United States Patent Application Publication US 2004/0123343 A1 - sequence listing, part 5

SEQ ID NO: 11634 - DNA, 2079 bp, Oryza sativa
  Clone ID: PAT_MRT4530_1783C.1
atgccgcgttacaagcctgagtacctgtttggtgttgagggttttgtccaggagttgcgtacgatgtcctttgtcattggatttgggactgctcctttttatgcccagattcctcatgatcgtcatgaagagaagtgccgagtcaaagtcaccttgaacagtaatagtgaagatatcccctcagtgatgtttgaagctggaggaagaaactatatccatgcatgtcaggaggtggcaaggatcgccataggagagctccgtgatcgctacagtgatcaattggccgacactgagtatcgctaccatcctcgccaacctcagggaagtgaccgtggcagttaccttgagactgaaggaattgagaatgatgctaccacgaagcatttggtggagatgttgtgggctatggatgaaagtcgtgcggagactgtgttagcagctcaagatcgtgaagaccggaatcgtggtaagatttgcaagctagaagacaaggtggatcgtttggagaaggaattagccgcattgaagggagaagcaccgccgcagaaggccaggattcgtctcaccgcaaggaagagagctctatttgtccctcgctatcaactggcgccaaaggttcgtgtggtggagaaagaagttgccccagctcaagcggatcctccggtcatcatcataagtagtgatgaagaagaagaatccaagcgcaacaattctaagattgagtgggtagcaactcaagatgatgaagacgagccttcaatcgacctccgatgcttggaagaactagataccactaatcctgttgaagctagtgattggctgcatgccatagagaagaagttggatttacttcagtgtactgatcaggagaaggtctcatttgcatcacatcagttgcatggccctgcctctgaatggtgggatcacttccgccttaacaggactactgctgaacctatcacttggcttgaattcaccgctgctttccgaaagacgcatataccatcgggagtagtgtctctcaagaagaaggagttcaggtcgcttactcagggatctcgctctgttacggagtatctgcacgaattcaatcgtcttgctcgttatgctccggaagatgtgcgcaatgatgaagagcgccaggagaagtttttgggaggacttaatgatgagctttcttacccactcatggttggagattatcctgatttccagaaattagtggataaggctattcgtcaggaggacaagtacaatcgcatggagcagaagaaacgtcggattgctcaattcaagacacaacagggaaataatcagaagccacgtcttactttaggaccccagtctatgccacagggaggttcttcgtctgttgttcgtccgcaacgtcagttcttcaacaacaatgctggcaacaacatccgtaatcaagctccacgtcctgttgcagctccagcacagcaacaacctgctaagagggagcaaggcaacaagcccgtggtgtgtttcaactgtggagatccaggacattatgctgacaagtgtccgaagccccgacgcgtgaaggttgtccctgcccagaataactctgctgtaccagcatccaaggctcgtgtaaatcatgtcgctgctgcagaagctcaagatgctccagatgtgattttggccgtcgccgtcgctcgggaagaccaccgtcgtgctcgccaagtcgtcgccgtcctcgtccgccccttcgccgtcgccggagatcaccggagcagcttcgccgtcgttgacccgaaggttcccgccgcttcctcctcgtcgccgtcgccgtccgttggtcttccgccgccgtttaggtcaccggtgagttcgccgtgttgtcctctacgtcttggtgccctccgtttgcgtcctggcgccgccgttcgccggcgagcgtgcgccgcccgagccgtctcctctgccgagccgccgccgctgtcggtgacgtcaccgctgacgtcatcagggtcgtccgccgtgaaccgccgtggactcgatcgatctcggccgtccatcttggatcggttagatctcggccgtccgttcgcgtga

SEQ ID NO: 11635 - DNA, 1295 bp, Oryza sativa
  Clone ID: PAT_MRT4530_17840C.1
tgcgggggcctccggaccggccgggctctggcatccttcgctcgctccgccgccgccgccgccgcctcctcctcctcggcgcctctccgccgccgcctcagccatggtgaagtactcgagggaggcgaacaaccccaccaagtcctccaaggccatgggccgggacttgcgtgtgcacttcaagaacacccgtgagacagcttttgctatcaggaagttgcctctgggcaaggccaagaggtaccttgaggatgtgattgcccacaagcaagctatccccttccgtaggtactgcggtggtgttggccgcactgctcaagctaagtcacgccattcaaacggtcagggacgctggcctgccaagtctgctagattcattctggatcttcttaagaatgcagagagcaatgctgaggtgaaaggtctggatgttgatactctttatgtgtcccacattcaagttaaccaggcccagaagcagaggcgccgtacctaccgtgctcatggacgcatcaacccttacatgtcctccccgtgccacattgagcttatcctgtcagagaaggaagaaccagtgaagaaagagcctgagtctcagatcgcagccaggaaggcctagagaaggaagctttgccccccttctgcctgtttgttagatcagattattatatagcctgtggcttttggctgagtgaaaattttggctggttgtccgcttgtttggcctatcggaaattcggaatactactagctcatacttcgtcaaaaccgttatctctgtgtactgaatctattactatgttctcaaaacgcaaatcttggaggtgtttggattttctttaaaaaaaaaaaaaaaaaaaaaaaaaaaattacttgtcgtaaaaaaaaaaaaaaaaaacccgcggcccaaaaaaaaaaacaaatgggccgtgggggtacaccttcgtggattgtgaaaacccctggggttacccaaatataatggccttggagaacattcccctcttttccaggttggggtatatatgcaaagagggccgaccccattcgccttttcaaacgaagctttgccccccttctgcctgtttgttagatcagattattatatagcctgtggcttttggctgagtgaaaattttggctggttgtccgcttgtttggcccatcggaaattcggaatactactagctcatacttcgtcaaaaccgttatctctgtgtactgaatctattactatgttctcaaaacgcaaatcttggaggggtttggattttctttaacctgattcggtcgtg

SEQ ID NO: 11636 - DNA, 168 bp, Oryza sativa
  Clone ID: PAT_MRT4530_17841C.1
ggaaaacaaaggaaaacaaatgacatagtcactttataatctgttcattatacacgacatttagagtttttctagttgagatgttgcgtaccattcaaaatggtctaaatagcattcagcttgaaacaacctttacttcaggaattggcagtttggcactgataaact

SEQ ID NO: 11637 - DNA, 386 bp, Oryza sativa
  unsure (1)..(386): unsure at all n locations
  Clone ID: PAT_MRT4530_17842C.1
cnccgccgccgccggtggccaagtgctcgcccgcccatctntntccatctctncccatccttnacttttccagttgctgctagctctctgtccaagaaaagaaaaaccaaaaccacccaccacagcggcagcnagcnacgnatcggggnggagggaagcggcgcgaatcgacggaaggaggcagcgcgcttcctctgtaacgactgcgctgcgcatcggcggcgtgtntcggcagcggcgcgcgcattggcgtcgcagttcccctttttaatccaaagcttgattccccaaatntaaatcccagagatcctggctncgccactgtaaaggacgacgagggggcaaacgggcatgagggaacgtcggggcaacanccaagcaagaac

SEQ ID NO: 11638 - DNA, 225 bp, Oryza sativa
  Clone ID: PAT_MRT4530_17843C.1
atggcgtcaaggagcacatatcttgacactcgtatgatggcccacaaaccaaaagctccgatagcaaatccgttaatggttacaacgccgtccaaaaggaagacatctattatgcctttaataagtgaggataaacatggcaaaatggtgacagtgattgacgataaatttggtgacgttgaagaaagaaaaggaagaaaagagaaacatcgttgctatgcatga

SEQ ID NO: 11639 - DNA, 411 bp, Oryza sativa
  Clone ID: PAT_MRT4530_17844C.1
atggagaaaaaagtgggggatgggaattatactttgttctgggaggatgtgtggtatgggcaaactcctcttagagtgcaatacccaggcctgtatggggtcagtttgcagtgcgggaagactgttaggcaggtctgggacagggggaaatgggatctaagttttagaagacatttgtgtggggggagtttgttggagctgcaggatcttcagaataagttgagggctgttgacatcacttcagactgtgataggatcatttggcctgctgggaggaagggggagtacaatgctaggtccatgtatagattgttaagttttggaggggttattgatgcagaaatgcaggatgtgtggcaaagtggtgtaaaaggtcgttgctctgatgcaaagatggaaagagttgctaaa

SEQ ID NO: 11640 - DNA, 1116 bp, Oryza sativa
  Clone ID: PAT_MRT4530_17845C.1
atggcgaaggagaccgagttctacgacgtgctcggcgtctgccccgccgcctccgacgacgagatccgcaaggcctactacatcaaggcgaggcaggtgcatcctgacaagaaccccaatgatccgcaagccgccgagaaattccaggctctcggagaggcctaccaggtgctgagtgatcctcttcagaggaaggcctacgatggctatggcaagaccagcatttccaaggagaacatgctggatggcactgtggtgttcacccttcttttcgggagtgagctgtttgaggactacattggccaccttgcaatggcaacaatggcttcctccgagatggccagcgacaatgacaaccctgaaaagcttcaggacaggctcaagggtgtgcaaagggaaagagaagagaagctagcaagattcctcaaggagttcctctcgcaatacgttcgtggtgaccaggaaggattcgcaagccgtgccgaatccgaggccaagaggctgtccagcacttcatctggactagacattcttcgcacaattggatatgtgtactcccggcaagctgcaaaggagcttggcaagaaggccatgtaccttggagtcccattcctggcagagtgggtgaggaacaagggtcacctatggaggtcacagatcaccgcggcgaaagaggacaaaaagaacaatgcaggagccttgcagttgctgcagctgcaagaggaggcctgccggcagagcggtaaggacggcttggccaccgagagggatgtcgatctgcagatgaggatgaacaaagacctgatgatgagctcactgtggaagctgaatattgttgatattgaagtgacccttctacacgtttgtgaaatggtgttgcatgaaaacaatgtcaagaaagaggatctcaaggctcgtgcaatggcactgaaaattcttgggaagatattccagagggacaaggaggcattgccaggaccatcaaaaccgaccattctcgatgatgacagcagctctgatgaaagttcagatgacgacgtggctcggacagtgccttatcggactcctgcagttactcaggcaattactaaactaagcagcttttatgttgcatag

SEQ ID NO: 11641 - DNA, 447 bp, Oryza sativa
  Clone ID: PAT_MRT4530_17846C.1
tatctcaaacacaagtccaattgaaactgattaaacctttcattcaaggtttcttaccatgcaatagtgcagccaattaatgaacagtaatcatgcactaaaaggacacatggtaagacaatggtgtccttgctttggggaactgcataaacacaagcgcagacaatacatttccccctccaaataagtataatacagacatttgtaatgctaccaaatacatttcagaatttttttttctatttttgcctccattgaatagcaccgcttccagagagaagaattttacatacaagaggataacaatcatagcagcatttttgaggcacctagagaatgcatctctctgaaaagataattcaatagcatgccaatcatctcttgaccttacttactccttttagggagtcaatgcgggcgaagtatgaggggatacgtacaacacca

SEQ ID NO: 11642 - DNA, 200 bp, Oryza sativa
  Clone ID: PAT_MRT4530_17847C.1
gtaccaagtcggagcagaacaccgtcaccattttttcgctgcagtcatctactcatcgcatcctcaaatcgaacaaaaattgtagaggcgaacatggtgacgagcctgacgcaactgatgtggcggtctcccgggcagcattgaccttgggggatgtgggccgatggggaacgctggcgatttcggggtacccccgttga

SEQ ID NO: 11643 - DNA, 866 bp, Oryza sativa
  Clone ID: PAT_MRT4530_17848C.1
ttatttttgaaaaggaaaagggatttattgcttcagcgctcgggctcacggtggactggatgcacggcggtggttcacgagatcggacggccgagatctatcttatctacaacggacggccgagatcgatcggatccaccgcggctcacggatggacgacgacgatgacgtcaccaccggcggcgaccgaaccgcgcatgcttgccggcgaacgacggcacgacagcgcgaacggaaagcacctacgggttgcgggcggcacggcgaactcaccggtgaccaaagaaaaagcggcggcaaccttcggcttgacgacggcgacagtgctccggcggtcgacagcgacggcgaaggggcggacgagaacggcgacgagacggcgaccacgacggtgacctccccgagcgacgacgacgactggagcgacggcggcgcacgactggagcgacggcggtgacggcgacgcgaaggctcacggcgctagagctctaccggcgactaaaagcgaaggcgagggtggcgacgtgggttgaaaggcggtggcgaaggcccacggcggccggcggcgagaaggaaagctttagggttcgggaggaaagagggatccaaatcaagctcaaatccgacactttccaagcgattttaaccgatgattccaaaagagaaaagatagaggagatcgagaagatcatttcccctctattgatttcatcggaaacggaaaggatcggcgggccccacctgtcagtgggcggacacgcgcgcgcgggcggctgactgggccgactgggccgagggagagagagagcggtttgggccgactttcggcccaaaaccaaaagggaggttttaaaagcttttccaat

SEQ ID NO: 11644 - DNA, 838 bp, Oryza sativa
  Clone ID: PAT_MRT4530_17849C.1
gatgctttcgcctgcaggcttccagataataccatccccatatgtgatatgtctggctttcttttatatgtatctatcttcagattcatacgcattatttggttattagttttcttttctttcagctagttaatttgtgcaaaacgctagctaccacatattattttctaatcacaccttgtttatatattcgacagaactgatttatatataattagtgagataactgcagtcctgatctacaccatgcatattatctttagaacttttcagcaactgcaagaatctgaactatgtaaattggagtccaatgcatgatatatatgtgatatgtaatcagatcttctctcaagaaaattgaggtttgtctccaagaataattagttctattgttacttgatcagttcatggtactatgtatgcttttttttaatctcttctgattacaatttttttttcttgttttccaagatttttttaaaattttctagtactggacgatcaagctataggtagaataaagggttcgaataatttaccatatttatacatgcgttttaaaatatttaatctgatgcttaattagagataatacaatgaataatgcaatatatcacagttattacttgccacaataattttctatgttatcttgtgattttttttttcattcactgacagcaacaagagacacccatcagtactgtgacggacaacccatgggcgaccctacggagagttctaattgctatccatcattttgttatagctaatgttgggctgaaaagaatcaggatatcttctaattaatcttttttgtttgagatgatgatcatca

SEQ ID NO: 11645 - DNA, 292 bp, Oryza sativa
  Clone ID: PAT_MRT4530_1784C.1
atggagatccaatatgtgcttaattcgggtagggatccgaataggagtcctatgggccttggagatggatcctatatattcgtgagagatgtgaccggtggaggcattgcatcactgtgggagtacggcgaggagaacgcacgaggaggagaaggtcgagccggtgcgatcaattacttcctctacatcgatgcgctacatcgcgagggttccttcgccttcttagcgctttcttgcgctgcgcagcgcgtcgtgtggtaactgttttgtatggttagtaaaaggcccatgc

SEQ ID NO: 11646 - DNA, 894 bp, Oryza sativa
  Clone ID: PAT_MRT4530_17850C.1
atgcccccgtcaattttcgcgggggcggagatggtcctttccttgtccccgctccccgcggagacccgaatagggcccccatggaagccaacactgttgccgccgaggcgccgcctcatctgcccggtccaagctgcagaggcgcagacctccactccccgctgtgccgccatcgacgccaacactgctccgctgccccaccacgccaacgtcgccctgcaaccgaccactgatggcaccgctcgcagccgacgctgtgaggccccttgctgcctcccaccattggaaccctaccagacgctgcttgggccttcgacgatggggatgacgagaaggaggacgacgccgcaccgctgtgctatccccgtgctgacaacctccacgccgctcgtcctcaaagacgccgaccttctccccatcgacagcggcggctaccccaaatcctccctatcaaggacggcgccacaccgttgtgctgtccccatgctagcaatctccacgccgctcgtccttgacgacgccgacctcctccccacgacagcggtggtcaccccaaatcctctggcgcgatgttacagacgtcgtctcgcgtcttcgccgcgcaccctgggtcgttctagtgcatccgcccgtggtgacgacgctcctccttttcatctccctcgtcgtcctccactcccacctctacttgtctgtgaggctgtgccatcggtggtcgacggcggggcggtaccggcgtcgatgggggaccatggacagctcgccaacgcccttttggggaaatcaactctctccaacgcccttcaagggaaggaagcctcaaaggagggagaaacactgatccttgcggtcctggacatctggaggaagagggtgaagacgagcaggggctaa

SEQ ID NO: 11647 - DNA, 3361 bp, Oryza sativa
  Clone ID: PAT_MRT4530_17851C.1
cgtgctcctcgccggcgccgccctcacctgccagaggcccggctgcgtcatctccgccaacctctccggcgaggtccgcctcggccgcggcgtccgcgtcatcgccgggagggtctccctcgccgcggccaacgtcacaatcgccgacacggtcgttgtcaacaccaccgcgctcgccggcgatccgcccgagcggaccagcggggtgcccacggggacgcacggcgacggcggcggccacggtggccgtggcgccagctgctacgtcaaggatgggcagacgcaggaggactcgtggggcggtgacgcctacgcgtggtccgacctcgagcacccgtttagctatggaagcaaagggggctctaccagcgttgagaaggactacggcggaagcggcggcggtatcgtgtggctgtatgccgatgacctgataatgaatggcacagtgctcgccgatggaggggatagcagcgagaagggcggtggtggttctgggggaagcatctatatcaagtctaagactatgatttatttcgtatttatacctgtttttcattttgttattaatgagtcatggatgcggggaggggggaagagttcgggctgtccagatgaggagctcaggttgtctggacaatgcaggagctgccgggactctttatgaggctgtgcctaagagtcttgctgttagcaacaacaacttgagcacacaaactgacactcttcttctagagcccccataatcatccactctggaccaatgtttttgtcaagaatcatgccaaagttgctcttcccttgcgttggagtcgtgttcaggctcaaggacaaattagccttctatctcgcgctacattaacttttggcttgacacactatccatattcagagtttgaattgttggctgaggaacttcttatgagtgattctacaattaaggtgtttggtgctttacgaatgtctgtaaagatgcttcttatgtggaactctagaatgttgattgatggtggcagagagtcaggagttgcgacttctttactagagggtagcaatttgatagtgttgaaggaatcatcagttatacattctattggcaatcttggaattcatggtcaaggcatcctgaatttatctggagatggagatacgattcaggcgcaacgtcttattttatcacttttctacaacatagtgtccttgctgcaatgttgcaataatcacttcaaaaatttgtcatatggctgccgaggtggaattggacgaggaagaatgttaagcagtggccttagtggtgggggtgggcatggtggtaaaggaggggatgctttctacagtggcagtcatgcagggggtggaactgcatatggtagtgctgatttaccatgtgaacttggcagtggtagtggtaatgtaagtacatcatcttcaacagctggtggtggtataatagtaatgggttctttggagcaatctcttccactactctcccttgctggttcaatagaggcgaatggtggcagttttgctggtgcggtgactcatgctgcaaatgaaggacctggtggtggttccgggggcacaattcttctatttgtgagggcattgtccttggaggagggctctgtactttctagcgctggtggggttggaagtaatggtagtggcggaggtggaggtggccggattcacttccactggtctgacattcccactggagatgattatattccctttgcaacagttaatggatcaatacttgcaagaggaggaaccgttgatggccaaggttttccgggtgaaaatggaacagtgacaggaaaagattgcccaaaaggtctttatggcacattttgcaaggcctgtcctttaggaacatataagaacattactgggtctttgaagtccttgtgttctccatgccctacaaatgagctccctcatcgtgctgtctacataagcatccgaggaggtgtactgaaaccccgtgcccatacaaatgtactggaaaccaatagggccgaagaatctcactgtcatgtgcacaggatgtatttcatgggtcccaacaccttcagtgaaccttggcatctaccacacaccccacctgagcagatttctgagattgtgtatgaggatgcatttaacaagtttgtcgatgagataaatgctctcgcagcatatcagtggtgggaaggatcaatttatagtatcctgtgtatactttcataccccttggcatggtcttggcaacagtggcgcagaagaagaaaattacaaagattacgtgaatttgttcgatctgaatatgatcattcatgtttacggtcttgccgttcacgtgctctttatgaagggctgaaggttgctgctacaccagatttaatgctgggttatttagatttctttcttggtggggatgaaaaaaggcctgacctcccccctcgtcttcatcaaaggttgccaatgtcattaatctttggaggcgatggaagttacatggctccattttcacttcacagtgacagtgtggtcacaagtcttattagtcagggtgtaccttcatcaatatggcaccgccttgttgctggattgaacgcccagttgcgtttggctcgtcgtggaaatctaaaagccacatttcttcctgtactcaaatggcttgaaactcatgcaaatcctgctttgaacacataccgcgtgcgtgttgaccttgcatggttccaagctacagcactaggttactatcaatttggtctagttattcattctgtgggaccattcagtagtggccttcaaggtggctctagaatgaaatttgattatcatgcgcaatttcagaacacagatgttgattctcaactagaccactcaaggaacaatgatgctgttatgcttaaaagaataactggcagagttctcgacattgacaacttaaggacactcaaggacaagagagatttattttaccctctttctcttatattgcacaataccaaaccagttgggcatcaggtgacttccattttgcacagctatcctgacatcattgcaacccctagtttggttatgatggatctacacaatcttgaacttaccaagctatattcatattctatgatcgatgtgttgttagtgctgtttgttcttcctcttgggatactggcaccctttcctgctgggataaatgctctatttagtcatggaccacggcggtcagcaggtcttgctcgtgtgtatgcgctgtggaatattacatcattggttaatgttatcgtggcctttgcgtgtggacttgtgcattacaagtcttcagccaaaaggcatccaagcatgcaaccttggaatttgggcggatgttgct

SEQ ID NO: 11648 - DNA, 391 bp, Oryza sativa
  Clone ID: PAT_MRT4530_17852C.1
tgtcaatgtgaggttgttgaaaggctttgccgtggcaagtctcattcgttgggacgtaggctcatgtgttgggcaagtcgcggagtacgggtaaagtgtacatccatggttgatcaacttctcgagaggcgggaagaggtagaccccagaaaaccatgacgaccaatggcgggaagctatccttgggaacacaatggatggtggacagaaccgtcgcatcttcacgcttgagtcgataagatcctggccgagtaacctcagagattataaatggtcctgcttcgtgagcttcctccagtcggttgagaccgtcaattcgatcttctccgtagcgctcctccttgaagttgagaaatcgcagggactcaaattctacttcactcggcaacat

SEQ ID NO: 11649 - DNA, 1536 bp, Oryza sativa
  Clone ID: PAT_MRT4530_17853C.1
atggctctagacggccccgcggagcgacgggacgaggcccaggccgcgatgggtaatggcaacggcgtggccccgccgccgttgcggtgtgatcgcggggcgcgtgccccatggctctagacggcccggcggagcgacgggacgacgcccaggccgcgatgggtaatggcaacggcgtggccccgccgccgttgcggccggccgtccggccctccggggcgccggcgtgcgcagatcggcggcttcggttcaaccccaacatggagcacaagccgcaggactacagcgacgtccgcggcgagtacgcaccagctgtatacagtgcacttgagaggcacctcccacccagtgtccttgatgccaaccgggaaatcaagctgcagctcatgcgagaggtcctcgggcactattggccccatggtgagcgcaacaaggttcaaaggcacagagaatacagacagagaatactcaaccattataagccacttcataaagagctatacaaaatgcgcccttcatcgttctttttaccaacattccttgaagctatttttgctatgttacagcctaatttttgtgagatgctattacaggaggtagagaacttcgaaaaatgggtccacacaatgaaatttaagataatgaggccaaatacaatgaacaagtatggtgctgtccttgatgattttggcctggaagttatgctgaaccaattcatggaacagttcatagctccaatgtctacagtattatatcctgaggttggtggaggaacattagatacacaccatgcttttgttgttgagtatgggaaagacagggatgttgaactcggtttccacgttgacgattctgaggttacattgaatgtttgccttggcaagcaattctctggtggtgagttatactttcgtggcatccgttgtgagaatcatgtgaattcagagacacagcatgaggaaatgttcgattactctcatgttcctggacgagctgtgctccatcgtggtcgtcataggcatggtgcccgaccgacatcatctgggctcagaatcaatcttcttttgtggtgcagaagggagatgaagaaatatcagaaggacttttcgggctggtgtggtgaatgtaaacgtgagaagaaggagaggcagattcatgctgttaaagcaactaagctggcgtttcttaggggtgctggaggggcaacgatttaaattatatttgctttatgtatttatacaatcttgtattatattatactttactgtcatttgggaagcagctagtgtgatcttcagtttttctggtcacaatcattagtggtcacaggtgtatgtaaattgaacttgtgatcaaatcaagctgaaacttagtggaggatcgcatgttagtgtgaaaggagtgctagcagaatagcaactccccccttcaatatcgtctaagcctgatattgtacagataagtgcatctgcatagaatgttctaatctgtcatcaaatttgggtgatgcaaccttttatccaaaaaaaaaaaaaa

SEQ ID NO: 11650 - DNA, 4568 bp, Oryza sativa
  unsure (1)..(4568): unsure at all n locations
  Clone ID: PAT_MRT4530_17854C.1
atggccacccacattcccctcgcccgcctccgcctccgcctccgcctcccccacctcgccctcgccctcctcgccgtcgcatcggggaaccctagcctcgggggtttcgatcggggggacgcggaggcggaggcgtactcgatcctgaccttccacgactacaccccgccgccgcccccctcgctgccgccgccgccgcccgccccgtcggcgacctgcgccggggacctccgcggcgtgggcgacctcgacacccgctgcgtggtccctgcctccgtgaggctccgtggccccggcgtctacatcagcgggaatgggacgctggtgctcgtcgacggcgtcgccctcacctgcgagaggcctgggtgcgtcgtctccgccaatttgtccggcggcatcttcttcggccgtgaggcccgtgtcgtggccgggtgggtttctctttcagctaccaacatcacgctctccagtgatgctgtaatcgacaccaccgcgctcgctggcgacccgcctgataagaccagcggcgtgcctactgggtcgtatggtgatggcggtggccatggcggccgtggtgctagctgctacgtcaaggaggggcaggcgcaggaggattcgtggggcggcgatatgtacgcttgggctgaactcaagacccccaatagctacgggagcaaaggcggttctaccagcgtcgagaaggactatggtggtggtggtgggggtgtagtgtggttgttcgccaaggatattatgatgaatggaacaattcttgctaatggaggagatggtggcaccaaaggtgggggtggctctgggggaagcatctatctcaaggctaaaaccatgcaaggaggtggcacaataagtgcttgcggaggggatggtttggctgggggaggtggtgggcgtgtttctgttgatgttttcagtaggcatgatgactcccaattttttgttcatggtgggaggagctcaggttgtctggacaatgcaggtgcagctgggactctttatgaagaagtgcctaagagtattactgttagcaacaataacttgagcacacaaactgatacagtttttctagaacccccatatgatccactctggacaaatgtttttatcaagaatcatgccaaagtttctcttcccttgcgttggagtcgtattcaggctcaaggacaaattagccttctatctcgcgctacattaacttttggcttgacacactatccatattcagagtttgaattgttggctgaggaacttcttatgagtgattctacaattaaggtgtttggtgctttacgaatgtctgtaaagatgcttcttatgtggaactctagaatgttgattgatggtggcagagagtcaggagttgcgacttctttactagagggtagcaatttgatagtgttgaaggaatcatcagttatacattctattggcaatcttggaattcatggtcaaggcatcctgaatttatctggagatggagatacgattcaggcgcaacgtcttattttatcacttttctacaacatagtgatatgccgtgttgaagacattgttgtttctggccttgtgcaaggaactgttattaatttcaacagagcaagaaatgtcactgtgagatcatctgggaccattagtgcaacaggattaggctgccgaggtggaattggacgaggaagaatgttaagcagtggccttagtggtgggggtgggcatggtggtaaaggaggggatgctttctacagtggcagtcatgcagggggtggaactgcatatggtagtgctgatttaccatgtgaacttggcagtggtagtggtaatgtaagtacatcatcttcaacagctggtggtggtataatagtaatgggttctttggagcaatctcttccactactctcccttgctggttcaatagaggcgaatggtggcagttttgctggtgcggtgactcatgctgcaaatgaaggacctggtggtggttccgggggcacaattcttctatttgtgagggcattgtccttggaggagggctctgtactttctagcgctggtggggttggaagtaatggtagtggcggaggtggaggtggccggattcacttccactggtctgacattcccactggagatgattatattccctttgcaacagttaatggatcaatacttgcaagaggaggaaccgttgatggccaaggttttccgggtgaaaatggaacagtgacaggaaaagattgcccaaaaggtctttatggcacattttgcaaggcctgtcctttaggaacatataagaacattactgggtctttgaagtccttgtgttctccatgccctacaaatgagctccctcatcgtgctgtctacataagcatccgaggaggtgttactgaaaccccgtgcccatacaaatgtgtgtccgatagataccgcatgcctcactgttttactgctcttgaagagttaatatacacttttggtggaccttggttgtttggtctgtttctctcaggccttctttttttattagcccttgttttgagtatcgctcggatgaagtttgttggcactgatgagttgcctggaccagcaccaactcaacatagctcccaaattgatcactcttttcccttcctcgaatcactcaatgaggtactggaaaccaatagggccgaagaatctcactgtcatgtgcacaggatgtatttcatgggtcccaacaccttcagtgaaccttggcatctaccacacaccccacctgagcagatttctgagattgtgtatgaggatgcatttaacaagtttgtcgatgagataaatgctctcgcagcatatcagtggtgggaaggatcaatttatagtatcctgtgtatactttcataccccttggcatggtcttggcaacagtggcgcagaagaagaaaattacaaagattacgtgaatttgttcgatctgaatatgatcattcatgtttacggtcttgccgttcacgtgctctttatgaagggctgaaggttgctgctacaccagatttaatgctgggttatttagatttctttcttggtggggatgaaaaaaggcctgacctcccccctcgtcttcatcaaaggttgccaatgtcattaatctttggaggcgatggaagttacatggctccattttcacttcacagtgacagtgtggtcacaagtcttattagtcagggtgtaccttcatcaatatggcaccgccttgttgctggattgaacgcccagttgcgtttggctcgtcgtggaaatctaaaagccacatttcttcctgtactcaaatggcttgaaactcatgcaaatcctgctttgaacacataccgcgtgcgtgttgaccttgcatggttccaagctacagcactaggttactatcaatttggtctagttattcattctgtgggaccattcagtagtggccttcaaggtggctctagaatgaaatttgattatcatgcgcaatttcagaacacagatgttgattctcaactagaccactcaaggaacaatgatgctgttatgcttaaaagaataactggcagagttctcgacattgacaacttaaggacactcaaggacaagagagatttattttaccctctttctcttatattgcacaataccaaaccagttgggcatcaggatcttgttggtttggtgatctctatattgcttcttgcagatttcagcttagtattgcttacttttctccagctatattcatattctatgatcgatgtgttgttagtgctgtttgttcttcctcttgggatactggcaccctttcctgctgggataaatgctctatttagtcatggaccacggcggtcagcaggtcttgctcgtgtgtatgcgctgtggaatattacatcattggttaatgttatcgtggcctttgcgtgtggacttgtgcattacaagtcttcagccaaaaggcatccaagcatgcaaccttggaatttgggcggatgttgctggatgatactagctggtggctgttcccaacaggacttgtgttatgtaaatgcatccaagcaagacttgtcgattggcatgtctctatcttagagatccaggatcgtgcagtttatagcaatgacccaaccatanttttggcagtgatggcatttgtatcactgaattgatcatcagaggttttggcaactcgagtttttgggagttgataaaaaggaaggctaggggatgagttgattctttttcggcccgtcagaggaagcgaagtacacaaagatctggacaccatagaattataaacttacctgagctaatcatagagatgagatggtggggaaagaatgtctcttgttcagaacttctccgagtctcctgccttcatgttgacgtggaaaagagcgagttatcagatttctactccctccatttcatattacaagtcatttgacttttttttctagtcaaacttctttaagtttgaccaatttatagaaaaatatagtagtatttttaacacaaaacaaatatattatcaaaatatattcaatgttagattt

SEQ ID NO: 11651 - DNA, 749 bp, Oryza sativa
  Clone ID: PAT_MRT4530_17855C.1
tcccgggtcgccccgcgtccggccctttaaccctagaaccccacaccgggcccaattcgcccacccaaaccctagtcctcccgatgctgtgatccgccgcgcgtgccccatggctctagacggccccgcggagcgacgggacgaggcccaggccgcgatgggtaatggcaacggcgtggccccgccgccgttgcggccggccggcggggcctccggggcgccggcgtgcgcagatcggcggctgcggttgaaccccaacatggagcacaagccgcaggactacagcgacgtccgcggcgagtacgcaccagctgtatacagtgcacttgagaggcacctcccacccagtgtccttgatgccaaccgggaaatcaagctgcagctcatgcgagaggtcctcgggcactattggccccatggtgagcgcaacaaggttcaaaggcacagagaatacagacagagaatactcaaccattataagccacttcataaagagctatacaaaatgcgcccttcatcgttctttttaccaacattccttgaagctattaggaccaatacagaagaaagctttagaagcattatgactgagccagttcctggtgtttattcatttgctatgttacagcctaatttttgtgagatgctattacaggaggtagagaacttcgaaaaatgggtccacacaatgaaatttaagataatgaggccaaatacatggaacaagtatggtgctgtccttgatgatt

SEQ ID NO: 11652 - DNA, 460 bp, Oryza sativa
  Clone ID: PAT_MRT4530_17856C.1
ggtgcataaaaggttgcatcacccaaatttgatgacagattagaacattctatgcagatgcacttatctgtacaatatcaggcttagacgatattgaaggggggagttgctattctgctagcactcctttcacactaacatgggaggctccactaagtttcagcttgatttgatcacaagttcaatttacatacacctgtgaccactaatgattgtgaccagaaaaactgaagatcacactagctgcttcccaaatgacagtaaagtatattataatacaagattggttaaatacataaagcaaatataatttaaatcgttgccccttcagcacccctaagaaacgccagcttagttgctttaacagcatgaatctgcctctccttcttctcacgtttacattcaccacaccaggcccgaaaaggcctttctgatattttcttcatctccctgaacacag

SEQ ID NO: 11653 - DNA, 929 bp, Oryza sativa
  Clone ID: PAT_MRT4530_17857C.1
ccggccgggatcagctcaagcacctcaaccagttcagtcatccattctgtcttctctgcagatactgagagccaagatgagtagcaaggttcttctgatcagtggtgtcctggtggggctcctttctctgagctcatgcaggagcctgggagagttgtctgaacagaagacctactcttctactactcagtatggtggctccccaactccatcatatggatcagatggtggttacaaaccaacaccaaccccaacaccagcttacggctctacaccaacaccatcttatggcactacaccaacaccatcttacggcactacaccaacaccatcttacggcacgacaccaagcacccccagcacacctgatgtccctgaagttccgacaaagcatgatttctgtggatcctgcgattactggaagaaccatccagatgttatcatctcagctattgggtcccttggcgacattggcaagacactcggtactgcttgcagtttgatcactggcaagaagctagaaaatcttcatgatgcactttcaaacactggaactgatggtactggtgctctgctccgcgagggagcagctgcatacctcaactccattgtgaacaagaaattcccttttaccacccaacaggttaaggattgcatcgtcgtggccatgacctctgatggcgctgcttcttcccaggctgagatcttcaagaaggcaaatgattatcactactagttcaagaggtgtttcctggctaaattatttgctcctatgtgtttcttcattgatgtaatcttgctgtttgataaatccattgtattcttttggtttgcaatgtaataccaccatctaagatatttgatttttataaatccaaaaaagatggcactgcaaaaaaaaaaaaaaaaaaaaaaaaaaaaaaaaaaaa

SEQ ID NO: 11654 - DNA, 310 bp, Oryza sativa
  Clone ID: PAT_MRT4530_17858C.1
ttgatattaaattactttcatgcccttaggaggatgtcaggtgatgtggccgttcatgtgtactatggcaatgctcctatacaaatctgttataatggggtggatttgactgtatataccttttttttattttagcctaaatgcaccggagcagttggttataaacgacgtgttagggtgattgtataatatgttgggggtagatccagtgttgaaaaattttatcataaaagttgtgtgatcagtaaggggtgaatgcggatggcagtagagagcatctaccgggagttggagaaagtttatgacaaga

SEQ ID NO: 11655 - DNA, 1584 bp, Oryza sativa
  Clone ID: PAT_MRT4530_17859C.1
atggccggcgggaagaagctgaggccgctcgcccgcggcatggggatgccggtgctagggcacccacggcggcgcgcgcggccggcgacggtggctcccgaggcgacgcgagcttcccccaggcggcgcgcgggctcagggcagcgcgagctcaagacgtgggtctccgaccgcctcgcggtccagctcgtcggtggagatgaggagggagcgggagtggcggcgggtgcgggagcagcagtcgcggtgcggggaggtggcgggcgggacggcggcggagtgcgccgcgcttgtcgtcctcgcggccgtccacgtccccgccacgccgtctgtggtgggcgccgccgcggtgtccgctccacgaagcggaaggagatgggcgagctcctcgccctggacgtcgcctccccaaggtcgctggccgtcgcggccaccaaggctaggaaggtagaggccgagttcccagccacgcccatgaccgaacacctcgtcgacatggagaagcaggtgtgggcgagcttctacagcgccggcttctggaggagcccctcgcaacgagaggacaggaggtcgccgtggtggtggctcggcagcgccatcgttgagctcgccggcgagggcgagcggcacggccgggacgcggccggcgagggcgagcggcgccgccgggactcagccggcgagggcgagcggcgtcgctgggactcagccggcaagggcgagcggcgctaccgggactcggccagcgtgggcgagcgaagacaagcgtacgtgcgtcgaactatggcaatccgcaagcaattagtgcaagtgcaaccgaaaaagatcgagatgtggcagtggcagcctccgcctctccatccaggggtcgtcaccatggcgaagcacaagctacagttggaggacctgtcgcagacgtgccggcgagaccactactgcgtcaggtgcgtccacgccttctgctcccactgctgcgatgaccaccacttcgtcccgctcggctcccacatcgtcatccccatcgccggtgtcgacgccgccaccggcaagcccgtcatccccgcgcactaccctcgccgccccgacctgcccatcaccgacttcgtcatcggtctcatcaacgccaacgacttcgccgaggagcaccccagggacgcctactgcatgtactgcttcatggccttctccaccgcgctctgccaccaccaccacacctgcgccgccgactgcgtcctccgcatcgtccgaagccacgacggccgccactgcgtccgctgcaccggcgacgagccgtggttcccttacatggagagcgtcctgggcgaccccgtggctgtcgaggaggaggagggcgacgacggcgaggtggtggctgtgctgctgctgctgcccgtgctgaggaggagctcaccgaccgcgtgcgtacactgcggcggcgaggtgcccaaacacatgcgccgctcggtgctctgctcgccggcctgcgacgcggcccaccaactggaggtcgcccagcgcagggagcgcagggacgccgtgctcgccgcgcgccgcctcgccaagctgaacatccatgccgtttga

SEQ ID NO: 11656 - DNA, 753 bp, Oryza sativa
  Clone ID: PAT_MRT4530_1785C.1
agcaatggacaagtcgagagggcaaacggcatagtactacaaggaatcaagacccgcgtctacgacaggctcatgtcaaacgacaagaagtgggtcgaggaacttccatcagtactatgggccgtgcgtactacaccgacaacgtccaacaaggagacacccttcttcctcgtctaccaacaagcccttcgccgttaccacgagaagcgcatccaagcacgcacgctttcgatcggcgactacgtcctccgacgggttcaaagccaagcaggacgcaacaagctctcacccaaatgggaaggaccgtacacgatcacacaagttctgcggccaggcgcattcaaaatcgcagacggcgatggccacgagttggcaaattcctggaacattgatcaagtcaaaggtccaagagccttatcttccgagaagaattctccgatgacaaggctgggggctagggagagacatggagactaccaggaaggccaacaccagtccatcgactggaaaaccatctccgccagcggcgccatcgacttcgccaggccatctatctccgtaggagttctccgagaacgagaaaacccttcgcggaggaactcgaggctgcccgcgctgctggacatcctcgacatcaacatctctacaaaggacaacaaagtactcgagatcaaaatgccaaacaaagctaaggcaatgaccgcacacactagggcggttgggaccaataaaagttttacaaggcatgactaa

SEQ ID NO: 11657 - DNA, 601 bp, Oryza sativa
  Clone ID: PAT_MRT4530_17860C.1
ttcggcacgaggtcctgtttggaatattggtaactctccctggctgttcttaggtgcaattcccaggtagtaaattgacataatagtttctcaggattgaatcacttcacgtaaaaagtctactttgcttttgccaaacaagttgcctatcattgtgtacactacccaaccaggacctttatcatcagcgtcatcttgtcaatattttatcacccatggcacaaggtaacttcttctgggttgtctaattcaataagtagagtaatttttcctgattgatgggttctgttgcttctctgtttggttatttgtgggctctggcttgttggtaagtgtgttggatttggagaactcattttctcttaatatgctaacccaagttttcagcttagttacattacatttatctttccccaaaaaaaaaacaagacacatgtttgtatacgattaaccatttatttatttttattttttcactggcatttcgattgaattcagcatagttcctaacgatgatcttaattgttgtcagttccctatttctacgttttgctagcaagtttgtatcaagctccatcattattctaattttgctttattt

SEQ ID NO: 11658 - DNA, 213 bp, Oryza sativa
  Clone ID: PAT_MRT4530_17861C.1
atgagatgggatgaggaggggtcgggtagaaggaggaggaggaagaaaggacaaagtcctgggcccaccatccccggccggtcagaccggctttacgcggccggtcagaccgccgggttgccgccggtcagaccgtgccctagtggccggtcagaccgctgctaccaggccggtcagaccgcgcatatagcgccggtcagaccgcgcatatag

SEQ ID NO: 11659 - DNA, 338 bp, Oryza sativa
  unsure (1)..(338): unsure at all n locations
  Clone ID: PAT_MRT4530_17862C.1
cccacgcgtccgggcagcggcgcgaagtcgtacgtcgactgggcggcgaagatggccgtcgccaccancgccggcgtgccctggttcatgtgcaagcaggacgacgcccctgaccccgtgatcaacacctgcaacggattctactgcgacgacttcacccccaactccaagaacaagccttccatgtggacagaggctggagcggttggtttacggttttcggtgggacggttgccgcagcggccagtggaggtcttngcgtttcgcgtggggaggttcatccagaagggcggttcttnatcanttnttaatgtacattgngggaacacttttaccgg

SEQ ID NO: 11660 - DNA, 582 bp, Oryza sativa
  Clone ID: PAT_MRT4530_17863C.1
aacagtagagtactctgaagactgaacaaatgttcaatgatctcatcaggaaaccctttttttttaatgttttatttgaatgacatctttgaatgcatatcatgagtggaagaactgggcggccaatgactgggcaggctgatcatcccaacttccttcaagcaactcatgtctaactagaaaagaaaaaaaagaagaaaataaaaagattatgtacagaaaaaaggccatcatcacaacatggacctctggcacaggcgatagcagttgttgctcaaaccctattgcaagcctgtaaaaggatggcttttattctacagctgcatagctcgaacacctgcaagaaagccacaaccaaacagcagcagccaaaccacaagtattcttcacctcccctactcctgcgctaactcaaaactggcaagaagtgccaagcctctgccttgccctttgccccgcagcgccgcacttgcgcgagcggaatgcctcgggaaggagctcctggaacttctcgaggaatagcgcccatgtctccgatcccatgtcggcagcttgacgaagctcgcactcgtcggaagttgc

SEQ ID NO: 11661 - DNA, 396 bp, Oryza sativa
  Clone ID: PAT_MRT4530_17864C.1
ggggccgggggaaaatcctccctttgaacaaagcaacaggttttacaactggggggggaaaacccctgaacaatttaaacccgtttttgcaattaaatttgcaaatcacagggctggcaaaattttttgcatttaggaaaccccagtttttgttttttttaggaaaagtagccccttttggggccaaaaatagccgccaactaactttgacatggtttacccaatctcgggcatggggtaataaaaaacaaagttttttccaaaaagccttttgtaaacaaagctaaaaggggccagctttgcctcggggttgttgccctcctttggggccaggaaaatttttatgatttttttcccatccaagggggttttgacacccttcccaaaaatttttgg

SEQ ID NO: 11662 - DNA, 423 bp, Oryza sativa
  Clone ID: PAT_MRT4530_17865C.1
gcctagtacatatcactcgccaaggggaaaggaaaggggaaatatcatctaggtgatgcttatggtgaaaactctggtttatggaatgtcccgtggagagcgttcactattttgtacgccatcagatgtattcaacctgtacataactgaggtttggaaggccaaggtgttaagcagtcagaaagatagtttcactaaagatgagataatctcagtatacacaaaggtaagcagaaggaagctccactgttgcccattttgctgttgcatcctactattactggtactatatacggctatttggtttcgggaatccattctcttatatacttttttccagactatgcatgatctatttatgtacacgtctaatcagtacagtttggtgaactgttatttatggaggtaaaaaaaaaaaaaaaa

SEQ ID NO: 11663 - DNA, 448 bp, Oryza sativa
  Clone ID: PAT_MRT4530_17866C.1
aagaagcaattaacataatattcgcacttatactggaaaaatataacatgtagacttatttttactggtgtcacacactggaaaatataacatgtacgcactggaaaatataacttgtagattgccctgcttaatttattcgtgttaccggtcgatcgatatcacatgttggcgtatgtatagctagctgttacgtggcactgcacggagcagcatggtctccaaggtgagtccggggccaaaggcgatgagcatcccccactcgaggccttcccccgccgtcgccatccctcgctcctccgacctcctcttcatctcctccatcgccaagaagatggtggagctacgcgtgttgccatactgcctcatcacctccctcgtcgcagccagcttctccccgccgaggcccagcctctcctccacgccatccacgatccccctcccaccg

SEQ ID NO: 11664 - DNA, 382 bp, Oryza sativa
  Clone ID: PAT_MRT4530_17867C.1
aggtcggccgaggtggtccaccggctctctccctgatcgatccaaagtacatcagagaagaaaagccaaaggcacggcacgccgaggaggggagcctggcatccgtcggtggtacgagggggaaagggacggcacggcacgggtggcgcctaatgatcgacgacgactggcttttcatgcgagattgtatggatgaaaacggcctggctgtgacggtgcatgcgcgctcgcgctttatgtttaacggccgaggggaaagagacgtgcatgagtacatgccaaggaaagctggtatgaactccgatcccctacgggacaaaaagggaaagcgaaagcaccgaccaacgaagaggaaaagaagcgacccgggcagatacatgga

SEQ ID NO: 11665 - DNA, 1662 bp, Oryza sativa
  Clone ID: PAT_MRT4530_17868C.1
atgtatagagaactgaagcatcttctgaataagagtaaacgatttctcccagatgctgattcatcagttgagcttgcctctacattctgcacattcttcagtgagaagatcagagacttgcggagatgtatagatgacttaaacgttgacgaattggacaatccaaatggtatggcaatctcagccccttcattcgtggagttccagttggtcacatctgaggaggttcagaggctgatcaaacgctcacccaacaagacatgtcctttggatcctcttccaacgtggctcctgaagcgtcaccttcctgttttgctgccaaagctgacgcatatcatcaacgcatcgttggcatcaggcgattttccatcatctctaggtgttgcatctgtgacaccagtcttgaagaagccaggacttgacaaagaaagaatgaaaaactacagacccatttcgaacataaggtttgtagccaagcttatggaaagagtcgtctcatcacagttagccaactacttggaagacaacagccttggtgatcctaaacagtctgcatataggaaaaatcacagtactgagactgcattggtgagtcttcagaatgatatcttatgtgctctggatgatcggaaatgcgtcattctactgtcgctagatatgtcatctgcatttgacactcttgaccacacgatcttgctgacaaggcttcgggatgaatatggtgtctctggcacagcactgcactggtttagatcatacctgagcaaccgactatcacatgtgcgaatcagaggagtgaaatcactagacaccaggttggagttcggtgtcccgcaaggatcggtgatgggcccgctgctctttacgctctactcgaaacctgtatctgatatcctttacagtcatggcataggctatcatgtatacgccgacgatatacaggtgtatatacaatgcgacccttctagccaggactctgttgatcatgctgcatgcagactacgggatgcaatgagagatgtctacaggtggatgacatccaacaaattgaaacttaatcaagacaaaactgagttagtagtctttgcttcgaaagtccatcaacgattgctccagaacttcactctaactcttcatgatgggactgtgattaaaccgtcaaagaagctgcgtattcttggcgtcgtctttgacaacctcatgctgccagatgttcacgtctcaaatgtagtcaggactgtcaaatatcatatccggaacttatgcaggattagaaaatatcttgacgaaagtaccactcatgctgcagtccgtgccttagttttatctcgtcttgattactgtaacagtttgttgagtggcacaacagcaaagaacattcaccgtcttcagcttctccacaaccagtctgcacgcctcatcttcaaacaaccaaagagcacacacaccacgcccttgttgaactctctgcattggcttcctattcaacagcgagtgctcttcaagacctccacccttgtctttaagtcgttacactatctctctccctcatatcttactgatctcgttcatgttaggcactccagttacaacctaagatccaacactcgtacagttttagataccccaaggtgtcgaaccaatgctggctttgacaagtag

SEQ ID NO: 11666 - DNA, 234 bp, Oryza sativa
  Clone ID: PAT_MRT4530_17869C.1
atggcgatgcacattctcggcagcctcgtcacactagcaccactggacgtgcttttcgacaacaccggaggcagagggagcagcttcggagggaatgcgacattaacgtcgctgccacattatttggaggacttcacggggagccggaagcctctgtcgaccctgaaggggttcggcatggcctcactcgcgtgcagcacgccgcactcacgcgccacgcaccgcctctgctag

SEQ ID NO: 11667 - DNA, 173 bp, Oryza sativa
  Clone ID: PAT_MRT4530_1786C.1
gaaccgggggcgggggggcctccctttcctccatcaacgagggggagacccgcgtggcggtgcttgcgtctcttgccaagcgcggcggctcggatgcgatcgtgaacatctacggcgcggtggtgcgcctcttggccgagctgctgctcgggacggagtggtcaagggagtgc

SEQ ID NO: 11668 - DNA, 270 bp, Oryza sativa
  Clone ID: PAT_MRT4530_17870C.1
atggctggccggcggaggcctcgcagcggcggccacggggttggccacggcggaggcggaggcggcggcggccgcgacctcccctctgccagatccggccgcccgggcccaggggcgagggcgcaccggcgcgggcaggggcgcagggtagcgagcgccgagccgccgaccagggccacagcggcacggccggagccgcacatcgcccctgaacacatcgtcacagccacacagggtagggggacggccagcgaggatgactgggattga

SEQ ID NO: 11669 - DNA, 1323 bp, Oryza sativa
  Clone ID: PAT_MRT4530_17871C.1
atggaggcagcgggcgatgatgccgcggcggcggtgaggatgagggcggcggtgaagcggctcagcttcgggacggcggaggagagggcggaggccgcgggggaggtcgggaggctggcgcgctcggacgaggggaggaagcggctgctccccgagctcggcgtcgtgccgccgctcgtctcgatgctcgccgacgccaggggaggtggtgccggcgcgaggatggccgcggcgggggcgctgcttgagctcgccaggggagcacacagaaacaaggtgcacattgtgcaggccggtcttctgaagaagctgccattgctcatggacgacaaggacatgtcaagaagccaggagctcgcgctcctcctcctctccatctcctccctggccaacaccgacttccccctcgcctcctccgagctcctccggttccgcgtcgccgtgctcagcgccgacgacgcgccggccgacacgaagctgccgtgcctgggcgcgctccacaacctctcggccaagctcgagcacgtccgcgacgtggcgtcgagcggcgcggtgcgcgcgctcctggcgctctccctggaccggaagacgtcggaggcggcgctgtccgtcctcggcgacctggcggcgaccgcggcggggagggaggagatggaggaggacgaggcggcgccgagggcgctcgtggaggccatgacgtggcacgacgctccgcggtgccaggagcacgccgcgtacctcgccatggtgctcgcgcacggcagccggctgcagcggcggcggatgcgccggttcggcgtcgtgcaggcgctcctcgaggtgtccctcctcgggagccccctggcgcagaggagggcggccaagatcctgcagtggttcaaggaggaagggcaggacaggatcagggcgcactccggccctcgcatggagggcgcgtcgtcggcgtcgtgcgacgacggcggcgagggggccaaggatcgccggaacgccgtggacaggatagtgaagcagagcctcgacaggaacatgaagtccatattgcgcagagccacggcgtccgtggacctgaccagtgtgaagctgctggttggaagctctagctccaagagcttgccctgcgagactctccatccatgactcatgactccgtgagcaaatgttcagttttctcttttcagctgtgctcttgctcaaatgcagtttgtctgatctgtgtgatctctgtagttctgtcttcagaaattagagcacaagagtgggagtcacctgtagtctttcttgtacatgaacacaattcatgaaagtaactgttgttaatacttc

SEQ ID NO: 11670 - DNA, 464 bp, Oryza sativa
  Clone ID: PAT_MRT4530_17872C.1
cagtatcccccacaccgattcctactccaatttaatattacattacattacaggcaatataatgtagaagtataaataatagaagcagacaagaaaacatatatcacaaggctcttcctctaggacatcaagccacctttcaatcaggctatagaaataatagaagcacacaagaaaatattaatcgcaaggctcttcctctaggacgtcaagcaatctccaatcaatgtcgattctaggttatcaaccaactcaatcatgagccttgttttcagaagagaatgtttagctgagcctttcatatgcacaaccaatgctatgtatggtttttttcccgtcgatgtagaacagttagcaacagtcaattttttcaagttagcaacaaccaattttttcagttgttcagcggcacgtagcaacgtggaagttccagacgagtccatatatcttacctattgaccata

SEQ ID NO: 11671 - DNA, 747 bp, Oryza sativa
  Clone ID: PAT_MRT4530_17873C.1
caagtaatagtagcatgaaaacaccaaaacattatatgtctaatctgaacaatcattttgagtagcctaattgattgcaagctcttgtgatgattttgctgtgtgcatgatttatgttctgcattcatgtgaatgtctgaattgaaggactcgtctggaacttccacgttgctacgtgccgctgaacaactgaaaaaattggttgttgctaacttgaaaaaattgactgttgctaactgttctacatcgacgggaaaaaaaccatacatagcattggttgtgcatatgaaaggctcagctaaacattctcttctgaaaacaaggctcatgtttgtctggttgacctctttaatttctgtataaaaacttcatgtatgtctggttgacctcttttattttatgatggtagtgttcgttcgaatccataagctggcttatcttatgaaattaaaattgtattcaggtttgagttggttgataacctggaatcgacattgattggagattgcttgacgtcctagaggaagacccttgcgattaatattttcttgtgtgcttctattatttctattgcctgattgaaagctggcttgatgttttcgaggaagagccttgtgatatatgttttcttgtctgcttctattatttatacttatatattgcctgtaatgtaatgtaatattacattggagtaccaaaaaaaaaaaaaaaaaaaaaaaaaaaaaaaaaaaagggggggcctcgtgc

SEQ ID NO: 11672 - DNA, 428 bp, Oryza sativa
  Clone ID: PAT_MRT4530_17874C.1
agacacggcccttccttctcctgaatggtcttcggatcatatagcactcttggcagaattccggtgcaagcctagaatcagacggtgacaccttaggtcgcgaatagatggttaacttcagcacccatgcggtggaacattcttccatggtgtgtgggacttgaggagggatggacgaaagcggatcctcggggaaggaccaccagcaccagcaggcttagggtagtggcctcatgaaagggaggcttgtaatgttgattacctcttacatttccaactcatgatgtttttaagcggccccattgtaatatcactttctatagaaggaaagatctcctgagagagagacatttttatgacagattcagatgccatcatggctaggccatttcaaattttcaatcccttctcttctagaaaaaaaaagg

SEQ ID NO: 11673 - DNA, 1918 bp, Oryza sativa
  Clone ID: PAT_MRT4530_17875C.1
tttaagcgataattttttttttttttttgcaaatcataaatcagtttcgtttttataaaaaccctcgtaggttccagcagactgctcataaaaacggagtattcaacatcgcagagaccatttctctgacccatagcaaaatcacagcgacaaaatccgctgtttacatttaatttatttgtcaactacttcaattagggttggctcgtagtcagcaggggcctcaaacccgtggaggttcatcacggtggcggcgacgttggcgaggccaggggtctgcacgtcgttgcggaatctcaccccagaatgtaggccagggcctccaatggcaactggcactggctgaagagtgtgtgaggtaagaatctggatttcgcctttcttgtcaagctgtggctggccggatttgttcctcttcaccatatcctcggcgttgccatgatcggcggtgaccaaatagatgccacccacttgctcaatggcatccagaatcatcttgacagcctcatcagcagctttgcaagcaaccactgtggcctcaatgtcaccagtgtgacccaccatatcaccatttgggaggttaacgcggacctggtcaaacttgccactaaggatagcatctctagctttctcagcaatctcaagggccttcatcttgggtttaacattgaatgtgataccactgtcactagggatttccacatactcttcctttgtttcatcgaagtatccagagcggtttccattccagaaaaatgtgacatggccgaacttcacagtttcactgcaagcaaaggtgcggatgccatttttcaccaagtattcaccggatgtcctctcaatctctggtggtgaaacaaggtagtggcttggaagcttcagctcaccatcatactgaagcataccagcatatcggatctttgggacacgaacacgatcaaatttatcaaaatcttcatactctaaagccttagcaatcataaccatgcgatcagcacggaaattgaaggtcacaactgcatcaccatctactataggcccaacagccttgtcactatcgtcaacaatcacaaatgggggaagatactgatcattagccttggtctctgaccggagtgttttcacagcttcaacagcgttttggaacttgtgaggtgcttctccaagcacctgagcatcccatccacgtttaacaacatcccagtcattctcatatcggtccatggtaacatacatccttccaccacctgatgcaatgcacgcatcaatgcccttggcacgcagttgagaaagatcattctctagcgtttcaacaaaaccaacgcttgtgccatccaaaacatcacgtccatcagtaagaatgtgaacacggatttttttcgctccattcgcacttgcaccattcaggagcaactgcaactggtcaagccgtgagtggacacctccgtcgctcaacaacccaataagatgaagagtgccttggtcaaaactctccttaatgtacttaaacccttctccttcaaaaatttttccagaggccaaagcagtatccacaagtttagccccttgagcaaaaatccgaccagcaccaagtgcgttatgcccaacctcactgttacccatgtcatcatcagaagggagaccaacagctgttccatgagcctttacaagcttccacttctctggagcacccttcttgagcgaatccattgttggtgtctcagcaacatggatgcagttatactggtccgcatcagcctcaccccatccatccagtacaaccacggccaccggcttccccttagggagctttgggtgatcaggcaatgtccacgagaaatctgagcttcccatcaccaacggaagagagactgttttttttttctccttttttttcgttgctatatttttctctgga

SEQ ID NO: 11674 - DNA, 393 bp, Oryza sativa
  Clone ID: PAT_MRT4530_17876C.1
ttgtgtttttttaattttttttgttttcccttttttttttttttttttttttttttttttacccaaaccaaccccattaattccagggggttaaaaaaatcattacccccccggggcgtttcaattttccaaaaatttttttattttccctggggtcacagcaaggaggcatgaaaaaatcacgggtcatgccccttcacctttaatcctgcccctttggggcccccaagcatgggaaatgaaaacgggcaaacccaagccaaaagaaaggggaaaaaaatagcaaaccacgagggcccttttgggaaaaacatgccaaaacaacgaaacgaacgaccaaccaacgccttaaccaccgggctaaaaggggggaaaaagggtagggcagcggcc

SEQ ID NO: 11675 - DNA, 470 bp, Oryza sativa
  Clone ID: PAT_MRT4530_17877C.1
tttttttttttttttttttttttttttttttttttttttttggggtttgtttttttttttggggggggggagggaactcacaccaaaaaacgggaagaccccttgggccttaccttgaaaattcccaaaaaattctggaactgaacctaaaacaaaaaaaacaattccttaaatttgctaaaaacaacggggaaaaaatttgggcaccctccaaagggggcacatattttttttataatacccatttcagggcacaaacccagacccgaaattggaaccccaaacgttagaaaaatcaagcgtgggttttattgaaaataagccgcgtgtgaaactggtctctttcccaccattaaaaacaaggaaaccccgataaaaaccgaaatgcaatttcaccgggggtgcgcagcattcacatattgacaacaccgggctttttctccttaaaaaaaaaccggatttaatatttt

SEQ ID NO: 11676 - DNA, 285 bp, Oryza sativa
  Clone ID: PAT_MRT4530_17878C.1
cccaggcccaggtggctctgcaaatttgccctcccatggtggtgagtctaccctgagggtactgcagcactccatggcaatggttggctgactgggtcattgcgggttctctgggtgagtgtggtaccaatgcaataatgatatatagtgtgggataaatgaaagtggtgcaacaacatgcatgcgtggtggtgtcatgtaataaaatttggaatagtctttggctgttcgtatgaataaatgaaaattataacatgtcccaaaaaaaaaaaaaaaaaaaaaaaa

SEQ ID NO: 11677 - DNA, 4301 bp, Oryza sativa
  Clone ID: PAT_MRT4530_17879C.1
aacaaaataaaagatattttttctatataaaagagctaacatttgcaagggcacacttcgtgctccgtgttacaattgctacaagccaatcaattaggctggaaggacaaattatgtactacgctatctatcttcttaggggctacaagtcaatatctacctttccactctacaactcctgtatgttgttttgctatatctcaaacctctaaccaaggaaaaaagaatctcgtataagcgcatatgctgcgtgaaagtatgcaagtctcctaatgtgaattggtattttcttcatggcttgtaaaggcagccactggtgaataggcacttgatgaaaactcgtcaaaaattcaagttggccacatcaattattggttgattgtacatagttcccactttccttcaccatcgatgagtttcagctccaacgaatggaagggtatcagagcaggcctttgtgacgaggtgatgacagttatgcccatactagttgctatcttgtacaaatgctcctcaacatcgacacttgtggcattggtgcactcgtctaggataccaaattttggacagtggaagaacaaacgagccatgcctagcctctgctgttctcccaaggatagaatatcttcccagttaggagtagcatcccacccttctctttctagaagatagaccaatcgaacattctctagaattgtcttcaggtgatcatccagtgacccagaagttattgccttgtcacctgatttgtataatgaaagaaccttcaactctgcctcctcatgagagaggggatatatgatctgatccctcaaggttcctcggagcaccctaaaaatggagctcttgccactgccatttgggccagtcacaagaaggctttttccttgagatacatcacaagataactgggtagccaatagcttttgagatggcgttacgatatccacatcatggaaggaaataatttcttccgatgccgcaataataggattagagggcatggcagcattgctttgagatgtctgtagaagctcttcgagttcaaacaccctattaataccaccggacagttcaaggaattttttatgtaactcaagaatatcaccaaaagctataaagctttgtgacaccacagatgccaagaatcgaagtgcatgtgccaactctccttgagttgaagtcaaagctcggtcccccttgtgttccaaagcatataacaaactaagcccccatgtcacattgtgaggtagctgcttcgtcacgaaatcatcaaaaataccatatagccatctttttctcaacagagtccttgagtggttaagcatcgttgtgaatttagcttcaaccatagctttctctcttgatccaccaccaaagaaagctattgactcagcatgcgtccgcaatctcgagtgcatgaacctgaaagttccttcaagctcttgttcttgccttgcaagatgaccaaagtctggggatacagctctcagaaagcccaaacctagcagcatgtaagcatacaagatagcaactccccttcgcccagacaaaagcttcattctccatgtaaaccaaagaatgtcgacaagtggttttaccattccagtaactaggccagcaagatcattggtcaacttctccacatcatgtgtgattctttggtctgcatcaatatcgatgcctgacatgttaaataccttgtaaaaagcatttcgtttcaaataatattgaagtagatggttggtcatgcgaattcgccagccaagggcaatctttgaagtaaggtttcttagtgatggtgacacaattgaatttgcagcactttgcagcacactaatcccaattaaccgaaggaaggcagctttgtcctgctccaggacatacttaacgctcgttccatcagatctatctccagtacatgaagataaaagccaaccgttcagtgaagctatacgatctgaaatccaagtccgagagaaaacaagcaatgccactgcaagcaactgcccaccttgcttatcaaataatttagggaccagtatttttgacattgcagcagctcggagtggcaaaggtcttggtgagcactgtaattgtggaactagatttgaccgttctgtgtgttctatttccatattgggagaagtggctatgagctgtgtagaataagaatgatccttggggcccattaaagcattaccctttgtgttggcaataaaagccctttgaacagcaagtgcatcagatttacgatcagtttctgatgagttcaatgcatcaaactctggttcagcagagataaaggagccatttctattttcctgaactgtccaccctccttctccatccaaagacaaaacgatgtcatgaaatgcaactaatgctggacgatgagagattgttatgcatgatgtgcccattgcttgaacccttttgcagaaacgctcttccatatcagttgtcacagcactagtgcattcatccaggatggcaaactttggcctatggtagaacagccgggccattcccaatctttgttgctctccaagagacaattcatcaccccagttaacttccttatcaagagggtagcgttctagcaaatattccagatccacattctttagaagatccaccatgccaccatagctaagtggttcagtttcctggtctgctgtaagtggatagataagctggtcccgaagtgttccaacggctgtatatggtcgctggggaacataaaaaatttctttgttaagattagagccaacaccaggtttcacaatatggcctgacataagtggccacagtcccccaagaacccggaaaagggagctttttccactaccattaggaccagttatcaaaagattagaacccgactctacccgaagagttaaatcatcaaccaagacgttccctgagggtgtcaccaccttaacacccgaaaattctatatggtttgcttcgctgatataatttcctacagaagaatttttattcatagattgatcacgaaccccagatagctcacgtgaaacatccagtaactcgcgaatacgatctgcatagccactgagaatattcaagcgtcttgaactgatagatagggttccaagagactgaaataatgatattatgacgctagtatgataccgaagattgctcaacatctctgcccgtcctaaagtggatgattcaggtttaaggtttccagcaaagaaaggttcaacaatcaagataactccaacggtggcaccaagatacttaagaagaaaatcctgaatcatgccaaaccaccagttttcatgaagaacaacattcaaatgcttcacaagagcctgaaacctctgcatgatgtgcgatgcttctctgttctcaccaccataaaacgccacactctcagcatgggttctcaaacgtgaatggacctgccgatattccccttctagctgttgctccatggattttaatttcccaaaagcaggagaaaactttctaattgcaccaccagcaccaagtacatatgccagaatccagagaacatattttggacttgcataagagcagaggcgccagatgtatattaacccatctgcaactgcagtcagatcatcctgtacgagtccacttagttccgagcagaacttaggaatatcactagcaatcctttgttctggatttgagatccggtgatctacatgcgagagtttgtagtaaaccatgttctcaaagtaatcagcatggacaagatctgtcaaaatcttcttaaagtgcaaacctaaggaccctgtcaagtacttggaggtctgatatattgtggactgaaggaagcataaaagaagattttcgataatcaggcgtgtaaaggttggaacacgccgaagaaatgcaaccctgaatagatagccctgaacttttgctaatctgtggccaacggcagtacgtaacacagctgttatcatcaagccgagaagatgatttattccatttggaccaatctttttaagcaaaatagcagccagaaattgtaaggatttcaacccatttttctttttccttgtttttaccaatttaccatcaacaccattttgacaaatgctctgattacccgtggtctgtgtacttgcatcactatgagaatattcttcctgacgtttttggcgccgagctgagtgagcatatgctaaagttccacccgcaagtaacgcaccagaaacaactgcaagagttctccttctcgaagacaaaaggttgcgtccgtgctctgtcagttgcaataactgaagagatggcat

SEQ ID NO: 11678 - DNA, 570 bp, Oryza sativa
  Clone ID: PAT_MRT4530_1787C.1
atggtggcagagtatctgatagtgaagggtcagatcaagtctcctcggattatgaagatgagtcccccccacatctcggcgaggaagagatggaatcaaaagcatgcccccgttgtggagaaattggacacattgctagcatgtgtctcacactctgccctcattgtgaagaagaccatccaccaggggagtgtcccacccgcaaggtcacatgttttctatgcgaagaaaagaaaatgccgagtccgggaagatatctgttgcttcaattgtcaaggaatgggtcatttcggcgacaagtgccccagaccgagaaacatagctgccagcacgtcagtccacgcaactccttgcaatcagaagcttgctcctcagcgaattgtcatccatgcatcccgaagcagtcctatagaccgcggtgcaacagctccaactccagcgagtgcattaccacaagttgtcaatgctcaatttcagccccagccatcagttgacaagacagaggccagtatcggcattgtacctttggatgttccagcacagcagccaaagaaatcaagtacaagatga

SEQ ID NO: 11679 - DNA, 1670 bp, Oryza sativa
  Clone ID: PAT_MRT4530_17880C.1
tttttttttttttttgcccaagttgcgaaaatgcaagcataattcaaatgaaatgagatttgacctctcatcagtagacaagagatgcaatgccatacaatcaactacaccatgacatgacaaaacggaatgtttcaagtatcacaggagatcagcttctgactgcataaatttctcaggtctaaatcaccatatggaagataaagggggagcattagatattgtacagaacaagcaggactccctacaacggatacacattcatatatacgttgctgagtacaagaaggattgctagttccacattcagtcaatgaatgttgttctgttcatacatctctccatatttaggtgtattaaactcccgtttttgtcaaaactccaaccagtttacagaagtactcccaagtcctaccaccaaagtgttatgagctcccaccaaaagaagcagcaagcagatcggttatgcttagctcatcctaatccgccatgctggaatcaccaccatcaggagcatcaatttcatcttcgttcttcaggttcccacagacattgcactcaaacacatgggacggctcaccgtttggcaagggcggaagtggcgcaagcatgccatagcattcaccatggttacacagataccttacaaagaagtatgagtgcgggaaatcatcatcgctatcgctaccaccatccccctcctcctgctccatcccatcatcaccaccttctccaccattaccatcctcttcctcctcttccatggtgtcatccccatcgccgccatcgctatcatcatcttgcttccacttgctctccacctgacaccgctcacactcgcatcggaacccatagtcctccagcaacctctgctgccgatccttgtactgccaattggccgcgaagtagctgaggcacacctccctcccctcggtgatgtcgtgaagagctcgcaccacaatgtcggtgttcccgggacccggcctatcggcgtaatcgaaatggcaagcattggggaggcaatcatggttcagcagcgacgcccgcgggtacacggcgtaggccctcgccttccggagaggctgcggcacctcggggcggtagggctccatgatggagaagctgttggtccggtccttggagaggagcgccgccgtgaggtccggcgagaaccctggcggaagcatctgcggcggcaccagcgccgccaccatggcgtgcaggctccccgggtcctggtcgctcgggggcggcgttgcggcggaggagagggagaggagcacgcggagggagggctccgggagggagtaggcggagagaaggaagaggagcggctcctggtgcggctcggcggcggacgcgaggtttccgttgccaccgccgccggagagcgcggtgcagaggaggcgcgggtgggaggcggcggcgcaggacggggagcagaatcccgcggcgcggcaggaggggcagggggatgcggcggcggagagggagcggaagcaggcggagcagaaggaggggagggaggcgagcgaggccgggtagaggagcagcggctgctcggtgaggatgacctccccctcccggatgctgcgcgccgcgaggagcccgcgtcctcggccggggagatcggccgcacgcagcgcgtcgccggccatggcggagcaaag

SEQ ID NO: 11680 - DNA, 397 bp, Oryza sativa
  Clone ID: PAT_MRT4530_17881C.1
aacttcgcgaaagtcgtacaccccgcttcttgcggaccaggccccccccagccattgctctaccaaggattcctcgcccacccccgggcatgctcttcctctcccaccttctccaccccacccccctcttcccgcttactcgccggccgcacaccacccactgccccgcgccgcagtactactacctctccgcactcgaatctctaattctagagatagagatgaatctgaacatagaatataaatatgttcagacacatctcataacttatagctactcgctataggaggccagcacagtacatatgtacatttgcaagtctacgctactcggctgctttttagcaacgtctgacattcccactatgtaagctttcacgataagtggaagacgccc

SEQ ID NO: 11681 - DNA, 339 bp, Oryza sativa
  Clone ID: PAT_MRT4530_17882C.1
gcagaagatgcacgaccggtgctagcagtgtaatgggatcgaccggcgagttgcaccgctgctgtgaaggggcgcagcctgcacattcaggctcctcgccgtgttgagttgcgcgttcgtgcggcggctacagctgtggcatttgaggctgcggaagtggactacagctctaacatctcggtgattccgacggaggcctgcaacctcatcaggggagaggcgtacaacgtgcagatgtacccagaggccaagctgtcatcatcggatgctgcagctgctacttatgctacggcggaggaagtacacagggactacctatggtacgacgagcccaccacg

SEQ ID NO: 11682 - DNA, 441 bp, Oryza sativa
  unsure (1)..(441): unsure at all n locations
  Clone ID: PAT_MRT4530_17883C.1
cccacgcgtccgcccacgcgtccgcaaaacccatgtatatttttactaccctacccctaatctctccctcccgcacaaaatctctcttttttcgccgccgcccctccacttctctttttcttcgcctctctctctctccctctcgccgccgccgtcaatcgcctctctgtcgcctgtggccacgaggaggacgagtagggccacctccctctctctctcatcgccgcccatcgcatccctctctcccgtcgccggatctaggccccccgcggccagatcggngaggagacgttggcggacacggcgctggcggaggaggccggggagggaggttggcngcggtggcttggtgcattcggacactagtatagtagtgtcataaaggagtagtgtatagcaagcgcttctaactgcatcaagattaactaaaatcctgtgatc

SEQ ID NO: 11683 - DNA, 279 bp, Oryza sativa
  Clone ID: PAT_MRT4530_17884C.1
atgtgtggctcatttgctccaaggtcatcgtctctgctgctgctgctaatcactctgctgcttgtcgttgtctcacgcccacaatattccttggatgctagcgcattatcagatcacctcgccgtcggcgatgcgccgccgccgccgccgcagcacggtgctggccggaggctactcagcacgcagaaccaggtgacgccgccaccgccggcgccggtgtcctcgccgccgataggccctgcgcctaccctgctgccgccgccgccgccggcaaaataa

SEQ ID NO: 11684 - DNA, 477 bp, Oryza sativa
  Clone ID: PAT_MRT4530_17885C.1
gcagtcggtgatgaagcccatgatcgacttcttgagatcatgcggcggatcgaggccgaggagatccgcctcgacgccgcgacatggtggtgatgagcaccaagcaagagatcgaggagcagtgggggctctacgatgggttcgacctcaaggtggagtgcaagctctgcatccgtcacatctggtcgaaggtgaggagcgcagtgggggctcctgcacctgctcatcaaccccaacaaggccaagaagcctctccctcccatctggtcgaaggtgctcagtttcttcacgaacccgcacaagccgatgatcctggcgctgtcgcggcaagacccaaaaaagaacatcaccacgctgctcaaggcgtacggcgagaaccgccatctccgggagctgaaattcatatatgaaatgggcaattcaagaaaaatattagaggaaattaagtattttcttcttcttatatcttgaatttat

SEQ ID NO: 11685 - DNA, 329 bp, Oryza sativa
  Clone ID: PAT_MRT4530_17886C.1
ctaccttatactgcgggtcttcttgggtgtcagatcctctattatcctagggcccaccaccagcaccgtagcaatggcgggcaacgggccgatcaacaaggaggacccgctcaactggggcgcggcggcggccgagatggccggcagccacctcgacgaggtgaagcgcatggtggcgcgaggccgcgagccgctggtcaagatccagggcgccaccctccgcgtcggccaggtggccggcgtcgcccaggccaaggacgccgcctgcgtatccgtcaagctcgactaggaggcccgagctcgcgtcaaggccagcagagagtggatcc

SEQ ID NO: 11686 - DNA, 1525 bp, Oryza sativa
  Clone ID: PAT_MRT4530_17887C.1
tttttttttttttttttttttttttttttttttttttttttttttttttttcataattaatccacacttattagctgctagtactaatttgctatacaaatccagtcatgtcctcatcgacgtagactgtagaatgtacaaatgaaacgagatctgtctttgtgtgtcgacttcatctaataattgccatttttgcagtaacatctactgcatcatcgatcgtttccatttgcttgccatctactagtgttcttctatttacaagctcaccacactcattccctaaagctaatcaaatatgtgctaattgcagagctgagctgagctgagctaaagtgccactacgaataattaaagaatttaacgcaaagcacgcagcgtcatttggcgacattgcatgcgtgtaggtgtaccatggcaaccaaacgaattcgctaatctacgaatcgcggcggcgccgccgtcactgctgcggctggccgtcggcggcggcgacgtcgtgctggtgcggccaggggatgaggctgtatggcgggaagcagcagtcgcactgccccgggcaccgccgcggccactcgccggccgcgggcatctgctccgccgccgcctcctcggccgccgcggcggcgacggcgtcgtcttcctcgggcggcgctccggcgtcgcggagcgggccccagcactcgacgcggttgaagcgtgggaggttggagtggaagtagacccacaccgtggcctcctccagctccgggtgccggctgaacaggttgccgtcgccgtggacgaacgccttcagaaccacggggagctccttgcggaagatgtagtagcggaggccggcgatgaggtcgaggaggacgtggccgccggagatgtggcagtggacgtgcagcgacatgtggccctgcaccttcttccactccgccaccacctcgtcccgctgcagcttgttgtaccacccctgcagctgcgcccggttgatggtgtgcgacaccgccagcgtcagcctcgccgtcacgtcgctgtgcgtcagcgtgtacgtccgcggcagcttccccgggtgctggtgcttctcctcgtccacccccaggaacagcaccttcagcttcgacgcctcgaagatcgccggcccgaacagcctcgccctcggcacgacgtagcggcagcggcggcggcggcgagagttgtggcagcgggaggcgaggacgacgagggagtcggcggcgtgccaccgctgctgctgggtgatgggaggaagcagggacatggtcgaagtagcagcagccatgtctgctccctcggatctcttagtcctagctagccagcagtagttaactttaagcctaacaaccaaaacgactcttgacagctttaattataagctgggatctctatggaggccggagatgctggaggcgcggctaattaatccctctcggcgaaagcacgagccttgcacgcctcaacaaagacaccggccggccgatcgatcgatcaaaattttggctcggtttggtagcttcgc

SEQ ID NO: 11687 - DNA, 518 bp, Oryza sativa
  Clone ID: PAT_MRT4530_17888C.1
gcggccgccctggaacctttatagtgtttggccttttttttttttaattgacccaccttttttttacacacatccagggggcacaaaaaaaaaatggggtgttttgcctctattaaaaaagaaaaaaaaacccccatatttgcgccccgggggcaaaaaaagcgcggaagcccccaaaaaaagccccccccaaaggggacccccgggccagaaaaactagccgagggggccaacacttgccttaaaaaaaaaccttcccccaaaaccccccggggggggggaaacaacaatgatcgttaaccctttaaaaacagggcccaagagaccaagagcccacaaaccccgaacaggaaaaaaaaaccccaaaaaaaaacccaaaggggggggaggtaacaaaacgaccggacgagaaaaaacaggtaacccccctaaggggaaaaaaggcggccccatcccaaaaataaaagaggggggccccaaaaagggggggccaaacccccaaacgggggggccccccc

SEQ ID NO: 11688 - DNA, 326 bp, Oryza sativa
  Clone ID: PAT_MRT4530_17889C.1
gggggggaaaaaaaattttaatgcttatttaataggggggccccccggggcaaatttaggggggttttccaacaaaatgaaaaagaagccttgggcccccccccccccccccccgaactttttgtcccattttgtaactccagaacttttcaattttcaataaaaccgacttggtgttacaaggaagcagggttccctgttttttaaacagggacttattttgggaccgcttcagcaattggagttagactttttttcctgaagatggaaaaccttctggaacttaaattcttttttttcaagttaaaaagaaatgaacccttttt

SEQ ID NO: 11689 - DNA, 774 bp, Oryza sativa
  Clone ID: PAT_MRT4530_1788C.1
atgcccggcgctggctctcccctcctccctccaccggcgtcctctcctcctagcccaaccgccggcaactctcctctcctccttctaccgttggcgttcgcggagatccctgaggcgcgcttcaatggctgcgtgacggagtggccggcgagctcccggtggcgcagatggaggctaggtgtgttcggcgagctcccggcaacaagcctcaatggcggcgtggatggcgacgagctcggggcagatctggcggcatcgacgcctcctcaccggtgcgggcaagaagctcatagcggagttgacagcgtcggcagcgatggtgtgggcggtgcgcggtttctcccccaaatccatcgcgagattggccggcgtcccccttctccctccaccggtgctggctctcccactcacgaccggcgcgtagaggaagaagacgacgacgagctctgccggcgtcaaggagctcccccgatggagcatcggcggggtcgtcgcgacgtggagcggcgacggcctcctcaggcttccccgacggcggcgacccaacgagggttgcatgcgccgatggttgaggcgagcccgacgagggctatggcgccggcggtcgagacgagcatggagtgagggttgcggcggcgccgagctcctcagctgcggtccatatgggccttctcctctggtcggatttggccgctcccttcccattctcctcctccggttggattgcacgacgcgggggcacggcgcgacgaaggcacgccctccacagcgcat

SEQ ID NO: 11690 - DNA, 347 bp, Oryza sativa
  Clone ID: PAT_MRT4530_17890C.1
atgctagtggtttcagataacatgaccatttgcggcgtattgtgtgctcccttgaggctgtcagtaagttccgatcagccctgatattgacttacctaggattgggaccaaatcttagttgctggtaaatgttcgagatgggacacacatcttagtttctgggaaatggtgcgagaatcgctgggaattgtaagttgttaattgattctcgtctgctaccattatcagtcctcttggttctttatttctgttttgacaccatgcagtatcagctggtgtgttccacttgtgtgtgccaaaaataccccatcaaagcaaggctttgtggatcaaaaaaaaaaaaaaaa

SEQ ID NO: 11691 - DNA, 501 bp, Oryza sativa
  Clone ID: PAT_MRT4530_17891C.1
atgccgccattgccgccgccttccccctccaactccggcctcctctctcgtgtatttccaaaattagttgaggcaaaatatcccccttatcctcctctatctcttcccccaaaaatccgcgccgtcgccgcgttcgtcttctccgtccaccgccggcagccgctccagccgcccctagcagccgcctcagccgtcgacgacctacgccgtcgcctctctcggctccgcaaggtcaagctccaccccgtccaccccttccccgtagccgaaacccaccggagctccatcgtcgccgtcaacccgaacgtcgcagccggggagaagcccgtccatccatccgttgccgctgctcgtcgccggaaaatcgtcgctgccgtggacccgaacctcgccgccctttggagtccgtcgccggccatctccttcactgttcgtcgtcgcataagtgttgccgccgccgtgccgcgcttagctgttggcttagcattgccgctgcgctag

SEQ ID NO: 11692 - DNA, 552 bp, Oryza sativa
  Clone ID: PAT_MRT4530_17892C.1
atggatctggcgactatgctggcgacagcgtcgtcgacggctggcgacggcgcggatgacggcgacgacggcggcgtccgccaacggccacctcagagacgacggctggcgacggcgcgacgacggcggcacccggcaacagcagatctggcgacagcgcaacgacaactgacgacggtgacggcgctggtgccgacggcggcggcgtccggcaacgatgacttcaactgcagcaatggcatctcgacgacgatggtagcggagagagaaagggggagaggaatgctgtcggcgtgggacccacaattggctaggctattttggctggccaaatttggccagtgggaggaggactttggccagccagatggcttggccatccggatagccagtctgttggagggtgaaattgagccaaaattgccaaaatttaacttggtgaggggaataaggaggctgttggagatgctcttagttggcgaaaagaaattgtttttagtatcacatcggatgtttgaccgaatattggaaggggttttcatatacgaatga

SEQ ID NO: 11693 - DNA, 219 bp, Oryza sativa
  Clone ID: PAT_MRT4530_17893C.1
aggaaagacaactatggtggtgtgtatatcacccatagttggccggagacaggacagatcatagaaccaaaacaaaagcgtcgcaaccagtttactgagtaaacttatatccggacgccggcctaggtggatatggtcgcggtatcaacgtcgtggaaggggtggattcgatttggagtgggtgcacggaacgcatacacattattaggctggggccta

SEQ ID NO: 11694 - DNA, 517 bp, Oryza sativa
  unsure (1)..(517): unsure at all n locations
  Clone ID: PAT_MRT4530_17894C.1
agtagtacccaagttttcttgcacttatcattgttttgtacatcagaaatcaggaatcaggaatcaggatgttctttgctggtgtaaacactacatcatgaattcatctgttggcaaaaaatgacaacttttatctggtcgattacagttggggatcatagcttctgaaccaaccaggcaaaagaactacctactgaaatggagcatcggcgtcgtcttctctccagtgagtatcccccggcagcacgagcaattgcatgtccccaaaacaagccagtgctcttcattgtagcttactatgcaccaaactaagagcaaaaactttgcatttcaatgaagttcttgtaaactttagaatggcatcattcttcccaagccctctttcgggactntttgtgtggccgttccgaatttatgacgctatcttcattgtccgatgttttgtgatcttgttcattcttaattttaatcccaacattgcttggtctccttgtaccactgctgatttctgatgcat

SEQ ID NO: 11695 - DNA, 309 bp, Oryza sativa
  Clone ID: PAT_MRT4530_17895C.1
ttttatatcgcaggaacggaatactgctccctggtactcttctgtgttgaggcggcggatataaagaccaaaaacatatgcattgcaccaagggctgcagtaaactcaatcattggaacgacatacggtgacaagtggctcggagcatatgccgcctgctattgctcgtccaagattgcaagcaaaatggacgtcattggagcctgctacatcaaggtagacatgggttcggtctggaaccgccttggttcagaggtcaccgatgttgaatttgacccagatatagcttcatcaacggactgcgaaatc

SEQ ID NO: 11696 - DNA, 236 bp, Oryza sativa
  unsure (1)..(236): unsure at all n locations
  Clone ID: PAT_MRT4530_17896C.1
tttttaaacagctcaaattccatatttnattcagaaaatagaaagatcaagtccatcatagaatagttctagttcactatttcaacataacacacaagttgaacaactagagtttgcatggcctaagacacctaatagcacgtactttcaaagtctcacactcatctatatggttagaaccatatagacaaaatatccaaaagcattagtatcccgcaactccacattggtatatc

SEQ ID NO: 11697 - DNA, 192 bp, Oryza sativa
  Clone ID: PAT_MRT4530_17897C.1
atggtggaacaggccagtgaggcaattagcggcctggccccgtactgcttgcaaaggaagagggccgactttggtgtttggctggggctcaaggtcacacttgataaatgggttgatgttggggtagtcatcccagttggtcttgtcggaagccaggccactacaaagctcgccactgatgttccactctga

SEQ ID NO: 11698 - DNA, 1272 bp, Oryza sativa
  Clone ID: PAT_MRT4530_17898C.1
atggctgagatatggctcaaacagattgaaaggaacaaaaagaaaagaggagagagaggggccacatggcagtcaaaagaaggtcttggactagcacatggctcacctgatggtcgcacacgcatgcgccagcgaatacaggaaggaaggaagagcttcctcttcttcctcgcgcatcaattcgggcgggcgccagcgctagggctggcccttgccggcggtgaggggcttggaggatggtgtggccggccacggcaggtctcaggggacctccgccgtctgtggacggtggcgcgcgggctgagatgctgtgaggcggtcgtactgcctgggcgtggcgacggctcacgcgcaagcgccataggcaccgactcggcggtgatggtggggcgcgaggggtgctgtcttggggtcggtgaggtggtgaggaactcgaaggagtgcgccaaagttgaaaggaggaacggggatgaccgggacgagcttgctccgcgtacacgctcaatgcggcggcggcggagatcggctcgatggggtcaggccgctggggtggggcggaggtggcgcgccgccgccacgtgctccaccccgccgtcgtcgccggccgagctccatctgcgccgcgccgccgcctccgtcgtcgccgccggtcgccgtcaccaccgttgtgttcgcaggagcaaggtgaagctcggccgctctctccccgctgtcgccggtcaccggagccccgtcgccgccgtcgaccgaagccgccgccgccacccacttcgtcgccggccgtcgtcgttcgtcgtttggttcgagggaggtcgacggcattttgtggacggttaccccgtgatcgggatgaccggtggtgtagaagaggtggccagccacgacgatgttcaatcgttcgttccaaagcacggcacagtcgcctacccctccatcttgcccaacctaggcttcggcctaaggcaagccgaggcggagcaagcggagcggcggcggcaaatgcgcaacaatttggcagtggagaagaacgagagcgagagagaaatggcaaaggagaggatggagagagcgcgcatggagaatgtcggagcggtggtggcaacaggacggcctccctgtgcagcagggcgcgtggcggcgaggtgctggaccgcgcggggacaaagcgacgcgattctcgtgatgccgtcgcccggggcgtcgcggcagcggcaagacagggagagcttggggaaggcaagggcgagcccgccggcgagatgggtgcggtag

SEQ ID NO: 11699 - DNA, 855 bp, Oryza sativa
  Clone ID: PAT_MRT4530_17899C.1
atggcggggagggcggcgacgtggggacgcggagtgggggcgcggcgtggagcggagaaggcggcggcgcggacggtttcagcggcggttgccgtcgtggggcgggcggctggaggaaggggacgacctgacagcaagaaaaaggggaaacttctgggcgtgacaatggcggggcgcgaggggtgctgtcttggggtcggggaggtggtgaggaactcgaaggagtgtgccgaagttgaaaggagggacggggatgaccgggacgagcttgctccgcgcacacgctcaatgcggcggcggcggagatcggctcgacggggtcaggcccctggggtggggcggaggtggcgtaaaacgcggccgaaagggagcaagaaaaaggggaacgggagggtgctcaccgtgcggcagccgggcagcgacacaccggtgttcgaccggcgaccgacagtgttcgtccgagttcagcgagggttcaaaggagaatgtcggagcggtggtggcaataggacgacctccctgtgcagcagggcccgtggcagcgaggtgctggaccgcgcggggacaaagcgacgcaattctcgtgacgccgtcgcccaggagctgggcgtcacggcggcggcaagacagggagagcttggggaaggcaagggcaagcccgctggcgagatgggtgcgaaattcttctcgttcccatgtggcttccttttcagggtgattgctccattggaccttgtacaacttgatggtcttggatcgagtctttctttctgcctcttccaatattttgatcggctgctcggggtaagtcaggtcttggctcacttctcgggcgtctacaggggtgaggcctaa

SEQ ID NO: 11700 - DNA, 4809 bp, Oryza sativa
  Clone ID: PAT_MRT4530_1789C.1
atgctggtatggactcaagtcggcgaaatcgtcttcccggtttacaccacgacgctgatctcaaccggtcctccaatgaccggagacgagaacgcagtggctacaaaccaaggcgattccatgtcgaaaaatcctcctgtcgagacggagaacggaatatcgacgacatccaagctcaagaaggattctgatacggccaaaccttgtccttccgacatgaaccatgagccgacaaagatgacttccgaagccacaaggtcttggtgtcctatccacaaaaccaagaaacacaccctgcaagattgctgggttttcctcaacgtccgtgctgaaattcgcgcctgcaaagaacgtggaatccagcgtacttctccaactcgggatgtctattgtcctattcacaagacaaagaatcacgacctctcgagctgcaaagtctttctcggcgccatgaaagctcagtctcctaagtcatatatccccatcagggataacggcaaggaacaaggagcgactccaacttcagatcgattcgttggggtaatcgatatcgatcctcacgaaccatcggtcttacttctcctcgaggactatggggcatcgacaacgagcgcgccgcgggaggtattggctatcgatgacgttggcacagatcgctacactacccaggagttggcgacaagacgcatcacaaccactcggagattattcgagatcgttgagcgatgcgcccacgctgatgatgcgctaagacgcaagaacgataggccgaagactgggggagagaagaaaccaaccacggacacatctgagtcaagcaagaagaaaaatcgcaaaaacgggaaaaggaaagctcaagcggaagtcctcgcagcagaatacgcgaaccctcccaaacgcccagacccacaaagcaacgacacaaagaaatcatggtgccccatacacaagacggacagacattctctggaagattgccttgttttcaaaaagtcactcgagaagcacatggcatttgaaaaaggcaagcgagtatgcgttgtcaagacgaacaaagagacgactcctcacgaaccggactcagcgtatccagactccgacctccacgtctcacacatattcggcggttccacaacgtactcctccaagcgagaatacaagaaagtggaacgtgaagtttgctcgacatggcagggggctgcacccaagatgaagtggtccgagcagaagatagagttctcggaagaagaccaccccaagaccgccgttatcccaggacgatatccgatcgcggtcgaacccactattcggaacatcaaggtagcgcgagttctcattgacggtggcagctcaatcaatcttcttttcgccagcactttggacgcgatgggaattccgcaaaacgagttgacaccaactgatcaacccttccatggaattactccccaatcatcgtccagacctttgggcaagattacgttgcccgtgactttcggccaagccaacaacttccgaacagaacagatcacctttgatgttgctgaattcgatacagcttacaacgccatcatcgggagaactgcacttgcgaagttcatggccgcatctcactacgcatatcaaatgcttaagatgccgggaccgaagggaacaatcactattcaggggaatacaaagctggtggtgcaatgcgacaagcggagcctcgacatggtcgagcaaacgcccagcccacccgccacgactgagccacctaagaaagtgaccaagacaaacaagacgccgaaaccagacggcgccatcaagattgttccactctccagtgccaaccccgacaagaccctgtccgacatgccgggggtccccagggaggtgattgagcacaaactcatggtgcgacccgatgccaagccagtaaagcaaagactgcggagatttgcaccagaccgaaaacaagccatacgagaagagctcgacaaacttctcaaagctggcttcatcagagaagtacttcatctagagtggctagccaatccagtcatggtgcggaaggccaacggaaaatggagaatgtgtgtcgactttaccgacctcaataaggcgtgccccaaggatcactttccacttcctcgaatagaccaactggtggattcaacagccggttgcgagttattgagcttcctcgatgcttactctggctaccaccaaatcagcatggcaaaagaggacgaagagaagatagcatttatcacgccgttcggggtattttgctatgttaagatgccgttcggactgataacagctgggaatactttccagcgcacggtccagggcgcacttagcaaccagcttggcaacaatgtcgaggcttacgtcgacgacatcgttgtcaaaatcaagacaggcgactcattgattgacgatctgcgggaaacgttcgacaacctccgacgatatcgcctcatgctcaatcctgagaagtgcacgttcggagtaccgtcgggcaagctgctcggattccttgtctctggcagagggatagaagcaaaccccgagaagatcaaggcaatcgagaacatgaagtcgcctacaagactcaaggaggtacaaaagctaaccggatgcatggcagcactaagcagattcatcgctaggatgggagaacgaggacaacttttcttcgctctgttgaagaaacaagacaaatttgtatggacacaggaagccgaaaaggcattcattgcactcaagcgctacctatcaaactcccctgtacttgttgctccccaaactaatgaagaattattcctctatattgtcgccacgccacactccgttagcactgtcattgttgtcgagagagagaaagtacagcgaccagtttattacgtcagcgaagctctccacgacgccaagacaagatacccacagatccaaaagctgctttacgcagtcatcatgacatcaaggaagctacgccactattttcaagcccacagagtcacagttgtctcctctttccctcttggtgaagttgtgagaaacaaagacgttgtcggccgcattgcgaaatgggtagtcgagctgagccagtttgatgtccactttgtgccacgaacagccatcaagtcccaggtactcatcgacttcgttgccgattggactatgccagataacaaatcagacaaccaaggcgacaatgcaacatggacaatggcgttcgatggcgcactcaacagccaaggagctggggcaggatttatcttgacgtctccctccggagatcaattcaagcacgcaatccacctcaacttcagggcgaccaataacactgcagaatacgaaggactactcgccgggatacgagctacagctacacttggggccaagcgactaatcgtcaaaggggactccgaactagtcacgaaccaggtacacaaagattataaatgctctaactccgagttatccaagtatctcgcagaagtcaggaagctagagaaaaatttcgatgggatcgaggtccgacacgtctaccgcaaggacaacgtcgagccagacgacctagcacgacgtgcgtccagacgagaaccgctcgagcccggcacttttctcgatatgctgacgaagccatcggtgaaagaggttagcggcgaagtcagcccgaacacccccgacattagctcggaggtcaccgaggcagaacgcgccgttgccgacatcgaaaccacaaacgactggcgcatcccactaatcaaattcatcagcagcgaggagttgcccgaggacgatacagaggcagagaaaataacccgtaaagcaaagatctactgtatggtcggcaacgatctatacaagaaagcgccaaacgggcgatgtgaagcctgtcaattccacagtaaacacacaaagctacccgcgcaagcgctccagactatccctctgacttggccattctcgtgctgggggctagatatacttgggccattcccacgaggacagggcggctatagattcctatttgtggcgatcgacaaattcaccaaatggatcgaagcagtacccacgagggaaatcaaggccgacaacgccatcaaattcatcaaagggatattttgcagatacggactaccacactgcatcataactgataacagctcccagttcatcagcgccgatttccaggactactacatcaggctgggggtcaaaatatgcttcgcctcggtctctcaccctcaaagcaacggacaagtcgagagggcaaacggcatagtactacaagggatgaaaacccacgtctacgacaggctcatgtcacacgacaaaaggtgggttgaagaactcccatcagtactatgggccgtacgcaccacaccgacaacgtctaataaggaaacacctttcttcctcgtgtacggctctgaggccatgctcccaggcgagctacaacatcagagtacacgagtacagaagtactctgacgagaaccaggaggagcagcgagatatcgatgtaaatcttctcgaggagcatcgggaacgagttgccgtccgagcagccagctatcaacagaccctccgccgttatcatgagaagcgcatccgtgcacgcatactttcgatcggtgactatgtcttccgtcgagttcaaagccaagcagggcgaaacaaactcacacctaaatgggaaggaccttacacgatcacacaagtcttgcggccaggcgcattcaaaatcgcagacggcgacggtcgcgaattagcaaattcttggaacattgaccaactacgtaaattctatgtatga

SEQ ID NO: 11701 - DNA, 240 bp, Oryza sativa
  Clone ID: PAT_MRT4530_178C.1
atggcggttgttaatttgaaagtagtagaggagataactgaaagggagttgagaggagggatgggagacggtagtacatgcatatgcttggcgaatttgcctaggtcagctggcaagaagctcttcctactgcagctcagctcggtcttccccaaggacagctgtaaactggcgaggaagacagacgccaccaggcgctggacagctggagaccaaattgagaaaacacaattctactga

SEQ ID NO: 11702 - DNA, 156 bp, Oryza sativa
  Clone ID: PAT_MRT4530_17900C.1
tgaaagagagagagagagatggcgtcaccgtcttcgatcttttctctgtcctctacatttttcataacattcgtggtctttctgcaactccatcatctcttcttcatatctaaaaaagtaaatgcaatcactcaattaatgaccattgacttcttc

SEQ ID NO: 11703 - DNA, 2613 bp, Oryza sativa
  unsure (1)..(2613): unsure at all n locations
  Clone ID: PAT_MRT4530_17901C.1
gatatatatctctatctatctatgtgcaggttcatatacacatataatctatttagagaacattatgttacacagtacaaagtaggatacgaggagagaaaaacgcagagaaaacatctgttagtacaatgccatccatcaagatcgtcgtcaatggaagccatgagatggcagcagtatcagaaacagggaagcgacggcggcggccagcacacggcagccaccggcgccggcgctggatctcgccgccgccgccgagctgctgctgtcggtgggcttcgccgccgtcgccgcctcttccggtgggctggcaatggcgacaggcggcaacggcgggtccagcacgtcgcccggctccagcaccggcgccggcggcagcgccggcggcagcgcccccggcgctgccaggtgcaccagcgcgccggcgtccgccggcaggatcgcgtagctcaggttcaggctcagatcgctgcacggactccggaagtaggtggcggcggtggcggggtactcggtgatgaggccgtcggccatgacgtggaaggcgtaggtggcgatctcgatgatggggtcggcccagtagtcgaatccgaggttcatgaactcgttccggagcacgccgacgtagacggtgaggttggcggcgtgcatccggtcggcgacgtcggtgaaccgcgtgaggaagaagccgttcacctgcgcgatcgacccgcggccgacggtcaccgccgtcgcgaactgcttgatctcctccaccgacggcgccgacgcgtcgctgatcgtctcgtccaccatcagcacccgcctgaacgccgggaacttcttgaacgccgccagcaccgacgtgtcgtccgacaccaccatcagctccggcaggtgcccgccctccttgtcgtagctcgcgttcgccagcgcccccgacacggcatccaccagcccgaggcctcgcttcgcgaggaacgatgcgtgctccatctcgaccatgatgccagagacattggtggccttggccaagtctaggaattcaggcaatgtcacgaacttgccggcgttcttcgcggcggggttcctcttcaggcctgcctgggtgtacggaccaagaagatcgggttttaatgtttggatttcgctccatgtgagatcaaaggagaagatgcccgacttgttctgaatttcactgacagtggagattttggtcatgaaactggtggacgccgtcgtgctggtgctgaggtctgcagatggctggcagaaggccacgccgtctttcgacatccggaccgcgcaatcgatgatgtcggcgccgtctttcaccgcctgctgatatgcgaggtcagtgctgcccgggtagacgccgctcgcgccattgtgggttatgatcagtggcctgcctccatcaccaccaggaggaggaagaggattgcccttggtatttgccaaacacgcaacagctcctgatgcagtgggagggaaatccgttatcacgccgtcgacagagaagtttgcattgccaatgtactgcaagtactctgcactgggatcaaagctgtagttgtaactcatggagacatcattggcaaatccagaggcaaaaacttcaagcccaagggcatgtgcatccttgaccaaactagtaggcagccgcagatactggtccttgcccaatggccaaatgtattccttggggacaagaatccctgatgcaaaggccttgacggatttcaggtctttcaggatctctccatacgttttcttggtggtatgctcagcgacgtcttctctaagaaaccggaaaattagcttggtgttgcttttcttgagcttagcacccacgtttttcaagaatccaatttctggtgaggagatgtaagcgacactaaaatcttttggtaatcctaatatgtaatcttcggcacttaatttgtgctcctggagaaataaagcatactctacattaacccataaatgtgggggcttgagtccgacaagatcttcaagggtaaacattcccatggctccatcaaatgtgcttgggcgagaaaagatgtcctggatcaatgtgacattctgatacagctcgtctgcggtgaaatccaaagcaaaccacccatggatttcctctccattcaccttgtatgtcttggccctcttagggaaggcttcggcgataagcgtcgagttctctaatgtcaatccagttttgcagaagcccaaaccatcactggacaattgcagatcacagtacagaaccacatcatgcaagctactcgacattgcaaactggtacgagaactggcttgaatcaggaaacaagccggagaaccctccacgagcaatgacaagaggacgctgacctccaagagtctgccatttctgtactggatctttcaaagccgcatgggctccatgaaaaagtaggaggatcaagaacatgtgaggatatctttctcccatttggacaggaggagcaccctcacatgaaactgcaataacacaattgagaaaagaccggacgcgtaaatcgacccgggataaaggcgaaagataacttctcatnaaacttatcttttttttnagaacagataactttaaatttaattttgcagagcaaaa

SEQ ID NO: 11704 - DNA, 705 bp, Oryza sativa
  Clone ID: PAT_MRT4530_17902C.1
atggggagaatcagctcaaacatcatatgtgcatggcaccatctcgtggaggtagaagatggagacccacggctccacctgcaggcctccacctccgcggcggtgtccggctcggtccccgtggggctggcggctaagaacccgaagctgatgcatgagggcgcgcaggacctcaacctggcgttccctcatcaccatggtcatgccctgcagtcaccggagttcacggcattcccgagcttgaagagcagcaccatgtgcaaccccggaggcaacctggcggcggcgaacggcgccgatggggccgctagggatgccggtggaatatgcagttgtggggttccatcttggcgagttccgcatgccgccaccgccacagtagcatcagcaacaagctcagactgcgctcggtttctcccaggacacgcatggcgggtgcaggcggcagctccagggtgtttggcgcgtgcagcgctgggttgcaagagagcgcggtggggcaggttgttgttcccgttcgaggacctgaagctggtggcgagcgccacggctagcgacgcaaacagcagcggcgatcatcagtacgaccacggcaagaaccaaggtggcggaggcggcgtcatcggtggccatgagaccccagggttctggaatagcagcatgctcggcaacggaagcagcaatggcggcggcgattcttggtaa

SEQ ID NO: 11705 - DNA, 340 bp, Oryza sativa
  Clone ID: PAT_MRT4530_17903C.1
caaacggaagcatgaggatggtgagccttgtggcagatggatctgccggtgatgaaatcatgaccaacagagataagaagaggagaagaaaggagcattctgttgagctgaaagagggtgatcaagttaacatatctaggaaggcagtgaagataaagggaaacaagaagagaaaaaatgaaagcgataagtttaatcctgacttaagcactgatgcactcactggagaagataaggttggtggagatggcaaaatgataagagaaaaaagaagacgatacatcgactagaaggaatgaggcttggtagggatgataagaatgataaaaaaaaaaaaaaa

SEQ ID NO: 11706 - DNA, 168 bp, Oryza sativa
  Clone ID: PAT_MRT4530_17904C.1
aatacaatcaaataatttactatattaacattagtgactacaaaatgcgatgcagttttcgcgatctgtgattgaacttgtctctgatctaaagcctacctctaacttgctgcaacttttacaagatagaacagccccgcaccaccaatatttttttagacagctcac

SEQ ID NO: 11707 - DNA, 2799 bp, Oryza sativa
  Clone ID: PAT_MRT4530_17905C.1
atggctgctcaatcacgtaaaaaacgtaaagcatatatgtcagagcgttctagggtattgcgacaacggttggcacattcatcatcttccatatatgataaagatgcatcgtcttctcataccactatccctacaaatggtcattcccgctctgttttctcaccattaaaccttggtccaccaagtcacacatgttgttattgtggcgcattattttggtatgaggagcgcatcgaccgacggcgtcacacaacaagaccgttatacaacaagtgctgcaaaggaggaagtgttatcttgccttcctacaagccacctccagagcctttgcatagtctgctaactgcggtggatagagctaaatcagctcatttctgtgagaatataaggtactacaactctatgtttgcttttacatcaatgggggtgaatgtgattgattctatcaatgatggtcgtggtccatatacattcaagagaagtggccagctctgccatcgtattgggtcgctcctaccaaaaagggataaacgaccagaatatgctcagctgtacatatttgacactcaaaatgagcttatgaatagattgcgtgttggcacctataaaaatagagccttccaacctaacgaagaaattgtagctgctctcatgcaaatgtttgatgcccataacccaattgtcaagttatttagggttgcccgtgataggctttctagggcaggtgcacccgatgaccactattttataagattgtttggatctcctgacaagcatggcgatatatttaatgctccagtagcatcagaggttgttggattagttgttggtgacttaggtacaagtgatattggacgtgacctgatggtagaagacaaggctggcaatctaaggaaagttaaagaagatcactgtaaatttatggcgatgcagtacccaattttatttccttatggagaagatgggtatcatcaaaacattgcatatagacagtgtcgaagatcagcagggattaaacggaagcgtgtcacagaggtagaatattatgcctataggcttcatgatagaggtgatgatttcaacaccctaacgcgttgcaaaagagacaaaaattacttaggctttggctctaattcctgggcaacattcatcgaacagcctgatattgttgatcgtgtgtttcatatgaagctgcatctcttcatcgatgatatcacaaagaatgaattttttggtccaattactgcagcacaattacctgatccttctgtcgatccaattggttttgatgctgtatctgcatttatgattcatggtccttgtggtgagggacatccatcatgtgcttgcatggttaacggcgaatgctctaagaactatccaaaagaatattgtgagaagacaacaatcttacaaaatggacatgttagatatgctcgaccaaagaatagaatatctaccaaaaagaatggtgttgctgttgataatgcatttgttctcctgcataatgtggatttatgtgtgaagtaccaagcacacataaatgtagagagagttagccgtgatgggatggaaaaatatttattcaagtatttaccaaagtttgaaattcaccacactaacccttctgttgagcgtcttcctgtccatctaccactcggaaacagtgtagtatacaatgaggatgacagcctagaacaagtattgcagaacccatggaatcaaattacaaagctcactgcctggtttgaagctaacaagacctatcctgaggctgtgtgctacacatatgcagagttcccagagcacttcacttggcatgctgatggaaagtattgggattatcgacgtggtactggtaacgtcggaagactagccaatgtggcaaggtcgtactcagagatcagaacaattgaaggccaacagtatccaacattccaggctgcttgccaggctcctggtctcctaggtgatgatcgtgagtggttgtccgctatagttgatgcagcgcattgggctcttccataccagctccatccattggctttatttgaagaacatttttctagaatgggtgaggactacatgcatcgcattgggcatagtatgacataccattctacaccttttacacaacatgttagatcatttgttcttgctgaaattgacaagttgcttagaaattctggatatagcttaccacactttaacttgcctgagcccattcttaccagtgcatgtgcagttggcaatagacttttaacagatgaacaagcttatgatattgataggatatcagtagaagcagctgaacaactcaatcaattgaatctgaatcaaaaacatgtttatgatgttgtccttcaatcagtcaacaattgcattggtcacacattctttgtgcatggctatggtggtaccgggaagacatttctttggaatgctttgcttaatgctgttagagctcaaggaaaaattgctttggctgttgcatcatctagcattgctgcacttcttctgccaggatacttgcttttgccacctgaatcaagaaatatttcatcactggtatcttttgtgtacaatgaatcaagcatttcagatatggttgcttatttctgtgagcgagcaatccttgccccaactaatgacatagctgcagaaatcaactcccacatgatatctcagttgccaacagaacaaatgtcatattatagctcagacatcatagatgatagcacagctaatcgtgctacacttgaggccttttatccagtggagttcctcaacacaatataa

SEQ ID NO: 11708 - DNA, 2612 bp, Oryza sativa
  Clone ID: PAT_MRT4530_17906C.1
atggctgctcaatcacgtaaaaaacgtaaagcatatatgtcagagcgttctagggtattgcgacaacggttggcacattcatcatcttccatatatgataaagatgcatcgtcttctcataccactatccctacaaatggtcattcccgctctgttttctcaccattaaaccttggtccaccaagtcacacatgttgttattgtggcgcattattttggtatgaggagcgcatcgaccgacggcgtcacacaacaagaccgttatacaacaagtgctgcaaaggaggaagtgttatcttgccttcctacaagccacctccagagcctttgcatagtctgctaactgcggtggatagagctaaatcagctcatttctgtgagaatataaggtactacaactctatgtttgcttttacatcaatgggggtgaatgtgattgattctatcaatgatggtcgtggtccatatacattcaagagaagtggccagctctgccatcgtattgggtcgctcctaccaaaaagggataaacgaccagaatatgctcagctgtacatatttgacactcaaaatgagcttatgaatagattgcgtgttggcacctataaaaatagagccttccaacctaacgaagaaattgtagctgctctcatgcaaatgtttgatgcccataacccaattgtcaagttatttagggttgcccgtgataggctttctagggcaggtgcacccgatgaccactattttataagattgtttggatctcctgacaagcatggcgatatatttaatgctccagtagcatcagaggttgttggattagttgttggtgacttaggtacaagtgatattggacgtgacctgatggtagaagacaaggctggcaatctaaggaaagttaaagaagatcactgtaaatttatggcgatgcagtacccaattttatttccttatggagaagatgggtatcatcaaaacattgcatatagacagtgtcgaagatcagcagggattaaacggaagcgtgtcacagagaaacgtggtcttccacatgtccatattattttatggctaaaaaaaactggtgcattgactgctgatgaggttgataagttcatacagcacaattacctgatccttctgtcgatccaattggttttgatgctgtatctgcatttatgattcatggtccttgtggtgagggacatccatcatgtgcttgcatggttaacggcgaatgctctaagaactatccaaaagaatattgtgagaagacaacaatcttacaaaatggacatgttagatatgctcgaccaaagaatagaatatctaccaaaaagaatggtgttgctgttgataatgcatttgttctcctgcataatgtggatttatgtgtgaagtaccaagcacacataaatgtagagagagttagccgtgatgggatggaaaaatatttattcaagtattttaccaaaggttttgattgttcaaaggttggtctccaacgtaaaagagcatccggtgaatcatctacctgtaccaaaggtgttaatgagatccaagattacctagagtgcagatgtatagctcccaatgatgcagcttggcgcttgctccagtttgaaattcaccacactaacccttctgttgagcgtcttcctgtccatctaccactcggaaacagtgtagtatacaatgaggatgacagcctagaacaagtattgcagaacccatggaatcaaattacaaagctcactgcctggtttgaagctaacaagacctatcctgaggctgtgtgctacacatatgcagagttcccagagcacttcacttggcatgctgatggaaagtattgggattatcgacgtggtactgtgaaggtggcaaggtcgtactcagagatcagaacaattgaaggccaacagtatccaacattccaggctgcttgccaggctcctggtctcctaggtgatgatcgtgagtggttgtccgctatagttgatgcagcgcattgggctcttccataccagctccatccattggctttatttgaagaacatttttctagaatgggtgaggactacatgcatcgcattgggcatagtatgacataccattctacaccttttacacaacatgttagatcatttgttcttgctgaaattgacaagttgcttagaaattctggatatagcttaccacactttaacttgcctgagcccattcttaccagtgcatgtgcagttggcaatagacttttaacagatgaacaagcttatgatattgataggatatcagtagaagcagctgaacaactcaatcaattgaatctgaatcaaaaacatgtttatgatgttgtccttcaatcagtcaacaattgcattggtcacacattctttgtgcatggctatggtggtaccgggaagacatttctttggaatgctttgcttaatgctgttagagctcaaggaaaaattgctttggctgttgcatcatctagcattgctgcacttcttctgccaggtggtcgcacaccgcattcccgcttcaaaataccattagatatacaagaacattcactctatgctatcaaaaaaaaaaaactcatctag

SEQ ID NO: 11709 - DNA, 529 bp, Oryza sativa
  Clone ID: PAT_MRT4530_17907C.1
ggaaacaaaaaaccccacccccccgggttaaggggccaaaaacccaaaaaaaaaaaaacccgggccttaagggaaagccaaatccgggccccccccccaaaaagggggcccaaaatttgggccaaaccgggcagggacccccccaaagggggccccccccccccccccaaaaaaaacccggggcttgaaaaccccccaaaccccggtccttggggggccggaaaaagggcccaaaaccaaaggggaagggggggccccgccccaaacccttggggaggggccccttaacccttggaaacccccccccgggggggggggcgcaaatttccgccccaacccccccggggagggggcccccagggcaaacaaaaagtttcccgggctggggaacaaggcccccaacgggtttttggcccccgggaaacaggggctcaaaaccctagaccccccaaagaaaccccccctggggggcccctagccagcccccgccccgccccgggggggggcgccccccccccctcgcgggggg

SEQ ID NO: 11710 - DNA, 762 bp, Oryza sativa
  Clone ID: PAT_MRT4530_17908C.1
atggcccaccacccatccgccctagatctggcggctgcagcagcatggaaggggcggcggccggctgcggcaaagagtagagaaggtgaagaggagaggtggtggcaggccgagccgggcgacgacgacgacgagggagagcgtggtcactgggaaggggtcagcagcagtggcacgggagaggggggcggcattaaacttgcagctcttgggtttgttgtcctcctaagcattggactagctagtgctgcaagagtagaaagatactctagttccgaaggttcaggcacaggaaatggagaggggggaggatatgtgaacggtgggggagttgggtctggaagcggtgccgggtctggtagcagtggtggtaactatggtgcccatgcaagcggtggaggagggggcgaaggtggtggttacagccaatacggtgggtcagggtcaggtagtggatctggttcgggctcaggctctagtgaatatactcaaaatggaggttatggttatgccggttcatccagcgctggtggtagtggtgccggtgctggtgccggacaagctggtggttattggccatccagtagccatggatctggtagtggtatgggctctggttctagtagcgctgctacttactggaaaggaccatatgcaagtgcatatggcaatggcaatggtggcggtaacggccagggccaatacggtggcagtggcgttggtgcaggttctgggtctgggtttggcgatgctagcccttaa

SEQ ID NO: 11711 - DNA, 3315 bp, Oryza sativa
  Clone ID: PAT_MRT4530_17909C.1
atggcggtgatggagaccgtagaaaagatcatctcaactgggatcaacatccacggagcgaccaatctggaagatgatctatcctgcctccgggcatccttgcccaatgctcgcttagtcatcaatcgtggcgagtggggaaggttcaagaacaaggatctcgcggtgcttctcacgcagctcaaggacaccacatatgacaccgaggatcttcttcgcaagttcgatgaccaggtgctgcggcagaagatggaggacactgaccgtagccgagcaggtaaattcttttcttcctctctgtatcgtgcaaaaaacttgatctgtggtagcaaaacaaggataaaggatgctcaagataagcttgacaaggccgtggatgatttagagagagcgcttaagcctctgggtcttaagatggagaaagttcaacacatgccagagacaagttcagtcattggagtgcctcaagtgtttggtcgtgacaaagagcgagatttagtgattgagaagttggcatccaaagcgaagcaactaaaaagagagagtatcagggccaggcctagacttgctcaggccaaattcgtcagcaatgtttctgtcttgccgattgttagcattggtggggtggggaagactaccctggctcagttcatctacaatgatccaagggtggaagctcactttggcaagagaatttgggtctgtatttcggacctcttcaacaagaaaaggataacaaaagagatcattgagtccatcaccaggaaagagtacaaatcatcgaacagtttagacgctcttcaggtggaattgaggaagcaactgaggagacgaaagttccttttagtgcttgatgatatgtggcctaatgccaaggacgaatgggaaacattttttgcaccattgaggtatgggtttgaaggaagcatgatcttagtaactacaagatctccagatgttgctaatcttgtcgctagcaacaactgtaatcctttccgaatcgagggattggatagagatatattttgggagttcttcaagaagtgtgcatttggtaaacagtgccctgagtcatatcctcaattgcatgatattggtcgaagcattgcttctaggttatgcgggtctcctttggctgccaaaactattggacgcctgttgaatatggagctgactgtgcaacattggaagactgttcagaacaaggaactatgggagctgccaaatcgagacaatgatatattaccagcccttcaactgagctacttacatctcccacaagaacttaagagttgctttgcattttgctccatgtttccaaagggttatagcttcgaacgagatgagattgttggcatgtgggtggcacagggcttcgttgcaccagaagggagcatgcgtcttgaagacatagggattaggtatttggatgatttaagaggcaggtttcttcttcaaactgataccaattgccttgatcaaagtagatatgtaatgcatgacttgatccatgatatggcgcagtccatctccgtggacaagtgcttcttgatgcaggatttgagctatcagaaccagaggagaatgccgcatgcagttcgctatatgtcagtcgaggtggacagcgagtccctgagccaaacaagagatattcagtatttgaataaattgcattcacttaagtttggaaccatcctcatgtttgagattacctggtttaatcagctctctaatatcctatttttgagcttaaaaggttgcatgctggtcaggttacctgaaagcattggtgagttgcacagtctccgttatcttgatatatctcgtagccatgtacaagaattgccagaaaaattatggtgcctttactgcttacaagtgcttgatgcaagtagttctagtctggaagttattagtccggatgtcacaaagctaatcaacttgcgtcgtctagcactgccaatgggttgctctccgaaattatcagagataagtgggcttggaaatatgtctcttctacggaacttgatacattttacagttgggatagggaatgggcggaagattagtgagctgaagggcatgaatcagctcagtggaacgctaactatcagttctatctataatgttaagagcaaggaagaggctgttgaggctagactcattgacaagcaataccttcaggcactagttctactgtggcgagatcagcctgtacccagggtgatgaacgatgacaatggtgtggccgaaggatcccctccctggtcctccccttcgactcgccgccgcctgagcggctcgtcggcaaagccggacggccacaaggacggcggcggcgcgacgctcccctcacgaggttgcccagcggcgggggacaccggaggcttctcagcagtggcggatcataggaggtggcggccggacggtcggcgcagcggatccgcccacaccggatgcggatccgcctttcccggcgccaaatctagcctccctgcggtcagatcgggtctgggcgaccccaacgacggcggacctcgtggtgacggtggcaagaggaggcgcacggtcgtcgagcggtggcaggcggcaggaggctggcgcgacggcagggagaggccggcggggtcgtgggcgacggcggcgacggcgacgcttctggggccgacacgatatggcggcgtggcccaggagactcacggcgatgacggcaacagcaggcagctggcgggaggagcagtgccggctggctggccggccggccggcgacacggcccgggggaggggggcgacagaggctgctcgcggaggtggctgcgtggccgagagactcatggcgatggtggcgacagcgggcagccagcgggaggagtagtggctagctggttggccggcggcggtggaggcagcgcacacagaggcgcggcggaggtggccgcggtgcgtggaggcgcagccgaggtggcagtgcgacatgacaaggctttgctggcttggagacggtggccggcgcagcgagaggagaggccggtggaggtgcaaccggtggcagtgcgcggagattggccggtggggggcaccggtgcagtgatgcccatgcgctggcggaagtttagatggcggtggagcaatggtgcatcagtggtagatcggcaggcggtggacggcgggcgaaaacccagcccggccttggccggatcagcaacgatggcgttcaagcgtcactcccctcctgagggcgttgtcgggccatctcaacccctcaagtgtggctgccaggtgaaagctcggtctcggttctctttgagaccctga

SEQ ID NO: 11712 - DNA, 5430 bp, Oryza sativa
  Clone ID: PAT_MRT4530_1790C.1
tcaagagtttgccaactcgcgaccatcaccgtctgcaattttgaatgcgtctggccgcaagacttgtgtgatcgtgtatggtccttcccatttgggtgagagcttgtttcgccctgcttggctttgaacccgtcggaggacgaagtcgccgatcgaaagtatgcgtgctcggatgcgcttctcatggtaacggcggagggcctgttggtagctggctgctcggacggcaactcgttcgcgatgttcctcgagtagattcacatcgtcgtttcgctgctcctcctgatcctcatcggaatacttctgtacttgtgtactttgatgtcgtagctcgcttgggagcatggcctctgagccgtacacgaggaagaagggtgtttctatgccgtttgccctctcgacttgtccgttgctttgagggtgagaaaccgaggcgaagcagatcttgactcccaggccgatacagtaatcctggaaatcggcgctgatgaactgggagccgttgtcggttatgatgcagtgcggcagtccgtatctgcaaaatatccctttgatgaatttgatggcgttgtcggccttgatttcccccgtgggtgtcgctttgatccacttagtgaatttgtcgatcgccacgaataagaacctgtagccgctctgtcctcgtgggaatggcccgagtatgtctagccccccgtttggcgccttcttgtatagatcgttgccgatcatacagtagatttttgcttcacgggttattttctcggcttttgcgtcgtcctcgggcaactcttcgctgttgatgaatttaatcagtggggtgcgccagacgtctgtcgtctctatatcggcaacgacgcattctgcctctgtagcctccgagctgatgtcgggggcgactgggttaccttcgccgctaacctctttcactgatggctttgccaggacgtccagaaaagtgccgggctcgagtggttctcgtacgatcagtcgcttgactctaagtgtagctgcagctcttatcccggctagtagtccttcgtactcggctatgttattggttgccctgaagttgaggtggattgcatgcttgaattgatccccgcaaggtgatgtcaagattaatcctgctcctgctccttggctgttgagtgcgccatcgaacgccattgtccatgtttcgttgtcgattcggttgtctgatttgttattgggcatagtccaatcagctacgaagtcggcgagtacctgggacttgatggctgttcgtggcacaaagtggacatcaaactggcttagctcgactacccatttcgcaatgtgaccgacaacgtctttgtttctcacgacttcaccgagagggaaggaggagacaactatgactctgtgggcttgaaagtagtggcgtagctttctcgatgtcatgattatcgcgtagagaagcttttggatctgtggatatcttgtctttgcgtcgtggagagcttcgctgacgtagtagactggtcgttgtactttttctctctcgacaacaatgacgatgctaacggaatatggtgtggcggcaatatagaggaataattcttcattaggttggggagcaacaagtacaggggggtttgataggtagcgcttgaatgcaatgaatgcctcttcggcttcctgtgtccatacaaatttgtcttgcttcttcagcagagcgaagaaaggttgtcctcgttctcccatcctaacgacgaacctgcttagtgccgccatgcatccggttagcttttgtacttccttgagtcttgtgggcgacttcatgttctcgattgccttgatcttctcggtatttgcttctattcctctgccagagacgagaaaaccgagcagcttgcccgacagtactccgaacgtgcacttctctggattgagcatgaggcgatatcgtcggaggttgtcgaacgtttcccgcagatcgtcaatcagtgagtcgcttgtcttggtcttgacaacaatgtcgtcgacgtaggcctcgacattgtttccaagctggtcgctaagtgcgccctcgaacggagtgatgaatgctttcttctcctcgtcctctttcgccatgctgatttggtggtagccggagtaagcgtcaagaaagctcagtagctcacaaccgactgttgagtccaccagttggtctattcggggaagagggaagtgatccttgggacactccttgttgaggtcggtgaaatcaacacacattctccatttcccgttggccttccgcaccataactggattggctagccactctggatggagtacctctctgatgaaaccatctttgagaagtttgtcgagctcttctcgtatggcttgttttcgatctggtgcaaatctccgtaatttttgttttactggcttggcattgggttgcatcatgagtttgtgctcaatcacctccctggggacccccggcatgtcggacggctgccaggcgaacatgtcggcattgtcgcgaaggaaggtgatgagcgcgagttccaatttctcgtttagtgatgccccaatcttgacggtcttgtcggggttggcactagagagtggaacggtcttgatcgcgccgtccagtttcggcgtcttgtttgttttgctcactttcttgggtggctcagtcgtggcgggtgggctgggcgtgtgctcgaccatgtcgaggctccgcttgtcgcattgtactgccagctttgcgttcccttgaatagtgattgttcccttcggtcccggcatcttgagcacttgatacgcgtagtgagatgcggccatgaacttcgcgagtgcagttctcccaatgatggcattatatgttgtatcgaatttagcgacatcaaaggtgatctgctccgttcggaagttgtatgcttggccgaaagtcacaggcaacgtgatcttgcccaatggtttggacgaagactggggagtgattccaaggaagggttgatcggtgggtgtcaactcgcttcgtgggattcccatcgcgtccaaggcgctggcgaagagaaggttgattaagctgccaccgtcgatgagaacccgtgcaaccttgatattacaaatagtgggttcgaccacgatcggatatcgccctgggatgacagcagtcttagggtggtcctcttctgagaattctatcttctgctcggaccacttcatcttgggtgcagctccctgccacgtcgaacagacttcacgttccactttcttgtattctcgctttgaggagtacgctgtagagcctccgaaaatgtgtgagacgtggagatcggagtctgggtatgctgagtccgattcctgagtagccgccaccgcatccttctcgaccacgcgtactctcttgcctttttccaatgccatgtgcttctcgagcgattccgcttgagctttccttttcccactcttgcgatttttcttcttgcttgactcaggtgtgtccttggctggtttcttctcttctccggtcttcggtttgtcgttcttgtgtctcagtgcgtcatccgcatgagcgcattggtcgacaatttcgaataatctccgagtagtcatgatgcgcctcgttgccaactcctgagtagtatagagatctctgacaccggatttgaaagcgcgaattacagaagcatcggtgatctcggggattgtgttcctgcactcgttaaagcgccgaacatagtccctcaaggattcgcccgggttctgtgttaacgcatgtaggtcgtcttcgatcgcgtggcgcttgtaagttccttggaagttggctacgaactgctgccacaagtctgcccacgaagagatcgagtagggggggagatgcatcagccatgaatgtgcagagcctttcaatgcgcttggcaagtaatttgccaacgcgttgtcgtccgctccggcagcgtagagtaccgtggagtaaacctgaaggaactcttcggggtcggtgctcccatcgtatttctctattgctccaggtcggaatctttcaggccatcggatatctcgaagtgaacgatcgaaagctctacacctagtgctgggggcggtgggttgtcggcgatcatacatccttcgtggatgtctatcattagcatcgccagttggtggctgttctgggtgcgctgcggcagcggcctcttcgaacgcgttgctgaggttggttactgattcctgtagtcgttctgtccaacgtgcgagatcgttgttcagaacgggatcgtagggggtttccctcagtattgcgttgacggctctaatgtgttgggccggagtagtcacttgattctccgcttccgcattgctgcgcgctgacgtgccgacatcgtcgatagccaatacctcacgcggcgtactcgttgtcgatgatccatagtcttcgagcaagtgcaagactgatggttcgtggggattgatgtcgattacccaaacaaatcgatctgaaatcggcgtcgcttcttgttccttgtccttatccctgatggggatgcgtgactgctggaccttaggaggtggcgtcttcatggcgctgagaaagaccttgcagcttgagatgtccgtggacgttgagaaaaacccagctggcttgcaaggatccttctcgggctcggatgtcgtcgacgttccaatctccgctccggcgggagggtccttcgacagggagttgttctgggttgtacccactacgttctcgtttccggccattgatggactagctgagatcggcatcgtgaaccttgagcaccaggtgcgcctacctggcatgccactgtcgacgggggatacccgtagaccggatatagagggtattgggattacaaaaggaatagtggaactcgatgataccaacgagatcgtagtcgagttggtacgactagatcacccggcgacttggctcatgtcaactggtctccaagtaggactcggagacatcggactcttatccgtaaccctgacagtagcccccgacttgagcttaaatgaacttatgtaatcggtcgcgacttctgatgtcggagttgctgtcgttctcgactggtcgatctcggtgtgaggacgcctcgcgcaacggacccagaaatttccggcggccatctctctcctttccttggaattcgcaccgtcggtagtgcgcctattcaaaggagttttgggaatccattttggagtccggctgttgcaagaacattctagcctccgaacgctcttcgtcttctccgcttccacgcaaaccctaattcgctcgcctcggtttcttctccggtgatctccaacggcgatgaaccttgacaagtccacttccaccagcgcgtctttgaagaagttgcaggaggagggcgctctccccggtcgcgggaccatggagagggaaccgggaggtactgaacctaaacccgtcctgggccgcat

SEQ ID NO: 11713 - DNA, 412 bp, Oryza sativa
  Clone ID: PAT_MRT4530_17910C.1
ccccactcgctgcaccacggcgtcgtggttacggataaggcatacctcctatcctacgacttatggaatataccgataaggtataccttcacgtatacgggttgtttctgtatatgttgcgtggaaaccatttcaaattataagaaatatctctacgagtcaagtgatttccaaagtcctactcggaagcttccttggggatcaggatgatcgacagtataaaagggaccccctgggagaggttctagggatcgaattccatcgccaacacacccaccaaagttatgaagccagagtacgtggagccaactcgccgggagatcacgtcgaatccctcgactacgatctcgtcttcgttccaacataccccaatcctctacttatccggtccacgagtatcactcgtcgacaa

SEQ ID NO: 11714 - DNA, 1950 bp, Oryza sativa
  Clone ID: PAT_MRT4530_17911C.1
atggcaaccaagaacggtggttttgttgcgttgctgctgctgctgtcgttcttgctgagctcgccgctgccggcgcgatgcgacgcgccgctccccgtcaatgtctggcccaagccgacgtccatgtcgtgggcggagccccacatggccgtgcgtgtctcgagctcgttccacgtcgtcgccccgtccgggaacgcgcacctcctctcggcggcgcggcgctacgccgcgctgctcctcgccgagcggtaccggcccctcgtgacgccggcggtgaacgtcaccgcgggcggcgccggcgccggcgcggcgggaaggggagccgagctggggtacctgacgctcgccgtgtccgacctgcacgcgccgctgcagcacggcgtggacgagtcgtacgcgctggagatcctccccgccggcgcggcggccacggtgaccgcggccacggcgtggggcgccatgcgcggcctcgagacgttctcgcagctggcgtggtggtgcgggcgggagcgggcggtgctggtggccgccggcgtgcgcgtcgaggaccggccgctgtacccgcaccgcgggctgatgctggacaccgggaggacgtacttccccgtcgccgacatcctccggacgatcgacgccatggcggcgaacaagatgaacgtgttccactggcacatcacggactcccagtcgttccccctcgagctcccctccgagccggcgctcgccgagaagggctcctacggcgacggcatgcgctacaccgtcgacgacgttaagctcattgtcgacttcgccatgaaccgcggcgtccgcgtcgtgccagagatagacacacccggccacacggcgtcgtgggccggagcttaccccgagctggtgtcctgcgccggcgagttctggctgcccgacgcgtctgactggcccagccgacttgccgccgagccgggcgccggccagctcaacccgctggagcccaagacgtaccaggtgatgtccaacgtcatcaacgacgtcacctccctcttcccggacggcttctaccacgccggcgccgacgagccgcctctcgagaagttcgtcggcgcggcgcacccgctgatcgtgtcccggaaccggacggcggtgtactgggaggacgtgctgctggaccaggcggtgaacgtgaccgcgtcggcgatcccgccggagacgacgatcctgcagacgtggaacaacggcggcaacaacacgaggctgatcgtgcgcgccgggtaccgggccatcgtctcgtcggcgtcgttctactacctcgactgcggccacggcgacttcgccggcaacgactccgcctacgacgacccgaggagcgactacggcaccagcggcgggtcgtggtgcggaccgtacaagacgtggcagcgggtgtacgactacgacgtcgcgggcgggctcaccgccgaggaggccaggctggtggtcggcggggaggtggcgatgtggacggagcaggtggacgcggcggtgctcgacggcagggtgtggccgagggcgtcggcgatggcggaggcgctgtggtcgggcaaccgcgacgccaccggccggaagcgctacgccgaggcgaccgaccggctcaccgactggcggcaccggatggtggggcgaggggtccgcgcggagcccatccagccgctctggtgcaggaaccgcccgggaatgtgtaacttggtccggtgaaccacccggcaaccgacccgtatacgtgcgctcaactatcacagcaactgctaccatatcataacgatgtgttggagttggagaaactaaagtgtgagttctggatttttttttttggttggttttatttatttgtcattgtgcgagaggggagaatacttctgctactgctgctgctgctaccaatttatttgtttttttattttgaaaaaaaaaaaaaaaaaaaaaaaaaaaaaa

SEQ ID NO: 11715 - DNA, 486 bp, Oryza sativa
  Clone ID: PAT_MRT4530_17912C.1
acgttcgtaccgagaggtttttattgaaaagtgtttcggaaacatcaggaaagtaacagatatttcttgttttaactttggcgacatcaaaagagaaagactagaaagggaataatatgagaactagaacctgtgtgttgaaagcgtatcagccgacctgggcttacgaatgttatgcccaactatgcaaggaattgcctgaaggttttggcggaatgggaattgctattgcttgtctacttctcgaggtataatggacagatccgagaagctcagactaaacacgaattggggggagaagtgcttatggtgtatatatgggtgaatcgccccgcctgatgagcgtaatcgccccacctatgagttatgagtgacccaattctatcttgaacttcctatttttcaaacaaaatacaacgtttttttatttgaaaataaaaaaagaacaataggagaaaaaaaatatgacagaaaaaaaaaaaaaaa

SEQ ID NO: 11716 - DNA, 476 bp, Oryza sativa
  Clone ID: PAT_MRT4530_17913C.1
aaagggcccggaatcatttttattcccccaccctttttattcctcccccccaaaaaaacggacccagggaagtttttttgcccgggtcaggcaagcaaagcacccccccccgggggggggggaagggctttaaacaaaaccctaatcaacccccagagctaaaacaaacagggggatcaaggcaaaccccgaaaaaaaaacccgggggaaaggccaaatttttttttggcccccaactcctcgggggaaccaccacgggtgggggatttttttttaccctggtttattcgctaaggggtccaaaatctccccggcgtcctttgaccccagaaaaaattccgggggccccccccccccccccccctttttgatcggccccgcaatggggttgggccggccaagcccctttagggccaggggcccccctttttgggcggaaaaataatgggtccaaacggggggcccctttttggggg

SEQ ID NO: 11717 - DNA, 308 bp, Oryza sativa
  unsure (1)..(308): unsure at all n locations
  Clone ID: PAT_MRT4530_17914C.1
cggaaaggtaaaggcccanacatagttgggccgggccgggccgggcctagtttatagttggtccgggccgggccaagttntgttgatgattggtcctctcggctntntagcatganaaaattnncatttagccattntcggattggggtttcgctanaatgccatccccgaacgtggcttcgttataatgccatnttcaaacgtccccatcttgccncattgccatttcatccaatttcggttatttgcaaatgttatccccttaaaaaaaaaaaaaaaaaaaaaaaaaaaaaaaaaaaaaaaaaaaa

SEQ ID NO: 11718 - DNA, 373 bp, Oryza sativa
  unsure (1)..(373): unsure at all n locations
  Clone ID: PAT_MRT4530_17915C.1
ccttccgacgcgggggnggaagccgaccagcccgggcaggaggcgccagccacgccgaccgcccaggccgaggcgcaccgcgcagggggagaaggggaggagaagacgccgagcgacggagggccggagcccggcggcgncgagccggnggggaacgagaacgacccccaccccgncgaccncgcccgccgcgccggcaccgagcacaacaagaaggccaaccccccgccggaagccgagaagnccgggagcgcgaagcaacaagccgccgccggcacccggaaccaccccacaaccgaggcgaaggaaggggacgccaagaagccccacgaagccaaggcccgggagaaaccacggacggaccccaaggagc

SEQ ID NO: 11719 - DNA, 579 bp, Oryza sativa
  Clone ID: PAT_MRT4530_17916C.1
atggcgtccatgatgctgtggatcttcccgtgggccgcttgcgctgcccgcacgagccgcgactccgggaacaggtcgaccaggttgaagccggcggcgagcttcgccaccttgcccagctcctccaggtactcctcctgccgcgggcaccggccgcgcgccgacggcggtcatcatggccgcgacatgctcgccgccgacgacgttcacgagcggccacgccggggacgcggcgacggcgcgcacgagcctcgccggctcggcctcgcggacgcggcggaaggagcgggcgcgccttgggctgagcaactcgacggcgcaggcagggcgtggtgcggcagcgagccgagcagtcagtgcatgctgccgatgaccgggagtggccatgggaccggagggaggataatcacctgtatgagggagacggccgtgtccgctgctgccgtggcgagctggctggcctcacgctgcgcctgcgcctacgccgacgaggcagcagctgagaacggcactggtgtcctgtcctccgccgtcgccacaatgctacagctacaaccatgcagcacctgctctgcctag

SEQ ID NO: 11720 - DNA, 1414 bp, Oryza sativa
  Clone ID: PAT_MRT4530_17917C.1
gcagagggagctagctagccgcgtgccttctccctgtcggtcctgtagccgcgccgatcgctggacgtatccgatccggttacgcccgcgggatgccgattacgattatatatgagcccaaaacaaaccctacctctctggctctcgctccatagttcatcgacaggtagaggagaagtcctgtggacggaatctgttcgcggcgccgcgtgtcgcgcaggtcgcgtcggcctacactgcgattaattcaacgctgaaaggcgagatgaattccaagaaaagcaagtgcacgtgtactctaactgatgatcttgtagtcgatatcctatctcggttgcctttgaagtcagtttgctgcttcaagtgtgtctgcaagtcctgggcatcactcttctcagatcaatacttttgcacgaagctgcccagaaggcctgcaggtcttttgtaccaagacagtaataacagttcgatccagattgcaaagttaccctcaggcaacagtgaaatcggcacatctcttagctttatgccacaccatgagaatctaaaacttgtagattgctccaatggtttaatcctttttacacatgggagtaaatctgattcacccgattcttctcacttcattgtgtgcaacccagcaacacaagagtggattgcacttcctgacacatgccctagagtaaatggatctgattatattgctatgttggccttcaatccatcatcgtcctgtcatttttttgtctttaacttccagaagaggagatccccacactcaggggtttttgtcatcactgaagttgagatattttcctctgaggatttcacttggattgccgatgatgcatttgaaactgaaattatgatgatttcaatgccacatgtcctacttcatggtgttctgtatctacggactgtagaacatagtgtttttgcaattgaaacaccacacatgtataaaccatggatacatcgttggacctttgagcttcctggggattcatgtcccatgaacaactatatatggggctgcctcggcgaatcgtccggcatcttacactatatgcagccaaactatgatggctgctggcttaatgtctggaggcttgaaagtcgtcatcaacagtggagcatgacgcactctcttagcatgatcgatgcctttggaaggggtacccttgttcatggtgatccctttagtgttgattggtctgcagattatggcatgctgtcttttgacctcgagagagagattgttttccttcatgaccgtgtatcaagcaaagtgctttcatacagcatacgtactggaaaactctgtgagatgggagatctccctagaaattctttgtattatgttccatactggcgcaagtttccagttgtagaggaagaccaatactggttatga

SEQ ID NO: 11721 - DNA, 118 bp, Oryza sativa
  Clone ID: PAT_MRT4530_17918C.1
gtagaagcacaagaagttacgtacaactgcgggggattggttggcattacatcccagaccgggcaaatcggcaaattgatacagcgttgtgaacgtgggagggcgaacatcaggcagg

SEQ ID NO: 11722 - DNA, 636 bp, Oryza sativa
  Clone ID: PAT_MRT4530_17919C.1
atggcggaggagggaaaggggaggcgggcggcgggcgatgggggaggggagaggcgcgacaataaggacggcgcggtgacgggggacggggggcgcgacgcggcgacggggatggcgagaggcaccgcagctggtggaggagatcgagggcgggagctcaagaagtgtgacggcggcggctacagctcgagaagcgtggtggcagccgccgctccgcccactttgccacgtcgcctgccgccgtcccccctctgcggcctactccggccgctccgctccgcccactgccatgctcgcccgccgtcggtcccccctctgacgtgcttgcccaccaccgctctcccctctgcagcgctcgcccctctccgcagccgcgcttgcccgtcgacgccgccgttccacctacctctggccgcgcgccgctgccgccaccacgatcccacgccagacgcggaaggccagggtctcctcatcagtgtccttgtcgaagtatatccccacccccgccacttaggaggacgccggggtggctggggacgagagctggagcacgacgcggagcaagaggccgagggaggtgcacgtccaggacagcgcagcgagaccgaggtgggtctcatagatggaggtcgctag

SEQ ID NO: 11723 - DNA, 5163 bp, Oryza sativa
  Clone ID: PAT_MRT4530_1791C.1
atggatttggacctgctaccacgtgatacaagtaaagcagtagtcgctgccgcagccacacccaatgttgggcatactgccgtatccgccgccgtgctgggtgctgcccctgcggtcgtcgcattgggtgcagcccctgcggtcgtcgggttgggtgctggctcctctcgcaagtccaatgcaaatgcccttcgcaggcctcctcctttgaaaaggaccacatccaagccgaaaagccatcttgcagctgttggagctccttctgcaccgactactctaaacacgtcatcttttgccggcggccttcgtctattaaaatccatgggattcacatcgaagtcaactgcgggtagtgcgaatagaagccagcaagactcgcaatcacttccacctcacgatgagagtgttaatgattctcagccaatacaaggtgatgatgatgaagatgaggctgaggaggaggatgtggactttggcaccaagaggaagcttacttctatcgtttggaaggatttcaagaaagtaaaaatctgtggtaaagtcaaggctcaatgccttcattgccacaagcggcttggagggaaaagcagtaatggaacaagacatctccatgaccatttgaaaatttgcacattgaaaaagatcaagatggcgggacaaaacaagacacttgcacagtcttctttaaggttcaattcccaggagggaggaaaaatatctgtggagaagtacacatttgatccacaaatagctaggagagagcttgctgccatgattgtactacatgagtatcctttatctattgttgatcatattggatttcaaaggaaggacattatggactattacatggaagaaaataagaaagccctagcctacatggctggaactaagtcaagagtggctattactacagacttgtggacatctgataaccaaaaaagagggtacatggctgtcacagcccatttcattgatgattcttggacacttagaagcattatcatgaggttcatatatgtgcctgctccacacacaactgaagttatatgtgaacaactttatgaagcattggtggaatggaatcttgatgagaagatctcaaccttgactcttgataattgtaccacgaatgacaaggatggtatagaggtgataaaatattcaattgcaaaaatccgtgaaagtgttgctttttggacagccacgcctaagagagtagagaaatttgatgaaattgctaagcatgttaaagttaaaatggatcacaagttaggccttgattgcaaaactaggtggagttccacctacaagatgcttagcattgctttaccttatgcacatgcttttgatcgtgcaaaacatgttgagaagctctttgattgtgcccctagtaaagatgaatgtgcttttgctgtagaggtagttaataggctcaagttgttcaatgatatcacagaagtgttctctggaactaattatgtgactgccaatgtccaactcttgaaaatttgtggggctaaagagcaaattaggcagtgggctgtgtcagggttacgggtaaggtataccctctacccttcgatatacgtcacgtatcgatatggtatgttcacgcgtatacggacgttttcggcatacgttaaggaaattcatcatggagttcacagatggaaggagtcctactcggtcagaactgggtcgtcattgtgtcgtgttcggtccagtctctccgagtccaactgggagacagatcctcgtaccagcgtaccccaataccctctatatccggtctacgggtattccccgtcgacagtggcgtgccaggtaggtggacttggtgctcaaggttctactactatgacatccacctttgtcgacaacagtgtcaacaccaacctcaaccaaggagttgctacttcaacaacactggtgtggactcaggtcggcgaaatcgtctttccggtttacaccacagtgccgatctcagctggtccgccaatggccggaaacgagaatgcagtggctacaacccagggcgactccatgtcgaaggatcctcccgccgaagcggagataggaacgtcgacaacatccgagcccgagaaggatcctagtgcggccaagccttgtctttccgacaggaatcacgagccgacgaggattacttccgaggtgacaaggtcctggtgtcctatccacaaaaccaggaaacacaccctgcaagcctgctgggtctttctcaacgtccatgctgaaattcgtgcctgcaaagagcgtggaattcagcgtacctctccaactcgtgatgtctattgtccaattcacaagacaaagaatcacaacctctcgagctgcaaggtctttctcagcgccatgaagacgccaccttctaaggtccagcagtcacgcatccccatcagggatgaacacaaggaacaaggagcgacgctgatttcagatcgattcgttggggtaatcgacatagatccccacgaaccatcagtcttgcacctgctcgaagactatggatcatcgacaacgagtacgccgcgtgaggtattggctatcgacgatgtcggcacatcagcgcgcaccaatgcggaagcggaaaatcaagcgactacactggcccagcacatcagagccgtcaacgcaatactgagggaaaccccctacgatcccattctgaacgacgatctcgcacgatggacagaacgactacgggaatcagtgaccaacctcagcaacgcgttcaaagaagccgctgctgcagtgcacccagaacagccaccaactggcgatgctaatggtgaagatcctgaacaccgggaattgcctcatcgagccaccccttcacctcgcggcaccggcgatctccgcgatcacctgaatggccgccgagaggcgcgacgcacaagtgacaacgagaaccgttctcaacatcgcatctcttcacgacgtcacgataacgaagatcgaggaggccgttcaagcgaagaccgaggccatgataaccgccacaaccgctgcgatcatgacgatcacgaacggcgggtgctgggcgatactggtcgaggacgtcgccataatgacgacgatgatggagatcggcgccgagacaacaacggcgacgacaacaaggttctcgagaacccggccgacgtcctcgtaaccgcacgccggaaccgagcgacccatcgtcatcgtcatcatcttcctcatcttcatcatcagatagacatccacgaagggcacttgtggcagcagttcgtagccaacttccaaggaacttacaagcgccacgcgatcgaagacgacctacatgcgttgacacagaacccgggtgaatccttgagggattatgttcggcgctttaacgagtgcagaaacacaatccccgagatcaccgacgcttctgtaattcgcgctttcaaatccagtgtcagagatcgctatactactcaagagttggcaacgaggcgcgtcacgactactcggagattattcgaaattgtcgatcgatgcgctcatgcggatgacgcactgagacgcaagaacgacaaaccgaagactggaggagagaagaaaccagccaaggatgcacctgagtcaagcaagaagaaaattcgcaagagtaggaaaaggaaagctcaatcggaagttctcgcaacagaatacgcggaccctcccaagcgcccagacccacaaggcagcgatacgaagaaagcatggtgccctatacacaagtcggacagacactctctagaagattgcctcgtcttcaaaaagtcgctcgcaaaacacatgacatcggaaaaaggcaagcgagtacacgtggttgagaaggatgctgaggcgcctactcaggaatcggactcagcatacccagattccgatcttcatgtctcacacatctttggaggttccacggcatactcctcaaagcgagaatacaagaaagtggaacgtgaagtctgttcgacgtggcagggggctgcgcccaagatgaagtggtccgagcagaagatagaattctcagaagaggaccaccccaagattgctgtcatcccagggcaatatctgatcgtagtcgaacccactattcataatatcaaggtcgcacgagtcctgatcgacggcggtagctcaatcaaccttctcttcgccagcgccttggacgcgatggggatcccacgaaacgagttgacacccaccgatcaacccttccatggaattactcctcagtcatcgtccaaaccattgggcaaaattacgttgcctgtgactttcggccaagcaaactacttccgaacggaacagatcacctttgatgtcgctgaatttgatacagcatacaatgccatcattgggagaacttcactcgcgaagttcatggccgcatctcactacgcgtatcaagtgctcaagatgccaggaccgaagggaacaatcactattcaagggaacgctaagctggcagtacaatgcgacaagtggagcctcgacatggtcgagcacacgcccagcctacccgccacagctgagccacccaagaaaccgtccgacatgccgggggtacccagggaggtgattgagcacaaactcatggtgcgacccgatgccaagccaataaagcaaaaactgcggagatttgcaccatatcgaaaacaagccatacgagaagagctcgacaagcttctcaaagccggtttcatcagagaggcgtgtcccaaggatcactttcctcttcctcgaatagaccaactggtggactcaacagccggttgcgagttgttgagcttcctcgacgcttactccggttaccaccaaataagcatggcaaaagaggacgaggataagacagcattcatcacgccgttcggggtattctgctacgttaagatgccattcggactaataaccacaggaaacactttccagcgcacggtccaaggtgcacttagtgaccagctcggaaacaatgtcgaggcttacgtcgatgacattgttgtcaagaccaagacaagcgactcattgattgacgatctgcgggaaacgttcgacaacctccgacgatatcgccttatgctcaatccagagaagtgcacgttcggagtaccatcgggcaagtgtcacaccttgaaaattcaaaatttataa

SEQ ID NO: 11724 - DNA, 370 bp, Oryza sativa
  Clone ID: PAT_MRT4530_17920C.1
gccacgaatgggctaacgcatgtactcgctgccacgctgacgcgcggtggagaagcaccactgcgtgggccacggagcaccctgaggtgccgtggacgagctactccgacatgactggtgccggcaggatggcgctgtctacgacagctgacgcaggtgctactggctcaaccacatggctggatgcatatacagcgagctggtgctcaacgatgtttggcaccacatggacgaagagttacctgactgacggaaatgggacttgtagctcgcagaagatatactgccggcgttctacgacttggacatgcccaacggactatgtggagactgctactggtttgtgagatctgactactaactaggctac

SEQ ID NO: 11725 - DNA, 410 bp, Oryza sativa
  unsure (1)..(410): unsure at all n locations
  Clone ID: PAT_MRT4530_17921C.1
gaaaggctgaaccgacgagaacaattccnactttaccgactgtatctctgcccaaaaaancccatgaagnctgtantccctgctccaaaaattcccattgagggtgatatagtgctctgttgcatccttncagaaatcacaggttgcgagcttctctctcagaaggactgtcaagttgccaggtttggactgcaacacctgaacaactgactcttggagatagattactgaacaactgaactctgcttgtgaatacttgtgtagtttctgatttgtttaggtctgaaagcttttgcncaacctaattgtgtagaaaagtgcatatgcggtgcaatttaggtaaccaaagttcagacgaagccatataaagcaaggtgacacataaagtgctcttgctgttttacttttaa

SEQ ID NO: 11726 - DNA, 972 bp, Oryza sativa
  Clone ID: PAT_MRT4530_17922C.1
ctaagagcaagaaaaaaaatcagtagattaatttgttatatttattatgagctcaatatatatactgtttaagtatgtacaatgcagtgtgttgctactgaactttatcagggtagtaaagtagatctttgtggactgatgaactgaacctatctctgcctatttggagtgtttcataaagggaacactccaaactctgaaatatcttcctccactgcagggtagtcactgaagttaactggactacttcagatcctttaaccgatggttaatcttggtcagaacgacagatttcttgttcaaactgaggttagattatatccacagcttcttggagcacaacaataacacataacctagaggttcctcaactaagatctcagttaagttgtggatgctcccttgctagtttatactcagctggtaaaaaagaattgaagacactagcctctaatgtttaagagaagaatcatcttctataggcgcctccgatgctggagacgaaaaagaatcataagcagaggctctggcatccatcagcattgatattacttcacgcatgctaggcctatctagtggcgactcgctggtgcagaacaatgcaatcttcagaaccagtgaaatttcttccagaaccctccttgagttcagattcagcctgctgtcaaaaatttcagaatttgttgtcgaactgtttgtcatccgcctcactagattgacaagatcccctccttgctcaagaggttgaatcggagattgtcccgtcactagctccaacaagactaccccgaagctataaatgtcacatttttcagtcaccttcatggtaaaagcatactctggtgcaatgtagccatatgaaccggcaatagcagacattgttctggagttggaaatatcaatcagttttgccaagccaaagtcccctacatgagcctccatcatttccgtacgcgtgggcggacgcgtggg

SEQ ID NO: 11727 - DNA, 472 bp, Oryza sativa
  unsure (1)..(472): unsure at all n locations
  Clone ID: PAT_MRT4530_17923C.1
cggctacggcntcanctggtgccggcttttggaggtgcaaccccaggnaaagtgccttcancagtggtgnatttggaaccttttggtggtaatccaagggtctgccttctcggcatttgctgggaagtggctctgctggatctggaggacccccagcgaatcttttgacacagatgagaaaataacagagttgtttccaggtatcctagttcttcattcctttcggctgcagtggcccttatgcatgcaccaaaaattgttcttcgtgcattagctgtagctattgtggaactcccagcacctggtaagttcaacctcgatatttgtacatcgaacacagtggctaatatggaactgactgacgaacatttttggaccccctatttctttcaacaagagatagatgagcagtgcgcatgcatgatcagaattcnaagnnnannnnnatacacggtaaaaaaaaaaaaaaaaa

SEQ ID NO: 11728 - DNA, 237 bp, Oryza sativa
  Clone ID: PAT_MRT4530_17924C.1
atgctagactttgcactgcacgttgaccggtggatcaagtggaagttatacacaacctcaaagcggtgctgctcttggcatggtgagagtggaaatgtagaggaagtggaggagaccgcgtccccttggattgaatgtgagggcgggaaaggcaaggcgcagattcagcagcaaggtggttgctggccaaaggtcgaaggaggagttgataggcaacgagaggacgagagggggtga

SEQ ID NO: 11729 - DNA, 543 bp, Oryza sativa
  Clone ID: PAT_MRT4530_17925C.1
atgggaagcgtcggcttggcggctgccttcgtgctccgcccccccccccccggcgccgacgagcgcgccgcctcgccggaccgccgacgctgtagcacgcggcttggcgtcgccctcgggcgcgccccccagccagctgaggtggagccgctgcggcgctcgccgccgcacgcgcgtgccgtctcgccggaccgcagtcgcaacatcgccgccgattcgctcactcgctcgccggacgccgaatcgggaagagaaggggacaagaatgagctagggtgggtgacggtagtgaagcccctcgccgatcacatgtgcatgccaagtcgcctacggaaaccaccacaatcaggggcgaagctacatgcagctatgagggttcctaggcacctggcttcgccactgaccacaatctgcgaacatggtgacgcttctggtgtagcagcatccaccctccatgagactgctctagtcacgcatgtgctggtgccgcccgtcatctcctatggcttggttcaaccaaaacttcgtccttgcagccaaaga

SEQ ID NO: 11730 - DNA, 1737 bp, Oryza sativa
  Clone ID: PAT_MRT4530_17926C.1
atgggggcgggggcgctgggggtggtggcgatggtggcggcggcggtggtggtggcgatggcgggggcgaactccgagggcgacgcgctgtcggcgctgcggcggagcctcagggaccccggcggggtgctgcagagctgggaccccacgctcgtcaacccctgcacctggttccacgtcacctgcgaccgcgacaaccgcgtcacgcgccttgatgtttcaagcaatgatctgtgtggaacaattcctacatcaggaccatttgagcacattcccctaagcaaaatcccggcgacgcgaaccctatcagcccgtgaacaaccaaccgcctcgagaagccacatttcgtcgaggcgcgggggcggcgcgctgttcgccttgctggggggatcggggcggcttctcggctgcggcggtggcggtgctttccccttcaaccttcgcggctgcgcgcggcgaccggagcgcgggcgcggcgcgcctcgtcgccccccgttcgtggcgctgttagaggaggattcattggtgcggcactgcggcattacgacgaacgtctcgagcgcgcctcgtcgcccggttaggattctttggggcatttcgacgaacgtctcgctcgcgcctcgtcgcctgttcgtggcgctgctaaagggcacgaggattctgcagtgcgacatttcagcgaacaccttgcgcgcacctctggcgccttccagggacacactaatagatgcatacaagagtaagcttgatgatggaaagatttcagaacaggaacctcctaactgtttccttactgagactgactatattgatgctaagatattgaggattgattctgaaattgagtacatgaagaaaatgttgtcagaagtctgtgcatttgattaccgtcctgccatcatgcctattttgaaggcctacatacgggataagttgagaaaggcttcctcttgtggtgtctttgatcaagatgatagatatgcagaatataacaagaatttggactctgtcaatcaatttcagatggaccagcaagctgggagaaatcaaaattttgttgatgaaggcaacagttctaggaccaaggtcgagaaagcacggtgctttgtttcagatcatcaagcctctattatagaacaaacgggaacatgcacaatatcagaggaaccaagcgctcagattgacatcagctgcacctactgtggagagatagttgaggaaaattcaacaattgtggagaaagaggaggagatagttgaggaaaattcaacaagtgtggagaaagaggagtgggaagtggtcatggaggctatgaagaggttggtggcatctctgcctccagagatggttcagttgccagggactatgtcagaagatccagcaagcaagattgcctttcatataatacgtgagttatcttttcgccaggctattaaaagtgtgaatgggcaaagaatggacaccaaggctgtggatactggtccaggtgctcttggaattgccaagccagcatcagacgaaaaggtcaatgcagcatcagacaaaaagggcaattctggaaggcccaagaggaggatgcttaagagcttgatatgggctctgctctcatcatttgctagccacctgtcaatgctactgctatccagatacttgtttggagctttgagaagggcctgcgcatgggagctccagaactacaaagccttagtcaacatgaagagaagaaaggatgagtag

SEQ ID NO: 11731 - DNA, 1140 bp, Oryza sativa
  Clone ID: PAT_MRT4530_17927C.1
aaagcttttgccgagtttagttccaaactttttcttcaaattttcaacttttccatcacatcaaaactttcctacacacacaaacttccaacttttccatcacatcattccaatttcaaccaaacttctaattttggcgtgaactaaacacaaccaaactagtgcttttaccatgccttaggtactaccatgccagaatgactattattgcttattgtcgtttgcaaggtgggtgacggtagtgaagcccctcgccgatcacatgtgcatgccaagtcgcctacggaaaccaccacaatcaggggcgaagctacatgcagctatgagggttcctaggcacctgggtaagagaaaagttttagctatggttaccccatctccaccatatatgcacccccctcatcccaacaatgtgtacccccaagcagaccatcaggccgagcaaaggtaacaaggccaacagagaagcgcacagccatgaggattttcttgtggtgcagcatgtttagttgcatagtttgccctgcatatcacgataatttcctacgtaaagttaagacggaatgcacttttttttccttgagatgctgatgtttgacgagtagttctccaaatcaggccacctagtgacgttgattttaatcttaacttcttcaggacactgcgctgataagtatcgtcattgggaattcccattttggcaagtagttttataatttaccgctaagttttcgttcttatatcactcgttcatgttaatgtagatactgaaatcaatggttttactattgtttaccatagtgttctttgataaaacatgataggtcgtacgtatatcattttcgaacatggtagtatattgctactatagtggtgcaccaccctctgttttgctctagcttcgccactgaccacaatctgcgaacatggtgacgcttctggtgtagcagcatccaccctccatgagactgctctagtcacgcatgtgctggtgccgcccgtcatctcctatggcttggttcaaccaaaacttcgtccttgcagccaaagatgacgaaatctctatcttcatctttaaaagtagtgctctggtgttatgccactccgtacaacaaaatataaaaatatcattttttttct

SEQ ID NO: 11732 - DNA, 1265 bp, Oryza sativa
  unsure (1)..(1265): unsure at all n locations
  Clone ID: PAT_MRT4530_17928C.1
atggccaagcccaagacctctcctctccaccgtgtcatcggcgccgcccgctgggacgccgagcgccccctcggccgcctcctcatcctcgcccacgccgccttcctcgacgccggcttcgtgcccgccgccgccgccgccgacgacaactccatccggcttccgaggaaggtgggcaggacggcctcctcgctcccgctccggtacgccgcgccgcagctgctgcactggccggacgacgccgccgccgtccagctgaggctgtgcgcgcacgggcgccacctcgtcttgtacgtgtccatggctagatgctccatgttcagggagtggttggacacgtactgggtgtgcctcgacgcgctcgccgccgcggcgctcctcggcggcgcgctggacgacacggcgcgcgcgctgcggcgcgacgcgcgcctggccgcgctctggggcgcgctcgccgacaggctgtgccggcgcgtcctcgtcgacgtgtgcgccaggaacggcgtgacgctggagcccaccttcatgtcgctccccgacgacgtcaaggcggccatcctggcgaggctccccgacggcgacgacctcgcgagggccgagtgcacctgcgccgggctccggcgcctcgtcgcggaccgcgaccgcgacgccgcgctctggaagccgaggtacgagaagctgcctttcctgctgcagctcatcggaggcggcgacgacgacgacggcgagccgacgacggaggtgagctggaagaagaagtatgtggcggcgaggctgtggcctttcggagagctctttgcgtccatgagagagacacggaggctaccgatttatgcaccattgttggacttggacttcgattcattcacacgcttttgggtgttcgatgataagccgtcgccgttgccggaggagatcactgtccctcgtcatcgtcgccgccgtcggaggtggagagcgatgccaagggacgccggccatggccttgcggcgcggggacatggcggcgacaagaagccgcggcatggcgccggcgcggttcactcgccgtcttcccggttccgatggaagcaccggtgatcnccggcgatcgacgtgctttggtttcgctgttgcagagcctttttggcttagttgtttatggatttcttttcgtttgctttgtaaatgtgctgagaatgagatcatcgtctgaaactgaaaatggttaagcctaatcacaaaaaaaaaaaaaaaaaaaaaaaaaaaaaaaaaaaaaaaaaaaa

SEQ ID NO: 11733 - DNA, 509 bp, Oryza sativa
  Clone ID: PAT_MRT4530_17929C.1
gggtgtttttttttttttttttttttttttttttttttttttttttttattttttttattttttttttttttttttttttttttgtttttttttttttttttttttttttttttttttaaaaatggaagagataattttttttttttttttttcgggggggggggcacatgtcaaaaccaaggatcccggggctttttttttcccttccgacccccaatttggggaaaattaaaaccaaaacccccccaggggggggaaggctttggggggccctttgggccccgggggggatcccctttgtggggggggggtaaaaacccaacagggtttgggcttggcccaatttccgggcaatgggaaaattgccaaactgggggggggggtcctggggccctttggcctggacaactttaattccctggttggggaattggtgccccccccccctgggctttgggagaatttggggttttttttttgaaaacccaattggggcccgggggggtcc

SEQ ID NO: 11734 - DNA, 3009 bp, Oryza sativa
  Clone ID: PAT_MRT4530_1792C.1
gctcgtggcttctcgcgccgcgccgctccccctcctccatccgcgaggcgaaaccctagccgaggacctcctccccttccgcgccagccatggcggccgccgacgtggcgtacgcgccgccgatgaagtccggcaagatcggcttcgagagctcgcaggaggtgcagcacaggatccgcatcaccctctcctccaagagcgtcaagaacctcgagaaagtctgcggtgatctggtgaagggagccaaggacaagagcttgaaggtgaagggccccgtgcggatgcccaccaaggtgctccacatcaccaccaggaagtctccttgtggagaaggtaccaacacctgggatcggtttgagatgcgggtgcacaaaagggtgattgatcttgtcagctctgcagatgttgtcaagcagatcacctcaatcaccattgagccaggtgtggaggttgaagtgaccatcagcgaccagtaaaatgctgctatccaacaggtggagaaattcggtgaacagggtagggtatttcagaaagtttttagcatgagaacactggtggaacagagtttttgttcatctataggctctcggcggttaattccgaccatctgttatctaagctatcataaatcttgtgactcatgtctgttccaacatatgctataaatgaatgactcgctaaagatctacaaaaaatagataccaaaaaaaaaaaaaaatgaaaaaaaaaaaaaaaaaattggtccctgggcagtctttgctgcagggcatgaggctgagagcaaatacctccaacacaaattggactgagagtaagttgtatatgactgttctttcagatggtttatatggttacgttgaatccacaccgcctcaactctactatgagcagacaacaaacaagagaggaaaatatccgacaagggttaccttcatgaatggcagcctcagcatctttatacgtaccacccaggcaggaaagcctgaagccattattgcactgccagaagcaaagtccacccaatacataaggttagagtctgatggacacttgaggttgtatgagtggtttgatgcaggatcaaattggaccatggtatctgatgtaatccagaaattccctgatgattgtgctttcccaacagtgtgtggggattacgggatatgcacaagtggccaatgcatctgtcctcttcaggctaattctagttcaagttacttccatccagttgatgagcggaaggctaatcttggttgtgcaccagtgactccaatatcttgtcaagaaatgcaataccatcaattcttgagtcttacggatgtttcttactttgatgaaggccaaattattgccaatgcaaaaaacagagatgattgcaaggaagcctgcttgaagaattgctcctgcagagctgtgatgttcaggtattatgggcagaatgattctgatggagaatgccagtcagtgacagaggtcttctccttgcaatcaatacaacctgaaattgttcattacaactcttctgcttacctcaaagtgcaacttactccctcctcagcagcccctacacaaaactcctcttctgcacctacacagacctcctcttttgcccttacacaaaacaaaagtaacaaaatgaaggcaattttaggttctacacttgcagcaagtattactcttgttttggttgctattattgttgtctacgtacgaaggaggagaaaatatcaagagacagatgaagagttagattttgatatattgcctggaatgcccctgaggttatcacttgaaaaattgagagaatgcactgaagacttcagtaaaaagataggtgaaggtggatttggatcagtatttgaagggaaattaagtgaagagagagttgcagtgaaacgtctagaaagtgctagacaaggaaagaaagaattcttggcagaggtcgagactattggcagcattgagcatatcaatcttgtcaggatgatcggattttgtgcagagaagtcaaataggcttctggtatatgaatatatgccaggagggtcacttgataagtggatatattaccgccataacaacgccccacttgattggagcacaaggtgtaggatcattctggatattgccaagggtttatgttatcttcatgaggaatgcaggcgaaaaattgttcatttggatatcaaaccacagaatattctcttagatgagaacttcaatgccaaattggcggattttggactttccaagctaatagatagagatcatagcaaggtaatgactgtgatgagaggcacacctggatatctggcacctgaatggttaacatcacaaatcactgaaaaagttgatgtgtacagctttggcgttgttcttatggagataataagtggaagaaaaaatattgatatctctcagccagaggaagctgttcagctcatcaatttattacgagaaaaggctcaaaataatcagttgattgatatgattgataagcacagtagtgacatggtctcataccaggaggaagtgattcaaatgatgaagcttgcaatgtggtgcttgcagaatgatagtggccgaaggccttctatgtcaacagttgtcaaggtattggaaggtgtaatgagggtggaaaattgcctagattacagctttttcaatgcaaattcagtaatatctgttcaagggaacccatccacatattcagctccaccccatgcatcaatattatctggtggtaggtatggactgtggatctcgcggccggcgacggcgcccagaaccgaacgagatggatttggtgataccttgggtttttgccagggtggggattgacgccgaggaggagacgttgagtggaagtaggtcgccggagacgaacgccgttctcgctgcggccatcatcgtggtggtgctttcgatcgcggctcggctgccggccgctgccgccgcggcgaaagggtgaatggaaattgggaagttttttttttttttcccggccgg

SEQ ID NO: 11735 - DNA, 372 bp, Oryza sativa
  Clone ID: PAT_MRT4530_17930C.1
atggcgcgacgggagaccgattcgggcgagctaaagcatctacgcgactccgagaatccgttgctagcgtcggattgggcggagctacgccgagcgaggccggcgacgagcgggcgctacggagcacgggcggcgacggcggcgagcacacagcgagcagcggcaacggcgcggcagaggctgacggcggcggcggccaggcggtcggccatcacggcgtgcgcgcgcgggaagcaacgggcggcgcggcgatttgggcagcgcggctcgggcacgcggcaaggcagcggggccgggcagcgcagacggcgcaggcgcggcacgggcggcgaccacgcgggcgcgggaattgggcatagaggggtgccgtag

SEQ ID NO: 11736 - DNA, 215 bp, Oryza sativa
  Clone ID: PAT_MRT4530_17931C.1
ggggttttattggtggtttacttgggttttgtttatggtgatgaggactgaatgatggtattgtaagacttttcggagacagaaagatggtactgaagaaaggtgtaggagttttgataggcaaaatgggcgggcaaagaacagatggtgcagggacgaaggaaggagctaagggcgggcgaaggcaaatgtgagaagggacgcatggggaagag

SEQ ID NO: 11737 - DNA, 402 bp, Oryza sativa
  Clone ID: PAT_MRT4530_17932C.1
aaattataaatttttttataaaatacattatttattactaatagcacatacaacatattaacacattttcacaatatttactgtcattttacttgttaaaatatttaacattaagactcttagtttaatgattgtattataatttataactttaccaaaaccatacaatatcctttacaccttttctcatctattgtttaacctttttatactcaaatttatcaccatttatattcctaaatttcactaaattaaaatatgttgtaatctgaaatattttagcattgatgtacattacacctttttttccaaaatttatatccttacatctttaacaaacaaccaattattttttaaaaatttttaatataaaatttttttaaataaaatttaaaatttttt

SEQ ID NO: 11738 - DNA, 193 bp, Oryza sativa
  Clone ID: PAT_MRT4530_17933C.1
aagcagtaaacatcacacatagatagagcaacagtctggtagaccatatatacactatgaggtatcatttgtgatctaattatagtactaacaataatcatgactaataacagtagtagtatatatgtcagatgagtacgtcaattactgacttgacatagtggtggacagtgcaatggtacattacaaggta

SEQ ID NO: 11739 - DNA, 402 bp, Oryza sativa
  Clone ID: PAT_MRT4530_17934C.1
atggtgccggtgactcgaggaagatgggcagacaccgacagcgtgagaatggttacggacggcggcgacgacgcgaggaggacaacaggacagcggcggcgatgcgaagaggacgagcggacgacggcccgaggggtggggggtgggggtggcaacggcgggggcgtcggtgctggtgtgggcagcggccatggagcacatccagggacggcgggagccatcgagctcgtgtccaactgcaacaagaactcgcccatgctgctttggaccaaggtcgctggatatgcgttggagttcctgccggtcccttccagcagcagctcttcgtgcgtcgtggacgcctgctgcatgagctcgtcagggcagcgctgcggttggctgcacgagctcgccaggggctga

SEQ ID NO: 11740 - DNA, 1104 bp, Oryza sativa
  Clone ID: PAT_MRT4530_17935C.1
atggaggtggagttgccatggggcgcgcggcggtggccgtggtgcggctgccatgtctgccgcgcctacctggccgggtcgtggaggagggagttcgccaacctcggcgactggtacgccgacctgctccgccgctcgccgacgggcaccgtccacgtccacgtcctcggctgcaccgtcacggcgaacccggcgaacgtggagtacatgctcaagacgcgcttcgacaacttccccaaggggaggccgttcgccgcgctcctcggcgacctcctcggcgacggcatcttcaacgtcgacggcgacgcgtggcgccaccagcggaagatggccagcctcgagctggggagcgtcgccgtgagatcctacgcgtacaagatcgtcgcccaggaggtggaggcccgcctcatgccggtgctcgccaacgccgccgacagcgggccccggtttctcaacgtcgggtcggagagggagctcaagaaggccatcaagctcatcgacgggctcgcggcggcgatgatccgggagcgccggaagcttggcgtcgcgaacagccacgacctcctgtcccggttcatggcctcctccggcgacgacgcgcgcggcgccgccgacgacaagttcctccgcgacatcgtcgtcagcttcctcctcgccggccgggacacggtgtcctccgcgctcaccactctgttcatgatcctgtccaagaaccccgacgtggcggccgccatgcgcgcggaggccgggggcggggcgggaagagcgccgggtggaagttgttggggtggtgaagaaatggataaaaatgaagaggatgacgcgaactccaacgcgttccggccggagcggtggctcacccgggccggcggcgcgttcgtgggggagagcgtcttgaagtacccggtgttccaggccggcctccgcgtgtgcctcggcaaggagctcgccatcaccgagatgaaggcggtcagcgtcgccgtcgtgagggcattcgacgtcgaggtcgtcggcgagaatggccgagatgcggcggcggcgccgccgccgcgccaagattcgtgccggggctcaccgcgtccatcagcggtgggctcccagtga

SEQ ID NO: 11741 - DNA, 1757 bp, Oryza sativa
  Clone ID: PAT_MRT4530_17936C.1
tttgacgaacacgaatcaatatctgaattttctgttttgtctcattaaaaacccaaatttccctactaattaatttctcctatttttctatgtacaagcctgtaataacttgtttcagtttgttgttgcagtagaagtgaagtctcctagctgtctaagtgtgaacgcggcgcctgactctcacttggagcccgccactgatcgacgcggtgagccccggcacgaaccgtggcgcggcggcggcgccgccgctccggccattctcgccgacgacctcgacgtcgaacgccctcacgacggcgacgctggccgccttcatctcggtgacggcgagctccttgccgaggcacacgcgttggccggcctggaacaccgggtatttgtacgggttcgccgggacgaacgacgcgccggggccggtgagccaccgcgccggccggaacgcggcgtagtcggcgccccagatgtgcggcatccgccccatggcgtaggggtggtacatgacgcgcgcgtcgccgccgacgtaggtgccgtcggggagcacgtcggcggcggcgcagaacttggagtcgaactgcaccggcgggaacagccgcatgttctcgtgcagcacggcgtgggtgtagtggaggcccttgaggtgctcgtaggtgatggcggcgcccgtctcgccgccgtcgccggcctccgcctccgcgcgcatggcggcggcgacttcggggttcttggacaggagcatgaacagcgtggtgagcgcggtggacaccgtgtcccgcccggcgaggaggaagctgacgacgatgtcgcggaggaacttgtcgtccgcggcggcgtcgtcgacgccggtggaggccatgaaccgcgacaggaggtcgtggctgctgccgacgcccagcttctggcgctcccggatcatcgccgccgcgagctcgtcgacgaccttgatggccttcctgagctccctctccgacccgacgttgaggaaccgcttcgccctccacagcaacggcgacgccgctgcgccacgcatggcggagaggcgcgacgcggcgtcgaacgcgtcggcgagctcggacacgggcatttcccggtcgaggcagccggggtcgaggccgaaggagatcttgcagatgttgtcgaaggcgaagcggcggaacacgtcctgcagatcgagcacggcgccccggtcggcggcgtcggcgagcaccggcatgaggcgggcctccacctcctgggcgatgatcttgtaggcgtaggagcgcacggcgacgctgccgagctcgaggctggccatcttccgctggtggcgccacgcgtggccgtcgacgttgaagatgccgtcgccgaggaggtcgccgaggagcgcggcgaagggcctccccttggggaagttgtcgaaccgcgtcctgagcatgtgctcgacgttcgccgggttcgccgtgacggtgcagccgaggacgtggacgtggacggttcccgtcggcgagcggcggagcaggtgcgcgtaccagtcgccgaggttggtgaactccctcgcccacgaccccgtcaggtaggcgcggcacacatggcagctgcaccacggccaccgcctcgccaccaggagcacgacgccgagcgccgccaggcacaccgagaacgcgaagaaggcgagccccgcgcaccgcgcgccccacggcaattccatctccatggacacggtggtggtggcatccatggcgagaggaggagaagaagaagagggagagagggagatc

SEQ ID NO: 11742 - DNA, 255 bp, Oryza sativa
  Clone ID: PAT_MRT4530_17937C.1
atggcacgaccccgctgtgagggttgtggcctcacgtttggtggccccatgcgacgccggagagagttgtaccgcgccgagacggaacctcatcgcaggagaaagctgctaccacgttggagagggaacctcgtcgccagagaaagctactaccgtgtcagagagggaacctcgttaccacccctgctcgttgttctatttgcggcgccgagctcgtctcttcgatctgcaatggggatgtcgcgccgacgctag

SEQ ID NO: 11743 - DNA, 243 bp, Oryza sativa
  Clone ID: PAT_MRT4530_17938C.1
cagttctttgtacttggtacgtctttgtactcgaatatatcatcatgtaactcaagtgtggcttctaaccaagaagtcattaggttggtttgacgggggttcagacttgtagtggaaccaacatgttcttttacctggcccactagccatgtgtcggagagagagaataggtagagatgaatggaacaagtttagataaacgagtcggccttaacatgatatgtacgtgtgactaggtggcgt

SEQ ID NO: 11744 - DNA, 618 bp, Oryza sativa
  Clone ID: PAT_MRT4530_17939C.1
atggtatccgtcagaactcggattcggtcggaaactatccgaccgtttttgccggatatccgaatcataataaacagaaaaatccaaattaaaacattgaaaaaagctcgtcgccgtccgccgcacgccgtcgcttcgcgccgccgagttcccgccgttgccgtcgcacgtcgcacgccggatccgctcgtcgccgtccgccgcacgccgtcccctcgcgccgccgagccccctccgtcgtcgtcgcctcacgacgtcggatcccgcggctccagggccgccaaccccggatccggccgccccgaggccggcgttgccgtccgccgcacccacacgacgtcgcctcgcgctggccgtcgccgtgacccggccgccccgacggcggcgcggccggttacgctcgtcgccgcaagccgcaagtcgtcgcctcgcgccgccgagcaaccgccgtcgccatccgccctacgcggcaccgcccccgatgtcgccgtcgccattcgccgcacgcggcccagcccccgtcgtcgccgtcgccgtcgccgtccgccacacgcgggccccgcccccgtggtggcgtctcgcgggagccgggagcccgggaggaagggcggcggctga

SEQ ID NO: 11745 - DNA, 2911 bp, Oryza sativa
  Clone ID: PAT_MRT4530_1793C.1
aggacgaggacggggcagcgaaggagagatccttaccaccacacgacgaggcgagggaacgacaacgatgaacgggcgcggcggagacggccgggaatgacggagacgaaaggcgaggggacgacttcacagaacagtggcggtaacgccactgttgccggcggggatgcacttccggaggtctccatgggcaacagagggcaggccggtgcagaggaggcggctgcgacgctggagaaggcaccggcacggccgaccggcgctcgggcaaggcggtaggggcggctggagggtggccggcactgaggaaagagaaggaggaggcggggagaggtggtgcagccacggggagggcgcgggagggggctaaaacgagagaacggagcgaggggccctcgtaccacggtcgatccggaagccgcaaaggccgtcgcagggcccatccaaactccatcacgcccaccctagccagggtacgtcaaccagaggaaagctatacttcaaatcaagcagttacccattcccgcttaataaaagatgctataactggtaataatttgattagctcctggtttggaatggttaattcctagtttggagatagaactgtgcagccgatgccgcgcttcaagcctgagtacttgtttggtgttgagggatttgtccaggagttgcatacgatgtcctttgccataggatttgggactgcccctttgtatgcccagattcctcatgatcgtgatgaagagaagtgccgagtcaaagtcaccatgaacagtaatagtgaagatatcccatcagtgatgttcgaagctggaggaggaaactacattcatgcatgtcaggaggtggcaaggatggccataggagagctccgcgatcgctacagtgatcagttggccgacactgagtatcgctaccatcctcgccaaccccagggaagtgaccgtggcagttaccttgagactgtggggattgagaatgatgctaccacaaggcatttggttgagatgctgtgagctatggatgagacccgcgcggagactgtgttagcagctcaagatcgtgaagaccagaatcgtggtaagatttgcaagctagaggacaaggtggatcatttggagaaggaactagccgcgttgaagggagaagcaccaccgcagaaggccagggttcgtcttaccgcaaggaagagagctctattcgtccctcgctaccaattggcgccaaaggttcgtgtggtggagaaagaagttaccccagccctagcggatcctccggtcgtcaatgtaagtaatgatgataaagaagaatccaagcgcacccattccaagatcgagtggggagcaactcaagatgatggagacgaaccgaacgagccttcaatcaactccgatgcccggaagacctagacaacgggaatggtcccaacatcatcaacaacaacaacaatggagagaatcccacgcttgcccaagtcctagctcaacaggcacagcttatgaacatgatgatgcagcaactccagaaccagcagaaccagggaaataaccatgcacctccccagaacaagttagcagaatttcttcgtgtgaggccgcccactttctctagcaccactaatcctgttgaagctggtgattggctggatgccatagagaagaagttggatttgctccagtgcactgatcaggagaaggtctcatttgcatcacaccaactgcatggccctgcctctgagtggtgggatcacttccgccttaacaggactattgctgaacctatcacttggcttgatttcaccgctgctttccgaaagatgcatataccatcgggagtggtgtctctcaagaagaaggaattcaggtcgctcatccagggatctcgcacggtcaccgagtatctgcacgagatcaatcgtcaggctcgttatgctccggaagatgtgcgcactgatgaagagcgccaggagaggttcttggaaggacttaatgatgagctttcttacccactcatgactggggattatcatgatttccagaagttagtggataaggctattcaccaggaggacaagtacaaccgcatggagcagaagaaatgccggattgctcacttcaaggcacaacaggggaatagtcagaggccgcatcttactttgggacctcagtcaatgtcacagggaggttcttcgtctgttgttcgtccccagcgtcagttcttcaacaacaacacgggcaacaacatccgcaatcaagctccacgccttgttgcagctttgacacagcaacagcctgccaagagggagcaaggcagcaagcccggggtgtgcttcaactgtggtgaaccaggccattactctgacaagcgtccaaagccccgacgcgtgaaggttgtccctgcccaaagcaactctaccgcaccagcatcaaaggctcgtgtcaatcatgttgctgctgcagaagctcaaggtgctccagatgtgattttgggtacgttccttgttaactcagttcctgcaacagtgcttttcgattctggtgctacacattcattcttatctatgagttttgcgggaaatcatgggatggaagtagaagatcttagacgtcctttgatggttagtaccccgagtaatcaagcactctctttgcaacatagcccctctgtcagaatagaaattcaaggagtaccatttcttgccaatcttattctgttagaagccaaagaccttgatgttatcctagggatggactggttagccagatataaaggtgtgatagactgcgccaacagaaaagtaattctcaccagcaatgatggtcgagttgtaactgttcatgcattgtcttctgagtctttaaggtcaagtctgaaccaaatgactttggaagagattcctatagtccag

SEQ ID NO: 11746 - DNA, 160 bp, Oryza sativa
  Clone ID: PAT_MRT4530_17940C.1
gttcgcttaatgagggctaacccaccaacatgattctaactgtacttttcgaacggataaacatgattctaactaactaaccatcaagattcacgcgttatacgatgtacagatgtgcacaactatgtataactggcagctggaacggtaccaacaaata

SEQ ID NO: 11747 - DNA, 461 bp, Oryza sativa
  unsure (1)..(461): unsure at all n locations
  Clone ID: PAT_MRT4530_17941C.1
aaactgtggttcgtgtgtttcccccacacagtttgtgttcactngatggactcgcgggaaatcatttaacggtgacatttctgatgagttacaggcgaaactntatgggagggtgagaagaggagtatgtattggtcaccagtccaactgttcagacagtgtcgcccgtgtgntgaatagtatgtggtccaccatgtcacgtcccccactgtatgaccccgtcntgtagggacaagggtagtatacccacgttctgggttatttggttcccatcntgttcgctggtaggagccacaggtagataggcgttgttntcgtcaagtttttgaagaagaataggtagagggtagatttcantatggagtagtataagtgttggtggttcgttgtcgaaaaatgtacccttgtgggaacattccgcnttgatatgtaaatattattttatgaaaaaaaaaaaaaaa

SEQ ID NO: 11748 - DNA, 402 bp, Oryza sativa
  Clone ID: PAT_MRT4530_17942C.1
atgtgcacgcgcacgagcgcgtgtcctctatagtgggcgccccctttttttttttttttttttttttttttttttagactaattccccttcataaatattacatcataaaatacacaaaaagagatatatggtacaggaatcagtcaaagttctgtaacagataatgcagcctcaattagcagtgaaagaatcgaaatcacctggttggctaaatgtcacatatcctacaacaaattttgaaagaaaaataatacacctcaaaggtagggagataaattatattacccacagggcaggtgggatttttttcagccaaacgatgtaacaatgtaaaggaatattattttaaagcttcgaccattgtttcgtgtggaccctgccaaatccaatcgtttggacct

SEQ ID NO: 11749 - DNA, 1581 bp, Oryza sativa
  Clone ID: PAT_MRT4530_17943C.1
atggcggcggcggcggcgggaggcggcgacgggagatggtgcgtggtgacgggcggccgcggcttcgcggcgaggcacctggtggcgatgctgctacgctccggcgagtggctggtgcgcgtggccgacctgccccccgccatcgcgctcgaccgcgacgaggaggaggggatcctaggcgccgccctgcgggagggccgggctgcctacgcctccgcggacctccgcaacaaggcccaggtggccgcagcttttgagggggctgatgttgttttccacatggctgcaccagattcgtctatcaacaactttcaccttcattattcagttaatgttgagggttggatttgccactcatgtgacactgacatgtgggaccaggatacacatgtcagtgagacatggtgtggaacaaagaatgtcattgacgcttgcatccgttgcaaggtgaagagacttatctacaccagttcaccaagtgtagttttcgatggaattcatggaatctttgatgcagatgaatcaatgccttacccagacaagtttaatgattcatattcagaaacaaaggcagatgcagaaaagttggtcatgaaggctaatggtagggatgggcttcttacttgttgtatacgcccaagtagcatttttggccctggtgataagctactggttccttctctggttactgctgcaagggcaggaaagtctaagtacattattggtgatgggagcaactactatgatttcacctatgtggagaatgtggcatatggccatgtttgtgcagagaaaactctatcatctgaagatggtgcaaagagagctgctggaaaaacctatttcataacaaatatggaggctataaaattctgggagttcatgtcgttgattttggaaggactcggatatgaaaggatgagtttgaggatggacagtgaaggatacatcttatacatatatgagtttatcaattaccattgtactaatgcattagaactttgtggcaggccttcaataaaaataccagtttctgttatgatgccagtggctcatatggtagaatggacttataagacgttcgctcgctatggaatgaaaattcctcagcttactccttcaaggatccggctcctgtcttgcaatagaacattcagctgctcaagagcaaaagatcagcttggttatgaacccattgtgtcactcaaggtggtattctccctattggttgtgagcatccttagttccatgtcttcgcaatctgcatttaaaataggcttcaaagcctatgagaaatgggaggacaccatcgatgatttggtgggtaatgcatgctcggttgttacgcactttgttcagggccagaaatcctcaaggcagaagcatgcagataattgaatggcatcatttagtaaggttaacttcaatttcagccattgctagtttttcttccaagaacttcagccaatgttcctataatgttgtaaattagtttagaggttcagatttggacatttccttacagtggttgatgcgcttgtagggaattgaactattttttcaaaaagatatttttgctat

SEQ ID NO: 11750 - DNA, 1311 bp, Oryza sativa
  Clone ID: PAT_MRT4530_17944C.1
atggatcccaaggcggcggcgaaggcgaagcgctcgcacacggtgcgggggcggcgcgcccaccagactcccgccgccgccgccgctcacaggcagaagcgcgcggaagccgccgccgccgccgcctccgcctccggcccccgcggccgcaacctcccgtcgaactgggaccgctacgacggcgaggacgatgccgatgaatccgcggccccctcggagtggaccggcgaggtggcgccgcgcagcaagggcgcagacttcggcttcctgctcgagcaggctcgggctcagccccgcgaggcgcagcgtctctcctcccaggattcgccattcgattttatgcaggcttcaacctctatgcttgaagctaaaggggaagagattttgtcctggtgtgaagatgacaacttcatcttagaagatgatttagcacccgatttcgaggtaccttttctctccatggatctgcatgcattggccacccatctttcgaagcttaagctttctgagaggcttttcttagagaaagatctgctacctgaggatctggtctgcctgcaatgcagcctttcaatgctctggttgatatttgctgctggtcgttggttcataaaggtttttgatctgttagtattcatcttagctgttgcatctgaggtcaatcaaatacagattcaaagaggcacagatgtggatagtgatgctaaaggcagcttgattcatgaccatgacagcattcgttgtgatgatcaaatgaaagcagattgtcagttgaaatgttttgaagaagataaatccacatcatcacccaagactagttctcactctgtgcatttggacactggagaagataataacaatagtgaaggggcaaagtttgaggtggttgctgcagaagaagaacttgatatgcttcttaatacgcttggtggaactcatctttctggctccaatttagatgaatcatttggaaacaaatcaacattgcaagatgtgaaagtcaatcaaccagataagaaagttacacctagcacttcatccaaatcatcgaatgaaggttttgctgaaccaggctcaacttccaagaatgaccacaatattgacatcagatatgctaaccagatagatatatctacatctattgatgatttggtggacgacttgctcactgacacttcactgtgcttgaatggacagaaacaaactacatctgctaagggcaaagacaacatctcaagtgtcagtgttcctcctaattccggaccctcaaatgcgtcggacgattttgattcatggtttgattctctctag

SEQ ID NO: 11751 - DNA, 624 bp, Oryza sativa
  Clone ID: PAT_MRT4530_17945C.1
atggcgagtagagtggtgtccatccagatggttatgttcaacgtgggggtttgcagcaattgggtgttggagatggaggacataaagggagcccgtcgaccagaatcccaccctccatgtgtagatgatgctcagatgaagacgccgacgaggaatgtcatgcatattcatggagctcaagtctcggatgaaatggttcccaagtttggcatggaattcgaatcgtacgatatggcctatgcgttctataacaaatacgcagagcacgccggttttgacgtgaggaagagccggagcaggaaagcggctaatgttcgtgaggagaatgcggacgacataagtaagctgctgaaattttttaacgaatgcaagaaggataatcctaagttttactgggacataaaaacagatgaagaaggggtggtgtcgccgccgcccgtccgcccctcctcgtcgccgggtcaccgccgcctttcatcctccgcttcggtcgccatgctcgccggcactggtggcgagggtgggcgtgatggagttgggtcggctagggtgtccggttgtccagctgccagattcaccgcggcgcaagaggggaccgcccactgcccattgggggtggggtga

SEQ ID NO: 11752 - DNA, 1831 bp, Oryza sativa
  unsure (1)..(1831): unsure at all n locations
  Clone ID: PAT_MRT4530_17946C.1
ccgcgccgtaagctcgttcctctagagatggcgcgcccttgcggtgaggcaccggggggggatgctgctacgctccggcgcgtggctggtgcgcgtggccgacctgccccccgccatcgcgctcgaccgcgacgaggaggaggggatcctaggcgccgccctgcgggagggccgggctgcctacgcccccacgcgcctccgcaacaaggcccaggcggccgcagcttttgagggggctgatgttgttttccacatggctgcaccagattcgtctatcaacaactttcaccttcattattcagttaatgttgagggaacaaagaatgtcattgacgcttgcatccgttgcaaggtgaagagacttatctacaccagttcaccaagtgtagttttcgatggaattcatggaatctttgatgcagatgaatcaatgccttacccagacaagtttaatgattcatattcagaaacaaaggcagatgcagaaaagttggtcatgaaggctaatggtagggatgggcttcttacttgttgtatacgcccaagtagcatttttggccctggtgataagctactggttccttctctggttactgctgcaagggcaggaaagtctaagtacattattggtgatgggagcaactactatgatttcacctatgtggagaatgtggcatatggccatgtttgtgcagagaaaactctatcatctgaagatggtgcaaagagagctgctggaaaaacctatttcataacaaatatggaggctataaaattctgggagttcatgtcgttgattttggaaagactcggaattaaacgtatgaaaggccttcaataaaaataccaggtcgtgttatgatgccagtggctggtatggtaaaatggacttataagacgttcgctcgctatggaatgaaaattcctcagcttactccttcaaggatccggctcctgtcttgcaatagaacattcagctgctcaagagcaaaagatcagcttggttatgaacccattgtgtcactcaaggatggacttaagagaacaatagagtcatatccccatctgcaagcacaaaatcaaaggagcatatcaaaagcctcaattttccttggcaatggaaatcttgcgaagacagttctctgggaagacatgaagcaaacaatgactgtactactgctactggctgttatctactatcatttatttacatgtggttacaccttcattacagcaatggcaaagcttttctcactaaccacactgtttttattcattcatgggattctgcctgcaaatgtgtttggacacaaggttgagaagctcgagccttcaaattttcacatcacacaggtggaggcgcatcatattgctcattcagtcagctcaacatggaactctttagttggtgtgctaaaatctttatgcagaggaaatgattggccactatttttcaaggtggtattctccctattggttgtgagcatccttagttccatgtcttcgcaatctgcatttaaaataggtatttctatggctttcctaggcttcaaagcctatgagaaatgggaggacaccatcgatgatttggtgggtaatgcatgctcggttgttacgcactttgttcagggccagaaatcctcaaggcagaagcatgcagataattgaatggcatcatttagtgaggttaacttcaatttcagccattgctagtttttcttccgagaacttcagccaatgttctataatgttgtaattaagtttagaggttcagatttggacatttcccttacnngtggtgatgcgcttgtangaaatggactattttttc

SEQ ID NO: 11753 - DNA, 333 bp, Oryza sativa
  Clone ID: PAT_MRT4530_17947C.1
gaagcaaacaaaacgtatatggctggagtttgcataactctgattcagagatgcgaaacactaaagcatgtgcatacactggatactactattacattaagtgaaggagagctctagtgttcacatttccagagcggacctcgcacggtaagatacagcgactgtgatgacactgggcactcaacaagcatggtgggcgacattaatgcatacacactgaacaatggaacaaggctatgtaaacaaggacgtgttacatgctacacacttgaattaagagcagcatgaagaactggatacaattcattaacttgacctgtctgagagaaccaa

SEQ ID NO: 11754 - DNA, 532 bp, Oryza sativa
  Clone ID: PAT_MRT4530_17948C.1
ttcgggatgacgatgacgacggtgctccggcggtcggccataggatcgagtggatcggcacccaataggccagattttcctatctttgatggtggaagaagaattgcgataaatattttcttatgttccacactccttacactacttggaaagattactccaccatgtatttcacgggtcaagctaaaatgtggttacaatctgtagaaaataaggtagagagtatgaattgggatgagttctgtgactttgtgtgtcttaggtttggtaaaagatgcagtatcaggcactgatccggcgcttaactcatgtgaagcagactggatcggttcaggactacattgagaatttcaagaccctaatgcaccaaatgctagcacacaacctcaacattgatcctgaaatattcactactacttttgttttgtggatgggttaaaataagaaattaggagagtagtgcttattcaacgccctgccgacttggatactgctggctctcttgcattacgtgatagaaatgaaatgacag

SEQ ID NO: 11755 - DNA, 324 bp, Oryza sativa
  Clone ID: PAT_MRT4530_17949C.1
attcggcacgagggcgcaggtaaaaaaacatcgacgaagcgaagtgatctgtcccttcagcaacagctagtcgagctacgattcacaaagcggaatcacttccagtgagtctcgaatccgccactccaacgaagcgcacacgagagagaagggagggaggaaagaatcgcgatgagaggcgcgctcggcggcaggagccgggcgcggcagaacgcgatgcggtcgggcctggtggtgctgggcgccgccgccttcggctacctctccttccgcgtcggcttcaagccctaactcgaccgcgcccaggaggccatggacgacagc

SEQ ID NO: 11756 - DNA, 2669 bp, Oryza sativa
  Clone ID: PAT_MRT4530_1794C.1
atagggggcagaggacgaggcaggatcagcgaggccaaccccactcgggcgacaaagatggacggccacccctcgccgcgttcacaccaccagccccctccgccagagcgggacggcagcttcaactacgacatagagagcatggacggcggcggcggcgcgtggcgagggcggtacgagtcgtcggaggtgctgctgcggtacgacgacgaggccggcggcggcccgcgccagccgctgctgcggaagcgcaccatgaacaccacctctcagatcgccatcgtcggcgccaacgtctgccccatcgagagcctcgactacgaaattgtggaaaatgaccttttcaagcaagactggcgatcgagaaagaagaagcagatatttcagtatattgttcttaaatgggccttagttctgcttattggcatgttgactggaattgttggcttctttaacaatcttgcagtcgaaaatattgcaggattaaaactattgctcacaagtgatctcatgctcaagcagaagtgcaggtacttcacagcatttttggcatatggtggttgtaatctagtcctggcaactactgctgcagcaatctgtgcttacatagcaccagctgctgctggatctggtattcctgaagttaaagcatatcttaatggggttgatgcttattctatattagctcccagtacactatttgtgaagatatttggttcaatacttggagtttcagctggatttgtacttggaaaggaaggacccatggtacatacaggagcatgcatagccaacttgcttggtcaggggggttcacgcaaataccatcttacatggaattggctgagatattttaagaacgacagggataggcgagatttgattacttgtggatcagcagctggagttgcagcagcatttcgtgcaccagttggtggtgtgctctttgctcttgaggaagcagcatcatggtggcgaagtgctcttctatggagaacattctttacaactgctgttgttgctgttgtgttgaggggccttatcgagttctgtcgtagtggaaaatgcggtctctttgggcaaggagggttgattatgtttgatctaagttcaaccatcccgacatacactgcccaagatgttgtggcaataatagtccttggaataattggcggtgtttttggaggccttttcaattttctcttggataggattctccgtgcctacagtattattaatgagagaggccctccattcaagatccttctcaccatgataatatcaatcatcacctcagcatgctcctatgggctcccatggcttgctccttgcacgccgtgccctgctgatgctgcggaggaatgccccaccattggccggtccggaaactttaagaactttcagtgcccaccgggccattacaacggcctcgcgtcgctcttcttcaacacaaacgatgatgccatccgcaacctgttcagcagtggcaccgagaaggagttccatatgtccaccctgttcgtcttcttcaccgccatctactgccttggcctcgtcacctacggtatcgccgttccatctggtctcttcatccctgtgatacttgctggggctacgtacgggcgcatagttgggacacttctgggtcccatatctgatcttgacccaggcctcttcgcactgctcggtgcggcttctttccttggtgggacaatgaggatgacggtatcagtctgcgtgatccttctggagctcacaaatgacctccacatgctccctttggtcatgctcgtccttctgatatccaagaccatagccgatagcttcaacaagggggtctatgatcagattgtggtgatgaaaggcttgccattcatggaggcacatgccgagccgttcatgaggaacctggttgccggtgacgtcgtgtctgggccactcatcaccttctccggggtcgagaaggtggggaacatcgttcacgcgctgaggatcacgggccacaatgggttcccagtggtcgacgagccacctgtatcagaagccccagagctggttgggttggtgcttcggtcccatctgctggttctgctgaaaggcaggtccttcatgaaggagaaggtgaaaaccagcggtagcttcgtgctgcgaaggtttggtgccttcgacttcgccaagccaggctctgggaaaggcctcaagatcgaagacctggatctcaccgatgaggagctggacatgtatgttgatctccatccgattacaaacacctcaccctacacggtggtcgaaacaatgtcacttgcaaaggctgcagtgctcttcagggcactaggattaaggcacctactggtcgtgccaaagaccccaggaaggccccctatagttggaattctcacaaggcacgatttcatgcatgagcatattcatgggctgttcccaaatctcggcaagtcacactaacaagggccaaatcgattgcattcagcagacatgtcttgtttttttgcttgccgtcgccttgtggctaccggtatcgaaggaagcgactgtgtgtaatattcgctgctcctatcttgcctttttgtttatctatattcatttcttccaaatgtactcaaaacattgaataatagtataatcaacaagagaatggaaattttgtagtc

SEQ ID NO: 11757 - DNA, 408 bp, Oryza sativa
  unsure (1)..(408): unsure at all n locations
  Clone ID: PAT_MRT4530_17950C.1
atctataactttctagatcgcgagcggcccccttttttttttttttcttttaaaaacctacnaacggtttttggtttcaaaaaaggacccaggacttaaaaaacttaaaaccttcttattgtgtttaatcatccgttctttcactcacaaatggactaaaaatacacacctaaattaagtgtggtgttcaaccaaaatatttactgtcaaatggaaagtcgcttaattttctaaaaactgcaaattttttcagaccaatccttaaacagaaaaaatacactatcaagactgttgggcaacaaacaaattttgcttggatttatttcccccgattcattatccaattttttcataccttcagggccaacttcttatcaacaaaaacctccttttttaaggttgtctccc

SEQ ID NO: 11758 - DNA, 1515 bp, Oryza sativa
  Clone ID: PAT_MRT4530_17951C.1
atggtgggcgccgacgccgagtcctcggcggtggtcgacgccggcgagggccacggagacctggccctcgattcctcctccgctgcctccaccgaccctctgctccacccgccgccgtccccttcctccaccccctcctctcccaccgcgatcgccgaccacgacgcgttcatcgaggaagacggcgaggatgactccgcgccccacgtcccatccgcttccgacgaggcggccccggagttcgtccagatcaccgtctccgagcctaagaagcacgcggagccggccgcgggggcagcgggggtcattcctggctccgggagctacttctcctacctcatcaccaccagggcggccgacggcggcctgttccgcgtgaggcggcgcttccgcgacgtcgtcgccctcgcggaccgcctcgcggcggcctaccgggggctcttcgtcccggcgcgaccagacaagagcatcgtcgaggggcaggtcatgcagcggcatgagttcgtgaaccagcgctgcgccgcgctccagcgctacctcggccgccttgccgcgcaccccaccatcggccgcagcgccgaactccatgacttcctgactgagccaagcggcattcccacctccgcgggcgagtcacccagatcggatcccgcgttgagtgctgccatgtccgcggccgccgttaccgctccaacggcgcctgcaaagcctgggagagatatttttgggatgtttaaggacctgaagcagacggtggcgaatggattggtggcagtgaggccgcctccagtggaggaggaaactgatgcaaagttcgtcatgcacaaggccaagctggagtacttcgagcagcatctcacgacggcatctcagcaggtagaggctcttcttaaagcttatgatgatcttaaagcaactacaggtcaactgggaatgacattcattaagctggcaaagtttgaaaaggagcaggatacatgtaattctcagagaaaaagagctgttgatatgagcaatttcgcaaatgctgttatcaacatgagcagatcacagacaaaactaaatgctaaaattgaaatacatctgggcactatctatgaatacttggagacaatgacttctgttcgtaatgcatttactgatcgcgcaaatgctttgcttcgtgtgcaaagtctgtcaggagatttatttctcttgcatactcaggcagcaaaacttgagtccgtatcatccagaggaatgggccaggaaagattaagataccaaaagattgaagaactgaaagaaacaataagaaaaacagaagatgcaaaaggcaatgcacgccaggaatatgagcttatcaaggaaaacaacatgaatgagatcataaggtttaacaaagaaaaacgccatggtttggttgagatgctgaaaggctttgtaagaaatcaggtttcatactcagagcatatttctagtatatggacaaaggtagcagaagaaaccacaggatatacaggcaagggcagctga

SEQ ID NO: 11759 - DNA, 515 bp, Oryza sativa
  Clone ID: PAT_MRT4530_17952C.1
aagccgcctatctaccatagggacatcaaggctaccaacatcctgctcgacagcgacatgcgcgcgcgggggggggacttcaaactgactaggcggagccagtaggggcagtcccacctaacgacgcgcgtcgtcggcacgcacggctacctggcgccggagtacgcgctatacgggcagctgacggagaaaagcgacttgtacagcttcagcgtgctggtgctcaaggtgctgagcgcgcggcacgtcctggacatgtcggcaccttcggaccccgtgctgatcaccgactgggcgaggacgcacgtaaaggccgtgcaggcaagggaggtgctcgacggcgctctgtctactgcggacagcccccggagcggctccatggagaggatcgtgctcgtcgggatcctgtgcgcgcacatcatggtggcgctcctgccgaccatcaccgaagccgttaatatgctggagggtgacatggacatactagatctgtcagaccggccatttgcgtacgg

SEQ ID NO: 11760 - DNA, 468 bp, Oryza sativa
  Clone ID: PAT_MRT4530_17953C.1
gtcacccgcgtttttgcccgaggagcttcggtccgcgtacctcaccggcgagttagtacccggtcgcccaggcgaggagcatgaacaaggtgctcgtcgccaatcaacacaaggcaagcacacttgatccgctgcttgagtgtctcacaggagtggaaccggcgcgcacctgcccatctgctaaacccacctgtatcaagaacctccccggagatgatgagatgagtccacagaggtggtggtttgtttcgagtagtgctggattatacccgtacaagtatgctgatcacaaacttttctttatacacctttgttgtgttaaggattcttcacatggtacacacctgcacatgccacacacacctggtagggaataacactggcaatgcggctataagtaattgtttttaattttgaatatatttcgattctttttgttttggatagtaaaaaaaaaaaaaaaaaaaa

SEQ ID NO: 11761 - DNA, 1351 bp, Oryza sativa
  Clone ID: PAT_MRT4530_17954C.1
atgctgccaccgccggccgccgcggccgccgcgctcctgctgctcctggcgctctccgccggggccaacgacatcgcgtcggacgccgcggcgctgcaggcgttcatcgcgccgttcgggtcggcgaccgtgtcgtggaacacgtcccagccgacgtgctcgtggacgggcgtcgtgtgctccggcggccgcgtcgtggaggtccacctcccgggggttggactccgcggcaacgtccccgtgggcgcgctcgggggcctcgacaagctcgccgtgctgtcgctgcgctacaacgcgctctccggcccgctgccgtccgacctggccaagtgcgcggagctccgggtaattaatctgcagtcgaatcacttctccggcgagctccccccggagattctggctctcccggcgctgacgcagctcaacctcgcggagaaccgcttttccgggaggattccggcgagcattgccaagaacgggaggctacagctgctctacttggacggcaacctcctcaccggcgagctgccgaatgtcaacatgccattgctcacctcgttcaacgtctccttcaacaacctcacaggcgggatacccagcggtctcagcggcatgccggcgacgtctttcctcggcatgtcgctgtgcggcaagcccctcgccgcttgccgaacgccgatttccatcccaccgtcgcaggctccggcgctctcgccagaaggcgcggtctcggcggtcggccgcgggaggggcggacgccgcctagccggaggagccattgccggcattgtgatcggctgcgcgctcggcttccttctcgtcgccggcgttctggtcctcgcgtgtggcgcgctgcagcgcaagccaagaccgcaccacagccgtgacgtcgcggcggagctcgccttgcacagcaaagaggcaatgagcccgagcgtgtacacgccgcgcgtctcggacgcgcggccgccgccgccgccggcggcggtggtccccgcgatacaaccggccgtcgccgccaacgtcgcaggaaagaagaagctcttcttcttcgggagggtgccgcggccgtacgacctcgaggacctgctgcgcgcgtcggccgaggtgctcggcaagggcacgtacgggaccacgtacaaggccgcgctcgagaccgggccggtggtcgccgtgaagcgcctcaaggagacctcattgccggagcgcgagtttcgggacaaggtcgcggcgatcggcgggctggaccaccccaacgtcgtgccactgcaggcctactacttcagcaaggacgagaagctcatggtgtacgagttcgtcgccatgggcagcctctcgtcgatgcttcacg

SEQ ID NO: 11762 - DNA, 432 bp, Oryza sativa
  Clone ID: PAT_MRT4530_17955C.1
atggagatggccgtgtccggcatcaccgcgcagctcagcaccggcctcgccatcctctcggtcggcgccgcccatgacaaaggcaaggagctcaccgtcatcgacgtcgacgtcaacgtcggcggcggccgggtccgcagcaactggtgggagaagagccgcgccgcccggtcgggcaaccccggccgggccgacgcgttctccggcgcgcgcgatgacacgagcgcgcccacgtcagccgagcgggacgaggaagcggagaagccgccgcgctcgcacgccgtctccgccggcggccgtcgctgcaccaccctcccgcctcgcgcccgcccagcctgcagagaagctgaggttaatatcagcaagatgacaaaaataacaaatattgttcaagtagcagactgggctggaagccaaaatacagcaagatga

SEQ ID NO: 11763 - DNA, 267 bp, Oryza sativa
  Clone ID: PAT_MRT4530_17956C.1
atgccgctgcgcatcgagatgagcagcaactcatgctcgatcatacgctcgcgttggcagcaaccatggcacatgtcgccgctgggcttcgactggaggggaagctcctcgagagtcgagattccgccgggcacggtgggcagcgcggtgctggacctgcagtacgcaaacatgatcatcaccacggagcggcaactgttggagacggaggctgaggagcgctggagcggcaccacgaggaggcgcgcgctgcaagctatgttgtag

SEQ ID NO: 11764 - DNA, 741 bp, Oryza sativa
  Clone ID: PAT_MRT4530_17957C.1
atggcggccttggctccccgcggcggcgccctctcctgctccacctccacccccagctcggcagcggcggcgtcgagtggctcggcgacgccggatcctatggtggggaaggcggcggcggtggatccgacaattgggagggctgcgccaacggatccggaagacggctcaggcgacggcggtggcgacaggctcggcagcggcggcgtcggggggctcagcggcaccggatcctgtggtggggaaggcggcggcggcggatccgacgatggggagggctgcgccgacggatccggaggcggcccgaccgtccgtcgtcgtccccgaagctctcccgcctcaactccgtgctccaaccctgatgccgtgctcgccctcctctccaccggcctatgtgcggacctcgctgccgtcgtcgtcgccgagccgcgggtgctctgcgcgaaggacgacgccatcagccgccgcatcgcgtccctccgcgaccgcgccggcctgtccctctccctctcccgtgcggacctcgccaccgtcgtcgtcgccaagccacagctgctctgcgcgaaggccgaggccatcacccgccgcattgcgtcccttcgcgaccgcgccggcctgtcggtgccccagaccagtagcttcctcctgtccggcggcatggcgcacctcggtggcagagatggagcgggaaggagggaaatgcatttgtatatgctgcggaagtgcgagatccaggggtag

SEQ ID NO: 11765 - DNA, 921 bp, Oryza sativa
  Clone ID: PAT_MRT4530_17958C.1
atggcggcggaagacagcttgggcgacagtggcgggcttgtcgaaggcggcgcgacaggctcggcaacggcagtggcgacaggctcgggcgacggaggtaggcggcaggctcggcagcggcggcgtcgagtggctcggcgacgccggatcctatggtggggaaaggcggcggcggtggatccgacaattgggagggctgcgccaacggatccggaagacggctcaggcgacggcggtggcgacaggctcggcagcggcggcgtcggggggctcagcggcaccggatcctgtggtggggaaggcggcggcggcggatccgacgatggggagggctgcgccgacggatccggaggcggcccgaccgtccgtcgtcgtccccgaagctctcccgcctcaactccgtgctccaaccctgatgccgtgctcgccctcctctccaccggcctatgtgcggacctcgctgccgtcgtcgtcgccgagccgcgggtgctctgcgcgaaggacgacgccatcagccgccgcatcgcgtccctccgcgaccgcgccggcctgtccctctccctctcccgtgcggacctcgccaccgtcgtcgtcgccaagccacagctgctctgcgcgaaggccgaggccatcacccgccgcattgcgtcccttcgcgaccgcgccggcctgtcggtgccccagaccagtagcttcctcctgtccggcggcatggcgcacctcggtggcagagatggaggatgcatggtcaaacagtgtaagcaaaatgtcaaaatccattgtattaggagacggagggagtactggggtacatcttgcagcgggaaggagggaaatgcatttgtatatgctgcggaagtgcgagatccaggggtaggggtgaaaacgaaaattttctcagaattaccagaaatgttgtga

SEQ ID NO: 11766 - DNA, 614 bp, Oryza sativa
  Clone ID: PAT_MRT4530_17959C.1
ttacttatcggacttgaagcccctgagctcaccggagctttccgggaagcggcaccgccgcaccttcacctcctcgcagtcgtgtccctgcgcacgcactgtcctggtgcacccctccaccgtcctttgctgaagacgggaagcgtcggcttggcgtcgcccctaccgccgacgaggtccaggccgctcggcgctcgtcgccggagagaaatggaatcaggagagagggatttggggacgattggagccgtccattagattggacggctcagatttgcctagcgttgggccgtcgctgctattgattacgctgcgcccaatgggccgcggaagtgcatcggaccgtccccgcatatgtgggccgtgctcagccgctcagcttaagggccgtcgaattgactcaactcgccgatgatgggccagcccaagtttgggcctgcttgggaagacctgggccaaaagtaaatttgatcaaacaatatggctcacatttttcaaattaaagtccgtcggataaactcttaagtaggctcgatatatatctatctagatttattaacattaatatgaatgtggaaaatgttagaatgacttacattgtgaaacggaggaag

SEQ ID NO: 11767 - DNA, 1121 bp, Oryza sativa
  Clone ID: PAT_MRT4530_1795C.1
ggcacatgatatccgctaaaggagttgttgtggaccccgaaatagtgaccgccttcactgactggaagcaacccaagacagtcactcaagtccgcaattttttgggtttggcaggatactaccgaagattcatcgagaacttctccaaaatagctcgacccatgacacagttgctgaagaaggaggaaaaatttgtgtggagcctgcaatgcgagaaggcattccaaactctcaaagaaaagctggtttcctcgccagtgttaatcttaccggacactcgcaaggacttcctggtgtactgtgacgcttcgcgccaaggattggggtgcgtgctcatgcaggaaggtcatgtggtagcctatgcctcacgccagctacggccctatgaaggcaactaccctacccatgatttggagttagccactgtggttcatgctctaaagatctggcggcactatctcattggaaatcactatgaaatatatactgatcataagagtttgaaatacatcttcactcagtcggatctgaatcttcggcagagaagatggttagagctcatcaagcattatgatgtggcaatccactatcaccctggtaaggccaacgtggtcacagacgcgctgagtcgaaaaagccgttgcaacactcttggcgtccgtggcattccaccggaacttaatcaacagatggaagccctaaacctaagcatcgttagccatggattcttggctattctggaagccaagcctaccttgctcgatcaaatccgcgatgctcagaagaatgatccagatatgcatgggatcctcaagaatatgaaacagggtaaagccgctggtttcacagaagatgaacatggaaccctatggaacggaaatcgtagcaccaacgaccggccggacttctccaacctctacaagtaccagaatggaaatgggatgaaattaggatggatttcatcaccggacttccaaaaacccaaggcggggaagacctgggataagagtctccccattgccgagttctcctacaataacagctaccaagccagcatacaaatggcaccttatgaagcgttgtatggccgcaaatgccgaacaccactattgtgggaccaa

SEQ ID NO: 11768 - DNA, 441 bp, Oryza sativa
  unsure (1)..(441): unsure at all n locations
  Clone ID: PAT_MRT4530_17960C.1
gcgcgcgccgccgggggcgcaggcgcccgccggagagcccgggacgaggagggaggncgncgnggcgaggcagccgaaggcgaagaagcangaaaaccncgnncacggccccgagcgcgaggagcncgcgcncaaggncgccgctagcnccgacaccanccatcnccagaccagcnacggganganctttttttatcgnnttccccatcctgttcatcatcaacgcgcacgatatccgggggcatcacgtggcgttcctggcgtcgctcatctcgccgtcggncatcttcgatcatatctccgtcatcttcgcgctgcccaagctgntcatcgactacttcacgctcgagctgactttcttccncacgggcttcttcgatcgcgnnnaggaggagggcgacgnnngcaccgcggngaccctcgcgcgcgtgctgtggatga

SEQ ID NO: 11769 - DNA, 995 bp, Oryza sativa
  Clone ID: PAT_MRT4530_17961C.1
acagaaaaacatttcgactgcatttcgggatccactcttcaaaaccactggataaatttgttcaatcacaaggagagagagaagaataaggagaggaagaggagtagtttaagttgcagcaagaactactcttgaaatgcatcatgcactcagccagtagtagcctctgatctcatatgcaccgacacgaatttctcatcttacaagaggcaagcggcggccagcaaggcagccacgccccacccggcggccctggcggcggcgggggcggcgccggcagggtggtcggcggagccagcgggcgcctccgcggacgcgctggtgtcccccttggccggcttcttgctgggcgccggcggcggggacggcggcggcttggggccgaacagcgcgtacgggaggagcaccttgtcgacggagtaaacggcgagcggctggtcggcgcgcagcgcggtgccgagcgtggtgtcgacgacgccggtggagacgttgacctggttggtggaggtggcggtgatgttgagcgtgtagggaccgtcgccgccggacgcctgggtgcgcaccgggttgctcgccgtgtcgaaggcgtccatggagtagaacttggggacgatgtgcgcctgcaccagcgacacctggtcctgcgccgacagggagttgagcgtgccgggcttgaggctgctgaacgcgccgtcggtgggggcgaacacggtgaagccggtggacgtgccgttcagctggctgttcagctgcgtgtcctgctgcgtgctcttcatcagccggatgaacgtcgtgtacgacccgcccttctccaggatcgccgtcacgttcagcgccgccgccgccgcccccttcggcgccggcgccgccgcctgccccatcgccgccggcaccgccgccagcgccaggcacacagccgccgccgccaccaagaacctcctcgccaccatcgccattgctctcagctcagctctgttctcactagtgtgaagtag

SEQ ID NO: 11770 - DNA, 577 bp, Oryza sativa
  Clone ID: PAT_MRT4530_17962C.1
ggaaattaaaccaaacactgttactgcacacaattttaaaaccaaagcccaaaaaaaacggggggagttacacagccgggaaccctgaagcataaattccaacctaaaaccaagtggccaagccccccaaagcacaagcctttttttttccaacctaactaaaataaaattctgccaggaaaaaaaacaacaacaactttagccaaagaccttatccacactgagatgggcacataaaacccactacccctttacagagcttccctcaggaaaaaaaactgggaaaaaaaaaaagctaaaaaactaggggcccagggccataaacaaactttgccttttcgaatgctcgggaaccaaaccttcaatggcttctggagggaagccatttaacttttgggttctgaaactgaaaaaagggggaaaaggccccccctttggtaaaacaggggtggggtcccttaacccatcaaaaaaagggggcttgcaagcttccaaaagggggccccaaaaatttggggaattttggaaaaaccgggttaaaaaggccacgtgttaaggggggaaccttttttggaaa

SEQ ID NO: 11771 - DNA, 237 bp, Oryza sativa
  Clone ID: PAT_MRT4530_17963C.1
ctaggggcctcggggtatcccgtcgcacccctcgggcccgaagggttgcgccaccccaaggcccccgctcagctgccatgtggcggctgggcgggcggaggagggggcgccagtccagtgcgctcccggtatcatgagcccacaaaagtcttcaaggcttaatgagggaatgacaggggatgtcccccatgtcagatgggagacggcgttgggacccacctcggagcaaacggccat

SEQ ID NO: 11772 - DNA, 471 bp, Oryza sativa
  Clone ID: PAT_MRT4530_17964C.1
atgtccgactcgtcgtctctgctgtgctgcctctgctccgcacgctcatcaggtgaggtcacggggaaaaagccctcgccgtcactcgcggtcggcggctgcgatcttgctgctccggtcacgactgcaggttactgctccttcacagaatcacggcggcggcgcaagaggggtggcggcggcaggtggagacggtgcggcccagcggcggcaggaggcagcatcggcagcgatggctgcgccctcccctccgcggcagtagtgggaagagcggcggccgcccagagcggcggcggctccctccgccccctctcgccttcctccggcggcggtggcggcggcggcggcagccgcgagcggatccggcggcagcgggcggatccagcggcggaggctccctcctccgccgcctctcttctccctccggtggcggtggcgacggccatggatggatatcgtggcgacggctga

SEQ ID NO: 11773 - DNA, 575 bp, Oryza sativa
  Clone ID: PAT_MRT4530_17965C.1
ggaaacgccacgtcgtcagtgtcggatgataccgaaccgatgatcaaatttcgtccagggttctgcaaaagttcctcgatccaccagtgttatcggtaatgttggaagaatgtccgagggtgcaccggtgcagcatattgaaaaatggatatggaggcatctgatgggagaaattgattctgaagatttactgtggtggatcatattagaagagagcagtggtcactggtcagcgataaaaattgagctttcctgggtgcagcccgccaaggtgattttcttgggggatgttttgggcctgttgctgaaatgctgacaggctgatgatctgaaatggttcggaaccgtgggcatgctcatgtcatgtgtgacaatatccatgaaagtcagagtttgtgttgggtgaattgtgaggtggctttattatcctccaaattgtgctagtcgaaaatacttctgttctatataaaccaatttttggatggatcgggtcttctaattcatgcttcattttctatttataaaaagaacaggcagtcattgtccggtgtacctgccccggccggccgttcgaa

SEQ ID NO: 11774 - DNA, 658 bp, Oryza sativa
  Clone ID: PAT_MRT4530_17966C.1
gtgcagactaagaaccatgttcggatagacacgccatgtgataaaacggataaactgttctttgccggccactaaactaatcatcagtgatggtaacacggtacatttctgggacaccgcttggatagaagggcaaaaaccataaacataatgccactagtttatacaataaaaaaaggaggaaaaatctctgcgtgaatgcatgaagaagatctaaatggcaaaacccacctcgcagtggatctgatcaaccaactcgtatccctgtggaacgcaacacagggcatccacctagaacaaacgaggttgaccaaattgtttggaagctaacgaaccatgagaaatatttgactttatcggcataaaagacgcaatgtctgggaattataggcaccaatttcaataccttaatgatctggagagcatggaccctgcaaaaagcaaattctatcaaaatagcgtatggatctcggatcgactcacaaccagaagctggccaaacaaacaacgggcactgccccctctgccaccgaaaaaatgaatcgatttaccatcttttcctgcattgccattttgccagatttctttggagatcaatacaattcacatttggattataccctccacatagtatatctcatatgtttgggaattggct

SEQ ID NO: 11775 - DNA, 356 bp, Oryza sativa
  Clone ID: PAT_MRT4530_17967C.1
actctttcttttactcttgtatttttcgggagggacactttttcgagaaagaaaccaattcaaacagcttatgacattccttatctcccaatcaacatcacattttctcgtcttggagaacggctactacatcgcatgagaataccacccgatcctctaaagatattggcggcgattctatccaatatatataaggagttctcggcctagtctaacgatattgatccctattttcaagccctacacactaaatggattgattacttagaggccaacacaatatatgatattcttcttaagttgactccagaaagcctgaacatatttggtccactatcaagtgctcatggatcttg

SEQ ID NO: 11776 - DNA, 519 bp, Oryza sativa
  Clone ID: PAT_MRT4530_17968C.1
atggcctcctctacctccctgcagcgcttcctccctccgtccccccccccctcatgcggcggcatcccgccgccgccctcccggcgtccgcgcccgccccatccagtcgtcgacggtgtccgcgccgtcctcctcgacaccagcggcggacgaggccatgtcggcggagcggctggagccacgggtggagcagcgggagggccgatactgggtgctcaaggagaagtaccaggctgggctgaacccgtaggagaagaccgaccggattcagtggccttgagctcgtggccgccggatctccgacggcggggcgagtggcagggtccgggtgggtggtgggatcctgtgaggatcgagggggcagcgggatctggtagggaggccgacgatggatttggtagggaggtagggactagggaggtaatctcacctttaaaaaggaggagattaggacatcctgatagcaccggcttcaaacggacctcgccgctgatccagaaggttcctcagagcccatga

SEQ ID NO: 11777 - DNA, 350 bp, Oryza sativa
  Clone ID: PAT_MRT4530_17969C.1
catcacaccacaactactggctccagactagcctgcttcacacgtgaggggttgctatctccatacatccacgcagcagaatacgggtggcgaggtgatggtgtacagtcctaaaccgtatcatataaaagggtgtaagaacgatgatgctggacttgcaaagggaacgacgcctgggaaagaggagaggctagagcagttgctggagcacaaagatagcggtgacctgatgcttaatgagaagaacagaacggggctgaatcacgacgagaatgtgaagctgaacaaggagcccacgttattgcctatggagggatactttatagagctcgaatagatgcccaaggagg

SEQ ID NO: 11778 - DNA, 732 bp, Oryza sativa
  Clone ID: PAT_MRT4530_1796C.1
atggcattccacctgagatctgcaagtgtgccatcgagccctcgctccaacgaaatcgatatcgaagggcagctccagaacctgaaggcaattgtttcttcatcgtcttcgaccattgagacaatgagtaatggcttgaagaggatcgggaatatctacagctgcatcaatgagatcatgtgcctgccaagcagccatgttgcaatttgccagccactgcagaggaaagcagtggagcaagagcttgagcgctctctcatcttgctcgatttctgcaatgccatgcaggagagcttttccaaccttaagcaaagcattcaagacatgcagctgattatgaagagaggagataatgcagctgtgcaagtgaagatccagtcttatatctgccttatcaagaaggcacaaaaacagttcaggaagatcagcaagaagtcttcttcagttgatctggaaagctgcagggtggtcaagctgttggctgaagcaagagagatagctatcttaatgcttgaaacctcattccatcttctctcaaggcaacttgcgatgccaagttctagcaagtggtctcttgtctccaagacattcaagaagagagcacttttctgccaagaggagcaattgcaagtgttggagtcgaacattgctgatttagacactggagtcaagaatctgttcaggaaatcgatccagagcagagtttctcttctcaacactctcagcttgtag

SEQ ID NO: 11779 - DNA, 1324 bp, Oryza sativa
  Clone ID: PAT_MRT4530_17970C.1
atcagagatgttctgagcaaacatgttcataatttggcagtatatcagagatgttcgtgctttctttataactttatacagtgacacaatggttttccgtttatacatacatacatacataattacatcactaagtagactataaacaatcccaattcaagccacacacacaacacaaattcttcattcttcacacgcaccgtgtgatcgggccacgaggctcacatgacggggtagctcggcagcagcgcgatgccgcacagcccggacgccaagccggcgacgtcgcgctgcatgaggatgtagccggggttgccccactccgccccccacgagttcttcacgatccagtacttctcgccgcctttcgccgcgccgccgccgtccgtcttcggctcggactcgccgtagcccaccacggtgacgccgtggttgacgtcggcggtgcacggccccgtgtagaccccgctgccgtagagctggaacatgaagctgccgccgtcgacggcgacggacaccggctgcgccgcggcggccctcgccaggtcgggctcgctgctgggcgtcacgttccggtagcccgcgatggcgaccgcgctctggttcagcttcgccgcttggcacgcgccgttcgcggcgtggtacgggtagctcgcctccgtggtcaggccgtggttgccgacgacgaactcgaacgcccagctcatgtacccgccgccgcaccccaccgccttgtcgtcgcagtccacgagctcctgctccgacagcgacaccagctcgccgttcttgatctggttgatcccctctatcgccgccaccgcggagaacgcccagcaagaaccacaatctccttggttcttcacttccaccactgcccctttcttcctccaatctacgctcttcggcagaatatcatcactgctctctccaggcattgctatgtcagcggagcaggtatttgaaatctgaggaatcgtgacatgaggtctgaaccccagcatcttggctctgaactcctcgttcgtcaggtcgccgaacttgttgtcagccagcttgtagccattgctcatggagttgaacgtctcaacgagctcgacgttcctcctgtacacctcgaacctcctctgcttctcaccggcgtcggtgtaggcgcggccatgcctgatcatccactgctcgaacctgtccagcatgagatcggcgcgggcgagagccgcgccgatggagaagatgagcagaggaagaaggaggagcaaggatggtttagccattgttggagcttggattggagagggagggtcagcaatggtgaacactgagtggt

SEQ ID NO: 11780 - DNA, 1308 bp, Oryza sativa
  Clone ID: PAT_MRT4530_17971C.1
atggacagcgcgatcttgcgccacctcatcgaggcgctcttggagcgtcaaccgattctcggcgaggactccactttcttgcgtcgagcgctggtgttcggaggtgtagcctccatcatatcgccggtacacctggagtcgttcttcacccgctatggagttgtcatagcgaccgtcctgctacgagatgctaccagatgcgagcgcgttggcatgctggtgttctccgcagagagcgattgcttgtatgcggcggagatggaggcggctcgtccaggcgcatacctgatgatttccaggattcttcgccgggacttcatgtcaaaattctccgtatttttggttctgatttctgaattggcttctgcggatgaatgttcatgcttctcccgctttgttcatgtcctaattctttctgttccggttgatgacgagattctgcataattcggtaaaccttgtgaaggatgcagccgaccagcagagccagcggtgctccaccgccgaggcattccgtcgaatggttccctggcgatatctgaaagcagacgcccaggaggacatcaacttgaggtgcctgctgctgaggatgggggcaaggagcacggctacgcccggagatctgtacggcgtcgcgagccactcttgcttgccaactcagcaagcctgtgtgacaaatgacttcactacccccgtcttttcggttcttcctccgcattcttcttgcgacggtgccgtcttcaagcggacctcgccacttcttgatccgacggcgatggcgagttggcgactgcctacacggaagggcgtactgcccgtgaccggtgaccgctaccttggcttttatccgattcgcgggcaaccgctcggacgagcaattctcatcagttatcagaagatggcatttgagagtgcgccattaaagaagatggcaaatagttcaaaatccccgagcagggaggccatggtggtgttcgacgagtccagggacatggagcgatgcggcagcaggtccgccgagctggtcgccttccacctcggcctctacgattcggggctcttccccttggtcgcggacggcgccggcggccatggcgtggtgacgcgggacctcctcccgctgttctgcctctcgccggacttccttggccgcgtcgcccttctcaggggacccggcatcgccgagctcgacgccggcgagtgtagtataattccacttgatgttcatgcctggtggttacatattgcagtgtctgtgcaatgctgctttcttgataaaacagttgaactcatcaactcaaaactgtag

SEQ ID NO: 11781 - DNA, 529 bp, Oryza sativa
  unsure (1)..(529): unsure at all n locations
  Clone ID: PAT_MRT4530_17972C.1
ggattctttatatggncgtcctttttttttttttttttccacttattttttttgtttccttattgtttattttctttcgggaccaaaatcaccttggggtatcacaggggaaaaaacttttaaaacccccgagtcccaacaagcttggatcaaaagggggaaaacccctgggtttaaaactgggttttgaataaaaaattccttccttttcctatcccttgccttgaaaagattttctttttctcccccccccttgcccactgtacggaccctgttgcccgactgacccttcccttcctccccccggggggcaacctttttgggggatttccccttgccggccccggccgggggaacataaagccggggggggtccattgcccaccgaataaccttggccccctcgggggccttggccttgggcgaccccccccccaaatcccccagccccacccttgtttcctttttcggcccccgggcccccttaagggttggaaaacccccctcccgcttggccaccccccccgcg

SEQ ID NO: 11782 - DNA, 2553 bp, Oryza sativa
  Clone ID: PAT_MRT4530_17973C.1
atcagctgcgcccccccccccccccaaccccctcgggcgcccgcttcgctccggcgactccacccggccgcgccgccgggatccgaccccccgcaggccgcccttggacgtggacctcgatggttccccgccggccccggcgcctttaacttctgatccagccagccgagtcccgcgcggcgccggggggcatcgaattcgaatccgcgccctcgccgtagtcgtcatgggttggtggggggagcctgctgctttgcattcggagcggggatttccagtggagggggattgcgggactgatacggccgggatcttgctggaaatggggggttacgagtacgcgaccaatggttatcatcggggaatggaggatgactatgaagacgagtactacagtgaagatccatatgatgaggaaggggagggtgctggtcaagagtatgccgaggaggatgacgagccgccggagggacagcaagagttccttcaaattagagaacgattaaaggagcagattaggcgaaaggcgcaggctgctagtgctagcgctgctggccgctcatcttcctcacatgatagaaaacctcaatccacttttggatccttctttgggccatccaagccggtgatttcccagcgggtaattgaagaaagaaaatcactgaaagaactacagaacacagcgtcaatgtccagggatcgaaggccttctgcaaaggagataccatcatcatctaaagtgcaatctaaaacaaatggacatcaccacaaacagaagattgtaaatgaggcaaaaagaaaggctgaggcacttaaggataatcgagactattcatttctactgtcagatgatgctgacatttcaccttctccaatggagaaacctgtggctaggtcctccttgagtcagaagtctgatcgcgagtcgacacattcagctgtgaagagcagagcaccgacaggccaaaccgctagattgtctaatggatatggattgaagaacacatcgtccagtcagaggcatactgaaggtagggtagattccaacagaaaggtggctggtgcaaacagagaaagggttgtcttgcctgacaatggaagaatgcatagcgtggttagaaatggatccacccaggctactacaagcaaagctgcaagtcaaaagcttcctagcaaggctcctattgccaacaggcctcctataaagagtgtaagtgatcaatctcttagggcaaatcattcagcttcaaagcaacttttgtcacagaatgggagaccacaatcctcacagagtcagaggatgcagtcgacctcgcatggtcagaggccacatcaacctgtgcaaagtcagtggccgctgcagtcattgcagggccgaaggccacagcagtcaccacaaaatacaaggccacaactgatgtcgaagagtcagagaccgcagcaatcattacagagacagagaccacagctatcctcacaaaatgagagattggaatcctcggagaggcaaaggccaccttcacaaagctacaggccacagtcgtcgcaagggcagaggcctagttcagtacaaggccgccagtactccgagcaaagaagaatccaggcaaatgatagagtaaagtcggcagaaaggcagataaggcctccctcgaaacccatgccatcacgacaaataccttccaacggaatgcgtgatgcccatgccaagaaaaagcaaccgatgaaacgaagatttaatgatcttagcgaagatgaggaagatccgttggcaatgatcaggagcatgtttaggtatgatcctagtaaatatgcaggcagagatgacgatgatagcgacatggaagcagattttgctactatagaaatggaagagcaaagaagcgcgagaattgcaaaggaggaggatgacgagcaacttcgcctgattgaggaggaagaaagacgtgagcaggagaggaagaggcgaaagatggcgcgtggccgatagtagcagctaagttgtacaaatgcttgagttacagcttgagcaaggcttgaactgcaattccacggtcgtacgggccatggtgcttgcagatgatagcacgctttacccccatttatttgccgtgcgatttctcaagagatctatcaagaaaaaaacggcagggatcaagcaaaacggcaggagaacgatgctccaacgtaatgtgaagtggtgtagcttgtgctgaaactgttagctgtgccaactacagatctttttgatgctgacgctgatcgtgcagaaacttctcccgtgagggtgtggtgatgccaacgtccctacaccttgtcactttgttgggttgtacatgatattcttcctcatgtagctgattcgttctgttggtcgagtactaaagatgccagaaatcaactggcgcctgtccgtgtttggattcgatttggatataccggtgttctaataaacaatgttttagacaattaaaaaaaagaaaaaaaaaaccatcatgtgtgagcgattatcgggttaaaaaaactcgagactagttctctctctctctctcc

SEQ ID NO: 11783 - DNA, 462 bp, Oryza sativa
  Clone ID: PAT_MRT4530_17974C.1
actagtactagctgcgcccccccccccccccaaccccctcgggcgcccgcttcgctccggcgactccacccggccgcgccgccgggatccgcccccccgcaggccgcccctcgtcgtcgtcctcgctggttccccgccggccccggcgccttttccttctgatccagccagccgcgtcgcgcgcggcgccggggggcatcgaattcgaatccgcgccctcgccgtcgtcgtcgccgccgccgccgccggacaatccggcgcctgccccctccgtgctccccccggccagagggattgcgggactgatacggccgggatcttgctggaaatggggggttacgagtacgcgaccaatggttatcatcggggaatggaggatgactatgaagacgagtactacagtgaagatccatatgatgaggaaggggagggtgctggtcaagagtatgccgaggaggatga

SEQ ID NO: 11784 - DNA, 263 bp, Oryza sativa
  Clone ID: PAT_MRT4530_17975C.1
ggaacaaaagggatatttttttatggatattgctaccacaaggcatgaatcatgaatatgaccttgtcgaacagtttgctcatgtgcccatcagcacatacatatgtaactttctagaagaaccaagaaagttttttttggatgcatacaaaaaaaaattgaaggggattaatcgcaatgcccatgcactttaaccgctagaaaagggtttacatacatgcatgccaaattttttagctttatggatcacttctaattgatga

SEQ ID NO: 11785 - DNA, 276 bp, Oryza sativa
  Clone ID: PAT_MRT4530_17976C.1
atggccgacggcggcagctatggtggaagctcaccggagtgcgaggagatgcgagctccggcgatggaattggacgggagaacggcggacgaggtggacctcgggatggcggacgcggcggcgccgatggcggggtggcctcttcctctgagtggtggctccactgaacctttgcaaaatctgattactttgtttctggtccttctctccctggttccaggataccaattggcttctccacctaggtcaaacttcttggatgtcaatgggctctga

SEQ ID NO: 11786 - DNA, 210 bp, Oryza sativa
  Clone ID: PAT_MRT4530_17977C.1
tccataattcttccgggtcaagatccccgggcctaggggagcattggagccgtccgacagacagtgacaccgacagacaatcgacgtcgaggacaccggcagacttcctgtgcagcaattgtgagcgaggtcacagtgaacttgctttctcttcttggatgtctgctccttttgttgtgctgctgttcatttctgagagctccattctgt

SEQ ID NO: 11787 - DNA, 269 bp, Oryza sativa
  unsure (1)..(269): unsure at all n locations
  Clone ID: PAT_MRT4530_17978C.1
gggagagagacttctctacgcggtcacgggttccccagcggaggagaaagatactagtagcagctgcagctacactctagtagtagtggctactagtactagctagcctccaatggngtcctcaccgtntccntccccgggcaccgcaactcccgccaccgccgccgccgcgccttccaccgcnaccccaacacccgcnacgcagcccaatgccacgccggccgacccctccatcantcccccggccgcntcccctccccttccctccg

SEQ ID NO: 11788 - DNA, 552 bp, Oryza sativa
  Clone ID: PAT_MRT4530_17979C.1
gcacgagggcttggaatgaaaccattccgtatttgatactgtcttcaactggaaatctaggattgctggttacttgtgaggcctgtttccactggttttcaaaatctgaactctcaactgaatatattcttgtattttccaatgatttgcagaagcataaaaattaaaatataggttgtgattctgtgaacctttgattctttgtgattggtatacagtagttatccccactttagtttgttcattgctattttagttgagttatagtaatagccctgtggtgaacttgaactaatcattgagtttggtgtgtaagtgtaactggtactttctaaatgaacttccgtggcccattttatcgttgatgtcgtgaaattagatacttctcatagaaacaaagtattagatgacaggaaaacattcagctatggttgttgctcctgggtccttttcagagattgttagcattgtagtgtgattagatctttgaccatctgactctgtgcattaaattaaacatagtttcaaagtcattattccttagtactaatt

SEQ ID NO: 11789 - DNA, 2250 bp, Oryza sativa
  Clone ID: PAT_MRT4530_1797C.1
ttagcaggcggcgctccggaatcgaatggccttgccggggacgtcgtacaccacctccagcgtgcgctgctgaacgttgccgatgaacgaccgaatgcggtcggaggcggtgagcgcgtgcagacgggataattgaaagagctttagtagctagcctaaactttagcagacaatgctgcaattaagctagctactgtaatccctttccaatagagatagatgctctactagtacgccatgtaggataaacatggcatcaaaacataaacaacaatcactttgactaattatttcatcaactagctagcttatattcgaataataagctaacaatacgctagttgggggaagcaagcaaatttgaattagcacttagcagggcgggcggtcctgcaatcgcatggccttggcggggaacgtcgtacaccacctccagcgtcttctgcctgcacgttgccgatgaagccgggcatgcgacggcggtcgggacgagcgcggcgcgctgcggcggcacgccgaatcccgtgaacccgagggagctcggcgacggcgggatgcagtacgagaacaccctgccgtactgtgtcgccgtccgaagaggaagaccctgacgatcgacgtcgtagggacccagcgtgaggtcatcgaagctgtacgtcccggtcgccgtcgagccatcgccgtagttgatgccgaactggcactgcgcgttggcggagcagccctccagcgtcttctgctgcacgttgccgatgaagccgggcatgcggtcgctggctgtgggcgcgaaggcgaggcagctgcctaacaggatcccggcggcgtcgaggttgacggtggcgccgccgtcgaagacgagggcgatgctgggcagggtgatgctgcggacgccggtgaagtcgtagcaggtgtcgaggatggacaccggcggcgccgcccggtacatggtcatggcgctcctgaacgccgcgcgcagcgcctggtacgccgtcggcggcaggcgcgagatgatcgtggaggagtcgatgaccgagctggcggaaaacacggccggtggcacggcgagtgggcgccccgccacgatgatggcgcggaggagcaccctgtagaacgtgggcgccatgctgctgctcagcagtggcgtggagacgaagctcgggatgagctgggcgcgttccggcggcacgccgagaacgaggaagccgagggagctcgccgtcggcgggaggcagtaggagaagaccctgccgtaccgcgtcgccgtctgctgcaccagcgactgcgagccgccgccgagcgccagtgacccggcgacgtcgtagtcgaacgcactccccctatcggcatgcgcacagccgaagcggaagcccctgatgacgtcgtaggggcccagcgtgaggtcgtcgaagctgtacgtcccggtcgccgtcgacccgtcgccgtagttgatgccgaactggcactgcgcgttggcggagcagccgcggcggtaggggccgagctgcgcgcaggcggcggaggtgcaggggacggcggcgtacgtggtcgacatggccgggtcgaacagggggtcccgttgccggtggcacatcggcaaggggcatggcttgcattgcacccatgaaacgtcgctgccggagtcgattatcaccgtctgggtcaccgccgacgtgccatccggcgccgaattcgtcgtcgccgtcgttgataaacttttgaggtgaggcacactgcctaagccaccattagtggcgtactggccgttcttctcgtattgcgaggttctgctcgaaaaggccatcggctgcttgtcgtcggtggcgccggtgagcctcttttggatgtagtccgcgcggcgttggtcgtcgtcgaccatgtcggccatggaagcggcgacgtcggcggcggtgctgttggccgacgacggcgccggcgagcatggcccatacaggtgatgcaacggtgcccaagtgctgttcggcgacggcacgtcccctggagcaaccttgtggccggagcagaaagttttcggtttcatggtgctggttgctatgaccatataggcgccggctgcagcgtctcctccatgggcaacaagaatggagctacagaggacgagaagcactagcagtagtccaagaggagtcatggcgatcatttgtacgtgctagctactatgttggcttgctgctgcttgctagctaagctgtggcttcccccgcgtcccgcagcccggcagcccggggatca

SEQ ID NO: 11790 - DNA, 440 bp, Oryza sativa
  Clone ID: PAT_MRT4530_17980C.1
gcacgagggggatcgatggcgtcggcggcctcgcgcgcggcgatagatcgtcggacttccagacggcggcggtggggatgggcttctcgctctcgtgcggcgtgctgctcgtggtgatgagcctcctccccttgccgagggtgtaccaggccgtgatgtgggaatgcgccctgctcctcttcttcgctgccggcgcacaagcctacaagcgaccaataatttggtatcctctagccgatctcatcctcaaaccgaacaagaagcccaagccacccgctgcctgattattcacagtttcacactgccagtctgtactctgttcctagttcttcagatcatcttctacgtggagtatgtgtgttttttttttcagtttgttgggatagtagcattgcaagggaatacattatttacgcatacttatgttttatggccattat

SEQ ID NO: 11791 - DNA, 116 bp, Oryza sativa
  Clone ID: PAT_MRT4530_17981C.1
ggaaggagaatgtgcacatattcatcttttacattccgaatgcttaactattgacgtttgtattctacaggatattgcaatcagctatatattacaactgtaaaaatgaggaattt

SEQ ID NO: 11792 - DNA, 1191 bp, Oryza sativa
  Clone ID: PAT_MRT4530_17982C.1
atggcagaatcgctgctcctcccggtggtgcgcggggtggtcggcaaggcggccggcgcgctcgtccagagcgtcactcgcatgtgcggcgtcgacggcgatcgccacaagctggagcgccagcttctggccgtccagtgcaagctgtccgacgccgaggcgaagagcgagaccagccccgccgtgaagaggtggatgaaggacctcaaggccgtcgcgtacgaggccgacgacgtcctcgacgacttccactacgaggcactgcgccgcgacgcccagatcggcgactccaccaccgacaaggtactcggctacttcacgccgcacagccccctcctgttccgtgttgccatgagcaagaagctgaacagtgtcctcaagaagatcaacgagctggttgaagagatgaacaagtttggcctagtggagcgtgcagatcaggcaacagtacatgtgatccatcctcagacgcactccggcctcgatagcttgatggagatcgttggcagagacgacgacaaggagatggtggtgaatttgttacttgagcagcgatccaagcggatggttgaggtgctatcaatcgtagggatggggggattgggcaagaccacacttgcgaagatggtgtacaacgacacaagggttcaacaacgctttgagttgcccatgtggctctgtgtctcagatgatttcaatgttgtttctctagtcagatccattattgaattggctaccaggggaaattgcaccttgccagacagaatcgaactattgcgcagccgtctacatgaggtggtaggccgcaaaaggtatctacttgttcttgatgatgtttggaatgaggaggaacataaatgggaggagctgaggccattgctgcattctgctggtgctccaggaagtgtagtacttgtcacaactcggagccagcgggtagcatccataatgggcacagttcctgctcacacgctatcatacctaaaccatgatgattcatgggaattattccggaagaaagcattcagtaaagaagaggagcagcagccagagtttgcagagattggcaatcgtattgtcaagaagtgcaaagggttacctcttgctctgaagacaatgggaggccttatgagttccaagaagcgaatccaggaatgggaagctattgcaggaagcaagagttgggaggat

SEQ ID NO: 11793 - DNA, 253 bp, Oryza sativa
  unsure (1)..(253): unsure at all n locations
  Clone ID: PAT_MRT4530_17983C.1
ccgccggnaaaaagcatgagttcagtccacaaaaacatggcaaccatcaattcccccatctttctccgtcgtttgcttgttcctcttgtgtaatgggtcgttagcccaactttcttagccaaagtactaatcaatggaaaagatctccgccgnggaagtccaaggagtgcaatttgatcggttgcaagcatttgagccgatcggcactgtaaggtcccaagctggacaactgagttttttgatgttctaatga

SEQ ID NO: 11794 - DNA, 366 bp, Oryza sativa
  Clone ID: PAT_MRT4530_17984C.1
ctaaaaattagcgagacgtagagccgccatgccgaagaagttgcgcacgatggttgtgccggtgtcggagccgatggaatccgcgctgatgagctccaacatcatggagccgaagccgatttccgttgggagttcgtcgtgacagaggcaagcatggataacagcatggagctgaagcccattcccaccatgctcgtgcccgtatgtcacaccctgaagttctcctcccaggccttcaacctcccacgtcgccggtgaaatcgggagcgccttggccacatccgtctctcccgagcccctataaagcatgcccgcactcccctccacatattttctttttccaccgctctctcccgtgccctccat

SEQ ID NO: 11795 - DNA, 1414 bp, Oryza sativa
  Clone ID: PAT_MRT4530_17985C.1
atggcgatgaagtccacgaccatctcctccctggtggctagtggggagttgcttgtccagtggcatgcacattatcgtgctgttaggtgccttgcactctatgactttttgcttatctcggggtctgaagacggtagcatcaaagtttgggatctcctcacgatgcttgatgagcaatcaagattggaggcaaagacacaacacatatacagctttaatcagcacgcacttcctgtaaccgatgttgcttgctgtcatggagcaattgctgtatcatcttcagaggatcacacctgtaaaatttggagtctatccgagggtagaatgctaagaagcatttcatttccttctattactgattcagtggcgttagacccaaggagtcatattttctacgctggtggtcgagatggaaagatatatgttactgctatgggaattgatgtcacctctcctagtagtgatgattcaactattaatggggctttggatgaccatagcaaggcagtaaccagcttagcatcgagtactgatggacttatattgatctctggatctgaggatgttcatgttgacaaacctgttgatatatgcccttcctacacacaaaggctcatgagtgaaagtatagaaacccatggaccatggaatacatacagtggcatgatgggtccagtgacgaatgttctcttagtaacgcctaaacgagtaaatcttccaccactacaatcactacggaaagtttgctcagcaaatggaggatctgaatcacgggctgtaattgtgccccaacctgaaaatgatgtccaaatttttggaaacttcagttccgactttctggagcgctgcctggatgcacttcagcagcctggcagttcgtccagattgtttgaatctggggccagtgctctgtatggtgcaccaaaacaacagggtgtagaatggaggagtaaatacttggagttacaggacctctttgtgcgtgaggttcttgatcagatgccgtctccaaagaatacatgatatgcaactgattattatggtcattgctgtcaattaggagattgtcatcagttttagccagcacatgagttggtttctaaccgactagaaaaccttggaagctctaattcatcagcgaagtgtaacatcaatttttgcaatttatgagtggaggggtgagcagggggctttgcatcccccatgagttcattggaactattgtacgctggagcaaattttatactaatttgcacttccggcctcagctcctcaaaagtgtactttgtgcttctctggttccaccactgaatttatgtgtactttgtgtctttgtattgagccttatggtaggtaacatgttacagaaaaacatctgaaatacaaagtaacttgaaaaaaaaaaaaaaaaaaa

SEQ ID NO: 11796 - DNA, 240 bp, Oryza sativa
  Clone ID: PAT_MRT4530_17986C.1
ggtatcttctcctgagaggcagtagcaggggttcttccatcatggggactgcgttagtacctagacaaactgcagctaattgtaggggctatcgatgcgcttctggccatcagcttcggcgccatggcggagcagagcgccgctacgcggtaggatacatcaagtgcataggaatgccatcccgactaaatggaagaacaggatacgttaagaggacttgaaaggagcatcatgtgcaac

SEQ ID NO: 11797 - DNA, 489 bp, Oryza sativa
  Clone ID: PAT_MRT4530_17987C.1
tcccaggagcactggaatactcagtgtccctgtaatttcactctcccaagtgtgcttcttttcagccacactgccttgctccataatgagagctgcccaagtctttccctctttcaaatgccaccaacacaatgtcagggtgtccaatgcaatgtgtattaagtactcaggaaaatagaagaggtttacacataagcaaagcataagacatgcacaaatgtgcaatgccatgctttttgaaattgtgcagagtaaaacatcgcatcttggagacatgctcttgttttgaaaagaacatacagttgaatacttaactcacagggatttctcttgaccggctttttctgtgaaccccgtctgtttttattgggaccttcttcacctcctccattctcctttacttctgctaacccgactcccagactctggctatcgccactatttgtctttgctttctggtctttctccacaaaccaaagtattttcttt

SEQ ID NO: 11798 - DNA, 345 bp, Oryza sativa
  Clone ID: PAT_MRT4530_17988C.1
caaaaagggcaaccattaagggcctttggattttattttatttttttttaaaaagggcatgatagaaatgcttcccagccaattgctttaactggtggggcaccaaatacaaagatttcaggattggaatacgttttaacatgttaaaacactttttatttagaaaagcagactggcccaagcagggtttaacgcaaagccacccaacggggccggggaaaaatacttttttttttaaaaataagccccagtgtcctaggttccaaaaaaaaaaaaatttcccgcggaaagaaacctcttaaaaacattggggcctttggggatgggagccccgagcaacccccg

SEQ ID NO: 11799 - DNA, 501 bp, Oryza sativa
  unsure (1)..(501): unsure at all n locations
  Clone ID: PAT_MRT4530_17989C.1
ggaactctgtgaaatgcatgccccttgggaagaaaccaaaaaatctcatccatggtggcaagtagctgatgtcgatggtttggcttcccttgtcgctgaaagagcaatggaaaacattgtcaacaatgatctgccaagacccactcagacagtccgggttcatggacctcaagtgaagggccctgaaaacaaggatgattatgggatgtctgttgtttctgggggccaagagccagatcctgtacatgacactatggagtgcagctacagtgtttcaagcaccaccaatgacatgaattcttctgacgggggacgttggcagcaccacgaaagaaataatgtgtccggggatgcacggngttcttatagttccaccaacagtacaccgggcagcaagccaacatatcaggatgcttctgagagagccaagctgctagatgctctccggcactcgcaaacacgtgctagggaagccgagatagctgccaagaaagcgtatga

SEQ ID NO: 11800 - DNA, 261 bp, Oryza sativa
  Clone ID: PAT_MRT4530_1798C.1
atggtcgttgctgaggagcaaactggggttgagccgatcctccctgctgatattaaatttgcggtgaaggaggctgatactgataattcaaattgcccccctgcgtttgctgaatcggttgcaaaacctgctgcctacgtggcgtctactgaattggctacacaacctgttggattcgtggcgtttgttgaatcgactgcagaacttgctgccttggtggtatttgctgaatcgacttctgctgggttggatcaacggtag

SEQ ID NO: 11801 - DNA, 711 bp, Oryza sativa
  Clone ID: PAT_MRT4530_17990C.1
atggcgtcgagcaacggagagcaacctccagaatcgccgaaggaagcaaatgctgcgcctgtagcagccaagcttgccatggcgtcagggcgcgatggatgtgagaggctcaaggatctggctgaaggaatctctgcgactgatcagcaagcctctggtgctgtatattcgctctcgctcctggagggactgactcttgactcggaccagaactccgcgctgcatgtggtggcagcctccggtgacagccaggcctgggaaccactcctcgcgctggctgctgctgcgcctgcgcgtgacagcagcggtgcagcgagggtggatgaccaggagctcctagcaaggaggaagaacaaggtcggtgagacggctttgcacggggcggtccgtgctggccacagcaaagtggtggaggtcctcatgaaggaggatccgggactggccggcgttgatcggcacgacggcacgtcaccgctgtaccttgccgtttcgttgggacgcttcgagattgcgtgggatctgcttgatatgagctctaggaaattatcttactccggaccagatggtcagaatgtcttgcacgtcgcagtacaacacccccaagggaaggagggatgtgtcacggagagggagggagaagaggagcaggtagcaggtggcttgccgctcctaccagccaacaacggcatgcacccccgccccaagccttaa

SEQ ID NO: 11802 - DNA, 522 bp, Oryza sativa
  Clone ID: PAT_MRT4530_17991C.1
atgggtggagtccatggattttcattggattggccccaatggactaccggcggcaagaaggacaggaagggcaaggagtacagaggcgtgcacgctgtcatgcagcagcatgaccagctcgtcgtcatggccgcttcgccggcggcaccggaggcggagaggttgactgccgctggcgtcgccaaggaggagttggttgcggcggtcaggattcaggcggcggaggtgatgcgcgtggcggcgccgcgacggggcgaggggcagcacgtgctgctcggcaccgccggcgaaacccgagctgcaccacaaggtctcgccgatgccgtcgacgttgacggactcaagcgcgcggacgatgagcggccgccggccggctcgatgactactccgccgcggcgtccgaggccagtgggcgccaacaccgcgttgcagcggctgcagttgccgccgccaatggcgaccacgaggcgacgagctgacgacgctgcagcagtggatttggaatggactcgaatggtttga

SEQ ID NO: 11803 - DNA, 816 bp, Oryza sativa
  Clone ID: PAT_MRT4530_17992C.1
atggcgtcgagcaacggagagcaacctccagaatcgccgaaggaagcaaatgctgcgcctgtagcagccaagcttgccatggcgtcagggcgcgatggatgtgagaggctcaaggatctggtgagtagggaagacgatgctactacgatggttgtggccatggcgacaagcaagaacgtggacgacacaagacgacctccccctccccgtgctgaaggaatctctgcgactgatcagcaagcctctggtgctgtatattcgctctcgctcctggagggactgactcttgactcggaccagaactccgcgctgcatgtggtggcagcctccggtgacagccaggcgtatgtggagtgtgcgcggatggtgtacgaccaggcgaggcacctactcggcgcggccaacaacaacggcgacacgcccctgcactgcgccgctgcagctgggaaccactcctcgcgctggctgctgctgcgcctgcgcgtgacagcagcggtgcagcgaggcaaagtggtggaggtcctcatgaaggaggatccgggactggccggcgttgatcggcacgacggcacgtcaccgctgtaccttgccgtttcgttgggacgcttcgagattgcgtgggatctgcttgatatgagctctaggaaattatcttactccggaccagatggtcagaatgtcttgcacgtcgcagtacaacacccccaagggaaggagggatgtgtcacggagagggagggagaagaggagcaggtagcaggtggcttgccgctcctaccagccaacaacggcatgcacccccgccccaagccttaa

SEQ ID NO: 11804 - DNA, 335 bp, Oryza sativa
  unsure (1)..(335): unsure at all n locations
  Clone ID: PAT_MRT4530_17993C.1
caacgcgtgccttcgaccgggaacatggcatctaccggacctttcagggggcgcagaaggggggctcgaaaacgttgtgatagatggccgagagcnnnnngatgacccaaggcatgctgaccaaaccaagcacagccacacccccagcccnnngcaaggacagggccacacctgagcaacgaacagactacaccctcaagctcctgaacagaacgatccgaactgccggcccctgcatcatgcccgtcgtgggcaggcagtcctaggaggacgcgacgcagaaccggaacgctntnnnccaggggcccaacccgtgccacgtgtccgtactagga

SEQ ID NO: 11805 - DNA, 1008 bp, Oryza sativa
  Clone ID: PAT_MRT4530_17994C.1
atggagtgggtgcgggtgctggaggagggggtgttccggttcgacgcgtcgggggccgcgcgggcggcggccgcgcccagcttctcgttcgcggagccgcggcggagggaggcggcgcgggagggcgcggatacccccgccgtcgtgccggcgtgccacgtggtcggggacgcccagaaggttctgattaagcttcctgctgggacgtctttctatggcacaggagaagcaagtggcccgctcgagaggactgggaaaagagtttttacttggaacacagatgcatggggttttgggccaggaaccacttcattatatcagtcacacccttgggttttggctgtcctccctgatggaaaggcactaggtgtccttgctgacactacacagcgttgtgaaattgacttgcgagaagaatctactataaagttttctgctccatctgcttatcctatagttactttcgggccattcaatacaccatcagaagttatgtcatccttgtcccatgcaattggaactgtgtcgatgccaccaaagtggtcgcttggctatcagcaatgccgctggagctatgattcttctgagaaagtactcaaggttgttagaacatttcgagagaaaggtattccttgtgatgtggtctggatggatattgactatatggatggttttagatgcttcacatttgatagtagtcgttttcctgatccaaaatctatggttgatgatctccattccatcggttgcaaagcaatctggatgcttgaccctgggattaagaaagaggagggctactttgtgtatgaaactggttcagaaaatgaggtttggattcaaaaggcggatggtagcccattcataggggaggtatggcctggtgattgtgttttccctgattttacctgtaaaagaactcgcacctggtgggctagtttggtaaaggatttcatctccaatggtgttgatggaatatggaatgatatgaacgagcctgctgttttcaaa

SEQ ID NO: 11806 - DNA, 279 bp, Oryza sativa
  Clone ID: PAT_MRT4530_17995C.1
atggatggtgcaaggtgctggaaaacaacttcattacggtggttccataagcgccagcagcacaagaggaagaaggccccaggaagcagaagccagggggcaggcaaggaagatgtgatcagtgtcttccgggcaggtcttgcagcagatgcagttgttgttgagccactgttgacagccttgggacaagggccagacatcaagccagaagtttgttcgacagccatcaccgattttcatagtggaatgagctcgaaggaccggcagaagagtgattag

SEQ ID NO: 11807 - DNA, 197 bp, Oryza sativa
  Clone ID: PAT_MRT4530_17996C.1
tgtctgccgccgtcttccgacctgccggcgtgccgcgctttaaatccccaataccactctcagcaccaacacaggaacgatttgcccctccaagtctatccttgggtgagcggcaggcgcttctacttccgctccccgttaatccgctcctccttcccttgcaagccaccgccaaaatccattccaattcaaatccc

SEQ ID NO: 11808 - DNA, 310 bp, Oryza sativa
  Clone ID: PAT_MRT4530_17997C.1
cacgcgtccggttgattgtgatatgtactcaaacaattcagagtccatcagagacgcattgtgttttttcctagatgaagagcaaggccaagatattggttttgtacagtatcctcagaattttgaaaatgtggtgcacaatgacatctatggccacccaatcaatgttgtcaacgaggtcagtagtaagatagcatagcatctcctgaaatttcagtgtacatacttacacaattggacctaactttgtttgtgatttcattccgttgatacccccccatcatccttgcttggatggttggggtgggat

SEQ ID NO: 11809 - DNA, 951 bp, Oryza sativa
  Clone ID: PAT_MRT4530_17998C.1
ctagcttgttgcctaatacggcgcacttgtcggaggatcacatggcaaagcctctcggctcagccgatctgggacaacactggcacactctaatcactcttctgccggtccttcgagctcattccactatgaaaatcggtgatggctgtcgaacaaacttctggcttgatgtctggctgactgataaacctctctcgattgagttcccagccctattctctcacaacacaactactcatctcacggttcgttcagcgctccacgctgggcttaatttaccccttgtcccaaggctgtcaacagtggctcaacaacaactgcatctgctgcaagacctacttcaagacttcccactctcacaagaccaagacacaatacaaagttcaatcagctgccgcagttgcctgatatcaacttaagcccttattgtaaaaccatggaaagtcagcaactttggccaccctaggaattcatctggggaagagctcagcccctccgatagttaaattttttggttggttaatttctatgaacagactacctactgctgtcaacctgcacaagaagtcaatcatcccctccccaacatatcagctatgcaatacctgcccggaagacactgatcacatcttccttgcctgccccctggcttctgcttcctggggcctgattcaagtgctacacatgctaacctccctgagtgagattcacaccatccactggtctggagaccttccagaacgactaaacagcaccttcttcctcttgtgctgctggcgcttatggaaccaccgtaatgaagttgttttccagcaccttgcaccatccatcaaccgtcttctccgctgctgcgtcaacgacgccaagctttgggcaaaccgtttcaagctggctgaccaggcggttcttccgtcttggcttgcatccttctcctctcctctccaccttatg

SEQ ID NO: 11810 - DNA, 343 bp, Oryza sativa
  Clone ID: PAT_MRT4530_17999C.1
atgacgaaatcccactacgaaaatgttcaaattgccctctggccaggcctcatctgcaactatcgtcttggaccatcacctggaccagcatggttcggcctccctgccaacaaggctgctagccggacgccttaccgcctccgtcttgggtcaacaagcaagagcctaattggcttgacctcctccaagccaagtcgatcagactcatgcacaagtgcatggcattgggccacagagacctccaaggatcctgacgtcagtcccaccttgtcacatggcctcttgactgcgtcggacctccgttcctccctgagcatagtcccggtcctcgccattgaccaag

SEQ ID NO: 11811 - DNA, 444 bp, Oryza sativa
  Clone ID: PAT_MRT4530_1799C.1
atggccgccgagcttgaggccagttccgggcatggatggtttcctcgtgttgggctcgagcggtgtggtgaggcgccggacggctgccaccgtgagctttttgttgtttctgggatgggagaggtgctggcagcggtggatctcgtgacaggagtagagaaaccaatggcggcgaagttcgccgctgagggagaggatggggcgggggagtcaccgccgtgcaccaccggagacgatggcgccgagcttgtcgccgcgggagatgcgagagacggcgggagacggcggtgcaggagtgggaagaagcacggccgccagatccacgccgtcagtggggtgggggtgggagaggagggggcgggggagtcgctgctatgcacgtgggagctgagggagaggaagagagagagcggggaaggagaagaaaaagtggtgagaccagct

SEQ ID NO: 11812 - DNA, 1284 bp, Oryza sativa
  Clone ID: PAT_MRT4530_179C.1
atggccaaactaaatagcgatgatgtggcacgctgtgagaagagagtggggtcttcagagctcaggtcaccgactttgaacttgtccatagcttgcccccagcttacaccagctgcgtcgacctttccagcagcagcatccaactattgccagcttgatgaactgctgacagaagaggaaaaggatctacaaatcaaagtccggcagtttatggagaatgaagttgcaccaataatatccaagttttgggagaaggccgaattcccgtttcatcttattccaaagatgagcactctcggaattgctggaggaactataaagggctatggatgccctggactttctggcccagcttgcgccatgtgttttctagagatcgctcgtgtggatgcaagcatagcctcattctgccttgttcagtcatgcctcgcaatggttagcattgcacaactcgggtcagaagcccagaaggagaagtatttgcgaccattgagcaaaatgcagaaagtttgcgtatatgccttgtcagagccgaaccatggtagtgacgcgagctctcttaacaccacagctagaaaggttcctggagggtggatactcaatggccagaagcgatggccagcaaacagcagttttgcagatatcttcgtcgttcttgcctgcaataccagcaccaatcagattaacggattcattgtgaatggaggcgcccccgggcttaagatcagcaagatcgacaacaagatgtcgctgagggtcgtccagaactgcgacatcctgctggaggacgtcttcgtccctgatgatgaccgtcttcctggcgccaactctttccaagacctagtgaaggccctctctttctctcgcgtcatcgtcgcctggatcagtatcggcattgcggcaggggtgtacgacgcatgccttcggtatctgggagagaggaagcagtttggggcgccattggcggcgttccagctaaaccaggagaagctcatgtggctcctcggctggcgtctctacgagctgcatgactccggcaggatgaccaccggccaggccagcttagggaaggcatggatcacaaagaaggcgcgggagactgtggccttgggcagggagttgctcggtggcaacggcatcgtcaccgacttccacgttggcaaggcgttctgcgacatggagtccttatacacgtacgagggcagctatgaagtcaatgcactcatcgttgctagagacatcactggcatcgccagcatcaggccggctagccggctctagttc

SEQ ID NO: 11813 - DNA, 1932 bp, Oryza sativa
  Clone ID: PAT_MRT4530_17C.1
aatattttggcatcaatacaaaatggcccgtagtttcgaagaacagttcggtttctgctaaatttggccatcgactattattatttccttcaaaaagaaaaattgaagcaagaacacaggatacattcagattcatgatgatgccatcagaaatttatttatttattccctcgctgaaaacatacggactagttttctgctgcccatccaaatgttatcaatctattattcctgaagaatcaccatggcttccaaatgttattaatttattattcctgaagaatcaccatggctttgttttgccacgcgaggaattgctgtacatcgtgtttccattgcaggaacacgaaggtgttgggtgatctgaactcattgattccttccttcctccatgtctaagctcactgcagggataatctggccattgccaaggcaagcaccttcacaccgttcgccatgtcctctggtgacgcatattcttcgggcttgtggctgtaacctttgtaacatggaatgaagatcatacccattggtgatattctggccatgaagagtgaatcatgataagctctgctaatcatcagcttatattcgaggttcaactgttttgcagcaaattccattgcgctgatgactgatttgtcagatagagcaggtggatcctgatttatgatcttgaactctgataatagcacgccacggttctttgatatctcaattgcggattggtgaaccttctcaatgacattattcctcctcttctcatcaatgtctctcacatcaatttccacatgcgatttacttgggatgctattgattgctcctggatgtagctgcagaataccaactgtcccaacagtatcaattgatcctgattccaaaacgtgtttctcaactgctaatgccaactcagctgccgccagtccagcatcatttctgtaaaaagttacctcacctatgtcaatatgtggtggggaccttgcaggcatgagcactgctccagcatggcccccattcccttcaaactccaccttaatacttgcaggagcagcaatagcagtgacaacgccaattttgataccttctttttccaaaatggggccctgttcaatgtgcaattctacaaaagcaaaatagtcgtctttcttcaaaaacacattatgtagctcctcaggatgcatcttgtagccagcagagtctgcagcatcaaaaaatgacacattctgattgtcaactgtttctttgagggatcgagccagttcttcactccctgccattaggcggcttcccaagcagctaattccaaatcttgtaggctcctccgatgtaaacataataacctccaaagatctttttggctggaaaccagaccttttcagcattctaattgcctcaagagcacccaggacaccaaccaccccatcatatttgcctgagaatgggattgcgtcaacatgagaaccagttgcaaccgctcctagtcctgcctcagaaccctcccagcgcccaaaaatgttgccaacagcgtcttcacgaatggacaggccaagctgattcattattccctttatataccttcgagcttgcacgtccttgtcgctgtacagaacgcgggtcaccgacggcaccggcgagtcggagaacgaagccagctcatcaatctggcgctggagcccatcggagtcgacgtagaacggggaggagccgccgctgccgccaccgccatcgccgcggtagtcggacgcggggaatccggcgaactcctccatcgtccgccgcgccgccgccgcgtcgtcgtcgtgccccaccaccgcgccagcagctccgccgagcaggacgaggaggacggcggcgcccgcgagggcagcgaggaagcgcgcggcggcgctcgtcgccatggctgggtggaggcgaaggcgaggaggttggaga

SEQ ID NO: 11814 - DNA, 544 bp, Oryza sativa
  Clone ID: PAT_MRT4530_18000C.1
gtcgtcgccgcctcagcctcctcctcctatcgctgctgcgccggcgccaccccctgtggatctagccacccagaggaaggagagggtcgccctcttctcccctctcatctccaagccatcattgcctccctctttctctcccaatcctcggtgagctgcagatccggtttgggggccatcggaatcgatggtcttggcctccccaacggtctccttgctggtgaatccgcgcccctcaaagggtcgccagatttggtaagggaaggacataggagcgttggggctgagtgattggagaggcagcagctcgggcacgacattgacgacggtggttgcggcccggcgacgatggcaggtgcaacgacaacggcagcagtggctcgctaggcagcgtgatctgcaatcattgggggtgatttcttctccaaaacaagcaggtgactttctatagtccaccaaggagtgatggcaggataaaagtgactcttctctaccatggtgatccatcccagaaagcttcttcctccccttcttgctattggac

SEQ ID NO: 11815 - DNA, 223 bp, Oryza sativa
  Clone ID: PAT_MRT4530_18001C.1
gttgcaacccttgcctgaggtgcaaagggtttggttggtggagcttgggatgtgctgtgcccccctccctctgataagcctgcgatgatgtgtggtgtgtggatgtgtgtgttggaactgagaggggtgtgccctgagaccataagggagacatatatggtgtaacttcggccacagaaaatggtgtaccaaagagtttgttgaaaaaaaaaaaaaaaaaaaa

SEQ ID NO: 11816 - DNA, 583 bp, Oryza sativa
  Clone ID: PAT_MRT4530_18002C.1
cccgggctgcaggaattcggcacgggcctcagcctcctcctcctatcgctgctgcgccggcgccaccccctgtggatctagccacccagaggaaggagagggtcgccctcttctcccctctcatctccaagccatcactgcctccctctttctctcccaatcctcggtgagctgcagatccggtttgggggccatcggaatcgatgttcttggcctccccaacggtctccttgctggtgaatccgcgcccctcaaaggtgacgcatggaagccgaagccacccccaccgccgtcttctcccgccaccgcccatcctggcctccttctccaccctcttcctcaccttcacctcgatgccggatcttgctttagggtcgccagatttggtaagggaaggacataggagcgttggggctgagtgattggagaggcagcagctcgggcacgacattgacgacggtggttgcggcacggcgacgatggcaggtgcaacgacaacggcagcagtggctcggcagcgtgatctgcaatcattgggggtgatttcttctccaaaacaagcaggtgactttctatagtccac

SEQ ID NO: 11817 - DNA, 1470 bp, Oryza sativa
  Clone ID: PAT_MRT4530_18003C.1
atggatccatccaatggtgtcgtgcagctgatcaccaacgtacgtaaccctagagcgtcggcaaaggcaatgtggcggccgattcttctccagcctcgccgcactcccatctcccatctccggcgtcgtggccacgacgcgaccggccacgacgcgaccgacgacgacaaggcggttcttcccctccgccgcctgattggctcacggggctacgcctcctcctctgatgccaccaacgccgccgcctctgccgccgccaacatcgcggctcctcgagctgacagcaggaggcggcggcgttcaccggcggcaaaggcgaaggcgaagcagcatctgtacgtcgtgctgaatgaccggaaggacgcgtgcgagatccacaagctggacatcgacggcggcggcggtggccgcctgatgatgaacgccggcgacatggcttcgctgaagaccctccggcggctccccgagccgccgctcctccggctgcagagccccacagtccacccatgctccaagttcaccaccgtcggcagcagcatcgtcaccatgggcgagtatttcagcgatcattattgcggcgattggtttcgcgaggccagggggaacacccttgtctacgacaccaagacggcggcgctcaccgtcgtgcgccacctcccggaaggccttcttggtgtctacgacttcgtggccgccattgccgtcggcgccaacaggctgtacgtgctcgacgagggcaccatggacgattaccgtggcagaatcgttggaggcatgcactgctttagattgaccgacgacgacgacgacggttcgaggaagaagaaagagcggtggtcatggtggcagccggacgaatccacgcgcatctcgtggagcgaccacccgtcccgtctcccgttcgacaccatcaccggccaaatcgaggcgtacgccgtccacccgaaaggacggaccttcttcgtgtccgtgcggcaagtggacgacgagggtaccttctcctacagcgtcgagagcggcaagtggacgcgccgcggggactggatgctgccgttcgttggccacggccactacgacggcgagctcggctcgtgggtcggcctccatcatagcgacgacgacgggcgcctctccgcctgccgcgtcgtgtccgccagacagcgccgcgcgctgccggaggtgaaggtcagcaaggagaaggtgttcgtccaggtccccggctgggcgcgcgtccaggccgagctggtgtacatgggtgggcgcagcgagtactgcctcgttgagtggctggagcccgagggtagtagcgacgaggagaagtgcgacgagtgtgtgctccggctgaccaagatgcgcgtcgtgtacgacggcgacggcgagctcaccgtcgccgctcaccggctctctggctgctacaaggtctcaaggtctgagaagtacagtcgtcatatggcagcgttctggatgtaa

SEQ ID NO: 11818 - DNA, 197 bp, Oryza sativa
  Clone ID: PAT_MRT4530_18004C.1
cccacgcgtccgaacgccatcacaaccaataaaaaaaaattgaaaataaaaaaaaaggaaaagatgctatgaaaaagtggaatataagcttacataagtaaaaaagatgcattttacctcatgtatagtgatacctaaagtcaatgcactgtcctacaattgtactttggggcaactggttaaactcatgtgtatcc

SEQ ID NO: 11819 - DNA, 296 bp, Oryza sativa
  Clone ID: PAT_MRT4530_18005C.1
gataaacaaagacaaaggaagggtgtattacatatttgaatttactccggttgggtacatagatactcaaacgggctgacaaggtgccacacatagctgaatacctaaacctactactaatgtgctgcgtgcaacgtgccaatgagcaagcccacagatactgtcacatggccaggactagagtactaggactgggcttactagcagggactgaacgtgatcctgtgaacatgacaatcaattacacctcgccatctggctgatcgatcgaatgaaatcaagcgtatgcatgtttg

SEQ ID NO: 11820 - DNA, 621 bp, Oryza sativa
  Clone ID: PAT_MRT4530_18006C.1
acacaaaccagccaaactcagttgtccaggggggttgtattatttttccatatgcaataaactacaaggaagtctccttgatttacataggcatgatacatgccttacagtagtctagggtgcatattggatacacccataatgctcatgtctttatattcccataatatgatccaactccatctgtcctagacatttatttgtttaagtattattagctagtatcataatataggtaaagaaggccacatttattctaggactgggcaggctagaaacattctaaggacagtgttctgttttcccaatatactgacagtaccaatctggggatcgatgacgtggtgacatagtgccatctgtctgtccatcagtagtactgaccatgagctttctttcattagaatctgcacctgaattctctcctttgttcataactccactgtttgagtgagtattagcaccataagctgcatgattatgaccatcagttctaccaaggaaaagatcttctgaatttccttgtgtcacatcagcaattacaattcctacgaagaagaatgccatgaccgctaatgcaaaaagatttgccttcctggcgctcatgattttgcctcgggc

SEQ ID NO: 11821 - DNA, 948 bp, Oryza sativa
  Clone ID: PAT_MRT4530_18007C.1
atggatgaggaggagcaagagcagcctccccagcgctactggttcccgtactggaccagccctccaccgcctccgccgccgccaccgccaccgccctccagctccaggtacaggccgccgtcacctccctcatcgcgccatccccacccaaccatcccagctgcccgcgccgcaccaccgctcgggccaaccaaccgccgcttgcatcagcagccgccgccaccagcaagcagagatggtcgtcacgagcctcctcccaagcccaaggacgtcgtcgtcatccccaccgacaccgtactgcatcacaaacaaccaccacccacgcatcatcatcagcatcagcagcacaaggtgaaagatcaggaggagaagaagggcgacctgcgcaaggacctcaaggcggggctcgccggcatgctcagcgccgcctcccacggccagcaagggacaagcatcatcacgctggccggcgacaacaagggcgcatccatgaagatatcctcccccgccccaggcagcaagggcgccggcgacgacaagagaagcagtgcggatggcaaggggggcgtgaaggcgatgatcaacagcaacgtgcagtccatcaacaactcgctgcttctccacagctcctgcagcggcggcgacctcggggtgcacctcaagctcaagctctcctcaaactccaagtccaagtccaagaccaagagcaaggagaagcagcagcataatgtcgtcgccgataccagcaacaaggagaagaagcccgatagcagccaggagaagaaggaggctggtaccagcgccgccaaacccaacaagccatccgccgctgccaaaggcaacaagcccgccggtgcagctaacaagtgattctgcagacatactaatgtatgtatgtgctttgtactgatctgattgccttcgcctcatcataatgataatcgaatt

SEQ ID NO: 11822 - DNA, 578 bp, Oryza sativa
  unsure (1)..(578): unsure at all n locations
  Clone ID: PAT_MRT4530_18008C.1
atgcaagtgtgtactagtaggcatgtagcaccggttcctttgcgttcgtgtgtacgtgaccgtgtgtatgggactggatcgatgattgggaggggggccaggtgcaccgagcatcgatcaaatggatctagcggaattgagatcacctgcagttgtttgtatgactgcaactttcgcagtcatacaaccattgttggatcaaatatcaagggctcaaatcacacaaaagtactgttcatcagatactgtagcagatgaatcctgtagcgcgtactgtagcgagtgataacaaacagtactggtactaaatcatggccgttgaaatcttcgatccgatggtattgaagacctaagactgctaattttgcagtccatgttcaaaactgcgtgggnattcccaattccggattctagcgacgccttacggggttatggcttatccaggcaagtggggggattggtgatgtgatggatgcggtgtttgttagtattggtttattatatcatcgtgtagttgttgtcggatggtggtggtgtcatggtgacacatgctgcaatgcttcttgttctttcttact

SEQ ID NO: 11823 - DNA, 764 bp, Oryza sativa
  Clone ID: PAT_MRT4530_18009C.1
ccggccgggacgctacgctgtgtttctctggtttggggagctttggaatgaactgaggcagcagcagaggacggagccggcaagccatggctccctccgccgccgccgccgccgccgccgccgccgccgccgccaccgcctcgccgctgtcccgtctcctgctcagcctcccaaaccccagcgtgaaacttcccgtgtcttctccgagccggaacgccggcgccgccgtggccgccaagaacagcacccccgtcgtcgccctccgccggcgcgaggccgtggccgccgtgctgtccgcatccatcctctcccgcgtgctccccgcggcggcggaagcgtccggcggcgagtgcccgctcgaggtggcgcccaacggtctcgccttctgcgaccgcgttgtcggcaccggcgccgccgccgagcaagggcagctcatcaaggcgcattacaccgggaggctggaggacggcacggtgttcgacagcagctacaagcgcgggaagccgctcaccttccgcgtcggcgtcggcgaggtgatcaaaggatgggaccagggcatagtgggcggcgaagggatcccgccgatgctcgccggtggaaagaggtcgctgaggctgccgccggagctggcctacggcgcgagaggagccgggtgcagaggctgggagcccacctcctgcgtcatcccgcccaactccactctcctcttcgacgtcgaaatgttcagagtatatatcgataccgagttgagagtttcagactga

SEQ ID NO: 11824 - DNA, 953 bp, Oryza sativa
  Clone ID: PAT_MRT4530_1800C.1
actaaaagcatacacacaattaattaattgaagtctataagggaattatgcatcctttttcctggaagctgagccagggtgttcgatccagcactttttctagtggtagatcagcgtctgtatgtatgtatgtatctacatgactacgaagcaataaaataaaagatttttctgcaattgaactgcctcccatcacgcggtgaggtcggacagcttgaaggagtcggcgacgactttgagcctgttcctcagcctactccatcgccgctcgttcgccgtcacgatcagtgtgtagtaccgaccgtttccaatggcaaccgtcgcaaatgcggacacgccgtagcccggggcctcaagatcgtactcaaatgtccagtagttcttgccatccacggtgcgctcttgcatgtcatagacagttggtatttgatttggagcagcataaacattgttcaccaaattgaagatcgcctcatccattggaccaaggtcacggatatctgtttttgtagtaggaatgaagcccacacgcacgcactgcagcgctacattacgatctttgaacgctgaatcatgccccaggaagtcgaaatccctccaatcagctggatacaggtatgaatatccatcttttgaatccacataagacttgtaattctttggcacttcttcagcatatgcagagctgctctttagcagaccagtggctaatgctccagcaccaagcagagctaatctcctccttgtcacattcttttcatccgaggatgcttcactcgagctagcgttgacgactgacagaggagacgcattcagcttgctggtaacagcacaatttggagcaaccaactgcttggaaacggagcagatcaaattctgcaggcttgccatttcacctgcaggagtagctatgaaacctgatagaatatacgtgttcttgcctcccgccggtc

SEQ ID NO: 11825 - DNA, 206 bp, Oryza sativa
  Clone ID: PAT_MRT4530_18011C.1
gtagtataatggtgccatggaccacaagtgggcattattgcccatgggttggtgccccattgctagatagtcccaagaaagaaccaaatggaaatggatattaagaagtactcaatatagaaaccttcccccgccatttaccagatcatgtaccgccgtccaccaccgattttatatagataaaagattgtaaaaaaaaaaaaaaa

SEQ ID NO: 11826 - DNA, 657 bp, Oryza sativa
  Clone ID: PAT_MRT4530_18012C.1
cccgggctgcaggaatcggcacgagggagagaactagtctcgagttttttttttttttttttggattcttagaacatgtcataatattatatacttgagtctcagtacactagttttaccaccaacatgcaactgatccattttacaagctaattaacctctcgctaattaatttctctctctctctctctctctctcactctgcataatcccataacctgattactattactactcccctccttgatacttgcacgcaatatcatcacaatccaaggggtaaaatgaacattgacccacccaaaaagaaaccatcccgccaaaatccaaactagaggcagaagcagccgccggcgttgtacttgacgtccttccggccgccgccgtgcttgatctgctcaccgaccttcctcaccgccggcgcgcacggcgtccactccgccgccatccgcacccgcgcccaccacagccacccgcttccgttcccgcccttccgcttccgcctcgccgcggcggccatggcggcctccgcggccagccgcttgttgtccgcgcgcagccgctcgatctcggcgaggcccaccttcctctccgcctcccacgccgccatggcctcgtagcactcccggttccgcagctccagcccgtacacctgcg

SEQ ID NO: 11827 - DNA, 136 bp, Oryza sativa
  unsure (1)..(136): unsure at all n locations
  Clone ID: PAT_MRT4530_18013C.1
aaattnaagttacaagtgtagcaagtgatcatacatgcaagtgcaaactacacagtgtactttcattgtatcatgcgtaagcaatgcacattttgtgataactttataggtatggctttcattaatttcagttaaa

SEQ ID NO: 11828 - DNA, 4764 bp, Oryza sativa
  Clone ID: PAT_MRT4530_18014C.1
atggaagcttcagtttctcaaatccgccgctctcctcctcgaatcgaaaaaagaaaaaagaaaaaccacaattctctttcgggcaaagcccccccgactcgtggcaactgcgactccctccctcccgtgtggaacgcgaagtcagcaagtgaatgccactggacacgccgattgacttccaactacctttcgctggtggtggtggtggttggggaggaattgcccccgtgctttgctcctcctcccatggagaccccgccccccgaccccgtctcgcctccgccgcccgccgccgacgagggctcgccgggaggcgacgacggggcggaggacgcgggggggttcagcgccgggctggattcgctgtggacggccctgttcggctccccggaggagctggagcccatgtggtccccgccgagggggttcggcgtgggggccgagttcgccgcggcggaggtggagcccgagatcatggacgtcgcggggggcccatgggacggcgcgccctggaggtcctccggggtcgtcgccggcgagggcgcggccaccgcgctcgttccccccacggccgccgcggggttcgcggagttcgagcccgcggcgccgatcgattcgtatccggcgggggcggcggcggcttcgttgggcgacgttcctgaggtgagtgcgctcgattccggcgttgattgttcgcctgacccgccgccatcgtcgtctcctccggtggattttgatgcgcgggggtttgaccccgtcgccgactccgccccggcgatggagtctccactaccgccgtctgtcgcttcctcggaagccaatttagacgggagaatgctcgattgtacgctcaactccgtgccatcgccacctcttgcttccccatatgaggtcggtttgggggctgaggatcctatcaaggattcttccccttcggttgcttggggaacaaccatggatgcgaaggatcccgaggtggatgctacttgtgcaaatggtacagctctgcggagatcacggaggatcatgaaaatcaagtcagcggcgagctccatgcctttgaatcagaatggagactcatctagagcttccaagcgacgagttgcggattcaaggaagagtagaagcagtgaagggagcaaactccctgcgttcacagggccaatttcagtaaacacagttgatttgattaacggggtgaaggttcaaggattgcaagaaattgttgccgtggaaaacgtaagttcctcttacgacaataatcagaaagcaggtggtctctacaatcaggttgtggtggctttaccagcagcgagtaatagtttgttgaaagacaaaggagcttctgttcttcctcgaaggaagactaggttagcctcaaaggtattggtgaattcagacagggtgtcagctatatcaccagtggtaaatggtggacctcctgtgcagaaatcagatgtttgtatacctactaaaaagcataagcttgctgttgaagagtgcttgacaagtctggatggagtggatggtggtggtattgtgttgtgcaactcaaagttgaaaagtgcaaaatcacgagtggtcagcaagacgcctcaagggagaggaagaagatcccctcaacctccaaagacacagagggccaggacgttgtcggttaaatacttggaaaaattaaagagggcagaaaacaataataataatggctcaatgtccaaatcaccaagagttccaatgataccagaaaataatggctcaatgtccaaatcaccaagagttccaataataccagaactgagcactaagcacgaacttgttttggacaagcacatggttgattcagtgatgttggaaacggacgatggttcctgtttctttgtgggggatgcagttcctgatgatgaggctaggaagcagtggcctcaccgttacgaaataaatgatcaaatcatgaaaaaggataagaggaccagcagccaaacatttgccaaactagttaccgtatctttttgtgtagtctttatgtatgtttatctacagatgcttgatttcaggggtccagagggaaaaccaaattatattggcaggttgctagagttcttcgaaacaaaaactggtgaatgttacttcagagtgcaatggtttttcacagctgaagacacggtcataggagagcaagcacaatcacatgacccgaggaggctcttttactcagacctgacagatgacaatttactggactgcattgtctcgaaagtgacaatcgtgcaagttcctcctagtgtagatggaaaatcaaagtcagttccttcgtccgactattactatgacatgaaatactctatcgactatagtacattctctaccatagaaatggaagacacagatgatttaatgcagtcatgttacactagtagaatcaatgacaaaatgaagaagatagatgtcaataagaagcacaagtctcctgtgctagagaagatggagctctctttgctagacctgtattgtggttgtggaggaatgtcaactggactatgccttggtgctcgtggtggtggtgtgaatctttcagcgagatgggccattgatgatgatgaaattgcatgtgaaagcttcaggaacaatcatccagaaacacgggttcggaatgaaaccacggatgatttccttgaactgttaaaagaatgggagaaattatgcaaaacatatgtgaaacatagtaggactaaggcatgtgttgacagtacaacagaatccaataatgaaactccagattgttctaccgtcccacctgaggagtttgaagtatggaagctagttgacatttgctttggtgatccaaataaagtcagcaaacacggcttgtattttaaggtccgttggaagggttatggccctcatcatgacacatgggagccagttgaaggattaaggaactgcaaagaggcaattagggattttgttattgaaggccacaggcaaagaatactaccacgccctcgaagaaacatagctgtgttcttgcttcgaccatcgaagttccctctgggtgatgtggacgttgtatgtgggggtccaccatgccaaggaattagtggctacaaccgcaatagagaattcgaggcaccatttaaatgtgagaaaaacaagcagatcatagtttttatggatgttgtgcaatttttgaagcccaaatatgtgtacatggaaaacgtccttgatatattgaaatttgctgatgcaacacttgcaagatatgctttaagtcggctagttgcaatgcattatcaagcaaggctagggatcatggctgctggatgttatggccttccacaatttcggatgcgtgtatttttattaggctgtcattctaaggagaaattacccccttttccactgcctacgcatgaggcgattgtgaagaatggctgcccgttggcttttgagcgtaatttggttggttggcccaatgacacaccaatgcaactagcaagaccaattgtccttgaagacattctttctgatctcccagaagtggcaaatggggaaagccgtgatgaaatgctgtatgtaaagggtcctcaaactgaattccaaagatacattcggtcatttaatgttggtgagttgatcgccttcccctctgaagtgcatggtcccagagctcatgttacaaaagattccaaatcctcaaaattgtatgatcatcgaccattggtactggataatgataactaccaaaggatattgcaaattcccaagagaaagggagctaattttagagacctttcaggagtcatagttggtcctgacaatgtggctagattagatccaacgaaagaaagagtacttttgccatctggtcgtcctctggtgcttgattgcatactagcttatgagaatggtaaatctttaagaccttttggtcgagtatggtgggatgaggtagtgggaaccgtgctgacagttccaaatgcccgtatgcaggccttgatacatcctgcacaagacagactgcttactattcgtgaaagtgctcggttgcaaggctttcctgacaattacaggtttcgtggaacagtcaaagacaggtatcgccagattggaaatgcggtggccgtacctgttggacgagcacttggatacgccctggcgatggcctacctgaagaagtctggagacgatccccttatgttgctgccgcccaactttgcattctcccatgacttaagagggtttgcctagtcaaacacccttgtcagaaggcacaaatttgagttccttccctcgttggctttgattgaaattcaccatctacattaatgctctgctaccaaagctgctcctcttcttgttggccaccctttctcgtgaatagtgaatagcattaggagttaggacatgccatttatctgttgggatcagatcaaggaatctgggttccccaatctgatgatcagctgtttgttgtagcaaaatcattccttgatttacagtagttgtgacatccaccacactagttaattagaaggattccatagggcaagtgtagtgactcatatcgggagcctatgttgtagtgtaaaagaatgtatgtacaagttagatgattaggaaaataaaatgtatggacatcatcttacctgttgttgtgttagccagcgatgaacacaatgtaacgacttcaataaatctacattgagctgcagatttccatggaacaaaattaatctattgcgtgataaaaaaaaaaaaaaaaaa

SEQ ID NO: 11829 - DNA, 282 bp, Oryza sativa
  Clone ID: PAT_MRT4530_18015C.1
atgaacccccctccgaaaacgaaagcgcagcaaatggacactagagcagagcacaggacacacggagctactccaaatatgcacaccataaaaaaagaaacagagaaagagatggcaaagatctcgttctccgattcaaggggaaaggaaacagcagtagtcactggtcagttaccttcttcctcctcttcttggacggcgggtggctcctctctcggtcgacagatcctcgccggcgcgcggcggcacaagagctcggaagcgacagaggagagcggctga

SEQ ID NO: 11830 - DNA, 415 bp, Oryza sativa
  Clone ID: PAT_MRT4530_18016C.1
aattccctcttttttccacacttttttatttttttccggtcgcgtgggttgtcccgggttttccggtccggtccctgcgggcgtcccagctttcccttttgtggggggggggggagcttggctttttcttggccatggctgctccctgggggaattggttttccgctcacgtttcccccctccttccgggccgggtgcttttggggtttggcctggggggcctttggggggggctgcccccctttatttgcgttgggctccctgcccgttttccggtcgggtttcctgtcgggccgggtgcctttttgtttggtcccccgcccgggggggggcgctttgcgtttggggcgccgggggggctttttttctcccctgggggccggccccccgctgtttgccctttcccgcctgcccc

SEQ ID NO: 11831 - DNA, 912 bp, Oryza sativa
  Clone ID: PAT_MRT4530_18017C.1
atggcgccgcctcttcttggttcttcagccaccctcaaccccggccactggttcctcggagctttaccagcacttttttcccaattccccaatttacacaaagtagagatcaattactctggttgggcacctggcaatgggagtcagatcgacaaccaaggtctccgtgtgctttcattctcactgcccttgctcaatgatctcaccttaagcttctgctctgaaatcaatgactctggtcttgcttgcctgactaattgcaagatgttgatgtccctaaaactgaactccacaccagaaataacttcaagggggcttctctctttagctgttggttgcaagactctatcttctctccaccttaacaattgtaagggaattactagcagcactgagtggttggagcatcttggcactaacggatcattggaagaactagtagtgaagaattgcaaaggaatagggcagtatcattttttaatgtttggcccaggatggatgaagcttcagaaatttgagtttgaaaacgaacaaagtttttggagtattttcagaagagatcgtgacccatcatacaaggctcacacttatagatatgatcttttgtgcgagggtttgaaggacttgaggttggtgcatattgtaacagagccgaaaggcccagaaataggacttcgttttctgttgggaaagtgcaggtcgttagagaagctaagcctagagtatgttagtggtcttattgacaatgacatgattgcactatcccagacctgcaagaatcttaaaagcatctcactttggctgaaacccgaacactacaatgttggtgatgatataattttcaggacgggttttactgatgaaagtctcaaggcactagctctcaactgtcctttccttcagaaatgttga

SEQ ID NO: 11832 - DNA, 376 bp, Oryza sativa
  Clone ID: PAT_MRT4530_18018C.1
atgggttctccctcgccggccgccgggacggaggagatcgagagacttgaaggtgtgcaggaccttctgccgccaccgccggagcatgcactcggcggccatgcatgcgctgccgcaccgtcggcgaaggccatgcgttggcgagcgaagtggccgagagcgaggctgtttgatgataagcagttttaccataggttttatcgaaagtcgtcggtgtcgtccgacaccgatgcttacactgtaaatcctcccttgtttgatgggctgatattgctagcgtgggcggagagaaaggtgcctgttggtgtgccgtgcttgcttgcgtccgtccgatgccgaacgagcggcctagcgacgtcgaacgtttcctcttacg

SEQ ID NO: 11833 - DNA, 699 bp, Oryza sativa
  Clone ID: PAT_MRT4530_18019C.1
atgcccggcgtgcggctgaaccaccaccaccatcatcagccccccgcggcggcgccgttcgtgggcgcggcgccgctgccgcaccacccgagatcaggcggcgcgtgctactgcgacccgtgccacgtcgccggcgcgtggcgcaggggtggctgcggcggcggcggcgcccgcggcgtgctcccggcgaagcgcgccccgcgcgcgccgcgcatgcgctggacgtccaccctccacgcccgcttcgtccacgccgtcgagctcctcggcggccatgacagggcaacgccaaagtcggttcttgagctgatggatgtgaaggacctcaccctggctcatgtcaagtctcacttgcagatgtacaggacagtgaagaataccgaaaggccggcagcttcgtcagatcaagctgatgggtttgagaatgggtcggccggcgagatctgcgacgagaactcgctcgacctgcacggcggatgcaggccggaggcgatgtcggcggcggcgcgacatggaagggaggactggtctggcttccatgagtccaacactggaaccatgcaaactctgaaggatatgcaatccaagagcctagagatcatatcagacatgaactcctgcgtttcggagacgacatcgagcaccagcgagctgaacctcgagttcacgctagggcgaccacaaaaccgaccaaactaa

SEQ ID NO: 11834 - DNA, 594 bp, Oryza sativa
  unsure (1)..(594): unsure at all n locations
  Clone ID: PAT_MRT4530_1801C.1
agatttattgcgctactacctcgaactgtggtgtttcgacaagggagtgatctcggtgtctgcttcttatcgttctcttcgtgctcgcggcgccgatggcaccatggcgtgccaccaccagagtatacagctcccggtgagtcttgtggcggcaggatgaagctatccgacgtacctcaccttctgtcctgtgttcattggcgaggcgccgatgcgttggccgtggtgcgggcagtgccgacctcgagcgtgtctggcaagactgctgccgggggttcgccgccgccgactactgctggcgctggtgcgcgtcgctcgttcactggctgtcaggtctctgctggtagcgcggcgccaccgccgccggtctccccatggcctgggcgttccccggatgtcggagaggggacttgtgtcgtgcgttgctgagctctcctgcggtgtgctctgcggcccttcccgtggtgctggnggggtctgcttctggctcgggtgtcctacgctgccaggacccggtcgctttgttactatggttcgctgctggtttgggtcggtgtggggccgcttgttaaggagtggtgtttgtttgtgggc

SEQ ID NO: 11835 - DNA, 1029 bp, Oryza sativa
  Clone ID: PAT_MRT4530_18020C.1
cttttctgtgagcgagagctgagttgaatgcaggggggattggtggacctgggctgccggtttccaaggataataaaaactacctcccccgctcgctgctacgcccacccggcgctctgtgccctcctccccgtgtttatttatacgctcccagctaccactcttcacaaagcgatagccggaggaagaagaagaagcaacagcagcagtcaagccaacccgtccggcgagcaagaagcaaccgaggcagcaaaaggaggaggagggaggactccactgttcgcttgtatcgtcttatgggggaagaggatatcagcaacgacagcaagagcagctgcggctgcgaggatggcgatggcggtggcggctcgcgacgacgacctcgacgaagacgacggcgcccccgacaacctcaacgacatagtggatggtgatggcaacctcgacgacgacggcagccgcaacggatggatgagatggcgatggaggttaggcggccggcgccgaagagcggcccattcttccccatcttggctcctccctcgtcgtcgtcgccagcgcaccctccctcacggtggcggcggcggaaatcgtacggcggtgatggcgcagggcgacgacgggtgggagaaggcgatggcgcggggcggtgacaggcaatggcgcgacgatgtgagttatgaaaatccgttccacaattcccccgttgtcgtgttcgtcgtctatgttgagttcatcgttccggcgatatcgatctaccccacgatctgttggctcatcaagtccgacgcggagtcggtatttttgtgcgaggagaaaaaggcgatgcagcagccgtcgtccacgtctacgcagccgcacgcgtcgaggaagcagcagccgatactagtctttttcgcgtccaccgtcgccttcctaggacagatgcggccgtacctatgccgcctcgtctctatcaccagccttggcacactcaggggatctagtatccttcactggggaggccagatctcgatgggaggggagtag

SEQ ID NO: 11836 - DNA, 180 bp, Oryza sativa
  Clone ID: PAT_MRT4530_18021C.1
atggaggggagctattaccggtgcacgcaggacaactgccgggtgaagaagcgggtggagcggctggcggaggacccccgcatggtgatcaccacctacgagggccgccacgtccactccccctcccgcgacgacgacgacgccgcccgcgcctccgccgagatgaccttcatctggtag

SEQ ID NO: 11837 - DNA, 1080 bp, Oryza sativa
  Clone ID: PAT_MRT4530_18022C.1
ttttttttttttttttcgcaacttaaccctttatccttgcattacagatttacagactaaaattcttcttttacactgagcagcgaatgctttgtcatccggatgtccttgtgatttccagagctcaacattttgcagatgtagcattcctgatctgcatgtctgggtacagtttgtgacactgtaccgtgggagtttgcaggatttctagctccatggtcagaaatattttttggagttccatgttaaaatccacaggtgcgaagtgttcacgctcgggaggctcttgttcctcttgaaccgcgtgatcctcaccgtgctcttggcgccgcactcctcgccgtcggcctccggctccgggtcgccgtgcccgtcagccttcctccggtggtcgtcgtcggcgaagtaggacatcgacgaggacgacgaggatgacgaggaggaggacgacgacgccggagagcggcacgacgcgtccagagccgccgcgtcgtagtcgtgtttcttgcctctcgccgccgccgtggccttcctccagaggctcaccccgacggcgcttggcttcctccggtggctcgccgtgctcccgctcctcgtcagcggcctcggcggcttgtttccaccgtaggggccgtgcagcacggtgttgggggagagcgacgaatccgccgccgccgcggctgccgctgcagcctgcaaccgaggcggcagcttgagcggcacgacgacgtgtcgcgccttgtcaccgtcgccgcggtcaccaccgctcgcaggcgcagcctcgccgccgtgagaaacaggtgccctctcgtcggcagccggagcgagcggcggcggcggcgcgaagtgttctggcgcgaccaccaccaccttaggcctcccgggcgcctcctcccagaggaacggcacgccgacggaggacccgagcgacggcgccgccgtgggcgacgcggcgtcgacgtcgagcaccttgctcgtccgcgaccacgcgccgcgcgccgcctgcaggcacagcgctgccggcgccgccctgccactgccgccgctcaccgtcgtcgtcgccgtagcctccgtccccat

SEQ ID NO: 11838 - DNA, 142 bp, Oryza sativa
  Clone ID: PAT_MRT4530_18023C.1
cttgccggcccacgcgtgcggctggttaaaacccctacattcctccctcttctttgccgcggcgccgacatcgatccatccctaacaaataacacgatgtcgcgcgcctcggtcgccattcttttttacattcttacagccg

SEQ ID NO: 11839 - DNA, 910 bp, Oryza sativa
  Clone ID: PAT_MRT4530_18024C.1
atggagtacaagagatcatcgcatgtggaggaggaggaagaggaggaagaagaggaggacgacgaggaggaagacgaggaggagcaaggtcaccatcagtacacgacggcggcggcgcagcagcagctgcacccgcaggttcttggctcgtcggcttcctcgccgtcgtcgttgatggactccgccgctttctcgaggcccctcctgcctcccaacctgtcgctcgtgtcgccgtcggcggcggcggcggcggcgcccggtggatcctacctgcatgcggctcaccaccatgggcagggaagaagggtggaggcgcctggtggggagagccagcaccatctccagcgccatcatgagccggcgagaaatggcgttcttggcggcgtcgccggtgctcacgcggcgtctacgcttgccctcgtgggtggtggtggtggtggtccgagaggcggcgagggggcggcgggcgaggcgccgacgtggaggtacagggagtgcctcaagaaccacgcggcgcggatgggcgcgcacgtgctcgacggctgcggcgagttcatgtcgtcccctggcgacggcgccgcggcgctggcctgcgccgcgtgcggctgccaccgtagcttccaccgccgcgagccggcggtcgtcgcgccggcctcgctctcgctctgccccgcctccgcctccgcctccgccgccgccggcctgcgcgcccgcttcgttggtgcgtccccgcgttgttgccatgagaggtaattaaatctgatcttaggacatgcatgcacgcatttctttgcttcccttggataaacatgattaggtttagcatgatagagccaaatgctaagtgcattttagggcttctttcttctctctcttgctagtgctagtggtagtgcagcagtagtgcatg

SEQ ID NO: 11840 - DNA, 201 bp, Oryza sativa
  Clone ID: PAT_MRT4530_18025C.1
atgaagaggaacaccatccttgctctcttcatctgggccatggctatggtgatcttcgccacggcaatgccggccaaggcaaggatggaggggatccatcctcaagagggagtagaccccgtcctcatcattagtcctgaagaccttgacagtactacacaaggagcccttggactagcagtcaaaacccgcgggggctga

SEQ ID NO: 11841 - DNA, 374 bp, Oryza sativa
  Clone ID: PAT_MRT4530_18026C.1
tttagggcatgagcatgaccagcatgtactggtgcggccaggacctgcaggagcttgttaacgccaatggccatggataagaagacgaggaagaagaaaagacttctccggagagggaggacggtggatgcagaccgaatccgatcgacatgcacgccgcggagttaatagggaaattctacgagcaattgaggctgaaaaagtcggactgattcaacaaccgagcctatggatcgatctcagtgctcggatcttgaaattagcagcgttcttctgttacgatgtacatggcggatggggagcaagaaaaatccattgaaatgaagtaatgaagaaaagtatatacctgaatgtcgagagcataattcacattc

SEQ ID NO: 11842 - DNA, 1098 bp, Oryza sativa
  Clone ID: PAT_MRT4530_18027C.1
ccgttctttccgtcgtgaacgcttcgtgtaaggcaaaacatccatctgatttatcttgcgaattggattgcttaacctaatctgggaattcaagtcagtacgtacgatatgccggcaccatcggcatccatccatctgggagttccaactccgtacataacatctcatggatccaaaattgctcgcctacacatgtatgactgggattgtgctgattcttctagtcgtagtagatggaatacttgaacataatagaaccattccatcgatttgttggatcggatatgatgacagacctcagataccccattgaaagacaacacagtcccattttgggcggtcccgataattggtatcattggaccaatgattatcatcactggaatatacttcaagaagaggaatgtgtatgatttccatcatgccatactaggtctcctattttcagttcttatcacggcggtaataactgatgccattaaagatggggcttatgataatttcactacaggagtgctttgtcatggtaaggcgagcgttatcaaagaaggtcacaagagttttccgagtggccatacttcttggtcttttgctggccttggtttcctgtcatggtatctggctgccttggttgctgtttctcgggtagatgactattggcatcattggcaagatgtgttcaccggtggaattttggattatacctcgcaacaagtaaaggagggttggtggtttcttcattttgctacctccaattttttccaatgccatctgatgaaaacggtatacgagaaggatttgaaacctcgttgcgacatgggtagggtttcaccagctagaactccgacgctgggggtggtgcaaccggtcaaagattggtggaaaatactggcctctgtgtctggcgtccctaagaagggactctgcaccctgattctactcatcgtatgggaagtttggaaggtgcgaaataggaggatatttgattataaggaagccacaacctcgtatctcctttcaaagataaaagaagaggctggcatgtgggccttggcaggcgccaagtgtcttggagagatcatcccgcagtttgtatag

SEQ ID NO: 11843 - DNA, 2371 bp, Oryza sativa
  Clone ID: PAT_MRT4530_18028C.1
ctcatcaacaaatccattcaagtaacaccgggggctttgaaaattgcagcacagatatttgtcttggatacaagagtatgaacttgagttaagcagttcaatggaaaatagctcggggttccagaaatgagcttacaaatctacagctgaagagtacctcataaccaggcatatatatgcctggaggagctctacatgtttctctttgtttcgcgcatcagctcaaatgcacagtttcggatttcagaaaccacaaaagaaaaaacctagaaaaattcaaactctagataattgtctgagcccttctggttggaagctggtgcaaccttgccattcgttgacggcacctgcttcgggcgacaatcgagctcaacgggcttaggaatgtctggagggctcgcgcatcttatgagcgcccagttgacaccctcaaagaatggatgctgttttatctcagtagccccacgcttgtagccaagtcggtgctgagggtccttgaccagcaatccccttatcatgtcccttgccgagaagctcactattggggattctgggaaccgcaagggctggccaacgacattgaagagcgtcgctcgattgcctgaacccttgaaaggggtcttgccaaacaatagctcatacaagaatatgccaaaggtccaccaatccaccgcactgccatggccctcgcctttaattatttctggggccaagtactcatgggtgccgacgaaggacatggaccgagcatcagttggttcagcgatgagctcagggaacaagctagcttggtttgcagcttcaggctttgatttctctttcttggacttcgatttggacttagacttgaagaaccgtggtccaaagcatgtggttggagcaacacatgatggctgaatgcacgatggctctatgcaagcaggctggacacagtacgctgcattattcctctgcagtgcatctaaaccaggatttgcagacttgatcacagttgggctcactgaacagcgaagagagaggtcaaagtcggaaagcatgatgtggccgtcctcccgaactaggacattttctggcttcagatcacggtatatgataccaagcatatgcaggtactccaacgctaggagaacctctgctacatagaactttgctgcttgctctgaaaaatgttttccaggctgcctttgtcgaagagtgtggaggtcccctccagggcagaattccatcaccagacatgaaaatttatctgtttcgaagtgagtatatagggttggtagaaatggatgatcaagcgactgcagtatctcaagctcagtctgcgatcgaagaagcttcttccgacttgccaaagatgccttatccatgaccttcattgcaaagtaactcctagtaccactcaattctgagagatacacgctgccaatatctcccgaacctaacttcttaagcaatctaaaatggtttaaaccaagaatgccatccttggttttgaccgtctggatcgcttcccaccttgaatcattccctttgtgcggctttgtggtggcgctgctcatgctgctgcgtgagctctcatcacttatgtcgctgctcgtgctcgcgcgacacatgctgctcttcccactctcagtgaaattagccctgtcacttgtcttagcactaccactggtcttcctcaaactattcgtcccatcactcactttagcagaagcaaaactatcgctcgtactactcttctgtgacgtcttcttctcctgattcccattacaatccaagttttggatctccttcagttcgccggaatcttcctcctccgcgactaacgaatcatccaggatcccagactccgaagagaggcctgaaagctccttgtccagcgtagatgccggagaaccttgatgctggtcagatggtgttcgctcctcggaaaccacctcagcatcacctccctgttccccagtgcccttcggctttgccgcttgaccaggcatgctttgcagcggtgatttggacgacatgaactaagcagtttatcagaaacaatcaagcgcggaatcggacagcaaggtgaacaaaatccctccacccccaaattcagtacttcagcagggcggtcaataattcctcatctgtgctagggccaagaagaggccatggcagtggcaggttgtggagaggggagatcttcacagatgggatgcttgctgcctgctccaccggctaggggatgttcagctgttcattcatccagctctctctctctctctctctctccctgactccatggcaatggcaatggcaaaaggcaaagctggagctgctgcatgctagtggtggccttggggcctcgatttgtgtggggcttcagggt

SEQ ID NO: 11844 - DNA, 168 bp, Oryza sativa
  Clone ID: PAT_MRT4530_18029C.1
agcaacaattgcttcccattacaatggccaacattataatcgctaatattcaagttcttgtataaccagtcaaagacaattagtaaattaattaacttggtaagacaaaaggaggcgacccaggccatttattctcttttttcaaattaagaaaaacccaaaaccttt

SEQ ID NO: 11845 - DNA, 331 bp, Oryza sativa
  Clone ID: PAT_MRT4530_1802C.1
atccagccaaaaagggaagtgtatttataaaagagtgtctacttcttcatcacatcatacacatcatatcccaggttcacaatcaacaaagcatgcattgctccatcaacaattacatcccaatacaccaccaccattcacaacctactcacctcctaaaaaacacaggaaatttggtggaaacaaacaaactattcaacttcctccatttggacatccttgataacactccaacacctcaacaactcaccattctgtttttaatccctggcactttatggcctttaccggattagctaaatcaaccaaatggtttttgatcaaaccattc

SEQ ID NO: 11846 - DNA, 374 bp, Oryza sativa
  Clone ID: PAT_MRT4530_18030C.1
cacacgcgcacagcgcatcaccaacgccggaaggagacagcgcccctcgcccccgccaccccaaccctacgagagggagggagccggcgcgccagccattcaggcatggccacctccacttccactggccacctgtccgtcaaccttgttctcccctcctacccctagattatcgttgaggctatctcattactatctgttttattctgatctatcctctccttcttatttctatattttataaagtttgtaattttcaatttatttttccgttattctttttatcattttcattattttttaatattttttatctttcttcttatattttctttttacatttatatccattttatatttctttttatataatt

SEQ ID NO: 11847 - DNA, 226 bp, Oryza sativa
  Clone ID: PAT_MRT4530_18031C.1
gcgaaggaggagcatggattgatgatggttgagtgcatatcgattgctgacaggataatgatggagaccatcgccaaggatgtcaccaacttgatgagggaacactgcgttggtgtacctcaaccgcatgacggatgcatgcatccatcccgtagcggccaagctagaatccatggcgccatgctcaatcatgcaggataggatgggctacatcaatgaacactga

SEQ ID NO: 11848 - DNA, 274 bp, Oryza sativa
  Clone ID: PAT_MRT4530_18032C.1
tcggttatagatcgcaagctggccttctcctgcaaggagagcatgcttaagcagggggtcccctacaccaagcagtttacgttcttggaccatgctgggatcaacgacactccagacagcgagcatagctagtggacgctggctacgcttaccgacgtggaggaggtgaagactggggccaggatgctggcgatctgggctacgacaatcatgttctggacagagtacactcagatgaccaccttctccgagataccagcgaccaccatggacc

SEQ ID NO: 11849 - DNA, 533 bp, Oryza sativa
  Clone ID: PAT_MRT4530_18033C.1
ggccggccgctttttttttttttttttcacacaacttaattatttccatatctcaaaatgtccaacacaacaatgcattacattaatttttttagtttgggtattaccacttccggccaaagttcaatgaaaagatacgacattctgagtattgctcaacacatttgctatatatatgttcattttggtaaggacactcaataatcatttcttcgcttgagagcatggtaatagctagcaaatgtgtccattccctcatcttcagcgcgcttcatactgaacaacttggcgggttcgcttcttgcagaggatgcgacagccacattcatggcactggacaacatcagtcggtttgagtaaggtctcagttccacaatctgtgcatagatagctgacgggtttcggctgctgaggatccattggtgccggtgagctagggtcgtgctgcattgcgttacgccgccacaaccaccgtgctcagaaaagggggagaagagagcaggagcagccgcaaagaaggaaggcccggccgg

SEQ ID NO: 11850 - DNA, 416 bp, Oryza sativa
  Clone ID: PAT_MRT4530_18034C.1
aaaaggaggaaccctccaattaaaaacataacaatagctaacaaaatgcccattttataaaaaacacaaacaaatgcttaatttcaacatatcccaaaaaaaagggggggttgacaccattttttttttaaaaaaaacacaattttttaaaaattttttaaaaaacatttaaaagggtaaacataaaatatgggggccccgcatttaaggcttattaagttgacagaaacacaagggatttgcattttttttaaaaagagggggttttgtttcaacctgaagaaaaatgaaaaaattttttttttctttcaaaagaagaaaggggacccaagcgttgacttaaaaggggggcgtttaactcccaaaaggggggttaatgcaacatcctgaaaaaggccgggcttttttttacccgg

SEQ ID NO: 11851 - DNA, 1248 bp, Oryza sativa
  Clone ID: PAT_MRT4530_18035C.1
gatgatgacaacgaggtggaatatgttgatccggtagagatcttcactatggatgattatttggctcggcagacaaaattcaataatgttgtatctcaagttgctttcaatatgcataatttatttcaaccatcatcctcgaatgcccatcgtgccagtaggacatatataaggagagatcgtgaagcccatcatgccatgatctagaatgactacttctcagataatccaatttttagctaacaacaattccgaagacattatcgcatgaacaagccattgtttcttcgaattatcaatgctcttggtcaatgggatgaatacttcacccaacgggttgatgccctaggtcagcctggactttcacctattcagaagtgcactgatgtgatgtggatgttagcatacggttgttgtgccgaccaaaccaatgattatgtgtgaattggtggcacaactgcttacgaattgctcgcgaggttttgcgaaggtgtcattgcaatatttagacctcactatttgaggaagcctacggatgatgatgttcaacgcctcgtacagaggcatgaagaacgtggattcccagcaatgttgggaagcattgattgtatgcactggaggtgaaagaattgcccgaacggttggaaaggaatgtacacacggggagattacggtgcaacaacaatcatccttgaggcagtggcgtcccgtgaccggtggatctggcattgttttttttttttggtatggcaggttccaataatgatatcaatgttctgaaccaatccccaatattcactgacatactaatggggacatcaacaaggctgcgatacacagtaaatggaattcaatatgacttgggttactatctagccgatggaatctatccagagtgggcgactattgttaagtcgatccgacatcctcaattggagaagcacaaactatttgctcaacaacaagaatcagcaaggaaggatgccgaatgtgcatttggtttactcggagctcgtttcaaggtggtcgcgactactactcacttatgggagcaatcagacatatccaatataatgacagcatgtattataatgtacaatatgattgtagaagatgaaggtcatttggacccgctggatgcacatgagtttgagggtgactatgagattgagccaccggaacatatgtacagtacaccgataccaagctataacctaaccatatctatatatcaggttgcttgaaatc

SEQ ID NO: 11852 - DNA, 294 bp, Oryza sativa
  Clone ID: PAT_MRT4530_18036C.1
atgcagcacgaccctagctcaccggcaccaatggatcctcagcagccgaaacccgtcagctatctatgcacagattgtggaactgagaccttactcaaaccgactgatgttgtccagtgccatgaatgtggctgtcgcatcctctgcaagaagcgaacccgccaaggtgctctacaagaggaaggaatttggaaagctcaatatgttttgttcagtatgaagcgcgctgaagatgagggaatggacacatttgctagctattaccatgctctcaagcgaagaaatgattattga

SEQ ID NO: 11853 - DNA, 315 bp, Oryza sativa
  Clone ID: PAT_MRT4530_18037C.1
atggcgaaaggtcctcatggcctgcctccaacagaatcaacaacaacagctacagaaggcggccatgcatgcaagatccgccgcaacaacaagaccgatcgcccaacctcctgcaacgtctgtgtccatgctacccgtgccagtgcctccactgcctacgcctgtgccaacaccggttgcatcaccacaggttcaggttcgcttgcaacctgcttagccgacaccaccttcggctcacttggcccaagcctcggcgtcccattccacaccaaatgcgacctctgtcatccaagcccagtttcaagctttcattaa

SEQ ID NO: 11854 - DNA, 352 bp, Oryza sativa
  Clone ID: PAT_MRT4530_18038C.1
cccgtccggctttttggttgagccgattgccaacgctatcagggggatatttaaactcaccatcgggtcctgcgccgcatatcccaaaaggtctgacgccaaggtcgctagtgctcctggtctatcagatggcgaacaacaggggcttttacattaccatccatgggcgccatctctaaccgcacgacatatggaaccaacgacgcccacgatgcctagaacgccgcctgcgggtagtccgcgacacagaacttggtgattccaacaggagaatacatgaacgaccacctaaacttcaggggggcgtgcaagggctacatcaggctcgatatggatcgcaccatgtttggct

SEQ ID NO: 11855 - DNA, 703 bp, Oryza sativa
  Clone ID: PAT_MRT4530_18039C.1
gacgaaaatgtcggccgcctcaacgatcttgccggcgctgtccttggtgaggcagcccatgaagccgatgtcggcgacctgcacctggccgcagctgttggggcagccggtccagtgcatccgcaccgcccggggcaccgacacgagcttctccacctgcgacgtcaccagcagcgcccgctgcttcgtctcgatgatggcctggccgcagaactggttgccggtgcacgcgacgaggcccttgagcagcagcgacggctgcggggagaacttctgaagcagcggctcggagagcagcgcctccaccttctcgttcttgacgttcgggatcacgatgttctgctccacggtgaggcggagctcgccggagccgtactcgtcggcgaggcgtgcgagctcgaacatgtccgccgcctgcacccggccgacgggcacgtgcaggccgacgtaggacatcccttcctgcttctgcgggtgcacgccgaggtagtccctcctctgccatttcttgtcgatgaggtcctccggcgccgcgcgctccagcacgccgttcggcatcctcttctccacctccgaccgaaaagcctccattccatcatgcgggtcttctggcggttgcccctggtgccgaggtcgcggtacgcctcgagaacggccttgcacaccgggatgatgtcgtcgccggtgacccaggcgtcgagcg

SEQ ID NO: 11856 - DNA, 539 bp, Oryza sativa
  Clone ID: PAT_MRT4530_1803C.1
tggtcggccatttccggcgagaagatcccggcgcgcggcgactgctgggacgtcgtcgtcgcgtggcgcggctcgtcgacgctcgccgactggatgatggacatgcatgtcatgaatctcgtcgacttcggcggcggcgccggcaccgccggccatgtggcggaggggttctacaacgtgtacacgtccaaggacgtgaaggtgaagcacggcacggtcagcgccaaggagcaggccgtcatggaggtgaagcggctggtagaccatctccgacggcgttccggcgccgccggcgagaagcccgtcaaggtgcgggtgaccgtgacggggcacagcctcggcggcgcggtggccgtgatgaccgcccacgacgtcgcggcggcgctggccgccgacgccgacgccgagggcgttcgtgtccgcgccgtgacgttcggcgcgccgcgcgtcggcgacgacgcgttccgccgcgccgtcgccgcgcgcggcgtggaggtgttccgcgtcatcgtcaagcaggacatcgtgccgaagctgcc

SEQ ID NO: 11857 - DNA, 372 bp, Oryza sativa
  Clone ID: PAT_MRT4530_18040C.1
ccgccgggccacgggcatgtttgtaaattttcctcccgtggctgccatctctcgcagcatctgcccttttgaactcgccaagagccaacaacagcgccctcgtgccccctccctcctccatcgcaacagcgcaccaccaccaccaccgtctccagccatggcctcttccgcctccctacagcgctttctccccccgtcctcacacgtggcagcatcccgccgccgccctcccgccgtccgcacccgccccgtgcagtcgttgaccgtgtccgcgccgtcctcctcgacaccggtcgcggacgatgccgtgtcggcggagcggcgggcagggctgaacccgtaggagaaggtgaagctggggaaggagcccat

SEQ ID NO: 11858 - DNA, 2830 bp, Oryza sativa
  Clone ID: PAT_MRT4530_18041C.1
cccccggcctccccccgtcccgccttcgccaacagccgagaagaggcagagagagcgccgccccccgtccctctctctccctctcgtcctcgcccccatccctctcgtctttcccttgccggcagcagaggaggcggcagcgacggcttcagctgctcccacgggccggatcgggcagtggcggtggcgtcggcggcttccgctggcgaatccggcgggtggatacaaatcagtgttccgataggtaaaaccctgctctcagcatctgcccttttgaattcgccaagagccagcatctgcccttttgaattcgccaagggccagcatctgcccatttgattttgaattcgccaagagccagcaacagcgcccccgcgccccctccctcctccgcaataaacagccacacgcgccgcccccatgtccaccctcatcgccacagcgcaccaccaccaccaacaacagcaacaccaccaccgtctccagccatggcctcctccgcctccctgcagcgcttcctccccccgtacccccacgcggcagcatcccgctgccgccctcccggcgtccgcgcccgccccgtgcagtcgtcgacggtgtccgcaccgtcctcctcgactccggcggcggacgaggccgtgtcggcggagcggctggagccgcgggtggagcagcgggagggccggtactgggtgctcaaggagaagtaccggacggggctgaacccgcaggagaaggtgaagctggggaaggagcccatgtcattgttcatggagggcggcatcaaggagctcgccaagatgcccatggaggagatcgaggccgacaagctctccaaggaggacatcgacgtgcggctcaagtggctcggcctcttccaccgccgcaagcatcagtatgggcggttcatgatgcggctgaagctgccaaacggtgtgacgacgagcgagcagacgaggtacctggcgagcgtgatcgcggcggacggcaaggagggctgcgccggcgtgacaacccgcaaaaactcgcagatcgccgccgtcacgctcaccgactagccggccatcctcgactcccccatcacccgtggaccagaacatcgtgatcccgaacgtcaaagaacgagaaggtggaggcgctgctcgccgagccgctgcttcagaagttctccccgcagccgtcgctgctgctcaagggcctggtcgcgtgcaccggcaaccagttctgcggccaggccatcatcgagacgaagcagcgggcgctgctggtgacgtcgcaggtggagaagctcgtgtcggtgccccgggcggtgcggatgcactggaccggctgccccaacagctgcggccaggtgcaggtcgccgacatcggcttcatgggctgcctcaccaaggatagcgccggcaagatcgtcgaggcggccgacatcttcgtcggcgcccgctctagaggatccaagcttacggacgcgtgcatgcgacgtcatagctcttctatagtttgctcatcgacgaacttggaatggaggcttttcggtcggaggtggagaagaggatgccgaacggcgtgctggagcgcgcggcgccggaggacctcatcgacaagaaatggcagaggagggactacctcggcgtgcacccgcagaagcaggaagggatgtcctacgtcggcctgcacgtgcccgtcggccgggtgcaggcggcggacatgttcgagctcgcacgcctcgccgacgagtacggctccggcgagctccgcctcaccgtggagcagaacatcgtgatcccgaacgtcaagaacgagaaggtggaggcgctgctctccgagccgctgcttcagaagttctccccgcagccgtcgctgctgctcaagggcctcgtcgcgtgcaccggcaaccagttctgcggccaggccatcatcgagacgaagcagcgggcgctgctggtgacgtcgcaggtggagaagctcgtgtcggtgccccgggcggtgcggatgcactggaccggctgccccaacagctgcggccaggtgcaggtcgccgacatcggcttcatgggctgcctcaccaaggacagcgccggcaagatcgttgaggcggccgacatcttcgtcggcggccgcgtcggcagcgactcgcacctcgccggcgcgtacaagaagtccgtgccgtgcgacgagctggcgccgatcgtcgccgacatcctggtcgagcggttcggggccgtgcggagggagagggaggaggacgaggagtaggaacacagactggggtgttttgcttgctccggtgatctctcgccgtccttgtaaagtagacgacaatatgccttcgcccatggcacgcttgtactgtcacgttttggtttgatcttgtagcccaaaagttgtgttcattctcgttacagtcttacagaggatgattgattgataaataaagaagaaacagattctgcctgaattgctcgacttgcaaacaaaaaaacgaaaattaaaaggagcgtaaactacggatatttgggcatccgggagaagatgatcaaatggacgacgcaaagccatcggaagagtgatgaaaccaattgtacttcatttggcctgcgtaaattgctccctgtttgtgtgttttgacggtggatgagctggctgagattggaggcacataacaacgggagacgagaagttccttgcaggagcaatttggtgggctttggtcgatgtaaacaaatttgacattgttattgtatttgtaggccttactacctaatgaggatacggtttgttttggagatgaatacaatgctgaagtgctcgacttgcggacatgccaaaa

SEQ ID NO: 11859 - DNA, 966 bp, Oryza sativa
  Clone ID: PAT_MRT4530_18042C.1
atggcttcgtgtatgatgataccgattatagtgttgatcctagtaagcatggcagcgaacgctctggctgatgatcggcggcaactccagctgatgcaggatccggccgccggcgacgtgctctcgtaccacggcggcgcggtgctcagcggcgacatcccggtgtcgatcgtctggtacggtaagttcgcgccgtcgcagaaggacatcgtcgtcgacttcgtgcaatcgctgacgtccacgtcgtcgtcgtcgcagcgggccgcgacgccgtcggccgcgcagtggtggagcaccctcgcgacggtttacctgtcgaacgcgaccacaggcggcggcgggaagccggcggcggcgacgcgcgtcgtcctgtccggtcaggtgtccgacgaggagtactccctcggcaagacgctgacgctggtccaggtcttccagctcgccgccggcgcggcaccgaagagaggcgccgtcgtgctggtcctcaccgacccggacgtcgtcgtcgagggcttctgcagcgtgcgctgcggcgtccacggctccgacgccggcgccgggtacgcctacgcgtgggtggggaacgccgagcgccagtgccccggacagtgcgcgtggccgttcgcggcgccgccgtacgggccgcagggctcgccgctgggcgcgccgaacggcgacgtgggaacggacggcatggtggtgacgctcgccagcacgctggccggcgcggtgaccaacccgttcggcgacgcctactaccagggcgacaaggacgcggcgctcgaggcgtgcacggcgtgcgccggcgtgtacgggagcggctcgtatcccggctacgccgggaaggtgctcgtcgacgaggcgaacggcggcagctacaacgccatcggcggcggcggcaagaggtttcttctccccgccatttacaacccggcgaccactggttgttgctctacgacggtgtag

SEQ ID NO: 11860 - DNA, 2055 bp, Oryza sativa
  Clone ID: PAT_MRT4530_18043C.1
agcatggcaacagctaaaatgagaactgcttgattcagaatagtgacagcaggttacatatagtggtgtgatgcttcgtttggatctgtacagctactgactgaactacaaactagtgttttctcagggacattattctgctagtagtcagtggctaaattctgcagcatgaacgacctggtcttgccatctggtttcaacccaatgctccgcattttcgtgtatactttcctcgctaatctgatcttgcctcgcagacaaagcccgtgaattaccgtgttgtagaccgaggagtctggagcgacctcctccaatatatcctcaacttcattccaaagagatccccatatgcaagctcttataacagataaatgtgtgaacgtgtctggtgaacaccctcgatgagtcatacgccggtacactttcagagcaacttttggcatcctagcaacttcacaagcacctatcacatgattgtatgaaaccgccgatatttgaagtccacctctttccatcatccataacaattgcaagccatgttcccattgaccaagtctttcacaagacatcaaagctatgttgtacagatggttatttaagagtgctgaatgcttggtcttaattccttgaaaaagatctaggacatcccaacaacgaccagacctatataacgctgacagtaaagcactccatgtatattgatcaggcttaaggcctgaagatgttagcagatgatacatcctaaaggcaagttcatcttcaccggccttaccaagtgagttgattatggaattgaacacaatgatactaggtttcattccagcactcaacattctcctgaatgtggtaagcgcaaactcccatttcccttcttttgtacatgatgcaatgatggccttcagtatatcttcacttggatcaataccacttttgaacatttcctgataagcatcaactgctaactcagactgcccacactggacaaatgtgctaactaacaaatcataagtcatcaaggttccactcaaagaattctcccctagccttctccaaagtctctccacctgcctccagtcttttgctcttccgcacacagatatcaccgtgttgtaaacgatcacatcgacattcttcttatcgctctcttcaatttcatcaaacattttcagggctgcaaagtagccctcagtagtggcaacagccttgagtatcaaggtgtacgaatgcccggttgccattcctttccccttcatgaactcgaataccttcatcgcatcggcgaaagaaccccttcgcacaaaacaagccagaagggagttacaggcatgcgcgctcggctgcaagcctgaggcacgcattgaatcgaacagctcggtggcactcctgaccttgttggactggctgagcttgatcaacctcctggacagcatctcctcatccctctcctccaagaagtgcagcctcgatcccccgacctcagatttgctccccgcggctgacgccgacgccgacgccgcgcttcttgctgcggcgacggggccttcctccacagcagccggcctcaccgggcgccgccgcagcccgtgcctccggtgaccatcagcgaccggcggctcatcgtccatgccccaaaccgccacaccgacctcctccttgccggcgacgtcgggttcaagaacgcatggagccgccgccctgcacacgcgcacgcgccctctggcgaagacaaccacggtccttgcagcttccgcatggcgggtggtggcgtctctgcccgctcctccgctccatggatggattcttgccccatcaccgccccttcttccacgcgggtgtgggggaagttcttggctgaagctcgtgctgcagccgctccacactgcagccatatatgcccgccccgcaaatgcaaacgaaacctgcaaaaatctctcaacaagacaaagggatcctggaaatcacgctggaagagggattcggctggctcatgaggggaaaatcggcaggaaatctggtgagaaatttggtccctcgctagaacggataggagaaata

SEQ ID NO: 11861 - DNA, 222 bp, Oryza sativa
  Clone ID: PAT_MRT4530_18044C.1
atggcggtggcgaggacagcagtgggggagggagctggtgtgggagggatgaggcgaggagctaggtcggcgacgctgtggaggaggacggcgatggcggcgctgggtcggcgacgcggtggtggacggcggagtaacatcacggcgcaacgggaagatggctttgttcagaaattttcgttgcctcgatggatagttaatctgtctgtagcagtagtttga

SEQ ID NO: 11862 - DNA, 393 bp, Oryza sativa
  Clone ID: PAT_MRT4530_18045C.1
atataaatgtagttatctgatgtttatatttacaaaggcctaagcccaacaaacagcaccgatcagtgataacactttggtgtctaaaatttaattgaaaaagaacttccacagtggccacgcgcacttacaagttacaaccttgaattgtcaatgacactatggtgtgtattgctgtctggcaatacacctgaatttgtcgtcagagaaactggaggttctcatctgaacttctggacaccaatggcgttggggcttcttatctggctgataatctgtgacgactcatcaaacttgcatgctctctcgtacacgccggcagccacaaggtaaagctcccttttgtcgatgctcgggtcatcgctaagctcaccgagcagtgccttcagcgcg

SEQ ID NO: 11863 - DNA, 452 bp, Oryza sativa
  Clone ID: PAT_MRT4530_18046C.1
gagaaattttatgaatctagagaaagtatctgttggtactaaaattttaatgttatgagtctacagaaagtatctgtcggtactaaaattttaactaaaaaatttgatgcctcgagacactagtatctggagatatcaagttttacattagaaaatatagtacctctcgatgtcttctccaaaatgataaaattatccttaaactgatagtttcagcttagcctgctgatccctgaacttatgcactcccatgccaaacttgtgaaatgtgaagcagggcacaagcgacagtaaaacgaaaaatgagatggtttctgctcgaggtgatgatcatggttttccaatattggatgggcggttgattaatcagggagtgcgtgttgtcattgggatcatagctggcggagcaatatttctgaacaacaagatagggtagcaggacatgtacattt

SEQ ID NO: 11864 - DNA, 168 bp, Oryza sativa
  Clone ID: PAT_MRT4530_18047C.1
tcgtttatatgtaaagagatatctgctccttgggaggaataataacgacggaagtacggttataaccactaacatgatacaagaagaggcttaggctaacttccataaaaacttatacatattatactagctgatgatagacctacagcattttaaatagacctgtat

SEQ ID NO: 11865 - DNA, 595 bp, Oryza sativa
  Clone ID: PAT_MRT4530_18048C.1
ggggaccttgccttcccccctttattatgacgagcaaccaaagatattttttttcaagggggaacaaccaggattgtactgctgctttggatgactggagaactaaccacttttgaaaaagccagggggcgttggactggaccatcacgtacaacagtagtactacttccatatcaaaatatagcaatggaacgtatcctagggtctcatcatatattaagctggtatacttattttgatacggggagagtacaatccagagggggcccagctaactaggcaaactatttacagcagcaccgagtttctgttgagcgtgcctacatgcagccgtaatatcatcgatcggggctggatgattcaagtcatggcaaaagaaaaagttgccaaaaaggaagccatttgcaatggcattgaaaaaccccacgtatcggggacgttttctagccgatcgatccggtgcccatcttgggggccatcctgtccggcgcatttgtggtcgcgcgcggcgcatgataggctgatagatatggggggttggcatcgggggtttcacgggggagaggcgaagtatggctaccgttagagcttcaca

SEQ ID NO: 11866 - DNA, 2808 bp, Oryza sativa
  Clone ID: PAT_MRT4530_18049C.1
atggaggagcggatcaaggtgattacacaagagatgttgatgagatcatgcattaggacccgtcaaggtgtggttctcaagcctagtcctcctctcaaatttaaggtaacctccaattcacccaacccatctattgctattcaaaatgttaatgatcgttgtgtagatgcatctgctacttctagttttgcttctgtacagtatgcctataatgctatggagggatcaatgggtgtttatacaaccgattgcacaggaatcggctataagcagaacctatatgatggtgtaactggtcgtaacaccggtgtaaccgcatcctacgacggtcaggctgtgtctaccatggccggtcagactgtgtactaccatagccagtcagaccatgccctatcctggccagatcgggcctcctgtggccggtctgaccgtaccactgaccaccggtcagaccggaccatgggccgatcagacagggtgctcggctggtcagaacggactatctatagccggtcagaccggttccctggaaatttctccaggggatatcctcctgacactaggtatggccaatataatcatattgcgccgcaacaaccacctcttaggccactaaactcaccaccaaatccacataggcctgaaaatatggagaagttgattagtatcattattagggataaatttgggattaaagcaaggaatcgtgttagggtgtaccaaaagctgtatcctgattattatgacaatatctcgtatcctcgtggttatagagttcccaaatttaccaagtttagtgacaatgacaccattgagagtataaccgaactaaatgacggtttggattgtatcacaagcgaaagtgaaatagcattgtcacctaataccgaatcacaaatcgatcatgtggatgttggaaaagatgatgacagtgtcttgcgggacagtagtgaaatagaatccaaagtacctatgcatacatatcaaaggccgtatcctgaacatgtagatttggtcccatacctgcaaggatttgaggtgcccaacttcacaaaattcacatgtgagaatgctatgactacaatggagcatatcggccgctttattgatcaatgtggtaaggacggtagtaatgatttgtttaagttgaagttgtttcccctttctttgtcaaactttgcatctacatggtatagtttatttgctcctaattcaatttctacatggtcacaaatgaagcatgagtttcataattatttcaaagatgcaagcttgatggagcaaagaccgattgatgattcatcggtcacttgtgaaactattccggttacacctatgcctaagaccagaattgttagtaatcctctccctattagtcctattgattctgacaacaaagaagtgttgattcggcctagtcaagccgaatccacgaaagggaaaaatgttattattagggatcctcggcccgagacaattaggatcaatgatgctaaggccaaagattgtagagttacaaaagataaatcatctagttcccaaaagactaaaaagccgaagctcacttttgagatgcttatggctaagtacgagaaaggattagcgagtcaacgatttcataatcaaattagtgattcaaaaagaccaagatcatctcgcaggaagagatttggtcaatcaccaaagcaatcgaagccatcaattataccaactccatacaaacttccggttgtgatgccatcgtatccatatccaatctcactatatggttatccttttatgtattacatgccgtggatgcatcaaccacctatgcagtattatcaagagtggaaggaatcacctaggtcagtaccaactaattcatctaattcaagacaagaccgtttctcacaaaagaatcggtccggtggatcaaaggtgaaaaaagggaagaaggtatgggtgaggaaagaagccaaagctccggaggtcgtttctatcaaggaagagtttcaagatgttgaagtacgtactggagatgcggtggaaaccatacaagcaaaggagattgaagccaacaccgtgattgtcaaaagcggaggtctgaccgaggcgtctggccggtctgaccgccaacctatgtttattggaatctatgcatgtgtcacatatgactttggtcattcattattgatcatatttcaattgggtcattggttcgtgctagttgcaatggattacttcactaagttggccgaagccatgctgctcgagaatattacttgcacggagagggagattgaagaacactcaaataagtggcatgaggtgctttctgaagcattatggactcattggatatctaaacatggtgctaccaaagtcactccttttgagttggtttatggacaaaaggctgttctatcaattgagattcacgatgttcatcaaaaaggcagaagggcagtgtttacacccaaatttggtacctatggacgaaatagaggaaaattgccaaagtttggaaagtgtcgggttcccttcacagggccggtcagaccacagttgccaactacgctacgcccacccactttctctagcaccaacagccccgtggatgccctggactggttgcatgcaagaaagaagttggataccgttcagtgcacggatgaagagaaagttgcctttgccggtcatcagcttcaggggcgcatcggagtggtgggacgacttcccgtactgagctgtcatcatcagttgcctacctcgacgtatccgcagcatataaccccaattaatgatacttaagaatctagacaccat

SEQ ID NO: 11867 - DNA, 1295 bp, Oryza sativa
  Clone ID: PAT_MRT4530_1804C.1
ctgcaggaatcggcacgagggtcggcatggtcgcgaggagccccgacgccaggcggtccaggcagacggccgccgcggccgctgccgccgcggctctcaaccccgccctcgtcagggagaccctcaagaaggtggacaggtgcatggcgcgcctgcaggagctgcagtacacggtagccggcggcgccaaggtggtctccggcgtcagcctcagcccgcggagcacgcgcgggtacctccgcaccagcctccgctgcaagcaggagaccgtcaggcaagtgctcgaccctgatcccctgatgagggccacaccggcgcgtaagacatcccccaacggcaagttcggcggcagtgacggcggcgccacccagtggcggcggatgtcgctgccggcgatgctgcttggcgagaccgtgctggagatcgtccaggccagcaagttcgcgagcgacattgtcgccgtcgtggacgccggcgccaacaagaacagagaggcccccaagaccccgaaccccgtaactaggacaaggaaagtgaacgccgaggcgactccgctgcgcgcccgccgcgccagggagaagcagagccagcggggcaccgcgcgcgccgaggcaagcacgccgccgtcgcgcggccgcgtgcggtcccgcatccagttcaagcccgcctcgccgctcgggcggccgtcggtgtccgcaaaccgggtttcccccaggaacaggccatgggccaagaagacagtgatgttccccaacccggcgttcctcgcttcaacctcctccgccgcgtacgactcgccgtcgccgtccaagaagcaaaagcgattctacaagactcgttccccgatcatcgccaggcagactccgcacaaattcctggtcaagtcgccgccgagctcgcttgggtccaagctcaaaagccatggcaagcttctcccttcaaggccattcaccgtgtcgccacctggcaaagtgcaagtggcggcggcggcggcatcggtgtccaagacccggcgctgcacgttctcgccgtcacgtttggtatcacggctcgtgtcatcgccaggcaaagcgcaggctgcggcgtcaaacaacaacaacaacaagggccggcgatgctcgttctccccgtcacggttggcgacaaggctcgtgtcgccgatcaaggcgaggttgtctctgaacaggagccgggacggtggcgtccatggcggcggcggcatggtgtgcgggctgaagcagcgaccgggagtcagcatgacggtgcggacggtgtcaagcaggataccatcatga

SEQ ID NO: 11868 - DNA, 339 bp, Oryza sativa
  Clone ID: PAT_MRT4530_18050C.1
ttagagttttccacttacagcttgtgtttgtggagtactatagaatgcatgaatgtcaagctgtctagttgtctcaatgccaggattgttcttgactatgttgtgctgaatagtgccatatgccatagcaagttgtccagtcccaccgacaatggcccactcaccagtttctggagtagtccccatcacctgaagctttgatccattaaacgatctcgccacgccccagccccactgcgccttccatgtccccaccgcgccacgacgcaccgcgccgcatcctcgctcgttccgtgccgcgccctgcctacatcgcgccgcgccgcgctctgcccccat

SEQ ID NO: 11869 - DNA, 118 bp, Oryza sativa
  Clone ID: PAT_MRT4530_18051C.1
cttttatgagggggaccaactccaatatatttacaaacacaaacaacgtacccaatttttactgttaaaattcaggcacactgcctggcttcacacgatcttaagtaagacagacctc

SEQ ID NO: 11870 - DNA, 366 bp, Oryza sativa
  Clone ID: PAT_MRT4530_18052C.1
atgaaggcggaagcaagagcggtgcgacctcggcgagggcgggaagcgtccaccgcgctcgtttcccatccccgcctcgtgctcccgcatcggctcgccgctaccaccgacgtcgtcaagtggcgggagccacattggctggatctggccgttaatgaagagctcgcctccactgccgtaccttcgccgccagggaagagggtgtcatgggtggggctggacagcgcgatgacaaatgggttggagctctgcatgtgctatcgcatccgctacgctgccgcccactccaacctcaccgctgtcccgagcgccggtggctgcacacgccctcttcgccgccgcccactccgactgccatcgttctga

SEQ ID NO: 11871 - DNA, 2096 bp, Oryza sativa
  unsure (1)..(2096): unsure at all n locations
  Clone ID: PAT_MRT4530_18053C.1
ctgataagaaaagagcagagattccatctaggagtggcaaagctgaaagtcacttaggctcgtctgatggaattggtgaagaacggtgttcttttagccaaggagatcatcagttggcgttccacatgcggtgaggatttccaaccctcaactccggcgaaatagtcgtcttcgagtcttttctctatcagggatttggccttacctcatctgatttcttttaggtttactggatttttacagcatcaagttgtatcacttaaacctgaattcaatccttcaaatagtcatcttcattcatctatgtgaatcttttctcggcatcttgccacatttcaaccttctccaccggtgattcttcccaaaactccaaacctgtaaggaaaatccatgtatagtcgcgggtgctggtatcccactgcacaccgatataaagaataaatatttctcccttcctctgaaaacttccaataagggttggtatggcgagttgttttattgttcaaaccccaatccttctcttcttgattttgtcgaacttccccccagtccatcaatcatcttgaaactcccttcccaatgacaaggaaatatctgaagccgacacactcatgtccaaatttatggttatgaaggacttgggactgaccagtgaatatgttactcggcacttcatcaaaacaaggttgcaaccaatcaaagaccgagtacaccctgcttaatatgctggggtagaggacccatctcgtgaagccaaggaatccttggacttgacacattttaagaatagaatgccagtcacattgaaatcccgaccactagcaagaagcctgtaaatacataccatttgctcaacctggctcctaaagaaaatcatctgatcgtgtctcgtccaccgaatatgaggcattagactcccaaaaaatcaactactggtccaagaatcggtgaacatggtcaaaggggagaaaaaagagcagcagctagcccgaagatagatgatgctgatcataaaaggaaaagatggctggtagttgaaaatgatgaagatgagtatataagcagcaaagctagccacactgtcacaactcctcagccgaaatctaaggcgccgaatcctccacctcttaatcgtcgggcaaatttgtgctttaggacttcttctaggaaaccttctgacattgattggattggcaagtcaggaaaaaattgagcatcccacaaccagcggttagtcaagagatgcagctcaacaacatccgactggcagccaatcaggcgaagagactcaacaaccattaactgaaggccagtcgaaaaacgatgaacaagagcagcaggttgtagcaagcaaacaacctgaaggtgaaaatgagacatcttcagcttagatcagtatcaaaactgaaataacccaaactccgcgtggggcccttcgtgctcagagttcatctgcctcaccaccgtcatcgccatgctcctccccttatttggtcgacgcgctcaaggtgtaccggccgttcagcgggtagagagaatgtgagatcgatcggtgaccgtccgatcgaagtagtactagcactagcaaacatgtgtacgtcgtatgggcagcagagcaacactgccgttgccaggtggggcccaggtgtgagataaaaaagaacgaggtaaacaaaaaatttttttgaaaaaaaaaaaaaaaaaaaaaaaaaagctgctcagcctcgcctgcctcgccatcaccgtcgccttccgccgccggctccatcgccggaatcctctccgacctcaaggtctacaagccgttcgccaccacctactaattcatcgagcacctcgcgtgcatgcacataccgtacgttattacgcgtggtcgagatgaagtacagatgattgtatcctaattaatcaattaatcaaccaaaattaattaactaattactatttagttattattgtcacacgtgtggtgaaaaaaaaagtgaaaagaggaatttgagacaggttgcatagagtgttgtttatgctattgttgnttgtatactgcctgtattaattccaaccgatgctactnatttttgaaaaaaaaaaaaaaa

SEQ ID NO: 11872 - DNA, 432 bp, Oryza sativa
  Clone ID: PAT_MRT4530_18054C.1
atggtcgccaccacccgatctccctcaccggagcttcgcaagccaaaccatcgcgccatcgagttcgcctcgacgagtggttcttatgtaagtcctcgcgaaggaggcaaatatatgccgcgaagggcaaatgtgatatttaccgaggcgcagggcttgaaacagttaaacatgtcggtttccgaatcattagttttgggagccgacaattatcacccgggaaaggctaatgttgtagcagatgctctcagcaggaaaggctattgtaatgctacagaaggacgacagttgccgttggagttatgcaaggaatttgaaagattaaatttgggaattgtcagtagaggtttcgttgcagccttagaagcgaagcccaccctcattgattgtcacaccccgaagttctttcccaagcctaaattggagttttaa

SEQ ID NO: 11873 - DNA, 762 bp, Oryza sativa
  Clone ID: PAT_MRT4530_18055C.1
atgactcagccaagggaggccggcggtggatcaggaattggaggagggtgtggtgcaccgatgtggatgacgccggtagcgggcagtgatggcttgggtagggtggtcgacgatgatggcccagctgaggtggaggcgaaccccgtcggcgatggagaagcggtgtcggcgacggcttccaagaggcgtcgccgcgtcggtggcagggagatctggcggggggcggcggcagtggaggagtcggtggcagggagatccggtggcgggcagcgggagaacaggaaacggtggtggggagatccgccatgctcgccgctcgccgcacgccatgcccccgccatgcccatcacctgccgcgcccatcgccggttgctctcggcaacttctgagagagagagagagaagaggggagagagaagagagagaggaagagggggaagaggagtacgacagtgcttcaagcaaccctcgagcactaacctatgtgggtattacatgttggagatgcttagggtcaacaggaggtacacaacaaacatcaatcacacccctgaaatctcttatgtagcaaaccggttcgacaacacaacaattatgaaggtatgcgctgacatttgccactttatccgctgtgattgctgcaacgcactagggcaatcttacgacaatgagagtcagctggcattagaagataaattcaagcccctaagagagtggggaaagaacatatgcagtaaaaatttactatttcgtttgtgttga

SEQ ID NO: 11874 - DNA, 3072 bp, Oryza sativa
  Clone ID: PAT_MRT4530_18056C.1
atgggccacctcaatatcatgttagctttcctttcatttgtgttattagggttagctgaagtcgagggaactgtagcactgagtcaaatcctctcaaatagccatctgatcaccccgtaccgagaggttacggcaagaaagtttgagagaaggtccttactgcaggatcatagtagtgatgataggagatcatctaatgcaagccttccctctgctgccacacttgctaactgtccaaagcgatgcggcaacttgagcttcgactatcccttcggcataggagatggttgtttccgccatcccgatttcagtctcacatgcaacgccactactcagcctcccaaactcctcttgcatattaacgaaagcgtggaggttatagataatattgaggtcgtcggtaaggatatagctgagtttttctacttcaacttctttatggtcgcatttaaccatctcatccccataaaagctggtgtcgatgtctataaccttacatggaaagccccagggatttcttttactatttcagagatgatgataattactgtcgtcagctgcgacttggatgtattcttgataggccaagacaacactcctaaactgctttgcatggttgcttgtcccaacaaagagattgcagacatggtgtacatgcaagactgtgaaggccctggctgttgtactgtattatctgaaacaccagttcaggctgtacaattgcagtttgttcgccatgagacaagtaatgctggaaaaatctccaatctcagcatgctatgggatagaatcaacataactattggggcgccacttgtttggagtattgttgaccaaacaagatgctcaagaaacatggaagataacttcgcttgtgtcagcaaccacagtgggtgcataacttctgtgtttagagatattggctatgcctgccaatgcaattctggctacaagggaaatccttttatccttgatggttgcaagcatgacagcggatcaagtatattcctctttaattccagggaactgacaaaaaaacgaattattcagcaaccacacgagaaggcttatgtgtatacgattatgtttccaacatgtatacccttttaccagaaacaacgagaacacttggagatggggcataacatggagtttttactgatgccaggttacaaccctagaccagaaaagcataattgcgctcgacaatgtgggacaatcacagtcccgtttccgtttggccttgaagagggttgctccgcaaggaaacgttttcagctcaactgctccgacaagacaaattcggtcctcaagttcaatgactattttcaggtgacgtatataaatgtcagtgaaggacttctgggcatcaaacacaactcatcgctggaggagcaactattcaatataatgatggaaatgatgacttctgataatgagccagacctatttgttgaccctcttgaatcagtctctgtgcaatgggccgttgccaacctgacatgccaagaggcgcaacacaacacttctggatatgcatgtgtaagtaccagcagctcctgcttgaatgtccttagctccatggatggttatgttggctacagatgcagttgcttgcctggttatcgtggaaatccatacatcctagatggctgcgaagatatcgacgagtgccgagagacaccaggaatttgtaaaggagtttgcaagaataccgttggaaactacagctgcaccaagtgccctgatcataccgagtacgatattttaagaatgcagtgtactccaataagaaagaaaagcttctacttaggtattataattggccttagcagtggctttggaatgctacttcttggattaagtggaatagttctcattcgaagatggaaaagacatgcacagaaaagactgcagacgaagtatttccgaaagaaccagggccttctattggaacaattgatatcatcggatgaaaatgctagtgagaagacaaaaattttctccttagaagagcttaaaaaggcgacaaataactttgataccacacgtatccttggccgtggagggcatggaacagtatacaaaggtatcttatctaaccaacatgtggtggctattaaaaaggccaaagttataagggaatgcgagattaatgatttcatcaacgaggtttcgattctttctcagataaatcaccgaaatattgttaaactctttggatgctgtcttgaaactgaggtccccttattagtctatgattttattcccaatggttcattgttcggactacttcatccagattccagtagcacaatctatttatcatggggtgactgcctaaggattgcagcagaagcagctggagctctatattatctccactctgcagcatcaatttccatcttccaccgtgatgtgaagtcatctaatatactcttggatgcaaactatactgctaaagtttcagattttggtgcttcaagatcagttcccatcgatcaaacccatatcatcacaaatgtacagggtacatttggttacttggatccagaatattaccaaactaggcagctaaatgagaagagtgatgtctatagttttggtgtggtactcctagaacttcttctgagaaagcaacccatttttacaataaactctgggatgaaacaaaatttgtgtagttacttcctttcagagattaaaaccaggccaattacagatatggtcgatgctcaagttctcgaagaagcaaatgaggaagatatcaaagaagttgcatcccttgctgagatgtgcttgaagctaaaaggtgaagaaaggcccacgatgaagaaagtagagatgacgttacagcttctgcgaacaaaaacgatgaactcatctcaagtagatccaaccattgaccaagagattcaaactgttctgactgaaggagccagtgacccagagatacaaccattagtaacaaatttggatgttgatagagctaatgcagcatctcaacgcttccaaatatcatgctatagcttggagcaagaattcttgtcatctgctagcttaccacggtag

SEQ ID NO: 11875 - DNA, 834 bp, Oryza sativa
  Clone ID: PAT_MRT4530_18057C.1
atggcgaccaggatgtacgggcagaagcagaatatctcccaatctggatattatgtggtcaagactcatgaggccacaatgcatcgacagaggaggagcatctcctccccgggaggcaacctctcgccgccgctcctcgtggtagccgccgccgtattcgtcgtcgccggcctgagcgccgccgtccctggcgccgccgcgtacaagaactacaccgtcggcgacgacaagggctggtacgacggcctcacccaccccggcgtcgactaccaggagtgggccgacggcaagaacttcagcctcggagatttcctcatattcaacacggacaagaaccactcggtggtgcagacgcggaacgagacgctgtacaagagctgcgactacaacgactccggcccggacgacaccgtcgagtggtcggccgccgcgccggagttcagcaaggacgccgtcaccgtcgccgtgccgctgctcaaggaagggagcagctacttcttctccgggaactacgacggcgagcagtgcgagagcggccagcgcttcgccatcgccgtcgcccacggccagggcctcccgccggacctccgcccgccggcggccgaggctcccggcccctcctcctccgccggcgccgccgccgacgcgccgcccaccttcgacttcagccaccccaagaacgtgtccaactcgccggccgacacgtcgacgaccgcgccgctggacgacgccgacgacgcgccgaccaccggcggcgcgggtcggagtatagccaggctcgggtccggtctggcggcggcggcgactctgctcttcttcgtggtgcaagtgtag

SEQ ID NO: 11876 - DNA, 276 bp, Oryza sativa
  Clone ID: PAT_MRT4530_18058C.1
atggcgacaggtaccgctgcgcatggtctgcttgcttctctcgccagcaccgtgcgtcgtccaccgtcgctcacgatagaccgcctcctatccgataaagagtcccaccggcggtggcgaggatcctgcatcaatgtggatctgccgtccatggccgacttctccgactcggataccacctcccaggcgacggggacggtccccagctctgccctcaccacccctctccctcagcccttcctgttcatggtggttatcgacggccaccgcaattga

SEQ ID NO: 11877 - DNA, 254 bp, Oryza sativa
  unsure (1)..(254): unsure at all n locations
  Clone ID: PAT_MRT4530_18059C.1
caagggccatggcccccatttctattaccagaaatggacacaggactacaaagttcttaaaaaaacagctgactccggtgacgaggcaggctggacccacaacatcggcttcccgcgttgcggcccggcttgctcgtggtcccggcacaaggaggctaagggaaggttggctgcccgctgcggatgccggcacgagcgcaacgctatgagttgttgcccgcgcaccaagatgagcggtcngtggaacaggccag

SEQ ID NO: 11878 - DNA, 193 bp, Oryza sativa
  Clone ID: PAT_MRT4530_1805C.1
aagctttttttttttcatttattcatttgtcacattattttttatcctaagtggcagcttatttaatattgtatacaccatcctagtcattgagttgggaatagtctaaaacatcactgcagttctctccataaatcatctataaatacacacaaattctagtgatcacttatgtcccttggcaatcaagctt

SEQ ID NO: 11879 - DNA, 830 bp, Oryza sativa
  Clone ID: PAT_MRT4530_18060C.1
atggcctatgcgtcattgactctaagtggtggcatgctcgtcactacgacgcaggcccgcagcaagggcagcgaagcagatttggtggcagcggcaaggaggttttttatttttagtgtcacgtcaatactacatgggataaagattaagtcaacccgccacaagttgggggatgcgttatacccggttttacggttgaggggtgagattcatccaagagcaagacttgtgggaggcaaaatagacttattcctagtgtataatggcatttatagaagtgtggtgaacattgccatcgaaaaaactccagaaagaactattcggcaaaatggtattattgtggagtgtgatccgacctatgcatatattgtagcagatgctcgtgcgtttgagggaaatattgcagctgataaaatcacggttgactttccgggggaacaatgcataaaaccccttcccaagcactgtaatattacaaatggattggttggaatctattgctgtccgggtgatgaaaagttcaataccgatctttttaagagggtcgaaatgtgcaatcagccgcttcagatgtccgaagcagtgacattgaatggacatgagttctcgcacaactgcgcggtgagtgtttcggcagagttcgggactccggtgatcaacaagaatggagaactggtggggatgaattgttcactttcatatcatcttactgccagaaacatttctgcattagtgggtacaattagggatattcagaatactctacggaatagagtgtaattactaatggggaatggaatgtttttggtttcatataaatcattgccttc

SEQ ID NO: 11880 - DNA, 687 bp, Oryza sativa
  Clone ID: PAT_MRT4530_18061C.1
atggcccaggacccggcggaacgaagacagggggggttcgccgcccacgacccccgcgcaatcaccaacagggccacaggcacggcttggaccccgttcgggcatggccgccgcacgcccccttaccgccgttcctgcctcgccgccgcctcccggggcccatccttagccaccgcggagctcctccgggttaccgtcgtgcttgcgcgcgagagagagaagagagaagatagaagaaggaaagaagagcgtgggatgccatggaggtggccgaaggctgggacctcctcgtccgagccatggcacggcggtggatggaggggagaggatgcagccgcgcgtggcttgttagagcctcgccctagcggtcgtgggtcatttcctctcccgcctcgcccagccacctcctccaccattctacccagcgatctggaggaaggagagaggggaagtgcactcgactggcttcggcttgccgccgcgattgctcatcaaggcggcggaccagtcgacgacgaccccggcggccggcgaggatgggtccacagatcgatgccgaccgggcacgagactgccccaactcacgccgcccacccccgcccgcctgttcgacggaacgccaaaggcggggacgagggggtcgcccccgcagtccacgcccgcaaggtgttcgaacaaatgccttag

SEQ ID NO: 11881 - DNA, 363 bp, Oryza sativa
  Clone ID: PAT_MRT4530_18062C.1
atggagctcaccgctagagccgccatggtcgtgcccagtgcggcaatgctgatagcgaggctccacaaggagatccatgcgccgccttccccagtggcggcagcggcgatactagcagcagagagcccgagaaggacatatcgcccttcgtttccatctcaagagagtcacactcggcaccgtaacactacaaattctcctagcgctgtcgtgacggccacaaccgtcttcatacatgctgctccgacgactggttcgggtgcggtggcaccactgttcctgaggaagagagaaggaagaagatggaaaatgaatgagatggatgaaaaatgtgacgtcagtggcacggtcccaattttataa

SEQ ID NO: 11882 - DNA, 169 bp, Oryza sativa
  Clone ID: PAT_MRT4530_18063C.1
gggcctatttaacattccaccaccacagcgatggcgatgatacaaatcaggacagcgacgaagggagtggcaaaggcttggaggatgttgaagctggagcgaagttgttgaagctgggcctccaattcctcgttgcggttagctaggttagcgaaatgcgtcacggtac

SEQ ID NO: 11883 - DNA, 628 bp, Oryza sativa
  unsure (1)..(628): unsure at all n locations
  Clone ID: PAT_MRT4530_18064C.1
gctggccgtagatnctgagctaaatatatnccaaagcaaaattctactttccctatcagtgttgctctccatcaggatcgtcctactatccgctctctccaagggatccagtccagatcgatctcgcccctcatctccatctccacgccgccagatcgccatcgctcggattctggtgcatatcgtcgccaatctgatctccgcaccgcaactccattgcatccctcgccggtctgtccgccaacacgttgttgccacctcctccgcctcaagcgccaccacagccaacccaaattccctccgccaccgagaggagagcctgtattctcgcaagggcagctttatgttgcattatcaagaggggtgtcaaggaaaacgacaaagattttggcaaagccttaaaaaaaaggtggaccccacaagaaggagcacaagaaatatcgtgtataaagatgttctggattggtgaacaatgacggcacgtcaggagaaacatatacggtaccacgtgattgtcactggagtaactatttatgtttttttcttcaaccttaataacatccgttctatgtggaaatgtaatgcctttaaaatatcaaaagtttaaagtcaaaaaaaaaaaaaaaaa

SEQ ID NO: 11884 - DNA, 540 bp, Oryza sativa
  Clone ID: PAT_MRT4530_18065C.1
atggcagagcgtttgacgcgacgagttgccgtgccaccgggagcacgggcgtacgaacgtctgccgctggacaaggattttttttttctaaggcacttgtcaattgccatccaggtcgtcaaggcattacatgttgccacggccaccgcggaggacatgagcgacagcgcacgggcagcggtgcttggcgggccacgcacaggcggcagcggcggcggcgtcgatggcagcgcttcgacgggggcggcggacgacgcacaggcggcgacggtgctccgacgggggcggtcggcgcgagcggggacaacgggcgatcggcgcatggcctgcgacgggcaacacgccgacgcgggcgggcaggtggtgcaagggaggcagcgcgcggagaggacgctcgggcggcgcacggccggcggcgggcgatttggagttaaaggttaccaaacacttttgggtgggtctccaacgctaataggagctagctccaactggtgtaggagtttagagctgggagttagagtttggagccctaccaaatag

SEQ ID NO: 11885 - DNA, 768 bp, Oryza sativa
  Clone ID: PAT_MRT4530_18066C.1
aaatggagcggtgattggtactgtgcgctagctagctctaaactcctacaccagttggagctagctcctattagcgttggagacccacccaaaagtgtttggtaacctttaactccaaatctgaaaaatatcaaaaaaaaaagaaaaaaaaaggaatccccgctatcgatcggctgtgcgtcgctcgagcatcgtctctgcgcacaccgcccgccgccggccgtgcgccgcccgagcgtcctctccgcgcgctgcctcccttgcaccacctgcccgcccgcgtcggcgtgttgcccgtcgcaggccatgcgccgatcgcccgttgtccccgctcgcgccgaccgcccccgtcggagcaccgtcgccgcctgtgcgtcgtccgccgccccccgctgctcgcatcgcccgccgccgccgttcgcccgcccgccgccgccgcaggagcgtcgccatcggcccgccgcctttgcccgcccgtgggagatgaagtttcgggggagagagcggggggaggtgaggaggagagtttgggggtagttcaatggtatatttttaaaaatatgttaaaaaattaaagggtaatatgtcttttgggttggagtggagttgtagagcagtaaaaacttatctccacccctgtagttcattttttaggagtagctccgttaactccaccccaaaaacagagaatctggaccgtttggcacagctctggctctaggtaagttgaagttaggagctagagttgtgccaaacaggccctataca

SEQ ID NO: 11886 - DNA, 368 bp, Oryza sativa
  Clone ID: PAT_MRT4530_18067C.1
gtccttgctgctgcatggcagctaattccggtttatgtttgctctaatttacaaattacattcatctctcgagaccgatttcgtgctcaatttcgcgtgcatgaataagatataattcatggaggcgacgatcaaatacacagcaagaagtcgagaagagatcggggaaaaaaagacggcggattcgtggctatggctagtagtgaattgatcactaagcttagttggccttcttggtggtggcgccggaatcttaacctgtgctttttaattattaatacctgtcatctgtaggagtattttggtatttcctgtatcaaatgctgcgtatggtaaattggaacatcgggctttaattccatgctatc

SEQ ID NO: 11887 - DNA, 2730 bp, Oryza sativa
  Clone ID: PAT_MRT4530_18068C.1
ggagagagagagaagaactagtctcgagtttacgcgtacgtattcctttcgggtgagagagggagggaacttgttccgggttttttttttttttttttgaatcacaattcacatgcatagatagaacggggcaatccatcagttcaattccggcggcaaaatctctctcctctccttcctgacatgcagcatcgtctcctccactacgcatccatctaccactgagacatcatcatcagttcatcgccatggccgggcaagaattcagtctcgggagtagacgccgacccagctgaaagatctgcgtggcttgaaactgaagctcagcccgaacatctccctgatggcctgccccttctccaggtgctcgaccagcttcgcgacgagggcggcgctctccctgacgtgatccatcccggtctgcgtccagatccgccgcgacagctgcagcctcctctgcttggtgctcatgtcgatcccccacttgccgtacagcctctccttctcggccaggtgcagcttcctcaccatctgcctgtacagcatgtccctctcatgccgaagattcctcaagcttgatgcggtggtagcgtggagctcgccgtctgcgatgagggagttcttgatgaaggagagtcgcctgtgctctacctccatgtagatgctgtccgtctgatcgcccttgaagaggaggaagaagtaggtccggtgtacgatcgagacgttgcagtcatgccacagctcgatgatctcctgctgctttctctcgaaatcgatgtgccatttcgaaagggagaccgtggcaacttctttagcaattttcggctggtgttgctctgaagattggggtgcatggttcatttctgtcttctgcttcacttctgtgacgcagccgatgtcattcacagcagtctcttcttcagcattgcaggtgctcttgtcttcttcagcgttgcccgtgctcttgtctgcgatctcatcaggactcaggcttttcctcaccttctctggccttctggtagaatatctgaaggtttcggacgacggcgtcgtgctcgccgagtcatcgaaccagctcttcagggcaagagattcttcagtttcaggcttctcgagatcaaatgacggctcaaaatcacacgcatatagcttgatggcattttctgctgaatttgacatgctttcgctatgcttttgatcatcagtgtgtgtcttcttttcaggtgtttggaagaattcttggcttctcctgctcctgagcttgtttgtctcgatgcactgcacttccttgcagtgctcctcagggggctcagattcagctcgatgagctactctctgtgcttcgtgttcctctgtgatgtcagaaatttggctgcttggtggaaacgagtgaggtactgacagttcatccattgtttgatcttgatagtcaatgtcttgagtatctgaagatgaaaatgcaccttctgacacaatgcgcggaatcgagtctgaagaccgactccatcgccttgctaagtgattgttgatatccccgtcgctcgcaactttgcggaaattatcaagctgagattgaacggtgtccttttgctccatcagttccttcaactgttcttccagattcttaattagttcatccttttctctgagaatctctgcatgagaagtgcaagaggctgatgcaggaaacttcagctcgttctccaacctagcgatctctctctgaagatgcttcaccagtgccttgtctgacataaccacgttgacctgtgcattggtgacgacatctttcgcgcagttagcaaacagaagagtgttcctcgactgctcgatgtggcagtgtgccgggctcatcgtgcagatgattgctgttcttgcattgcctcccagtgatgactgcagtatccgggtgagctttgaatctctgtatgggatatggccatttctccccttgctgagttggcgaatgacctttcctagagtaagcaggcttctgttaatatggctgccctcctttagcctcataccagccgatgccgtctgagatgcacgctcacttcctgctaaatcaacaaaattaagatgcaggtatttcatcaataccacacaagcaataagagtgctcgagtttcctttccccaagaactgcttagctgaactctcaaccgtcatcctgagtatttgatgagatctggagcttgcttcattcatagcagtttccccaatctgtctttgagcttcacacacagcaaggagctccagaagatggcctttgtctcgcagagtctcctcggtgagtttttctacaactgttcctttcatgtcaaggaaaaaggtaacctctggatcatcaagaagcctgagaggcgttgcgtcagagctcaggaggtccctgacagcctcgttgtatatctccattgccgagaacttcaggatgaactctctctcaggatgcttctcgatgtagtcgtagatgtccgacatgctgtactccgtgatgccaaccatggtgtaggtcttgccgctgctcgtctgcccgtacgcgaatatgctcgcgtagctgtaggaggcggggaacatggcgcgctcggggacggcgccgcggaacgtgagcgtggtcgggccggcgcactcccagtcggagccgtcgccgcgctccgcctcgcgcgcgttcaccggccgcagccgcaccgacaccacgatccgctccggccgctcctcccccgccat

SEQ ID NO: 11888 - DNA, 324 bp, Oryza sativa
  Clone ID: PAT_MRT4530_18069C.1
atggcgcctggcgatgctaattgggccttctttcctcctcttatctacattgagctcgctaacaagatgagaatggcgaggacggctgctgagccatgggcgtcgccgttcttcatgttctcgacacgacatgtcgagcccttaggagatcgagccaacacacgccaagacaagctgccggatatcgatatcagagataagcctagacaaactcaatatggtgtctacggaggccaacaaaagagatttagcactatctctgatctcgccgagtgcgaattcgaggaggaagactactgcgttgtcgactacgtgatgcaatag

SEQ ID NO: 11889 - DNA, 373 bp, Oryza sativa
  Clone ID: PAT_MRT4530_1806C.1
aatgacaaaggaattagcaatgaagactcccatttcgcggcagttattgcccaaaaataattcttaacatccacgtataaactccacagaaaataaaatcataacgactgacatatggcacaatgtgtgcacatattaacgggcaatgcaacaactgaaatgaccgtcatcaaaacttcacaagtactaaaagagctagatatgtcacacgctaatattgaaagaaccactagaacgagactgatttcttcttggtggaagcattgggcaactttgcacacaatgggtacctcttctacacattctagatgacgccaacattcaccgagcttcttatgttacgcacggttaaacgaccaaaaagaggtttctc

SEQ ID NO: 11890 - DNA, 1367 bp, Oryza sativa
  Clone ID: PAT_MRT4530_18070C.1
cgtcgctcgcacctttgcggaaattaccaagctgagattgaacggtgtccttttgctccatcagttccttcaactgttcttccagattcttaattagttcatccttttctctgagaatctctgcatgagaagtgcaagaggctgatgcaggaaacttcagctcgttctccaacctagcgatctctctctgaagatgcttcaccagtgcctggtctgacataaccacgttgacctgtgcattggtgacgacatctttcgcgcagttagcaaacagaagagtgttcctcgactgctcgatgtggcagtgtgccgggctcatcgtgcagatgattgctgttcttgcattgcctcccagtgatgactgcagtatccgggtgagctttgaatctctgtatgggatatggccatttctccccttgctgagttggcgaatgacctttcctagagtaagcaggcttctgttaatatggctgccctcctttagcctcataccagccgatgccgtctgagatgcacgctcacttcctgctaaatcaacaaaattcacacaagcaataagagtgctcgagtttcctttccccaagaactgcttagctgaactctcaaccgtcatcctgagtatttgatgagatctggagcttgcttcattcatagcagtttccccaatctgtctttgagcttcacacacagcaaggagctccagaagatggcctttgtctcgcagagtctcctcggtgagtttttctacaactgttcctttctctggatcatcaagaagcctgagaggcgttgcgtcagagctcaggaggtccctgacagcctcgttgtatatctccattgccgagaacttcaggatgaactctctctcaggatgcttctcgatgtagtcgtagatgtccgacatgctgtactccgtgatgccaaccatggtgtaggtcttgccgctgctcgtctgcccgtacgcgaatatgctcgcgttgattccactgagcactgacatggcgacctgcctggcgccttcgtcgtacacctgcctcgtgccgcactcatggctgaacaccctgtcgtagctgtaggaggcggggaacatggcgcgctcggggacggcgccgcggaacgtgagcgtggtcgggccggcgcactcccagtcggagccgtcgccgcgctccgcctcgcgcgcgttcaccggccgcagccgcaccgacaccacgatccgctccggccgctcctcccccgccatctccgcctcctccccttcctctcacgcggggacgacgaaacggtgggggagaggagtcgaggagaggttgcccgcctccgcgcgcgcgcggctgcctccttcctctcctcgaaagaagaagaagaag

SEQ ID NO: 11891 - DNA, 361 bp, Oryza sativa
  Clone ID: PAT_MRT4530_18071C.1
tcccttctcgacccacccatccgttttcattcatttcgctgattccatcccatacggggggggtatatttaaactctagcggggttctcaaaccccaccatatccactgcttgtcctacatgatgcttattatctatccgtgagagcttattctttcttctacacataccttcttactcatgatatcttgctctgtggcctgcccgtttctgatctatgtgatactatactctctacatataaaaaagttgcattacttaacagcctttttggaacccgtttctatgcacatttacagggctatcgggcgagtatcatgcatctttgtgaccttaagtctaattgttgatcctgatcactt

SEQ ID NO: 11892 - DNA, 410 bp, Oryza sativa
  unsure (1)..(410): unsure at all n locations
  Clone ID: PAT_MRT4530_18072C.1
gggagaaggttttgatcttataggatctaaagatagcattgcagaccatagtaacatactaattataattacaatcaggatcctagctagatcatccaattcatcatcagaaatactgctagactgagacaatatttgaataatggataatgactcaagagatacaagcagatatgcttcagctaatctaaaatctccaccatgtctggttaagtgcgaaatatagaaattagttggaggacttgggtntttggcgcttctacttcttccgagagctcaagtgaaacgtggcagggatcactttcataaaagacttgtagctctattccacgaccacgaatgtcacatgaaactattgggtcgcttagtttttctgaaacacggaaatagtcaattcgcattctattgcc

SEQ ID NO: 11893 - DNA, 399 bp, Oryza sativa
  Clone ID: PAT_MRT4530_18073C.1
atggcgatgtcggctagcccacgggcacggcggaaggggctgccgaaggcgacgtcgacgaggaggaagaagaggctggcgcggcggtggtggtctccggacgaagacggcagcgtcggccaacgctttaggcgcggcgaacggccgatgggaggcggtgcagtggcggcgatgccactggacgccggtgggaacatgcctccggtggtctccgcgcgaaacggaggcgacgccggtggaggggaagcagttgcgacgccgagggaggagacggcgcggtcggccgacgcacgggcgcgacagcagaggcggctgaagcggagggaagcgagccgagcacgggaggagcggggaacggcggcggaaaaggcgcccggcggccatggaaggcggccatga

SEQ ID NO: 11894 - DNA, 466 bp, Oryza sativa
  Clone ID: PAT_MRT4530_18074C.1
aacgcaattaatgtgagttagctcactcattaggcaccccaggctttacactttatgcttccggctcgtatgttgtgtggaattgtgaccggataacaatttcacaccaggaaacagctatgaccatgattacgccaagctctaatgacggactcaactataagggaaagctgggtaacagcctgcaagtgtaaccagtgtcacaggaattccccaggtgtcgacccaacggcgtccgggcaccaggtcgcccttaacaatatccccttaaggagtttccagacccccacatgacctgaccccaggattaatcgaattgagtccgaaagcgagacttcagagtaatgtaattgagaactagtatcggcgtagagtaaaataaacaccacaagtatgacacttggtggtgattctattcgatatcagtagtaaataaagctacaaatttcttaagaaaaaaaaaaaa

SEQ ID NO: 11895 - DNA, 307 bp, Oryza sativa
  unsure (1)..(307): unsure at all n locations
  Clone ID: PAT_MRT4530_18075C.1
atagcctatataggagactgcgttcagacattgatcagtatgaaggaggactggaaacattttctcgcggttatgagaagtttggatttaatcacagtgctgaaggtgtcacttatcgagaatgggctcccggggcacattctgcagcattagtaggtgacttcaacaattggaatccaaatgcagaccgnatgagcaaagtgcgaatggaaactncatctggtataaaggattctattcctgcctggatcaagtactctgngcaggccgnaggagaaatcccatacaagggaanatattatgatcc

SEQ ID NO: 11896 - DNA, 3119 bp, Oryza sativa
  Clone ID: PAT_MRT4530_18076C.1
cggcgcacaccccgtcaccgaccaccaggcagcgcctcctcgctttggctctcgcgtgaggagggtttaggtggaagcagagcgcgggggttgccgggggatccgatccggctgcggtgcgggcgagatggcggcgccggcgtctgcggttcccgggagcgcggcggggctacgggcgggggccgtgcggttccccgtgccagccggggcccggagctggcgtgcggcggcggagctcccgacgtcgcggtcgctgctctccggccggagattccccggtgccgttcgcgtggggggttccggggggcgcgtggccgtgcgcgcggcgggcgcgtcaggggaggtgatgatccccgagggcgagagcgacgggatgccggtttcagcaggttcagacgatctgcagttgccagccttagatgatgaattaagcacggaggttggagctgaagttgagattgagtcatctggagcaagtgacgttgaaggcgtgaagagagtggttgaagaattagctgctgagcagaaaccacgagttgtcccaccaacaggagatgggcaaaaaatattccagatggactctatgcttaatggctataagtaccatcttgaatatcgatatagcctatataggagactgcgttcagacattgatcagtatgaaggaggactggaaacattttctcgcggttatgagaagtttggatttaatcacagtgctgaaggtgtcacttatcgagaatgggctcccggggcacattctgcagcattagtaggtgacttcaacaattggaatccaaatgcagaccgcatgagcaaaaatgagtttggtgtttgggagatttttctgcctaacaatgctgatggctcatctcctattccacatggctcacgtgtaaaggtgcgaatggaaactccatctggtataaaggattctattcctgcctggatcaagtactctgtgcaggccgcaggagaaatcccatacaatggaatatattatgatcctcctgaagaggagaagtacatattcaagcatcctcaacctaaaagaccaaagtcattgcggatatacgaaactcatgttggaatgagtagcacggagccaaagatcaacacgtatgcaaactttagggatgaggtgcttccaagaatcaaaaagcttggatacaatgcagtgcaaataatggcaattcaagagcatgcatattatggaagctttgggtaccatgtcaccaatttctttgcaccaagtagtcgtttcgggaccccagaagatttaaaatctctgattgataaagctcatgagcttggtttagttgtgctcatggatgttgttcacagccatgcgtcaaataataccctagatgggttgaacggttttgatggtacagatacgcattactttcatagtggttcacgcggccatcattggatgtgggattctcgccttttcaactatgggaattgggaagttctaagatttctactatccaatgcaagatggtggctcgaggagtataagtttgatggtttcagatttgacggggtgacctcaatgatgtacactcatcatggattacaagtagcatttacgggcaactacagtgaatactttggatttgccactgatgctgatgcagtagtttacttgatgctggtaaatgatttaattcatggactttatcctgaggctgtagccattggtgaagatgtcagtggaatgcctacatttgcccttcctgttcaagatggtggggttggttttgattatcgccttcatatggctgttcctgacaaatggattgaactcctcaagcaaagtgatgaatcttggaagatgggtgatattgtgcacacactgactaacagaaggtggtcagagaagtgtgttacttatgctgaaagtcatgatcaagcactagttggtgacaaaactattgcattctggttgatggacaaggatatgtatgattttatggctctggacagaccggcaacacctagcattgatcgtggaatagcattgcataaaatgattagacttatcacaatggggttaggaggagaaggctatcttaactttatgggaaatgagttcggacatcctgaatggattgattttccaagagctccacaagtacttccaaatggtaaattcatcccagggaataacaacagttatgataaatgccgtcgaagatttgacctgggtgatgcggactatcttaggtatcgtggcatgctagagtttgaccgcgcgatgcagtctctcgaggaaaaatatgggttcatgacatcagaccaccagtacatatctcgaaagcatgaagaggataagatgattatatttgagaagggagatctggtatttgtgttcaacttccattggagtaacagctattttgactaccgtgttggttgtttaaagccagggaaatataaggtggtcttggactcagatgctggactctttggtggatttggcaggatccatcacactgcagagcacttcactgccgattgttcacatgacaacaggccctactcgttctcagtttattctcctagcagaacctgcgttgtctatgctccagcggaatgagaacaccaagaggcagcatgcaagtgtgtgcggctgctagtgcgaaggagcaagaaaaactagttgccagcaatctgtgaacggctttcctaggttctgcttcgatgaatgccggatagactagacagcttgcttttgtgctttgcgctcccaatttgtagttttagtttgtgagggaaagaaacgtttatttgtaattatctatggctgtcgaacggcgacgaaaccatgaaccccgtatatttgttggtaccgttcgaactgccagttatacatagttctgcacttctgtacaaattgtgatacttgaatctggatggttagttacgatatcgcttgtcatttgtatgtttatgaataatctgttcgacagaaatgtttttctccttgtatttagtgctcaaaaagcttctctttagtctgcttctgcatatttcttgagataagacaatgcatgcaatcagagcagaaaaaccatttaaaaaaaaaaaaaaaaaaaaaaaaaaaaaaaaaa

SEQ ID NO: 11897 - DNA, 574 bp, Oryza sativa
  unsure (1)..(574): unsure at all n locations
  Clone ID: PAT_MRT4530_18077C.1
tagaagagctatgacgtcgcatgccgcgtacgttagcttggatctctagagcggcgccgcgatctagaactagaacagagggagtagtgacttcctcaggataaaagcattgcacattcattgtcnataaatgccgctgagaggaattgatcnagtgatgcaagaaacagaatgatctccaaaatttcaaacaagtaaagtgtacagcagcatttacaagaaatagttaccatatttatgaaacaagagtaaagggtggcaatggcattttagagtaagctgcttgatgtcgactttcatgcaacaaccatttggccaaaaggttaagctgttgaggacagcaatgtacttaggatactagcaatatagatattagcatgaattttatgcttgatatctacacttgggcaactagttttagttcatttctgcaatgacaagaagggttctgacagtaaactaaattcccataaaagggccacatgcacagaatacaggcattaatctaaaaaaggataaaatttacatggcaagagaacttttcagataaatgaatacagtgaaccagagctgt

SEQ ID NO: 11898 - DNA, 1224 bp, Oryza sativa
  Clone ID: PAT_MRT4530_18078C.1
atggcggggtacggggaggagaaccagaacggcatgaacgggtacgaggaggaggaggaggaagaggaggtggaggaggtcgaggaagaggtggaggaggaggaggaggaagaggaggaggaggagggggctgatgccaccgccgcggctgccgatgcggcggaggaggttgcagaggagaggcgaggcggaggtggagaagtggagggcgtcggcaatggcgaggaagcggggaggactgcgggtggtggagagggcggtgattcgtcggggaaaatttttgttggaggtgtagcctgggagacaactgaagaatcgttcaccaagcattttgagaaatatggagctatatctgattctgtgatcatgaaagacaagcatacaaagatgcctcgtggatttggttttgttacattttcggatccatctgttattgacaaggttctgcaagatgaacacactatagatggaagaacagttgaagttaaaaggactgtcccgagggaggaaatgtcgtcgaaagatggtcctaaaacgagaaaaatctttgttggtggtattccaccatctcttactgaagataaattgaaggagcatttctcttcatatgggaaggtagttgagcatcagataatgcttgaccatggcactgggcggtcacgaggctttggctttgtcacatttgaaaatgaggacgctgttgaaagggttatgtcagaagggagaatgcatgatcttgcagggaaacaggttgaaataaagaaggctgagcctaagaaacctggcgggggtgattctagctctaatgggagacatagtcacgggagtggtggtggccaccgtagttcttaccgtggtagtggtggtggcaattctggaagcagcagcagcggtggctatggtggatatggtggtggctatcggtcagctgctgcagcttattacggtagcacaggttatgctggctatggcagaggttatggatatggaggtaaccccgcatttgggtcaggctttggctctggctatggtggttcaatgtatggaggtccatatggtgcctatggtgcatatggtggtgcctatggaggtggtggtgcatatggtgcaccgggtggctacggtgcaggaggatatggtgcttatggcggagctggaggtatgggcggtggtgggagcacaagtggtagaggctcgagcagataccacccgtacggaaaatga

SEQ ID NO: 11899 - DNA, 2213 bp, Oryza sativa
  Clone ID: PAT_MRT4530_18079C.1
tttttttttttttttttttttttttttaagtagtcaagtgcgtagatatcagtttaatttattgcaacggagatcaacaaccacagtacatgcgccctgctaggctgctacctgctagcgacttgactaactgcttctgtattatgtgcatatatatagcttgcagcgcagtttgcctatcggcacgatgacctctagcttcccggtacaaaaaccacacactttgtactgcctcatagcttagactacggttactcggggaggtacatatatatattagtagaagctaattaccataaactgatacttaattaagtgagtacctacttgcgtgcgaccaaataagtagcatatatatgcagtggcaactctattaagacagtactacagcatgtcagcatgacttcgtagctgctaattaatcttcaggtaccatgcacactagctactacattagctagctcttctttcacccgacgacgacgactcaggcggcaggcgcgcagtcatagtcgtcgtcatcgtcgtcgccgtctgtctcggccatcctaccccgcgcactgcagcacggtgcgccggcgtaaaccgcaaaggaggcaataatgccgccgtcttggtggacgagggggctggcctccgacaccggcgccatggaaattaagcaggaggggtatgctagctttagctcgctcaacactactgtggctgatggggctagcactctggaggctctaccgctctagctagtgcgctgtactctataccagctagctagctgtgtggcgtgggcggagaccacagccgaccgggggggcgtggcgccccacggccgcgtgcctctgacaggcaacacccaggcaagctcacatccacatgcaaaggagctcgagcaagtaaagggtgaggtcgcgtgggcgatggatctgaagcaagtggcgacgacactacctcatgcaaccaacatcagaggaggagctcatgagggtacaggtgccccgacaagcctgaggtcacttgatggtggagccatggtcaccagccgtgagagacatgtctctcgtgcaacgcgtgcagccctcccctcccccttcacgttatttgttggtgaggcatctagacaatgggaggtagatctgaagaccagagagacaggtctagaaggaacataccaggaagacccctattgtcgccatcactggcgggcggcggctgtggtgtgggatgggaggcagcggcagcgcggggcaccgaggcggcagcagggtgggaagtgggatgcggaggcaggggcagctgcggcgtgggatgcggcggcggcggcagcagcgtggggtgcggaggcagcggtggcgtgggaagagccggcggcggtgcagggaaggagaaggaggaggaccgggctgtcccggcggatcccgacgccgccgggagggggccgggttgtcccgcgtcccgccctgccgccgcctccgcgtcccgcgccgccgcggcctccgcatcccgcgtcgcctccactcccccactccaagcccacctccacgccaagaacgttcacgcaccacctcgtcgacctcctccactcgccgctctacctcccgcgccgcctcaccatctcggacatcgcggtgcaccggtggtcgaagcgcaccgcggtggcctccgcgctcctctccccactcctccttgccgccatcaccgcgcgtcaccacaacaaccaccctccagtcctcctcaccatctcgctcgctggcgtcctcctcgccgccgccgccgcggccaccacggacgccgcctccccacccaagagccgctcatcccgactcccagcgctctggtcgaacgtcagggagggcatatccgacggtggtaggtggtcctcccgtccctaccgccagccgatggctagaaggtataggaagggataccaagggcacattcgatggtgtgctggaggaggcgacgacttcgctagcgagggcagggaggacttggatggggtgggtagtggcggcaccaagggcaggccgccacgatcgcgggcgtacgcgacacggcccgacggcgcgcagtccggaagctgcgccgagctccacaaatccaatgatcatgataccgtccgcgatggcggcggcgtgtataacacgccgccgtccacacggcgtgactcccttcctgtcaacgcggtcagcggggactgggagacggttaactag

SEQ ID NO: 11900 - DNA, 104 bp, Oryza sativa
  Clone ID: PAT_MRT4530_1807C.1
gtcaacgacgccggtccgggccgggtaaagcagaggcgaacggcgtcagcggcgctcgaagacatccgatgggtagcttcctccggaaggatgaggccgactag

SEQ ID NO: 11901 - DNA, 115 bp, Oryza sativa
  unsure (1)..(115): unsure at all n locations
  Clone ID: PAT_MRT4530_18080C.1
ctgctcgcaacattgaggatacatgcatacgacttangaaacttgcagagtaaggctgaaggccacgttctccagatggaacacttgtcatagatggcaagaacagttctgtggt

SEQ ID NO: 11902 - DNA, 974 bp, Oryza sativa
  Clone ID: PAT_MRT4530_18081C.1
ctagcaatcgcaaaaatctgacaacgaggaatggttgtagtctcgtggtaaatggaagatcgagttgtgcccaaagccgaacacggccgctatgcaaaattttgctctgacataaacataactaggcagatatgacgctcggatcgtcactagaattgacttgtttagatgctcgaacggaacagtttcagctgtgttcttcttgagctcagggtgattgaactcgttgcgtggaaggacaatcagctgagatcgtgcacccttctcgatcacccaaccggagtttgcaatatggtgctccaggaacttgtccaatgcaagaccctcaatgttgatggcctccgcaagaacaggcctaggaactttctggtatgtcaaggagagcacatgtatcgcataggattggattgcctgctcaaaacctggaacaacatccaatatgttgcggttcttcgacgcctcatcccaaaattgacggaacctagcagtctccaggtagtgagagagaactatcaacgtcttgaactgttcctccatttgcacatgctctggaattaagaataagcataggctgaagtccgggcctggcattgccatgagagccttaatcaatatgcgagatacaatctgcacactcaacctttctggttcgaactggtacagacgaagaagactaagatttgcatccaagttatatgtttggttggaaacctgatcgttgacgaagccctcgaggtcgttgaggatgtcggggttgtaggggttcacggcgacgagctcctccaccgtgtagctctccgccgcctgctcgctcgccatctcggggaaccctaacgcccgaatgctagagtagatctcgcgcgaaaccctgggagcggcgagaggaggagaggagagaagtggcggcgcggcggagggggaggcgatggagaaaagggttttcgggttcgtgcgaattttttcgctttagtccc

SEQ ID NO: 11903 - DNA, 1039 bp, Oryza sativa
  Clone ID: PAT_MRT4530_18082C.1
tttttgtttttttttttttttttttttttttttttttttttttgtgcccaaagccgaacacggccgctatgcaaaattttgctctgacctgataaaatatcttgccaacaatgtaatatcatggcagaatgcttacataaacataactaggcagatatgacgctcggatcgtcactagaattgacttgtttagctaaaacaggcatatcaaaacgcagtacatcacagcagagaaaacagatgcgcccagagtatcttcacgcgctcagaagttctgtaatgcaaaatctcagttggtctggttgttgactcagctaaggacagggaatatgcgagttacatgctcgaacggaacagtttcagctgtgttcttcttgagctcagggtgattgaactcgttgcgtggaaggacaatcagctgagatcgtgcacccttctcgatcacccaaccggagtttgcaatatggtgctccaggaacttgtccaatgcaagaccctcaatgttgatggcctccgcaagaacaggcctaggaactttctggtatgtcaaggagagcacatgtatcgcataggattggattgcctgctcaaaacctggaacaacatccaatatgttgcggttcttcgacgcctcatcccaaaattgacggaacctagcagtctccaggtagtgagagagaactatcaacgtcttgaactgttcctccatttgcacatgctctggaattaagaataagcataggctgaagtccgggcctggcattgccatgagagccttaatcaatatgcgagatacaatctgcacactcaacctttctggttcgaactggtacagacgaagaagactaagatttgcatccaagttatatgtttggttggaaacctgatcgttgacgaagccctcgaggtcgttgaggatgtcggggttgtaggggttcacggcgacgagctcctccaccgtgtagctctccgccgcctgctcgctcgccatctcggggaaccctaacgcccgaatgctagagtagatctcgcgcgaaac

SEQ ID NO: 11904 - DNA, 4332 bp, Oryza sativa
  Clone ID: PAT_MRT4530_18083C.1
atggcgtcttctagcggtgggggtgataaagggatcgtcactgggatggtcacccacccgaagcccctggtcgacgcgatgctctcccatcaagagacgtctactacggccaaggagatcatcttggccccaaataagcaggctttggagtcagcgagtcagagtaaagataagatgatccacgctaatcccaagaccttgccagcgacgggggctagcgacacctactcaactgggccgggtgcatacacagaaggagatgtggaggaggaggatgatgaagcggtggaggtactgctagaagatgatgaagtacaactagctgggcagtggacagttttgtcgagattctactcgcttcgatcacccaatcaagcggctctatttgatgacatgaagcgtgcatggagattgcgagctaacatgaaggtcaagtccctgagagataacatgtttatcatcaccttcagctcggaaggggattacaactttgtgctccagggcggtccatggcttcaccgtggagacgctctgcttgttgcaaaattcgatggcctgacgagcccgtccatggttccccttgagtttgtgccaatctgggtcaggatttatgacctccccttggtgcttatgacaaagaggaggggagaactgtatggcagcaaacttggacatgtgagggaagtagatgttggtgaagatggcagaaacaagcatgacttcttccggatcctgccttttgagagaagaatgagcacaatccatggccaacaaaagtcaggagtggcacgcaatctggccttccgtggagcagggagtgcaagctcgtcatcctccaaacaggggaaaggtaaaagcagggaggagattattcctgacagggtcgatgctcaggatggctttgagggaagagaagatgtgggggacggggtggtggatgaactgctagctagtcagactagcaatctgaacatgtcaggtgagaatatggtgcagaaaggagaaccggtgggtatggaggaggaacaacgccatcagctgtcaacatctaaccttgtttctgatactgatatgattctagcaatacagaacctgcagcaaccggcatcctttggaggagagtcttccgaggacatcagtgataccaaccggaaaagagtgcaaccacagagcgggagcaagatatccgacagagttcaacaggccttagtattgtatggtcaaggatctggtagagaacaggctaagcaggtggacccaaaggagccagcgagagctctcaaacggtttcggaagacggaggtggaaagtatggaagttttggaagcaaccagtcctggggctactgttaaagaggccgattcccaaattgttttcctaagtgagactagacagaaggcggatagaatcaggcgtttacggaataggttgggtcttagaggttttgctggagttgatagtgatggaatgagtggggggctcgctttgtactggcatgagtctgttaatgtggaaataaaagctttgtgtgagagatatattgatgcttatgttcgcttgtcgccggatggccctctgtggcatgccacctttgtgtatggtgaacctagagttgagaataggcacaatatgtggtcgatgctccggtctctgaggaattcatccaatttaccttggcttgttattggtgattttaatgaagctctttggcagtttgagcatttttcatctcaccctaggggagagccccaaatgggcacaccctttacttatgataataagcgccagggaagaaacaatgttagagtgagacttgatcgtgccattgctgacaatgcatggcgtgataccttccctaatgcgactcttgcacacctggcctccccccgttcagatcgctgtcccatatccttgcaactgtctcaggagatgaaacagccagccaggaagaaaatcttgcattatgaaatatgttgggaacgtgagccgtctttgccagaagttgtgcaggaatcttgggtggaagcagggactaaatctgacctgggtgatattagtgctgctctacgtaaggtcatggcatctctgcattcctggagtaaggtaaaattcaagaatattggccgtgaattacagaaagctaggaaaaagcttgctgagctgctggaaacatatgcagatagtgctgctgttcgccaagcctcggatcacatgaacgaactactttatcgtgaagagatgttgtggttacagcgctcacggattaactggctaaaggagggcgaccgtaacactcgcttctttcatagtaaggctgtttggagggcaaagaagaatcggattcagtctcttaaagacagtgctggcactgtacaccgttcggcaacagcaatggagcagctggctactgaatattttcaggaagtgtattctgccgaccctagtctggatcacagtatagtgtcaagtttcttccagtcgaaagtttcagcacagatgaatgaggctttatgcagcgatttaacagaagaggagatctctaccgccatcttccagatcggcccgctgaaagcgccgggccccgatggattttcggccaagttctatcaacgaaattggggcacaattaaaagtgaggtagtcaaggcagttcataatttcttcatcataggagtgatgccggaggggataaatgacacagcaattgttttgattccgaagattaagcagcccacccaactgaaggactaccggccgatcagcctctgtaatgtcatttataaagtggtaagcaaatgtctggttaacaggctgagaccgttcctagatgaactggtttcgcctaatcaaagtgcttttgtccctgagcgtcttataactgacaatgctctagtagcttttgagtgtttccatttcatacaaaagaacaagaatccaaacaaggctgcatgtgcttacaagttggacctgtccaaggcttacaacagggtagattggaggtttttggagcaagcaatgcacaagatgggtttcgctcaccgatacctggggtttccgacaccggagggtagaatgaagaaagggcatttccagagtttacaagagaaggcaaagtactatcccaacggttccatcgttgacacctgttttagcgggaatgcttcacctgggtggagaggaattgaacatgggttggagctactcaagaaaggaattatttggcgggtgggtaacggacagtccataagagtatggcgagatccctggttaccgagagattattccagacggcccatcacccgcaaaggtaattgttgtatcaagtgggtgtcggatttgctacaggatgatggaacttggagggttgataaagtgcaggaacacttttggccgatagatgtagaaatgatcctgaagattcgcacctcagcttcacttgaatccgattttttggcttggcatcctgatagattgggaaaattctcggtcaggagtgtgtaccacttggtcgtttcgcttgcagagaccggtgattgctccagttctacagaggtgctagtaaataaatcttggaagcgtatctgggcgtgcaatgtcccacaaaaagtcagaatcttcgcttggaaggctatatctaatagtctccccacaatgaagaacaaaaagaagaggaatctggagttgttgagcacttgctgcatatgtggagccgaggaagaggatgttgcccatgcgctttgtcattgtcagcaagcgaggaacctgtggtcggctatgtattctgcgagagccatctctcatgacgtgaatagtgcttggtccgggacggattggatcctgaaccttttggaggatgccatgtttctcatgctaatgtggcgcatttggcataacagaaatgagatcacccatggtaaatcaattgcgccagtggctgtctctcagagattcatctttagttatgttagctcgctaactactattaagcagtaccctcaagctgacataattaaaggtaaacaggtggcacacccggaccgcattaggcttcccagccaagctccccccgcagtcagttcgcctaggcgctgggagaaaccgagcacaaggtggatgaaattgaacgttgatggatcctttcaggcttcggatggtaaaggtggaattggggctgtttttagagacagctctggaaatgttatttttgctgcctgtgggtctatgctggtttgtggtagtgctatggaagcagattactcgcgtgcagggagggtattgcaatggcgcttcaatggacgttcctgcctttcattgtggaaactgattgcttag

SEQ ID NO: 11905 - DNA, 558 bp, Oryza sativa
  Clone ID: PAT_MRT4530_18084C.1
atggcaagtaatgattccgagcgcggtctagcagacccctcggttttcctgccctacgcgtccccgtgtgtggcgcagttattagcggtcaagtcatcatcatggcgcatgggatgggtggcagcgcacccacgtcccgccccctgtcaggcggagtgggggcagccggaggatggcactgggacccacctgggggcgaacgaccgccttgcttccggtcgaaggcatggacggcgtcttgacctaagacataactacttcggcatcctctggtccgaaagatatctactgcgtcaagtaccttggaaccccttcgcctgccgaagcaatgttgtgcattgctcggagttgcatctttttctagcatttcgacgcctacgaagggcgatcagatcttgtgatgacttggatcactcttcattgtgcatcttggcgctgttcggcctggggtgcttggacatgaacagcttcgcgaggcacctcttcggctctgactccttggaggctgcccttgattcgccggaggtgaagggcgaaccatcacaggtgtcgaactaa

SEQ ID NO: 11906 - DNA, 437 bp, Oryza sativa
  Clone ID: PAT_MRT4530_18085C.1
ctcaccttcgaaatccggcggcggcaatggcggcggcagatacggcgaggtccggataccggcgcatgtctctccatctcggccttatccacgtccaagtcgaccaccggacacagaaagagctaccattccggcatcctcttcatctcatgctgaactaacacttacatcaacaaatggctttaaagaatcttgtggaaagctcgaacactaaatacatgctcgagtagccacatagcgaccaactgcattctataccgcgacggccttcataggggatgctacagctgcggatgcatgttaaggaatagaaggaacggatggaaagctgccggatcgatcgccaatgcttgctgaatacgctatacccacaccacgaccagattaaccatagataaactcacagccacaacaatcatggggcccttcatctagtt

SEQ ID NO: 11907 - DNA, 284 bp, Oryza sativa
  Clone ID: PAT_MRT4530_18086C.1
tcctccctctgtgcgcatcatcaacctggccggcgagccgctgaaacagaccttggtggaggcgctgtatcaacagcctggcgtcgaacatgtctacgacctttacgggccctctgaagacaccacctactccacctacacccggcgtaccgccgggggccagccgagtattggccggcccatcaaccataccgccagctacctgctggatgcccagttgcaggctgtgccccagggtgtttgcgccgaactctacctggcgggcgcggggatcacccgcggct

SEQ ID NO: 11908 - DNA, 1110 bp, Oryza sativa
  Clone ID: PAT_MRT4530_18087C.1
atgtggaagaagatcgcggccggcgcggcggagggggagacatggaaggcgctcgcggccggcgcggcggaggggtggcgcggtctgctgccgaagacggcgtccgccaccaccaagctcgtgcccgattcttctccaaagtcggcgacgccgaccgcggcgctcaacctcgtcgccgacgcggtggcggcgtggcgccgctggcttcgctctccatcagcgagtcccaccgcgagctgcagagacgacagatcattggacatatggtatactgctaaagaatttgtcaagaagtatccagttgtactctttgctcagcctacagatacacactctcagttccacagatgggtataccaggagtggttcaaacccacggtaagaagcttgcttaagtgtgtcagtgatcaccatgcttccaatttggagtttcaggagattactacggagaatgtcaagatattttgcaatgctgatgctcctcaatttattccccgaatcaaaatctactgtgagaccagaaaagcgacttatgaagggagaaagcagaattttgtgcagacaggggaactgataacagagttgataaaatcttctgtggacaatccaactgaggttttggacctgctctctgaggacataaaagataagctcagtatgttgaaaaatcctgacctgtctcatgatgctgatccacggcagtgtggagtttatatccttgtgaatcatccgtccatgctacgaagggagatgcaatctccgttttaccttgcctgttatgatttgctaatgagtgtggataaaagaattgcaaacagggcattcaggaaactgccttataagaactggcagtcaagagccctgcaacaccccctgctcaaagatcatctcatcaatagacggtctagctatggcagagacaagtatcaccaagcaagatatcatcggaatgtggcaagtcacaaaacatcatggaaatccaagtacaaagctgaagaggtcgacgagattatccaccaccactttccgatgattttaacacgtctgatgaaggtcctgtcaaagatgaagttgctgatacgccttaccctccacaacttctttggataa

SEQ ID NO: 11909 - DNA, 487 bp, Oryza sativa
  Clone ID: PAT_MRT4530_18088C.1
actcatctcactgaacttattagtcacaacaagaaaagtagcatagtattagtaactcgtcatacgcaatggcaaaatgtatgacttacacccaccaaggagttatgttatttttcttggttcttctggtgtgctctgctattcctgcacaaataagaggtcaaaacacaaacaagatcagaagtgatttgctgatgggagtaaaaggcagaaacggatttctgggacttgattataaaccggatcattgcgttcaaacccgtggtgggttctattgctgttcgctggaccagctctgctatccaacactcgaggaatgcttaccaaactgcacaccaccaaaggtgcacagaggttcacaattaacaagtgattgatcagtaataatcatatactgcatcgagcttccccgcaaaaaaaaaaagtactgcatcgagcagctgaggactgaaattaattatgatacctgatatgtttgttctaaccg

SEQ ID NO: 11910 - DNA, 597 bp, Oryza sativa
  Clone ID: PAT_MRT4530_18089C.1
atggccgcctcgctcctccgctccggccaccgcctccgcctcctccgccacggcagcctctcctgggcctccttctccgccgccgccgcggaggagctcatcgacgtccgcaagctccccactgactacgacgcctccaccttcgaccccaccgccccgtcccgcccaccgccctccgaccgcgtctggcgcctcgtcgaggacgtctcctccctcaccctcgccgagtccgccgctctctccgccctcctcctccgccgcctcgacgtccccgctccccccatcgccatcctcaactccgccgcgggcctcggcggcggcggcggcgcgggtgccgcgggcgccgccggggagaaggccggtggggcggcggcggctgagaagacggtgttcgagctgcgcttggaggcgttcgatgcggcgagcaagatcaaggtgatcaaggagatccggtcattcaccgacctgggtctgaaggaggcgaaggagctagtggagaaggcacccgctgtgatcaagggtggtgtctcgaaggaggaggctcggacaatcatcgataagatgaaggctgttggtgccaaggtcgtcatggactga

SEQ ID NO: 11911 - DNA, 234 bp, Oryza sativa
  Clone ID: PAT_MRT4530_1808C.1
aacaatgtctcgcacgcctacgcagggatcgcaccacccgcgccgcagaagccaacgactggagtgagaggtctgatctaacgcgggtgtgtcacgtgtgtagtatctgtgcaccctgcatgcaggtgcaaaatgtccacatgtcaccagacgagaagatacatgccaatgggagcagtttggaggcgtagactgtatgcgtggtgtgtgtataccgtgtgtatgcaatcatcg

SEQ ID NO: 11912 - DNA, 114 bp, Oryza sativa
  Clone ID: PAT_MRT4530_18090C.1
atgtctatagggatcaccgaaccgaggagcaagcaggaagatgcttcggagaaacaaaccactgcatcttcagagttcagagaacaagagatgaccagctctgttgcctcctga

SEQ ID NO: 11913 - DNA, 1879 bp, Oryza sativa
  Clone ID: PAT_MRT4530_18091C.1
ggaattcggcacgagccctacgcatccatccaccgtctcaatctcggtagtaatcctcgcggcctcgccgttagttccaccaccgggcgccaccatgtgcgggatcctggccgtgctcggcgccgccgactggtcgcaggcgaagagggctcacgtcctctcctgctcccgcaggctgaagcacaggggacccgactggtccgggttgtaccagtgcgagggaaacttcctcgctcagcagcgtctcgccatcgtctccccgctctccggcgaccagccgctgtacaacgcggaccggaccatcgtcgtcgtggccaatggagagatctacaaccacaagaagatcaggaagcagttcgcctccaagcacacgttcagcaccggcagcgactgcgaggtcatcatcccgctgtatgaggagtacggcgaggacttcgtcgacatgctggacggcgtgttcgccttcgtcctctacgacacccgcaccaagacgtacatggccgcccgcgacgccatcggcgtcaaccccctctacatcggcaggggcagcgacggcgccgtctggatatcgtccgagatgaaggcgctgaacgaggactgcgtggagttcgagatcttccctccgggccacctctactccagcgccgccggcgggctccggcggtggtacaagccgcagtggttcgccgagaacgtcccggcgacgccgtaccagccactcctcctcagagaggccttcgagaaggccgtcatcaagaggctcatgaccgacgtgcccttcggcgtcctcctctccggcggcctcgactcctccctcgtcgccgcggtgaccaagcgccacctcatcaagactgaagccgccgagaagttcggagctgagctccattccttcgtcgttggccttgagggttcccctgacctgatagctgcacgagaggtcgctgaccacctaggaaccatccatcacgagttccacttcactgtccagtacaatgctgatcttggtcgcatcgagaagtgggttatgaggaaggcgttcgacgacgaggagcatccttacctgccgaaggtcagtgatgaaatgatgaagaacgctgccaaagtgtacccgcacaacacgcccgtcaacaaggaggcgtactactaccgcatgatatttgagaggctcttcccgcaggaatcggcgagggagacggtgccgtggggcccgagcatcgcgtgcagcacgccggcggcgatcgagtgggtggagcagtggaaggcgtcgcacgacccatccggccggctgatcgcctcccacaactccgcctccgccaaccacaccaaccacgcaaacgccaacgccaacggcaacagcaacggcaaggccaacggcaactgcgcgatggcggccaacgggacgaacggcgtcggcctggttgtggccaacgggacagccaacgggaagatggaagcataacgctcgaagctggccggccggacggccattgatcgcgctagccgatgagatcgtcgacggccgtgtggtgtacactaaaaaaggataaagctagtactagtaggtgtgcgtgttttctcaccaatcgcccatgacgttggcgcgttctgtagtactacccgtgtacgtgcgtgtttgttgccgctgctgttgtaccgtctccccttgtcgttgtacgtgtgcgagagagaccgatccaagtatgtggagagtgatcgatcactcatccgaactcatccttgaaacgatacaccgtaattaatatatctcctcatttttcgctgtcaaaaaaaaaaaaaaaaaaacaaaggaaaaaccccacacgagctctctccctcgtgcaaaaaaaaaaaaaaaaaaaaaaaaaaaaaaaaaaaaaaa

SEQ ID NO: 11914 - DNA, 531 bp, Oryza sativa
  Clone ID: PAT_MRT4530_18092C.1
atgtcaccgaagaagatcattaaggagagagttgccaagcgaaaggagggcggtagcgaaggggagatggtagccgaagagggagcagagccttcggcctccgagggtgaagctggagcggcgcctcctccggtggcgcagccaactctcccgccttcggtgcctacactttcgactaatgcggaggcggcgaaagtggaggcaggggcgaaggccctctaggtcaggggcgcgatcttgtcatctcaagtaccgggggtgcctccagccgccgctttcgcccaacaggccacgatgtcgatggcaataaccacctcacaagccaacgccaatctcaaagctcaagccgaagttgacatgggggccatgcgtcagagtatggctaaacttcaagacacgcttcgccagatgtaagagtagcagcaagcgtacgaagcagcaagacaagccaagacccaaacccagcagttctacgcttagccccaagctcttcctccacacgctgagatcactaaacccaaaaatacagat

SEQ ID NO: 11915 - DNA, 1472 bp, Oryza sativa
  Clone ID: PAT_MRT4530_18093C.1
ggcctatcaacatgagtcagcaaataaatgcaggtgacgattgaatcaattcagcatttcgaccaaatacagatacaaggtaaccgaacaggtaaaaatacacattttaacatgacctgttcatttcagacatgttccttggaactctctaatagcacacgtacaagtcaccaagagttagaaccaaatgtcgtgaacaattctttgaacacggtaactaattacataagaaatgcatctgttccccgcttacacaactcacagaaagcacatccatccataacgctcttcacgcagcaacaaccttgatgctgatgaatgtgcctgtgtgaccatcccaatcttattaatcctctggctgttcagttctgtaatttacagttgaaataaattccatatgctagagatcaacttccgttttccagtttcagtcctttgcgatgatggttccaagctagtaatgctgcaccaatggctggttccacctcaggtcgaataggatggacgcctgggaagactttggaaatacatcttacaacctcaccactaatgttccattttttgttgccttcgagaacacctccaaccaaaacaagcggaaattggtccattccatcttcaccacacaatttaaggcgccgaacaacagcaacaacactatcagctaactcctgcactgaatcatgcaatattttgtttgctacttcatcaccatcttcagcagaagataccacaacaggaacaagtgctgcaatacgggcccaagatggatctgcatacgtccacccaatcaattcatctggtgaagaaagctcaagcttcctaaggatctctcttgtaagattagtatgaggtccacggccatcgtatgcttttacgactgctgtcagggcctgtgcagcaatgccatatccactaccccagtcgcccaaaacaggtccagcaccagctgctcttgctacctttccatcttcagtgaccccataagctatgcttccagtgcccgctatcaatacacagccatgtagctttcccattgtaccactggccagagctgccaccgcatcattttccacataaaacttgacatggccagggaagagatctcgaatccagtctagcatcctctgctgatcagaaggatggttaactccagatacagctaaacaaactgcacggacagctgaacgatccgtgttgaccaatgtgagggcctgtgccatgacctgttctagagtttccagtgcagcactttctccgacggagttgcggttggagcagccggcgacggcgcgggacaagacggggacggcgccgggcgattccggcggcggcattgcgaccggcaggcagacgcagacggtgttagtggtgccgccgtcgacgcccaggatgacgccgccgtctccggcggcggccgccggcgagtcgccgttctcgtagccgcccatcccctcgttgctccctcgtgc

SEQ ID NO: 11916 - DNA, 597 bp, Oryza sativa
  Clone ID: PAT_MRT4530_18094C.1
gctgcaggaattcggcacgaggctctggtcttgaattcttcatcttctctctctgcaagaatctcgagatttcaagatcgaggagaacttaaaagtttttacgccatgattccgagagctccgagcctcttccatatcgaggatggagctgtgggtgtcgcggcgtcgacgaagaagccaatgccggctgactccggcgagctcgtcgggctccggctgatcatacagcagtcgccgaggcaacggccgccgctgtccgtgctcaggcggtcggcggtgaggccgtcgccggcggcgacggcggcggcgagtcaggatgaggctggtgctcctgcaggccgggggttcatggggttggggttcttgaactgctgctactgctgccacaagaagctctacgccgacatggatgtgttcgtctacaaaggggagcacgcgttctgcagcgcggaatgccggagccagcagatggcgagggaggagaggcgagagatcgagatgctggtgaggcggcgccgcgacgcgttccaccgccggcgagcttcgccgccggccaagatcggtggacacgcgaggctgcagatcgctgcttcatga

SEQ ID NO: 11917 - DNA, 1141 bp, Oryza sativa
  Clone ID: PAT_MRT4530_18095C.1
ggaacaaatatgtgagaaatttttataccaccacaaagcccccgctctttctttttttctctggactttgggcagaaaattccgcaataaaaccacaaaaaattttctgtacaaacaccaagatcatcatcatcatcttcttcttcttcttctccaccgccatcgtcttcgccggagtaatcaaatgattgatatgaacgagccaaacgaagattggcaatggatgcagcgatcagatcttcatgttggcgtacatgatgaactggagctccttgacgcagtcggccatggaggggcggccggcgctctcgaagcagacgcagcgggcggcgaggccggcgaacatggacaccgactccggcgtgtaggacgacctcgccatgtccctgtccaccaccttgcgcagccgcttccggtcgccggacacctgctgcatcctcacgatgaggttctgctccggggtgccctggctgaggtcgatggcgcgccgccccgtgaggagctccaggagcacgacgccgaacgcgtacacgtcgctctgcagcgtcagcttccccgtcagagcgtactccggatcgaagtagccgaaggtgccaagcaccctggtggtggcgtacaggtcgatatcctgcggcatcagcttggccaacccgaagtcagagatcttagcctcaaagtgctcggtgaggaggatgttgctggacttgaagtcgcggtggacgacggggacgccgacagcggtggtggagtggaggtaggcgagccccctcgcggcgcccagcgctattcgcagccgcaccggccagtccatcctcacctctcctatcccattgaggatgtcttgcaggttgcctttgggcatgaactcgtagacgacaaaccggtgcttgccgtcagcacaatagccgatcagagtgaccagattggggtgatctaacctgctcaggatgtcgatctctactcggaattcgcgctcgccgtcggcttgtttcgatgtaggtagatccatcttcttgatggcaacaatctgtccatctttcagaactcctctgtaaacgcgcccaaatccgcccttgccgatgaggttcctctcactgaacatgttggtcgcctcctccatctccttgagcgtgaacaccat

SEQ ID NO: 11918 - DNA, 1739 bp, Oryza sativa
  Clone ID: PAT_MRT4530_18096C.1
atgccgccgcggagcctcaccctctcccgccttcccgtggccgcccttggcctccccttctcttcttgctccccgcctcctcctcgccttcgcttccccttcgccgcacgccgcgccaggtccctcgccaccagggcctcctcctcctctccggattcctccttcggctcgcggatggaggactctgtcaagaggacgctcgccgacaaccccgtcgtcatctactccaagtcctggtgctcctactccatggaggtcaaggcgctcttcaagcggatcggcgtccagccgcacgtcatcgagctcgaccgactccacccacagggacctctattgcaaaaggtgttagagcggctgactggacagtccaatgttcttaatgtgttcattggtggaaagcacattggtggctgtacaggggcaggggcaggggcaggcgctgccattgtggtggtggtggtcgcagtcgcagcagcggtggtgtgcgagtgcgaggcgaagccgcgagcctttttcgtgtttggcgactcgctggtggacagcggcaacaacaactacctgatgacgacggcgcgggcggactcgccgccctacggcgtggactacccgacccaccgcgccacggggcgcttctccaatggcctcaacgtccccgacatcatcagcgagtacctcggcgccgaatccgtgctgccttacctcagcccgcacctggacggacccaagctgctccacggcgccaacttcgcctccgccggcgtcggcatcctcaacgacaccggcatccagtttgccaacatcatccgcatcgagaagcagcttcggtacttcaatcagtaccaggatcgggtgcgcgggctgatcggtggcgcggcggcgcggcggctggtggagggcgcgctggtgctcatcacgctcggcggcaacgacttcatcaacaactactacctggtgccattctcagccaggtcccgggagttcgcgctgccggactacgtgcgctacatcatcggcgagtacggcaaggtgctgaggcagctctaccacctgggcgccaggcgagtgctggtcaccggctccggcccgctggggtgcgcgccggcggagctagccacgcgcagcgccaccggcgagtgcgacctggagctgcagcgcgcggcggcgctgtacaacctgcagctggtgcggatgacgcgggagctcaacgccgagctgggcgccggcgacgtcttcgtggccgtcaacgcctacaggatgcacatggacttcatctccgacccggcggcgtacggcttcgccacctccaaggtggcgtgctgcgggcagggcccctacaacggcgtcggcctctgcaccgcgctctccaccctctgccccgaccgctccctctacgtcttctgggacaacttccaccccaccgagagggccaaccgcatcatcgtcagccagttcatgtcagcctcgcccgactacatgcaccccttcaacctctctaccatcctcgccatggacgccgccactgctgctgctgcgccatgaacgcccgccatcatccggcccatacatatcgaccaacctcgctatatatatctctaattttatatatatgccgcctatactataattaactacgctatatatagctagtataattgataatgtaattcttcccaagcaatgcaatatacatatgtatgcatgcaaataaagatcgagggatatatatattgcgtacgtct

SEQ ID NO: 11919 - DNA, 881 bp, Oryza sativa
  unsure (1)..(881): unsure at all n locations
  Clone ID: PAT_MRT4530_18097C.1
ttttttttttttttttttttgatgtnnctgaatcggaacnatnccntctgaataaaggtaaaacataataaacngacttagttcggtggcttgagctcaaggttcnggcaatctgtggcttgcaagccatccncngtgagtctgtncngcagtatnaggtactcaagacataataaaacctgtacaaatttaacagtttcacaggtttctttgtacaatatccacatcttctctacattgatcaacagctaccaaaatccttgccccccttgcttggtgtagcatctggatagcaaagctttaaattcaggattaagatgtctgagagcacaaggttgcaactgaagaacacaccttctgaattatgcaaatatagagtgtagctttacgtgactagtctcagaattctagtaatcgttccttgttcctaataatacatgttctgttatttatcacatatctgtagaaagatcggtgagatgtcagcagtttcaataggagacagggatgcggactgaaggtggaccggatctcatgtcctcaagaatgaggttgaaaagcatctgagcaattgggccttctttgcctgagccaattatctgatcatcccactgaacaacaggtttgacaagaataccactaccaatgagcatcatctcatcagccgccttcccttcctgacactcacattccttgaactgatcccgctgagccttccatctgccactagctgcttggcaagggtcagaacccgtttgccgtgcacccgtaaggatcttgtcgaaacggggcatgaggagctccttgctttgtgtcacgaagccaacattcatgttggaaccctctggtacgaaatccctcttcatccaacatatgccggg

SEQ ID NO: 11920 - DNA, 777 bp, Oryza sativa
  Clone ID: PAT_MRT4530_18098C.1
atggagaccgagtcgtcgagcagcagctactacgcgatcaatgtatcactcgtccgtgtcgtcacggaaaccggcgacgggacgacgagttttcaacgtgacggcttcgccggcgaccgggcgctgaaggtttcgtcggctaaaagcaataatcgaagcgccgacagcggccgagtgtatgagtgcaccaagatagtcccgagcttattgaaatgtgttattttggtcccaaattaccacgacccctccaggatcctacgtggtgcttacatgacatgcctcacggacactaaagtggcctccgaaaccacgcgctgctgcgacgtttacacggacgggcgggcgatcaggtttttggggagcgcaaggcgcgactactcactgttcgtcaacatctacttcaccttcaccaacatgtcgaatactggagacaacggcaacactggagacaaggagaaggaggcttccgtcaacaccaacggaggcaatactgcctcaaactccagcagaggaccattcttggggtataaccttcttacattatttcaattagaactcgccgcgttccagtacgacgtgtcgccgccgatggcgccggcgaggtcgaacatcccggcgtcgagcaccgccgtcggaggcgcccagtcggcggcggcggcggcggcagccgctgccggcccatccgaggaccgtgcggcggcgaacggcggcgagatgctgtgtgcggcgaacgacaccccccgaggactaccggggccgctccgcggctgggagccc

SEQ ID NO: 11921 - DNA, 192 bp, Oryza sativa
  Clone ID: PAT_MRT4530_18099C.1
atgctggacacgcggcggcgagcgattgggcgcggggaagattccaaagggcgattcggcactgccgggccccacgtgtcatggacggagagaaaccggtcgcgtttccggcaggaacaggaaccgatttctggcaacttcttgtgtggtgcgatcgctgcacacgactacgagcacgagcacgagcaatga

SEQ ID NO: 11922 - DNA, 710 bp, Oryza sativa
  unsure (1)..(710): unsure at all n locations
  Clone ID: PAT_MRT4530_1809C.1
cnnncgaggccggcccgggaaaaaaaaaaaaaaaaaaaaaaaaaaaaaagcgcattgccccacgcctccgctctctcccgctcctgctccccggaccagacgccgccgccaccgccgccgccgtccaccgcagctgctcctcctgtggcggtagcttggccgcgttggcgcctgcccgcctgcgcggcatgtcgtcgtcgtcctcctcctccgtctccccctccccgtacacgacgctcgtgggtcgcgtgagctgcgagcgcgagatcaagaagagcaagttcatcgccatcgccgcccccgtccccgacgagcgcgccgccatgtccttcctcaacgaggtcagtgatccccgtgcaacccataattgctgggcgtataagctgggagagcaattccgttacaatgatgatggtgaaccttcaagcaccgctggaaagccaatatactctgccattatttcatctggcattgatatggtcatggtggtggtaatcagatactttggaggcataaaattaggaactggtgggctggtgagagcttatggtggggttgcttctgaatgcctaaaagatgctcctacttgtcttgtaaaaccaaaggctcgtgtgggtatggaggtaccatttgatctcttgggaacagtctatcatcagttgcaacattaccaagctgaagatatcaaacaggactatgacactgggaaa

SEQ ID NO: 11923 - DNA, 479 bp, Oryza sativa
  Clone ID: PAT_MRT4530_180C.1
cccacgcgtccgaaaaaaaaaaaaaaaaaaaaaaaaaaaaaaaaaaaaaaaaaaaaaaaaaaaaataaaagaaaaaaaaatataaaaaaaaaaaaattaaaaaaaaaaaaaataaaaaaaaaggggcgccctttttaaagaatcaaattttactacctgggtctttggcaaacaattattttttttttgagggcccttaatttaatttacttgcccggttttttaaaatgtcgtttttggaaaacccttgggtttcccaaatttattccctttgaagaaattcccttttttgccaattgtatttatacaaaaaagccccaccctgatcgccttttcaaaaatttgccaatcttaattgtaaattgaaaccccccttttactggccatttaacctcgggggggttgttggtttccccaaggttaacttttaaatttgcaagccccttatccccggttcttttaatttttttcctttcttt

SEQ ID NO: 11924 - DNA, 1976 bp, Oryza sativa
  Clone ID: PAT_MRT4530_18100C.1
tcaaagatataacctcagtgcaccttttcttccattattctgcttgacaccagagtttgtatatgtagtctcgtatctctttagttctagtgttggacggttaagatggacgtcgactgcatatcttgcagctgcctctgcctcctccacctcttcaagactagcattctcatagttgatcgagacgctgaacttctcttgatgtatgtcaaacagcatcatcttatcttcatcacgtcttatgatttcaagggcgggtctgttgggatggtcattggctgcacaccacgcagctgcctctgcttcctccacttcctcaagctaagcatcctcacattatgcgcaaattctctgagcagtacgccctggattatgcagcagccagtggaagtcaaagtaaccaccatgacgcttcactaccgggacttgctgatcacaaggatcaacttggagctcctctatgcccttgtaggcattatgatgacaaagctgctgaggtagcacaaggattttggaactgcccttgtgttcccatgcgtgagaggaaggaatgccattgcatgctttttcttacccccgacaatgactttgctggacaagaccaggctataaccttggaggagatcaaagacgcaacatcaaagatataacctcagtgcaccttttcttccattattctgcttgacaccagagtttgtatatgtagtctctgtaagatgacattctaccgatgaaatcggtcatgataagatgtgtagtaaacaacaatttgtcgttccttagctttcatgttcttgcttttgaacatgggaaaacacgctcccactaatacaacagcctattaactaagcaggtgacttaaaaattctcaatttctgaaagtaaacatcaccagatgtcccccccatgcttattgtcgcagtgtaattggaatccagtttgaggtagttgagctctggtaaccttccaagtgtttctatgtcctgttccttcaaagccatcacgctcttctttccggatgaggcataaatatccacagtctggatgctgtgcagattgtgtaggcaatccaacaaatctctgttcggcctctcatctggttcgtaagtagaaagcctaatccacagcacccttagtttactcagcttgcctagtgccttcataaactgtattctgtcatcattttcagcctctatccatatctcttcaagagaggtcagctctccaatcaaaccagctgataccttgtaaatcctattggcacgtagacacaccagctttgtcagcaggcccattgactctggcagctcttttatttgagttcccaacagatcaagtacttgtagaaacttcagatgtcctacatcctcagggatctcaatagaatcaatgtactgtagtccaaggtacctcaggtgaagtaaactccaaacatgctgcagactgtgtttactcttcttctggatgaattcctggagttcattcatgagctgcctttcatccagcaacatcataatcgaatgcatgtacctttgcttgtcaagatcaatgagaatatccctaaggactttcttcatgtcaggatgctgaccaatcggcacaaaagctccagaatcaaaccccggtttaaacttgttgtagactgctttggcaagggttgtcttccctagacctccaaatccaaagatagaaacaacctttggtttgttcatagatggatgaatatcatccccaagggccaacatctcaatgagctcatccattggcccatcaattccaacaagctctgtggccattcttgcagccacctccttgagcttcttatcgatgtcttggatggctccagcgatcttgcggcgaaccttgactttcttgaacaatttgccaatcttctttctgaggcgccggagcatgtgtgggctggcaggttccatggactcaacatgtacaagaaagatgtcgacgatgtcctccat

SEQ ID NO: 11925 - DNA, 2310 bp, Oryza sativa
  Clone ID: PAT_MRT4530_18101C.1
ttacagagtggtacaaggcttctgctctgtttggtcttggtcagataacgccatctttttttcaccgtatctctttagttctagtgttggacggttaagatggacgtcgactgcatatcttgcagctgcctctgcctcctccacctcttcaagactagcattctcatagttgatcgagacgctgaacttctcttgatgtatgtcaaacagcatcatcttatcttcatcacgtcttatgatttcaagggcgggtctgttgggatggtcattggctgcacaccacgcagctgcctctgcttcctccacttcctcaagcgtagcatcctcacagtcgatgtagacctcgaattttctgatgtttggattatgcagcagccagtggaagtcaaagtaaccaacatcatccttcaccacccgcgctttgacatttttgaaagcagttttataagtgatgtttctatcgggtatcaatcgtggccggctagagttatatgagattaagaggagcttattagcaaccgacaactctttgtaaggtgagagcaacctatcctcagatattcttactattttaagtgtaggatggttgggatggacggcggcagcttgcgccagtgccgcctccgcttcctccacctctttggtatgagcaccagcacaatagatgtcagcttcaactctttgaagcgatgttcttccaaggttcctgaaaccaagttggttctcgaaacaaagtaggttggtatcttttaggaaccgtacatggacagtgaacttaagggattcgaggcttggcataatagccttctcgttgcaaatgatgttatgtagatcaaaccacacgagtgaacggggtgccttaaaaattctcaatttctgaaagtaaacatcaccagatgtcccccccatgcttattgtcgcagtgtaattggaatccagtttgaggtagttgagctctggtaaccttccaagtgtttctatgtcctgttccttcaaagccatcacctgcaattctagataacagaggtttggaagaaatgatgagttcaaccacatcggaaacctgcagaatttcaaggtttgcaagcacaagtgccggaggcattgaggggaagcgtgcccttcttcccacattacgctcttctttccggatgaggcataaatatccacagtctggatgctgtgcagattgtgtaggcaatccaacaaatctctgttcggcctctcatctggttcgtaagtagaaagcctaatccacagcacccttagtttactcagcttgcctagtgccttcataaactgtattctgtcatcattttcagcctctatccatatctcttcaagagaggtcagctctccaatcaaaccagctgataccttgtaaatcctattggcacgtagacacaccagctttgtcagcaggcccattgactctggcagctcttttatttgagttcccaacagatcaagtacttgtagaaacttcagatgtcctacatcctcagggatctcaatagaatcaatgtactgtagtccaaggtacctcaggtgaagtaaactccaaacatgctgcagactgtgtttactgcaatggtccagaataaggcaattttgtagagccaatacacgtataacatgagagcctgtggatgccatgcttatatcacagcactcagtcacaacaaaggacctcagttgctccacacccttattagctaacaggggacattcaacgtttggctcagaactcttacactgcagagctagtctgcgggaatttctcgatagaagtaccagttcctcattgccatccaatacagtgacaaagttttcttcagctgacaacaaacggactagatcaagcaccatatcatgaacatggcaaccatctatgtaccctttgtcttcagcctcagctggcaggatcaagcttctgttaatcaactcgttgaagtatccctcgccgagttcaaataaccctatcccagctgctttctcttcgtgtacgaaaccctcggttatccatttccatattaacatatttttctcaatatagtaatcctctggaaatataattgtcattgcctccatgccccagacaatagatttgtatactacgggccagtcctccattggtttattggctaacaaactagccattgtaatgatagctaatggaacaccgcaacatttcttcaaaattttctcacatgcatcaactgatggatcactatccaaacacttatcttcaccaccaactattctcgtatacaataactttttggagtcttcatgtgaaagtggcttcat

SEQ ID NO: 11926 - DNA, 117 bp, Oryza sativa
  Clone ID: PAT_MRT4530_18102C.1
gggatgaaagccgaggtagattattttaagaagcctggcacgcatgaggagatggagccagggttccatggaggggacccccttgtggatggaatgacccatccaagctaggttggg

SEQ ID NO: 11927 - DNA, 831 bp, Oryza sativa
  unsure (1)..(831): unsure at all n locations
  Clone ID: PAT_MRT4530_18103C.1
cccacgcgtccgcactctctctctctctctcgctccctccctcccgcgcgtgccgccgccggcgccgccgccaccgcccgcccccctcgtccgccgcgcgcgcgtgccgacgaggagttctcctcactccctctcagcccctcccaatccgagaagcaggatcggtgggctgctgtccagcaatgatgtcgatggcctccaccaccgccagccccttttgcccttcacccatgcccagaggacgcaaatgcacagttcgagttcaagctggagctgccggagcggatgcatctgataagtcgctcgagattatgcgcaaattctctgagcagtacgcccgccgctccaacaccttcttctgttccgagaagtccgtcaccgccgttgttatcaagggacttgctgatcacaaggatcaacttggagctcctctatgcccttgtaggcattatgatgacaaagctgctgaggtagcacaaggattttggaactgcccttgtgttcccatgcgtgagaggaaggaatgccattgcatgctttttcttacccccgacaatgactttgctggacaagaccaggctataaccttggaggagatcaaagacgcaacatcaaagatataacctcagtgcaccttttcttccattattctgcttgacaccagagtttgtatatgtagtctctgtaagatgacattctaccgatgaaatcggtcatgataagatgtgtagtaaacaacaatttgtcgttccttagctttcatgttcttgcttttgaacatgggaaaacacgctcccactaatacaacagcctattaactaaaaanaaaaa

SEQ ID NO: 11928 - DNA, 886 bp, Oryza sativa
  Clone ID: PAT_MRT4530_18104C.1
attggaaaaggttttaaaagttctcttttggctttgggccgaaagtcggcccaaaacctctctctctctccctcggcccagtcggcccagtccggcagcagccgcccgtgcgcgcgtccgcccgctgacaggtggggcccaccgcgcctttcctttcccggtgaaatcaatagaggggaaatgatccccgggatcccctctatcttttctcttatggaatcgtcgccaattcggtttggaaatccgtggattcgagttcaattcagatcgatctctctcctccgaaccctaaaccttccatcgcgtcaccggtcgccgtgggccttcgccgtcgcctccttgcccccgccggcaccctcgccttcgcctctcgtcgccggtagagccctagcaccctgtagcctagcgccaccgtcgctgccgttcgtccagccgtgcgccgccgccgctccggtcatcgtcgtcgtcgctcgggaaggccgccatcgtgatcaccaagtcgtcgccgacctcgtccgcccctccgccgtcgctgtcgaccgccggaacaccgccgtcgtcatcaagccgaaggtcgccgccgcttcttctttggtcactggtgagttcgccgcgtcgccctctacgtgttggttccctccgttcgcgttgtcgtgccgtcattcgccggcgagcatgcacgcccgagccgccgccggtggtgacgtcaccgctgacgtcatcgttgccatccgtcgtaggcctgtcgtggaccgatagatctcggccgttcgtttttggatggatcggtctcggtcgttcgtttccgtgagccgtcgccgtgcacccagtccatcgcgaaccctagccgatgacgcagtaattcccttttccttttcaaaaataa

SEQ ID NO: 11929 - DNA, 165 bp, Oryza sativa
  unsure (1)..(165): unsure at all n locations
  Clone ID: PAT_MRT4530_18105C.1
ggccgcccttttttttttttttttcgttcagaaaaaacaagccatcttgtgacaaattaccttccatatggctaaaatatgtactgggtattatatggtatgaaacggtcattacaacgcaacgacncttttangtnncttctaaaatcccnctannacgggggg

SEQ ID NO: 11930 - DNA, 336 bp, Oryza sativa
  Clone ID: PAT_MRT4530_18106C.1
atgggcagcaagagatcgatggcaaggctggcggaggtggcgtcaacggtggccagcggcgtagaggacgccgagcaccaccagcaggcgggcgtcctcagcggcggacggggcccgatgacgccggccgaggtgaagaggtggccgtcccccctcccctcccccccccccagcggcagcggcgaggcaggcctagcatggccgacggagatccacacgtcaacggttgctcgtggatggccacgggcgggggcagtgcgccaggtggtcggtgagatcgacgacgatcggagacgctgctgctgctgcttgattgatgacaacacaaacgcctga

SEQ ID NO: 11931 - DNA, 242 bp, Oryza sativa
  Clone ID: PAT_MRT4530_18107C.1
tttcttttttttttttatttttaacagtgagatcattattgattactttatatgagtatgcctacttgttagaagcacttagcaggggtttacatgacaaaggtggtgctttccgctctatattttaggaaaaatcctacacaagaggcttcatatcagcaggccccctcaataaaaataaaggacctcctaatgaactgggaaacacatacaccgttccaccctatttcgtgagactttac

SEQ ID NO: 11932 - DNA, 552 bp, Oryza sativa
  Clone ID: PAT_MRT4530_18108C.1
ttgattgtttcccgtcctgaatttgacaagaataagctaaaattacgggtaaagtttgctttggagtgtaaatttgctattctgccatagatttatagttacagctgggagctatttctagacagtcaactctcctgaaaatcgattcatattccaaaggcaaggcatcaggtatacctaacctctctttctatctaaattgatttgctttcttcccaggatataatcaaatacaaacaattacaaataacaaaatacggagtaacacaaaggcagttactaaagactccctatagtgttgtcactcgcattttagcataccgatctcccacggacaaagttgtgctgaaacacggtctacatctatcatatagtgctgcagcatatgacctcataaaattttcagccctaccacccaccaacaacagaagatattcactaagtcgcttcagtgctacacgttctagcaatgcctacgaacatctatagacattgttattcatctacatcatctgcatctgcccatccaatgaaaactcacatacaaatata

SEQ ID NO: 11933 - DNA, 539 bp, Oryza sativa
  Clone ID: PAT_MRT4530_18109C.1
gagtggtaatgatgcttttcccattttatcattctcatctctgttgttgttgatcaccacaacatgaatcaaagaattaatggtggtacaaaagctagtaattaattgtacatacatgaatagatcatcatcatcatcatcatccccaatgtgtgatcaccatcaaccgatgtgaaaaatctccaatctcttcttgcgaatttctgatgcagtgcaacagctaaatcattgccccctacatcctccaaattttttaaatcactttgattaattttcttcctaaatattgcaaatcccaccagctaaatcaatcaatctccccatcaccaccacaccacaccaaccctcccaaatggccatcacccttatttcccccactgacaggtggggcccacctggaagactaataaaccgtattcacacctgcccaccgtgcggtgccgtgccgtgacgtctcacttgggggaggtcgcgacggcggcgaaggaggccggcgcggcggcggcggcggcggcgggcggcgtgctcgtcggcgtggg

SEQ ID NO: 11934 - DNA, 230 bp, Oryza sativa
  unsure (1)..(230): unsure at all n locations
  Clone ID: PAT_MRT4530_1810C.1
cccacgcnngtccgccatgtactacatcggctaggttgctgagtaacaagtccaatgaggcccagactccgtgtcacgtgcgtttcatctttgttttgtcttgaaatgcttctaagttacaataattttcgacgcgcgtctatctgtacttttccttgtgagattgatgagatttgtaatagcatgtacgtgtaagagcggtaaatctatctagctatgtactattgagc

SEQ ID NO: 11935 - DNA, 1218 bp, Oryza sativa
  Clone ID: PAT_MRT4530_18110C.1
atggatatactgctaactgcattggctagtgacatttccagccgtgtcatctccttcctcgttgctaagtatcggaagcagaacactatggataagatgattaggctgcatcggctgctccttagagccttcacaatcattgaagaagtcgatggcaggtacatctctaaccaagggatgctcctgcagctcaggcaactaagaattgtcatgtacaaaggccactatgtgcttgacactttcaagggacacgctgaggtgagccgatctttcaatctgaacaaaattcaggtcatcatagagaatttagaatctatgatggaagttcttcctatcattggtcctcaagaaattggaaaaaagacgctggtagagcatgtattgaatgaagagatggtgaagagaaaattctcttgtattatttgtctcaacagcgatggtttgagaaatttattaggagatggtagtcccatcgagcaaaacaacttgatttattccaatgggaagtgcttaattgttgttgagcttcaacatgacaatgatttgatagcatggagaagatttcagtcctcgctttctatgataaaatttgttagcaaggtcatactcatcagcagcgtgcagggagtctcgaggctagggacgacacaagcactaaggctgaaaaagatgcgtaaagatgagttttggtacttctttaagaccctttcttttggaagtacaaacccagatgagcataaggagctaataccaatagccatgaagattgcggtgctgatcaatcgtgattttattggtgcacatgtattttcaaggttactacgaaccaaccgtaatgcgcagttctggcgccggatgttgttatttctcaacaaagtaatagagtgtaacttgcatgtatttggagaacatgtatctgacattgttgggagcaaccgtccttactatgtgttgtcaaatcgtgatgatgccccacacatttggtgtaccagctcgaatacaattccagggcatttggtggattggggctcgacgataataaccatggaaggcataatgagtgagagtgtcgctctccctaccgaaggaaactttcaggtgataaggtggcagtctccaatagccccctattacagctatatatccaattgtgaaattaggaaagtttcccaggttgtttctgaagagaaatgccctaagagaaacagaaggttataa

SEQ ID NO: 11936 - DNA, 1318 bp, Oryza sativa
  unsure (1)..(1318): unsure at all n locations
  Clone ID: PAT_MRT4530_18111C.1
atggagtcagaagcaggcagtgcacctaatggttgtacatctacagtaaaggggtcagaagagaggcacagtttggaacgtcgtcatgatgatggctcatgtatctcagagattaaacttatttctaatatggttgtaaagaaaaagagggggagaagagcacctccatcttctagaagattaagtggtaataaggttattagtggtgaagatgctgttcaaaatcgcaaccatgctaaagaagaagaccaggctggtaattcttctgatgtggcgttgtcgccatctagcaggaagacagaaggtcaagatcagtcgacaaaccccaaagatttgtttgagaaagcttgccatcaagctacagagatggttactgaaagcacaactggttgcaagaaatccttttgggaagaaaagggaagtgataataggagaggcaggcaagctacactttgtgtgaaacaggatgggcttgatattgaaacaacaggcaaggatgtctctgcaagtgaagcttatgaaaaatccagcacactggaagatacttctgttgggcatgcagcagcaaagagtgttaatcctgaggataattctctagatcctatggataatgtgtctgatacacatgtgaatgccacatcttctgaggacaaaagttctgaagaagttgaggacgtgaaagtgtgtgacatttgtggagatgttggtgaggaggagaggcttgctgtttgcactacatgcaatgatggtgctgagcatatttattgtatgcgggtaatcatccaagaggttccagagggtgaatggttgtgtaaaaagtgcgaaaatgaattggaatatgaaaagaagaagcaactagaaaaatctcagctgaaggttggtgcctcaaaaagccagttctttgaaaggaaaaccaatanaattgccaatgcatcaaaaagcaattcttatgaagatgaaccctcaaaagcccttgaagggaaaattagtaaacctgacactgctttgaagaacagaagttcttttgaaaatgaagtggagaatgaaaatggagataagaaagagttgaattcaacaaaccaatgcaataatagcaattcgaagaggaaggaagaaggtgcagggatcatttcctcgattaaacaaagtattactgaacgctgtggtttctccatgggagctgagtccagaaaaaggttgccattgtcatgtgagagctcatttcggttggatgtagagaagggaaagcaagccgctaccaaagtaccaacttcattggcatttgacgctgccaagaatctgggaccaccacttcgtg

SEQ ID NO: 11937 - DNA, 435 bp, Oryza sativa
  Clone ID: PAT_MRT4530_18112C.1
ggagggaccctgggggaaaacaataacggatggaaagggaaaaggcgggggaaaaaaaacatcacaaagctagctaaaggaaaccccaaaatacggcccgaaaccccccaaaaaaaaagattacccaaaaaacccaacccgcaaaccattggactggagggaaaggaaaaattttttcggctgccaaaaagcagggggcataaaaaaggggaacaattaaaaaaagggaccaccccacaaaaaaaaggggggggaaaaagcaccaaagggggaggggaaaatctgggagggggaaaaccattccaccccccaagccgcctaaaatttgggggagcttttaaaccttcaccacggggggggcctgggggagggaatcccaagccgaagcccggaagtcaaacgggaattaatgcttggcgaagaaggggggcaacc

SEQ ID NO: 11938 - DNA, 484 bp, Oryza sativa
  Clone ID: PAT_MRT4530_18113C.1
acataagataaattcatttatccagacagtaattgacaacatgacgctgatacacacaccgagactgaatcgacaaacgcaacctgcaggtgctaggcatgcaccgtgaattattgtctgcataatatttggctctggtcgatcgatcgatggccgggcgatgagatatgctatatttatatggggcaactgaatgaacaatctagccagctctgtcgtcaataagccacgcttacctatcaaagcacggcgagcgcgctgacggcgacgacgagcgaggcgacagaggcgtagacgaagaaccagttgccggcggcgccggcacggcgggggtcgtcggagacccagacgaaagcgataacctgggccacgccggcgaggaaggtcaccactgcaagtgcaagtgcaaggtaggagtaataggcagcgccgttattacccaagtcagcttgcagcggcgtggtggtggtagccaaggtgattg

SEQ ID NO: 11939 - DNA, 441 bp, Oryza sativa
  Clone ID: PAT_MRT4530_18114C.1
atgacgtcagcacgacggccggctcgggtcgacgagctcgccggcgttagggaggttggcggcggaaacggagaccatctacacgtagaggacaacgagacgaacccgttggtactcaccacgacgagaaacgatgcacgacggcggccggcgacgagaaggaagacggcggcggctcgggtcgacggcgacgagcgagctccggtggtcggcggcaggaaagaaggggcggccgagcttccttgcaccacggcgcacctcttggcgatgacggcaagcgacggcgacggcggagacggcgcggcggcgttgccgaagacggccggcgacggcggcggacttggagagcgtcgcggcggcgctaggaggcacgggaggactcgggagagggggcaaacggaagaggagatcaaggggaagctttatatgagctcggattga

SEQ ID NO: 11940 - DNA, 552 bp, Oryza sativa
  Clone ID: PAT_MRT4530_18115C.1
atgagggaggttgccgaccagaagcacgatagggccacagtatggggtgcactcaagcgatggcggttcgaacaaggggctgtgatggaatgggacatggccgcctgctgtgatgatagttgcagttctaacatagtgataaacatgaatatgctaccagaaataatagcatctaacaacatatttaacactgctgagatgactagtacaaacccggagaacactctagatccagaggcaatggtgttggtgttgtcgccatcgttgtcgttgtcgctcccttctcctctgttgccgatgctctcctccaatgccgctgctcctggtactggtcaacatgttgcaaagggttgtcgatgtagaggaagcaatgttgagagcattcacgcaaagaacgtgctccccaaaaacttgatcgcctacctaccaatgcagttactcaggtggatggtgttccaggggcatgctcgtcctaagtacccgtgcgtgcaggttaacatctctgctttaagaaaaactagtcaggtcatattaagaattaaagcaacataa

SEQ ID NO: 11941 - DNA, 879 bp, Oryza sativa
  Clone ID: PAT_MRT4530_18116C.1
ggaattcggcacgaggcgagagagctaacgatttctcatctcgcggtggccatggcgggtagcagctacggcgacgttcatgagtctgcaagaaagttggtgggcaaggtggcgctgatcaccggcggcgcgagcggcatcggggagtgcacggcgcggctgttcgtgaagcacggggcgcaagtcgtggtcgccgacatccaggacgaggcgggggcgcgactgtgcgccgagctcgggagcgccaccgccagctacgtgcggtgcgacgtgacgagcgaggacgacgtcgcggccgcggtggaccacgccgtggcgaggtacgggaagctggacgtcatgttcaacaacgccgggatcggcggcgcggcgtgccacagcatcctggagagcaccaaggccgactttgaccgcgtgctggccgtgaacctgacgggcccgttcctgggcacgaagcacgcggcgcgggtgatggtggccgcggggcgcggcgggtgcatcatcgggacggcgagcctcgcgtcggcggtggccggcacggcgtcgcacgcgtacacgtgcgccaagcgcgcgctggtggggctgacggagaacgcggcggcggagctgggccgccacgggatccgcgtcaactgcgtgtcgcccgccgcggcggcgacgccgctggccacggggtacgtgggcctggagggggaggcgttcgaggccgccatggaggccgtggccaacctcaagggcgtgcgcctccgcgtggaggacatcgccgccgccgtgctgttcctcgccagcgacgacgcgcgctacgtcagcggccacaacctgctcatcgacggcggctgctccatcgtcaacccgtcctttggcatcttcaaggactga

SEQ ID NO: 11942 - DNA, 1284 bp, Oryza sativa
  Clone ID: PAT_MRT4530_18117C.1
atggtgcgggagatcttcctcacgcgcgccgaggcgttcgaccgctacgaggcgcaccccgtggtccggcagctggagggcgacgggctcgtcagcctccacggcgacaagtgggctcaccaccgccgcgtgctcacccccggcttctaccccgacaacctcaaccggctggtgccgcacgtcggcaggtcggtggcggcgctggcggagaggtggcgcgccatggcgtgcgccggcggcggcgaggtggaggtggacgtggcggagtggttccaggcggtggcggaggaggccatcacgcgcgccacgttcggccgcagctacgactccggccgcgtcgtgttccgcttgcaggcccgcctcatggcgttcgcctccgaggccttccgcaaggtgctcgtcccgggatacaggttcctgccgaccaagaagaacaggatgtcgtggggcctggacagggagatcaggcgcggcctggtccggctcatcggccggcgcagtggcggcgacggcggcgaggaagacgagaccaccaccgagctcaaagacaagcaggacagcggcttcaacgacttgctggggctcatgatcaatgccggcgtggacaggacgatgccggtggaggacatggtggaggagtgcaagaccttcttcttcgccggcaagcagacgaccaccaacctgctcacctgggccaccgtgctgctcgccatgcacccggactggcaggaccgcgcccgccgcgaggtcctcgccgtctgcggcgatgccgccggcgagctccccaccaaggaccacctccccaagctcaagacgctcgggatgatcctcaacgagacgctgcgcctgtacccgccggcggtggccaccatccgccgcgccaagttcgacgtcaccctcggcggcggtggcgacggcgacgccggaggcatccatatcccgcgcgacacggagctgctcgtcccgatcatggcgatccaccacgacgcccggttgtgggggcccgacgcggcccagttcaacccggcgaggttcgccagcggcgcggcgcgcgcggcgaagcacccgctcgccttcatcccgttcgggctgggctcccgcatgtgcatcggccagagcctcgccatcctcgaggccaagctcaccatggccgtcctcctccagcgcttcgacctcgcgctctcgcccacctacgtgcacgcccccaccgtgctgatgctgctccacccgcagtacggcgcgccgttgatcttccggccgcgccaatctcagccgtccaattag

SEQ ID NO: 11943 - DNA, 2048 bp, Oryza sativa
  Clone ID: PAT_MRT4530_18118C.1
atggaggcggtggccgtggcggcggcggtgctgctgctgctgcacgtggcggcgagggtggcggacgcggtgtggtggcggccgaggcggctggaggcgcacttcgcggggcagggggtgcgcggcccgccgtaccggttcctcgtcgggtgcgtgagggagatggtggcgctcatggcggaggccaccgcgaagcccatgccgcccgccgcgccgcacaacgcgctccccagggtgctcgcgttctaccactactggaggaagatctacgggccgacgttcttgatttggttcgggccgacaccgcggctcacggtggcggagccgaagatggtgcgggagatcttcctcacgcgcgccgaggcgttcgaccgctacgaggcgcaccccgtggtccggcagctggagggcgacgggctcgtcagcctccacggcgacaagtgggctcaccaccgccgcgtcctcacccccggcttctaccccgacaacctcaaccggctggtgccgcacgtcggcaggtcggtggcggcgctggcggagaggtggcgcgccatggcgtgcgccggcggcggcgaggtggaggtggacgtggcggagtggttccaggcggtggcggaggaggccatcacgcgcgccacgttcggccgcagctacgactccggccgcgtcgtgttccgcttgcaggcccgcctcatggcgttcgcctccgaggccttccgcaaggtgctcgtcccgggatacaggtacggtacacgccacgaacaacccaaaaaactcccaaacgattcgcccattctcgccgaaattgggctcacggttggcgccggaattcgatcgaacaggttcctgccgaccaagaagaacaggatgtcgtggggcctgtacagggagatcaggcgcggcctggtccggctcatcggccggcgcagtggcggcgacggcggcgagaaatacaagaccaccaccgagctcaaagacaagcaggacagcggcttcaacgacttgctggggctcatgatcaatgccggcgtggacaggacgatgccggtggaggacatggtggaggagtgcaagaccttcttcttcgccggcaagcagacgaccaccaacctgctcacatgggccaccgtgctgctcgccatgcacccggactggcaggaccgcgcccgccgcgaggtcctcgccgtctgcggcgatgccgccggcgagctccccaccaaggaccacctccccaagctcaagacgctcgggatgatcctcaacgagacgctgcgcctgtacccgccggcggtggccaccatccgccgcgccaagttcgacgtcaccctcggcggcggtggcgacggcgacgccggaggcatccatatcccgcgcgacacggagctgctcgtcccgatcatggcgatccaccacgacgcccggttgtgggggcccgacgcggcccagttcaacccggcgaggttcgccagcggcgcggcgcgcgcggcgaagcacccgctcgccttcatcccgttcgggctgggctcccgcatgtgcatcggccagagcctcgccatcctcgaggccaagctcaccatggtcttccggccgcgccaatttcagccgtccaattagctactattactaggtaggagtactagtattgctagctaggaaaagacgaggaaagcccctgtcctgttgtgtgcatagtagactcaggaaaaggccaagagacaactaacaaaaggctctgcccgtggcaggggcagggccggattccgaaaatgccctcgctaacagactagtggtacgatcagagcacaacttttagggatttgatgggtcagaaactctcagaagagaagaagagagacagtagtagggtagtagcagtagccccacacatccactgctcggttgcttccatttgttctcttctccttcgcgtggattctggtgtatgtatcgatcaatgcatgtacctgtatgtgtgtgttgtgtacaggggtgtgattattttgattcgggacacccggcacttcacagcaaaaaaaaaaaaaaaaaaa

SEQ ID NO: 11944 - DNA, 751 bp, Oryza sativa
  Clone ID: PAT_MRT4530_18119C.1
cagtaattgacttgtagctgacgtaggacacaaatttcttgcaaccacactagagtaagttattgtttttttttaagaaaatggaagtcgtcattggtttacacgagacatggttttcactgtttttaggttagtctctaattttttattgaactggacgctagtgtatattgtataatttgatgtacatgttttgcaactgcttcaaacaactaaataaatgccctcaccttttttcatctctttcaggtgcccttggtagctcaaactcatccttcaacaacatagatcatctgagacaatcctcaagttctggacaagctaggagctacacatcttcacccctaggagctctgagaccaaagatgttcccatctggaaaccgactcctgcacacaagtcgtcccctgtcggctcctgttgcaaaccgcccactgtcaccccatctccctttgaagaagccgcagctgagtgctacgttctcaatctcacaccgtatttttggtgctgccctgggagctgtcattatatccattcctcttgccaccaaattcagcctcatgtttgatgtctgagagcgaaatgtagctttcattagctgggtttccttgcaaagaataactttgtttcatgcttgtggacatatatgagtaataagccaaaccatccaacgctccgtgtaaaaagatttcaattttgaatgctctcttttccctctcgtgccggcgtcgccggctcctatcccctctcc

SEQ ID NO: 11945 - DNA, 1130 bp, Oryza sativa
  Clone ID: PAT_MRT4530_1811C.1
agtggatcccccgggctgccggacgcgagcgttccggccgcagcctacctctgcctctctcctctcctcgcggcgtcggcagcgagttctcctcggatcgggagtggaggagaagcgggaggaggaggaggaggagggatgagtctcttcgggctcggccggaatcagaagacgttccgtcccaagaagagtgctccttcaggaagcaagggtgcacagcttcggaagcacatagatgccactcttggcagtggaaaccttagggaagctgtaaggttgccgcctggagaagatatcaatgaatggctggctgtgaatactgtggatttctttaaccaagttaacctgctgtacggcacactcgctgagttctgcacacctgagagctgcccaacaatgactgctggcccaaagtatgagtacagatgggctgatggtgtacagataaagaagccgatagaagtatcagcaccaaaatatgtggagtacctaatggactggattgaaggccaacttgatgatgaatctatatttccccaaaagcttggcacaccattcccgccaaacttcaaggaggttgtaaagacaattttcaagcgcttgtttcgtgtttatgcccacatatatcactcccattttcagaagattgtcagcctcaaggaggaggcccatcttaacacgtgcttcaagcacttcatcctgtttacaactgaatttggcctgattgacaagaaggagctggctccactccaggagctcatcgaatcgattattccatactgagaagaatacagggacggaacggagcgtggataacgagttctttacatggacgatcgaggaatcaggctacttgcaacactattttactggcatagagcttactgttccagatatcagacataaaaaaggacatttgacattgctaatgctatgttttttgtgtactgatgttcgttcgtcctgattcagtattaccttgtgtaagcgtgcttgtaatgtaataacaggattggtggattgggatatattgcaaagaacgatctattaatccaatcgtgagttgcaattgttaaaaaaaaaaaaaaaaaaaaaaaaaaaaccgctcgcgatctagacggacgcgtggg

SEQ ID NO: 11946 - DNA, 300 bp, Oryza sativa
  Clone ID: PAT_MRT4530_18120C.1
ataaacccaccaataagagataacaccataaaaaaaaaccgaaaagcaccctgacaaatgaataaaattacatgtgcatccacccaaaaaaaaagaaattaaaaggggcattataagagaagaaaaaaaaaaaaaaaaagctttaatgtcaaaaaccatattgccgggaaaactgacctcaaggggggtcacgtttttgccgattctgggaaagatttgggccaacccctgtcttgggggggtaacctttttcggggaaaccccctccttgggggggagggactgaacctaggaattggg

SEQ ID NO: 11947 - DNA, 433 bp, Oryza sativa
  Clone ID: PAT_MRT4530_18121C.1
tctttcgctctcctatcttgtatatgtggggtctacatggctgtgactcgggcgagcggcggcggccagtggtcgagcggtgaggtcgggcggccacggcggacaagatgcggccaatgcctacggtggcgcgaccctacagaggagcagcctgtggtggcacgacatggaggaggaggtggcccttccggaggctgggcgaagcagcggcttggcacagtgtgacgacgttgccccgcgagcggattggcaacgctgcagccggccagatccgcggcgaggcggccggccggtgccggcgtgcggtcgcaggcgtggttggcttgcggcgagcggcaacgacgctgaaaatatcgccatccactccccttccctttttcatttttatttcgttttcttttcttcggtttcttctttcttttcatttaccttt

SEQ ID NO: 11948 - DNA, 7094 bp, Oryza sativa
  Clone ID: PAT_MRT4530_18122C.1
atgatacggtaccagatacggaacgagtacgggctgtcggatccggagctgtacgcgccgggggagaaggatgacccggaggcgctcctcgagggggtcgccatggcggggctcgtcggcgtgctccgccagctcggggatctcgcggagctctttgttggtgagaccatgccactattcctcttttacttaagaacttatgtatttccctcttggaaacaaaggtttgcagctgaaatatttcacgacctgcatgaagatgtgatggccactgcttctagagggcatggtttaatgcttcggttgcgacagttagaggcagaatttcctgcagttgagaaggccattatatcccagtctgaccattcaaattacccacatgatgacggtgttgagtggcacacaaatcttcagattgatcaaaatatgattactcaaggagatatgccccgtttcattttggattcatatgaagaatgccgtggcccaccacgtttattcacattggataagtttgatgttgctggtgctggggcctccttgaaacgatactcagacccatctttcttcaagacagaacattcctcggacatgatagaaacggatgctgtgatagaaaagaagccccgcaaaattaagaaaaaagctttgcgttggaggaaaggagaaacactcgaatcattgcttatcgcaaactctgaatcccacactacctcaaaggatcgatcatctagaaaagttccaccaaggacaacaaagttgaaatacaggtatcctcgggagtctgatcataagaacattagcagaatatgcagagagcatctgcaagaaataatctcatcacaacaaaagatcttctccaactattcttcgaggtactaccatccaaagtttagattaactgagtcaagtgaaacggcatcctcatttggagaaatagataatttcagtgctcgtgctcaatcttctgctaaacttgaactgactaaggttgttccaataaacgagtttgataccaaggggatcgcacctacacacattaatggttcagattgcctggaggccctggaggcagatgataggcaattacaggctacacagcatgaacctgacaaagtggaagacgtctgtaagagatctcttgtggaacaaaatgccatgctctccaactctgataggatgcagtcagtgcaggaagagaatcttctatcagctatggtccctgctgatcaaaatgatgatcgctgcagacctgatgacactggtagtgatcaggagaacttcgtggacgctcttaataacatggaatcagagggtgaagcacatgctgagatgaaaataaaaaaggaccctggtgccaagatggaattggatgaattgaactttcaccgcgatgaaggtgaaaatgaacggcacacagagttttcagaactaggtcatgtaatagactcatcaccatggttgaatgattcatacaatggtggagaaccaaaccatgcaatatcttctaatacaaatttcagtggtgttgattgcaccaatgatgaagagccttctaatgatgttgacctaatggaaatggatgtcagctcatcatccagtgtattctctgacgacaatgatgtttttaggaccaatggtaatatgaatggttttcaacaataccaggaggcatctttgtccaatgatcatcatgctgtgattgcccatagttctgataaacagtcatcccagaaatctagtggcttggatggttcctctatcgaaagcaatgattttattgaaaaaccatttcactcattggaggatgataaaaactttgcaccagatggtacttctgtgatattgggcagacctaatgatgtatcacagtgtgaagaagaaattgaagttggaaatgctgatgattcattgctgcaacctaccatttccaatcaagaagtacataggtccaataaccaacttgaaggtgtggctatgcacgcaagcatttcatctggaaaagttgcatctttccctgatatggatcctggtatgtgcacaaaggacttggagttggacaatgttttagttcctaaagaaactgttgcaaatacacccccaacaggtttaggtactgatcatatccacgagcatgtggacgagcttgattcgggagttgcaccaatcaattcaagcattcagagtgattcgacatatgaatcagatgatgatgacatggctgaagatttgaactctctaccagaagatgatctatataagcatgacgtagaggacctatataagcatgttttagaggatgatggaataattgcgctaggaaaagggccttgttccactagggccaacatgcatcaagaggaccctatggaagtctctgatgtgcgtggggacttctctaatggtcaagagctcccagtactcactgaaactgcatctcctcaaggagaattagtaggaggaggagagctcccattactcactgaaactgcatctcctcaaggaggagaagaagatcttgcagatgaggtggttgtgatctcttctcgtgatctgaatgatgagaagaagccatcgttggctgaggtcccactagcttgcggtgatgcctctctgcttgacagtagtgcttcctgtttggaacatgacgagtctactgaaacaggagaaattgcaaaaagtgatgaagttctggtcaatgttgaggttgcagaagaatccatcactggcaggtttactgatgacatgacaccttttcaagaggatcttcctgatggtgccaaatatagtgaggatgcagaatttttggctaatcctagggtggacaactctaggcacgatgtgcaattacagtctagttccccttgcagggaagagttggaaacagtgaaagctccatgtgaaaatctttgtgcattagatgaatcaagagagcatatattcgagaaaagtgtgttgcagataaacaatcttccccagcatattgaaacaaaaaatacaggtgaagcatgtagtgacattgatgatattcaacatctttcagcattgcattgtccgaaaaatcctgtttgtcaagaggaattaccagacgagaccaatcttagtgctgacgttcagtatcattgtgatgtggagaagggtggtgcagtaatcttgaatagtaaaatggtggaagaacaaccagaaaatattgatttggtgagggagcctcgtgctcaagattcttttggtacaaacccattcatggatcctgggtacaaagcgaatcatgctctagctgatccgtgtcctagctatcaaccatgtttctctgaggaagaacaggattttatttcagaactattaatccctcatggtaatatgggaatcgaagacctgaatccggttccggttgctgattccctctgggaacctgcaactccacctgatgaggtgccattgccatcagaagttatgactgaggaggacttcagatcgttctgccatgagtaccacgagatggatctgacagcaacgcctgaaagtattgatgataaaccagcctcagattctaatgtcgtctcaagtagtttggtgaccagtgagtcggagttcctctattgtgtctctgcagtacggacaggagtggaccaggaggaatccagggatgctccagatgatacattgatgcacttttctgccaaagcggatcctgatgacaaggcagcaaattctgacttaaaatccgatgagcccttcattgatgagaaaattcatgaattaggtgtcccttctgttccaatggaactagaggtggaacaacatgccttgcatgaggttgattctcatggtgattcccagttgttggataatgacatgatcgatgaaacatgtagctctccttcaggcaacagtattgcagtgaaagataaacaggaaacctgtgccaatcttgtttcacgtgcttttattaatgaaaggacagatgaactagaagttcctgtgagtaactccgtattgttggaaccatcagaagaagttcatgactcggatgaatataattaccaagatgttccatggtcttcaactgatgaggggagagatgaagtggatgcccatccgttgagcaaacgaattcaaacccagggatcagaagctcttgttttaggcgaacttgattctcgagctgttccatcttgctctgttaatgagatggcagatcatgtagatgcccctcctttgagtactgttcttgaagcagaacaggaaccagaagattgtatatcaggagagcataattctcaagtcaccaaatcttctttggttgatgagaagataggtgaactggatgatgcctctccattgagcaatactctcctagcggaaatggagagagaagtttgtgtcccaggaaaatctgcttctcaaatcgcttcatgttctccaacaccaagtaatgagaaaatagatgaactaaatgcccctccgttgagcagttctggtttaatagaactcgagtcagaagacagtgtctctggtgatcttgattcccaaatcattccgtgctcttcacctaatgataagactaatgaaccagatggtgctacatcaactcatgttcttccggtggagttagagcaggaagtgtgttcattcccagaattggattctctagttgctccatgttccttgaatgatgataaggtttgtgagctagatgaacctccatgcaagcaattggaatcagagaacggatcttattgcttgcctcaagttgattgccaaatcgaaccatgttattcagaatcagttgtactatctgaggcatcgacaatgtcttctgctaatgccatgccaagtactgaggaaacatatcggttgtcgtctcctgttccaccacccaacgaaccgttttcaaatgtttcctatgaagatcctcaaaaaccaccacctctccctcctcttctatggaggcttggaaagcctcgcttaggaattgcaagtacaaaaggccatatgcttgagcctgaaagagggaaaggtcctgttttgcatacttcagatgcagggatggataatatgccaggttgcctaagtggaatgactgaatcaatagagccggtttcctctcaagagatcaaagagaggcatctagatcctatattagacaataatgagcgaggagtagagttcagaagattggctacacctccgacagcaaatgatgttgcagtgactgaacatgttcagttattttcagatgcttgtgagaacattaagcatcaggagcatcctcaaaaaccaccacctctccctcctcttctatggaggcttggaaagcctcgcttaggaattgcaagtacaaaaggccatatgcttgagcctgaaagagggaaaggtcctgttttgcatacttcagatgcagggatggataatatgccaggttgcctaagtggaatgactgaatcaatagagccggtttcctctcaagagatcaaagagaggcatctagatcctatattagacaataatgagcgaggagtagagttcagaagattggctacacctccgacagcaaatgatgttgcagtgactgaacatgttcagttattttcagatgcttgtgagaacattaagcatcaggagcgtgtgtcttcatcagaaacagaggctgaggaacatcagaatggcactgggatcacagatgtaatggattcacacccaccaaaaccattgtttctagttccatcaatcagccagcagggccttcaggggtccgtttttccttcggatacttcagacaatggtgagcattctagttatacttctcgagcggtatcagaggatgaaaaaacagtggatgaccacaatgctgcatgtgccatggacttgcacataacaagctcttcagcatcaagtcatgtttcagagaatgggtgtaaccagcaatctcatggtgaatcgctcccagtgacttcagttgataaagtgcatacttcagatgcatcatgcgaggacaacaaactaaaaaaccattttatcacaagcgaggtgtgttcagacgcaacaaatctttctgcatcaggcttgctgacggaagaagaaaatatccataatgtggaggatcagtatgaaggcccattacctagtgaagaatcatcaggatgtctagattacccacatgatgaccacaattcggagaaagaagacatacaccagccagatgggtatgcagcaagccctggcaataataaccactttgatagctctcatgaaggtggctatttacatgccgagcagccaccagtcatgggctggactgtgagaccccagatgcttcatccaaattacggcatctcaatggaagagaaccaatttgaaccaaaggttgaagatcatctactaatcaagaaaccagtttcaattagaaatatcccaaggaatccactggttgatgctgttgctgcccatgatagaagcacgatgcggaaggtttcagaacttgtggccccaactgataagtcaaaacctaatgaaagaaacctgttgctagagcagataaggaacaagaccttcaacctgaagccggtgagttcagctaagcagccaacaatcagaacccctcctagagcctcaacaaggaacttgaaagttgctgccataatagagaaagcgaacgccatacgacaggcggttggaagcgacgatgaagacggagataattggagtgaatcgagtgacacatgaacgcgcacattttgccccatttttgtggctggaaggtgccgaaacttcacgaagctcctgccttcctggacaggctgcacagccaatctcatcttttggatagcgttgctagtcttgtgtatagtatatgcccatacatcttgtctttttttgcattcttttagcccgcatttgtatgtatactttcctctcccagcagcaaaggctgctgatggtagtcatgttccgaggactgtattattcaggcctatatgtaaattatcaatctgtttgtttcagttaaagctgatttatctaacatgacagtcatctttgtgtttaaaaaaaaaaaaaaaaaaaaaactcgagactagttctctcctcgtgcg

SEQ ID NO: 11949 - DNA, 1224 bp, Oryza sativa
  Clone ID: PAT_MRT4530_18123C.1
atggcgctgacggggcaccgacgtggcggccacgtgtgcggacacacgggcggcccagatcgacccgaggccgatcggacggctgaggggagagacggctgggcacgatattgccaagaccggcccagccggccatggcgcggcggtggcgcgcggtctccggcgacggcgaccggcggcggcgcggggagcggcggcgcacaagggcgtcaggcagcgcacgcgagagaacggcggcgcggcgcggctagtgcacgagcgtggcgcaaagccggctcggccgagcgatggcgcgcggcggcgcgaccaccggcgacaagtggcggcgcaggacgacgcgaggagggcggcaaaagggagaggaggaggaggcggttctcaccgtgcccgcacaaacggcgagaaggagacgggaaggcggccggcggcgaggaacggcgacggcgtgctcctcggaaagacggctcggcggggcttcggcgactctcggtgaagaccgcggcacggccgaggcccggcagggcctggggaagtccggcggaggaaaccgagctcaccttgagccagggagtttcttcggcgattcgcgaagatggagaagtggccgagcttgccctttcagccgcgaagccggtgatggcggtggcacagcctgaggtggacggggatggcggcagtaggcggccggaggcgacaaaacggcggcggcctcgggttgacagtgggggtggagtttcggacggcggcgaggtgtggctggagtcggcggtggcggcggagagaggtggtgcgcgtggctgcggcgcttcggaggtggagaggggaaatggagcggtggacggggtgcgcacggtggctgcagtgccggggagggcgacggcgcagtgcggggtgaacaggagcggtggcgcggcacggctggagttctccggagagcggcggcgcagttccggcgacgtgggtgagtggggctcgaacggcgccgatttttggggggaaaatgggggagaaagtggagaaagggaaggacgtggggtggaccgcgcccacacgcgcgcgggaaccgggaggcgcgcggggaggggcggcgacgtggatggctcaggcggccatggcagttgccggcccgggctggaggttaggggtgaccccgacaggtgggtgttgggagtgcccgcccaggccgcatacgcgagacagaacatggaggtggtcgagacggcc

SEQ ID NO: 11950 - DNA, 213 bp, Oryza sativa
  Clone ID: PAT_MRT4530_18124C.1
ctcctcctcgctccctcaccagcggcggcggcggccgccgctcgccggaggaaggtcggtggatcagccctccgcgtcgctgctcgagcgtgcgggaactggagagatccccgaaccctcgtccgggggagcggctgccgccgctgcgggaggcgaagcgggtggtgctggtgcggcacgggcagagcacctgtaacgcggaggggcggatcc

SEQ ID NO: 11951 - DNA, 490 bp, Oryza sativa
  Clone ID: PAT_MRT4530_18125C.1
acaagagatcagaacgcacaggagttcaattgcaggcccaggtgtaacacgcgaacataatcaacgcctgcgtaaacatatgaatggaatgcactactacagaggtgaaatctaaagacataaattgatttagatcagactgactgcaaggtgtcatgattatttaatcttttaagcggtacattagcagcaaacagaactgatcaaaacaacatgggaatactcatgaaacaccaccacagctaatttcatgctgtagaactaacaggtggtgtaacgccaatgtaagcatttatcactatgtgtaccagatgacgctcagatctctagaagctaccatttcctgatgtcgcagggagacacagaccaaatccgccagtgcacaatcagcatcgcctatggtgttaacaaggacattgtgtgttggcatacacctggatctcactgtcatggatgtgatcttgattcataatacggcggacatcatctc

SEQ ID NO: 11952 - DNA, 1371 bp, Oryza sativa
  Clone ID: PAT_MRT4530_18126C.1
cttttccacacgaagagatagagtgaaataccaagagagaaaaaaaagagagaataatttcccccttttctctcttccgtgccggagaatcgatggagattagggcgccgccgacgagcctgaggctcgccgccgccgccgccggcctccgccagcttccgccggaccgcgctcaggacctccttcctcaacggcagcgtttcacttagacttattcaagtgcgccaatcaaatgtcaacaggtttaagtgcaatggcataagaagtaacctccttgatagattttctagggttgtaaagtcctatgcaaatgcagtcttaagttcatttgaagaccctgaaaagatcctagaccaggctgttttggaaatgaatgaacgatttgacaaagatgcggcaagccacttgcacaggtcttggcttctcaaaagcggcttgagaacaaatacaaagccgctgaacaagcttctgatgattggtatcggagggctcaacttgctcttcagaagggtgatgaggatcttgctcgtgaagcccttaagcggcgtaaatcatatgctgacaatgatcagctccttaaaggcccagcttgatcagcaaacagggcgtggttgagaacctggtatcaaatactcgggttcttgaaagcaagatagcagaggctaagcaaaaaaaagataccttaaaagcccgtgctcaatcagccaagacttcaacaaaagtgagcgaaatgctggggaatgtaaatactagtggtgctctttcagcatttgagaaaatggaggaaaaagttatggcaatggagtcccaagcagaggcactcggtcagttggcaactgatgatcttgaaggaaagtttgcattgcttgagacttcatcggttgatgatgaccttgcacaaatgaaaaaggaaatttctggaagctcttcgaaaggagaacttcctccaggtagaacggcagtcagcaattcaggagcagcgcgccctttccgagacatcgagattgagaatgagctaaatgagctgcggaagaaggccaatgaatattagattatgcagtttccttgtccctgcaccaggcttgacgaatcctttagactgaagaaccccgggaagatataggatggtcttcaggtttctccaatgcccctttgttgaaccaccagtgcagccttttttccccccaagagtataatggatgcgtaaaaaaaattctacattttgcagtgtgattgacattgactgtacagtttagctacatagttatgtaaaagtcatattgctctttctagagctgactctgcatattttagtggaaagccaaaaatttccgtcctaaaaaaaaaaaaaaaaaaaaaaaaaaaaaaaaa

SEQ ID NO: 11953 - DNA, 2535 bp, Oryza sativa
  unsure (1)..(2535): unsure at all n locations
  Clone ID: PAT_MRT4530_18127C.1
gttttnnnnntttttnnnntntntttntntttnntttttntnnttgnaccccaagaaagcggagaatttttttttcagccacaaaagcataaacaggacatgccatgatgccaaaaacacaagaggagaaaaagaaaacggcagatacaattgtttggaagggatcaatcgattacacttctgcagaggttgcagacttgcagccgatgatgcagctaaagaagagtgtccactactactgcctactggagcagatcagcgaatgatcctgatgattcttgcttcgttttgccatctcaaacctcgcattggcggcgattaacagtaataatctacagaatttgaagttcttgtaagctaatggtggttactgcaagtgacacaggctttagcttgtaggagtagtgttttgagctcgattaggatggtggagagatggcccgattaggcgttgatccggtcgaggctctcggcgacggcgcgcatgcgggggcgcagctcggcgtcgggctcggtgcagccgagggcgacatggaagacggcgagcacctgcttcttggcgtgcacctcgccgagcagcgtcgggtcgaccacctccgacagcggccgctcctccttgaaggcgcggcgcacccacgcctccagctccagcccgccctcgccctccgtcggctcgcgcccggtcaccgcctccagcagcacgacgccgagcgcgaacacgtcgcccttctgcgtcgccgcggcggccgcgccgccgggcgtgcggagctccggcgcgacgtacgccagcgccccgcccccgccgcgcagcgcgcacgccgcgccgcccagcttcttcgactgcgccgccgccgccttgtgcgcgccgccggcgacgaggcgggcgaggccgaagccggagacgtgggcgcggagctcgtcgtcgagcaggatcttggatgacttgatgcacccgtgcacgtaccggcgtgggctgcactcgtgcaggtatgccagccccctcgccgcgccctgcacgatggacagcctcatcgaccacggcaatggcgtcggcgacgccgtcgggccaccgtggagagcggagtggagggagccattggagaggtagtcgtagatgagaagcttctcgtcgggcgcgtagtagtaggcgcggaggcgcgcgacgttggggtggcgcgcgcggccgatggcggcggcctcggtctcgaacgcgcggcgccggcgccacccggagtcggagccgccgtcgccgtcgtcgggctcgctgaggcggcggacggcgacggcggggccgtggcccgggacgacgcggtacacgatgccgccgcggctcttcccgacgacgaacgcggacgcgcggagcagctcctccagctccatcccgaacccgtcgtccaccgccacgaacacctccccttcctccccgccgttgcgccgctcctcgctgccggccagcgtcaccgccccgctcttatccttcgccgactccttctcctcgtccctcgccgtcgccgccgcgcaccgccgccggcactgccactgcaggatcaccccggcgacgatggcaaccaccacaatggcagcaagaacgggcaccgtcggcgacgaccggcgcctcggtggcctcccgaccgccgccgccgcgccggggttcatgccaccattcgcctcggggattcttggatcttccttctcaccggcgcactccaccttgagcggaaacccgcagagcctcgggttgtcgtcgaaggcggtcgggccctggttgacgagggaccccacctgcgggatctcgccggcgaggtcgttcccgcggaggtcaaggctcaccgccaccggaatgccgccgaactccggcgggatcccgccggtgaaatggttgtagctcaggttgagaaccccagagagacgaggaagcccggcgatcgccggcggcagcgagccgttgagctggttggaggacaaatcgaggcgggacagcgacacgagccgcccaatccccgccggaacctggccagagaggaggttgtgggcgaggtcgagcgccgcgagcttctgcagcgccgtgatggcgaccgggatctggccggcgagctggttgtagggcagggacagcgtcaccagctcggacagcagcgacagctcggatgggaggtagcccgcgagcgagaagttggcgagctccacgccggcgaccctgccgccaccgccgtcgacgcaggtgacgcccgaccagccgcaggggtcgttgtcggcgtccctccacgtcgagagcgcgccattgggatcctccgacaccgcgaacttgagcgcaagaagcgccagcccgtccgtgttcagcgcagccgccacctccacgccgagcaccaccaccaccaccaccaccgccaccgccgccgcccgcgcagctgccgccattgcgacggaagtggccgctcgcttccgaagctaccaatttacaaccctgccactgccgggtcgacctagaaggcaagaccggtacccaattcgccctatagtgagtcgtattacgcg

SEQ ID NO: 11954 - DNA, 2163 bp, Oryza sativa
  Clone ID: PAT_MRT4530_18128C.1
atgagtgaccctggagagccttctaagcattcccaatggatgtcacactggaccaaaggaagcagcagtgcagagccccaagttggcagaagtaatgattctccggaggatgcgaaatatgacatttgcgaggacaattctgggccttcaaactttgagatcatgaaatctagattgtttgaaaggctaatggtaggaatcagccaagaaagagcttcgttggagcatggacagaagttaaattctaacatgaaagtagtggtaaaagatgctcgccgacacgctgtgcaaaaccaaattgatcagggagacgggccaattcaaaaatctgtgatgcaaaaagatgtcttatatgctaaggctgttgtatcaaaatcactttccattcagaagctttcagagttatcagtggattgtcagaaacttgcaggttcagatgacctgagttcagagtggaaccattttcctatgcttgcaatcaacagaaaaattgactccattctcaaccctaagaggaagtctgcaaagagtactggacccaatgacgtttttgtgccaaaacaaactctgaagctaaacatgactacagctaatctgatggcattctcatctcaggaatatgagctgcattctcatcgaacaaccgacgagacaatggatcactgcaaacatgcaggaggcattgtatctcgcctggaagatcatgctggtgtcatgttgaatcctgcagagcaaaaattaaaaggtcaattattgccagcaacgtcatgttcgtgtagcaaggatgacagtaactcatctgatagtctattagatgagcagcatacaagccgctacattgcagattcagatcaggaaccaacctgcagatctcgtgaaaaaaggttgaaatcttcagaaaacaatgacacgaactgtaaaattggaagttgctcccagaatcagaagtcaagagcacctggacatcataaacacaaaggttctgcgggagtcatgtttcgtacgtcagtacctggtaaagaatttgaagctgctgaaattaattgttccgacaaaattaatcagcgacatctgaatacacagagaatagtatctgcagcgaatgtcactggctcctgcatacctgatccagctgcagacatatctacagtaaatggtaggggggaggcagtgacccagccatcgagcatatctggagattcaactaaacgaaaagctccatatttatttgaaatgctaaccataccttccaaagctcaaaatatgaatcctgaagattcactgccttcaggaaactcgactgcttttggagttcacatgtacggcacaaatattggcagtcatctatttggagcaaataacaaatcatcaactgaaactgaaatattatccggcgacagtcaacatgtttcaaaatcctcagcaggcatcgcctcattgttggcacaaaaggcaaaatccgagcagctcgcgactctgtacatgaaaggagcatcaggatgcaatgtgaatgaacatcaaggtgtttcctccaaggcaattgtcgccaataagcaacaatgctacaatccaagaacagcacgcatggacttagatctcatgcaattccagttgagcagaatgagaaaccaagaatcacaagcgcgaaccgaaccaggcgacagatggctaaaacgcctacagattgacagcaaggaccctcatcatcttccttgctccaagaggtcaaaagctggagacggatccggtcgtccagtcaccggaggagcaagcagcatggcaccccgttgcgacgggagcaacgacgacgacgacattgttgaccgtgatcataaggaggaacaaggattggatgaaggggtggaaattcaaggcggccgagaagcatctcctgttccggcaaagagtgatgaccggtggattgggagatggtgccagggtggtgttcctgtgtaccatgaagatgatcatgatcagaggaaggaagtaacaaagcctgatcttgccgccggtgactccggaggacttgaaggtcagttcccaagcatcaaggcgatggcgatgatgggacgagcaatgagcaaggttcggccgtgtcaggaagagaggaggggatccttcatggtgtggaaggcgtagtaggagagatcctgatcacgtaca

SEQ ID NO: 11955 - DNA, 230 bp, Oryza sativa
  Clone ID: PAT_MRT4530_18129C.1
gtaacaaattaaactatatacgtacacaaaaagctttggtgatttttatctcgcgcgtttgttcttgactggactacactgaccattaatttaattcaaccactaataatagtaataataataataatgattaagtgaaaagccataagatttataaccaatcaatcaatgcgcatttcacaagcacttgaggagggttagctccttggaagaggactccacgctgcttc

SEQ ID NO: 11956 - DNA, 152 bp, Oryza sativa
  Clone ID: PAT_MRT4530_1812C.1
ataggcgccccccgtagatcaacaagtacttattaatagtggagtcggcaattacagagcaacaagaggaggagggtacaattacactcaaagacattttgatgaatgtaacaaagaaattacatacagcggctaacaaatatacttagtgt

SEQ ID NO: 11957 - DNA, 2673 bp, Oryza sativa
  Clone ID: PAT_MRT4530_18130C.1
ataacagcaagcaaataagaaagctaggtagggcattcctccctcctcaagtagagaagagctacagctgcagctgcagaggggggcataatggccgtcgggttgaggagatcggacagcattgccgacatgatgccggaggcactgcggcagagccggtaccagatgaagaggtgcttccagaggtacgtgtcccagggtaagaggctcatgaagaggcagcagctcttggacgagctcgacaaatccgtcgatgataaggccgacaaggaccagctcctccagggcttccttggctacgtcatatcctccacacaggaggctgcagtgctccccccattcgtcgcattcgctgtcaggatgaaccctggcatctgggagttcgtcaaggtccattccgcaaatctgtccgtcgagcagatgacaccgtcggactacctcaagaacaaagaggccctggttgatgacaaatggggggcttacgatgacgactcccagctggaagtcgattttggcgccctggacctgtcgacgcctcacctcacgctgccctcctccatcggcaaaggcgcgcacttggtctccagattcatgtcttccaagctgaccgacaacaagaagccattgctggactacctgctggcgctcagccaccgcggcgacaagctgatgatcaacgacatccttgacaccgtcgacaagcttcagacagcactgcttctcgccgaggtttacgtcgccggcctgcatcccgacacaaactactccgaatttgagcagaagtacatgctgtattaccatacctggtttcaggagtggggactggagaaaggctggggtgacactgctgaaacatgcaaagaaacactaagcagtctctcggaggtgctccaagcaccggatcccatcaacatggaaaagttcttcagtacggtgccctgcgtgttcaccgttgtcatcttctccatccatggttactttggccaggagaaggtcctcggtatgccagacaccggtggtcaggttgtctacatcctggaccaagttagagctctggaagacgaactgctgcaaagaatcaagcagcagggcctgaatgccacacctaagattctcgtgctaacaaggctcataccagaagcaaagggcaccaaatgcaatgtagagttggaaccgattgaaaacacaaagcactccaacatcctccgtgtgccattcaagactgaggatggcaaagttcttccacagtgggtctcccggtttgacatctatccttacctggagagatatgcccaggattcttcagtcaagattctcgaaatattggaggggaaaccagacttggtcattggcaattacaccgacggtaatctagtagcatccctcctgacaagcaaactaggagtcactcagggaacaatagcgcatgctctagagaagacgaagtacgaggattcagacatcaagtggagagaattggaccacaagtaccatttctcatgccagtttactgctgacatgattgccatgaacactagtgacttcatcatcgctagtacctaccaagaaatagctggaagcaaagagaagcctggccagtatgagagtcactatgcattcactatgccagggctctgccgctatgccacaggcatcaacgtatttgatcccaagttcaacattgctgcaccaggtgcagatcaatctgtttactttccctttacacaaaagcagaagcgcctgactgacttacacccccaaattgaggagttgctctatagcaaagaggacaataatgagcatatagggcacctagcagacaggagtaagccaatcatcttttcaatggcaagacttgacaagataaagaacatcacagggctggtcgaatggtatggtcagaacaagaggctcagggaccttgtgaaccttgtcattgttgggggcctcctggacccttcacagtcaaaggaccgtgaggagatagaggagataaacaagatgcacagcctgataaacaagtaccagctcgtgggacagatccgttggataaaaggacagactgaccgagtgcgcaatggggaactttaccgttgcatcgcggacaccaagggagcctttgttcagcctgcactttatgaagcattcggactaacagtcatcgaggcaatgaactgcgggctgcccacctttgcaacaaatcaaggaggacctgcagagatcattgtcgatgaggtttcgggtttccatatcaacccgctcaatggcaaggaggcaagcgacaagattgctgacttctttcagaaatgcaaggaagacctcatctactggagcaagatgtccaccgctggactccaacgcatctatgagtgttacacgtggcagatctatgcaaccaaagttctgaacatggcatcaatatatggcttctggaggactctagacaaggaagaaagacaagctaaacagcactacctacacatgttctataatcttcaatttaggaagttggcaaagaatgtgccaacactgggcgaacaaccagcacaacctacagagagcgcagagcctaataggatcataccaagacccaaagaaaggcaagattgcaaccaacttacttggaccactgctcccagcctccaatttctcaacagatggagcttgaagtag

SEQ ID NO: 11958 - DNA, 537 bp, Oryza sativa
  unsure (1)..(537): unsure at all n locations
  Clone ID: PAT_MRT4530_18131C.1
ccagtacttgattccaatgggtgcaccaagaacaattgctccaaatgcatttaggaacgcaccaatggggaggccaagcaatcctcgcgcagctgccttaagaaacgagcagcgcttgggatttcgacggagcaaactgaacactgcgatgacaagaggcgcttcgaagaccacgaggaggcggagggcgtaggcgggattggagacgagcatgccgcggccagacaattgatgggctgccacgatcccagcgaagcacagagcatggaccgctactgcgcttgaggcgctgacctgcgtggcctcgtcgcccatgacaggggcaccgtgggggagtcaataggtggcagtggagccaacaccaggatggatgcggcggaagcaacaggacgagcgacggcgaccctgctcgctcgcgggatggatggggatcgatggcggcggcggaagcagcaggacgagctacggcactctgctcgctcgcgggatggatggggatcgatgccgtcgnctaagccggagtcgttggtaggcaaa

SEQ ID NO: 11959 - DNA, 1283 bp, Oryza sativa
  Clone ID: PAT_MRT4530_18132C.1
gttaattcaaaataaaaatgatagtaataggtagctgcaaagggttcgagctgaaggagtcaacaaagtagaagctggacgatcctatcgtaagccatcactgcttatattcaatatatgaaagctaaatgacataaatctggatttagctgcaaaaggttccagatgaacgagtcaacaacgtaaaacttggatgatcctatcgtaagccatcactccttatattcaatatgaaagctctctggtcccaaaaaaagaatacttgtacactatcgggaaaaatcactgatggccaggaaaaagcaagggcacttgtcatccataggctagctagtcagctttggcacgacctcttctcttatgagtaactactagggccagtgatattgccattccaatcaaatgcccagcgactgagccataagtaacagagattggccattcctgccaaggtctttcccagtcgagaggcataggccaagcaccaagccatgctcctattacagctccatgagcaggtgcagatatcatgtagtccactgaatcagttgatccgcaataaatggaatgagagagcacagcctgccaattcactttggatgctccaaatacgcatgctgcaggaacaaatgtgaacaaggacatgagaagtgaccaataagttgttgctgcccagtacttgattccaatgggtgcaccaagaacaattgctccaaatgcatttaggaacgcaccaatggggaggccaagcaatcctcgcgcagctgccttaagaaacgagcagcgcttgggatttcgacggagcaaactgaacactgcgatgacaagaggcgcttcgaagaccacgaggaggcggagggcgtaggcgggattggagacgagcatgccgcggccagacaattgatgggctgccacgatcccagcgaagcacagagcatggaccgctactgcgcttgaggcgctgacctgcgtggcctcgtcgcccatgacaggggcaccgtgggggagtcaataggtggcagtggagccaacacctgccaagtcgggaggtcaattcccaggttgcggttcagcgacctctcgcagtggcatgatcctacaggatggatgcggcggaagcaacaggacgagcgacggcgaccctgctcgctcgcgggatggatgggggtcggcggcggcggaggaagcagcaggacgagctacggcgactctgctcgctcgcgggatggatggggatcgatggcggcggcgaaggcggaggcggcggtgtgccgattcctgca

SEQ ID NO: 11960 - DNA, 168 bp, Oryza sativa
  Clone ID: PAT_MRT4530_18133C.1
atggcggcgagcggcggcggtggcgacacgctggctgaccggcggggcgacgccaaccaagtgttcgacgaaatgactacaagggacactggcctacccggagtagatgcgccgcggtctgaccgttcgatgtactccggcctgaccggtgtagtacctccggtctaa

SEQ ID NO: 11961 - DNA, 401 bp, Oryza sativa
  unsure (1)..(401): unsure at all n locations
  Clone ID: PAT_MRT4530_18134C.1
cggcgcctttttnnggatttttaagattggggtttacatttttttttttttttttttttttttttttttttttttcgccaccgcggcgtaggacttggccccacaaataaagcccttgaaaaaaaggaacgccaaaaatggtggataaaaaaggttaaagagggccccaacctttatcaccatgcgactcattgctccgaaaataaaataaaaaaatgttttttccgggggagacccttttattctttattttaccggggggcggaagggttaaataaataaacaatcggggccagcttgaatactataaaatagccggcgaaggacaacttgtacatcaccatggacaggggtgaagagctctccctccccataaacgtggagataaatttttaactcta

SEQ ID NO: 11962 - DNA, 294 bp, Oryza sativa
  Clone ID: PAT_MRT4530_18135C.1
atgggcatttatcaaggcaaaggtgagaatagtcccaatagtgaaatggcattgacgttgacaaccctcaaggtgaagcaagaagaggacattcttagtggtgtattagtcccaggagctatttttgaaaatggctctacccgggacagagagtcccacccggaggttctgtccggaacttcctggcgccaaggtgaggttgaaaaattttctaagtgttgcccggaagttcctagcacccaggcccggaacctcctagcaaccctccagttcaaatatgtgagtaacggctag

SEQ ID NO: 11963 - DNA, 457 bp, Oryza sativa
  Clone ID: PAT_MRT4530_18136C.1
attgaaacgttatacttgaatcaaaattagagattcttcatttactaatgatagcctgatgcttctcatcttgtaactacttaatgattgttatgcaagtactcatcgttattattgatacgtgccctgcacttaacgtctgtgcaggaaatatagattacctaatctattggtggaacccctgcgcaatagttactagtacggggccatgtactaaacctatcgagaattcaatggttgtgataatgatatatggcgcctgttcacataagtgcaactgatattcgggactatgttgaacatgttctgctatttctaaacgttcagcagaatcatctttgctatgcaaaaagggccttcatttggcaaagcatcagtagcaacagtctcatgacgacagcatctatcttttgagtgacatagaagcctaacaagttctcatgctgatcaaaacttg

SEQ ID NO: 11964 - DNA, 2988 bp, Oryza sativa
  Clone ID: PAT_MRT4530_18137C.1
atgggagggggagggggaggggagagtgaggtagcgacagtggcgactggagggcaagaggagaggcaaccaccgccagtagtgaaggctcaaaacaaatcacagcttcctatgcgtcagaagaggaagaaagtttttacaagagtaagagtccaagatcaagaagaagacaatgactttatggaaccagcttgtcaggttaagagtaaggatgaagtggaagaggaagatgaggatgaatatgaagatgatgttgaggatgaagatgaagaagtagaagaggatgacgacaatgatttcatggaaccagccctcaaggtcaagcggaaggttcctcagaataggaagacagaagcaatgcaaggttctaaaaagaaggttgcttcaaagcaaaagttgactaaggatgtgccggtcaggaagcgtgatcatttctctgtgaacaccagatgccagcctaatgccatccttgaaatggttggttcgttgaacaaacctcagagggatagattgcatgctttgggatttgattgggttttcaagtttcggatgaatggccttcgatctagggaactcattgaatatctaatagattgtcttgaccctgattctatgtgccttgatcttggtggtcgtgggaagttaccagtgacacctgatgttgtgcactgtgtgttggggctgcagaatggccacttggatccaccagtagtgtctgacactactccattggatcctatcagggaagaattaggtcttggaaaaaaggagaaaatatctagttcatccattctggataggattaagatggggggcactgacgatttcacaatgcagtgcattctgatgatcttgtttagcaagttgctggccccagactctagcaccgacatcacagggaatatagtcaacatggtgagcaaaaacttggagcagtacaaagacatggccctctacaagtttgttgttgatcatttgagatggtcagctgagaagtggaaaagtggcaagaggagtacagtctacggctgcacagctttacttgtggtgtattaccttgacaaccttctttgcaaggccatgatctcaaacaccaatacaccacgctcacaatttttcaactccagtcttattgacaaagtcgggaatctcacaaaatcaacaaagaaggatggctctacctcttttgggaaattaaatctgaggtgtagggaaagcacttgctactttgtttcaaaggagaaggtgaagagaaaggttggagctgctagtgggagtactagaaagaggaaacacattgatgaattagcagctcaagaagcaactgtagcaagatccaaagaagcgcctcgttttggtggtgacttcccaagtcttcgtagtaagctaggaccacttattgagtcacttgggagtacccgcaagcaaattgggttggatgctcttgagcaatatgacaaggaggtcgagcagattatgggtaacctacacaaggctcaagaccgcctagtggatgttctaacttcgctttgctcgacaagtgatcctaagatagcttacacacggaaaagcaaaaagagaagagatggcctcccccctctagattctaatgcagtaaccgacaaaacatctggcagtggcaatgagaacacaacccaagcttctatcggcacacctcccactcaggccaatgatgttttaggagatgagcaaagtagaggcaatgtggagagctctcccccaatgcatgtcgaggacccaaaagatgcagaagctggacaaccttgcgagccagcaaaagatgcacataatgacagcttagtggacaaaatatgtacacatgttgaaagtactcctatgctggccattgccccatctcttgctgcgaacctgtcgcctgcgatcatgcctattgagatggaaaagaggaggccgttggcaaaccccaagtacatatcccctttcaagtgtgtttccattgaaccactatgggatgacactggagacattgccatggaagtgtacaaaattgtatggaacggtcaactccctgatgttgaaagtgcgtatctcatcgaccaaagggaaggcgcccttgaagtgctgaattctgaaaaccacaatcttacattctcatttgatgctgccgtcaacataatctctcgtgaatgcaagagttttaacctacctaatgcaaaactgagttttcttccaacgattaacaatgaccattggactattttctgcttcaacttcaaccacaaacgaatcgatatacttgattcattaggacatgacagagacgagaaagctctaaaggctatgaaagacagagtggttggtaggttccttgatgttcttgatgtgatgttcccaaagaagttcacagatgttaggaagtggaaatgctatcatgcttgtaaccaaaagcaagtcttgacaaatgattgtggctttttagcgatgaaatacattcagttctgggatggcaaagtttttgtgaagaaagtttgccctaaggatggaacaaaatatcgtgcggaggtcctctattacatactcttccacccactgaacgaggcgaagctccctgcggctattgagcgatataggcctaagattaggaagatctccaagtagttcagctctgttcttttttccaagttgtcttttggaactttgtacctaaatgattgcagtaacatacttagatgctggtagtaacataattagttggtggcagtaacaggagactgttaggaacattgccacgttttttaagtaatgaaggtgtacagtggcagtaacgtacttggatgctggtagtaaaaatacttagttggtggcagtaacaggagactgttaggaacattgccacatttttgcagtaacgaattatatagtggcaggaacataccatatattataagtcttttgtgtaattccctgttaactctgggttgtttcacatgtcacaacatttacatc

SEQ ID NO: 11965 - DNA, 143 bp, Oryza sativa
  Clone ID: PAT_MRT4530_18138C.1
atggcgagatgcacgcgggcggcggtgctcgcgccgcccggggtgagcgacggttgcggtgccgccggccctggtggcagcgggccgagcaacaacgtcaacggccgcgcgaggctcgcacacagcggctaccgacagtgctg

SEQ ID NO: 11966 - DNA, 474 bp, Oryza sativa
  Clone ID: PAT_MRT4530_18139C.1
atggcgcgccgggagcgggagccagagctggcgcaccgggagctggtgcaccgatcgacaacaccaacggaggcagttctgcctcacaatccagcggtgggactttcacagacttgcaagatggggcacacattgaggcccaccaaagatccccttaccaataacgcggtgactcttggaaggaacaaggaagggaacagtaaattgtatggatatggaggccttgcgtctgttgacactcatgcctggacggtactcgacgccgatcagtggaaggaaacacacgcaatatatcagtacatagaacattatcaccgcgacactcttcaacaacacgtatatgatgggaaccaaaagaccaaaaattcggagcagctgcagcagaagcgatgcatggtgatcagtggtaggcctgaagctatcttttggccattgcttcaagatccacgagctgaagtagcacagtccccctga

SEQ ID NO: 11967 - DNA, 149 bp, Oryza sativa
  Clone ID: PAT_MRT4530_1813C.1
atggctgaaacaaccaaggtcacggaagaaattgttcccttgatagatgtgttcatcatccgctttgaggagcccttcttctggtgcaacctcatcaatctgctctatctcacggggcaccctgtgacccatctctgtgtagttcaccc

SEQ ID NO: 11968 - DNA, 1888 bp, Oryza sativa
  Clone ID: PAT_MRT4530_18140C.1
caaggtagtatctagaagagttttacattagaaaatgtgatacaccccggtgtcttctcaataaaattaccctgtgccaagaatatttggtaattctggcgaatggtctccaaatcaagtacaattagccgagactataatgcctctcatatcattttaaccaggaatataatacttgctaccagtacaaattaaaccatcgaaaaaacaaaatttacaaagtcagttaattcggcggtaagcgtgccaacctttaagctgtaacaggtgacaatattgtgcacgcttactatttgtcatctggcacttgctcttgaaccattttttcttagagtttcatctgcccgtgaagtgagatatcagtatgctcagcagtactaacagcataatcggtcgcagttgtatggatatggaggccttgcgtctgttgacactcatgcctggacggtactcgacgccgatcagtggaaggaaacacacgcaatatatcagtacatagaacattatcaccgcgacactcttcaacaacacgtatatgatgggaaccaaaagaccaagttgcaaggcagtagtgagaactgatgcgaataagcgaatttgcgcagaaattcggctcacccaacgaggaagttgcaaggcaatacttggaactgatgtgaataaggaaatttctgcagaaattcggagcagctgcagcagaagcgatgcatggtgatcagtggtaggcctgaagctatcttttggccattgcttcaagatccacgagctgaagtagcacagtccccctgacaagcctgagatgccccaaaaactacttctccaataaccctgcaggatcgtcatctcatcatatgtagccgcccatgcccacagcaaggaaaccgcgaagaggcaaatgattttgcacgcacgggcatcgtgggcatggttgaggtgaacggagaaccatatgagcagggcgacaagctccggcgtgcaggctagcgccatgctcttcgtcccaaaccattctccggccatggtgtgcaccgacactagaatgagggcgatgcatgtcctgtgcatcactggcaacacgcgtgatacgccaggatagatcccggctggcaccgtgcgggcgattagtgtcgccagagcaaccatagcggagctgatgaacaccaggaaatgagagaccaaaacacgatcttgctgccaggttcctcgggcaagcatcacgccgggtagctgcagccaaaacggtagcaccgctacgatcagcgtcagctgctcttcagatttacgcaagacgctgctagctttggaagcaccgggggaatcatgtcgaagttgcctcctgcaggtttcttctacccagaacttgcggcacagagcgccgatgaacacaatcatgatagctgggaacacggcgaggctgatataccttgtgttaatcaggagcaggaacacgtaagaaatcagcactatgcgggcagtggtgatgtgcaacgcaaccccggagccatattgctgtttgggttgaagtatccggaaacgcatgccatttccaatcacaggagtgatcatgccgagacagaaaacagctattggcatcgcggaccgtttagccgtttgctcgggctcgctgtgacttgttagaagaggaattatatagttgccgaccgctgatatcactagcgacaggaaaccatgcacgaacaatcttgtaattggctctttcatgtcctcgtcgctctcttcctctctggcttcagaagattgagtgacttcatcgctcaatttttttgacgacgatatctcgggcacgctgagtgccttcattcctctctatagatccgctgtttttggtttttggttgtgtgatctttcgagcgcatattagagacga

SEQ ID NO: 11969 - DNA, 262 bp, Oryza sativa
  unsure (1)..(262): unsure at all n locations
  Clone ID: PAT_MRT4530_18141C.1
cgcancgcagcgacgagaggagaaacgagaganagaaaaanaagaaagagaaaantnctgcgccacgccgcccgccgcctggccaccacccgcnccgccgccgccgccggccgcagcagcagggcgctctcgacggcggaggtgccggccgaggcggtcaccgattccgnnttcgcggaggcttggaagaaggtggcccccaacatcgaggcccccgncacgnccatttggctcatgcagccccggccccccacgtcggcgg

SEQ ID NO: 11970 - DNA, 986 bp, Oryza sativa
  Clone ID: PAT_MRT4530_18142C.1
gcacgagggcagctagcttagctgccggcatggacgacgacggcgacggctcatcgtcaccgaccgacgacagcgccgccgccgggcttttgccgctcttcagccgatcgccggccgaggatcttgaggagaagctgaggcgggcgatggaggagaacgcgcggctgacgcgagcgctcgacgccattctggccggtcaccacgcccaccagcgcgcgctcttggcgccgtcgctgtcgccgccgccgccttccgccacagcaagggcgccgagcgtgtccaccagctgcgcggcgagggaggacgccgcaccggcggtcgccgccgccgccgcgtcgacggcatgtccgtcgagacagcagccgccgaccgcggagccacggcccaaggtcaggacggtccgcgtgcgcgccgacgccgccgacgccaccgacgccaacagcatggcggagaccgtgaaggatgggtaccaatggaggaagtacgggcagaaggtgacgcgtgacaacccctaccctagagcttacttccgctgcgcattcgcgccgtcttgccccgtcaagaagaagctccaaagatgtgcggaggataggtcaatgctagtggcgacctacgagggagaacacaaccatgccctgtccacgcagacaaccgaattcgtcgccagcggctgcactacgagccagcacgccggggggtcgtcgtcgtcgccgctgccgtgctccatctccatcaactcgtcgggccgcacgatcacactcgacctgacgaaccaagcagggtccggatcgatcgcgagctgcggcgtcgaggcggccgccgtctccggcgagctcgtcacggtgctctcgccggagttgaggaggcacctcgtggaggaggtggtgcaagtgctcaagaacgacgccgagttcgtggaggccgtgaccaacgccgtggccgctagagttgtggatcaaatcccacacattcctgttcatttgtag

SEQ ID NO: 11971 - DNA, 181 bp, Oryza sativa
  Clone ID: PAT_MRT4530_18143C.1
agcgctcacctctgggtgccgccggggaacacttgcccctcagcggtttcttgcaacactctagcagtcagttacccagaccccacacgcttctactagcaaattcggggctaaatccgcttggcctacgtagccaatcctactaggaaggcgtcggattaggacacaagatcgatcagtt

SEQ ID NO: 11972 - DNA, 1745 bp, Oryza sativa
  Clone ID: PAT_MRT4530_18144C.1
gtaaacattatagctcagcaaacacaaaatgctcaccattcaaccagatagcaagggatacatgtaatgcttaagagcatggccaacagccacccaaatcaatcccctaaattattattttgagatctctaaaaaggatataaggcatgaatatatctttatctccaagagatacccaaaattcaactctccaaacaaataaagtgggccagctagaaaactaccaacaacaaaattgtagttcctctcttcccccctcacatgcgttgcgcactgtgccctcctccgtggcacgtgacgtactccctccgagcgtggcatcccgtcatccgtttcaccattttttcttcaggacgttcaatctccttgacatcataacttacagttgaagcattgaacaatgctttcattggcttcagactgaactgcttcatatgaatttcagcagcaaaaaaaagaggagttttgcaagcggcaagatatttcagcagatgggtccatttgtggtcaaatattgtggagataacaactatgttattaatggacatgaataaatctttgaatgccactaaaccaacctggctaggtggagatgggactggtgctgccggaacacgtgccgcttctggaaaaaatgccgacgcggggtagcttgggggagcgatggctgctttcccaacagctccaaaaagatcagcaatacccttatgacataaagcattttcaaccaacaagtttctcaaagttcctttcaaaatccctccatcaagagtgggatgtaagagaattctgaactccggcccttcatacttgtcttccccagcgtcgcactcgccagcaaacgggtggtaacaaacagcagtaacatcatagtcagcagagccgccatcaccttcagctgcaaacgcgcggcaatcgaaccgcatcaccggcttcacatcaggcttactgacgaacaccttcatgagcgcgtccctgggcaggggctcctccccttcgaaccgcagcggcgcgagcaccgccgacacgaggacctcctcggaagcatcccggcggcgcaggagcacctcctgcccgcgcggcgcgtccgacacggtggagaaatcaggaatgtcctgggattggagcgacggaggagaggaggagggggaggaggagagctcatgagcgatctcggcgcggacggcggccagcacgccgccgtcgttggcgccgccgcggcgcagggcggacgcggccaggcggcgcagcgacatcacgccggaatcattagcgagctgtcggtcggtccgcgaaccaaatacagtggaaggcccataaattaaattggccaatcctgcaaaaatttttaaaagtgcaagaagaggtaaaaggctccagtggcaattctgattgatgtaatcagtattttgaagtaacagtgttagctcttgattgtctgaaagaaaaagaggatttgcaattttaaggaaatcacagatgaagagagcaagtttgaaggctgcaagttctgcttgcattggtgatttgtagagacttgatttcccctgcacaaagatagcttgatgattaattggattatgaagaaagaggccaaaacctgttagattgtccttccaagaagcatcaaagaagcatctgtttcctggtaaaaagtttagacaaacagtaggattttcatttatgataggagtgtcattattatcatcatcatttgataaagcagtaatgtagctcttagacat

SEQ ID NO: 11973 - DNA, 255 bp, Oryza sativa
  Clone ID: PAT_MRT4530_18145C.1
atatgaatctggactagaatctcatatcatagcgcacattttgtacgatattacgatctctcaatttacatgtgtgcattgtcccgaacactaagctttcaagccacccatctcaaaaacacacatttttcttcaacctgttcatgtcatcgaatcgaaatcatactgtcggcttacaaaactttaattccaagcatttgaattacatacattttcattggagaggtgacaccccttgacgtgtactaattcaac

SEQ ID NO: 11974 - DNA, 351 bp, Oryza sativa
  Clone ID: PAT_MRT4530_18146C.1
atggcggcccgcacgcacccaaggggagggtggaagaggggcggtgccgccgcatccgggggcggagggcgggagaggggcaccgccgcggaatccgagcggcggagaggccactcacgtgcccacgggttcaccaacttgagatactctttttgttcccacaagccactagcccaggtccgccagctgcctttagccatggaagaagagattgaggagggagaagagaaaaagaaagaaaaaatggctggccctacttgtcagcagcgttgggttgatgaaggcttcatgttaacatttgtgtcattccaagtcgaactttggaagcatgaatatatttcgcatctttag

SEQ ID NO: 11975 - DNA, 523 bp, Oryza sativa
  Clone ID: PAT_MRT4530_18147C.1
gtccgttaatctgatctatatatgaagtctcgatcggcgcgatcttgctatttttatttttttctgcacagagtaaagtgatttgtgtttgcgagacagtggcccacagccatgccaaaaggtaaacatttaaagtgagcaaggtagtagataagatggatgaacagatgatcatcctgaacagcgccgtccagtccaagctgtttcccgaacacgacagtaaaacaattcaattcacagagattatctggagatcgacgaggcttcacttcacctgtatatactcggctgctggtggataggcagttgtatgtggtttttgcatccaattggaatggcaaaaaggaatagtgttattgtactagctattctttcctctcttttttttttttcctttctttttgggatcttgagttctgattttgcaaggtgcttctgaactgctggagagagaccgatggctggtgttcgtggtccagtctgtataatagccttcccttctgctaccttcgtcgcagaagac

SEQ ID NO: 11976 - DNA, 207 bp, Oryza sativa
  Clone ID: PAT_MRT4530_18148C.1
atggcgagaagagagaaaacgacggcagtggcaacacaacgtgcggtaaggggaaggaggcagggagctcaccgacgggtggggaacgatgtcgggaacgaaggatggacgatgaaggaagcgcaagctcgagctatggcgctcccatccgcgccatcgtcaactggagccacccagccgcggccgctgccgctcggcgccgactag

SEQ ID NO: 11977 - DNA, 389 bp, Oryza sativa
  Clone ID: PAT_MRT4530_18149C.1
cctacgcgtatcccaacatgaggaggcgcggcccaccactggaagaggcggttgctgcattgcgagggcgttggcggtggcggcaccgggtggtacttgtggagcagcggcgttggtggtgggagcaaggacgacgttatggacaacggaggcggtggcgcagccgcgacaccatcatgagggagcctccgggaagaatccctttgaaggccttgccacaggtctctctaggtgagctctgggagacctccaggggcaccttcaagaccggtgaagcggggccgatgcgcctcggtatcacgcctcgctctcgagccgcacactccgggaatcacaggacccccagcaatgctggtttaatgggtgaaatcccatcctttatcccctaa

SEQ ID NO: 11978 - DNA, 2718 bp, Oryza sativa
  Clone ID: PAT_MRT4530_1814C.1
atggcgtcgccggacacaggaacaacgccgccggcgacggctgatcagcagccgccgaagccgccatcatgggagtaccagctgagggagtacctcctgctgctgagctcggtggtggccatcgcgacgtactccgccggcctggcgccgccgggcggggtgcggcagaaggacgccggcggcggcgggcagtacaaggccggcgacccgacgctccaggacatcgcctccgccggcggcggcgcggcgcacgcgcggtacctcgcgttctactactgcaacgcgaccgccttcgcggcgtcgctggtggtgaacctcctgctcctcgtcctcgaggaggcgagcactgtggggctcgccatgctccgcacggtcatggtgctcgacgtcctcgcgctcatggcggcctacgccgccggcagctgccgggacctgcccagcaccgtctacgtctccaccctcgtggacgacgggggcccgacgctgcggtcggccgggcgcgggcagtcggcgcggctggcgaccttcttctactgcaacacggcggcgttcgtggcgtcgctgtccatcgtcgtgccgctgctgagcagcaggctgcagaggatgcacctcgagctgtacccgcccatcctcgccgcgctgctcggcctcatgggcgcgtacaccgccgggagctccagggatctcaggacgatcgcctacgtcgtcgccctggtcgccgcggtgcttgcgtatatcctcctcgccatggcgattgctctgaagaagaagaagcacgacgtcgacctcgccggtggggtagaagattcagagacagctaggcctcctaggaatgaaaaagatgggcaattagaaggtgaaaaggggagcaaaaataatgaaccaatgaaggataacgattttgtactactgcttgccactctcgcggccagcatcacataccaagctgggttggaccctccaggaggcgtctggtcagaggatgacaagctctacgggcgtaaagctggtgacccaatactcttatccacgcatgttgaacgctacaaggcgttcttctactgcaattcaactgcgtttgcagcatccttggttgtcatcctaatggtccagagtaagattgttaagggcaaagcactagtgatagcaacgatgatactggacctgtttggcctcattggagcatacgccgcagggagttgccgagatgtgagcacatccatctacgtcattgccctagctggagctgtcctggtctatgtggtgatccatgttgtgttctggcctgacgattgttacgtgagcaatcagaaggacaaggaggtagagaagcggagggagcggcttctccttctcgcgatcctagtggccaccattgcctaccaggctgggctaaccccaccaggtggcttttgggacaaagacgatggcgaatccggccaccatgcaggtgtccctgtcctcctcgacaactacccaagaaggtatcatgcattcttctactgcaatgcaacagccttcatggcgtccgttgcactcatcatcttgctcgtcaaccctaagctgtacaagctagggataaggtgttatgcgctatacgtgtgcatgatggttggcatgtttggactcatgggggcctacgctgctggtagtgcccggaaagtgcggacatctatctacgtctttgtgttagtcggtgtggtgattgccttccttctcgtgcaactcgtatatttcaacattcaggcagtatggaagcagctccttgtgttcctcaacgtcaagaaggagcctacctctaattcagattcagcaaacacaacaaatgggtcatcatctgattcaaaacataacattgcttccaacactgaagaggagtccaaaaagaaagagtacctgatgacacttgccatcctggctgcaagcgtcacataccaggccggcctaaacccgccgggtagcatctggcaggatggagggaatgtgggtaaccccgtgatgcgtgacaacaactaccctcggtacaacgcgttcttctactgcaactctacatcctttatggcatccattattgtcatcatcctgctgctacagcagtatcaaaagaagtatggtggtttcctgctctatgccatgaatatggtcatcgtggtcgatctgctcggcctccttggggcttacgcggccggcagctgcagagactgggagacgtctgggtatgtcatcgctctggctgttgttgtgcttgcctgcatcatgatccacttcatgttgttgtaccataatggaaggtccaaaggaagggtgggaggagtccaagagattaacacacttccggtcaaccatagttaatataattgttctaccttttatttatcatattttcccgtgtttattcgatttataccattttattgttgtcctatttacccatctttttcctctcttgttctttctctttttacaatatcgctcttttttctatttttcttttttcctcttttcttcttccttcttctcttatctcctttcttccttcctcttatcttttcctttctctttcttctttcccctctttttctttctctctcttttcctctcccttttttttttcctctcctttttcattctctttctcccccttttctactctttatccctttttctccttccctcttctactttctcctttttttcttttcgttttttccatttttt

SEQ ID NO: 11979 - DNA, 171 bp, Oryza sativa
  Clone ID: PAT_MRT4530_18150C.1
atggcgcctcctccaggtggaatgacgaaggtgggcaccggcggcgttgcttgtggcggtagatgcaagaacgccaacgccgtagtcaagtatgggacatccagcgacatctccttggggatggaggtgcgatggttcttctggcaacggtggcattggcaacgccggtga

SEQ ID NO: 11980 - DNA, 502 bp, Oryza sativa
  Clone ID: PAT_MRT4530_18151C.1
atcaagtaatgtaaaatcacttttcattttatgatcattttgcagtgtcaaagtacacttgtctgaaacatactttattacctccaagaaaacgaaatggacggtaactattataagagtagctatgagaagatgtaaggaaaggggaaaaaaggtgtgcttcataacgaagcagttacagtaatttgcgcagccgaccacagcaaatggtctgttcagttactgattactccaatctactacatgtcccagttgacaaatcgtgttcttcatgtattgttgttcaatcaactggtgcttggctctccgattgaaacagatgctaacgatttggaagcccaagcagtagcatgccttgctccatcatgcaaattcccttgcttagacgggtataccctgttaaatttatgttttccttgctcaaggcaggtgaagagagtacgcctactccatgtccgcttcacaaaggcagtgatcttcggataaaaaagatagagcagtc

SEQ ID NO: 11981 - DNA, 1057 bp, Oryza sativa
  unsure (1)..(1057): unsure at all n locations
  Clone ID: PAT_MRT4530_18152C.1
ggccgccccttttttttttttttttttcttaaacgcttaacatgttaccatcaaagagaagttctcaaaaaggacacacgatcaacttctattacacacccttccaatctcttgaacataacccacgacaaactgacaaaagttcttttaaaaaaatgaaactgacagtacaaactcgacggtcgacgccaagctaagcttccagcatcgattaaatataagatgagacaggcaactaaacaaacaatcaataataatctctgcttggtcacatttaaagagcccccagcctggaaaggaaagccctccaacacctgggtcgtcctggccttgccggcggttgtggtgcacggtcgtcactcgtcagcacggatctcaaagcaagacgcacggtcggatcgatctatcccccccccctccctcctccgtctcttgctgatccgtcaaatcttcccccgggggnttgggtcaggcgacggtgaggccgaatacggcggcgagcaccgccgcggccacggcacgcgcggcgagcgagctgcgttgccgccgccccagcccggcgtcgccggtcgccgncgtcgccttaatgattattaccggtggcagcagcagcggcagcaggagcaggcttggtggcgttgttggactcgtgctccctcgcgtactgcttgaagatctctgcctccttggagtcaggcgacatgttcagcatctttgggcagtcggagaaggtggcggcgatggagcagccggaggggaggtccatggcgcgggtgacgttgatgcggaagcccagcgccggctcgtcgcggtccttgacgagcacgcacaggcacttcttgctgccggcgaccacctgcccaagcccggcgcagcaatccctcgtcggcgccctcgccgtcgccttctcctccacgtacgtcaggcacgtcgccagcgccatcagcttgtccgcgcactccgccttgtccgccgcgaagtcccccttcgccgcccccgccatcgccgccaccgccaccaccaccgccgccacccaccatctcgccgccgccgccat

SEQ ID NO: 11982 - DNA, 225 bp, Oryza sativa
  Clone ID: PAT_MRT4530_18153C.1
aaccaaaacaggttaaaacacaaaggtgcaaaatacggccattcaacattttatccccggccaaaatccacccaacgtcatttggaccaaaatgacgtctcctgtccaaaaagtcgtttacattcaccaacaaaaacaaactcccatgtccaaataacaccaaccacaaaactagccatctgcaaatgaaacaagttgaggctaaccacaaaagtgttaaggcca

SEQ ID NO: 11983 - DNA, 1022 bp, Oryza sativa
  Clone ID: PAT_MRT4530_18154C.1
gctgtgcgtgaccaccacaccccccgcgctttatgtgccgctacagggggcgtcccattctccattttgggtgtgcaactgttttgaaaagcgctcggtgtgcgcctcttttctattataccccctctcgaaaaagggatgtgttgcacgacgatttagttttgtgacgccacggtttttccagtctcgacgttgtgtaacgccggccactgtattttatttttgtgttcactatataagagactatttcttctcacgcgcgcgtttttttttcttttttctttttttatcgccccccccttttttttttttttttttttttttttttattaagagtaattctactattagggattcgaaaaggaaacaccggtaagcatttgcacagcatactttgcagttacatgaaatatataaaaaaggaaaagggtctcagttaaatgttgaagggaggtctgagtcaacaatttaagcatggatggaaggtactacattacttctaaacccttgtactcttctttcactcttcaaatccaagcttcttgtcttggcagaattcaagcctctttctcctcttcacgctttggcagttgggactctgtaagaagggcaacgaatgcggccccaaacaagtacccggaaatagtgacgccagcaaccatccacgcatgtttcgtattgtgtgtgccaatcttcttcatgcgctcaaggatcaggctctcagagctttctctcaccatatctctttttgacaaaatcttctctatactccttacttttccaaggtttctttcattcatcaacacctggatgtacctatcgagagggccctcagcctcggagatgtcgagacctcggccgctgttgatgtgcagccgtgtcggcagcgctttcgataacacgccgtaccggactgccctcccagccgccgccaccgccgccgccgccgccatcccgccggttcgctcctcagttctcaggcgttagggactcgtgggcggacgcgtgggcggacgcgtggg

SEQ ID NO: 11984 - DNA, 390 bp, Oryza sativa
  Clone ID: PAT_MRT4530_18155C.1
aaaaagagctaaggaaaatatcatcacccacaaaaagggcgccacatgcatacatttaaaacaccatttttttggtgccgccaaaagccccccacttttacttattcagttaaagacttcaggcgaaggctacctttcaccttagggggcggggaccccacctacggggtcttggccgactcgtttttaaacgggggggcccccggggatgactcgccgaaaaccttggcgatcccctcgggggggatggcggggaggtcctgggctccggggaaacccttgtcggccgggggggagaacacctggggggacttttcggcccaaaaggggggggggggcacggggatctgggccccctggggaaacaacggaaggttgttgagccagccc

SEQ ID NO: 11985 - DNA, 253 bp, Oryza sativa
  Clone ID: PAT_MRT4530_18156C.1
cattattcatatttggtttgatcactatctgggtgcatgcaacacagcaacggggggaccctactagctatgaggcaagccagctaagcccagggcggggggggggggaagatgccgcactgctggggctcaacccggcacatggacggcagctgcgccgcgtactgcctcgccctggtcagccccacgcggggcaaccccggctggtgctgctgcccgccgtagtagccctcctccgacgcggacccgtggg

SEQ ID NO: 11986 - DNA, 155 bp, Oryza sativa
  Clone ID: PAT_MRT4530_18157C.1
gttctaaagtagcgaaaataccactggacaattgtatcctaggccgtgaggtggaatcgccaacggggcgacctgccccggaccgcaatcaaagtataaatccgtatcgtctccaacgacgtcggacacctagggcggggtcctacaccgcttag

SEQ ID NO: 11987 - DNA, 316 bp, Oryza sativa
  Clone ID: PAT_MRT4530_18158C.1
gatagcaactactgatccaacgctcggccaacgtttgctggagatgaagactagccaactactagcactgctctttgctcttgctgtcgttcttgcggcggaagcaacaccttcagattcaggtggcgtgaatacggacgagtgcattgggcggaagatactgaaagtgccgtgccaacggtgcttctcggaatgcattcgctcgtactcggacgggataggcacctgcctcgacgagaacacatgcagttgcgcctttggctgcggctttaatccgcccaaggcgtcgcccccgcctcccagcgaactgatatga

SEQ ID NO: 11988 - DNA, 355 bp, Oryza sativa
  Clone ID: PAT_MRT4530_18159C.1
tgggtttttttttttttttgtgttttccccttttttcccctatttcttttatgggggcaaaaaaccctgcatttttgaacccaggaaaccttgtttaatttgatttgaacactgttttttttctactagttaaactccttttttgcaaaaaccccaagcctttcttacacttgacagttacataaccaactcctaacaatgatcccaattatatttcggtgggatctaagagaagctgagatagagattccgacaggatgaatttgcgctctcaaaagtcggtgtccctccggatcggacatcattgttgcatgtattaagggccccccaatttcccttggccccccctcgctcg

SEQ ID NO: 11989 - DNA, 300 bp, Oryza sativa
  Clone ID: PAT_MRT4530_1815C.1
ccaacccttccgccaacgcgtccgccaacccgtccgcccacccggccggtcggccatgcttgttctccaaggctgctcttaacggcacaatgtaactgaacaatgaataccatgcgctgtctacctgctggaagcaccgggtggtaacacgattacatttacagcagacatgaataacatggtggaatcagctgacactagaggttatgactagaggcttgagaacctgatgtcagggccgtaacacaagggcatagcagtagtgagtgctagtggaatggagaagcctgatgttgtgcc

SEQ ID NO: 11990 - DNA, 1080 bp, Oryza sativa
  Clone ID: PAT_MRT4530_18160C.1
atggggcatcactcttgctgcaaccagcagaaggtgaagaggggcctctggtctcctgaggaagatgagaagctcatcagatacatcaccacccatggctatggctgctggagcgaggtcccggagaaagccggtttgcagcgatgtgggaagagctgccggctccggtggatcaactacctgagaccggacatccggcgagggcggttcacggcggaggaggagaagctcatcatcagcctgcacgccattgttggcaacaggtgggcccacattgccagccacctgcctggccggaccgacaacgagatcaagaactactggaattcatggatcaagaagaagattcgcaagccggcggcggccgccgccgcggcgaccacgacgagcccgaacaacccgccgccgtgcagcacggcgacgtcggaccaccaccacctgccgccgccggcgttcggcggcgctgatcaccacctgcagctcgacgccatcatcaaccagaacctgatatcatccctgccgccgaagctcgccaccggcgacgactcgccgccggcggtgcccgggctgccgcaccactgcccgctcttcatgttcgacaccaccaccaccggcgccggcggcgccatcagcccgccgccgccgtcatcactgatcccaacccacctccaccaccaccaccacccgttcatcgccagcttcacggcggcgatggccgccgacacgccgagctacctgcccccgctggtcgacggcatggcagccatgggagcggccatggattgcagcttagaagatggccaaacagccgccgccatggccgccaccaatggctactaccagcatcatcagaagcatcagcagctggagattgagctggaggaggaggagcagaggcagctagggcatcatcatcatcagcatcaccatgagcatgagcatgaaaatcatcagtgggatgaagaagaagcacagcatctgctgatgtgggatcaagaagtactaacatcatccaacttggaggccatgcaaagtggtgctcattccctcctttttatgggaccaaatgaccatgattaa

SEQ ID NO: 11991 - DNA, 222 bp, Oryza sativa
  Clone ID: PAT_MRT4530_18161C.1
atggaaaaagggggggcaaaaaaacggggaggaaacagggcgggcaagcaacaaaaatcaaagggggggaagcaaatgacgaaagctccgaacccggctatgcgacgggaccaattgaaccacgcatgtggcttaggaaacaagaacacaaaccgtagccaccccaggggtataacgccacacaccccaactgggaagcgagggccgtcccgtggaccataa

SEQ ID NO: 11992 - DNA, 285 bp, Oryza sativa
  Clone ID: PAT_MRT4530_18162C.1
ttcttcacccttctacacatttcgtcgaacatcttgtgggcgtgctgtagcttcttcccggctccaccgccgccgcggaacttcgtcgttccgccgtccctcgctacccgtgcccggccatggcggccatgcggcgcctctcgcccccgcgccgtcctgtgccgtgactgccggcaggaggacaccggagtcttgccgctccctcccctggtcaccgtcgggtcgccctcggccggccttgctgcgcgcgccgcgtctcccctgctgctcccgctcggtctggag

SEQ ID NO: 11993 - DNA, 486 bp, Oryza sativa
  Clone ID: PAT_MRT4530_18163C.1
ctacgtctgtaacctgcaaaacactaccatcctgcacccatcgatccgcaatactaccatgctgtctgtacccatgttccgtggatctgggttcacccccagcatggaggcgtatgcactgcgcagatcgtgatacgcccccattgatatgacagcagccacggacgcaacagccaaccgagctcgcctagtgcgagctagctcgcatttatagtgcccatgctggctgtcacagcgatcacggccggcgccggcggtggcgacggcgaggacgctgtcacggccgccagcgatcacggcgggtggcccaccggcgtcggcgaccgcggcggggttggacgggacgggtgcattcgtcgctgtcgtgtccggactggacggtggggcccaggtgtcggccgcctcccaggtgggccccgcgccccactcgcgcccccagcttgcgtttgacgccaactcgacgagccttcccttggcgcgcgccat

SEQ ID NO: 11994 - DNA, 165 bp, Oryza sativa
  Clone ID: PAT_MRT4530_18164C.1
atgctgctgtacatggggtccatcccgctcgacgtcgtgccgcggattgtcgcgcgcccggcgcccgggtcggtgtaccgcagcccgcagctgtacgcgcgcctccgcgccgacatggacgccgacaactccaccgacgcgttgcaatgtggcacaaatgtctga

SEQ ID NO: 11995 - DNA, 328 bp, Oryza sativa
  unsure (1)..(328): unsure at all n locations
  Clone ID: PAT_MRT4530_18165C.1
ttgcagaccttcagtctgtggtttccantcgtcgagcatagactaggcaaaggttactgtttcattggtttntgtttttgcctttttggttgtgatgtctttggtgcaaggagtattattaggagttcaattgcaagctgtatgtaattggttaactttttttttttggcaaagcttcttagtatcccgataatgcgaaacccttggttttgtgattagttgtgttgcagctgcttagctcttggggaagatgtaactcagtgaatttgtgctttgttccaattcacatgccattgcctaaaaaaaaaaaaaaaaaaaaaaaaaaaaa

SEQ ID NO: 11996 - DNA, 452 bp, Oryza sativa
  Clone ID: PAT_MRT4530_18166C.1
ctatgattatcttaaaaatgattgagaacaacatgtgtcacgataataaaacaataagagatatgctcgatagaaggcactatgccaaagaagatgatgatctcacatgtcttttgtgcaatgcacatcacagagaaacaaggcttcatcttttcttcacttgccctttcagtgtcagatgctggcgacacttaggaattcagtggaatcataatttggagttctttcagatgatcaccctagcaagactcaagtttgctcagaggggcttcctggaggttttctttttggcagcatggcacatttggaagcagcggaatggtttaatcttccagaacattcggccctccttccaagcttggagatctctttttgtgaaggaagttcttctgcatatgtgcagaatgaaggatcccttaaaacaaattgtttctgattggttacaaacttta

SEQ ID NO: 11997 - DNA, 294 bp, Oryza sativa
  Clone ID: PAT_MRT4530_18167C.1
gcacgagggttttttttttttttttttaatgtaaatattattatatttgtctataaacttaatcgaagcttagcagtttgattttaatcaaagtcaaaacattttataaccctaaaatgaaaaacattttacatgaaatgaaatgaatgaagtactacgtaggtagttgaattttgtttgctttgtcagatgggcgcggcgtgctggtgaagctccacgacgacatccagacgtgcgggtacgaggacgtgcaggtgatgtgggacatcctgcagcgctcggagacggcgaggc

SEQ ID NO: 11998 - DNA, 123 bp, Oryza sativa
  Clone ID: PAT_MRT4530_18168C.1
atgggcattactccagcatcgtcagtctaccaggcacagtgccgtctaggggcaacaaagcacgggcttcgattcactgattcggaaaacatggacgccagggaaatacaaattctgcacgtg

SEQ ID NO: 11999 - DNA, 1353 bp, Oryza sativa
  Clone ID: PAT_MRT4530_18169C.1
atgtcggcgcacgggaacgtgtcgtggggctgtgtcttcttagaaattctggttcgtgaatttctgggcgtgacagtgtactccgcgccgtcgctgatggcgacattatcttcaccgctggttgccgtcatcaccgctgaccgatttctccgccaccacgattggcttattccgccgccatcgctgatggcaacattatcttcaccaccggctgcagtcatcaccgtcgaccgatttctccgccagcatggttggtgtattccgccgccatcgctgatggcgacattaccttcaccgccgactgctgtcatcgccgccgaccggtttcttcgccaccacggttggtgtactctgccgccgccgctgatggcgacattgtcttcaccaccagctgccgtcatcgccgctgaccggtttcttcgccaccacagttggtgtactccgccgctgtcgctgatggcgacattgtcttcaccgccggctgccgtcatcgccgccgactggtttctccgccaccatggttggtgtactccactaccattgctgacggcgacatcatcttcacagaccggcttgccttcactgccaccgactggtgtctctgcctacacggctggcctattatgccaccgttgttgggcttctacgacttcaccgtcggcttgcctctatcgctgccgactggaatggatcagtcagaacatcaccaaccggcttgccttcgccgccgccgactggtgttctctcctatacggttggttggtcacattaccgttgttgggcgtctacgtcttcaccactggtttgccttcgccaccgccgactggtgtctctgcctgcatggctggcctattatgccgccgttgttgggcgactacgtcttcaccgaccggctgcctcgccaccgtcgactggcatcttcgcctacacggttggcctattatgccgtcattgttgggcgtctacgtcttcaccgatcggcttgccttcgccaccgccgactggtgtctccgcctgcatgactggcctattatgccgctgttgttgggcgtctacgtcttcaccgatcggcttgccttcgccgccgccgactggtgtctccgcctgcacggctggcctattatgccaccattgttgggtgtctacgtcttcaccgacaggcttgccttcgtcgccgccgactggtgtctccgcctgcacggctggcctattatgccgccgttgttgggcgtctacgtcttcaccactggctcgccttcgccgccatcgactagtgtctccgcctgcatggctggtttattatgccgccgttgtaggacgtctacatcttcaccggccggccgcctcgtatga

SEQ ID NO: 12000 - DNA, 426 bp, Oryza sativa
  Clone ID: PAT_MRT4530_1816C.1
gtcgactccatttctggaaagatcaaacaacaaaagatcgacatctgctacttagatacgacatacctcaatccgaaatactcctttccgcctcagaacgatgtcatcaaagcttgtgccgacctctgtgggtctatgtctcctgatcccaactgtaaagacgacatttgggaaaaggccggtggacagggcactctagcagttagcaagttcttcccaaacacaaagtatgacgagaatgacaaactcgacacaaagaaaaagcctcctcagcggctacttgtaatttgcggcacctactcgattggtaaagagcgcatttgtatctccatcgccaaagctctgaagtccaagatttttgcaacacctggcaagattaaaatctgcaaacaacttgacgacccagaactttctgctcttttgaca

SEQ ID NO: 12001 - DNA, 631 bp, Oryza sativa
  Clone ID: PAT_MRT4530_18170C.1
cgggctgcaggaattcggcacgaggattacaatcataacattcatatttattcagaaaattattgtatttcgaccattggattatgcagtttaatatactcaccagagaatttagagtttgtaagttgatgcaaactacctggatgatgtattgttaacaaacaagcgtagacattgtgtaatccacatgatactgatattaatatttgttgttaagagtagcaatttagcagaatcaaacacgtgacacatgaactgccttgcactattcctacattgttgcatacatcaccatatgttaatgtacttcctattttggttcctagcttagcagtcataggcataagagaatggttgcactcataatacacatacagcacttaaggtagattcattattttctgttgcagtgtcctatggcacctgaatagtaaaatgatgtgtcactacatgtattaaatctagggcaatgctgccttttttaactagatagttttctcaccttacctcatgactttccaaattctgtgttaacatgaatacttttttttagaataaggcatctatcaattcactagattacatttcgacagttcagaagtcatgaagttatgcgtcactctcttgaagt

SEQ ID NO: 12002 - DNA, 1482 bp, Oryza sativa
  Clone ID: PAT_MRT4530_18171C.1
atggagtcgatgctcgtagccggagcgggcgcggcggcggtggcggccgtcgggggcctcgtcgcggcggccgcgctcgccgacaagctcgtcgcggcgccgccgccgcgcaagaaccgcgccaacccgcctccagctgttcctggtttacccattattggaaatctgcatcaattgaaagaaaagaagcctcatcagacgtttgcaaaatggtctgaaacttatggaccaatctacactataaagaccggagcttctccagtggttgtgctcaattcaactgaagtagccatgggggcgatgattgacaaattctcatccatatctactcgaaagctaccaaaagcattgtctgtgctaacccgtaaaagcatggtcgccatcagcgactacggtgacttccataagatggcgaagcgtaatattatgctcgccatgttaggttttaatgcgcagaaacacttccgcggtacaagagagaggatggtcagtaacgtgttaagcactttgcataagttggttgctcttgacccacattcccctctgaacttcagggatgtttacactactgagctgttcggcttgtccttgatccagagtttaggtgaggatgtgtgttcagtttatgtggaagagtttgggagggagatatccaaggacgagatcttccatgtccttgtgcatgagatgttgtcgtgtgccgtggagcctgactggagggactacttcccctacctcagctggcttccaaacaagagcttcgacacaattgtgtctactacagaattcagacgagatgctgtcatgaacgcgttgatcaagaggcagaaggagaggattgcgcgcggagaggcaagggcatcctacattgacttcttgctggaagctgagagcagtgcacagctgacagatcaccaactgatgctgctgctggcggagtccatcccggctgctgcggatactgtcctggagcggctctaccgggagatccgagaggcgtgcggcggcgaggcggtgaccgaggacgacctgccgcggctgccgtacctcgacgccgtgctccacgagacgctgcggctgcactccccggtgccggtgctccccccgaggttcgtccacgacgacaccacgctcgccggctacgacgtccccgcgggcacccaggtgatgatcaacgtgttcgcgtgccacatggacgaggaggcctgggagtcgcccggggagtggtcgccggagaggttcctcggcgaggggttcgaggtggccgacaggtacaagacgctggcgttcggcgccgggaggaggacctgcgcggggagcctgcaggcggtgagcatcgcgtgcgtcgccgtcgcgcgcctcgtgcaggagctccagtggacgctgagggagggcgacggggacaaggaggacaccatgcagttcaccgccttgaagcttcacccgctgcacgtccacctcaagcccagaggaagcttgtga

SEQ ID NO: 12003 - DNA, 970 bp, Oryza sativa
  Clone ID: PAT_MRT4530_18172C.1
cgagatgctatcatgaatgcattgatcaagaagcagaaggagaggattgcacgcggagaggcaagggcatcctacattgacttcttgctggaagctgagaggagtgcacagctgacagatgaccaactgatgctgctgctgtcggagtccatcctggctgcagctgatactgtcctggtgaccaccgaatggaccatgtatgagattgccaagaaccctgacaaacaggagctactctaccaagagatccgagaggcgtgcggcggcgaggcggtgaccgaggacgacttgccgcggctgccgtacctcaacgccgtgttccacgagacgctgcggctgcactccccggtgccggtgctgcccccgaggttcgtccacgacgacaccacgctcgccggctacgacatcgcggcgggcacccagatgatgatcaacgtgtacgcgtgccacatggacgagaaggtgtgggagtcgccgggggagtggtcgccggagaggttcctcggcgaggggttcgaggtggcggacaggtacaagacgatggcgttcggcgccgggaggaggacctgcgcggggagcctgcaggcgattgaacatcgcgtgcgtcgccgtggcgcgcctcgtgcaggagctcgagtggaggctgagggagggcgacggggacaaggaggacaccatgcagttcaccggccttgaagcttgacccgctgcatgtccacctcaagcccagaggaaggatgtgagctagaagaagcagttccatgcatgatgaagaattaatgatattctcgaacgtattttgcaggatgaatagtgatattaaaaatataatggtatatactacctctggttttttaatatgctagaaaaaaatgtatgtgcactgctaggggagaaattaaatttatcatgaacatcgtagtatttttttttaaaatgtacgacgccaacgtttgaccattcgtccctt

SEQ ID NO: 12004 - DNA, 249 bp, Oryza sativa
  unsure (1)..(249): unsure at all n locations
  Clone ID: PAT_MRT4530_18173C.1
gggattcngcggctgttctgggtctgccccgggctgcaccggctgtcgtgatcttgacggggcgatcggagccccggctgttccggttctttccttgagcaagctcttccgactcgtcgcggcgctcgctggtccgaccggcggccgtggacgagctggtcgaccgctcgcgttttgcggccggacttcctttcgacgcacctccggcttcgatcggaacctggccttgttcgggctaactaggcgccg

SEQ ID NO: 12005 - DNA, 249 bp, Oryza sativa
  Clone ID: PAT_MRT4530_18174C.1
atgggccccacctgtcacctctctctctctctcctccctcccctcacctccatctctctctatgatcgagcagtcgttggagacggagctgaggatggcagcttagagcggcggcgaagggcgagtatggcagaggcagctcggagcggcggatgggaagccgaggatgacaacggtggtggggacgacggaggtgcacccaaaaaaccgagccaaatcgaaccaacgagcgggagggaaatattttag

SEQ ID NO: 12006 - DNA, 207 bp, Oryza sativa
  Clone ID: PAT_MRT4530_18175C.1
cagtgcccttcacggggcttggccactcgctgtcgactttgcaaggaagcctgcccccactggtgtatgatggaatatagggatgcctgggcacaatacccacaatctccactgggatgccgtgtgacaacatgtgtgctgctttgctgcctgtgtttgggggtgtgtcgttggatatgtgtcttgagctgaggcttttttggtgtt

SEQ ID NO: 12007 - DNA, 2446 bp, Oryza sativa
  Clone ID: PAT_MRT4530_18176C.1
atgtccaccgaccagcctcacctcccgccccccgcgcccccgcccggcgccgcggcggcggatccccccgagtccacccccgcgccgcctccgccgccgccgctcgagccacccgaggtgatgcacaagacgagggccgtcgacttcctcggccgccgcaccccaatcgtctaccagaacgacaacgggccgtgccctctcctcgccatctgtaacgtgatgctgctgaagaatgtgatcagcttgaacccggacgcgggcgaggtgtcgcagcagaagctgctctcgctcgtcgccgagcgcctcatcgactccaacagcaatgtgcagggtaaggacgaggagtatgtgcgcaaccgggagcagaacatctcggatgcgattgaccttttgccgcgcctcgcgaccggcattgatgtgaatgtgatgttcaggaagatcgatgactttgagttcacccgagaacgtggaacatggcaacagccatgctttgagcgatggccctatgttacaggacagcacaaatgctgctcctaatattaatgaagttgggatggaggaatcccaacaggttttgacgtctaatgaactagaagacgatgggaaaaggaatatcttgccagagcactctgatatgacgattcaactttcagagtctgtgcttgactgttcctctcatgagtcttctgctcccaaccaagctgctcctgcccttgggcaagttgataaagaatcctgtgaagaacaagctcccttgcaaattcatggtcaggcttctgacactgagaaaattcatggtcaggcttctgacactgagattagctctgagctaacaactgcagctagtcaagataccccaaatcatgctactaaagagctgaatggggaagatggcaatagtcctgagcctatcatcttaaaccttcaggaaagtgagccaatatatcaaggagaagagcacataacagccatgctttgagcgatggccctatgttacaggacaccacaaatgctgctcctaatattaatgaagttgggatggaggaatcccaacaggttttgacgtctaatgaactagaagacgatgggaaaaggaatatcttgccagagcactctgatataaccattcaaccttcagagtctgtgcttgactgttcctctcatgagtcttctgctcccaaccaagctgctcctgcccttgggcaagttgataaagaatcctgtgaagaacaagctcccttgcaaattcatggtcaggcttctgacactgagaaaattcatggtcaggcttctgacactgagattagctctgagctaacaactgcagctagtcaagataccccaaatcatgctactaaagagctggatggggaagaatgattcttggaatgaacagcaggctatgacaagtaccgctgactatcttgctcaatttgacaatactaccctgtagcactcgtctggaaactctgatctagagctagctatagcacttcaacaacaggagtttgagcggcaacaacctcaacgacaccagtcgtcaacacagcagcaggagccggtgccccagcagcaacagcagacacccaatcaatcacatggcacaggtcggccaggattagttgttggtccaacaacggcaaggaggccacctgctccacagccgacgacgccgaagaaagagaagtgcatcgtgatgtaaagatacaacatatcggagacgggacaggagaaaggaaaagggagggggacaaggagcatcacatagtatactgtaaagaatcttcttgtctactcttcttctttagtgccgcggcatagcagcagcctgttgtttttttagccacttttcccaatcttgagcgctcttcattttgcgtgttttttcttccctggtgtaaataaccttcaaagaagtcataaaacgtaaacagatgctgtcaaatgatagccttccttgttttatgataatttgttgcaacccaagtatgatgctatttcccatggtattattgcttttgtttctgcacgtgtgcataaggagtttgagcggcaacaacctcaacgacaccagtcgtcaacacagcagcaggagccggtgccccagcagcaacagcagacacccaatcaatcacatggcacaggtcggccaggattagttgttggtccaacaacggcaaggatgatatctgtcatagcttgtagtgcgttggggggcttgaggcttttagtttataaggttaaacttgctctggagtcaccagtttgtcaggccacctgctccacagccgacgacgccgaagaaagagaagtgcatcgtgatgtaaagatacaacatatcggagacgggacaggagaaaggaaaagggagggggacaaggagcatcacatagtatactgtaaagaatcttcttgtctactcttcttctttagtgccgcggcatag

SEQ ID NO: 12008 - DNA, 240 bp, Oryza sativa
  Clone ID: PAT_MRT4530_18177C.1
atgggtggcaaagttgctctcctggtggtccttgtggccatgagcgtcgtcctcctggagacccaggcgaagacaaagccgaaggcggaggagaagccacccaaaaccaaggagcacaggctgccgagccaccccgacaagccgccgccttaccgagagagaagagcagcgggctacagatttgtagccagctgtagcacggacttcaagacgcagtgtgtctatgacaggtgggactag

SEQ ID NO: 12009 - DNA, 519 bp, Oryza sativa
  Clone ID: PAT_MRT4530_18178C.1
atggttggcgggaggcgtggcagcgacgggtccaatgggggggaggtgctcggcggcggtgagaagtgcagcggtggcggatcccactatggggaatggggcagcaatggatccagtggggaggcacatcggtgtcggatcctgctcgccctcccgcgcggcaatggcaatgataacgagccaccggggaggaggatgatgagaacggtggcggtggctttgagcgatgatgaggacggcggcatcaacttcgagcaacgacataagcacccacatgcaaaatctaatttatggatgccagcgagaaaacatatgcaggtacctgcatacctgggcatgcttgatgtgggtggtagtcttgtcccaggatgtgccacggcgtcggtcgggcggtgcgaatcggcggccgacggcgtgtcatccgacgatggcgaggggagggatgacgtcggcggtgaagctagtcgacgggtgtcgggcggtgcgagggggcggtggttagggttccggcgatggtga

SEQ ID NO: 12010 - DNA, 5181 bp, Oryza sativa
  Clone ID: PAT_MRT4530_18179C.1
atggacgaggtcctggaggtagaggaggaggcagtggcgtttacccccaccccgtccgggagtggggattccggagaaagccgtgatcctcgtcaccatcgccacggttctccaactcctccccgccgcgaaccctcgcggagggaggatcccacccattcgggtggttcggctctctctccaccccctggcggagggaggccgcgatgcgtcggggcacgccgccgtctcgattatggagacggcggttcgccccaaggagcgcttcaggcggcgagtgcccttctgcggcatcccccggtaaacccggagtcggagacccccgttcagcactggctggacgacgtggccaacttggtcactactgcccagcggcagttggccacgggcggccgatccaccgccactggtacgtcgcgtacctcggttaccctctcctcgtcggcaaggagaagggcccaccgatcggccacgatctcaaggcggtccacagttccaacatcgtcgggggcctcgggaagccggaggcatcatgacggcctctacggggcgcaggacgctcgaatcaacattgagcgacgccgggacgagcgccgagctgcccgcatgggggaaggcgccttctcatttagagtgccacgctccccttcacgaggcggccctccccctacgctcacccctggggggacagggggtgatgaccgggtcatggcgaattactttcccatgaccctcaagggtcaggcgcgtggttggttgatgacccagccccccgactccattcactcctgggaggatctgtgccagcagttcattacgaacttccagggcacatatccccgtccgggggaagagacggacctacacgctgtacaacggaaggacgacgagtccctccgttcgtacatacagcgcttctgtcaggtccgcaacactattccgtgcattccagctcacgcggttgtatatgcattccggaacggcgtgcggcataattgcatgctggagaagatagcctccaaggagcccaagaccaccgccgagctcttcgagctggcggacaaggtggcccaaaaggaggaggcgtgggcttggaactctcccagcaccggtgcggcggccgcggctacccccgagtctgcccccgctccaagcggcgagataggagaggcaaaaggaaaccagcctgcttcgatgacgagggccatgtccttgcggcagatgggcccgcatgggccccgtgcaaaggaaaggccaccggcgataagccaagccccactgttccctccggcgagggccggtcggcggacaagtggtgctcggtccacaacacttaccgccatagtctcgccgactgccgctcggtcaagaatttggccaagcggttctgaaaggccgatgaggagaagcagcagggtcgacgggagggcaaagctcccgcgacctcaaccggtgaccggcgagaggaggccaagaacaatgcccccgccgatgatggcggagacagggaggggggcttgcgctcacaccttttgccaaggcttcaaggccatgaggcgagagcttctggccgccgttcccatgcacgaagcggtccggaaggcgcgttggtcagaggtgaagctcacgttcgaccagagcgaccattcgacggtgctcgctcggggagggaagttggccctggtggtctccccgactatccacaatgtcaagatgaagcgtgtgctggtggatgggggggccagtctgagcatcatctccccggctgcctttgacgcgctcaaggccccggggatgaagctccagccgtcgctccctatcattggcgttactccggggcacacgtggccgcttggccacgtagagctcccgataaccttcggcgactccaaaaacttccgcaccgagcggatcgacttcgatgtggcggatctcaatctgccctacaacgcagttctaggcagagccgcgttggtgaagttcatggtcgccactcactacgcctacctccagatgaagatgccgggccctgctggccccatcaccgtctttggtgaagtcaaggtcgccctcacctgcgcggagcagcgcgcagacaacctagtggtggccacggagccacaggccccagaggcctctgcgtcccacacctccaagaagcgcctcacctcggctgacgaggaaagcgcgctcatctccttcctgcgggcgaattctgacgtcttcgcatggaagccgtcggatatgcccggggtccctagggaggtgatcgagcaccgccttgccatgcgaccggatgcgcgacctgtccggcagaaagtgcggcgtcaagccccggagcggcatgccttcatcagggaggatgttgcgcggctcctggaggctgatttcatccgcgaagtgatccatccggagtggctggcaaacccggtggttgtcccgaaggccaacggcaagctacggatgtgcatcgactacacagacctcaacaaggcatgccctaaagatcccttccctctgccacgcatagatcagatagtcgactccactgcggggtgcgaccttttatgttttctagatgcatactctgggtaccatcagattcgcatggctagggaagatgaggaaaaaaccgcctttattactcctgtgggcaccttttgttttacaactatgccttttggattgaagaatgcaggccctacttttcagcgcatgactcgtattactttaagtaatcaggttgggcgcaatgtagaggcgtttgtcgatgacctggtggtaaagacgcgccaccaggacacgttgctacaggacctggccgaaactttcgatagtcttaggtccacgcgcgtaaagctgaaccccgataagtgtgtgttcggcgtgccggcgggcaagcttctcggttttctagtctcttcccggggcatagaagcaaatcctgagaaaatacgtgtgatagagaggatgtgcccccccagcaagcttagggatgtgcagtgcgtcactggatgcatggccgccctgagtcgatttatatcgaggctgggtgagagggcgctacccctattcaagctcctcaagagctctgggccgtttatatggacggaggaagctgagcaagctctcaatcagctgaaagcttacctcacttcccccctggtcttggtagccccggggccggaggaaccattgctactctacttggccgcgacccctcatgtggtgagtgccgccctaatagttgagcgtgaggaaggcgaacgggaggcccctccggctcgcaacggcccctcgtcccccgaaggcctagcgcccaaagctcccagcccccgggaggaccccgaggcccccgagggaggaggggaggctttggcaggtggccccgagccttatgatcctgaggcaatccgggatccccccgggacctccgaacaggcgcgccccggatcatctacccctgacaacacgaaccggccccgccgaaaggtgcagcggcccgtctactttgtcagcgaggcacttcgagatgcgaaaacccggtatccgcaggcccagaaaatgctttatgccgttttgatggcctcaaggaagttgcgtcactacttccaagcgcatcaggtttccgtagtgacgtcgtaccctctcggccaaattttgcacaaccgagagggtactggacgggtgagaggaagaggatccaaacgccgacattcgcggcgggcactggattatgcatttcgatggctccctcaaccttcaggtgcaggtgccagagtcacactgacctcgccaagcggagacgtcctcaaatacgtcgttcgactcgacttccgagccacgaacaacatggcagaatatgaagggctcctcgcgggattgagggcggcagccagaatgggcatccgccatctcctggtcctaggtgactcccagctggtcgtaaatcaagtatccaaagagtatcagtgcaccgacccgcaaatggaagcatatgtctacgaagtacggcgcatggaacgccacttcgacggacttgagctccagcacgtgccccgacgcggcaacacagttgctgacgagttgttgcgtgttgcgtcggcacgagccccactccccccagggactttcgaagaaaggctcgcgcaaccatcggcgcgaccgaaccctttgagggaccccaacaacacgccctccaaccctcgtatggatgaccgacatccggggtatctcgacggcaatactcttcctaaggatcgcgcagaagctgaaaaggtcgcgcgcatctccaaacggtacgtcctcatagaagggaccctctaccggcgtgccgccaacgggatactcttgaagtgtatttctcgagagcagggcatcgagctcatagccgacgcccatcagggtgagtgcggggcccattcgtcctcagaaactttggtcggaaaagccttccggcaaggtttttattggccggctgcattacaagatgcccaagaatgggtccagcggtgcaaggcatgccagttccacgccaagcagacccaccagccggcccaagccttgcaggtcatcccactctcttggcctttcgcagtctgggggctagacatccttggaccattcaaggcagctcgaggcgggtatctgcacttgtacgttgccatcgacacattcaccaagtggcccgaggcctacccggtcgtcaaaatcgacaagcattctgccctcaagttcatcagaggcattacgtctcgattcggattgcccaaccgtatcattacagacaacggcacccagttcaccagtgagctatttggcgattactgtgatgacatgggcatcaaattgtgctttgcctcacccgcccacccccagagcaatggccaagtcgagcgagccaacgccgaaatcctcaaaggactcaagaccaagacatacaacgtcctgaagaagcacggggattcatggctcgaggagttgcccaccgtgttgtgggcaaatcggactaccccaagccgcgccacgggggaaacaccattttttctgatgtacggcgctgaagcggtcctaccctccgagctttccctggggtcgccttgcgtcacactgtataacgaggccaacatggacgaccttcaccgcgacgatctcgattatcttgaagaacggagaaggtga

SEQ ID NO: 12011 - DNA, 706 bp, Oryza sativa
  Clone ID: PAT_MRT4530_1817C.1
aggctaatcatggattaattagactcaatagattcatctcgcgaattagttcagtgtcatgatataactatggctactatggatacaaccgtgctcacatcatgaatcaataaaaggatatcaatatcaagtcctccaagtattacaatccgattcggccaccagctacattgctaacttcaaactgccgccaaatctgcatacgagctctgtttttggcctgtgatccagtcgtgttcccaaattccatcataaccgcaatcaaagaaacaatatgctgcgtcgcctataatggacctcatgggattgtaacttcatctgggaccccggcccaagtagggcccatgtggggtgcctcgttacagaaccccaacttatcatttgtattcaatttatatttgtaattcagattgttttttttattattcttacttgtttattcgatttgcttgtaggaataaggttgatctgcatcagcaagataaacaacgcatggagaggtgtatcgatcggtaaggcgcaacacaacaacgtgttgtacggtcgtagtcgagtcgtcaacgtttctcccaaatcgtagttatcatcaactcaccaaaagatcgggccaattatggccgtgagtatttcgagtggaactcaggctttatcatgtcaagacagacatacgaggctaacaattaatttatctcattagaatttaaaa

SEQ ID NO: 12012 - DNA, 2190 bp, Oryza sativa
  Clone ID: PAT_MRT4530_18180C.1
atgcgcaacctgtccggcagaaggtgcggcatcaagccccggagcggcaggccttcatcagggaggaagtggcgcggctcctggaggctgatttcattcgcgagccgtgcgccgccgtcgctccggtcgtcgtcgctgctcggggaggtcaccgtcgtggtcaccaagtcgtcgccgacctcgtccgccccaccgccgtcgctgtcgaccgccggaacatcgccgtcgtcgtcaagccgaaggtcgccgccgcttcttcctcgacgctgtcaccgtccgttgatcttccgccgttgttttggtcaccgcccccgggagggccccgaggcccccaagggaggagcgaaggctttggcaagtggccctgagcttgatgatcccgaggcagtccgggatccccccgggaccaccgaacaggtgcgccccgagtcaccagcccctgacagcacgaatcggccccgccgaaaggtgcagcggcccgtctacttcgtcagcgaggcactccgagatgcgaaaacccggtatccgcaggcccagaaaatgctttatgccgtcttgatggcctcgaggaagttgcgtcattacttccaagcgcatcgggtttccgtagtgacgtcataccctcttggccaaattttgtacaaccgagagggtactggacgggtggtaaaatgggccatcgagctggctgagttcgatctgcacttcgaaccgcggcatgcgatcaagagtcaaatcctggctgacttcatcgcggaatggaccccggccacgaacaacatggcagaatatgaagggctcctcgcgggattgagggcggcagccagaatgggcatccgccatctcctggtcttaggtgactctcagttggtcgtaaatcaagtacccaaagaatatcagtgcaccgaccagcaaatggaagcatacgtccgcgaggtacggcgcatggaacgcaacttcgacggacttgagctccggcacgtgccccaacgcgacaacacggttgctgacgagttgtcgcgtgttgcgtcggcacgagccccactccccccggggactttcgaagaaaggcttgcgcaaccatcggcgcgaccgagccctttgagggaccccaacgacgcgcccttcggcccaacccctggcgacccgcgcccctcggggcccgaggaggtcaaccccgacccctctcgtcaggttgtgtggatgaccgacatccgggcgtatctcgacgggaatactcttcctgaggaacgcgcggaagctgaaaagctcgcacgcatctccaagcggtacatcctcgtagagggggccctctaccggcgtgccgcgaacgggatactcttgaagtgcatttctcgggagcagggcatcgagctcatagccgacgcccatcagggtgagtacagagcccattcggcctcacgaactttggtcggaaaagccttccggcaaggtttttattggccgactgcattacaagatgcccaagaatgggtccagcggtgcagggcatgccagttccacgccaagcagacccaccagccggcccaagcattacaagtcattccactatcttggcttttcgcagtctgggggctagacatccttggaccgttcaaggcggctcgaggcgggtatcagcacttgtacgtcgccatcgacaaattcaccaagtggcccgaggcctacccagtcgtcaaaatcgacaagcattctgctcttaagttcatcaggggcatcacgtctcgattcagagtgcccaatcgtgtcattacagacaatggcacccagttcaccagtgagctgtttggcgattactgtgacgacatgggtatcaaattgtgctttgcctcacccgcccaccccaagagcaacggccaagtcgagcgagccaacgccgaaatcctcaaaggactcaagaccaagacgtacaatgtcctgaagaagcacggggattcatggcttgaggagttgcccgccgtgttgtgggcaaatcggaccactccaagccgcgccacgggggaaacaccatttttcttggtgtactgcgccgaagcgaacggagaaggtgagcggccttccgcgccgcgcgctaccaacaaagcctgcgacgctaccatcaacgccacgtccgggcccgatcactacaagttagcgacctcgtcctacgccacgttcagtcgcgcctag

SEQ ID NO: 12013 - DNA, 1089 bp, Oryza sativa
  Clone ID: PAT_MRT4530_18181C.1
atggctaatgtcaaccccaaccctcaccgtttcctccgacaaggccacattgttcacttgggtgtccccacatgctatatgtgttctcttaaattgcctttaactatcattaaggccattgatacaacaagaaaggattgtttgtggagaggaaatgacccaacttccaccagaaaatctctagcttcctgggagctagtgtgtaggccaaaggacaagggtggcctaggggtgataaatctaagaacacagaacattgctcttttgttgaaacacttagacaagttctacagaaatgttgatcttccttgggtggatctcatatggaaatcttattacacctcaaagcctccccactcaattgccaacaaagcttataacaaagaggaatatgttggcatggcttgctcaaggcctttagaagatgctttcatgcttccttttaatactgaagcttatggggaatttttagtgttgaaatctgatcttgacagtgttcatttaaatgaggggtttggtgatcattggagttatatttggaatattgataagtattcagctcaaagattatacaaaatgaattactcatgcctacaaccctcaaggctgcttgtttggatctggaagacaaagtgtgtgatcaaaatcaaagtgtttgcttggctcctctctttagatagatttaatacaagggacatgttggatcgcaggcactgtgctaaggagaatgatgatctcacatgtgttctttgctatggggatttaagagaaacaaaactgcacatcttctttgcttgtccttatagcctccgatgttggcagcttttgggtttccattggtttctcaatttaaatttcttccagatggttgttctagcaagaaatcgctttggtatgaagggctttctggagatcttctttatagctgcctggtacatttggaaacaaagaaatggcatgatttttcagaatgttcctctgacttttcatggatggaaagttcagttcaggaaagaacttcttctacatatgtgtagaatgaaggagcctctcaagcaattagtttttgattggttacaaactatgtaa

SEQ ID NO: 12014 - DNA, 3233 bp, Oryza sativa
  Clone ID: PAT_MRT4530_18182C.1
ttccctcgacagctggcgcgccaggtaggggcggttgcgcattccgagaggaagtcgctttcttccatcctaattttctggcgagagccgaggtcctcgtcaccgtcgccatggttctgcaactcctccctgtcgcgaaccttcgcggagggaggatcccactcgttcgggtgattcggctctctctccgccccctggcggagggaggccgcgacgcgtcggggcacgccgccgtcttgactatggagacggcggttcgccccaaggcgcgcttcaggtagtaggcacccttctgcggcatcccccggtaaacccggggccggagactcctattcagcgctggttggacgacgtggccaacttggtcactactgcccagcgacagttggccacgggtggtcgatccactgccgctggtacatcgcgtacctcggtcaccctctcctcgtcggcgaggagaagagctcgtcgatcggccatgatctcgagacggtccacggttccaacatcgtcgggggcctcgggaagccggaggcgtcatgacggcctctacgggacgcaggacgctcgaatcaacatcgagcgacgccgagacgagcgccgagctgcccgtatgggggaaggcgcctcctcatctggagcgccatgctcttcttcacgaggcggccctcctcccacactcacccctgggaggacgggttgtagggcctttgtggcgagtctccggaatgtccggtggcccccgaagtttcgccccaaccttacggagaagtatgatggtagcatcaatccctccgagttcctccagatctacaccacggttatcgtggcggcagggggtgacgaccgggtcatggcgaattacattcccatggcactcaagggtcaggcgcgtcgctggttgatgacccagccccccggctccattcactcctgggaggatctgtgccagcagttcattacgaacttccagggcacatatccctgcccgggggaagaggcggacctacacgctgtacggcgggaggatgatgagtccctccgctcatacatacagcgcttctgtcaggtccgcaacaccattccgtgcatccaagcccacgcggttgtatatgcattccggaacggcgtgcggcataatcgcatgctggagaagatcgcctccaaggagcccaagactactatcgagctcttcgagctggcggacaaggtggcccggaaggaggaggcgtgggcctggaactctcccggcaccggtgcggcagctgcggctactcccgaatctgccccccactctaagcggcgagataggagaggcaaaaggaaaccagcccgctccgatgacgagggccatgtccttgcagcagacgagcccacgcgggccccgcggaaaggaaaggccaccggcgataagccgagccccaccgttccctccggcgagggccggtcggcggacaagtggtgctcggtacacaacacttaccgccacagtctcgtcgactgctgctcggtcaagaatttggccgagcggttccgaaaggctgatgaggagaagcggcagggtcgacgggagggcaaagcccccgcgacctcaacaggtgaccggcgagaggaggccaaggacaaggcccccgccgatgatggcggagatggtgaggatctggatttccagatacctcaggggaccgtcgccacgctcgaccggggggggggggggggcttgcgctcacacctctcgccgaagcttcaaggccatgaggcgagagcttctggccgttgttcccacgcatgaggcggtccggaaggcgcgctggtcggaggtgaagctcacgttcgaccagagcgaccatccgacggtgctcgctcgggggggggggggggggaagttggccctggtggtctccccgaccatccacaacgtcaagatgaagagtgtgcaggtggatgggggggccagtctgagcatcatctccccggctgcctttgacgcgctcaaggccccggggatgaagctccagccgtcgctcccaatcattggcgttactccagggcacacgtggccgcttggccacgtagagcttccggtgaccttcggtgactccaccaacttccgcaccaagcggatcgacttcgatgtggcggacctcaatctgccctacaacgcggttctaggcagacccgcgttggtgaagttcatggtcgccacccactacgcctacctccagatgaagatgccgggtcctgctagtcccatcaccatctttggtgatgtcaaggtcgccctcgcatgcgcggagcagcgcgcagacaacctggtggtggccacggagccgcaggccccagaagcctttgcgtcccgcgcttccaagaagcgcctcacctcagctgacaagaaagtgcggcgtcaaacctcggagcggcaggccttcatcagggaggaagtggcacggctcctggaggctgatttcattcgcgaggggatccatccggagtggctggcaaacccggtggtcgtcccgaaggccaatggcaagctacggatgtgcatcgactacaccgacctcaactaggcatgccctaaagatcccttccctctaccatgcatagatcaaatagtcgactccactgcggggtgcgaccttttgtgttttctagatgcatactcggggtaccatcagattcgtatggctagggaagatgaggaaaaaaccacctttattactcctgtgggcaccttttgttatacaactatgccttttggattgaagaatgcaggccctacttttcagtgcatgactcgtattaccttaagtaatcagatagggtgcaatgtagaggcatatgtcgatgatctggtggtaaagacgcaccaccaggacacgttgctacaggacctggccgaaactttcgatagtcttaggtccatgcgcgtaaagctgaaccccgataagtgtgtgttcggcgtgccgacgggcaaacttctcggttttctaatctcttcccgaggcatagaagcaaatcctgagaaaatacgcgcgatagagaggatgcgcccccccagcaagcttagggatgtacagtgcatcactggatgcatggccgccctgagtcgatttatatcgaggctgggtgagagggcgctgtgtcacgctaagaaatttccaaataggattccaagcagaatatgcattaaacccctgtccaggaccggccagggtgcacaaacgacaatg

SEQ ID NO: 12015 - DNA, 381 bp, Oryza sativa
  Clone ID: PAT_MRT4530_18183C.1
ttattggccgaccgcattgcaagacgtccaagaatgagtccagcggtgcaaggcatgccagttccatgccaagcagacccaccagccggcccaggcccagcacttgtacgtcgccattgacaaatcactaagtggcccgaagcctacccagtcgtcaaaatcgacaagcattctgctcttaagttcatcaggggcatcacgtctcgattcggagtgccctccgagctttccctgggttcgcctcgtgtcgctctgtacaacgaggccaaccaagatgactttcgccgcgacgatctcgattctcttgaagaacggagaaggcgggtggccttgcgcgccgcccgctaccaacaaagcctgcgacgctaccatcagcgccat

SEQ ID NO: 12016 - DNA, 2419 bp, Oryza sativa
  Clone ID: PAT_MRT4530_18184C.1
taactgtgggtcccacgtgtcagttttttcacccttcttctccacccccctctctctctctctctcttcttcttcttgttcttcttcttcttcttcttctcctctcatctccgccggctgaacccgtgcggtggcggaggtgctgtggagcccccggcgcccacgccggactgcaacggcatcctgctcacctacaacttcgagggccgcgccaagatccggccctacgtggcggacaggaacaagcagccctactcgttcagggccaacgccaccgtgctcaactccgggacgcgcccgctcaagtcgtgggcgatgctcgtgacgttcgggtacggggagatcctcgtcggcgtcgatggcgccgtgctcaccggcggcggcgagatgccgtacaacaccacccaggacgccggcaacgcgacgtcgttctccggctacccgcagaccgacctcctcaccccgatcgccaccgcgggggacatctcgcagatccaggccaaggtcggcatcgtcggcacgctcttcgccgggccagggccgttcgtgccgctccccacggcgctgtcgctcgacgacccggcgtacaggtgcccccaggagaccaatgtttcctccggggtgctctccacctgctgcgtcctcaccccggaggcggaggccaacgccaccgtcatcaacgccaacgccaccgacccgaccaagaacttcctcccccgcggcaccggcgacctcgtcatcacctacgacgtgctccaggcctacccctcgagctacctcgcgctcgtcacgctcgacaacaacgccaagctcggccgcctcgacaactggcggctttcctgggagtggcggcgcggcgagttcatctactcgatgaagggtgcgtacccatcggagaaggacacgaccggctgcatctatggggcggcagggcagtactatcagagccttgatttctcccaggtgctcaactgcgacaagaagccggtgatccttgacctgcctctgtccaggtacaatgacactcagattgggaagattgaccattgctgcaggaatggcacaatcctgccgaagtccatggatgagacgcagtcaaaatcagccttccaattgcaggtgttcaagatgccaccggacctgaaccggacaaagctcttcccaccggccaatttcaagatcgccggtgcatcatcactgaacccagactacacctgtggccagccggtgcccgtcagtcccacagagttccctgatccaagcgggcttgattcaacgactctggcgatcgcgacatggcaggtggtttgcaacattaccacgagtaagggggcgaagccgaagtgctgtgtaaccttctcggcatactacaatgattcagtgatcccctgcaacacctgcgcctgtgggtgtccgtcgaaccagcggggtcctacttgcagcacgactgctcaatccatgctcctgccacccgaggcgctgcttgtgccattcgacaatcgcacacagaaggcattggcatgggccgagttgaagcactacaatgtgcctaagccaatgccttgtggtgattactgtggcgtgagcatcaattggcacatatctacagactacaacaagggctggagcgctcggatgacattgttcaattgggacaatgtcgacttggcaaactggtttgctgctattgtcatggacaaggcttatgatggttttgagaaggcgtactctttcaatagcacatcagttggcaagaacaccatcttcatgcaaggtcttgaggggctcaattacctggtgaagcagaccaacatgagtggatcagactaccttgtgcctgggaagcagcagtcagtgctctcattcaccaagaagctgactcctggcatcaatgttgttgctggagatggtttcccttcaaaggtcttcttcaacggcgacgagtgtgcaatgcctcagaggattccaatgagcaatagtggattcaggacccatctcagcagtgtcctctcactggttttggtcctggctgcttcggccttcgtattgcttcagcaataatcctggccgttgctccgattctttcattctttcaggtggttggatcgacgccatttgtaagaaacctttttgtttctggcggtttactagatgcgtaatggttgctatgtagcagaatctggcagcaattgtgcggcgagatgaacacatagggggaggaaacattgttgcagacttgcaacatagcatcaggatcactttcctgaatcctgatgatatttattactacatgtttacatcaagatgagtgatattgtacatctctgatttaagttggtgtagttgccaggaatgtcttatgtttagttatgttatatacaaaatacattttgccatcaaaaaaaaaaaaaaaataaaa

SEQ ID NO: 12017 - DNA, 455 bp, Oryza sativa
  unsure (1)..(455): unsure at all n locations
  Clone ID: PAT_MRT4530_18185C.1
ctggggggcgggttttttttttttttttttttttttggggtttttttttttttttttttgggagccgggcccacccaaattgcataattaacgatcccttggggggatacttttttggctagtaaaaaattaatttgctaaaaattaaaaacaatttggggtggggggaacttaaattttttttttaaattttccaccnttttggcaagaggtttattcaaaaaggcttatgcccaggtcaccatgggactcctcctggggcttttccttttttttttcctccttgggggccgttggagcagcaccccccctgtggggggcaactggggcaacaacagcgaacttgggggggtctttaaaatcccccttgatcttataagcttgggggtacaagttttcggtctccacagaaacagaaagcacatttttgtccccattgggaaacatgtgggggg

SEQ ID NO: 12018 - DNA, 846 bp, Oryza sativa
  Clone ID: PAT_MRT4530_18186C.1
atgggctccgcactcaccctgatgagcgtcggctatgagctcgatgccctgctctcgagaaatacacttcaagagtatcccgttggcggcatgatgagtattgccttcgagatacgcccggatgtcggtcatccacacgacctgacgaggggggtcagggttgaccccctcgggccccgaggggcgcgggtcgcctggagtcgggtcggtgggcgtgtcattggggtccctcaaagggctcggtcgcgccgatggttgcgcgagcctttcctcgaaggtccctggggggagtggggctcgtgccgacgcaacacgcgacaactcgtcagcaattgtgttgtcgcgtcggggcacgtgccggagctcaagtccgtcgaagtggcgtttcatgcgccgtacctcgcggacgtacgcttccatttacgggtcggtgcactgatactctttggatacttgatttacgaccagctgggagtctcccaagaccaggagacggtggatgcccattccggtcgccgccctcaatcccgcgaggagcccttcatattctgccatgttgttcgtggctcgaaagtcgagacgaacgacgtatttgaggacatccccgtttggcgaggtcagtgtgactccggcacctgcaccttgaaggttgagggagccgttaaaatgcataacccagtgcccgccgcgaatgtcggcgtttggatcctcttcttctccgggaagggaaaaggggacattggacggaacaggttcgtccaccggggtccattccgcgatgaagtcagccaggatttgacttttgatcacgtgccgcggtttgaagtgcagatcgaactcagctag

SEQ ID NO: 12019 - DNA, 273 bp, Oryza sativa
  Clone ID: PAT_MRT4530_18187C.1
atgagctatggctaccgcgacgtacgtcccgtcctcgtggacaaaggccgggatcgaggagtacacaccgagcgggacaggggagtacacaccgagcgggacaggggaggaggtgcagcatcgtacgtggagatcatcgtctgtggtccgactcggagatcgtccatggccaaagccaccgccggacgccgtcgttcgcgaacgtacgtcgtcgacacggtggtgttgcgagtgaaattcgaatttaaggattgcacgtttgcacccttcgat

SEQ ID NO: 12020 - DNA, 3663 bp, Oryza sativa
  Clone ID: PAT_MRT4530_18188C.1
atggttctccaactcctccccgctgcgaaccttcgcggagggaggatctcactcgttcgggtgattcggctctctctccgccccctggcggagggaggccgcgacgtgccgggacacgcccgccgtctcgactatggagatggcggttcgccccaaggcgcgcttcaggcagcaggcgcccttctgcggcatcccccggtgaacctggagccggagactcctgttcagcgttggctggacgacgtggccaacctggtcactactacccagcggcagttagccatgagtggccgatccgctgccgctggtacgtcgcgtacctcggtcaccctctcctcgtcggcaaggagaagggctcgtcgatcggccacgatctcgaggtggtccacggttctaacatcgtcaggggcctcggaaagccggaggcgtcatgacggcctctacgggacgcaggacgctcgaatcaacattgagcgacgccgagacgagcgccgagctgcccatgtcggggaaggcgcctcctcatctggagcgccacgctcctcttcacgaggcggccctccccccacactcacccctggggggacgggttgtagggcctttgtggcgagtctccggaatgtccggtggcccctgaagtttcgccccaaccttacggagaagtatgatggtagcatcaatccctccgagttcctccagatctacaccacggttatcgtggcggcaaggggtgacgaccgggtcatggcgaattactttcccatggccctcaagggtcaggcacgtggctggttgatgacccagcccctcggctccattcactcctgggaggatctgtgccagcagttcattacgaacttccagggcacatatccccgcacgggggaagaggcggacctacacgatgtacggcggaaggatgatgagtccctccgttcgtacatacagcgcttctgtcaggtccgcaacactattccgtgcattccagcccacgcggttgtatatgcattccggaacggcgtgcggcataatcgcattctggagaagatcgcctccaaggagcccaagaccactgccgagctcttcgagttggcggacaagcggcgagataggagaggcaaaaggaaaccagcccgctccgatgacgagggccatgtccttgcagcagacgggcccacgcgggccccgcgcaaaggaaaggccaccggcgataggccgagccccaccgttccctccagcgagggccggtcggcggacaagtggtgctcggtacacaacacttaccgccacagtctcgccgactgccgctcggtcaagaatttggccgagtggttccgaaaggctaatgaggaaaagcggcagggtcgacgggagggcaaagcccccacgacctcaaccggggggggggagttggccctggtggtctccccgaccatccacaatgtcaagatgaaatgtgtgctggtggatggaggggccagtctgagcatcatctcctcggctgcctttgatgcacttaaggccccagggatgaagctccagccgtcgctcccaatcattggcattactccgggacacacatggccgcttggccatgtagagcttccggtgacctttggtgactccaccaacttccgcaccgagcggatcgacttcgatgtgacggacctcaatctaccctacaatgcggttctgggcagacccgcgttggtgaagttcatggtcgccacccactacgcctacctccagatgaagatgccgggtcttgctggtcccatcaccgtccttggtgatgtcaagatcgccctcgcctacgcggagcagcacgcagacaacttggtggtggccacggagccgcaggccctagaagcccctgcgtcccgcgcttccaagaagcgcctcacctcggttgacgaggtgcctgtcaaggaaatcccccttggtgatccatccggagtggctggcgaaccggtggtcatcccgaaggccaacggcaagctacggatgtgcatcgactacaccgacctcaacaaggcatgccccaaagatcccttccctctaccacgcatagatcaaatagtcgactccactgcggggtgcgaccttttgtgctttttagatgcatattcagggtaccatcagattcgtatggctagggaagatgaggaaaaaactgcctttattactcctgtgggcaccttttgttatacaactatgccttttgggttgaagaatgcaggccctacttttcagcgcatgactcgtattaccttaagtaatcagatagggcacaatgtagaggcatatgtcgatgatctggtggtaaagacgcaccaccaggacacgttgctacaagatctggccgaaactttcgatagtcttaggtccacgcgcgtaaagctgaaccccgataagtgtgtgttcagtgtgccggtgggcaaacttctcggttttctagtctcttcccgaggcatagaagcgaatcctgagaaaatacgcgcgatagagaggatgcgcccccccagcaagcttagggatgtgcagtgcgtcactggatgcatggccgccctgagtcgatttatatcgagactgggtgagagggcgctgcccctattcaagctcctcaagcgctccgggccgtttgaaccattgctactctacttggccgcgaccccccatgtggtgagtgccgccctagtagttgagcgtgaggaaggcgaacgggaggccccttcggcttgcaatggcccctcatcccccgaaggcctagcgcccaaagtttccagcccccgggaggaccccgaggcccccaagggaggagcggaggctttggcaggtggccccgagccttatgatcccgaggcagtccgggatccccccgagacctccgaacaggcacgctccgagtcatcagcccctgacaacacgaactggccccgccgaaaggtgcagcggcccatctactttgttagcgaggcacttcgagatgcaaaaacccggtattcgcaggcccagaaaatgctttatgccgtcttaatggtctcaaggaagttgcgtcattacttccaagcgcatcgggtttccgtagtgacgacataccctcttggccaaattttgcacaaccgagagggtactggacgagtggtaaaatgggccatcgagctggctgagttcgatctgcacttcgaaccgcggcacgcgatcaaaagtcaaatcctggctgacttcatcgcggaatggaccccggtggacgaacctgttccgtccaatgtccctttttcccttcccggagaagaagaggatccaaacgccaacattcgtggcgggcactgggttatgcattttgacggctccctcaaccttcaaggtgcaggtgccggagtcacgctgacctcgccaaacggggatgtcctcaaatacgtcgttcgtctcaacttccgagccacgaacaacatggcagaatatgaagggctcctcgcgggattgagggcggcagccggaatgggcatccgccgtctcctggtcttgggagactcccagctggtcgtaaatcaagtatccaaagagtatcagtgcaccgacccgcaaatggaagcgtacgtccgtgaggtacggcgcatggaacgccacttcgacggacttgagctgcggtacgtgccctga

SEQ ID NO: 12021 - DNA, 943 bp, Oryza sativa
  Clone ID: PAT_MRT4530_18189C.1
gctagcacatctagcataggcaggtagctaatctgccgccaaaaatctcgagaaattaacctgtcacaattcggtcggcatcgatcgatccatattccacatccatggagagacccaagaagccagcgctgaggcggccggagacgaagacgacgacggtggcggcgatggacgtcaggaggatgtcgtcctcgctcaacatgtcatcgtcttctctccggagcagcggcggcgccgacgtcgaccggaggacgacgacggccacggtgaggttcgctccgactcccaccacgctgtcctcctcctcctcctcgtcggcgacgaggagagctggttcttcgcgtgcggtgtcgtcgtcctcgtcgtcgcagcaggcgaggccggcgaccgcacggccggcctccgttgctgggacgagggggatgaggagcctgcatggaggatcgccggcgacgttggggccgaaggggctgaggcggagctggggttggggaacaggtggcagcggcggcggaggcggcgatggggaggagaaggagggcggtgatcatcgccggcggggtgatgccgtcgccgtggccggcgaggtgaaggctccagttcggagtagctcggtgagttttagttttgcacctccgtttcaggttataagactttctagcattgttcacattcgtatagatgctatatgtatatagatttattaccatctatatgaatgtgaacaaggctagaaagtattataatatgaaatagagggaataattttttttttgtctttgattgaagttgtgttttttgaccagttcaaccaaaaacttaagttgatgaagaatttgtacatcgattcaaaatcgagacctcttactataaaatcgtattgagttgcatatatacggttcaatccaaattctcaagctgatgagaaaatacagttcccttt

SEQ ID NO: 12022 - DNA, 2028 bp, Oryza sativa
  Clone ID: PAT_MRT4530_1818C.1
atgaacgcgatgatcgcgaacagcggatgccgggcgatactggtcccggacgccgccatgacgatgacgatgatggagatcggcgccggaacaacaacggtgtacgacgagaggattcccgagaacccgggcgtcatcctcggaatcgagttggcaacaaggtggatcacaactactcgaagattgttcgagatcgtcgatcgatgcattcacgcagacgatgcactgagacgcaagaacgacaagccgaaaacggggggagagaagaaaccagccaaggacacacctgaatcaagcaagaagaaaagtagcaagagtgggaaaaggaaagctcaagcggaagtcctcgcgtcagaatacgagcgccctcccaagcacccagacacacaaggcaacgtcacgaagagaatatggtgccctatacacaagtcggtcagaaattctctgaaggattgcctagtcttccaaaagtcgttggaaaagcaactggcattagagaagggcaagcgagtacgtgtagtcgagaaggccgttgaggcaaccactcaggactcggactcggcacacccagattccgatctccatgtctcgcacatgttcgaaggttccacgatgtactcctcaaagcgagaatacaagaaagtggagcgtgaagattgttcgacatggcagggggctgcacccaagatgaagtggtccgaacagaagattgagttctcagatgaggaccatcctaaggctgctgtcatcccaggacgatatccgatcatggtgcacaaagactacaagtgctctagcccagagttattcaagtacctcgcggaggtcaggaagctggaaaaaagatttgatggaatcgaggtccgacatgtataccgcaaggacaatatcgaaccagacgatctggcgcggcgtgcgtccagacgggagccactagaacctagcacctttctggacgtcctgacaaagccatcggtgaaagagtcaaacgacgaaaataacatagtcgccttcgacatcagcttgggggctacagagggtggctacaaattcctgttcgtggcgatcgacaagttcaccaaatggatcgaagcaacactcacaggggaaatcaaggccgacaacgccatcaaattcattaaagggatattttgcagatatggattgcctcaccgcatcataacggacaacggcacccagttcatcagtgccgacttccaggattactgcattggactgggagtcaagatctgcttcgcttcggtctctcaccctcagagcaatggacaagtcgagagggcaaacggcatagtactacaaggaatcaagacccgtgtctacgacagactcatgtcacatgacaagaagtgggtcgaagaactcccttctgtactttgggacgtgcgcatcacaccgacaacgtccaacaaggagacacatttcttcctcgtgtacggctcagaggccatgctccccaccgagctacaatatcagagtacacgagtacagaagtactccgacgaggatcaggaggaacaacgaaatgatgatgtgaacctactcaaggaacatcaagaacgagttgccgtcagagcagctagctaccaacaggctcttcgtcaataccacaagaagcgcatccgagcacacggcgatggtcgcgagttggcaaattcttggaacattgatcaattacactatggccatggttttgcaacaactcctgaggtacgagttgaaccacacctcgcgacctcggagtgcttccagggcccggtgcttcttgacttccagcatagtcctctcgagttcggcgacctcaaacttcatcctccagtactggatgcgacgatcacgatcggcaagcgcactcacaagattctggtccacgtcgtcctgcggcacatatggctcgagcgcaagtgccggaacgattacaggcaactcaggctgcccgcgctgctggacatcctcgacatctacatctgtacaaacaacaacacaaagtacccggaatcaaaatgctaa

SEQ ID NO: 12023 - DNA, 627 bp, Oryza sativa
  unsure (1)..(627): unsure at all n locations
  Clone ID: PAT_MRT4530_18190C.1
agcgaccatccgacggtgctctctcgggggggggggggggagttggccctgttggtctccccgaccatctacaatgtcaagataaagcgtgtgctggtggatggcggggccagtctgagcatcatctccccggctgcctttgacgcgctcaaagccccggggatgaagctccagccgtcgctcccaatcattggcgttactccggggcacacgtggccgcttggccacgtagagcttccggtgaccttcggcgactccaccaacttccgcaccgagcggatcgacttcgatgtggcggatctcaatcatccctacaacgcggttctgggcagacccgcattggtgaagttcatggccgccacccactacgcctacctncagatgaagatgccgggtcctgctggtcccatcaccatttttggtgatgtcaaggtcgccctcgcctgcgcggagcagcgcgcagacaacctggcggtggccacggagccacaggcccccgaggcctctgcgtcccgcgcttccaagaagcgcctcacctcggctgacgaggtgccagtcaaggaaatcccccttggcaacgatccgtccaagaccgccaagattggcggaaccttggacgccaaatag

SEQ ID NO: 12024 - DNA, 5240 bp, Oryza sativa
  Clone ID: PAT_MRT4530_18191C.1
atggtcaaggtcctggaagtagaggaggaggcggtggcgtttactcccacctcgtccgggagtggggattccggcgcgagccgaggtcctcgtgaccgtcgccatgattctccaactcctccccgccgcgaaccttcgcggagggaggatctcactcgttcaggtgattcggctctctctccgccccctggcggagggaggccgcgacgtgccgggacacgccgccgtctcgactatggagacggcagttcgccccaaggcgcgctttaggcagtaggcgcccttctgcggcatcccccggtgaacccggagccggagactcctgttcagcgttggctggacgacgtggccaacctggtcactactgcccagcggtagttagccatgagtggccgatccgctgccgctggtacgtcgcgtacctcggtcaccctctcctcgtcggcaaggagaagggcttgtcgatcggccacgatctcgaggcggtccacggttctaacatcgtcaggggcctcggaaagccggaggcgtcatgacggcctctacgggacgcaggacgctcgaatcaacatcgagcgacgccgagacgagcgccgagctgcccgtatcggggaaggcgcctcctcatctggagcgccacgctcctcttcacgaggcggccctccccccacactcacccctggggggacgggttgtagggcctttgtggtgagtctccggaatgtccggtggcccccgaagtttcgccccaaccttacggagaagtatgatggtagcatcaatccctccgagttcctccagatctacaccacggttatcgtggcggcagggggtgacgaccgggtcatggcgaattactttcccatggccctcaagggtcaggcgcatggctggttgatgacccagccccccagctccattcactcctgggaggatctgtgccagcagttcattacgaacttccagggtacatatccacgcccgggggaagaggcggacctacacgctgtacggcggaaggatgatgagtccctccgttcgtacatacagcgcttctgtcaggtcggcaacactattccgtgcatcccagcccacgcggttgtatatgcattccggaacggcgtgcggcataatcgcatgctggagaagattgcctccaaggagcccaagaccactgccgagctcttcgagctggcggacaaggtggcccggaaggaggaggcatgggcctggaactctcccggcaccagtgcggcggctgcggctacccccgaatctgccccccgctctaagcggcgagataggagaggcaaaaggaaaccagcccgctccgatgacgagggccatgtccttgcagcagacgggcccacgcgggccccgcgcaaaggaaaggccaccggcgataggccgagccccaccgttccctccggcaagggccggtcagcggacaagtggtgctcggtacacaacacttaccgccacagtctcgccgactgccgctcggtcaagaatttggccgaaagtttccgaaaggctgataaggaaaagcggtagggtcgacgggagggcaaagcccccgcgacctcaaccggtgaccggcgaggggaggccaaggacaaggcccccgccgatgatggcggagacgggaccgtcgccacgctcgacgggggggtttgcgctcacgcctctcgccgaagcttcaaggccatgaggcgggagcttctggccgttgttcccacgcatgaggcggtccggaaggcgcgctggtcgggggtgaagctcacattcgaccagagcgaccatccgacgaccccggggatgaagctccagccgtcgctcccaatcattggcgttactctggggcacacatggccgcttggccatgtagagcttccggtgaccttcggtgactccaccaacttccgcaccgaacggatcaacttcgatgtggcggacctcaatctgccctacaatgcggttctgggcagacctgcgttggtgaagttcatggtcgccacccactacgcctacctccagttgaagatgctgggtcctgctggtcccatcaccgtccttggtgatgtcaaggtcgccctcgcctgcgcggagcagcgtgcagacaacctggcggtggccatggagccgcaggccccagaagcctctgcatcccgcgcttccaagaagcgccttacctcggctgacgaggaagacgcgcttgtctccttcttgcgggcgaattctgacgttttcgcatggaagccgtcagatatgcccggggtccccagggaggtgatcgagcaccgccttgccgtgcggccggatgcgcgacctatccggaagaaagtgcggcgtcaagccccggagcggcaggccttcatcagggaggaagtggcgtggctcctggaggctaatttcattcgcaaggtgatccatccggagtggctggcgaacccggtggtcgtcccgaaggccaatggcaagctacggatgtgcatcgactacaccgacatcaacaaggcatgccccaaagatcccttccctctaccacgcatagatcaaatagtcgactccactgcagggtgcgaccttttgtgctttttagatgcatactcagggtaccatcagattcgtatggctagggaagatgaggaaaaaaccgcctttattactcctgtgggcaccttttgttatacaactatgccttttgggttgaagaatgcaggccctacttttcagcgcatgactcgtattaccttaagtaatcagatagggcacaatgtagaggcatatgtcgatgatctggtggtaaagacgcaccaccaggacacgttgctacaggatctggccaaaactttcgatagtcttaggtccacgtgcgtaaagctgaaccccgataagtgtgtgttcgtagttgagcgtgagaaaggcgaacgggaggctccttcggcttgcaatggcccctcgtcccccgaaggcctagcgcccaaagtttccagcccccgagaggaccccgaggcccccaagggaggagcggaggctttggcaggtggccccgagccttatgatcccgaggcagttcgggatccccccagacctccgaacaggcgcgctccgaagcatcagcccctgacaacacgaactggccccgccgaagggtgcagcggcccgtctactttgttagcgaggcacttcgagatgcgaaaacccggtatccgcaggcccagaaaatgctttatgccgtcttaatggcctcaaggaagttgcgtcattacttccaagtgcatcgggtttccgtagtgacagcatacccttcttggccaaatgttgcacaaccgagagggtactggacgagtggtaaaatgggccatcgagctagctgagttcgatctgcacttcaaaccgcggcacgtgatcaaaagtcaaatcctggctgacttcatcgcggaatggaccccggtggacgaacctgttccgtccaatgtccccttttcccttcccggagaagaagaggatccaaacgccgacattcgcggcgggcactgggttatgcattttaacggctccctcaaccttcaaggtgcaggtgccggagtcacactgacctcgccaaacggggatgtcctcaaatacgtcgttcgtctcgactttcgagccacgaacaacatggcagaatatgaagggctcctcgcgggattgagggcggcgaccggaatgggcatccaccgtctcctggtcttgggagactcccagctggtcgtaaatcaagtatccaaagagtatcagtgcaccgacccgtaaatggaagcgtacgtccgcgaggtacggcgcatgaaacgccacttcgacggacttgagctccggcacgtgccccgacgcgacaacacaattgctgacgagttgtcgcgtgttgcgtcggcacgagccccactccccccagggaccttcgaggaaaggctcgcgcaaccatcggcgcgaccgagccctttgagggaccccaatgacacgcccaccgacccgactccaggcgacccgcgcccctcggggcccgagggggtcaaccctgacccccctcgtcaggtcgtgtggatgaccgacatccgggcgtatctcgaaggcaatactcatcctgaggatcacgcagaagctgaaaagctcgcgcgcatctccaaacggtacgtccttatagaagggaccctataccgacatgccgccaacgggatactcttgaagtgtatttctcgagagcagggcatcgagctcatagccgacgctcatcaggacatccttgggccattcaaggcggctcgaggcgggtatcagcacttgtacgtctccatcgacaaattcaccaagtggcccgaggcctacccagttgtcaaaatcgacaagcattctgctcttaagttcatcaggggcatcacgtctcgattcggagtgcccaaccgtatcattacagacaacggcacccagttcaccagtgagctgtttggcgattactgtgacgacatgggtatcaaattgtgctttgcctcacccgcccaccccaagagcaacggccaagtcaagcgagccaacgccgaaatcctcaaaggactcaagaccaagacgtacaacgtcctgaagaagcacggggattcatggcttgaggagttgcccgccgtgttgtgggcaaatcggaccactccaagccgcgccacgggcgaaacaccatttttcttggtgtacggcgctgaagcggtcctaccctccgagctttccctcgggtcgcctcgtgtcgcattgtacaacgaggccaaccaagatgaccttcgccgcgacgatctcgattatcttgaagaacggagaaggcgagcggccttgcgtgccgcgcgctatcaacaaagcctgcgacgctaccatcagcgccacgtccgggcccgatcactacaagttggcgacctcgtcctacgccgcgttcagtcgctcctggggctaagcaagctctcgccaatgtgggaagggccatacaaagtgatcgaagtgccccggccaggctccgttcggttaaccatggaggacggcacagagctgcccaacccctggaatatcgagcacctccgtcgtttctatccatgacatcgagattttttgctttcctggagcacgggccagcccccgcacaacccctcggtttgtgcgggactggccgggggctaccactgtgtatccttttacaagcaatgaatttttctactttttcg

SEQ ID NO: 12025 - DNA, 1404 bp, Oryza sativa
  unsure (1)..(1404): unsure at all n locations
  Clone ID: PAT_MRT4530_18192C.1
cggtggggcctgctgaagtttggcgccttcgcggcggtgtgcggggctctcggcgccgccgggtactccagctacgcttatacgcttgaggaggtggatcagaagacgcgggagttcaggaaggccatgactacgccgcgccccgttgcggaggacgcctctgaatttgaggtggtcccggctttggttttcccggcggccatctccgcgcctgttgcagcgatggttgcctacttggccgttggtcccacattggagctcgggattcggggctctccggggcccgcgtcggacggtccgcttcccgcccgtgctccgctttttcggcttttcccctctctagttcttgatctgaatgaaacactcgtttactctgattggctgcgtgaaagaggatggaggacttttaagaggccaggagttgatgcttttatagaacacatggggaaattttatgaagttgttgtgtattctgatcagatgcctatgtatgttgatcctgtgcttgaaaggctggacacaaagggtttcatcacaggcaggttgtcaagacctgcaactaagtatcaagatggtaaacattatcgggatttgtcaaagttgaatagaaatcctgcacaagttatttacatcagcagccacgctcttgaatcttgcttacagccagaaaattgtgttcaaatcaaaccttggaaacttgaaactgatgacacccagctgctggatctgatcccatttctagagtatgttgcccatggtgagaccttctgatattaggactgtgcttgcttcctatcaaggtcgtgatgttgctgcagagtttatcgagcgttcaaaggaacnccagaggcgtatgcaagagcaaaaacaacatgggcgtatatggagacaataatggacctaatctgcaggaaggatgaagctccaattgattcatctatcctagttttttgcctttattttttttttcggaaggacgtatttagcctgttccaagcacctcaagtcaagttgttgactgcgatgaaaaattgaaatgataacatgtagtattgtcagattaggttgcaaacatttagctaaatatcaacgttcaaaccaccattttgtagtgcaaggatgcaagattgaccatcttagattgaccgcctttttcttcaagaacatcgctgaatattttcagtgctgtgcgtgctactactaaattagttgcatgccagtagctctcagcatgcgctgaaattttgctttcttgcatatttgctgataatagcatcttctgaggtgtgaaaaaacaaaacgtattcggctggcaacagctgtttcagcctggatcttttttttttttggttgtaaattagtatattgcatgatctgcatgaattcctaagctttatttgtttt

SEQ ID NO: 12026 - DNA, 805 bp, Oryza sativa
  Clone ID: PAT_MRT4530_18193C.1
atgtcataccctcttggccaaattttgcacaaccgagagggtactggacgggtggtaaaatgggccatcgagctggctaagttcgatctgcacttcgaaccgcggcatgcgatcaacagtcaaatcctggctgacttcatcgcggaatggaccccggtggacgaacctgtcccatccaatgtccccttctcccccgtagaagaagagaatccaaacgccgacattcgcggcaggcacaggattatgcatttcgacggctccctcaaccttcaaggtgcaggtgccggagtcacgttgacctcgccaaacggggatgtcctcaaatacgtcgttcgtctcaacttccgagccacgaacaacatggcagaatatgaagggctccttgcaggattgagggcggcagccggaatggacatccgccgtctcctggtcttaggtgactcccagctggtcgtaaatcaagtatccaaagaatatcagtgcaccgacccacaaatggaagcatacgtctgcgaggtacggcgcatggaacgccacttcgatggacttgagctccagcacgtgccccgacgcgacaacacagttgctgacgagttgtcgcgtgttgcgtcggcacgagccccactccccccggggactttcaaagaaaggctcgcgcaaccatcggcgcgaccgagtcctttgaaggaccccaacgacgcgccctccgacccgacctctggcgacccgcgcccctcggggcccgagggggtcaaccccgacccccctcgtcagggcatcgagctcatagccgacgcccatcagg

SEQ ID NO: 12027 - DNA, 1212 bp, Oryza sativa
  Clone ID: PAT_MRT4530_18194C.1
atgaacacaagcatgatacactggcatggctgcacctgcaaaaaattactgaagaaacaaaacttacctgctatcacagatgcaatattccaattgtctgtagcagcagttcaaggttcacatgtcaaagtaattgcagctacatcatcggttaccgcatttgttgttcttttatcaatggtagccattgcactttatctttcactgaagacaagatataacgaagagatacacatgaaggtagaaatgtttctcaaaacgtatggcacatcaaaacccacaaggtacactttctccgaagtgaagaagatagcaagacggttcaaggttaaagtaggacaaggaggatttggaagtgtgtacagaggcgagctaccaaatggagtccctgtggcggtcaagatgctagaaaatccaaaaggagaaggagacgaattcatcaatgaggtcgcgactatcgggagaatccatcatgcaaacattgtccgcctccttggcttttgctcagaaggaacaaggcgggctctcatttacgaatacatacccaatgattcgctggagaaatatatattttcacatgattctaatacttctcaagaactcctagtaccaagcaagatgctagatattgctttaggcattgcccgaggaatggagtacctgcatcaaggatgtaaccagcgtatcctccactttgatatcaaacctaacaacatcttgctggactataacttcagcccgaagatttcagactttggccttgcaaagctgtgtgcaagggaccaaagcatcgttaccttgactgcagcaagaggcacgatgggctatattgcaccagagctatattctcggaactttggggagatatcttacaagtcagatgtttacagtttcggcatgctggtactagaaatggtcagtggaaggaggaattcagacccaagtgttgaaagccaaaatgaggtttacttcccagagtgtatctatgaacaggttaccactgggcgggatttggaacttggtagggaaatgactcaagaagagaaagaaacaatgagacagctggccattgtggcactatggtgcattcaatggaacccaaagaaccggccatcaatgacaaaggtggtgaacatgctaacagggaggttgcagaatctacatgtgccacctaaaccatttttctcagctgatagccatcctataatgtaa

SEQ ID NO: 12028 - DNA, 2846 bp, Oryza sativa
  Clone ID: PAT_MRT4530_18195C.1
atggtcgaggtcctgaaagtagaggaggaggcggtggcatttactcccaccctgtccgggagtggggattccggcgagagccgaggtcctcgtcaccgtcgccatggttctccaactcctccccgccgcgaaccttcgcggagggaggatcccactcgttcaggtgattcggctctctctccgccccctggcggagggaggccgcgacgcgccggggcacgctgccgtctcgactatggagacggcggtttgccccaaggcacgcttcaggtagcaggcgcccttctgcggcatcccccggtaaacccggagctggagactcctgttcagcgctggttggacgacgtggccaacttggtcactactacccagtggcagttagccacgagtggccgatccgctgccgctggtacgtcgcgtacctcggtcaccctctcctcgtcggcaaggagaagggctcgtcgatcggccacgatctcgaggcggtccacggttccaacatcgtcaggggcctcggaaagccggaggtgccatgacggcctctacgggacgcaggacgctcgaatcaacatcgagcgacgccgagacgagcgccgagctacccgtatgggggaaggcgcctcctcatctggagcgccacgctcctcttcacgaggcggccctccccccacactcacccctggggggacgggttgtagggcctttgtggcgagtctccggaatgtccggtggcccccgaagtttcgccccaaccttacggagaagtatgatggtagcatcaatccctccgagttcctccagatctacaccacggttatcgtggcggcagggagtgacgaccgggtcatggcgaattactttcccatggccctcaagggtcaggcgcgtggctggttgatgacccagccccccggctccattcactcctgggaggatctgtgccagcagttcattacgaacttccagggcacatatccccgcccgggggaagaggtggacctacatgctgtacggcggaaggatgatgagtccctccgttcgtacatacaacacttctgtcaggtccgcaacaccattccgtgcatcccagcccacgcggttgtgtatgcattccggaacagcgtgcggcataatcgcatgctggagaagatcgcctccaaggagctcaagaccactgccgagctcttcgagctggcggacaaggtggcccagaagaaggaggcatgggcctggaactctcccagcaccgcagacgggcccacgcgggccccgcgcaaagaaaatgccaccgtcgataggccgagccctaccattccctccggcgagggccggtcggcggacaagtggtgctcggtacacaacacttaccgccacagtctcgccgactgccgctcggtcaagaatttagccgagcggttccgaaaggctgatgaggaaaagcggcagggtcgacgggagggcaaagcccccgcgacctcaaccggtgaccagcgaggggaggccaaggacaaggcccccgccgatgatggcggagacggtgaggatctggatttccagatacctcaggggaccgtcgccacgctcgaccggggggggggggcttgcgctcacacctctcgccgaagcttcaaggctatgaagtgggagcttctggccattgttcccacgcatgaggtggtccggaagatgaagatgccgggtcctgctggtcccatcaccgtccttggtgatgtcaaggtcgccctcgcctgcgcggagcagcgcgcagacaacctggcggtggccacggagccgcaggccccagaagcctctgcgtcccacgcttccaagaagcgcctcccctcggctgacgagccgtcagatatgcccggggtcctcagggaggtgatcgagcaccgccttgccgtgcggccggatgcgcgacctgtccggcagaaagtgcggcgtcaagccccggagcggcaggccttcatcagggaggaagtggcgcggctcctggaggctgatttcattcgcgaggtgatccatccggagtggctggcaaacccggtggtcgtcccgaaggccaatggcaagctacggatgtgcatcgactacaccgacctcaacaaggcatgccccaaagatcccttccctctaccacacatagatcaaatagtcgactccactgcggggtgcgaccttttgtgttttctagatgcatactctggataccatcaaattcgtatggctaggaaagatgaggaaaaaaccgcctttattactcctgtgggcaccttttgttatacaactatgccttttggattgaagaatgcaggccctacttttcagcgcatgactcgtattaccttaagtaatcagatagggcacaatgtagaggcgtatgtcgatgatctggtggtaaagacgcaccaccaagacacgttgctacaggacctggccgaaactttcgatagtcttaggtccacgcgcgtaaagctgaaccccgataagtgtgtgttcggcgtgccggcgggcaaacttctcggttttctagtctcttcccgaggcatagaagcaaatcctgagaaaatatgcgcgatagagaggatgcgcccccctagcaagcttagggatgtgcagtgcgtcactggatgcatggccgccctgagtcgatttatatcgaggctgggtgagagggcgctgcccctattcaagctcctcaagcgctccgggccatttgtatggacggaggaagctgagcaagctctcaatcagctgaaagcttacctaacttccctcccgtcttggtggccccgggaccggaggaaccattgctactctacttggccgcgaccccccatgtg

SEQ ID NO: 12029 - DNA, 1992 bp, Oryza sativa
  Clone ID: PAT_MRT4530_18196C.1
atgagaggatttcttgcagcaaccctcctggtgttgagccttcttctcaacctgcacacagcagcgtcagtgtcagcgtgggaagacaaggatttcttcagctactgcccgccgtcgaggtgcggcgagcatggccccgagatcaggttccctttcaaacttgaatccaaaaatacaccatcgtcatgtggcgtgccatgcatgaagctatcatgctctggccaatataccatcctacataacaaataccttggaaggccatacaagttgaccgccatagattacaagcatgctctcctgaccgccgtcccgctcgcagacgaagacaactactcctcaccgtctccctgcccacttctaaaatccatatctatcaggccaaacttaataacagggccaggctatggttattacaacacagggtaccagaacccttgccaaacatacgatacctactatgcagcactagtaagctgttcaacagaatttgccctagctagtgtccctggcactgccaccgataacgattatattgctggccccatctcttgccttagcaaccaaacccacttctcctatttggtggcttatcgtgtaactatgtctcttcttccgttggactgcgaggtcatctcagatggccccattccgataccagctttttattactccggttatatcccatccatgttcacaacaagtgcagacagaatcctcgactatccttccggttatgtcttatccacgttcagagaaagtgcagaaagaatcctcaattcttctgagaccatgatctggtggtatttctacaagtacgatggcagacattgtgaacaacaaggccgacgctgcgcattcagctcacaaaggaatcaaacattctgcatgggtagaggttcacatgtcaaagtaatagcagctacatcttcggttgctgcatttgttattcttctgttgatggtggccactgcactatatctttcactgaggacaagatataatgaagagatacatctgaaggtagaaatgtttctcaaaacatatggcacatcgaaacccacgaggtacactttctccgaagtaaagaagatagcaagccggttcaaggttaaagtaggacaaggtggatttggaagtgtgtacagaggtgagctaccaaacggagtccctgtggtggttaagatgctagaaaactccaaaggggagggagatgaattcatcaatgaggttgcaactatcgggagaatccaccatgcaaacattgtccgcctccttggcttttgcttagaaggaacaaggcgggctctcatttacgaatacatgcctaacgattcgctggagaaatatatattttcacatgattctgatacttctcaagaagtcctagtgccaaacaagatgctagatattgctttaggcattgcccgaggaatggagtacttgcatcaaggatgcaaccagcgtatcctccactttgatatcaagcctcataacatcttgctggactataacttcagtccgaagatttcagactttggccttgcaaagctgtgtgcaagggaccaaagcatcgttaccttgactgcagcaagaggcacgatgggctatattgcaccagagctatattctcggaactttggagagatatcttacaagtcagatgtttatagtttcggcatgctggtgttagaaatggttagcggaaggaggaactcagacccaagtgttgaaagccaaaacatggtctacttcccagaatggatctatgaacaggttaccgctgggcaggatttggcacttggtagggaaatgactgaagaagagaaagcaacaacgagacagctggccattgtggcactatggtgcattcagtggaacccaaataaccggccatcaatgacaaaggtggtgaacatgctaacagggaggttgcagaatctacaggtgccgcctaagcagtttttctcagctgacagccatcctactctgtaa

SEQ ID NO: 12030 - DNA, 428 bp, Oryza sativa
  Clone ID: PAT_MRT4530_18197C.1
gttgctgcaacctccccgccgccgccgccggcggcattcctccccccgcccgggggaaccaccaccgccgcgccatgcccatctcctccttgttcttcttcttcctcctcctgcagcaggaggacccctactagattcttcttctccctcttttgtcttctttcttggtacggcggcggaggaggagccgatgggcagcctttgctccaaggacagcgtcgccgaggagctcacgccgcagccgccgcctgctgcggcagcggcggcggcgcccgtggggaggctgcagaagacggagagccagtcgttgaagcagctcatcacgctcaccgccaaggaggacgccgcggtggtcgcccccgtcgtgcacgccgtcatcacccgggcggagtccaacgccaaggccaagtccaacgccaaggccaagt

SEQ ID NO: 12031 - DNA, 1926 bp, Oryza sativa
  Clone ID: PAT_MRT4530_18198C.1
atgcacacagaaaataggatgagaggatttcttgcagcagccctcctggtgtttggcattcttctcaacctggacacagcagcgtcagcgtgggaagacaaggatttcttcagctactgcccgccgtcgcggtgcagcgagcatggccccgaggtcaggttccctttccaactcgaatccaacaatactacacaatcctcatgcggcttaccattcatgaagctatcatgctctggccaagataccatccttgataacaaatgccttggaaggccatacaaggtgactgccatagattacaagcatcctgtcctgacagccgtcccgctcgcagacgaaggcaactcatcgtctccttgcccgcttctgaaatccatatctatcaggccaagcttaaaagcagacaatggttatcactatatgatgtaccagaaacctagcgaaacatacgttgaacactattatgcagcactagtaagctgttcgacagagtttgcaccagctagtatccctgatgccaccgatgatattgttggccccatctcttgccttagcaaccaaacccacctctcctatctggtggaagttcatgcatctatgtctcttcttacattggactgcgaggtcatctcagatggccccattccgataccagtttttcattactccatttatgacttgcccacgttcagaggaagtgcagaaagaatcctcaatttctctgataccacggtctggtggtatcgctacgattgcccacagtgtgaacaactgggaggacgctgcgcattcagctcgcaaaggaatcaaacattctgcatgcgtcgaggttcacatgtcaaagtaattgcagctacatcatcggttgccgcatttgttgttcttttgttgatggtggccactgcactctatctttctctgaagacaagatataacgaagagatacatctgaaggtagaaatgtttctcaaaacatatggcacatcgaaacccacgaggtacactttctccgaagtaaagaagatagcaagacggttcaaggttaaagtaggacaaggaggatttggaagtgtgtacagaggtgagctaccaaatggagtccctgtggcggttaagatgctagaaaattccgaaggggagggagatgaattcatcaatgaggttgcaactatagggagaatccaccatgcaaacattgtccgcctccttggcttttgctcagaaggaacaaggcgggctctcatttacgaatacatgcctaatgattcgctggagaaatatgtattttcacatgattctgatacttctcaagaagtcctagtaccaagcaagatgctagatattgctataggcattgcccgaggaatggagtacctgcatcaaggatgtaaccagcgtatcctccactttgacatcaagcctaacaacatcttgctggactataacttcagtccgaagatttcagactttggccttgcaaagctgtgtgcgagggaccaaagcattgttaccttgactgcagcaagaggcacaatgggctatattgcaccagagctatattctcggaactttggagagatatcttacaagtcagatgtttatagttttggcatgctggtgttagaaatggttagcgggaggaggaactcagacccaagtgttgaaagccaaaacgtggtctacttcccagaatggatctatgaacaggttaacagtgggcaggatttggcacttggtagggaaatgacacaggaagagaaagaaacggtcagacagctagccattgtagcgttatggtgcattcagtggaacccaaagaaccggccatcaatgacaaaggtggtgaacatgctaacagggaggttgcagaatctacaggtgccgcctaagccgtttttgtcaactgatagctatcctgtgctgtaa

SEQ ID NO: 12032 - DNA, 270 bp, Oryza sativa
  unsure (1)..(270): unsure at all n locations
  Clone ID: PAT_MRT4530_18199C.1
gacccagcgnccgcgagacttttggcgcgcaacacaagggggcagcaagggggcaagcgcagggaagccgacgagcggcaggccccgagggggcagaccggaggacgacgccggacgccagcgaagggcacgaggngaaacacgccgggcggcaccccagagaggagaaccatagccagagcgaccgcgaagccagaggggggcggggnggaggcgcgcaagcgacacggacgagcgaaccggccccgcgaccggccggcaggggcgaag

SEQ ID NO: 12033 - DNA, 882 bp, Oryza sativa
  Clone ID: PAT_MRT4530_1819C.1
atggggccagataaaatttcattaaatactttgcttaattctataattcctagatttttctgggatttatttgagctaaggaacgccctagcgccgtgtaacctagcgccgccgtcgccgccgccgctccagccgtgcgccgccgccgttccagccgtcgtcgtcgctcgggaagaccgccgtcgtggtcgccaagtcgccgccgtcctcgtccgccccttcgccgtcgccgaagatcaccggagcaccgtcgccgccgtcgactcgaagaccgccgccgtttcaacctcgccgccgtcgccgtccgttgatcttccgccgctcttctggtcgccgccgttcgccggcgagcgtgcgccgtccgagctgtcgagccgccgagccgtcgccgccggtggtgacgtcaccgccgacgtcatcgtcgccctctcccctcgcgacgtcgctctctctctctccgccgtcgccgccgagctccggtccaccgccatcgtcaccccggaccgcctcccgcctcggcgtcgcctccttcggcttcgccgcgtcctcgccgacctcgtccacccttccgtttcgcccgccgaccgccggaacgccgccgtcctcgtcaacccgagccgcgccgccgccttcctccgctccggtcgccgttcccgtcgtcgccgtcgacccggggtgagccgtggaccgcccatttcgtttcccccttccctcccctctctcgggcgccgctccgccgcgccggtggtcgccggcggcgaccatcggggcgcgggcgcgccgcctcccgtcggctgtgccggcgaggccgccttcgggcgcgccccgcggctgccatgtggggcccggccgtcagccgcccgcgccctcgggtgcggctga

SEQ ID NO: 12034 - DNA, 129 bp, Oryza sativa
  Clone ID: PAT_MRT4530_181C.1
atggggggtagcgtgcccgtgccccgtcctgtgtcgggcagcgtgggggcaagggatgtctcccgtgtcagacgggagacggcgcttggacccacctcggagcaagcagccacattgcttccggtctaa

SEQ ID NO: 12035 - DNA, 1911 bp, Oryza sativa
  Clone ID: PAT_MRT4530_18200C.1
atgggaggatttcttgcagcagccatcgtggtgttcagccttcgtctcaacctggacacaacagcgtcagcgtgggaagacaaagatttcttcaaatctttccaacttgaatccaacaatactacaccatcctcatgcggcttaccatgcatgaagctatcatgctctggccaagacaccatcctactagatactaacaaatactaccttggaaggccatacaaggtgaccgccatagattacaagcaaggtctcctgaccgtcatcccgctcgcagacgaagaaaactcctcatcgtctccctgcccgcttctaaaatctatcaggccaagcgtaataacaggcaatccttattacgatatagggttcgagaacccttgcagactatacgatgcaccctattatgcagcactagtaagctgttcaacagaatttgcattagccagtgtccctggccctgctaccgataacgattgtattgctggccccatctcttgccttagcaaccaaacccacttctcctatctggtggctgtttatgttactatgtcttttcttccgttggattgtgaggtcatctcagatggcctcattccgataccacgtttttattactccgattattcctcatccacgttcagaaaaagtgcagaaagaatcctcaatttctctgataccacgatctggtggtttaacgacgattgctcacacccagcacagtgtgaagaacagggaggacgctgcgcattcagctcgcaaaggaatcaaacattctgcatgcgtccaggttcacatgccaaagtaattgcagctacatcatcggttgccgcatttgttgttcttttgttgatggttgccactgcactctatctttctctgaagacaaaatataacgaagagatacatctgaaggtagaaatgtttctcaaaacctatggcacatctaaacccacgaggtacactttctccgaagtaaagaagatatcaagacggttcaaggttaaagtaggacaaggtggatttggaagtgtgtacagaggtgagctaccaaacggagtccctgtggcggttaagatgctagaaaactctgaaggggagggagatgaattcatcaatgaggttgcaactattgggaggatccaccatgcaaacattgtccgcctccttggcttttgctcagaaggaacaaggcgggctctcatttacgaatacatgcctaatgattcgctggagaaatatattttttcacaagattctgatacttctcaagaactcctagtaccaagcaagatgctagatattgctttaggcattgcccgaggaatggagtacctgcatcaaggatgtaaccagcgtatcctccactttgatatcaagcctaacaacatcttgctggactataacttcagcccgaagatttcagactttggccttgcaaagctgtgtgcaagggaccaaagcatcattaccttgactgcagcaagaggcacgatgggctatattgcaccagagctatactctcggaactttggagagatatcttacaagtcagatgtttatagtttcggcatgctggtgttagaaatggttagcggaaggaggaactcagacccaagtgttgaaagtcaaaatgtggtctatttcccagaatggatctatgagcaggttaccattgggcaggatttagaacttggtagggaaatgactgaagaagagaaagcaataatgagacagctggccattgtggcactgtggtgcattcagtggaacccaaagaaccggccatcaatgacaaaggtggtgaacatgctaacagggaggttgcagaatctacaggtgccacctaagccgtttttctcagctgatagccatcctgtgctgcaagactcaggacatgctggcataatatag

SEQ ID NO: 12036 - DNA, 352 bp, Oryza sativa
  unsure (1)..(352): unsure at all n locations
  Clone ID: PAT_MRT4530_18201C.1
ctaagcttcaattgctccactgcccagtgcccatgaggccatgaaccgaggatctgaggggtgaggcaagaaacgccgcaggcttaggctcggccacccgcagttggtcgccttggaggcgcggccgcgcggggttgagcaatcgtccgcgaacgaggagggttgagcaagctggtgcgccggaggtaggcaagcaacagatgccggcttggggtttcgaaagcccacccctacaacagaggaggccgccagctgaaccattatgactttttgtttgaaattttgattaatctctttgngaatttgnatattcaggaccgtaatttgataattttgatgcnttccccaaaaa

SEQ ID NO: 12037 - DNA, 1464 bp, Oryza sativa
  Clone ID: PAT_MRT4530_18202C.1
atgagaggatttgttggcgcagccgtcctccttgtatgcaacctggccacagcgtcagcgtggaaggataaagatttcttcagcgcatgcccagcaaagcagtgtggcaaggttgagatcaggtaccctttccgatttgaacccagcaatacatcgtcctcctgcggcttaccatgcatgaagctaacatgctctgaccgccaagaaactatcctagatatcaaaaattaccttggaaggccatacaaggtgaccgccatagattacaagcgtgctaccctcaccatcgtcccgctcgcggacgattcttccttgcctcccactcccggatgcccgcttcccaacctcatctccgaaggagcacttgatcaccgttgtgaaccatacgcaatgtggctgcttaagtccatcaacattgaattcccttttaggagggcggttcacgtatcagaatcattgcagacaagatataatgaagagatacatctgaaggtcgaaatgtttctcaaaacatatggcacatcaaaaccaacaaggtattctttctctgaaataaagaagatagcaagacggttcaaaattaaactaggacaaggtggatttggaagtgtgtacagaggtgagctaccaaacggagttcctgtggcagtcaagatgctagaaaattcaaaaggagaaggagaagaattcatcaatgaggtttcaactatagggaggatccaccatgcaaacattgttcgcctccttggcttttgttccgaaggaacaaggcgggctctcatttatgaattcatgcctaatgagtcattagagaaatatatattctcagatggttataatattcttcaagaactcctagtaccaaacaagatgctagatatcgccttaggcattgcccgaggaatggaatacttgcatcaagggtgtaaccagcgtatcctccatttcgatatcaagcctcataacatcttgctggactataacttcagtccgaagatttcagactttggccttgcaaagctgtgtgcaagggaccaaagcattgttaccttgactgcagcaagaggcacaatgggctatattgcaccagagctatattctcggaactttggagagatatcttacaagtcagatgtttatagttttggcatgctggtattagaaatggttagcggaaggaggaactcggacccaagtgttgagagccaaaacgtggtctacttcccagaatggatctatgaacaggtaaacagtgggcaggatttggcacttggtagggaaatgacacaagaagagaaagaaacggtcagacagctagccattgtggcactatggtgcattcagtggaacccaaagaaccggccatcaatgacaaaggtggtgaacatgctaacagggaggttgcagaatctacaggtgccgcctaagccgtttttgtcagctgatagctatcctgtgctgtaa

SEQ ID NO: 12038 - DNA, 210 bp, Oryza sativa
  Clone ID: PAT_MRT4530_18203C.1
atggcgggacacatctcatggtgcggctcaccaaggaaggccactcctagttcagggaacaatggaaaagcggagaacggcgtggcgaagcttgagatctggcattggaaagcaacaccagggcatcctttggcttggtttgccatcgagcacctggcatgtgtggtgaaacaacgcctccggcctctctccgcggccgctctggcgtga

SEQ ID NO: 12039 - DNA, 1376 bp, Oryza sativa
  Clone ID: PAT_MRT4530_18204C.1
ggagagagagatcttgtctcgtgtttttttttttttttttttttttttttggggcagaatttcccttcttccaaaatttatttatcaggataacattactcataaaccatattcatatattctcttgagaatattacatgccattcgctttagttaaggaaagggcataccacagcactcatatcatcaggcaaaacatccaattcatgtgcaagcacaacggtacagaaaagtcttagccaacacaaacaacaaacgacatactactgtacatatagatcccattttgtacaaaccgttccatattaacttgaaggagcacaaccctcccgataacgaaaactcagcaccaaatcattttctcaaaacatcacttgtaactttgggtgctgaacagatacgacacatggcattgataggcttgcattgttgttacatggtgtgatgctttaattgaggtaaatctgtagagcggatcatgatctacacgatggaagagaaaggcctccacagaaagcagcgatgatcaagtaaagtagaagtactatgacagctgtcaacacagcaagaagcttggcatttttcatccaaagagctctcctgagcctcctggattgcttgcggaagtggaaagcactgtcttgcatggtggaggtcttgtcgacgagtagcgagatgcgctcacctctgtcgagaatcttctcaatgttgtcaaccatgacagtatgtatctcactgacttccccacggagacggttgagtgtgtcggcgctggggttgctggagaagtactccatttgctgatggaggaccctagagaactcatcgttcatggcataggcgagcgcattatgggcgattctgccatagttcttgatgaacctcatttggatgtcctcgaggtaaagaaagggaattcgtcttccgaaggtgtcgttggccatgcagaggaaggtgaggccatcggcggcggcggggggaggggagcggaggacgtggaagatgtagcggtcctgcgcgaagcagaggcgcgactcggcgtcgggcggaagcttctcgaggatgcggcgggcgacggcgccggcgttcccggagacggcagagaactcggcgagaaccacggtgccacgcgccaccaccgcgtaaacgatcgccatggattctagatccaacaacttaggcttggatagttgaattgatctgattgatttggggttggggttgggcggcgagctcggcggccggcgcgggatgcgagcttggcggcggcggcgagcccggaggctggagggttccgccgccccgacgaggtcgtccttgtaaccggcaagcgaggagacggggcggcgaccggcgagccccggccgtcgatggat

SEQ ID NO: 12040 - DNA, 107 bp, Oryza sativa
  Clone ID: PAT_MRT4530_18205C.1
gcggccagctcgcgctctcctagacgtcggaggcgctggcgtctagactgctaagagatcttgtatggcctttcgtcaacatggggaagacacatggaatggcagct

SEQ ID NO: 12041 - DNA, 390 bp, Oryza sativa
  unsure (1)..(390): unsure at all n locations
  Clone ID: PAT_MRT4530_18206C.1
tgacaaatattttccagnacgagnattatnnataggaatgtctgtaaatttgncaggcttgaagcagccaaaacgagataataggattaagacccaaaaaaaaaaaaaaaaaaaaaaaaaaaaaaaaaaaaaaaaaaaaaaaaaaaaaaaaaaaaaagggggggccgcccacatttttttttttttatttttttttgggcgtcttttaaaatgccgcggctgggggttttttttttccctttttttaaaaacaggaatttttgggattttccaatactacgttctcggggaaccccccctcttttacattttcgtgaacacatttttccggggacatttcccacacacccccggtttttttttttttggcttttttgggtttctccccca

SEQ ID NO: 12042 - DNA, 327 bp, Oryza sativa
  Clone ID: PAT_MRT4530_18207C.1
cgtgcctcaagacgtggggcgggcagccggagaacgtgaaggcggcgcaggacgcgctgctcctccgcgccaaggccaactcgctggcgcagctcggcaagtacaccagcgacggcgaggccgcgggccaaggggcatgttcgcagactacttctatcgtcaatcataagacggacctgtgtgtgtgtcgctaagtacgttactgtgcctgggcctgagcagggcgacagtcaggtggatcgaggcaagtaaactatctgattattatttacctggacatacgggtcatatgttttatacatgatctttttaggcgttgattacatc

SEQ ID NO: 12043 - DNA, 1062 bp, Oryza sativa
  Clone ID: PAT_MRT4530_18208C.1
gctgatgtacttgccgcgatccagcgacctcgcgcttcgtctcccatggcaacgacgcagttgctgtccaccgtcgagcaccgggagacgctcccggagggctatgctcggcctgagtccgaccggccgcggctcgccgaagttgccacggacagcaacatcccgctcatcgacctcgcctcgccggacaagccgcgggtcatcgccgagattgctcaggcctgtcgcacctacggcttcttccaggtcaccaaccacgggatagcagaggagctactggagaaggtgatggccgtggcgttggagttcttcaggctgccgccggaggagaaggagaagctgtattccgatgagccatccaagaaaatcagactctctacgagctttaacgtccgcaaggagacagtacacaactggagagattatctccgccttcactgccacccgctggaggaattcgtacccgagtggccctctaatccggcacagttcaaggagattatgagcacgtactgccgagaagtccggcaactggggctccggcttctcggcgccatctctgtcagcctcggcctcgaggaggactacatcgagaaggtgctcggcgagcaggagcagcacatggctgtgaactactacccgcggtgtccggagccggacctgacctacggccttcccaagcacacggaccccaacgccctcaccatcctcctccccgatccccatgtcgccggcctccaggtcctcagggacggcgaccagtggatcgtcgtcaacccacgccccaacgctctcgtcgtcaacctaggcgaccagatacaggctctgagcaatgacgcgtacaagagcgtgtggcaccgtgcggtggttaacgcggtgcaagagcgcatgtcggtggcatctttcatgtgtccgtgcaacagcgcggtgatcagcccggcgaggaagctcgtcgcggacggggacgcgcccgtgtaccggagcttcacctacgacgagtactacaagaagttctggagcaggaacctggaccaggagcactgcctagagctcttcaaaggc

SEQ ID NO: 12044 - DNA, 746 bp, Oryza sativa
  Clone ID: PAT_MRT4530_18209C.1
ttttttttttttttttttttttttttttttttttttttttttttttttggcaaatttccgattttctctattcagctgtaatgagccatgacaataagaacatgactgtctacaaatgaggagaatataactcatcagtaaacacctaactgtgagtaatgactaattatataagaatcctatgaaagaaatgttccacaaacgaaagaagaatagaaaggtagtaaaaaacactatgatagtgttttcttcatcccctacagctgaacatcatgcactcccgataagctcattgatcagcatgttcatgttcatgttcatcgggactaatcgtgctttcgatgtttatcccaatttcacccctcaagaacttggagtaccagtgagcagagagcttcggctgccttggcaaattggggtcctcaaaatcaacataatgcaggccgaatggcgaatggtatcctgctaacagctcaaacacatcaagaaatgaccacacaaagtaacccttcacattggctccattccttagtgcagctagagtgcttcccatgtagctactcaagtagtccactctatctgtgtcattgagtgaatcgtcgtccttaccgaaatgcccgaaaccattttcattgtaatataaacagcgaaaaaactgggtatgtggtctctgaggctattcgagccatacattgcagccccttcggatctcttgggagcctagtagggacaaactgactactcgg

SEQ ID NO: 12045 - DNA, 291 bp, Oryza sativa
  Clone ID: PAT_MRT4530_1820C.1
atgcggattcccatcgctatatgtgcacgaatcttggcacttatcgaacagcctaaaaaaggacaaatccgagagaaaaaatcacacgacaaatctatagcaaaatcgcacacggtatggtttgggttgggccaacccgtgcgcaaaatcgtgaaacaccgaaagtgcccatggaaaaccgatgaagctgccgtgtgtatgttactgtgcggttgtctattctcgggtgtttctggcgcacgggagctttcagtgttcgctagctttttgacctggattaacggccacacg

SEQ ID NO: 12046 - DNA, 482 bp, Oryza sativa
  Clone ID: PAT_MRT4530_18210C.1
tatgtttcgattctccatgctttcctctactgctcattggtaacattcggcaaatttgacagatgggtatattggtcatcttggtggacctgcaatgctgccgctgcgatgccaagatcaggaaggtcctgggctgccttgaagaggagtactgcatcgagaaggtggagtacgacgtgaagaacaacagggtgatcgtgcgcgggaagttcgacccggagaagctgtgcaagaagatctggtgcaaggccggcaagatcatcaaggagatcctcatcgtcgacgtctggccgccgtcgccgccgccgccgtgcaagccgccgccgtgcgagaagcctccggaggactgcaagcccaagccctgccattgctgcagctgcgagaagcccaagcccaagcccaagccctgccattgctgcagctgcgagaagcccaagcccaagcccaagccctgccactgggagaagcccagccctgtcact

SEQ ID NO: 12047 - DNA, 353 bp, Oryza sativa
  unsure (1)..(353): unsure at all n locations
  Clone ID: PAT_MRT4530_18211C.1
gaattaataatgcatatgcttccaagatgaacaaaactggcgataatatacagatgccatacatacatgtcctcacactgcatataattaatttaagtacagacaaaaattataggcttacacgtctaaccataaagaggggaagaaatggtagagaaaaataatgaacaacaataatggaatatctgcatcatcatgcatatgtgtaagagcaaagaatggtggtggtgactggtgacatggcacaacgacgacatcgatcatccctctctagctagggcttgaggcgtccatcaataatggcggcgatgaaccctngctagctatagctagttaggcctttggtgcctcct

SEQ ID NO: 12048 - DNA, 1764 bp, Oryza sativa
  Clone ID: PAT_MRT4530_18212C.1
atgtcgaccgccgcgtccgcctccgcgccgccggcctcctccgcggcctccgactaccactgccgcaccaagcacagcctcaccgccggctacgcgcgcgggcctggccgcctcgactgggccaaccagcccaaccccttcctccgcttctcccctccctcccaaatcccgctccccaacccgccgccggggatcgccggtatcccctacccgtcgctgttccactcgccgccgccgccgccgtcgccgcagccgctctccgtcgactccctctccgcgctgctgttccactccctcgccctctcggcgtggaagtccgccggcgtctccacctggtccctccgcgtcaaccccagcagcggcaacctccaccccaccgaggcgcacctcctgttcgagcacccgcgggaccccggccgcctcgtcgtctcccactacgcgccgcgcgaccacctcctcgaggttcgctccgcggcgcccctcgccgacttcccggcgctcctgccgccgccggccaccgcggtcctggcgctgtcgtccatcttctggagggagtcctggaagtacggcgagcgggcgctgcgatactgcaaccacgacgtgggccacgcgctggcggcggtggcggtggccgcggcggcgctaggctgggatgttcggttgcttgatgggttgtccgatgaggaccttgggtatctggtgggggtggagaaaggagccccccctccccctgatggcttgcctgacaaaatggtgaggggcaaggcaccatgggtggagcggcagcatcccgattgcgcggttcttctgtttccggctggctcagagccaaaggtggattatggagtgatgagtgcggcattgaggggattggatagattggagtgggttgggaaggctaatgcccttagcaaggatcatgtggtgtgggatgtgatataccacacggcggaggcggtcaagaagcacggtcctgctccaggggagagcttctctgtgaatccatggcggaggaacgcagcgttatctgatgatctctataaggaactgacagtgcaggaggtggtgcggcgccggaggagtgcggtggacatggatggcgtgcatgtgatgggcagggacacattttatcagataatgttgcattgccttccgtcaggtgacgtttctccagaggagctgcagggacctccaagtgctctgccatttcgtgtcttgccatgggacgcagaagtgcatgccacgttgtttgtgcaccgtgtctcagagctgcccaagggattgtatttcttggtgaggaatgaggagcattttgatatgttgcggcgtgccatgaggcaggactttgagtgggaacgacctgaggggtgccctgatggcctcccattgtacaggctgatgaaaggggattgccagcagattgcaatgcagatatcctgctttcaggacattgcctcacatggatgttttagcctagggatgattgctagatttgagcttgtgctacatgagaaaggcgaatggatgtatccacgtttgttttgggagactggtgttcttggtcaagttctttaccttgaggcccatgctgttggaatatctgcgacagggattggttgctactttgatgatgctgttcatgaggtacttggcttaaaagacttggagttccaaagcctgtatcattttacagtgggtgcacctgtacttgacaagcggatcatgagtcttcctgcatacccaggaccagggattgatgcatga

SEQ ID NO: 12049 - DNA, 2157 bp, Oryza sativa
  Clone ID: PAT_MRT4530_18213C.1
atggtgtacatctcgaacgcgcaggatgccagtaagctgatcgtgacggcgaagggaggaggaggagaagccgacgacgccgccgcctcctccgctgccgtcgtccttgacctctggcggcagccggccaagatcccggcgccgttcgtctggccgcgcgccgacgtcgcgctgccgccgtcgtcgccgccgacgggggagctggacgtgcccgtggtcgacctcgccgcggcgctacgcgacgccgccgggatgcgccgcgccgtcgcgcaggtggccgccgcgtgcgcgagccacgggttcttccaggtgagcgggcacggcgtgcccccgtcgctggcgcgcgccgcgctcgacggcgccgcgggcttcttccgcctcccgcccgccgcgaagcagcgcgcccgccgcgccccaggcacggtcaccggctacaccgccgcccacgccgaccgcttcgtcgacaacctcccctggaaggagacgctctccttcggccaccgccacgccaacgccgccggcaacaactcctccaccgtcgccgattacttctccaccctaggcgacgacttcaaacacctaggggaggtgtaccaggagtactgcgaggcgatggaggaggtgacgaaggcgataatggcggtgctaggggagagcctgggggtggggggcggatactacaggaactcggcaccctcctctaccactacccgcacccacggtcgaagcccgctcgaccatacaacccggtgcagccatcgtgtacatctcgaacgcgcgggctgccagcaagcgcatcgtgacggcgaagggacgacgaggagaggcccacgcccccgcccccgcctccgctgccggcctcctgcacctctggccgcagccggccaagatcccggggcccggggtctggccgcgcgccgacgccgcgccgccgggctcgcgcctgcattattcatgcttcgattctccatgctttcctctactgctcattggtaacattcggcaaatttgacagatgggtatattggtcatcttggtggacctgcaatgctgccgctgcgatgccaagatcaggaaggtcctgggctgccttgaagaggagtactgcatcgagaaggtggagtacgacgtgaagaacaacagggtgatcgtgcgcgggaagttcgacccggagaagctgtgcaagaagatctggtgcaaggccggcaagatcatcaaggagatcctcatcgtcgacgtctggccgccgccgctgccgccgccgtgcaagccgccgccgtgcgagaagcctccggaggactgcaagcccaagccctgccattgctgcagctgcgagaagcccaagcccaagcccaagccctgccactgcgagaagcccaagccctgtcactgcgagaagcccaagccatgcgagaagccgccgccgtgcaagccggaggagccgccgaagccgccgccggagaagccgccgccgaagccggagtgcaagctggtgccgtacccttacccggtgccgtacccgtacgccgggcagtggtgctgcccaaagcctgagcgcccgtcgccggcgccggacccaccgtgggagcgcgacccgccgcagccgtgcgggacctcgcacgccccttcgtggcgctgacggacggcggctacgccgccgccgccgtgcgggtgctcggggggccacgggaactgcggctgcggcatcaggccgtggccgccgcaggtgtggccgccgccgcccgtctgcccgccgccgccgtggtgctacaccgaggacaacgccaacgcctgctccatcatgtgatggccggccggcggcaggcgtcgatcacgatcatctctgctgcttaatttccttgcttgctactacctctgctcctttccttgcctcggaaatcggaataaattaaacacgaggctgatcgatgtgtttgtaattaatccatggtgtttgtgttgtgtgctgtgtgggctgtataataattaattacagtatgttcatgtaaatttgtttgtttgtattgtttatgattgattcgatatgtataagttatgtacaataattaatcgtggagaggctcactaaactcataaactgtagagtatcttggctataaaagtgtggcaatttatctttttcttgtgttacaaaaa

SEQ ID NO: 12050 - DNA, 240 bp, Oryza sativa
  Clone ID: PAT_MRT4530_18214C.1
gacccagaagagttgctctgttcctgaggcatcccgagtggagacaacagcacccatggatctatgaggttaaatctgtcactatgaacctggagagtgcatctgaagattcccggctatttactgctattttatagtgagaattgagacacatctcaaacttgtctgtcgactgaagtttttcataagtgcatgttagcagcatccatgctctgatataggtatgcttaaaaaaaaaaa

SEQ ID NO: 12051 - DNA, 227 bp, Oryza sativa
  Clone ID: PAT_MRT4530_18215C.1
cagtacacttagaggactagaagactgggatctatcaaacaacaacttatcaggacccatccctgattttcttgggaatttccaagctacggtggccatgaaagtacttgatcttcgccaaaagggacaaacacagggcttttttgctgagtgcgatgccttgaggaggatacaacatcggaaacttgttaaggttgtcacggtgtgtgacagcttagactataatg

SEQ ID NO: 12052 - DNA, 279 bp, Oryza sativa
  unsure (1)..(279): unsure at all n locations
  Clone ID: PAT_MRT4530_18216C.1
ccccctcctncgccgcccgncgcctccgctnnccccacccgctgtatnaaaaccacggcatggtttttancggttcagttcgtcgccgtcgtcattagctagcttagcttagtcatcnccatgcancaacccgagggattnctagagtnatctagacttgtaaatnacagcagcagttgagttnaggccgtaatgcaatgcantgtgatgaatgatgatgtaanccatgaanccanccatggncaanccnaaaaaaaaaaaaaaaaaaaaaaaaaaaaa

SEQ ID NO: 12053 - DNA, 550 bp, Oryza sativa
  Clone ID: PAT_MRT4530_18217C.1
ggcctacatagcgagtctccggaatgtccagaaaaccccgaagtttcgccccaaccttacgaagaagtatgatggtagcatcaatccctccgagttcctccagatctacaccacggttatcgtggcggcagggggtgacgaccgggtcatggcgaattactttcccatggccctcaaggcccacgcggttgtatatgcattccggaacggcgtgcgacataatcgcatgctggagaaaatcgcctccaaggagcccaagaccactgccaagctcttcgagctggcggacaaggtggcccggaaggaggaggcgtgggcctggaactctcccggcaccggtgcggcggccgcggctacccccgagtctgtcccccgctctaagcggcctgataggagaggcaaaaggaaaccagcccgctccgatgacgagggccatgtccttgcagcagacaggcccacgcgggccccgtgcaaaggaaaggcccccggcgataagccgagccccactgttccctctggcgagggccagtcggcggacaagtggtgctcg

SEQ ID NO: 12054 - DNA, 533 bp, Oryza sativa
  Clone ID: PAT_MRT4530_18218C.1
ggcgaattcgagctcggtaccctactgagaaacgcgtggaagctgaaaagctcgcgcgcatctccaagcggtacgtcctcgtagagggggccctctaccggcgtgccgcgaatgggatactcttgaagtgcatttctcgagagcagggcatcgagctcatagccgacgcccatcagggtgagtgcggagcccattcggcctcacgaactttggtcggaaaagccttccggcaaggtttttattggccgactgcattacaagatgcccaagaatgggtccagcggtgcaaggcatgccagttccacgccaagcagacccaccatccggcccaaatcttacaggtcattgcactatcttggcctttcgcagtctgggggctagacatccttagaccgttcaggcggctcaaggcgggggcatcacgtcttgattcggagtgcccaacgcgtatcattacatacgacggtacctatttcactagtgagctctcaccagcggtcgcagcagaggggaagaatcccatcaaggattag

SEQ ID NO: 12055 - DNA, 275 bp, Oryza sativa
  Clone ID: PAT_MRT4530_18219C.1
atggaggtcggcgccggcgtcgacggcggcgagatcaaccaaccgtgcaagtacgtgagcccccggcccgagagcccaacgggattgaaccgtagcgagctcagccatggcagctgcggaagcggcgggcaggtgttccgtcccgtgccacgccccggtggtttcaatgccatcagcgccgcatcgacgggggcggtgacgggtagaagggagggcgtcggcatcggcggcggcggccacgtgggagaaggagagggcgacttcgtgcgggcgag

SEQ ID NO: 12056 - DNA, 1233 bp, Oryza sativa
  Clone ID: PAT_MRT4530_1821C.1
atggacctccaagcggacacggtgaggaagctcgccactaagcggcggaatagtcgtgtactccggcgcgttgggcgggaacaccactccacaggcatcctcgacggcacggacaaagcctactcctcggagaacccgccatcggacacatactcgagctctgggattggggaaaatagagcaaggctgagtactacccactgtactcagcaagtcataccggaacgggggtatgatgcagggattccacaagggatagctaagcaggaaaagagggttgctgacgtcatcaaaggggaggggcggcgccggcaagcgggccccaccggtcagcgggacaagggcgccggtccaccgtggaccgggaccaccaaggcggtccaccgccggtccacgggaaccgatggcccggatcggcccaaaccgatcgagcggccaggggcggcgcggctggggcacagcacggcacaaagccagctggccaaacgacggcgcgcggcggcgcggccacccgcggcgacggccggcgacagcgcggggaggagaggagggatgctcaccaagggcggcgacggcgagactacaacgaggaagccggcggcgggctcctcggggaggcaacggtggaatccggtggccggtgtgcggcttctgatttccgatcccaaggaggaaacggcgcagtccggcgtcgaccggggaggcgaggcgacacagatggagatacaaacacggcggcgatctcgggttggtggtgaagttggtgctcggccggcgagaggcgacaaccgagcggcggccgagcttgactttgaggcggcgaagctggcggtggcggcggctcggcgcagcgacggctgtggcggcgggaaacggcgaccggagttcgccggagtgtggcagcgcgtgggtgcggcgtggggagagcgagggagagtatgccgggctcgggaaaaatggggaaacggacgaggggagcacggggatgctttttatgggctcgggaaggcgggatcgaggccggacgtggcggaatcggccggcgaagtggggcgccgatgtggggtggtggaggggttaaccggcgccgattttcgcggggagagtgggggaaatggtggaggacgtggagaggatcgttcccacgtcgttggatgcgagctcgggtgcgggagggcgccggattttgcggcgatgtggacggcaatggcggttggggtcggccggcgagag

SEQ ID NO: 12057 - DNA, 4134 bp, Oryza sativa
  Clone ID: PAT_MRT4530_18220C.1
atggtcgaggtcctggaaatggaggaggaggtggtggcattcacccccaccccatcggggagtgaggattccggcgagagccgaggtcctcgtcaccgtcgccatggatctccaactcctccccgccgcgaaccttcgcggagggagaatgccgctcgttcgggtggttcggcaccctctcctctccaaggcggagtgaggccgcgacgcgccggggtacgccgctgtctcgattatggagacggcgattcgccccaaggcgcgcttcaagcagtaggcgcccttctacgacatcccccggtgaacccggagctggagactcctgttcagcgttggctggacgatgtgaccaacttggtcactgctgctcaacggcagttggccataggtggtcgatccgctgccgccggtacatcacgtacctcagtcaccctctcctcgtcggcgaggagaagggctcatcgatcggccacgatctcgaggcggtctatggtcccaacatcatcaggggcctctggaagccggaggcgtcacaaaggcctctacggtacacaggacgctcgaatcaacatcgagcgacgccgggatgagcgccgagctgcccgtatgggcgaaggcgcctcctcgtctggagcgccacattcttcctcacgaggcggtcctcctcccacactcacccctggggggacaggttgtagggccttcgtggcgagtctctggaatgttcggtggcccctgaagtttcgccctaaccttacggagaagtatgatggtaacatcaatccctccgagttcctccagatctataccacggtcatcgtggctgcagggggtgacgaccgggtcatggcgaattactttcccatggccctcaagggtcaggcgtgtggctggttaatgacccagccccccgactccattcactcctgggaggacttgtcccagcagttcatcacaaacttccaaggcacatatcctcgcccaggggaagaggcggacctgcatgctgtgcggcagaaggatgatgaatccctccgttcgtacatacaacgcttttgtcaggtccgtaacaccattccgtgcattccagcccacgcggttgtatatgcgttccgaaacagcgtgcgacataatcgcatgttggagaagatcacctccaaggagcccaagaccaccactgagctcttcgagctggcagacaaggtggccaggaaggaggaagcgtgggcctggaactctcctggcaccggtgcagcggccgcagccacccccgagtctgccccccgctctaagcgggggggggagttggccctggtggtctccccaaccatccacaacgtcaagatgaagcgtgtgctggtggatggctgggccagtctgagcatcatctccccggctgcttttgacgcgctcaaagccccggggatgaagctccagccgtcgctcccgatcattggcgttactccggggcacacgtggccgcttggtcacgtagagtttccggtaacttttggcgattccgccaacttccgcaccgagcggatcgacttcaatgtggcagatctcaatccgccctacaacgcggttctgggtaggcctgcgttgctgaagttcatggccgccacccattacgcctatctccagatgaagatgccaggtcccgctggccccatcaccatttttggtgatgtcaaggttgctctcacctacgcagagcagcgtgcggacaacctggcggtggccacgggaccacaggcccctgaggcatctgcgtctcacgcttctaagaagcgcatcacctcggctgacgaggaaggcgcgttcgtctccttcctgcgggcaaattctgtcgtttttgcatggaaaccgtcggatatgcccggggtccccagggaggtgatcgagcaccgccttgccgtgtggccggatgtgcgacctgtccggcagaaggtgcggtgtcaagccccggagcggcaggccttcatcagggaggaagtggcgcggctcttggaggctgacttcattcgtgaggtgatccacccggaatggctggcgaacccggtggtcgtcccgaaggccaacggcaagctacggatgtgcatcgactacaccgacctcagcaaggcatgccctaaagatcccttccctctgccacgcatagatcaaatagtcgactccaccgcggggtgcgaccttttgtgttttctagatgcatactctgggtatcatcagattcgtatggctagggaagatgaggaaaaaactgcttttattactcctgtgggtgctttttgttatacaaccatgccttttgggttgaagaatgcaggccctacttttcagcgcatgactcgtattactttaagtaatcagatagggcgcaatgtagaggcgtatgtcgatgacctagtgataaagacgtgccaccagaacacgttgctgcaggacctggctgaaacttttgatagcctcaggtccacgcacgtaaagctgaaccccgataagtgtgtgttcggcgtgccggcgggcaaacttctcagttttctagtctcttcccaaggcatagaagcaaattctgagaaaatacgtgcaatagagaggatgcgcccccccagcaagcttagggatgtgcagtgcgtcactggatgcatggccgccctgagtcggtttatattgaggctgggtgagagggcgctgcccctgttcaaactcctcaagcgctccgagccgtttgtagccccagggctagaggaacccttgctactctacttggcagcgactccccatgtggtgagtgccgccctagtggttgagcgtagggaaggcgaacaggagggccctccgacttgcgatggccccttgactctcgaggaaatagcaaccgaactctcctgcatccgggagggccccgaggcacccaagggaggagtgcagactttgatagatggccttaggctcgatgaccccgaggcggtccggggtcccctcgggacctccgaacaggtgcgccccgaatcaccagcccctgacagcacgatccggccccaccgaaaggtgcagcggcccatctacttcgtcagtgaggcactacgagatgcgaaaacccggtatccgcaggctcagaaaatgctttatgctgtcttgatggcctcgaggaagctacggcattactttcaagcacatcgggtttccgtagtgacgtcataccctcttggccagattttgcgcaaccgagagggtactggacgggtggtgaaatgggctatcgagctggctgagttcgatctgcacttcgaaccgtggcatgcgatcaagagtcaaatcctggctgacttcattgcggaatggaccccggtggacgaatcgattccatctaataccctcttcttccccggagaagaagaggatccaaacgccgacattcgtggcgggcactgggtgatgcatttcgacggctctctcaaccttcaaggtgtgggtgccggagtcacgctgacctcgccgaacggggatgtcctcaaatacgtcgtacgtctcgacttccgagccacgaacaacatggcaaaatatgaagggctcctcgcaggattgagggcggcggccggaatgggcatccgccgtctcctggttttaggcgactcccagctggtcgtaaatcaagtatccaaagaatatcagtgcaccgacccgcaaatggaagcatacgttcgagaggtacggcgcatggaacgccacttcaacggagtagagctccagcacgtgccccgacgcaacaacacagttgctaacgagttgtcgcgtgttgcgtcggcacgaaccccactccccccaggaactttcgaggaaaggctcgcacagccctcagcacgacccagccctttgaaggaccccaatgatgcgcccttcgacccaacctctggcgacccgcgtcaggtcacgtggatgaccgacatccgggcgtatctcgatggtaatactcttcccgaggaccgcgcagaagctgaaaagctcgcgcgtatctctaagaggtacatccttgtagagggggccctctaccggcgtgccgccaacgggatactcctgaagtgcattcctcgagagcggggcatcgagctcatagctgacgcccattag

SEQ ID NO: 12058 - DNA, 172 bp, Oryza sativa
  Clone ID: PAT_MRT4530_18221C.1
acccacgcgagcgaacatcatatacactcgcttgagcttaattacagactgaaagaagatgtgttgcagctgagaatctagctgcaactacgactcatactgctcctgcagatagaagcaccctgacctggaagagaagagcagcatagccaacgccaccgtcgcgctaggt

SEQ ID NO: 12059 - DNA, 857 bp, Oryza sativa
  Clone ID: PAT_MRT4530_18222C.1
atggtggatggactggaggttgcaacggcagtggatggggatggtggattggcggcgtcgatgggagtggagatactgacggcgatggatggttatggcggcgatttttggaagagattgatgatccgcacacaatccttctttccccacccccacccgcgagtccgcgaccccttccccggcccacgcgcggctgcgagcctgcaacctccgtccccctctccctgcgccttctcccctaaccctatccgccgtcgctcccgctctagcgccgccgtcgcaatcaccttctcccccaatcgtatctgccgctgcttccgctctccacgtggtcccgtttgctccatagcggactccgcctgcaagtccgccggccatcgcatgatcctgacggcagctagatccagtaccctgtccacccgtctctccttcatcaccgagggacatcacaatctgaactgcacctttaaaggtgcgccccttcatgattgccagactgcatgcacagccaagtaaatatatctgtgtaaagaattttgatgctgtcaatctagaaaaatagatactcttaagtaaccaatacagacccactaacagggtggataccagggtgacggtcgcctcagattcggagctgagggaatggtgtaggaggaagcggatggatcgagctgctacacccccgcacttcgctgtctcgatgtgccccgtcattggccgcttcgccatggcggcggggtgacgagattcttaagtgtatcacgaatactcaaagttatattctatattgtaccgattaccgaatattttttttatttctctatgaccacaacaaattaatggaataattctctacc

SEQ ID NO: 12060 - DNA, 513 bp, Oryza sativa
  Clone ID: PAT_MRT4530_18223C.1
tcagtccgttccgatgacaagagacatgtccttgcggcggatgggcccacatgggccccacgcaaagggaaagctgccggcgacaagccgaaccctactgttccctccggagaggcccggtcggcggacaagtggtgctcggtgcacaacaccgaccgccacagtctcgccgactgccgctcggttaaaaatttggccgagcggttctgaaaggctgatgaggagaagcggcagggtcgacgggagggcaaagcccccacgacctcgaccggtgatcggcaagaggaggccaagaacaaggcccccgccgatgatggcggagacagtgaggatctggatttccagatacctcaaggggtcgtcgccacgcttgacgagggagcttgccctcacacctctcgccgaagcttcaaggccatgaggcgagagcttctggccgctgtccccacgcatgaggtggtccggaaggcacgttggtcggaggtgaagctcacattcgaccagaatgaccat

SEQ ID NO: 12061 - DNA, 328 bp, Oryza sativa
  unsure (1)..(328): unsure at all n locations
  Clone ID: PAT_MRT4530_18224C.1
gcggatgcccgacccctgcaggcgcgggatgctggaccgaccggcgtagcgtgctcggctcgcgcggcacgcggaggcgcacgggtctcgctggactttgctgccccgggtgctgctgctgctgggcacgtaatagccccctgtcctcctcctggcctcccggccccggatgctgctgctgagtgtacataatancacctgtgatctttctggctcctggcttgtaattctgttctagtttgtttttttttctaattgtacacattcttgggcggtccgntgttgaacctagagagttctctctttaatctcccaattacattgaacg

SEQ ID NO: 12062 - DNA, 5238 bp, Oryza sativa
  Clone ID: PAT_MRT4530_18225C.1
atggttgaggtcctggaagtagaggaggaggcggtggcgtttactcccaccccatccgggagtgggaattccggcgcgagccgaggtcctcgtcaccatcgccatggttctccaactcctccccgccgcgaaccttcgcggagggaggatctcactcgttcgggtgattcggctctttctccgccccctggcggagggaggccgcgacgcgccgggacacgccgccgtctcgactatggagacggcggttcgccccaaggcgcgcttcaggcagcaggtgcccttctgcggcatcccccggtgaacccggagccggagactcctgttctgcgttggctggacgacgtggccaacttggtcactactgcccagcggcagttagccacgagtggccgatccgctgccgctggtacgtcgcgtacctcggtcaccctctcctcgtcggcaagaagaagggcttgtcaatcggccacgatctcgaggcgatccacggttctaacatcgtcaggggcctcagaaagccggaggcatcatgacggcctctacgggacgcaggacgctcgaatcaacatcgagcgacgccgagacgagcgccgagctgcccgtatcggggaaggcgcctcttcatctggagcgccacgctcctcttcatggggcggccctccccccacactcacccctggggggacgggttgtagggcctttgtggcgagtcttcggaatgttcggtggcccccgaagtttcgccccaaccttacggagaagtatgatggtagcatcaatccctccgagttcctccagatctacaccacggttatcgtggcggaagggggtgacgaccgggtcatggcgaattactttcccatagccctcaagggtcaggcgcgtggctggttgatgacccagccccccggctccattcactcctgggaggatctgtgccagcagttcattacgaacttccagggcacatatccccgcccgggggaagaggcggacctacacgctgtacggcagaaggatgatgagtccctccgttcgtatatacagcgcttctgtcaggtccgcaacactattccgtgcattctagcccacgcagttgtatatgcattccggaacggcgtgtgacataatcgcatgctggagaagattgcctccaaggagcccaagaccactgccgagctcttcgagctggcggacaaggtggcccggaaggaggaggcatgggcctggaactcccccggcaccggtgcggcggctgcggctacccccgaatctgccccccgctctaagcggcgagataggagaggcaaaaggaaaccagcccgctccgatgacgaggaccatgtccttgcagcagacgggcccacgcgggccccgcgcaaaggaaaggccaccggcgataagccgagccccgctgttccctccggcgagggccggtcggcggataagtggtgctcggtacacaacacttaccgccacagtctcgccgactgccgctcggtcaagaatttggccgagcggttccgaaaggctgatgaggaaaactggcagggtcgacgggagggcaaagcccccgcgacctcaaccggtgaccggcgaggggaggccaaggacaagggccccgccgatgatggtggagacgggaccgtcgccacgctcgacgggggggcttgcgctcacgcctctcgccgaagcttcaaggccatgaagcgggagcttctggccgttgttcccacgcatgaggcggtccggaaggcgcgctggtcggaagtaaagctcacattcgaccagagcgaccatccgacggccccggggatgaagctccagccgtcgctcccaatcaatggcgttactctgaggcacacatggccgcttggccatgtagagcttccggtgaccttcggtgactccaccaacttccacaccgagcggatcgacttcgatgtggcggacctcaatctgccctacaatgcagttctgggcagacctgcgttggtgaagttcatggtcgccacccactacgcctacctccagatgaagatgctgggtcctgctggtcccatcaccgtccttagtgatgtcaaggtcgccctcgcctgcgcggagcagcgcgcagacaacttggcggtggccacggagccgcaggcccagaagcctctgcgtcccgcgcttccaagaagcgcctcacctcggctgacgaggaaggcgcgctcgtctccttcctgcgggcgaattctgacgttttcgcatggaagccgtcagatatgcccggggtccccagggaggtgatcgagcaccgccttgccgtgcggccagatgcgcgtcctgtccggcagaaagtacggcgtcaagccccggagcggcaggccttcatcagggaggaagtggcgcggctcctggaggctgatttcattcgcgaggtgatccatccggagtggctggcgaacccggtggtcgtcccgaagaccaacggcaagctacgaatgtgcatcgactacaccgacctcaacaaggcatgccccaaagatcccttccctctaccacgcatagatcaaataatcgactccactgcggggtgcaaccttttgtgctttttagaagcatactcagggtaccatcagattcgtatggctaggaaagatgaggaaaaaccgcctttattactcctgtgggcaccttttgttatacaactatgccttttaggttgaagaatgcaggccctacttttcagcgcatgactcgtattaccttaagtaatcagatagggcacaatgtagaggcatatgtcgatgatctggtggtaaagacgcaccaccaggacacgttgctacaggatctggccgaaactttcgatagtcttaggtccacgcgcgtaaagctgaaccccgataagtgtgtgttcgtagttgagcgtgaggaaggcgaacgggtggccccttcggcttgcaatggcctctcatcccccgaaggcctagcgcccaaagtttccagcccccgggaggaccctgaggcccccaagggaggagcggtggctttggcaggtggccccgagcctcatcatcctgaggcagtccgggatccccccgagacctccgaacaggcgcgctccgagtcatcagcccctgacaacacgaattggtcccgccgaaaggtgcagcggcctgtctactttgttagcaaggcacttcgagatgcgaaaacccggtattcgcaggcccagaaaatgctttacgccgtcttaatggcctcaaggaagttgcgtcattacttccaagcgcatcgggtttccgtagtgacgacataccctgttggccaaattttgcacaaccgagagggtattggacgagtggtaaaatgggccatcgagctggctgagttcggtttgcagttcgaaccgcggcacgcgatcaaaagtcaaatcctggctgacttcatcgcggaatggaccccgatggacgaacctgttccgtccaatgtccctttttcccttcccggagaagaagaggatccaaacgccgacattcgcggcgggcactaggttatgcattttgacggctccctcaactttcaaggtgcaggtgccggagtcacgctgacctcgccaaacggggatgtcctcaaatacgtcgtttgtctcgacttccgagccacgaacaacatggcagaatatgaagggctcctcgcgggattgagggctacggccggaatgggcatccgccgtctcctggtcttgggagactcccagctggtcataaatcaagtatccaaagagtatcagtgcaccgactcgcaaatggaagcgtacgtccacgaggtacggcgcatggaacgccacttcgatggacttgagctccggcacgtgccccggcgcgacaacacaattgctgacgagttgtcgcgtgttgcgtcggcacgagccccactccccccagggaccttcgaggaaaggctcgcacaaccatcggcgcgaccgagccctttgagggaccccaatgacacgcccaccgacccgactccgggcgacccgcgcccctcggggcccgagggggtcaaccctgacccccctcatcaggtcgtgtggatgaccgacatccgggcgtatctcgaaggcaatactcatcctgaggatcgcgcagaagctgaaaagctcgcgcgcatctccaaacagtatgtccttatagaagggaccctataccagcgtgccgccaacgggatactcttgaagtgtatttctcgagagcagggcatcgagctcatagccgactctcatcaggacatccttgggccattcaaggcggcttgaggcaggtatcagcacttgtacgtcgccatcgacaaattcaccaagtggcccgtggcctacccagttgtcaaaatcgacaagcattctgctcttaagttcatcaagggcatcacgtctcgattcggagtgcccaactgtatcattacagacaacggtacccagttcaccagtgagctgtttggcgattactgtgacgacatgggaatcaaattgtgctttgcctcacccgcccaccccaagagcaacggccaagtcgagcgagccaacgccgaaatcctcaaaggactcaagaccaagacttacaacgtcctgaagaagcacggggattcatggctcgaggagttgcccaccgtgttgtgggaaaatcggaccactccaagccgcgccacgggcgaaacaccatttttcttggtgtacggcgccgaagcggtcctaccctccgagctttccctcgggtcgcctcgtgtcgtgttgtacaacgaggccaaccaggatgacctttgccgcgacgatctcgattatcttgaagaacagagaaggggagcggccttgcgtgccgcgcgctatcaacaaagcctgcgacgctaccatcagcgccacgtccgggcccgatcactacaagttggcgacctcgtcctacgccgcgttcagtcgcgcctggggctgagcaagctctcgccaatgtgggaagggccatacaaagtgatcaaagtgcctcggccaggctccgttcggttaaccatggaggacggcacagagctgcccaacccctggaatatcgagcacctccgtcgtttctatccatgacatcgagattttttgctttcctggagcacgggccagcccccgcacaacccctcggtttgtgcgggactggccgggggctaccactgtgtatccttttacaagcaatgaatttttctacttttttg

SEQ ID NO: 12063 - DNA, 668 bp, Oryza sativa
  unsure (1)..(668): unsure at all n locations
  Clone ID: PAT_MRT4530_18226C.1
ngtgccccccaaggagcttagaaatgtccagtgcgtcactgaatgcatgcccgccctgagtcgatttatatcgaggctgggtgagagggcgctacccctattcaagctcctcaaaagctctgggccgtttatatggacggagaagctgagcaagctctcaatcagctgaaacgctttttacccccccctgggtctttggtagccccggggccgaaggaaccattgctactctacttggccgcgacccctcatgtggtgagtgccgccctaatagttgagcgtgaggaaggcgaacgggaggcccctccggctcgcaacggcccctcgtcccccgaaggcctagcgcccaaagctcccagcccccgggaggaccccgaggcccccgagggaggaggggaggctttggcaggtggccccgagccttatgatcctgaggcaatccgggatccccccgggacctccgaacaggcgcgccccggatcatctacccctgacaacacgaaccggccccgccgaaaggtgcagcggcccgtctactttgtcagcgaggcacttcgagatgcgaaaacccggtatccgcaggcccagaaaatgctttatgccgttttgatggcctcaaggaagttgtataanctactgcagcaaagcgaatcaccatcaaggggcca

SEQ ID NO: 12064 - DNA, 3162 bp, Oryza sativa
  Clone ID: PAT_MRT4530_18227C.1
tcaagcttgtcagtagtcttagggacgagcgagtgatttccaagagacgagcctctgcccccggccgaactcatgagaaagggggtctcacgactccccgctattgaggatcttccctcgacagctggcgcgccaggtagggggcggttgcgcgtttcgagaggaaatcgctttcttccgtccctagtttctccaggccttagctgaccatggtcgaggtcctggaagtagaggaggaggcggtggcgtttacccccacccagtccgggagtggggattccggtgaaagccgtggtcctcgtctctgtcgccatggttctccaactcctctccgccgtgaaccttcgcggagggaggatcccactcgttcgggtggttcggctctctctccgccccctggcggagggaggctgcgacgcatcggggcacgccgctgtctcgactatggagacggcggttcgccccaaggcgcgctccaagcagcgggcgcccttctgcggcatcccccggtaaacccgcagccggagactcctgttcagcgctggctggacgacgtggccaacctggtcactgctgcccagcggcagttggccacgggtggtcgatccaccgccactggtacgtcgcgtacctcggtcaccctctcctcatcggcgaggagaagggcccgccgatcggccacgatcttgaggcgatccacggttccaacatcgtcgggggcctcgggaagccggaggcgtcatgacggcctctacgggacgcaggacgctcgaatcaacatcgagcgacgccgggacgagcgccgagctgcccgcatgggggaaggcgcctcctcatctggagcgccgcgctcctcttcacaaggcggccctcccccccacactcacccctggggggatgggttgtagggccttcgtggcgagtctccggaatgtccggtggcccccgaagtttcgccccaaccttacggagaagtatgatggtagcatcaatccctccgagttcctccaaatctacaccacgattatcgtggcggcaaggggtgacgaccgggtcatggcgaattactttcccatggccctcaagggtcaggcgcgcagctggttgatgacccaaccccccgactccattcactcctaggaggatctgtgccagcagttcattacgaacttccaaggcacatatccccgcccaggggaagaggcggacctacgtgctgtacagcggaaggatgacgagtccctctgttcgtacatacagcgcttctatcaggtccgcaacactattccgtgcattccagctcatgcggttgtatatgcattccggaacggcgtgcggcataatcacatgctggagaagatcgcctccaaggagcccaagaccaccgtcgagctcttcgagctggcggacaaggtggcccggaaggaggaggcgtgggcctggaactctcccggcaccggtgcggcggccgcggctacccccgagtttgccccccgctctaagcggcgagataggagaggcaaaaggaaaccagcccgctctgatgacgagggccatgtccttgcagcagatgggcccacacgggccccgcgcaaaggaaaggccaccggcgataagccgagccccaccgttccctccggcgagggccggtcagcggacaagtggtgctcggtacacaacacctaccgccacagtctcgccgactgccgctcggtcaagaatttggccgagcggttccgaaaggctgatgaggagaagcggcagggtcgacaggagagcaaagcccctgcgacctcaaccagtgaccggcgagaggaggccaagaacaagcccccccccccccgatgatggcggagacgggaccgtcgccacgctcgacggggagggggggttgcgctcacacctctcatcgaggcttcaagaccatgaggcgagagcttctggccgttgttcccacgcacgaggcggtccggaaggcgcgctggtcggaggtgaagctcacgttcgaccagagcgaaccattcgacggccccagggatgaagctccagtcgtcgctcccaattattggcgttactccggggcacacgtggccgcttggccacgtagagctcccggtagccttcggcgactccacaaacttccgcaccgagcggatcgacttcgatgtggcggatctcaatctgccctacaacacagttctgggcaggcctgcgttggtgaagttcatggccgccacccactacgcctacctccaaatgaagatgtcgggtcctgctggtcccatcaccgtctttggtgatgtcaaggtcgccatcgcctgcgcggagcagcgcgcagacaacctggcggtggccacagggccgcaggccgcagaggcctctgcgtcccacgcctccaagaagcgcctcacctcggctgacgaggaaggcgcgctcgtctccttcctgcgggcgaattctgacgttttcgcatggaagccgtctgatatgcccggggtccccagggaggtgatcgagcaccgccttgccgtgcggccggatgcgcgacctgtccggcaaaaagtgcggcgtcaagcccaggagcggcaagccttcattagggaggaagtggcgcggctcctagaggctgatttcattcacgaggtgatctatccggagtggctggcaaacccggtggtcgtcccaaaggccaatggcaagctacggatgtgcatcgactacaccgacctcaacaaggcatgccctaaagatcccttccctctgccacgcatagatcaaatagtcgactccactgcgttgtgcgaccttttgtgttttctagatgcatactctgggtaccatcagattcgtatggctagggaagatgaggaaaaaactgcctttattactcctgtgggcactttttgttatacaactatgccttttggattgaagaatgcaggccctactttttagcgcatgactctattactttaagtaatcagatagggcgcaatgtagaggcgtatgtcgatgacccggtggtaaagacgcgccaccaggacatgttgctacaggacctggccgaaactttcgatagtcttatgtccacgcgcgtaaagctgaaccccgataaatgtgtgttcggcgtgccggcggaggactccgagagctttccatcaa

SEQ ID NO: 12065 - DNA, 1098 bp, Oryza sativa
  Clone ID: PAT_MRT4530_18228C.1
ctaaaacaggttttcgctggcggtactaggcgccgccagagagtaaaggccagtgaagatgtagagttttctctggcggagtccaaccactagagaagatctattttcgctagcggctttctcaagggagccgccagtgaaaattgtctcaggttcagcatggcgcaacatctcctccaaatcaaaagcagttccatcactaccattagcatcatctactgtgacatgaccatcatcaacatcattagctgtgtcataaccatcatcatcaaccgattcttcttctactaccatgaaattccaatcattgaacacttcatcctgtactatctcttggttgggaacttggaagcttgcagggatttctccatggtgtgaccagtttgtgtagccgccgttggagcaccgccgtcgccctgctacccggccgcgcgacgccgccggagcgctgcggctgctgcccgcccacgcgtcgccaagctgcgccgtcgctggcctactgcctgtgcgctcagagccgctgccgaagtgccgccgtcgccctgctgcccgtccgcgcaccgctgccggagcaccgtcgtcacccacgatgagcaccacgtgcccatgatgtgtcgtggtcatccgccggtgccgctgccgctctcgcaatggcgaggccgttgccgaaccgtactgtggcaggcacatacgtccgacacctccctccgtcacttccctgtacagtgggcacttgaagtcgtcattgtcgccgttgtccacaccgagcgagccgtggtggactggtggcagagatccacgcactggcgtggtccgtggccaccgccgctgccgagcaggccgcgcgcgccaccgtccacggaacaggccgcatgtgcttcgggctccgccaccgccgccgagcaggccgcgcgcgctccgggcactgccaccgagcaggctgctgctgctgtcgagcagactaccgccagtgagcaggccaccgccgtgcgtgctgccgccgctgaacaggccaccaccgccgagcaggctgccgccaccgccgccgctgaataggccacacgcgctccgggtgctgacgtcgatgtcgacgatcat

SEQ ID NO: 12066 - DNA, 321 bp, Oryza sativa
  Clone ID: PAT_MRT4530_18229C.1
atggcgaccgacgcaggccgtgcagcagcggtggtgacgagcaccgtgggagccggcgccgccggcgcgggtggcgccgctggcagccgtcgcaagggcgcggccgcggcaggagccaggaggagacgccgtcgccaagagcccgtgacggcaggagccaggagccgccgccgcccaggaataggaacagacgaacaatcactccactcggtctcctcatctctctcctatttcctcgggcattatggacgagcagctactgtccagacaccagttatcaaccaggccatagagctaggccatccaacctgccaattctga

SEQ ID NO: 12067 - DNA, 414 bp, Oryza sativa
  Clone ID: PAT_MRT4530_1822C.1
tattttccttttttgtctgcacggaggcgtgcgagaagaaaggtcgacgtctgtttcaccgtgaacgggcactcctacttcaacctgatgctcgggaccaacggggacgaaggcaagcaccatcccgtcctggtgctgacgcacaagctgctcctgctgtcgcaccctgacgtggacgagggggcggaggtggacctccagcccgatgctctacggcgcagagcctctccttgcaagggacgcgctctggacgagccgcatccgggccagcggcgacctggcccaccccgcttggctgttcgggcagaccttcgaggggggccaggtctagccgccgccgccttgggcgactacggctcccgcttataataactcgggggacatcttcgggctcgctgtcgatgtcgcctttct

SEQ ID NO: 12068 - DNA, 327 bp, Oryza sativa
  Clone ID: PAT_MRT4530_18230C.1
atggctgatccgcggctgttctcgtcgggatccggcacccgcgacgaccggacggacgcctccggcaggcggctcaacggccgccgcatggggaacacgctcggggtcatcggcctgctctacgccgggatcgagagcggcatggtcgccgtccgcgaccgcgacgactggatcaacagcgtcaccgcggggctcggcaccggcgcgctcttccgcgccgccaacgggccgcgctccgccgccgtcgcgggcgccatcggtggggtcctcgccggcgccgccatggcaggcaagcaggcggcgaagagatatgtgcctgccctctga

SEQ ID NO: 12069 - DNA, 732 bp, Oryza sativa
  Clone ID: PAT_MRT4530_18231C.1
tcaccattctcatccccaacatcagctggaagtttcaatgaagcaatctcttcctctttcttgtcccgagggaaatataggggaagcaatcgcttatatatctctgtatcagatgatgtagtagtacaaaactccaccccggttattttgccctttctgcttcctccaggaaaacgtctaaccaagtttctttattcgccaaaccatgaagccaacccggttcacgagggtaatttttggctcctggatatatgcgacccacttgcaatgctttccagaccattctcaatgagaagttccaaacaagacctgtagcagtggctaagtgcattctctgcagctgtgtgatacttgacagcatatttagggcccacagtatgaattaccttccgagcaggcagatcatatgcattggtcatcttagccatcccagtccggcaaccacccagggtggtgcactcctcggcgagccctggcccagccgctgcatgcagaccctggactactatgcgcctcgtccaagttctcatttctcgaattgacaacggcatcgacctcaaggttccacgggtggccgcgccagagacagatcttcgagttgatctcgtggtcgacggggaaccgggacgcgccacggcccccggccccagcggccgctctagaggatccaagcttacgtacgcgtgcatgcgacgtcatagctcttctatagtgtcacctaatcatcctgct

SEQ ID NO: 12070 - DNA, 1097 bp, Oryza sativa
  Clone ID: PAT_MRT4530_18232C.1
ctaatcaactcccgggccatcaaaattgcggcccatgaatcgcaaggtcggcgaccgcgaaaatatcacatcacacacacacgcaaacgcaagtggcttggggctccagaaagttgtgtaaaataataaagaggccgacgcggaatacgcgcagtcagctccgtgccgaaaccctcctcctcttcctctctgcctttcttccgctccacgccgccctccgccgccgccgccatggctgatccgcggctgttctcgtcgggatccggcacccgcgacgaccggacggacgcctccggcaggcggctgtacaacccctaccaggacctgaatatcccctacaagcagctctacgacctccccacctccccggagttcctcttccaggaggagtcgctcgcccagcgccgctcctggggcgagaacctcacctactacaccggcataggctacctctcgggcgccgtcgccggcgccgccgtcggcctccgcgacgccgcgcgcaacgccgagcccggggacaccgccaagatccgggcgaaccgcgtcctcaactcgtgcggcagcaacggccgccgcatggggaacacgctcggggtcatcggcctgctctacgccgggatcgagagcggcatggtcgccgtccgcgaccgcgacgactggatcaacagcgtcaccgcggggctcggcaccggcgcgctcttccgcgccgccaacgggccgcgctccgccgccgtcgcgggcgccatcggtggggtcctcgccggcgccgccatggcaggcaagcaggcggcgaagagatatgtgcctgccctctgattcgtccgcacggtattctctctgctgtgataagaaatggtcgaatcaattggtcgccaaaaggaatgtcatttcttcgttttgctctcctggttaatttattattggagaagggttttcttctcgacattatattttagcgttatgttacatgtaatcgatatgatcggatcagatcactaaatttttggcctatgttgcaatgtaacgtcttctcgagtagctagttagctggtaccaacacaataatacatacttttacgttaaaaaaaaaaaaaaaa

SEQ ID NO: 12071 - DNA, 438 bp, Oryza sativa
  Clone ID: PAT_MRT4530_18233C.1
atggggattcaggagatggtacggcagatggggattcaggagatggcgcagcgggcgacagtggcgcgatgtgttggcggcatcggggatgattggggtgaggatggggattttgtgagtgattttcgggtgggcggagtgagagggggcgccggaggcaggggtagtgggagcagcctaaggagcagaggcctagagcagctggcgaggaaggtgcgtagcatggcgttctccgcgttcgaagatgtcagccgaccacagcggcagggaacaagattgactatggcagagaacggccgagtttggatagcggaatccgattcgaccgaagcggtggaggtgatcttggcacgaccagcgccaaagggcgtccgctcgctgcgatggcactgccatcagggagatgggtttggccgtgacattttagttttatcgtga

SEQ ID NO: 12072 - DNA, 621 bp, Oryza sativa
  Clone ID: PAT_MRT4530_18234C.1
atggggtggtggccggtggcggaggcaggagaggcgtcgctcaggatagaggtggcggaggcggctcgaggcggggtccgggatagggacaacggctggtggcagaggcatgcaactagaggcgggactcgggaagggggctcgtcggctggtgatggagacgtttggaggctcggttcgaccccctctcttcagcgtttggaatggcggcgatggctggtggcggaggcggtgttcaggatgagagcggcggctgggtcgaggctaggaatgggggcggcgaccagtggcggaggtgagggaggagaggtggtagatcctgtcgccgccgtctcttttgcccgcctctcctgccgctgccactaccacccgcctcttctactcagggtgctacgatgtgggggagggggtggggggaagctgtgcgacgggtggcttcgagtttgctgtggaggcggcgaggtcaacagtgaactccacaacctgagcaccgctgccactaccgaccccgtcttgtcacgccgagcgttgctcggcgcgagtagaggagagagaggacatccaccactagccatgcaggcgtgctccactcgcctccgcaccgccgccgcagggtgctaa

SEQ ID NO: 12073 - DNA, 454 bp, Oryza sativa
  Clone ID: PAT_MRT4530_18235C.1
cgttctgaacgggtgttgagcggccgaccgtttacgcgctcgagggttgccgcaccctgatcgttgtgtcctctgttatcagcatgagaagtcgatcacattttggtcatgtgtccggaatcccggcaactctagtggctcgtgctcacaacaaacggatagcccggttgcctgccaatgaatgaagactcctttcacctgtggatttgcaatagtcggaagaagattgataaagcccactgatgaggtttcaacaccattgcaactcttgtagtgtggacgatcgatctagaaggaaagaaataatcgggtcttcagtcaacaacagaaatctttgtccaaggtgacgtaggcgatagctgctgacgcagcactttggcgcttggccaatgcggtggcaccggcgataggattgtaactgcctagagcccatggtcgccaaatgcttttgtga

SEQ ID NO: 12074 - DNA, 288 bp, Oryza sativa
  Clone ID: PAT_MRT4530_18236C.1
atgtcggcgaagacgacgagggtcaccgcgcccgtgccgaccaccgtccacgacgccgatggcacgccgagcgtggacacgctcctgctgcagctgcgcgagctgggcgtccgggaggaccatgcgatcaggtcggcgacgctgccgccaccaccactgccgctgccgcggcacaggaggagcgatgccacgtcagcaaaacgggacaaaaatactgccgagggacctccggtgaacggtttgaggacctcaaaaaatctcgctgttaagttgagggacctccggtga

SEQ ID NO: 12075 - DNA, 471 bp, Oryza sativa
  Clone ID: PAT_MRT4530_18237C.1
caagctaacaaacaatccatggattcctaccaaaaagcaaaacagggatcggtttacattcatccgggattatgacgccacagcaggggatatttaaagggggggggccacaagggagacccaaatccatccataccacacgttatatcacgtaaaaacccagggggaaggttccaaagcaagggaaaaataccagagcaaaattcccaaaaccccaagattagtcggaatgacaaagccccggggaaaaggctcaccctggaaaacgtcataacgatttgaaacagggggaaaactgattgaatcgttccctaaggccggaaatttgggggaatttttgggggacaaaaaagctcacaccagggggaggctgggatgattaacaacaacggaaccgaaatcatcccgaaggttacgggggccataaaaaacactatgattctccagtcaaggactgcttccggggctacg

SEQ ID NO: 12076 - DNA, 251 bp, Oryza sativa
  unsure (1)..(251): unsure at all n locations
  Clone ID: PAT_MRT4530_18238C.1
aggcaaacatttacccgagttatntttttttttggtaaagaacacccttataaactgggaccagggggaataaggttcccggccggggttgagaatggagaggtccttccattcattggcttgtactggttggaaacaggggttccttttttttatacttcacaatatccaaatcccggttttggagggaggggttttaacaccacgaacacaaggtttcatgcgagataagactgggaccatttaagaag

SEQ ID NO: 12077 - DNA, 178 bp, Oryza sativa
  Clone ID: PAT_MRT4530_18239C.1
gtgctggccaaaacattttgtgaatgtgatgatgatgatgatgatgatttcaccaaacaatttttcaccccaactgaaaaggaaacgtcgatgaccagttttcttattttaaattgcccactaaactctttggatatttattggccactagctggcctgtttttgccaccacccaaac

SEQ ID NO: 12078 - DNA, 2514 bp, Oryza sativa
  Clone ID: PAT_MRT4530_1823C.1
ctactccccgttgaggcgatcccaactccagtgctcaacctcgaagccaccgcacgcccccttcgtcaaggggtgggcaaggcgggagccggcccatggagaggacgggttgaagtattcattgggttgcgttccaaagtaagcaaactgtggatggaagaaagcatttggatcatactcaggaggaggaggaggtgctgagcttgagctagctccaggatgagaagagggcaccgtcctaggagcacggggagctccaagctgaaggcggggcttgtactgcttgtgcttcttcaaattttgcccagcagccccaagcttgtcttgaatcaacctcatgatgtaaggggcataatagattccctgagtgaaggtccccttggagatggcaatctcttgcatcatgagagacacaatgtcgaactgacgaccctgaatgattgcatcgatgacgtgccaagccacccccctaatgtcatcattgttgccaaggcgaggaaggatggtagctctcacaatctggagggtgttggacatccacttcatctcactatagtctccagccacccacactgtagcatagaactgccggatcaaatattcattgtagtcttgcttgagggtcacaatccggtcaataccaacagtcttgaagagatcctgcaagctctcaaactctggagtctcattgatgtctctccaagaaatccacttatgctttgcaaatgctttccctgcataaacctgttcatacacagtcttctggaaagcggtgtgaaaacggggatccagggtgtctcgaggcctcaagaactgatcatgatgcctcaagatggtatactgcgatggattcctcatgttcaccacaaactggatgaagggatcaatgtgcatatcatcatttccttcatcctcatcctctccacttccactgacatcatctccacttgccacctcactagccccctcaatatttgcttcaacctcttcatcactttgagcgtaatcctctccgctcgattcctcagtctcactcacgggatccggagtgggcgtacggtgaccatggcgagtgcggggaggcatcactccctcatcaaggtcgagatgcccgttggttgccataggtgtcttgatgggcttcgcatcatccaaaccaaacctcttgagtagatccttgatgtacttggtttggctcacgaacgtcccatccttgagttgcttgatttgaagtccaaggaagaagctcaactctccaatcatggacatctcaaattccctagacatcatatcaccaaattccccgttctcatcttgtttgttcctatagacccactttgtccctatgacattgtggcctctaggtctttcaaccaaagtccacaccttgtttcttgcaaagttgttgagctcttcatgcatagcattcatccaatccggatcacaaagagcttcaacagccctgtgccatgacatctcgactaccgggccgcagctcgtgtagccttcatttgcccgggtccacgggagtggggcccacgcgtcagcctctcggtccacggtggaccgggagcacgcggctggcggcggtcggcgccgtgggtcccacgcgtcagccgcacccgcgggcgcgggcggctgacggccgggcccacttggcagccgcgagggcgcgcccgaaggcggcctcgccggcacggccgacgggaggcggcacgaccgcgccccgatggtcaccgccggcgaccaccggcgcggcggagcggcgcccgagagagcggagaggagagggaagcgaaagggcggtcttcggctcaccccgggtcgacggcgacgacgggaacggcggccgaagcggaggaaggcggcggcgcggttcgggacggcgaggacgacggtgctccggcggtcggcgagcgaagcggaggggtggccgaggtcgacggggacgcggcgaagccgaaggaggtgacgccgagtggggaggaggtccggagcgacgacggcggcgaaccggagctcggtggcgacggcggagagaaggtgcgacggtgcgggctcgattccgacggggaggagaggcggcgagtggcggaaacggaggaggagagcacggggaacgcttatatagcgtcgggagggggagagcgcggccggagagggaggaaacgggcgcggagatctcggccgccattgaagacgccggcgaagattgcgggagcgattccaaacggatccgagggagagagagagagaaaagagggggaaaagagagagggaatcacggggagtgattccccccactttaatgcgcgcggggacggcgggaggcggcggaatcggcggcggcggcggcgctagggcacgggcgggcggcggacgcggcgcgaggtcggggatgacaggtgggccccacccgtcagcgagggtggcgggcgggcccgcctcatcaagcacaagtccaggacgggctcctttcgcctggcgacactggaaggcgaagagttcgaccat

SEQ ID NO: 12079 - DNA, 1035 bp, Oryza sativa
  Clone ID: PAT_MRT4530_18240C.1
atggccactcgaatcgcacaagcccggaaaagacaaggcagagatcgccggagctcgacacgtacgcccctgaacaggggacaaccggacaaggctacacttttgcagctccagccaggacttgcattgcagcgatcagcgcaaccgaagcgaggaataataatcggcaatgatagcgggagtttggtcagacgagcctcagacgaacagccggtcgaatattcactctcatcaccagcaaagcggaaaaaaaaacacgacgatatatgtggctctcgtcgttttatattcacatgtatgatgtatcatacggagtatgatagtatatatcgatttgattcaccggtgaaaattctcgcggccgccacggagaaatcggcccagaaatccggcccgagaaaaaggcccacgcgcgaagcagcccaccaagcccggcggcggcgagcagccgcggccatgaaggacccgttcgaggcggcggtggaggagcaggagtcgccgccggagtcgccggcggcgaacgaggaggacgcggccggggcgcccgagggatacgacggcgccagcgggtcgcgcgggcctccgctgcggctgcctccttcgagggccgcgccatcgggctccggtggtgccgccgcggccgcggcgaggggtaaggtggtgcgggtccagaaggagcagcaggaggaggaggatgacgaggaggaccacatggaggtcgacctcgacaagctgccctccggcaccagcgaccccgacaagctcgccaagatgaatgccatactgtctcaatttacagaagaccagatgaaccggtatgagtcattccgcagatctggattccagaaatctaacatgaaaaagctattggcgagcattactggcagtcaaaagatttctctaccaacaacaattgtagtatcaggaattgcaaagatgtttgttgctagaatagttatgactgagaggaaagattctggaccacaagggaaccagagcaaacagtacgtacaagctgaagtactacggtactac

SEQ ID NO: 12080 - DNA, 1685 bp, Oryza sativa
  Clone ID: PAT_MRT4530_18241C.1
atgcctcactcctcctacctcgccctcgccctcgccgttgcggcggttcttgctatggccgccgtcgaggtgtccggcctcggcttcgacctccaccaccgctactcccccatcgtccagcggtgggcggaggagcgtggccacgctggcgtgtcctggcctgccggcgccgaggtgatcggctcgcccgagtactactccgcgctgtcccgacacgaccacgccctcttcgcgcgacgcgggctcgcccagggcgacggcctcgtcaccttcgccgacggcaacatcaccctgcggctcgacggatccaacctctgcgaccagcccaacgcctgcgccacggccaccagcagctgcccctacgccgtccgctacgccatggccaacacctcctcctccggcgagctcgtcgaggacgtgctctacctcaccagggagaagggcgccgccgccgccgccgccggagccgccgtgcgaactcccgtggtgttcgggtgcgggcaggtgcagacgggctcgttcctcgacggcgccgccgccgacggcctcatgggtctcggcatggagaaggtgtccgtgcccagcatcctcgccagcaccggcgtcgtcaagtcgaacagcttctccatgtgcttcagcaaagacggcctcggccggatcaacttcggcgacaccggcagcgccgaccagtccgagacgccgttcatcgtcaaatccacacactcctactacaacatcagcatcacgtcgatgagcgtcggggacaagaacttgccgttggggttctacgccattgctgactccggcacgtccttcacctacctcaacgacccggcctacacggcctacaccaccaatttcaacgcgcagatcagcgagaggagggccaacttcagcggcagtactcgttctggtccatttcctttcgagtactgctactcgttgagtcctgatcaaacaacggtggaactgcctgttgtgagcctgacgaccaatggaggagccgtgttcccggtgaccagccctgtttaccccatcgcggctcagatgacaaacggagagattcgtatcattggttactgcctggctgtcatcaagagcgatctccccatcgacatcattggccagaacttcatgaccgggctcaaggtcgtcttcaaccgtgagaaatccgtcctgggctggcaaaagttcgactgttacaaggacgagaagatgacagacgacgggtcgagcgtcgggagcccgagcccatcgccggggccgaccactcacgtcttcccgcagccgcaggagagcgactcgccggcgggcagaacgcccatccccggcgcggcgccggtgccgcggtcgagcagcgcggcagctggcggccgtgcaggcttccggctcctgtcgtccatggcgctcttgctgctggctgctgctgctgcagctgttttctgatgattttttttttacttggggagtttataggtgatttcattcgtggtggctgctctgctgtgtacataacacatgcatgcattcgagatgatttttattcagaaagcgtagatagatcgatcgatcattgtaggatttagtaatttgttcttgtgatgatgattgatgtgtatatggttacgaggattttcgttgttggattcggtgataagcgagctacgttcatttatcccccgaat

SEQ ID NO: 12081 - DNA, 225 bp, Oryza sativa
  Clone ID: PAT_MRT4530_18242C.1
atggaggcgatcttgccgcatatagggtggggctggtgttcagaactgcgcaacggcgggatcgctggcagcgacggacagaaaggtgctcgggcggcgggcgacggaggtgagcacctgtgctcggccggctgtggtcgggtggcgagctacggcggtgggcagctgtggtcgggcgccggacgacggcagtggcaggctgtcgtcgggcggcagcggaactaa

SEQ ID NO: 12082 - DNA, 252 bp, Oryza sativa
  Clone ID: PAT_MRT4530_18243C.1
atggacccgcacctctttgtccccacgccagccaccgccgccttgttgacctcctcatcaccatcgtgggaagggcagccagcaccagatctatgcggctgcccgaggtcgctccagctacccgagcccgccaccactgctcccgtcgtcctccacatcggattcatcgccgagctccttgccaccgatcgccgacccgcttgccgctccagctcactgccaaccgctcttgtccactgtcagccgctctag

SEQ ID NO: 12083 - DNA, 867 bp, Oryza sativa
  Clone ID: PAT_MRT4530_18244C.1
tcgcgatctagaactagtggcgaagggggcgcacaagctccgcggacgcgtgggcgcgctcaaccaccgcctcgtgtcctggcgcgtcgtcgacagcgccggggcgtgggcggccggcacgggaatcccggactacaagggcgcctccgcgtccgccgtgctggcctacctcgccggggggagcagctaccacgaggacgacgacgacgggggcgcccccgccctggaagccgccccgccggccagcggcagcggcctctctgacctgtacgacctcatcgtcggccaccacgccgccgcccgccaagagccggacacggcgcgcgccactgacatagaagtagcaaacaaggacggaatcgaggaggagccggatcaagatgcagcagcagcgtctggtgaagaggaggaagaagacgacatgggcttcttcatggtggggatcacaattgcgctggagttctcagatggggaggaagactggatcgtggtggaggagatctgatccgatctcggtcagttcgatcaagaattgcaaaataaagaatgcaagagaggtcatccatccaatccaatcatccatgtgttggctctgtatgatcctgtctctcccatctgctggtggtgttcatattattgttgctccagtcgattgtgtccatgtgtatatggtgacttttaatcatcgcttaatttagttgtggtcaattaattggtcatggattatgatgcatgattcaaaacctgaatttatctcatgtgtgaataaaatggagaagggaactattcttcttcacttgttggttctagatgcgtaatccatactgaatttgttccatcccagttgtactgattgctcttctatgg

SEQ ID NO: 12084 - DNA, 551 bp, Oryza sativa
  Clone ID: PAT_MRT4530_18245C.1
aaggaagcagggcaactttgcgggtgcagtggaggagtacagcagagccctcagcctgacacccagccacttcaaggcgctgttcaaccgcggcttctcgtatgacaagctgggcaagtatgacttggccatccaggactacaccaaggccctggaggttgaccctgccaacagctttgcatactacaaccgcggtatcaccaaggaccgcatgggtgactttgagggggcagtggcagacttctcgtcagccatctcgctggaccccggcaacgccgacttctatcacaaccgcggcttctcgctgcgcaagcagggccgctttgagtcagccatccgggactacacgcaggccattcagctcaacccaggtcactgccgcgcctactacaaccgcgccttcagccacgaccgcttggggcagtttgaggatgcagttgcagactacagcagggccctgcagatagagccggcgaatgccacagcactgcacaacaggggcagcttgtttgagcggatgggcaggtggaggatgctctgacgacttactg

SEQ ID NO: 12085 - DNA, 1263 bp, Oryza sativa
  Clone ID: PAT_MRT4530_18246C.1
ctagatgccggcgccgacgccgccgcccctcaggtgctcgcgcgccaccgccgacgcgccgtggccgtcgatggcggccatggacatcacggcgagcgagcgctgccggcacgcgtggcaggtcacctgcgcgatcaggcgcgccgcgtggtcccgcagcgcgagcgccttctcgagctccccgcgcgcccggtggcgcgcgcggcgggcgtcctccagcgcgcgctccgccgccgcggcctcctcgcgcgcccgctcccgcgccgcgtccgccgcggtcttctcctccagcgcgcgcctcacctcttcccgctgctgctcctcctcccctcctgccgccgcggcgcaggcgccgccgccgccggacgccgcggcgacgacggcggcggggccgattgagagctgcagcttcgtcgttgtcatcgtcgtcgcgtgttgctcgtgggaggaggagccggtggtcgtggagttggacgagaacgcggcggccaacggcgccgtggtggacgccgggaggagctgcagctcaggcggcggcggcggcggatgatggtgatgatgccgcagcgccgcgggacggatgaccggcagcgtcgtggccacgggcacgacctcaccgcgcacacgtccagagttacacgcatcctggtgctctatgaagctctccactttgattgctatatttgatagagatattatatacttcattcttaaataattggctatgtcactatacaggtttaaacttctggtaatttttcgggagaagacgcggccgcagtcgcaggagtggccgcgggtgccgcaggtcttgaggtgggccttgtagtcggactggacggcgtagcccttggcgcagcgggcacacacccactgccgccggccgccgtgcttgcgccggaagtgcttcttgatgccgacgaggtcgcccagcgcgtgtgccgggtcgtggtggaggcagctcggctccgggcacacgaacacgcgcttccgcgcccctccgccgcccgcgccgccgccggcgccgccgccgccacccgcggcgccgccgtcctccgccgccgtcgccgccgcggggcgcttgaccagccgccacggcaccttgtgccggcgccggtgcatctgcaggttctgctcccgctggaacccctgcccgcagatctcgcacacgtacctgtccgactccagcagcgtcctcggcgacagcgccaccacctccgcatctgggtctacgtacacacgggctccatgatcgaacaccat

SEQ ID NO: 12086 - DNA, 357 bp, Oryza sativa
  Clone ID: PAT_MRT4530_18247C.1
tttttggttttttttttttttttgtttcttttttatttttttttttttatgtttttttttttttttggcaaaagaggagagggaaaattgcccccaaattgcccaaggggaaactttaggcgggccccaggacagggcctttctttaaatacacaaacaggggtggaccagcccggcacaaaagaaaggggccgagcctgccctaaaatcttaccaacaaaaagggcaaaagaaacccccaattacacaaaaatgggatacaccaaaacaaaataccttgaaacagggaaccgaaggatcgggccctgcaactaaaacggcaaaattgctaaccggttgaaaaaaaaggggaaaact

SEQ ID NO: 12087 - DNA, 210 bp, Oryza sativa
  Clone ID: PAT_MRT4530_18248C.1
atggaaggccgcaccgagaacgactccgccacctacgccgactctggcaagtggcaaactggcaacccctgcctcgacttcttcttccatgtcgcagtcatccatggagctcgcgttagcgttagtgaggtggaggctttgttcgagctgttcaagagcattaatggttctgtgatcgacgatgggcttatcaataaggtgatcatctaa

SEQ ID NO: 12088 - DNA, 388 bp, Oryza sativa
  Clone ID: PAT_MRT4530_18249C.1
cgcctcggcggaggcggtggtggcgacggcgactgcggcgacagggcatgcctgacaccacacgaggtgatcaaggccatgtggaaggacgtgccggcgaggaccaacgactacatcacgcgtcccaaggggaacgggtaccggagcttgcacgtcgccgtcgacatgagcgagccggggccggaggggaagaagaggccgttgatggagatccaggtgcgcaccagggagatggacatggccgtcgtcggcggccaggcgttgcacgcgctctacatgggcggtctcaccgaaaaatgctctagattcaacaacatctcaggaaacccctacctaatgtaataccttattcccacagcttcatatttgctgaacgtacgccatgtac

SEQ ID NO: 12089 - DNA, 351 bp, Oryza sativa
  Clone ID: PAT_MRT4530_1824C.1
atggactgccttcagctcgtcttcacgctcccaagtagcttcttcctcagcgtggttgctccattggaccttgcaaaaacggattacccgcttctctcagtatatcggtcccgaacacttggctttccccaacttggtcccacaatagcggtgtccggcatttgcggccatacaacgcgcttcatagggtgccatttgtatgctggcttggtagctgttattgtaggagaactcggcataagggagactcttaccccagaaatgagaggtgaactggcttccctgatcagatacaattttcttgggaacgccatggagactcacgatcctagcgaagtagagttcagctaa

SEQ ID NO: 12090 - DNA, 483 bp, Oryza sativa
  Clone ID: PAT_MRT4530_18250C.1
ttttgacctctcctctcagtgtatgacaggtgtggtgtttacagacaagcaggctgatgcgcaacttgctctgtggtggttagcaccgaatcatgtagtactaatgaagctaattaggcgcaagaggtgagaggtggggcagaggcggatcatgcctgatgtcgggatgtgcgagtaaattagagggttgaaaagggcggcgaagttgtgaagagctgattccaatcctcggtctgactttgggatcaattgacatatctctaaagtgctgcagttgtagtaggggtctctgtataaaccactcttgagctttctcaactccaagtggatctattgcaaccaacacagtggctctccctgctgaccatgtatgtgtcttacttctgagataagtctgttttagttgaatttcctatttttattataggaaatatccaatttgagatatgaattgagatattaccctacctactctgttatatg

SEQ ID NO: 12091 - DNA, 2349 bp, Oryza sativa
  Clone ID: PAT_MRT4530_18251C.1
gcacttactaatggcatttttttttttggaaaaaaattgggggttcagttgaatctgcatgctccaggatggagatcgacgggcaggagcctgggcacgagcacgacgggatgatggagccgcaggtggtggacctcgaggaggaggaggaggacgacagcatcaacttctgggcctcgctgggcgtccatgccgtcgaccagatgccgctgcacccccgggttgggatggagttcgagtccggcgaggccgccaagaccttctacattgcctacgcggggcgcgtggggttctccgtccgcattgctcggtcgcggcggtccaagtgtaacgagtccatcatcatgctgaggtttgtctgctccaaggaagggttcagcaaggagaagcatgtcgtcgcggggaagaagacgaggaagcggcctgcttccatccgggagggatgcaatgccatgctcgaggtgctacgcagaggcgatagcaagtggattgtcaccaagcttgtcaaggagcataaccatgaggttgggatgcccagcagagtgcactacattgccatggagggtgatacggtggtcgacccttacattggtatggagtttgaaagttcgctgtattcgctcacagggtgaggtacttgttattgcaaagaacttctctgacacacgcaatctcctattgaacggtctagatttccagcatcctagagagttccagtataatgatttagggccagaggatgctcaaagcttactcagatatctcaagaacacacaaagcgaggatcctgcttttttctatgctgtgcagcttaacagtaatggacacacagccaatattttctgggctgatgctaaaactaggatggcttactaccattttggtgatgttgttaggcttggtacactgtgcagaaacagcaagtatatacctattgccatattttcaggcgtcaatcatcatttgcagcctgttgtctttggctgtgcactaattgttgatgattctgaagcatcgtttgcatggttatttgaaaaatggcttgaagcaatgcctgtgggccctcctgtctcgttggtattagagtttaaccaagaaatggctgccgcagctaccaaaatactacctgatactcattgtacgttctgtgagaagcatattttgggcactgtcagggaagagctaggaagtttgtatccagaaccagaactagaccatttcattactgatctgagaaagtgcattgactgctgcagattagaagaatcatttgaatcatgttgggattctgtcatcagaaaatatggcttcagaaataatgaactattacagtctctatatgaaattcgcagacaatgggcccctgcatacacaaggaaggtattctgtgccagaaatctactgccacaaagctgtcagaatcttgaaaatgttatcgagaagcacttctcatccaagacccagttatgggtggccgttcagcaacttggacaagctgtttgtaatttttatgaaaaggaaactcaggcagattatctgacaacatttcaaatggcaacagttaggactgcatcacctcttgaaaagcaagcaagttcaatattcaccaggtcaatatttgaaaaatttcaggatcagtttgccgagtcctttgggtaccatgcagatagacttgaggatgacatgctacacaagtatcgtgtcacagtaagtgaaggggatgaggaggcacatactgtttctttcaatccagaaaaaaagacagtgggttgtagttgctgcctgtttgagagctgcggcatcttgtgtcggcatgctcttcgtgttttcattattgaaggtgtgcgtgctctgccaaaggcttatatcttgaaacgctggacaaagcatgcaaaaagtattgccactgtagatgattacattgatctaagaggatgtcgtgacgatccttcaaccacaatgtacaatgatctccattgtgacgcaatcaaatgtgcaaaagagggttcggcatcctctgagctctatagtgttgctaaagaggcattgcacaaagctcgccaaacttgcaacttgggtttgtttttgcttgcaagaggcttaatgggttgtcagtcattcttaaagcttattagctgtcaagacatatctcaaacaaatccagttaaagctagcaaccaaacacacatatcactcaaacaaatccaaaaaatacacaataaacctaacttggttgtgaaaagttgcatgatctataaatcaaatctaataagttagatgacacgtgttaatttccctcagttcagtatagtaacttctcgaattaaagtttcaataaataaccacctt

SEQ ID NO: 12092 - DNA, 693 bp, Oryza sativa
  Clone ID: PAT_MRT4530_18252C.1
atggagtggcgccggccacgccacatcgaggacacggtgacgagtgccgcacgggtcgcggtggtcgaggcggctgacggtgagcgcgaggcggacgaggcggcggacggcgagcgccgcgcggacggacgaagcttcgttggtgagggcaacgaggagagccgcctactccgccgtcgccaccaccgcggatacgtcggccccgccgcttgccgctctctctctcttatgggtccgcctcggcgccgtcccggctgtgccgcgctctgggaggacgcggaggaagccatcccggtcccggcgcgcctgcctgagtcgtcgcctgtccgtgcgcccgccggcgtcggctcccgtccacgtgcccgccggagtcatcgccgctgctcccccgctcggccatcgctttcgtcgcccttctacgcgcccgccggagttggctgccgtcgcccgtccgcgcttccgccggcgttggctcccaggcggagggacacggcggcgggccacatctcgcccgctggctccacacagcccggcgccgaggcgggtgcgggggtgttcggcgagcgcaacggcgacggtgaagaggggagggaggagtggtggggacggcgaagaggggagcgcgacgtggacgtcgctagtggcgagcacctcttggagcggctcgggaggtgggggatcagacacgagtag

SEQ ID NO: 12093 - DNA, 1177 bp, Oryza sativa
  Clone ID: PAT_MRT4530_18253C.1
atggagatcgacgggcaggagcctgggcacgagcacgacgggatgatggagccgcaggtggtggacctcgaggaggaggaggaggacgacagcatcaacttctgggcctcgctgggcgtccatgccgtcgaccagatgccgctgcacggcggcgtccagatcgtcgaccagccgtcgccgccgccgcaggagcaggcgcaatcgcagtcgcagtcggtccgcaaggacctgttcccggtcgactccgacccctgccttgagccccgggttgggatggagttcgagtccggcgaggccgccaagaccttctacattgcctacgcggggcgcgtggggttctccgtccgcattgctcggtcgcggcggtccaagtgtaacgagtccatcatcatgctgaggtttgtctgctccaaggaagggttcagcaaggagaagcatgtcgtcgcggggaagaagacgaggaagcggcctgcttccatccgggagggatgcaatgccatgctcgaggtgctacgcagaggcgatagcaagtggattgtcaccaagcttgtcaaggagcataaccatgaggttgggatgcccagcagagtgcactacattgccatggagggtgatacggtggtcgacccttacattggtatggagtttgaatcacttgaggccgccaagacattctactactcatacgcgacccgtgtcgggtttgaagctcgtgtgcgtcagtcccgcaagtcgcaagatgagtcactcaagatgctgaagcttgtgtgctcaaggcaccgataccattcaggaagagagaccaatggaggggatcccaagagagtgcaggccttggatccctccagggatggctgtgatgcattatttgagataattcggaaagacagagatgcctggacgggtgaggtacttgttattgcaaagaacttctctgacacacgcaatctcctattgaacggtctagatttccagcatcctagagagttccagtataatgatttagggccagaggatgctcaaagcttactcagatatctcaagaacacacaaagcgaggatcctgcttttttctatgctgtgcagcttaacagtaatggacacacagccaatattttctgggctgatgctaaaactaggatggcttactaccattttggtgatgttgttaggcttg

SEQ ID NO: 12094 - DNA, 159 bp, Oryza sativa
  Clone ID: PAT_MRT4530_18254C.1
gacctagaaaggcagtacactccaacaaaatctcgagataaaaatagagtttcatacaccatagtaacatgtcaatttggatgattcctataaaatcctttcgggtgaatcacactaccttcgatacgcattacaaatttacaatagtgtgaactggcg

SEQ ID NO: 12095 - DNA, 699 bp, Oryza sativa
  Clone ID: PAT_MRT4530_18255C.1
atgggtatagaggagatcaaaatgaaaactcaggggtatataagggatgatgtgaaattcaggggtgaaggacaattactaagaggaggggaagagggagatgttccgcgtcttcgacaaggactagaaaatggcttcatctctaacgcgagccccgccatgttatgtccaatgcatcaggagaggctcactaataaggaggtcgacgagatgatccatgagactggtggtggcaggtggatcaattacaaggagttcgaggttcataatgggagaaatgcatttttttggaaggatgtttggtgtgatagggtgcctctgaaggttcttttccctgacttgtatgagattagctatgatcagggggccactgtgaatgatctgtatgaggggggtggttggaagctagattttagaagaaatcttaaccctatgaaggagagggttaaggatactgatatgtgggagatttggaagagcaaattacctctgaaagttaaacattttctttatttagtgggtagagggagattaccttgtgcagaacaactggttaaaagaaaatggaaggtggtgatgaattctaagtggtgcgcattgctcaaggaggaagactgggagctgctggggagatggtgtgaggcaatcaggatgcagctgattcaagtcaggccccaagtgttgccaacgtctctgtaa

SEQ ID NO: 12096 - DNA, 250 bp, Oryza sativa
  Clone ID: PAT_MRT4530_18256C.1
ttcttctttcctcttctttttttttaatcttttttcctctataaagcaatcggatgcagcacgactcagaccccacgattacgatgatgcatggataatgaatacgtacaaccatcgtccaaaaaacacgtactagtatattgcaccgtcgtcatcgtgggatccgagccacgctgcaaattaacctgaaccttatcgatcagcggctgtgcatgcgacagcagttaagcattagctacacgtccatatc

SEQ ID NO: 12097 - DNA, 469 bp, Oryza sativa
  Clone ID: PAT_MRT4530_18257C.1
ctcttttgtaaacttgccctctgtggtgacctcgttactgccagcaccttctgaaggctcgaatttatacccaaatgcatcaagagcagccgccatgctatctgcgggatcacgatctttacatgaactggcagtcaaggatgtggcaacctatatgggtagatcggacaggtcgctatttggaacgcatttgatttgtgctgggcaaggatatcaggaggcaggtcctcagcttgaggatgctggttgctcgcgagaagcgtgaactgcggctgcaaggactgtacatgggtctgagtatgctgggatcctacagaggcggcgagatgatattcttcggagcgtacatatcaggggtagagctctagtactatatgtagctgcttgagcactacctgaggctatagaaacgcttcgcactaccagcgaccagacatgtgaagcgctgttgttgctagcgtgccatgag

SEQ ID NO: 12098 - DNA, 372 bp, Oryza sativa
  Clone ID: PAT_MRT4530_18258C.1
atggccgagccggctaagtccaggtgcccagggccagcgccattatggctagtgctgacatcccagcccgcaagccatccagaaggcttgctgggctgggccatggctgagccggctaagtccaacctcagcgccctggcgctgatgtgcccagggccagcgccattatggctggcgctgacgtcccagcccgcaagccatccagaaggcttgctgggctgggccatggccgagccggctaagtccaacctcagcgccaggtgccctggcgctgatgtgcccagggccagcgccattatggctggcgctgacgtcccagcccgcaagccatccagaaggcttgctgggctaagccatggccaagcttgctaa

SEQ ID NO: 12099 - DNA, 370 bp, Oryza sativa
  Clone ID: PAT_MRT4530_18259C.1
gatacaaatcatattagcctatatttgaagggactgaaggtggacttatccctaccagagtactatcacacacacaccccgaacgctactacgctttcacgctgatctcgtgaactttgacacgtagaaacatcacacatacaaataatatatatactccttactaaggtaacaatatattatatactccgatcactaacaaggattgacgtctggacgatcgccccgtacgcgcaggcaaaccacagcctcacaaacacgacaccagcagggtcatcgcggcagcggctccgaagctcgcggccttgagagccaccaccaccgttccggacaccgaccttttgatgcctgccttccccgacgacgggtc

SEQ ID NO: 12100 - DNA, 2007 bp, Oryza sativa
  Clone ID: PAT_MRT4530_1825C.1
atggacctcggcaaatcggcttccaccagtgcaacgttgaagaaactccaggaggatggcgctcttcctggccgtggaaccatggagagggaagcaggaggtactaatcctcagctcatcttgggtcgcatggttgcgatcgaagattgtgttctctgcggttttctccctccatcttccgaatttcttctcctggttttgaatttctatggtctttctcttctccatttgaaccccaattccatcgccttctttagcatctttgtgcatctttgtgaggcctacatcggggtagagccttttcttgatctttttcgcttttactacgaactgcgttggatggaatccaacagggtatctggttgcgtcgggttccgacttcgggatggcctgaagtcgcgttacattcccttccagtgcccttcttctcgcagcaagtggcggaataggtggttttatcttgagatcaagaactcgaaccctgtcttcgtggttcctgaagatcaaccggacaagattccgtcttggaccgcaaagccccccttgaccccctctcttcagtcgtttatcgacatcatcgacgatctccgagcacagggtttgtcgggatatgaagttgttgcagacttcgttggtctgagcagcgaaatcgtggagcgccgcgtcggccaggtgatgatcagtggcccgaccacggcgagtgacatccctgtgcccctttatgaaaagggggcggcggaacgtgatgaagccatcaacgcccttcctttgactgacatcattggaccgctcgcggaccatcaggtggcgacatctctgaaagtgaaggtcgtcaaggaggcatctgatgctgccaccactagcggtggcaatgttccgacaaagccgaggaaattctcgtctgggctcgaggaccgaatgtcggaactcgggaacaacctatccgagatccggggctcattgagggtcacctacactggccttcaccagctcgccggggagtgcggcgtcaagtccacgatcccggtgaatcccgatgagttttcgctgacctcctctctcgcggaactggtgacggcgatgggggaaatcccctccaagcatgcggccaggattgcggaggagacgtcgaacaggatctacaccggggcgtgtcatgtcctcgcgtgtgtaaggctgtcgcgtcctgaactcgatctgcgcgagatcttggaccagagggcggccagcgacacgcgtaaggaggtgatggaagaagtcggtgatctaggggagtctgttctccccctttttgaagaagatgctgatgacgaggatgtccagcagcgcgggcagcctgagtcactggcaataattccggtactcgagtttgaaccacacgtctcgcctgaccatgtggatcaaccccttgatatagaggggatggcgacgacttcctcagtagatctcgagggtgcccttgctagccaagatcgtcatatccaatactggaagacgaagtttgaagtggcggagctcgagagaaccatgctggccgtgaagaaagagcaggctgtggaaacgctccgaggtcgtgaggtgtggtttaactcgtacttgaagagttgctgcacatccatggccagagtatgcaaggagcttcgagtagtccgcggagatcccgaggagtcggcggccgggtacatctcgtggcttaatggggcctgtgcccaactcgatggaatcggcaagcgtatcgacgaggccttgaagcaggagtgtcgtcgatcgagccgatacgccggagggcacgtgttggcttgcctacgaaatcatcgcccgcgcctggacctcgaatatctccgtgagggttttgctcgttctcggaggactccggcggagatagaccatctggcaaggtcaatgtcgccgttggccgatgtggacccccgtttttataacaggaatcaatcgtgtaaacagtaccatttccctggatcaagtagtttggtacacacgaattcatag

SEQ ID NO: 12101 - DNA, 300 bp, Oryza sativa
  Clone ID: PAT_MRT4530_18260C.1
atgggtgacagcagcgacgcactcgaggtgggagaaatgaggaggagggtggtggtcgctgtaggagaaggcaaaggaagccaccacaaatttgtactcagaggacagagatacgcgtgcagggaggaaatccgccacctcttcatcaccgccggccgctaccgccacatctcctccatcccctcaaccttcttggcgctattggtgacaccccccgtatctctacaacaaccagcccgccccctcccccacccctcctctcaaccccagccccgcgacgaccaactcccgatccagtga

SEQ ID NO: 12102 - DNA, 3024 bp, Oryza sativa
  Clone ID: PAT_MRT4530_18261C.1
atgaagataggtctgctcatgttgcttgttctcttcctggtcatgtcccctgatgggatccgcaggagcttagccgcgaggccttctattgtgaatattggggccattcttcgatttaactccaccattggaggtgtttcgatgattgctatccaggcagccttggaggatattaattctgattcaacaattctaaatggaacaactttaaaagttgacatgagggatacaaattgtgatgatggtttccttgggatggttgaagctttgcagttcatggagactgatgtgattgcaattattggcccacagtgctcaacaattgcacatatcgtttcatatgtagcaaatgagctccgagtccctcttatgtcctttgcatctgatgcaactttgtcatcaattcagttcccattctttgttcgaactgctcccagtgatctctatcaaatggatgctgtagctgcaatagttgactactaccgttggaagatagtgactgctatatatattgatgatgattatggccgaaatggaatagccacattggatgatgcacttactcaaaggcgctgcaaaatctcctacaagattgcatttcctgcaaatgctagaaagagcgacctcataaatttattggtcagcgttagttatatggagtctcgtgttatcatcctccatactggtgctggacctggactcaagattttctctctggcgaaccaactaagcatgatgggcaatggctatgtatggattgcaactgattggctttctgcttatctcgatgctaattcatcggttcctgatgagactatgtatggcatgcaaggagttctcactttacgcccacacattcctgaatcaaagatgaagagtaatttgatctccaagtggagcaggttaagcaagaagtacagttatagttatctccgcacaagttcatatgctttttatgtttatgatagtgtatgggcagtagctcgggctttggatgctttctttgatgatggtgggaagatttccttttcaaatgattcaaggctgcgtgatgaaactggaggtactcttcaccttgaagcaatgagtatttttgatatgggaaataacttgttggagaagattagaaaggcaaacttcactggggtgtctgggcaagtgcaatttgatgctactggtgacctcattcatcctgcttatgatgtcataaatataattggaaatggcatgcggacagttggctattggtcaaattattctagcttgctgtcgactgtccttccggaggttctctattcagagcctcctaacaattctctagctaatcaacatctatatgatgttatttggcctgggcagactgcacaaacgcctcgaggctgggtttttccttctaatgctaaggagttgaaaattggtgtccccaacagatttagcttcagagaatttgtcacaaaagataatgttactggatcaatgaagggctattgcattgatgtctttactcaggcattggctttgcttccttatcctgttacatacaagtttataccatttgggggtggtaatgaaaatccacattatgacaaactcgtacaaatggttgaggataacgagtttgacgcagcaataggggatattgcaattacaatgagcaggactgtaactactgatttcacccagcccttcattgaatctggcttggttatcttggctccagttaaaaaacatattgttaattcctgggcattcttgcagccattcactcttcagatgtgctatactgcaagtcttacttccatcctgactgttcaacaactcgatacttctataagaggaattgatgacctgaaaaatagtgatggtcctattggtttccaagttggttcttttgcagaagaatacatggtcagggagctgaacatctcacggtcgaggctgagagctcttggttctccagaagaatacgctgaagcgcttaagcatggccctaagagaggaggtgtcatggccattgtagatgagcgcccctacgttgaactgtttttgtcaacttattgcaagattgcagttgctggttcggatttcaccagcagaggatggggctttgcatttccaagagactcccctttgcaaattgacctatcgactgcgatcctgtcactgtcggagaacggggaactgcagaggatccatgacaaatggctcaagactagcgagtgctcagccgacaacaccgagtttgtcgactcggatcagctccgccttgagagcttctggggcctgttcctcatttgtggtatcgcatgtgtcatcgcgctgctcatctactttttcaccaccgtacgcaaattcctcaggcatgaacctccagaagatccaacacctcgtccaggcggatcaacaactcttccagacgaacgaacacccccaaagaacggacaagagaaatgcaactgcagaaatttcatctcatttcttgatcacaaggagccaccaaagaagaagcgaaccttctaccgccactcgcttccctcctccgcacctccacctccttcgagaggggcctgcgccgccgcatgctgctgcctccgcgcggccgtctcccggcggcgggcagccgcgcagctgctctccgccgccggattcttgatcgccgtctcgccgccttcgctagccgcgcggaggggccgcatggtcgtgtcgctggaggactacgtcacttcacctgatggcctgaagtactatgatcttgttgaagggaagggtccaactgctgaaaagggctcaactgtgcaggcgtcaccgaaacctcctgccgcaatgtacacaataactgaagggatgaaagtggggggaaagaggagagtaattgtccctccagagctcggatatgggaaaaaggggatgaatgagataccgcctgatgctccttttgaactcgatatagagcttttggaagttgtccctcctgcagagaaatgaccaattccgtggcttaccgcgagaacaaataattactat

SEQ ID NO: 12103 - DNA, 414 bp, Oryza sativa
  Clone ID: PAT_MRT4530_18262C.1
gttcttttaaaaggatggagcttctggtgctacgggggggaatgtttaagatgcatgctgttactgctctgccatttgttgaatactttcttcataaattgagggatcatggtgcaccctccttgcttgcacgctctcgctcttccgaccttgtcttgagcactgctaaaggtgctgaattcgtggtattcagaccctcagagattgctgccagcgttgctcttgcggcgattggggaatgcagcagttctgtaattgagagaggtgctactagctgcaactatttggacaaggagagggttttaagacgccatgaaatgattcaagaggagattgctgtgggaagcattgtcctaaaggctgctggaacatcaatttcctctgtgccacgaaagccccatagcgtcctggatg

SEQ ID NO: 12104 - DNA, 2145 bp, Oryza sativa
  Clone ID: PAT_MRT4530_18263C.1
ccacgcgtccgccgagccctaaccctagcctctcgccggcggcggcggcggcggcgatggcgtgcctcgcgatctccctccagccggtgaacggcccggacatcctcctccagacccgatcctggttccccgtctcccgcgccctcgccgccgtctcctccttccgcctcgcccgcctccacctcgcccgcgggaagcagcagcagttgtcatcgtcgtcgtcggccgccgcggcggcggcgacgctcgaggccatcggcgacgacccgctcgccgccgggtcggggcagctcgtggtcggggtggagtcgcagtaccgcgtcgtgtaccgcctagtcaactccatctacgtgctcggcgtcaccacctcctccgaccacgcctcccccgccgtccacgccttcgccgtcgccgacgccgtcaaccaggccgtctccgtcgtcgtcgccgcgtgccgcggcgtcgacgtcacgccggagaaggtgcaccgcaagtacccggaggtctacctcgccctcgacctcgtcctccacggcgtcggctccgtccgcctctcccagatcctcgccaccatccatggcgacaacctcgctcgcatggtgaattcatcccctgacgccgaggcgaaagctcgtggcgctgatccctggcccgccgtcgagcacctcgcccacgatcgccatgccgctcgcgatggcttcacgggcgcctcgttcgagctcccccaggagacccttgctgccggtgacgagttctccgcgtctaacattgcgccggcggctgctgcggctactggggatgagcctccaccggaggaggcagctcccgtggagaaggacccgtttgcagccagtgaactggttaacaattctgaggaggcgttggttggtgggttcaagaagaacaaggagaccgccattgtggttgctgatcccgcggctgcgcttgctgggttggaggtcacgaccttgccaccagctgaggcgactaagccaacatttattggagttgaagggtttgagggtgactatggtggaattgagtttggcaatgaggaggcttcactggccgaggcatttgaagggttcaatgcgccgtttgggggtggattggatgcttcagagtttgttaccacaacaaagaaggaccataaggataagagcatcactggtcttgagctgctagccactagtgctggacagggaccaaatgcacctggtggtaccccgctggagaacttgttggtgacaaagagcacagagatgacagcccctgagctatacatcgtggaggaggtcaatgcagaatttaaggagtctattcttgcacgggttggtttgaagggtacaatctttctgcgaacgttgccaccaaagaaggcggctggtaaggagacagagttctcatttcgtcttgagggcacatctggaatgaagaaggccgcgttgcagagcactgtgttgagcaacctcgagaatgggatgttccatgtccggacgccatcgaaggaggaacccatccccatcatgaagtacagctttctgcccaagcactcacctctccctttgaggatgcgccttgtgaagcgacatagcggaacattgctctcagtgatgattcaatacgcatcaaacccaatgttgccacagccgctgagcaatgttacgttcattgttaagcttcctgtggacccaactctgctaaatgtttcacccaaggctgtgctgaatcgggcagagagggagctcaggtggcacatcccagacattcccctgaaaggacctgctggacgtttgagggctcggatgcctgtagatcaggactcaaaggatggtgagctagaggttgttgggatggtgaagtttgcttaccaagggccatttacattgtctggcatcaaactatgcccagccactgatggcacggctcagtttaatgaggctggccacaccttctccagtgggagttatctgtgcatctaattggtaccttctttgtattgtagttgttactttacccttgatttgttcggtttgcttctaaagcaggttgtgaaattcctattgtatgtagtgacgcttgtttgttttttgaggctggaaattacatcatgtttttgatttgtctattaaaaaaaaaaaaaaa

SEQ ID NO: 12105 - DNA, 440 bp, Oryza sativa
  unsure (1)..(440): unsure at all n locations
  Clone ID: PAT_MRT4530_18264C.1
cagattcagagcaaagggaagaacagctaaatagaacagaagaaatggctaggaggaagagcaatccccacaaaggaagaggagatgaggaggagtaccccatggtggcatatgcttgctgcccctgctatgtgctcagctctgtcatcagagggattgggaggtgcctctttgtggcctgctaccctgccatacaatgctgtggccttgatgagtgcaggcaccaccacaccaccacccagctcagccacttcagatgaccacagcaataattccatccattaagtatggcatctcaatcatcaccaattctttcttctcttctttctcacacactggggttcagtaatcatatggagttcttgattaaagagagctnnccatatttgatttcatacatgatgaaagtccttttgcnnnnnnngcnnnnatttttcnag

SEQ ID NO: 12106 - DNA, 503 bp, Oryza sativa
  unsure (1)..(503): unsure at all n locations
  Clone ID: PAT_MRT4530_18265C.1
ttttttttttttttttggttgagaatgccatatattattatactggactgtacagttttttccattgaaaagagcaggagacaacagctgactcaaagaagctgctgtttgaaaaaaatttacgaaatatcatttaaccctgaacaatatggtttttaggaatttacggtgagcagcagctccatataatttgcatttgcaggatgcagcaggagggaaatagtaacactatatatgttctgatggctacacgcaggcttaactgtgaggaaaccatctttccagcagagatggtttagcctcataaccagggcgaataacagcatagcaagggaaatgcatcacggctaccaccaaataccatacaggagcttataggaaaggctacgtccagaaaggggtaaggccacaaatcgatatgctagcatggatgagccactgcacattaacaaaagcgccagtccaaccgacangaaactagtgcgattctacaaccagggaca

SEQ ID NO: 12107 - DNA, 594 bp, Oryza sativa
  Clone ID: PAT_MRT4530_18266C.1
ctcccttctttttttttttttttttttttttttttttttttttttttttttttttttttttttttttttttttttttttttttttttttttttttttttcaaaaaaagggggggcccccttttgctttttggaaaaaatttttttcctttaaaaaacgggggttttttgggccccaaaaaaactttttgaacccggccctggtttacccccttttttttggaaccccagaaccaacctttgttggccctggaaatttccaggggcaatttttggggccttctttttccccccccaaaaaaaaaaaggggccaaaaccgggggcttaaccctttttttggggggctttaactttaaaaccccactttaacttttttttcccggcggggggctatttttttttaaaatttgggggggggaaaaattttggggggtgggaaaaaaacacttggggggctgggaaaaaaccccccaaaacttgaaaaacctttttttgggggagaattttttgccccccaatttggaacaacttggcccccttaattggggccccccgttttttttaacccccaaaaccgggggagtgcccccccttt

SEQ ID NO: 12108 - DNA, 322 bp, Oryza sativa
  Clone ID: PAT_MRT4530_18267C.1
atcgtcctttactttattctccggtagatgacatggctatatatgagctaatgtgcgacacgactcaatgtacgggccatcaagcgcactattgaacgatacataagactcacctgcacgatctgatacatgatgtcgagcggtgcaaggcagtcacagctgagtgtgaaggcatatatgtggattactgcaggcaggaagcctgtggctagaccacggagaagctgattaaattgcacgaggcagcctacatgattgggacgaccgagaagatgtttagttgcgacaagatcactctcacagagaacagatctgagcttga

SEQ ID NO: 12109 - DNA, 382 bp, Oryza sativa
  Clone ID: PAT_MRT4530_18268C.1
gtgattttatcattttggctgaaccgagacctggtgcatcctctggtggtgaggtgagcctgtattttggtggcatggatccaaagcactataagagggatcacgcctatgtcccagtttctcgttaaggctactagcagttaaacacgggggatctccttattgatggccactcaactggcttctatgcaaaaggctgcgctgctattgtggactctggaacttccttgcttgctggtcctatagtattagttgctcaggtgaaccatgctattgaggctgaaggaattatcagcacggaatgatcggtggtgggaacgtataaagtaaatgtggtggaattgctgctaattaatttgggttttttgttcactgttaggca

SEQ ID NO: 12110 - DNA, 1024 bp, Oryza sativa
  Clone ID: PAT_MRT4530_18269C.1
gcacgaggcaactctccaagtacggcagcagcactggctactgcggaggaggcgttgcgacttgcgagtggcggaggactaggaagtcgcctccgcctccgctgcagacacactggcgatggcttcctccttcgccgccgtcttcttcagcagcgccttcgctgcctgcttcgctgaggtgtgcaccattcctctcgacacagccaaagtgcggcttcagctgcaaaagaaagcagccctagctacaggcggaggaggagggaccactggaggaatgctgggcacaataatgtgcatcgcaagggaggaaggggtggccgcgctttggaacggcatcatccctggccttcaccgccagtgcgtctatggcggactccgcatcgccttgtatgagcctgtgaaagccttctttatccgagacggagatactgttgctggtggtgtcagtttatttgctaagatccttgctgctcttatgacaggtgtcatagcaattgttgtggcaaatccaactgatcttgtcaaagtgagattgcaagctgatggaaaggccaccactgtcaagaggcactattctggagccctcaatgcgtatgctaccataatcagacaggaaggtattggagctttgtggactggcctcggtccaaacatagcacgcaatgctataattaatgctaccgagttggccagctacgaccaactcaaacagatgtttctaaaacttcctgggtttactgataacgtttttacccatcttttagctggacttggtgctggattttttgctgtttgcattggctctccagtggatgtggtgaaatcaagaatgatgggtgacgcaacgtacaagagtacactagactgttttgcaaagacattaaagaatgatggacttcctgctttttataaagggttcattgcaaacttttgccgcattgggtcatggaatgtgataatgtttttaacactggagcaggggaaaaatggaaagaaaaaggaagtcctagtctcatcgctatag

SEQ ID NO: 12111 - DNA, 255 bp, Oryza sativa
  Clone ID: PAT_MRT4530_1826C.1
atggccatggacaaccagaaaagttacagggcgctactggggctggacgatgctggagctggatggacattggacagtgaggaggagcatacaggagacaagtgggtgtggaccaaccgatcgatcaaccgaccgatatgtagagtagcagtgatgatacggatcatcatatcgatcgatatgatcagtctctcggtgtgggtcaaggattacacgcttgatccacacagtcagtccacgccattgtgtgtttga

SEQ ID NO: 12112 - DNA, 1064 bp, Oryza sativa
  unsure (1)..(1064): unsure at all n locations
  Clone ID: PAT_MRT4530_18270C.1
ggactaggaagtcgcctccgcctccgctgcagacacactggcgatggcttcctccttcgccgccgtcttcttagcagcgccttcgctgcctgcttcgctgaggtgtgcaccattcctctcgacacagccaaagtgcggcttcagctgcaaaagaaagcagccctagctacaggcggaggaggagggaccactggaggaatgctgggcacaataatgtgcatcgcaagggaggaaggggtggccgcgctttggaacggcatcatccctggccttcaccgccagtgcgtctatggcggactccgcatcgccttgtatgagcctgtgaaagccttctttatccgagacggagatactgttgctggtggtgtcagtttatttgctaagatccttgctgctcttatgacagccaaccagtttacatccaaatttcatgtgttaaggacttaaggtaggtgcactatgcacaagtaaatatactcttatattaattaccgttctatatattcataggtgtcatagcaattgttgtggcaaatccaactgatcttgtcaaagtgagattgcaagctgatggaaaggccaccactgtcaagaggcactattctggagccctcaatgcgtatgctaccataatcagacaggaaggtattggagctttgtggactggcctcggtccaaacatagcacgcaatgctataattaatgctaccgagttggccagctacgaccaactcaaacagctggacttggtgctggattttttgctgtttgcattggctctccagtggatgtggtgaaatcaagaatgatgggtgacgcaacgtacaagagtacactagactgttttgcaaagacattaaagaatgatgtacggcaaacccttctccaaaactttcatagctcttctgttgtgtacaaccaaatcttttagatttttcgatgcaaatgtattttggtactatacaactaatcttcaaagttcaaacacttgtagcgagcacagaagtaattctccttggngataacagttcaacatttcagtaaacattcccttaaacattatg

SEQ ID NO: 12113 - DNA, 430 bp, Oryza sativa
  Clone ID: PAT_MRT4530_18271C.1
gaaagtttagccattgctacttccttgcagcgcgcgtgtcggctagaccgtccatctgcttgtatccgaaaccccaacttattgtgtgcattcattcctagttgcaattcaaattgcttttatcttgttcttgcttgtttcttcgatttgcttgcaggaatagggttgctttgcaccggcaagatcaacaacctacggagaggtgtatcgatcgctaaggcgcaacacaacgtcttgtacggttgtagtcgggtcgtcaacgtttctcccaaatcgtagttatctcaactcatcgaaagatcgggccaacaacagctttgagtgtcatgtggaactcagggttcatcagccgcacgagtcacgaagtgatttttcgacacggacgtacacaatacactccaatattgagtttttgccacgaacgcaccca

SEQ ID NO: 12114 - DNA, 101 bp, Oryza sativa
  Clone ID: PAT_MRT4530_18272C.1
atgggtaagatggtggctagcattggaaaggaggttttggcgtgggtcggtgaaaataccggggaaatgatgggaacgcttcggcagatgaaggggttcaa

SEQ ID NO: 12115 - DNA, 478 bp, Oryza sativa
  Clone ID: PAT_MRT4530_18273C.1
gatcactaattacagtttattctctttccatcgttgtccacgcttgtttttgtgtctcttagcatcagaagaagaaaaccccaaagaagtagccaatggcatcctttttacttgaaaaatcctggcagattaatgctatacgactgttacttatttcaagtttcttgcaagaactactaatggaaggatgtgcatccagtaaaaataaactcaatggagcagaccatgaacatgattacatgaatggagtcagaggtggagacaccgcttggcaaccccgggcagccacctgggcttatcggcaaacacataatagaattttatcattatcttagtgattgaaaatatatttcttttataataaacactcaatgtaaatggatttgtccagctctaaaagattcctagctccgaaaattgtgaagtaacatgcattggatgattgaatatgttggttcaggtaggtgtatttctacat

SEQ ID NO: 12116 - DNA, 365 bp, Oryza sativa
  Clone ID: PAT_MRT4530_18274C.1
atacaaatacatattaaatgcattgtattcttgtttattgtgtttgggagccaaaatgtattttgtctctaacataaccaaataaagaaagttaaaaagtttgcttaggccatcacttaaacagttcaattttctgataaatggtctttaaacatgtagtaataaatatcatcaggattcaggaaagggatcctgatgctttgttgcaagtttgcaacaatgtttcctccccctatgtgttcatttcgccgaaaaattgctgccaaattttgttacataaaaaccattacgcatttagtaaaccgccaaaaacaaaaaggttttttacaaatgtgatctcacaatctgcccatcactgttaacag

SEQ ID NO: 12117 - DNA, 1401 bp, Oryza sativa
  Clone ID: PAT_MRT4530_18275C.1
gcaaatctcactagctagctagctatctcagctcactctctcagtagccactgatcagaagaagagcaagagaagccaattaagctagctagctaagctggttaattgccatgggtagtggtaataagctcgctgccaccgtggtcgtcgtcaccttcgcggtgctcatggcggcggtgacgacgacgtgccaagcagcttacgggccacccaaccctgcttcgtgcgggctcaaggtcggttactactacgccaagtgcccgcatgccgaggaaatcgtcaagaacgtcgtcggcgccgccatcctccacaaccccggcgtcggcgctggcctcatccgcatgctcttccatgactgcttcgttgagggatgtgatgcgtccgtgctgctcgacccgacgccggcgaacccgcagccggagaagctcagcccgcccaacatgcccagcctccgcggttacgaggtgatcgacgccgccaaggcggccgtcgaggcggcctgcccgggcgtcgtctcctgcgccgacatcgtcgccttcgccgcgcgcgacgcctccttcttcctcagcaacagcagggtcgcgttccagatgcccgcggggcgcctcgacgggcgctactccaacgcgtcgcgcgccctcgacttcctcccgccgcccaagttcaacctcggccagctcgtcgccaacttcgccaccaaggggctcggcatggaggacatggtggtgctctccggcgcccacaccgtcggcgactcccactgctcgtccttcgtccccgaccgcctcgccgtcccctccgacatggagcccccgctcgccgccatgctgaggacgcagtgcccggcgaagccgagctcaggcaacgaccccacggtggtgcaggacgtcgtgacgcccaacaagctggacaaccagtactacaagaacgtgctcgcgcacagggtgctcttcacctccgacgcgtcgctcctggcgtcgccggcgacggcgaagatggtgtcggacaacgccaacatccccgggtggtgggaggacaggttcacgaaggcgttggtcaagatggccagcgtcgacgtcaaaaccggctacaagggcgagatcaggaagaactgcagggtggtcaactaattaaaatgatgattcagaagtatcagaattcagaacaactttaactttttgttcaatcggatgcaaccatccacattattgcttgttttgatttatgggacttgggttttatcttctagaaatggtgtggttagtggggattgattatgcggtggaataatttcttaccgttttgttgtttcgatttgttgatttattttgctgtggttctacgtgtggcttgtacgatcatttcatgtttctgatgaataaaactgtgagcagtactact

SEQ ID NO: 12118 - DNA, 167 bp, Oryza sativa
  Clone ID: PAT_MRT4530_18276C.1
gtcacgaggaacaaatgcacagataacagggggcccccccttccccttcacagtcttccgagcgcatcccccgactccgacgacgcgatgaggcagatgcgtcatctgctgagcgcgcgacgccgagacggccctcacctctagagcgccgacatggacgagggcta

SEQ ID NO: 12119 - DNA, 453 bp, Oryza sativa
  Clone ID: PAT_MRT4530_18277C.1
atggaggaggaggacgacatcgtggtggttgacggcggtggccggcgagcgatgatggatggttgctactgcgcaacgtcgagcccaactctataccacgctgctacacccttctatgattccatcgtcgactactgctcgccacccggttgccctctccactacctcgtgcccagaaccgcacccctccgcctccgagcgcaggtgagcacgacggagctcgacgctggttgggaagcccatactccacgggttgaacgggagcacgtggacgccaactatccgcccatcgccaatggcatccgcgatgaggtgggctcgaaaggcctttgccatgccgggtctagcgacgacggtggatcttgcatccggacggcaccgggggaccagcagcagccgccgcgtgctttagtacatctccggtacacatttgagggcctgttcagattgtag

SEQ ID NO: 12120 - DNA, 3840 bp, Oryza sativa
  Clone ID: PAT_MRT4530_18278C.1
atgggcgacaaggagaagccgtcgttcctgcggctggttcgctacgccgacgcgcacgaccggtgcctgatggcgctgggcgttctgggcagcttcggcgatggcatgatgcagccgctgtcaatgctggtgctcggcgacatcgtcaacagctacggcggcgccggcggcgccggcagtgcccggagcgccttcagctccggcgccgtcgacaagggtctgtgctggacgagaacggcggaacggcaggcgtcaaagatgaggaggctgtacctggaggccgtcctgagccaggaggtggcgttcttcgacgccgcgccctcctcgccgtcgtcgccgcaggcccaggcccaggccaccacgttccgcgtcatctccaccgtctccgacgacgccgacgccatccaggacttcctcggcgagaagctccccatggtcctggccaacgcgacgctcttcttcggcgcgctggccgtgtcgttcgtgttcgcgtggcggctcgcgctggcgggcctcccgttcacgctcctcctcttcgtcacgccgagcgtgctcctcgccgggcgcatggccgcggcggccggggaggcccgcgcggcgtacgaggaggcgggcgggatagcgcagcaggcggtgtcgtccatccggacggtggcgtcgtacaccgctgagcggcggacggtggagcggttccgcggcgcggtggcgcggagcgcggcgctcggcgtcaggcaggggctcatcaagggcgccgtgatcgggagcatgggcgtcatctacgccgtctggtccttcttgtcgtggatcggcagcctcctcgtcatccacctgcacgcccagggcggccacgtgttcgtcgcctccatctgcatcgttttggcgggaatgtcgatcatgatggcgctgccgaacctccggtacttcattgacgcgacggcggcggcgagccggatgcaagaaatgatcgaaatgctcccaccgctcgaaggggcggagaagaagggagccaccatggaaaggatcaggggcgagatcgtgttcaaagacgtgcacttctcgtacccgtcgaggccggacacgctggtgctcaacggcttcaacctgaccatctctgagggcgccaccgtcggtctcgtcggcggcagcgggtccgggaagtccaccgtgatctcgctgctgcagaggttctacagcccggactccggggagatatcgatggacgaccatggcattgacacgctcaatgtggagtggcttaggagccagatagggctagtgagccaagagcctgtactgtttgcgacctccattagggagaacatactgttcggcgacgagacggcctcgttgaagcaagtcgtcgccgcggcgaagatggccaatgcccacgagttcatcgtcaagttgccccatggatacgaaactcatgtacacaagcaacagcaatttttacagtgcatgctacagcacgctgaatcttatggtgtattttttttttctccggtgcaggttggtcagttcgggacgcagctgtcgggagggcagaagcagcgcatcgccattgctcgagcgctcgtccgggacccgaggatcctgctgctggacgaggcgacgagcgcgctcgacgccgagtcggagcggacggtgcaggacgcgctggaccgggcgtccgtgggccggaccaccgtgatcgtagcgcaccgcctctcgacgctccgcaaggcggacacgattgcggtgctcgacgctggccgcgtcgtggaggccggcacgcacgacgagctcttggggatggacgacgggggtgaaggcggcgtgtacgccaggatggtgcacctgcagaaggcgccacccgtggcggcgagggaggagcgccaccgcgccgtggatgtggtggagagcgagatggtgtcgttccgcagcgtggagattatgtcggcggtcagcgccaccgagcaccgtcctagccccgcgccgtcgttctgctcggtcgaacactcgacggagattgggaggaagctcgtggaccacggtgtggcgcgctccaggaagccctcgaagcttcgcctgctgaagatgaaccggccggagtggaagcaggcgttgcttgggtgcgttggcgccgtcgtcttcggcgcggtgctgccgctgtactcgtacagcctaggctcgttgccggaggtttatttcctcgccgacgatggccagatccgttccaagaccaggttgtactacttcctcttccttggcatcgccgtcgtctgcatcacggcgaacatcgtgcagcactacaacttcgcggtgatgggcgagcgcctgacggagcgtgtccggggccagatgctcgccaagatcctctccttcgaggtcgggtggttcgacgaggacgagaactcgagcgccgcggtgtgcgcgcggctggcgacacagtcgagcaaggtccgctccctcgtcggcgaccgcatgtgcctgctggtccaggcgggcgccacggcgtcgctgggcttctcgctcgcgctcgccgtgtcgtggcgcctcgccacggtgatgatggccatgcagccgctgatcatcgcgagcttctacttcaagaaggtgctcatggctgccatgtccaagaaggccaagaaggcgcaggtgcaggggagccagctcgccagcgaggccgtggtgaaccaccggacgatcaccgcgttctcgtcgcagcggcggatgctccgcctgtacgaggccgcgcaacaaggccccaagaaggacaacgtggcgcactcgtggttctccggcttctgcctgtgcctgtgccagttcagcaacaccggcagcatggcggtcgctctctggtacggaggcaagctcatggccaaggggctcatcactcccacgcacctgttccaggtgttcttcatgctcatgaccatgggaagggtcatcgccgacgccgggagcttgacgtcggacttggcgcaaggcggcgacgcggtgcgctccgtcctcgacacgctggaccgtgaaccgacgatcaaggacgacgacaacgacaacgagaggaagaagaagaaacggaaggagataaaaggcgcgatcgagttcaagaacgtgcacttcagctacccgacgcggccggaggtggccgtgctcgccggattcagcctcgagatcggcgcggggaagacggtggcgctcgtcgggccgagcgggtccggcaagtcgacggtgatcgggctgatcgagcggttctacgacgcgcagaggggctcggtcctggtcgacggcgaggacatcaggagctacagccttgcacgcctccggtcgcaggtggcgctcgtcagccaggagccgacgctcttctccgggacgatacgcgacaacatagcgtacggcgccgccgaagagcacgccaccgaggacgaggtggcccgcgccgcggcgctcgccaacgcccacgggttcatcagcgccatggagcgcgggtacgacacgcgcgtcggggagcgcggcgcgcagctgtcgggggggcagaggcagcggatcgcgctggcgcgggcggtgctgaaggacgcgaggatcctgctgctggacgaggcgacaagcgcgctggacgccgcgtcggagaggctggtgcaggacgccgtggaccggatgctgcgggggaggacgtgcgtcgtggtggcgcaccgcctctcgacggtggagaagtccgacacgatcgcggtggtgaaggacgggagggtggcggagagagggaggcaccacgagctcctcgccgtcggccgcgccgggacgtactacaacctgatcaagctccagcacggcagatcgccgtgccttagtcccatgtga

SEQ ID NO: 12121 - DNA, 144 bp, Oryza sativa
  unsure (1)..(144): unsure at all n locations
  Clone ID: PAT_MRT4530_18279C.1
atggtggggccgggaaaagaaggcttggtgaccaggccaaagaccacattcaaaaatacatttgcgaagaagggattgaagagaggggcacatgttcatgaagacaacgtcaggggatcctntagagtngncntggngngtgng

SEQ ID NO: 12122 - DNA, 3471 bp, Oryza sativa
  Clone ID: PAT_MRT4530_1827C.1
atggtgacaaccaggagaagtgctgctaccggtgaaggcagtcaccccgaaggcagcaactacaacaaccatggcagcccacctccacctcctcacccgcctccaccaccaccaccagacaccaactctatcctcacccaaatcctcgcccagcaggccaacatgatggctgctttcctccatcacatccaaaatccgccacagcataatgctccacctccaccaccacccccgcaacattctaaacttgccgagttcctccgcatccgtccgcctaccttctctagctccaataaccccgtggatgctttggattggttgcatgccgtggggaaaaagttagacaccgtgcagtgcaacgatgaggagaaagctacgcagccagaaggacagcctattacttgggcccgcttcaccgccgctttccggaggacccatgtgcccgccggagtcatgacccttaagaaaagggaattccgagagttgaagcaaggcaactgctctgtgatggagtatttgcatgagtttaacaacctggcccggtacgccccggaggatgttcgtgaagatgaggagaagcaggagaagttcttggcaggaatggaccctgagctgtccgtgcatatgcagcagcagcaaccacgctccgcgctccgacctcaattcgtggtgcgcgtcccacagccgcagcaacagcagagccagcaagggacccgtgcgccccgtcctcctacgccagccgtgcagcctggacaaggccgcagagacgttcatggtcagcagcgtctgtgcttcaactacttcgagcccgggcactttgcggataaatgcccaaagccgaggcgccagcaaggccaagcgcctccccgccccaacaacggtggtaaggatgtcattcggggtcgtgtgaaccacgtgactgccgaggatatgctgacaactccaggcgttatcgtgggtacgttcctcattcattccatccctgctaccattttgttcgactctggagcttcccactcgtttatatctgtgccattcgtggggagaaatcagttgggggtagaaaggcttaggaaccctctgctcatcaccacccctggaggggttatgacagcaaagtattatagccctgccgttcctatagaaatccagggaatcctttttccctcagatttgattcttctggacaccaagaacttggatgtgatccttgggatgaaatggttggctcaattccaaggagtagtggattgcgcaagacgcactgtcactctgtaccgagggccggaacaaccggttgttttctttgcgcccccaacctctgccagtagttcagaacttcatcagataggactgtcagaaatccccatcgtcagagagttcggagacgtgtttccggaagaactactcggtatgccgcccaagcgagagattgagttccggatagatcttgctccaggaaccactcctctgtacaagcgaccctaccgtatggcagcaaatgaactggccgaaaagaaagacaagacaaagcggatgtgcgttgactacagagctctcaatgaagttactatcaaaaacaagtaccctcttccccggatcgatgatctcttcgatcagcttaaaggtgccactgtcttttctaaaattgatcttcgttccggatatcaccaattgcgtatccgtgaagaagatattccgaagaccgcattcacctcgcgttatggactgtatgaattcacggtgatgtcgttcggtctgaccaatgctcctgccttcttcatgaacttaatggacaaagtgttcatggaaaacttggataagtttgtggtggtctttattgacgacatcctgatgtactcacaatcagaggaagaccatcagcagcatctccgtctggtgttgggaaagttgcgggaacatcaattgtatgccaagcttagcaagtgtgagttctggttgtccgaagtcaaattcttagggcacgtgatatccgctaaaggagttgctgtggaccccgaaacggtgaccgccgtcactaattggaagcaacccaagacagttactcaggttcgcagctttttgagtatggcaggatactaccgaagattcatcgagaatttctccaaaattgccagacccgtgacgcagttgctgaagaaggaagaaaaatttgtgtggagcccgcaatgcgagaaagcattccaaactctcaaagaaaagctggtttcctcgccagtgttaatcttaccggatactcgtaaggacttcctggtgtactgtgacgcttcgcgccgaggattggggtgcgtattaatgcaggaaggtcatgtggtagcctatgcctcacgccagctacggccccatgaaggcaactaccctacccatgatttggagttatccgctgtgagaagatggttagaactcatcaaggattatgatgtgggaatccactatcatcctagtaaggccaacgtggtcgccgacgctctaagtcgaaaaagccattgcaacactcttggcgtccgtggcattccaccgaaacttaatcaacagatggaagccctgaacctaagcatagttggtcgtggattcttggctacactggaagccaagcctaccttgctcgatcaaatccacgaggctcagaagaatgatccggatatgcgtggactcctcaagaatatgaaacaaggtaaagccactggtttcacagaggatgaacatggaacccaatggaacggaaatcgggtatgcgttccagacgacagggaacttaaaacagttgatacttcaggaagctcacgaaagtccttattccatccatcctggcagtacgaagatgtacttagacttgaaagaaaaatactgcatgtcaaggcagagcaccaacgaccggccggacttctccaacctctccaagtaccagaatggaaatgggatgaaattgggatggatttcatcaccggacttccaaaaacccaaggcggatatgattctatgtgggtagtcgtggaccgactaaccaaggtagctcggtttattcctatgaagaccacctatggaggaaacaaattagctgaactctacttcgctaggatcgtgagtctccatggcgttcccaagaaaattgtatctgatcagggaagccagttcacctctcatttctggaagaaactccaagaagagttgggtacccgattaaatttcagcaccgcgtatcacccgcagacagatggacagaccgagcgtctgaaccagatcctcgaagatatgcttcacgcatgtgtcctagattttgggaagacctggggtaagagtctcccttatgccgagttctcctacaataacagctaccaagccagcatacaaatggcaccctatgaagcgcgttgtatggccgcaaatgccggacaccgctattgtgggaccaagttggggaaagccaagtgttcgggaccgatatactga

SEQ ID NO: 12123 - DNA, 327 bp, Oryza sativa
  Clone ID: PAT_MRT4530_18280C.1
atgcctgtgattccaaagattccaaaagcagaggagctaccacgcaacgcaactgctggttttttagggattatgggaatagtatctgaagatgtggatactaacaaagtcagcataactcaattaagcaggaactcaaagcacatcaacgacactgtctttcaaaccccaaaccccaagtgcccaacaaccacaagctatgccgaccagatcctggccgaggacggccggcgcactaatgttataaccatgttaaactctcaaggaactacaaaagccttacaagagaatttgcctatgcctcttctaaacaactcttctgactaa

SEQ ID NO: 12124 - DNA, 416 bp, Oryza sativa
  Clone ID: PAT_MRT4530_18281C.1
tttttttttttttttttttttgggttttggtttttttttttttttttttttttttttttttttttttttttttttttttttgggggagccgataggggggggatttacaaataaagagtggcccaccctgccgggcaaattaaatttctccaaaaaaaaacttttttccaccggggggcgaaaaaaaaagtaacaagggattttggagattttaacaaacatttgggggtttaaaaaattaaacccatttttttttgcagaataagccaaagttttaatgccaccatggtaaaggaaacccccccgggcaaaaacaactttggtaatttctttttccaaacaagacttgggaattacttcaccaattttttgtgccacttaaactgttggcccttccgagtattccaagacctttg

SEQ ID NO: 12125 - DNA, 5024 bp, Oryza sativa
  Clone ID: PAT_MRT4530_18282C.1
atggaggcaccaccggaggcctcaaagccggcggaggctaaaccgttaaagacgcggctgtctgtgcccaccggcaggtttgcattggggacagcttcttcaatcaagaagcggattgatgttgctccctcagccgagttggggatgtcaaggtcatcgttgacgaagtctacctcgactataaatgctgttccagttaagagaagaagcagcactgtaagttcggggaagaggcaagatagtgggggctcagtcgttgttaagaaagctagttcttctctgtcagatagagtgcagaagaatagacccatgacagccgccatgttcagctaaaaatcttaaaaggaaaaaaggtcatctgtgcagtctgagagggccagatccaaggcatcattcccaactacagaagtgcgaggaacatatgttccacccttccatgttgagctatatcgcaacgatcagcaccgcttcaagattgttgttgatggtgagagcgaagttgacttgatggtgcaaactcggcacatgcgagacgtcatcattctggtgattagaggtcttgctcaaaagttcaacagcacatctctcaactcactcctcaagatagaagcatgaagatcgagttgccaacctgatataacttacagtatgaaaccgattagaaaaggttgttcagtatcgattcaagttgtttagtttggaggatgtgtaatatttataggatttggagcgtggcagcttttgtgtatgggtgtggttgagtgtgttaaagtttttctttttctcaaatcaggagcgggttgctcttctgaccctggttttccatactcatgaaatgtacataggaaagggagggttggtgatatggtgttgcattaatatacaagttgtgtatgcaattctcatattaggctatatgattgattgggaagattttctgttttcctaacttggagtttctctctgttgctcaaaataggttgaaatcactctgtatggctagtcagcctcgacttcaagtactagcagccagcagaaacaaaatatcagttttgaagggatttccgcatttgccttctctggagcatttacgtgttgaggataatccacttcttgagatgccacacttggaggctgcttctattctgcttgtaggccctaccttgaaaaagttcaatgaccgggatctgaaccccggtgaggctgaagttgcgaagcaatatcctgctcatacagctatttgcattcgtgatggttgggaattttgctctcctgaacttgctgctgattcaacattttccttcctacttgagcaatggaagaataagttgccgcaagatttgatagtgaagaaagctcatgttgaccatccatttgaagaagatccctgtcattgccattttagcttcacaaatcagtgtgatgagggtgaactagtcctcaaatatcagtggtttataggtgacaagacaccaactgattttgtgcctcttcctgaagaattaagtgaggtatactggccaaagcgtgaagatgttggaagatgtctgaaagttgaatgcactccaatattgaatgatgctgaattcccgcccatctttgctgtttccttacctgtttctccaggtactggttgtccaaaggtcatcaatctgacggtccatggtgatttggtggaaggaaatgtactcaggggtgttcctgagattgcctggtgtggtgggatgccaggaaaagtgaataccattgattttgttaaaccttcttttgaggctagttggttaaggagaagatggaacggcaatgctgttgtaatagatggagctgacaggatggaatatcagctaaccctagatgatatcgattcaagtttggtatttatgtacacccctgttacagaagatggtgttaagggagagccccaatgtacaatgacagattttgtaaaggctgccacaccatcagtcagcagtgtacatgttgtgggagacattgttgaagataacacaatcaaagggaatggaaagtattttggtggcaaagagggattaagcaaattcctctggtttagagagaaggaaaatgggtatgaccgtatgagccatactgccattagtttgtcatctttgagtattgataaaacacctttatgtgaatttcttctagtgctatcaaatagcacggagtacacgctaacaaaggaggatgtgggtcggcccctcaaatttgtatatgttcccatcaaccttgaaggtcaggagggtgaagctgcttatgctatgacagatgcagttaagaaagcacctccaaaagtcttggatttgaagatagttggggaagcaagagaaggaagcaaggtgtctgctactgctactgtcaaaggtggcactgaagggttcagcagggttcaatggttcataggatcttcatccaaatttttaaatgagaatgaactcagagtcctcactacatctaaagtttctaagacattccgcattcctctcagtgctgttggatattatattgttgcaaagtttacccccatggcacctgatggtgaaactggtgaaccagcctatgctgtgtctgctgatgttgtggaaatgctaccacccagcctgaattttttgacagtcactggtgaattctcagagggccaaatgttgacagcatcatatggttacattgggggacatgaaggcaatagtttatttagttggcatcttcatgagactgaggatgatgaaggcagtctggtttcagaggcatcaggtctgctacaataccaagttacaaaggaagctgttggaaagttcctttctttcaaatgcgtacctattaggaatgatggtatacttggaaggccaacaatactttctcttgaactaactggtgaggccattgaggggaccacaatggttgccagcagaagatattggggaggagaagaaggggagaccatattccgttggatattgactagttcagatggatcacaaaaacaaattgaaggggctgcaagttcatcatacaccttgaactgtaatgatattggcttttacatatctgtcttgtgtgagcctgttagaagtgatggagttcatggttctttggtgtcaacagaagagtctggtcctatcttacctggaccacctacatgcttatctcttgagttagctggccctatggttgaaggtggctgtttgacctttcatgctgagtatacaggaggtttcaagggagactgcatccaagaatggttcagattacattctgatggcagcaaagagaaattgtctactgatgaatgtctagatcttactctagacgatgttgattcgcgcattgagcttatattcacacctgtacgagatgatggatcacaagggtcacctaagagtgttctatcggatacaattctacctggggaccccaagggtgttgatcttgttctaccagagtgttttcaagacaatgaaatttctccaatcaaaacctactttggtggtaaggaaggcactggaaaatatacatggtaccgaactaaagagaagcttgacaacttggaggctgatctggtggcttcatgttctgaagttggagtaaatttgatgtacaaaccttcgttagatgatgttggtttctacttgattcttcactgggttcctgcacgatatgatggagagatcggtgacccgttggtggctgttaccagtgaccctgtcatggcagcatttccatctgtttcggatgttcacttgaagcagaaaagttcattgttgtatagcggaacaggagtctattatggtggatatgaggggtcaagcttgtataagtggtacagggaatctagtgatggaaccaggcattgtatagatggtgctgatttaattatatatgaagtgacagatgcagattatagccgccgtctactgtttgggtacattcccgttcgttctgatgggatcattggagaagaaaggctctctgagccatctgatataattctccctgaacgacttaaaatcgaagcactctctttcaagggaaatcaggttgagagagagacactgactgttcttgaacaaattccaagcactgcagttcaacaacatctatggagtaactacaagaaagagataacatatcaatggtttgcttccagtggatctgaagtggatcagacttttgagccactggctaaccagtgctctcgctcatacaaagtacgtttcgaagatattggccgatgcctgaaatgtgaatgctcagtctctgatgtatttggacgatccagcgaattgatatccattgtgactgctccgatcttaccaggaaaacctaaaattgaaaaactggagattgaaggaagaggtttccacactaacctgtatgctgttcggggtacctattctggaggcaaagaaggcaagagcaaaatccaatggctcaggtctatggttggaagcccagatcttatctctatacctggcgaaattggaagaacatatgaagccaatgttgatgatgtaggttatagacttgttatcatttatacacctgtgagagaggatggagttgagggacaacctatctctgcttcaacggagccaattgcagttgagcctgaaatttacaaggaggtgaagcagaagcttgatgatggatctgtcaagtttgaggttttgtgtgacaaggacagaacaccaaaaaaggcacaagtgatgggacatttggagcgaagaattttagaagtgaataggaagaggatcaaagttgtaaagcctggatccaaggcatcattcccaactacagaagtgcgaggaacatatgttccacccttccatgttgagctatatcgcaacgatcagcaccgcttcaagattgttgttgatggtgagagcgaagttgacttgatggtgcaaactcggcacatgcgagacgtcatcattctggtgattagaggtcttgctcaaaagttcaacagcacatctctcaactcactcctcaagatagaagcatga

SEQ ID NO: 12126 - DNA, 408 bp, Oryza sativa
  Clone ID: PAT_MRT4530_18283C.1
atgaaggatttgggagtgattgatgttattcttgacattaagctactgagaggagatgaggatgagactacaattgtgcaatctcactatgtggataaggtcttgagtcaatttggttatagtgactgcaagccagctcctactctttatgatcccagtgcggtattaaggaaaaaccatagaatagcaaggaatcaactacgatactcccagatcattggttcattgatatacttacctagtgtaacgaggcctcatatctcatttgctgtgagcaagttgagccggcttgtctcaaattcaggagaagatcaccggtatgctctagaaagagtaatgtgctatctaaaaggaacaatgagccatggaattcactatgcggggtacacaaaagtaccggagggctaa

SEQ ID NO: 12127 - DNA, 321 bp, Oryza sativa
  Clone ID: PAT_MRT4530_18284C.1
atggataatgggaactaccgcgtaaagaagaacgtcgtgtggaacttcaagtgggattacggcagaactaggcggaggcgacagagggaggagctggcgctgggtggagccggctatgcgtgggacgaggcggctgagctcaatgaagctcaggaggacacgccaccaagggaagaggcggccctgccaagctcaatggagctcaagaaacgcgcctccgaggcggcatgggacctcgagcctcagctcggtgctctgctagaagatggagatgatcatcaggatggagagtcacaggggctgccagatttagccacctga

SEQ ID NO: 12128 - DNA, 242 bp, Oryza sativa
  Clone ID: PAT_MRT4530_18285C.1
ttctggattggccaacttaattaatgtatgaaataaaaggatgcacacatagtgacatgctaatcactataatgtgggcatcaaagttgtgtgttatgtgtaattactaattatctgaataagagaaagagatcatccatatttcttatcctaaatgaatgtcacgtgtctttataattctttgatgaaccagatgcattttattaaccaattccatatacatataaatattaatcatatat

SEQ ID NO: 12129 - DNA, 345 bp, Oryza sativa
  Clone ID: PAT_MRT4530_18286C.1
atggataatgggaactaccgcgtaaagaagaacgtcgtgtggaacttcaagtgggattacggcagaactaggcggaggcgacagagggaggagctggcgctgggtggagccggctatgcgtgggacgaggcggctgagctcaatgaagctcaggaggacacgccaccaagggaagaggcggccctggtaggggtgaggcggcagcagacggaggagccagagctggggggagccggcaatgcgcgggacgaggcagccaagctcaatggagctcaagaaacgcgcctccgaggcggcatgggacctcgagcctcagctcggtgctctgctagaagatggagatga

SEQ ID NO: 12130 - DNA, 1077 bp, Oryza sativa
  Clone ID: PAT_MRT4530_18287C.1
atgaaactatattgggcagtggcatgtcaacaaagatgtgggaggtcacaagttgagcattcaaaaacctgtattctccctgacaaggtgcatttgtactatccagacagcctaagcaaaacagcagtcgtgttcaatgttgttggagaagtgagagggttaatatctgagaagtttgtttgtgctgatgatcttagagaaaaggagaaggctgaagcatatgcagctgtgaagcaagcgtatgaaaattggaagaatgtcttcacctgtgacaatgaaacacttctggcaaatccttcacagctccttgatgtgagaactacgtcattgcatgaaaatgactatgaccagttttctacacaagtttttaccgatgggtttggtttgagccagtcaagcataccatcacctgacattttctcaattgatccctcgagtgcattggatccttgtccattggaaactgcagaaaacaatgaaaatcaatatcagtcagagttacccccacttggtggccatgcaccaccgcaagtatcacagacagtggacaagttctcaaattctttggtttatgaggattgcaccagtcacccctcattcagtgaagattactatcgttgttcagatccatctgtatcctttgacacacaagaccttggagctgcattgaaaggcttcattgcaacgatatctaagcccaaggcgtatagaggatggaggacattgtcttatgttataggatggatattctacaccaagaagattgttgctatgaaaagaaatgaacatgggaaataacgttttcgttcacatgtttattcctgtggttgtttagttaaaccgtgaaatatatataagcggagaaaaggaaatcatgtacatacgagtttggcagtcttgaaatctttttgggcacagctggcacgctctgctggtttatgagctacatccagcattttttcagcatgagcattcagcattgcctgtaaataatcagatgaagttttgtgaatataatccgtaaatatttgtggatgtttgttaacgcgtggtagttctttgaaaaaaaaaaaaaaa

SEQ ID NO: 12131 - DNA, 687 bp, Oryza sativa
  unsure (1)..(687): unsure at all n locations
  Clone ID: PAT_MRT4530_18288C.1
ccggccgggagaaaattgggctcgcaagcgctcgagttcttcactttcggcaaaagatggcacacctctcatgctttaccaagtaaaggtactaaataaaccgccttcgctggctaatccctacgtcttggtactctaccctcccattcataagagagtggtagttgtcaccggaagcaggtgaaagtcgtgagttgagtaagtcttggcaacaacgcttcgcacaactaaatactaacacactgtttacttctgtacttctccaccgccaaaacacaatgacttatgcattccatacaggcacgagcgaaaaacgagctgaacgagtgatcaggtgcttcgacctctctttctacggttggtttctgacatcaatcgagattcaacattcagtaggtttgcaagatatgcttaatagcacagaagggcgctagctaggctactaactaatgccagtaataagcaagcaccggtcaagtagaagcagaagcaaggttcggttttgggacagacagaaagttggataagaggatcgttcttagccccagctacgagagaataatatgcatcttccgtcatttcattagacgttcttgttggatttgaacgcgcatcggattacttacctntctacaccttctctcttttgaatcatctcgcaaaaaaaaaaaaaaaaaatttgcgggc

SEQ ID NO: 12132 - DNA, 1507 bp, Oryza sativa
  Clone ID: PAT_MRT4530_18289C.1
ttttttttttttttttttttgccaaaatgttcttggttagcagtgaaatagatgggggaagtgagtttatctggtcccttcattggggttaatgcatcatacaggaacagcagtttaggcgctactacaaaacaacccagttgcactttcacaggtgaaaacccaggtgaacattcacacgcaagggtaccaaacatgccagcaatgtctgcacaaaacgagctccagagtagttctccaatgctgtaagcagggcattctacaggccaagaccgacggtccggccgtctctccggcgcaggcctgcgatgtaatgcttctccaggtcggtgtccagctcctcctgcttcttggcatccgacgagctcccgtccttgccgtcgaccttgctctcctgggctgagctgctgctgctgctcttcactcccatgagtttgttgaatttctcttggcgctcccggtcaggaaacagattcgagtcccagtgagcgcttgactctggaggattactctttttgttgccccaaagcagttttttcttctggtctgtggacaggcgcccagcaccaactccaaatcctacaaggtttttgttcactaattcggcagctttcatagctgcaacttttgctgcatcaacactgtttacagtaaatcctgatgtagggttatccaagactacaccattcgaacagtcaagtgaaggtttcttcccagaagtgtctgcattatcattaagttgtgcattttcaaaatctggcccaactgaactaaataaacttctcttctccctagttcccacctcaggttcagctacggaactcatcttttcaatttccttgccagttctcttctttagggcctcctcttgcttagcagtctccttgtacttactttccttttcttctggataccttctgctagtgtgtccttgtttttttccatctgaatatttgtcatgttctccatcatatctaggatattcacgtgatggctcttgcttatcttggttcttactcctgtgttctctccttaaagatttgtcatcatttcgccaatcaccgcgtgatctatcagatgtgccatcacgctttgtacgatcataataagtgtcagaccttgattcccgttctgaccgagagattctatggcccctgtcattgtcatcaccacgcttatcatgatacctcctataatcatcatgcctcctggaatcacgtggtgctccagaagaatgcctatcagaatgcctgacatattcatgacctctgcctgatctggcattactagagtcattctctagatctcttaagtcatctttccttccagaaatctcaatctccttattgttgccttccaagtgctcaactggactatgactcctcctacgcttagagttcatcttgcagtcagcagaatcaggatggatgcggcggaagcagcaggacgaacgacggcgcccctggcccccctgctcgctcgcgggagggatggatggggatcggcg

SEQ ID NO: 12133 - DNA, 2184 bp, Oryza sativa
  Clone ID: PAT_MRT4530_1828C.1
atggacctcaggaaatcatcttccaccagtgcgtcgctgaagaagcttcaggaagacggcgcccttcccggtcgtggaaccatggagagggaagcaggaggtactaatccccagcccgtcttaggtcgcatggttgcgatcgaagactatattctctgcggttttctccctccgccttccgaattccttctcctagttttgaacttctatggtctttctcttcttcatttgaaccccaattctatcgcttttcttagcatctttgctcatctttgcgaggcctacattggtgtagagccttttcttgatctctttcgcttctactacgagctgcgttggatggagtccaacaggtgcccttcttctcacagcaaatggcggaataggtggctctatcttgagatcaaagattcagaccctgtcttcgttgttcccaaagaacaacctgacaagatttcgtcttggaccgcaaagccccccttgaccccctctcttcagtcgtttatcgacatcatcgacgacttccgagtacggggcttgtcggggtatgaagtcattgcagacttcgttggtttgaacagcgaaaccatggagcgccgcgtcgaccaggtgatgatcagtggtctgacaacggcgagtgacatccccgtgcccctttgtgagaagggggcagccgaacgcaatgacgctatcaacgcctcggacgcgtctcccccgcctccacgacgacaacgtattgtgacgattggcgagaaggaggcgcgggcaaaggctgtgcaagccaagttcggagggacttccagcgcgtcgcctgccgtggcctcgacggatgtcgcgctcacagccgggagccgggaggcgacgcctagcggcccagtcagcgatcccgcggcaggtcgtggtccgccaattgccggcctcaccttggaggagctccaagtcgaaatgaggcgcctcctcgaagctggtgctcgcggcatcgaccgcgagattgcagaggcaaggtcggaagcagcgctggcgaatgcgcgtgctgaccggttggtgcgtgagttggctgaagcccgtgaagacctcacgaagatgagggaattggtgtccggcaacgagcgacaacggaaggggctcgaggaccgcctgtcggaactcgggaacaacctgtcggaaatccggggttcgttgtgggtcacctacactggcctgcaccagctctccggggagtgcggcatcaagtctaccatcccggtgaatcccgacgagttctcgctgacctcctcccttgcggaactggcaacgacgatgggggagatcccccccaagcatgcagccaggattgcggaggagacgtcgagcgggatctacaccggggagtgtcatgtcctcgcgtgtgtaaagcagtcgcgtcctgaactcgatctgcgcgagatcttggatcagggggcggccagcgacacgcgtgaggaggtgatggaagaagtcggtgatctgggagagtctattctccccctatttgaagaagatgctgatgatgaggatatccagcagtgcggccagcccgagtcactggcgataatttcggtactcgagtttgagccacacgtgtcgcccgacaatgtggaccagacccttgatacggagacagggatgacgacgacttcctcagaagatctcgagggtgcccttgctggccaagatcatcgtatccaatactggaagatgaagtttgaagtggcggaactcgagagaaccatgctggcagtgaagaaagagcaggctgtggaaacgctccaaggtcgcgaggtgtggtttaactcgtacttgaagagttgctgcacatctatggccagggtctgtagagaacttcgagtggtccgcggagatcccgaggagtcggcggccggatacatctcatggctgaacggggcctgtgcccaactcaatggcatcggcaagcgtatcgacgaggccttgaagcaggagtgtcgtcgatcgagccggtatgccggagggcacgtgttggcttgcccgcgagatcatcgtccgcgcttggacctcgactttctccatgagggttttgctcgttctcagaggactccggcggagatagaccatctggcgaggtcgatgtcgccgttggccgagaagatcttccagtctatggactggcgttggccttcttggtag

SEQ ID NO: 12134 - DNA, 2547 bp, Oryza sativa
  Clone ID: PAT_MRT4530_18290C.1
atggaggacggcgccgcggggggcgatgtgtccgccgaccgtgtcatcgctgagttgctcgacatggggttcgagttcgacgagatcagccgagcgatcggtgcagtcggcacgcgctgcgccgatgtgctggagtttatgctgggtggttcaggcaatgggaaaatgaaaaaggcgagtagggaaacacgaagccgtagttgtgtctcatctaatgcagaagcacgcccgagtgatgatgggaacaaattggttaatcctaggaaaagattaaagcaatcgagcattaccgatcatcttgcatcgaataccggctgcagaaggggatcttgtggtgagaaagctagcacgtcatatccctgtttagcggcttccgatgatcctagagcgccagtggcagtcagtgctgatgtgtgttctgcattgaagcctgaatctcaatttttgcttgctaattcaagaagtgagtctgacctcggacacaaaattagtgctgttctgcggaaacactttggattttcctgtgtgaaaggattccaaaaggaagctttggatgcttggtttgctcacaaggattctcttgttctagcagcaacaggctcagggcaacctgatagccgtgttgagggcaaagcaatgtctggcatgtataagattatttatgtttgccctgagacagtattaaggcttatggaaccattgaagaaacttgcagaaaagccagggattgcactttttgctatcgatgaggttcactgtgtttctaaatggggtcatgattttcgaccggactataggagattatctgtgcttcgagaaaatttcagtgcaagcaaattgaagttcttggagcatgatattcctttgatggcattgactgctactgctaccatccccgtaagagcagacattatcaagtcgctgaaaatgtcagaagatacagtggtcgtcttgacatcttttttccggcctaatctcagattcagagtaaagcacagtaggacctcagtctcagcttacaaaaaggacttcagagaacttgtagtaacatataatgattcaaggaattttagggggaagggacagaaagctcttagtgagatcaaccctgattctgaaagcagttcatatgagtctccggatgatgctatgtcagatgatgaagatgcaaatgttgattccatgagccatgaagataatagttttggaaaaactaaagtcggcatgcccttgataaatgaaaatgctgaaaatgagttggatgtatatccaggagtagatgattttgatgttacatgcggagagttccttgagtgctcgtggcctgagaactctgcatcttcttctcaatgcaacaaaactggttccagttcctcagaaattgctgatcaaggtcctaccattatttacgtacccaccaggaaacaaactgtggagttagcaaactatttgtgcaaaactggtctcaaagctgcagcatataatgcgaagatgcctaaatcacatttgagacaggtgcatcaacagtttcattgcaatgccttggaggttgtggtggctaccatagcatttggcatgggaattgacaaatcaaatgtcaggagaattattcactatggtttcccacagagtttggaagcatattatcaagaagctggccgtgctggtagagatgggaagttggcggattgcactctatattgtaaccttttgagagcaccgacactccttcctaataaaagaagcaaggaacagacaaaagtagcatacagaatgctacgtgattgctttcattatgctttgaacacttcaatttgtagagccaaaatattagtaaagtacttcggggaggaatttggtcctgatggatgccgcatgtgtgacatctgtattaatggccctcctcaaatgcatgatttcaaggaagacgcagttatgtttatgagtgtgctccaagctcaaaacggacaagcaacggaagatatgggttgcagcaatataccccgttatatatctggaaggcaaaggtttggggaggttccgaatttcagaggggtggtcagttatataagggaaaagtttcctagatttgccacaactgacaaggtatggtgggaaggccttgctcgcatattagaaggcaggggatacatacaagaagctgctgaaattggactatttggaggattgcatcttccatcatttttctactttagttcagagattgaaatcctaaagcctcgtgttttaatccagtatcctgaggtgacagaggccggactgaactttttgagtatgcaatcagaagaggaaggtttatatgaataccttaatgctgctatgctattggtaatgaatgacccaaaacctatttctacatcttccgagtggggcaggggttgggcagatcctgcgatacgccgccagcgtctagcaggcaagaaaatggggagaagaaaaggaaagaggcattctcggagccactctacaggtttcaccactgcaagacagagattagctgaaatactctcaaaacgcagaagataa

SEQ ID NO: 12135 - DNA, 344 bp, Oryza sativa
  Clone ID: PAT_MRT4530_18291C.1
aggaaaactttccaaccgtaattgaaactttcaactcaaaatttaaaaagttgcccctcgacttttgaaaacttcaggctcacacaggagccggcaaatttgcgtgcagcaaaggaatcaacccttgcccttggttccctaggaagacttttaccaattggttattgcagggtgattctgcttccaggtaccaaactttgggggttcacattttcaccatctccggtaaaaaaatggggctcaaaacaaaagctattggaatccgtttaacgactagatttattccgtaaccattaactaggggcttaaaatcccgggatgggggaagctgccttgaaattctt

SEQ ID NO: 12136 - DNA, 711 bp, Oryza sativa
  Clone ID: PAT_MRT4530_18292C.1
atgggtgagatggaagagaggttgttggctgtggtggaaaaactggcggagaaggtggagaaggtggagctgattcaagagaagctggaggcgatggacatgaagttggagaagcaaggagagagacttgatcaagtgcaggccaaggcgaaccgcgccaacaacgctggtgattccaaccaggacaatggaggcaacctcttctatgacaagagaacaacctcagatgctgttgtgaatgagtttgacagtggaacccatcacattaaagctaatgcaatgtttgaattgaaacaaacgggttctgtggatgagtataagagtcaatttgatgatttaatgtacaacatcaaactgtatgataatactgaacttggaactgtgtgggaagtggggcactttgtagctggactgaaggatgctctaaagactcatgtcctgtctaaattgcccgaaactatcagtcaagcttaccatcttgccaaggcaaaagaaagggtgatgggagaagtaatgcagggaaagaagaaatggggcatgaaaattggaaggagtaaagggggagataagtcaaaaatttctactggagacttgtggaaggcacaacagttaaaggaatatcgcaggattcatgggctctgttttaggtgtggtgaaaagtacagtccaaatcaccagtgtgctcaaattcctgctgctcaagtgaatgtg

SEQ ID NO: 12137 - DNA, 1225 bp, Oryza sativa
  Clone ID: PAT_MRT4530_18293C.1
atgggtgagatggaagagaggttgttggctgtggtggaaaaactggcggagaaggtggagaaggtggagctgattcaagagaagctggaggcgatggacatgaagttggagaagcaaggagagagacttgatcaagtgcaggccaaggtagacctgtcggtagaatcactggggcaagttcatcaagaatagatccatgttacgcaaactgtgaggcgaaccgcgccaacaacgctggtgattccaaccaggacaatggaggcaacctcttctatgacaagagaacaacctcaggtaacctttccaacatctacacccacaccaccacctagggttgagacggatgagaaccatttcagaagaaatatgccaaagatggatttcctgaagtttgatgggacagatgctagtgtgtgggtggacaactgtgaaacgtattttgctatgtaccagattccagcaggttttaaggtgtcagttgcatcactgaacatgttggggaaggcatcatgtttgggacgaattcacagatgctgttgtgaatgagtttgacagtggaacccatcacattaaagctaatgcaatgtttgaattgaaacaaacgggttctgtggatgagtataagagtcaatttgatgatttaatgtacaacatcaaactgtatgataatactgaacttggaactgtgtgggaagtggggcactttgtagctggactgaaggatgctctaaagactcatgtcctgtctaaattgcccgaaactatcagtcaagcttaccatcttgccaaggcaaaagaaagggtgatgggagaagtaatgcagggaaagaagaaatggggcatgaaaattggaaggagtaaagggggagataagtcaaaaatttctactggagacttgtggaaggcacaacagttaaaggaatatcgcaggattcatgggctctgttttaggtgtggtgaaaagtacagtccaaatcaccagtgtgctcaaattcctgctgctcaagtgaatgtggtagaaactattgatcatacagatgtattgtctgatgatatacttgaagctgttatggaagtggaagatttagggcagaatccagatatgtttttgtccctaaatgcagtagcaggatggggaaatacaggtactattcacttaagagctatggtacacaaccaggtgttactgatacctgtatgccatggcccatctcaccagacccta

SEQ ID NO: 12138 - DNA, 1263 bp, Oryza sativa
  Clone ID: PAT_MRT4530_18294C.1
atggaggaggatgaggaagaggatgacgagctcctcatggagatgaccagcgatgatgagctcctcttcctcaacggcatccacgttcggttggatttggagcgaacgctcaccacggcgcccatcaagctcagcgctccgttatgccaatcgctcgagtcgatggaggggaaattgttggagaagttggagttactcactcagaagatggaggctatggacgacaagatgacgaaacacggagggcggctcgatcaggccgtcgtcaaggtggatctcgctctggaggcggttgggaagctgcagcaagatcagcttcaggcggcgcggctgcaaaagagtttggcgtcttccgatcaaggtgttcaagagtctgattcccagactgaattatgtgctatttcttaccctcaaatattgaaatggcagaagggttgtgatatttgggctgctgttttgcttgaacctactgacaatgcagattctcagtccatttcagaagtagtagctccattactgtctgagtttgctgatgtttttcaagagcccaagtgtttacctcctcatcgcacttttgatcatgctatcttcttgtaccctgatgatgctcctgtcaacagtaaaccttacaggtattctcctttacaaaaggatgagattgaatgccaagtcaaggacatgattgattctggtctgaaatcagatgtggctaactttgttaagcagtgtcagatttgtcagcaggccaagtctgaacactgcaagctccctggcttgttaacaccattaccaattcctaaggaagcctgggtggacatatcaatggattttatcgaaggtcttcccaagtctgatggattcactgtcattcttgtggtgttgattaagtggtcttctttaccggcgcatcaggctacctgggaggattatgaagtgctcaagacccgctttccatcagcaccagcttggggacaagctgtttctccggcgggcggcaggctcgagaccatatcatgtcaaccaagattggttgatgtcccactcccaaacaatgcattgtctgctgttcaagctacaacatccgaagtgtcaaaactgatcatcccaaccaaccaatccttgcagctccatgatccaccctctccaaacgaaaggaccaagaagacgctgctggacagtcaaaaaagctgtcgcatgcggcacatcccttgtgtaatgaggatggccaagttagcgcaccaggacttcaggggcagcacctag

SEQ ID NO: 12139 - DNA, 3149 bp, Oryza sativa
  Clone ID: PAT_MRT4530_18295C.1
cagaacctcggttacttcctgatcagtgttcgattctctgctctatcgtctcgacggagatggagtacgcgatcttattcgccacgtcgttggtgatcaccgtgctagcagcatccggcttcgcgccggcgcatggctggaacaaagggacggcgacgttctacggcggcgccgacgcctccggcacgatgggtggcgcgtgcgggtacgggaacctgtacacggcggggtacgggacgaacacggcggcgctgagctcggtgctgttcaacgacgggtggtcgtgcgggcagtgctacctgatcatgtgcgacgccgccgcgacgccgcagtggtgcagggcgggcgccgcggtgaccatcacggccaccaacctgatggaggggaaattgttggagaagttggagttactcactcagaagatggaggctatggacgacaagatgacgaaacacggagggcggctcgatcacgccgtcgtcaaggtggatctcgctctggaggcggtcgggaagctgcagcaagatcagcttcaggcggcgcagttgcaaaagagtttggcgtcttccaatcaatttgaaagtactgcacagtgtgaaaaagttcaggcgctgcaaaccttacggcaaactggttcagttgccgattataagtcccagtttgattcactagtgtaccaggtgcgtgtgtttgatccatctgtgggagggatgatgctgctgtatcgttttattctgggtctaaaggaagaaatccgctcagttctgctggtccagttacctgacactgttcagcaggctgctgcaattgctttagtgcaagaaagtgtgttactagacagtggacagaaacctcttaagaaattgacatacaaaggggttggcactaaagtggatacatctgttcctatctctgagccatcggccattaaacctgaaagagctgaattatggaaagctaaacagttgaaggaatatagaagagcgaatggaatctgttttaaatgtggggataaatattcacctgatcatcagtgtgtgatcactgtggttgccgaagaagattctgatgctgaggagcagtatcatatttctttgaatgcattatctggtgcatctcgccataatgctattcgtttgagagcattggttcagaataaagtagctaatggtgactttctctcttgtcaatatgtggttcctaatttcacatggtggatccaaggtcagacattctcttatgatctgaaagtggttcagttggggggccatgatgcaatattggggatggattggttggctcaatggggtgatatgtcttgtaactgggcaactaaaactctgaagtttttctaccaagatcagtggattgcactgcaaggtgttcaagagtctgattcccagactgaattatgtgctatttcttaccctcaaatattgaaatggcagaagggttgtgatatttgggatgctgttttgcttgaacctactgacaatgcagattctcagtccatttcagaagtagtagctccattactgtctgagtttgctgatgtttttcaagagcccaagtgtttacctcctcatcgcacttttgattatgctatctccttgtaccctgatgctgctcctgtcaacagtaaaccttacaggtattctcctttacaaaaggatgagattgaacgccaagtcaaggacatgattgattctggtcttattactcccagcatgagcccttttgcctccccagtcttgttggtcaaaaagaaagatgggacatggcgtttttgtgtggattatcgcaaactcaactctgtcactgttaagagtaagtttccaatgccagtggttgatgagttattggatgagttagcgggcacacaatacttctctaaactggacttgagagccggttatcatcaaatccgtatggtggaacaggatgagtttaaaaccgctttcaaaactcatcatgggcagtttcaattcagcgttatgccctttggtttaataaatgctccatctacatttcaatgcctgatgaattcagtatttgcatctcttatttgcaaatgtgtattggttttcatggatgacattttagtgtacaaccctaacttggattctcacctacatcatctgagacaagtgtttatgttgttgcgacagaatcagttatatgccaaaatgtctaagtgctcttttgcttgtgctcaattagagtatttgggccacataatttctgctaaaggtgtcagtactgatcctgccaaaactgcagcgatgttagcttggcctgttccacaaactgcaactgagttgagaggttttctgggcctcacaggttactatcgcaaatttgttccgaattacagcattatagccaaacctttgacagtgttattaaaaaagaaagcattcctctggtcagatgctgctcaacaagcttttcaacagctcaaactagccatgagttctaccccggaggtgttaaattcttattcagtggatcctgctgctcaaactttgctgactgaattggctgttcaatctactaatacacaaggtttttctctgcatgatagattgatcagacatcatggccgagtatggattggagctaacattggattacaaacgaaattgattactgcttttcattcttctcctgttgggggtcattctggcactactgctacctatcaaaggatgaagaagttattttcttgggtaggtctgaaatcagatgtggctaactttgttaagcagtgtcagatttgtcagcaggccaagtctgaacactgcaagctccctggcttgttaacaccattaccaattcctaaggaagcctgggtggacatatcaatggattttatcgaaggtcttcccaagtctgatggattcactgtcattcttgtggtagtggatagattcactaagtttgcccattttattcccttgcgtcatccatttactgcttcccaagtggccaatgcagttgacaaaacagttttcaagacacatggcatccctcattctatctcagatcgggataaaattttcaccagccgattttggagtgatttgttcaaagtgtgggacactactctgagtatgagcttcgcttatcatcctcaaacggacggctag

SEQ ID NO: 12140 - DNA, 881 bp, Oryza sativa
  Clone ID: PAT_MRT4530_18296C.1
ttatttttgaaaaggaaaagggaattattgcgtcagcggctagggttcgcggtggaccgggtgcacggcggcggctcacggaaacgaacggccgagatcgattcatccaaaacggacgaccgagatcgaccggtccacggccggaccacgggagacgacgacgatgacgtcagcggtgacgtcaccaccggcggcggctcgggcgtgcatgctcgccggcatacgacggcacgacagcgcgaacggagggcacctacgggtagcggacggcacggcgaactcaccggtgaccaaagaaaaggcggcggagacgatcaggtcgacggcggcgacggtgctccggtggttgacaacgatggcgaaggggcggacgaggacggcgacgagacggcgaccacgacggtgacctcccgaatgacggcgacaactggagcgacggcggtgcacggctggagcggcggcgacgacggcggcgcgaggctacacggtgctagggcgctacgggcggcggcagacgaagacgagggtggcgacgggggttggaaggcggcggcgaaggcccacggcgaccggcgacgagaaggaaagattagggttcggaggagagagatcgatccgaatcgaactcgaatccacggatttcaaacgattttagccgacgattccaaaagagaaaaggtagaggggatcccggggatcatttcccctctattgatttcaccggaaacggaaaggggcggtgggccccacctgtcagcgggcggatgcgcgcgcgcgagcaggcggctcggctgcgggccggattgggccaggagagagagaaggttttgggccgactttcggcccaaagccaaaagaggattttaaaaaccttttcaatt

SEQ ID NO: 12141 - DNA, 346 bp, Oryza sativa
  Clone ID: PAT_MRT4530_18297C.1
cccttccgttctaaaacgcgagccgcccgccttttttttttttttttttttaaagattaaaaaaaggtttatcatcatttggccaaagaccggaccggtccttacaaccaaaccattggttggcatttaattatttaagtattccttattccgaaggccaccctaaaagatttcggccgattattaaccgtctgggaacctttggtttggaatggaaggaatggccccaacctcatttcctttataaggctggacccttgaacctttttttctggaaatccaatatcctttgcttaaaccatcatttgggaaaaccccggaaaaggaacctctttcttgcaagggg

SEQ ID NO: 12142 - DNA, 255 bp, Oryza sativa
  Clone ID: PAT_MRT4530_18298C.1
atggcggtagatctcaaacagatcaaaaataatcggggaactttaatgactcacatgagcggtggagtgcggcggcggctggggatgacctcggctcaagcggggcagtggcggctggtgacgaccttgactccgacgggggaagcagcggctggtgatggcctcgactccggcgggggcagcggtgtagtgcggctgcggcggggacacgcgtggaggcgtggagcgaggaggagcgagtagaggctcctctga

SEQ ID NO: 12143 - DNA, 414 bp, Oryza sativa
  Clone ID: PAT_MRT4530_18299C.1
atggcgcgatggtggtggtggcgcgcgggagatatacaagtgggcggaatcgagtcgagtcgagtcgaggggaggaatctcctggtgggggttggcggcgatggcgctggtggacaggaggagatccgtgtggagggatcttctcctggcgcgtccacgtcgcggatgcgcgctcgtccacgtatcccccgttatgtcggagtaggctacactccactgcatttgcatggcgggggcggcggcctcggcgcggagctgcggcgacgtcggacggtgacgcggaggcggcggctgagggcggtggctgagggcggcagcctcggcacggagctgcggcgacgtcggacggtgacgcggaggcggcggctgagggcagtggatgaaggcaacactctctttttcgttttcttctag

SEQ ID NO: 12144 - DNA, 741 bp, Oryza sativa
  Clone ID: PAT_MRT4530_1829C.1
atggcgcccccaatcgtcgggaacggccgcgcctttcccggccaccttccatggccgccggccgccttttccgccgccgttcccaccactcccgtgcccggctccctctcctcccctataaaatggaaccccctccatgcgttctctcgttttggccccttcccgagctcccccgtggccgcatcacctctccccgccttctccttctctctctccggcgccggccagcatccagccgcctttcctcctcgcccgagcaccatccggtcgcgccgtcgccgcctcggcctcgcagccgcctcctctcccccggtcagccctccgtttcgcggggaaatcaccggagacgtgtcctcgccggcaaaacagtggcgttgccgccactgtactgcctccagccacctctgccgcgtcccctccattgccggctgccctcgttgcctcctcgccggccccggtcgtcatcgttgtcgtcctctcgtcgttcccggtcgtcgtggcattcgtccctccgtcaagccgttctcgtccgtcgtccgcgtctgtcaagtgtgccgctgcagccccgtcgtcgtcttcgtcctcgcctccgcgtcgtcaagccctgcgccggccgtgtctcgccttcgtccaaggatcgccgccgaagtcgtcccctcgccgttcgtctccgtcgttcccgaccgcctccgccgcgcccgttcgtcgttgtcgttcccacgcctcgtcgcgtggtggtaa

SEQ ID NO: 12145 - DNA, 319 bp, Oryza sativa
  Clone ID: PAT_MRT4530_182C.1
ggacacaaccctcgttcctggaaaaacacatcatattccagagccgtcactggcaggagaaaaaaaacagccgaatccaaggcaattacctaaccgcccaaaccggtgccggaaagcaaaattatctcaccccccttcccccaccacgaccaggacggaaaagactcgttccatcacgcgcctgatctatccagcctaactaacacgtaagtgcccggggtccgcccccctcgcgagcccggcatggcgggcctgaaagccacacacacgcccgcaggagatcgactgatccacccccggggtgggctgccaaagggcg

SEQ ID NO: 12146 - DNA, 460 bp, Oryza sativa
  Clone ID: PAT_MRT4530_18300C.1
tttttttttttttttgtcaaaatgtaagagtcaaactattcttattgaccatatacggctgaactttcgagcaaaaggtacttgtagaatttaaaaaaaaaacaatggcaaaccccttacaagaataaacaacacctttggaagaatggaaaacaagacctcaatcctgcatggtatgtacgtacggcattatccattgacaaattatgtgtagcaaaccaaacggaataaacgaatcacagccttggtcaaataatgtcaacgattgatcgatctctagcacatgggaagatcggacggcggaggcatcagcttctgctcaggcaacgggccgtcgttgaccacccatgccatcttcaacccccaggttgtgtgaacctccaggtggcaatgcatgaaccagacaccagggttatccgcgaagaacctgatggcgacccagccgccggccggcacgccg

SEQ ID NO: 12147 - DNA, 545 bp, Oryza sativa
  Clone ID: PAT_MRT4530_18301C.1
caggaagcggcaccatgtctctccctattgtatttggtactacggagactatctctaacctgcctggacacctccctgcttggccgcttcgatgaccttgaccagcgcggcaagatttccgcagagtacatatggattggcggaactggccaggacctgaggagcaagactcgcgtgctttcaaaggtgcccaagagcccttctgaccttcccggtgtggaactacgacggctcctccaccggccaggcgcccggcgaggactctgaggtgtacctggtgccgcgcgccgtctacaaggaccccttccgcaggggcgacaacatcctggtgctgtgcgacgcctacgagccgccgcgcgtccagcccgacggcactgtgtctggcatcaaggccatccccaccaacactcgtgccgcatgcgccgacgtcatggagaaggtgaaggaccaggagccgtggtttggtattgagcaggagtacactgtgctcaacgccaccaccaagtggcccctgggctggcccacctgcggctaccccggccccc

SEQ ID NO: 12148 - DNA, 105 bp, Oryza sativa
  Clone ID: PAT_MRT4530_18302C.1
atggcacttgatgaagggtatgtagattggagagggaacgcagtggatgcaaggaagcatggaggcaccaaggcaacagtctttctctatgggagatgcatttag

SEQ ID NO: 12149 - DNA, 1159 bp, Oryza sativa
  Clone ID: PAT_MRT4530_18303C.1
gcgaacaagccaagcgcacgcatcgatcgtcgcgcttgcgccgcgcgccatggcgtcgtcgttgtcgttgctgctcgccggcgtgaaggcggcgctggtggtgctcgccggcgtcgcgctgtacagccccgaggggttctcgccggcgccgatgccgcccgagtactcgtacggcgcccccgtgtcggcgccgcggcacgagccccgcgcgctggcggcgagcgagcgcgtcggggaggggcggctcccggcgccggaggacctggcctacgacgccgccggcgggtggctgtacaccggctgcggcgacgggtgggttcgcagggtgagcgtctcgtccggggacgtcgaggactgggcgcgcaccggcggccgccccctcggcgtcgccctcaccgccgacggcggccttgtcgtcgccgacgccgacatcgggttactgaaggtgagcccggacaaggcggtggagctgctgaccgacgaggcggagggcgtcaagttcgccctgaccgacggcgtcgacgtcgccggcgacggcgtcatctacttcaccgacgcgtcgcacaagcacagcctcgcggagttcatggtggacgtgctcgaggcgcgcccccacgggcggctgatgagcttcgacccgtcgacgcggcggaccaccgtgctcgcccgcggcctctacttcgccaacggcgtcgccgtctcgccggaccaggactccctcgtcttctgcgagaccgtcatgaggaggtgctcgagataccacatcaacggcgacaaggccggcaccgtcgacaagttcatcggcgacctgccgggcttccctgacaacatccgctacgacggcgagggccgctactggatcgccatctccgccgggaggacgctgcagtgggacgtgctgacgaggtcgccgttcgtgaggaagctggtgtacatggtggacaggttcgtcgtggcggtgccccacaacctgaagaacgccggcgccatgagcgtgacgctcgccggagagcccgtgtcgatgtacagcgacccgggactcgccctcaccaccggctggctcaaggtcggcgactacctctactacggctcgctgaccaaaccgtacctcagcaggatcgacctcgccaaatcgccagctgagaaggctcaggagtga

SEQ ID NO: 12150 - DNA, 336 bp, Oryza sativa
  Clone ID: PAT_MRT4530_18304C.1
atggcgtccaccaaggtccagcgtatcatgacccagcccatcaaagcgcgcatccagatctggctgttcgagcagaaggatctccggattgagggccggatcattggctttgatgagtacatgaatttggtccttgatgatgctgaggaaatcaacgttaagaaggatactaggaaatcattgggtaggatactattgaaaggcgataacataactctgatgatgaacacttctattagggacatggcattactgccatattgcttgaaaaggaaatctcatggagatcttgttgatgtcttctgtttatatactgtgttgctagagatatggtga

SEQ ID NO: 12151 - DNA, 230 bp, Oryza sativa
  unsure (1)..(230): unsure at all n locations
  Clone ID: PAT_MRT4530_18305C.1
caaccactagcagcagcggcangaaggcgagaggnggaatcggaggtagctggacgngggcgaggcgacgacgagcnggggtggtncagcaagaacggcgcggcgagcggcggggaggagagattngttcgacgccnggtagttaggaagggagcttggagagatngcggcttcctcnaggcccgtcggcgtcggcggggagagggcnacgagcttcgccatggcgtgca

SEQ ID NO: 12152 - DNA, 288 bp, Oryza sativa
  unsure (1)..(288): unsure at all n locations
  Clone ID: PAT_MRT4530_18306C.1
gtgagggggcgtgggttttagggggtggggggtgtcgttttgcgaaaaaggccccccgtgngggcgtgggtttatgttagatttaggggggggggcccaaaaatggggaaacccaagccccgggggctgtgggtggggtaatagccccaaaaccccaatcacggggggcccggggcccaaaagacttcggggggcgcgtgacctaaagggggcccattttgtgggccccctcgggggcatccaaaccgggggtgagcttaacaaaagccttttttttcccatcaggcc

SEQ ID NO: 12153 - DNA, 265 bp, Oryza sativa
  Clone ID: PAT_MRT4530_18307C.1
tgttgagctcggaacccggggatctcgctgggaatcccgctacccctgctactcgcaacatcactgttgatacggttgcaccagcggttaatgagcttgacatcactgacaacaccgataccggcgcagatgacttgattactagcaatggcaatcctgtcctcaccttcacgggtgaacctggactcaccatcacccttaccggtccggatggtgcactggctccatctgctgcctacaccgtcgcagagacacccagtgcgaa

SEQ ID NO: 12154 - DNA, 187 bp, Oryza sativa
  Clone ID: PAT_MRT4530_18308C.1
gtaacagaaagtactgtcgttggtgcactgaatgcattgctcgtattggagagtgacgactcctccagcgcggaggccaaggcatgacagtgtcgccgcgccagatcttctacagcacttgaggcgcccaccggctcggtcgactgtgcgctgctcacatggaacctttgtaagggctgcagacccc

SEQ ID NO: 12155 - DNA, 1091 bp, Oryza sativa
  Clone ID: PAT_MRT4530_18309C.1
tattaaccctcactaaatgctggggagattatgtaggagtagtcagggcagaaaggaagacatgtactcctgtgcatgatggttcgagaagttggtttctatcagttgttagcacctatggagaaacaacctgtgctgatttgggagactcttgaccagtttggtgcggtgcctcctaaaagatatctctgactctggcgataagattatttcatgacatattgcctgatgcctcctatccatattgcatatattctactttgttttagatatttatcaaaaacaacaactccatgcccctacaaccgagggtgtgtatcacagtctctttgatttctctcacattcttagatttctctcacaacctgaggtcttgttggatggcaattgctaattgcttcgttggaatgatgagtcgatgtggtggcaaagtactgttgcatgtttatatatactgaaagatgaggttgtatttgtactattaggagatggataggtgaattactgagactgccttgtaaatttggaaaaaagctgtttagggggcataagtatcatcaacctacagaatttctcatgccattagaatttgtatttcactttcagagagtctcatactctcgtctcaggtgacaattagtttgaagattccatctgtattatatatgcaaagtgagtaactgtttgtgtatttgtaatgacataccgaattccttttgccttcaggacaagaaattgcccctccatgatccccacataattaaacaattctggggtatcagatttattttctgaaaggttggccaaccaattttattaagaatcaattttttttgtgggggggggggggggagagaaagaagaccacaaccgttgcacaggctgccgaaactgggagataaagaagagaaccttaaacagttacaatccaatccgactataagctgctacagcagatacatccagggcagctgctattttatcctatatgttatgagatcaattcgtgaacgagcccggcctctttcatctgcacatttcatcctggattaaactgaacaactgccaccagcatttagtgagggttaata

SEQ ID NO: 12156 - DNA, 1761 bp, Oryza sativa
  Clone ID: PAT_MRT4530_1830C.1
atggacctcagcaagtcatcttccaccagtgcgtcgctgaagaagcttcaggaagacggcgtccttcctggccgtggaaccatggagagagaagcaggagaacaaccggacaagatttcgtcttggaccgcaaagccccccttgaccccttctcttcagccgtttatcgacatcatcgatgatctccgagtacggggcttgtcggggtatgaagtcattgcagacttcgttggtctgaacagtgaggccgtggagcgccgtgtcggccaggtgatgatcagcggtccgacaacggcgagcaacatccccacgcctctttgtgaaaagggggcggccgagcgtgatgacgctatcaacgctcttcctctgactgacatcatcgggccactcacagaccatcaggtggcggcgtctctgaaagagaaggtcgccaaggaggcgtatgatgctgctgctgccaccactagcggtggcaatgttgcgacaaaggggaggaagttctcctctgcctcggacgcgtcacccccacctccacgacgacaacgtattgtgacgatcggcgagaaggaggcgcgggcaaaggctgcgcaagccaagtccggagggacttccagtgcgtcgcctgccgcggcttcgacggatgtcgtgcccgcagccgggagctggaaggcgacgcctagcggcccagtcagcgatcccgcgatggggcgcctcctcgaagcgggtgctcgcggtattggccgcgagattgcggaggcgaggtcggaagcagcgctggcgaacgcacgtgctgaccggctggtgcgcgagttggctggagctcgtgaagacctcacgaagatgagggaattggtggccggcaacgagcgacaacggaagaggctcgaggaccgcatgtcggaactcgggaacaacctatcggagatccagggctcgttgcgggtcacctacactggcctgcaccagctcgccggggagtgcggcatcaagtttacgatcctggtgaatcccgacgagttctcgctgacctcctcccttgcggaactggcgacggcgatgggggagatcccctccaagcatgcagccaggatcgcgaaggagacgtcgaacgggatctacactggggcgtgtcatgtcctcgcgtgtgtaaagctgtcgcgtcctgaactcgatctgcgcgagatcttggatcagggggcggctagtgacacgcggagggagacccttgatacggagacagggataacgacgacttcctcagatctcgagggtgcccttgctagccaagatcgtcatatccaatactggaagatgaagtttgaagtggcggaactcgagagaaccatgctggccgtgaagaaagagcaggctgtggaaacgctccgaggtcgtgaggtgtggtttaactcgtacttaaagagttgctgcacatccatagccagagtctgtaaagaacttcgagtggtccgcggagatcctgaggagtcggcggccgggtacatctcgtggctgaacggggcctgtgcccaactcgatggcatcggcaagcgtatcgacgaggccttgaagcaggagtgtcgtcgatcgagccgatacgccggagggcacgtgttggcttgcctacgaggtcatcgcccgagcttggacctcgaatttctccgtgagggttttgcttgttctcggaggactccggcggagatagaccatctagcgaggtcgatgtcgccattggccgagaagatcttccagtctatggactag

SEQ ID NO: 12157 - DNA, 722 bp, Oryza sativa
  Clone ID: PAT_MRT4530_18310C.1
ttttttgttcaggtaacacacaactttactgctattttgttcttcagttatctacatttggatcaaatatatgtggagtaaagaatgaatctgtgtagtccttttggacaaagaaaaaaaatcttccctagttaacgagcaaacgacaaatttacagctaccactgagtttgatttacaaccttcaggccccaactgacgtcctcgcagtgcctcacgaacggcaccatcttgcccaggtcagcgttcctcttcgccttgcagtcgtagaagggagcctgatggaagcacggctcgatcgacatggcgcggcggcacggcgggtccggcatggcgtggttctccgacctgaacatgatccacggcgtcaggccggagaggccctgcgcggcgtagccgaaggtggagaagccactggtgatgagcacgtccgtcatgctgagtaggtagatctcggccagtgctttcatgttgtgcttcttgttctttgatctctggtactcctcatggctcggctggtatacttctaccctggttccatcgactgttgggtgctcactgtacttcttctggatctgatcactgtaccaggagctcagagaagttgtaagaacagcaattgtctggttattcttgggcgcggtcggtgcttctgcttccgctcgcgtgcggatttctggcagcagcttttcattctgagcgcatgaaaggatctgttctaag

SEQ ID NO: 12158 - DNA, 1038 bp, Oryza sativa
  Clone ID: PAT_MRT4530_18311C.1
gcacgaggcctcgtgccgaattcggcacgaggcgcgatccctctcctcctcctcctcttcccccaatctcgcgcgacgcggcggaaccctagcccccaccgcgattcgctcgccggagagggagagggagggaagggaggctaggggaccccctcgccggcggcggagatggaggtgaagctgtggaacgacaagcgggagcgggagctcctgggagagcctcgccgacctgtacgccatcatcaaggcgacggagaagctggagcgcgcctacgtccgcgacctcgtctccgccgccgactacgaggccgagtgcctcaagctcatctcccagttcaactccctctcctcctcgctcgccggcgtcgtcaccatcccccggttcgtcgaggcctaccgcctcgactgccccgccgccctcaaccgcctcgtgcagtccggcgtccccgccaccgtcgagctccgcgccgcggcgtcctcgtccgcgccggcctcctccgcggcgtccgcggccgccatcgcccagtgcgtccagagctttattaccgccatggatgccgtcaagctcaacatgctcgccaacgaccaggtccgccccttgctccacgacctctcgacctccatggggaagctgggccccgtcctgccgccggacttcgaagggaaggtcaaggtgagcgagtggctcgccaagctaaataagatgggggccggggatgagctcaccgagcaacaggcaaggcagctcaacttcgatctggattcggcgtacagtgcgttcatggcatcactgcccagcaccggcctatgagcaagcctcatcctggttctgagttggtttcttctttttatttttctcaggtgtttttctatggatcaccgctgcagtgttatagccttataggtatgtgtaacttgaattgtgctatattatttgtcaataatagtgccaattttgtggtaacacatgctgttaaaaagagttctgtggcctattggttataaaaaaaaaaaaaaaaaaaaaaaaaaaaaaaaaaa

SEQ ID NO: 12159 - DNA, 1176 bp, Oryza sativa
  Clone ID: PAT_MRT4530_18312C.1
atggggaatggcctgagcagcggacgtcacctcgtcaagctacccctccgcctcgtggcaccaatgatctccgcgaccattgttgacggcatccacgatgagcacatgatcaccgacaacccaccgcccctggcggcggtactctacgccgccggagtagacgacaacacattggcaaattatttgccggcggtgttgaagggatctgcacgaacatacaagtgccacgcgatcaaggatgacctacacgtgttgacgcagaatccgggagaatcattgagggactatattcggcgctttaatgagtgccaaaatacgatcctcgagatcactgatgcttctgtgatccgcgctttcaaaatatgcggacccaccaagcacccagacccacaaggcgacgacacgaagaaaatatggtgccctatacacaagtcggacaagcactctctggagacttgtttcgtcttcaaaaaggcactcacaaagcaactagcattggagaagggcaagcgagtacgtgtagtcgagaaagccgcagaagcagctactcaggactcagactcagcctacccagactccgacctccatatttcgcacatcttcggaggttccacgacgtactcctcaaaacgagagtacaagaaagtcgagcatgaagtttgtttgacatggcagggggctgcatccaagatgaagtggtcagagcggaagatcaaattctcagaggcagactaccccaagactgctgttactctaggacgatatccgatcgtggtcgaacccactgttcggaacatcaaggtcgcacgggtcctcatcgatggcggcagctccattaacctactcttcgctagcaccttggacgcgatggggatcccacgaagcgagttgacgcctactgatcaacccttccacggaattactcctcagtcatcctccaagccattgggcaagattacgctacctggaaacgcgaagttggtggtgcagtgcgacaagcagagcctcgatatggtcgagcacacccccaacccacccgccacagctgagccacccaagaaactgagcaaaaccaacaagacgccaaaaccagacggcgcaatcaagatcgttccactctccagcgccaaccccgacaagattgtcaagatcggggcaccactggatgagaaatag

SEQ ID NO: 12160 - DNA, 4702 bp, Oryza sativa
  Clone ID: PAT_MRT4530_18313C.1
ggtcaccctaggcctgggctccgtcggcgctcgcacccgtcctcgcccgcctcctcgacagcggcgcttccccggggcgcggctgcggcccagtccctcgcttgtggggggcggggggggggccgctaccccccgcggccatggagttcgaggcggacggcgcccggtggccggagccgcgaggcgacgctgccggggcgccgccgctggagcgtggcgatgcgccttcccctcgcttcgattcgtctcgtgccctaagattgctgagagagcttggctcaaatgtaacagaagatttggttgtgctgatgccaaatttgctatcatttctgaaacatgatgatcctgtggttgttaatcaatccatagctagtgggacaaatttatttgctgctgtattggaagagatgacacttcagattaataagtgtggaagggttgatgcttggcttgaagagatgtgggcttggacgaagcagtttaaagatgcagtccataatctgatccatgagtctgtcccagttgctactaaactgtttgctgtaaagttcattgaaacatggatcctgtgtttcgcacctcaatccaaaagtgaccggatgcagccaactgaaggaaggaacaggaggttgtttgatagttcaagattatctcaattccatcccagccttaaccctgctgttctcgaagctgatgcaaacagggctctcatcctccttgtggatatactgcagtcagcttgtgctcatcaaggatccttcctagttggcaccattaattctcttgcagctattgcaaagaatagacctgtttactacgaacgcatactgccagtgctacttggttttgaccctagtttggaggttgcaaaaggagctcatcctgcaagtctgcggtattccctgaaaacagcttttttagggtttctaaggagtccttgccaggcaatgattgagtccaaggatactctggtaaggcagcttcgtgttctgagccctggtgaagcaacagaacagattattaggcaagtagagaagatgactagaaatattgagcgcgcttctcgtgctagcaaggatgaaccttcaacgttggatatgccttacggagatgttagtcggaaatatcctgctgccagatcaagtgatgcttttgctacagctgatggcgtagctaaaagagcaagatttgatacctctgctgctttaaacccaccatttcagggagcatctgattattctaatatgcaggttgacaatgaagcgaatgtggatcattcctctgatccagctctcttgaattgtgatatgtctcctgttgagaagatgattgaaatgattggtgctttacttgctgaaggggaaagaggagctgaatcccttggcattctcatctcaacagtagaagcagatgtcatggctgacattgtaatagaaacaatgaaacatctacctgaaacttcaattctattagctaccagcaacaatggccagcaaaagaaaattcaatcttcctccagtcccctgacagaaaacttgccagcaaactcccactcaatgccctacagtacgcagtttgcacttcctgcagatggagtcagcatgtcaatgtcagatgtgcctgttgtgtctggcgttcatgattctaagcgtgacccaagaagagatcctcgtcgccttgatcctcgtcggacagttgcccctgcagccactagttccatacatgtgaagggggaaaccaccggcgtgcatcagacaaataacttgtcaaatgtaccttatcctgtttcagggaaggttgaaaactctttagactattcaggagacctatctaaaaatgaagacgtgcagcaaacatcttgtcaacccaatcaatcactcccaaaggaaaatagtgagattttggatgatgccttggaactggagccgaaatttgaagtgcaggcattagcagatgttggatttcattcttctggtgttgataaagagatggtcaatccattgtctccagaagctacttcaaacaatgaattggatagcgtggaattggaggttgatccattttccccagttttgaaggcatcaacgctggaggatactactaatcatgatttgccagttcttccatctcatctggaattaagtgacgatgagaaaatcttgttgcacaaattagcaattagacggataatcgatgattacaagaaaaacagcgttaacacaagattttccctccttgctcatttgattgcccagagacacattatataccattatcatgatcagggtcatgaactggcaatgcatgtgctgtatcagctgcacagtgtgagtgttgctgattcaccagaaagcaccttacctgcttctaaaaattatgagaacttctttatatcacttgcaaggtccttgattcactcgctacctgcttcagacaaatcttttagcaaatttctgtgtgatgcaccatacttgcctgagtctatgcttaaattactggaggatatttgtgtgtcacaaggcaacagccagcaaacaaaggacagtgatggtgatcgtgtcacccaaggccttggaaccgtgtggagtcttatcttagcacggcctccacttcgacaagattgcttagatattgctcttaagtgtgccattcactctcaagatgaagtcaggggaaaggcagttagattggttacaaaaaaactctatgaactaacatacgcatcagaaagagttgagcagtttgccatcgacagtcttttggcaattgctaataaacatggtgtggagacggacattaatttcacatccttgaaagaatcttcacctgagtttgaggcaggcagccaggaaacttcggttagtggctcccatatttcagatgctgaaccttctgaaagtacatgcaataagaccgatttggtttcacctaagcaatctgcagtatctgtatctgaggccaaacgccatacttcattgttctttgcactttgcacgaaggtagtaaaaccattttccttcttccagaggcccattcttcttcaacatctgttcaatgtttatggaaggtctccaaaagttgtcaagcaggttctactttcaacttctaaagtcctgaattttgactattggatcacaaccactgtctgctcattacgtcgcaaaatcatgcagtgtatccattggcatatacccaatcttatattgcaaactctgacagaagattcaactccttcagccgaacttgtagcggcagttaaacatctatataaaaccaagctgaaggatgcatctattctcattccgttgttatcctcatttccaaaggaagaggtgctgcccatatttccaagactagttgatctcccacctgatagattccaagatgcacttgctcggatattgcagggatctgctcatactggtccggctttaacccctgctgaagttcttatagccattcatgatattaatcctgaaaaggatagagttgccctgaagaaggtcactgatgcttgcacagcttgctttgaacagcgcacggttgacaatgtaccaattccacttcttttcatgagaacagttattcaagcacttgatgctttcccagctttggttgattttgtcatggaaatactctccaggcttgttaataagcagatatggaaaatgccaaagctgtgggttgggttcttaaaattggcatatcagactcagccacgctcgtttgatgttattttgcagttacctccaccccagcttgaaatagctttgaataagtaccccaatctacgaactcctctttgttcctttgttaatcagcggaacatgcacagcatcttgcccagacagattttgaaagttctgggcttcatcaatgaaccgcaccaggcaccaattccatttgtgcctgctgcaatgcaaacggcagatgcaacctcctctcttcctggtgcaactcttatgtgaaatgtgatgtataaactccaatcagatgcgagaaggctttcctgatcacaagtacacacactgccttgtgaacaacgatgatatgtgagtaaaacagagcccagacaaggacagcggtgtcactcaaaagggtctgcgtttgctggacttgtttcaaacaaagttacaggttgtcagcaagggataccgaggtggtttcttaaaggttcattgcgcttgtgctcgaggggctcctatgattttgcagcccgtgcaagttgtacagtagttgtactctttcgtcctgcaattgcggactgaggcttctgtgacaagcaaagaatagaaggaatattgtttaggacgatgatatgacttatcatcatcatgtcttccgccaaggaaatgacatggttgcaagctgcggcaatgcggcattcctttccgagctgcacggagacggcatccgactgattggctaaccatttcttctgttctaatgctaacaatgtctgagtattgtacattaactatttgagtccgctgtcagccgatgttaaacctttcatctcagaagataataatttatagatgttttgattgactagcatatcaaaggtaatagacaatattagcgccgttgattttcttcggtgctgcgttactttcgtaaaaaaaaaaaaaaaaaaaaaaaaaaaaaaaaaaaaaaaaaaaaaaaaggggggggcctgcagcccggggatccactagttcta

SEQ ID NO: 12161 - DNA, 658 bp, Oryza sativa
  Clone ID: PAT_MRT4530_18314C.1
ttcttagtaaatgcttgtctaaattgattaatgaggatggtgtttggcagtaaatgctctgaaggaaataactacataattagacaattactcaagtggttaaaaaaacaggtgactctcatttctagccgggtctaataaaagttaaaaataaatttctaggttttgaatcttttgtcctcaatgtagattttgggaggacaagtggattggaaactcttcttttaaagggtggtatctatctttatataatattgtgcgtcggaaaagtgcgtcagttgcaactatcatgaatacagttcctttgaatgtttctttccatagggaactagtgggccagaatatagttaattggcaaaattttgttgctcgaattgtacgtattaaccttaatgataataaatatatgtttaggtggaaccttcatcaaaatggtatcttttctgtttgatccatgtatcttgctatgatcaacagtgggtatattgataggaataaagtgttacggaaattgaagattcctatcaaacttaagattttcatgtgttatctagctaaagggtagttctaattaatcaatgataatttagtaagaagaaattagaatggtagtactagatgttgttttttatgtccaacatctattctttgattgtca

SEQ ID NO: 12162 - DNA, 450 bp, Oryza sativa
  Clone ID: PAT_MRT4530_18315C.1
ggcaattgctaataaacatggtgtggagacgggcagtggtttcatatacttgaaagaatcttcacctgagtttgaggcaggcagccaggaaacttcggttagtggctcccatatttcagatgctgaaccttctgaaagtacatgcaataagaccgatttggtttcacctaagcaatctgcagtatctgtatctgaggccaaacgccatacttcattgttctttgcactttgcacgaagaggcccattcttcttcaacatctgttcaatgtttatggaaggtctccaaaagttgtcaagcagtgtatccattggcatatacccaatcttgtaagaaacctgggatcctcatgttctgagatgctggctattattcataacccacctgaaggcagtgaagagcttgttaccttgatattgcaaactctgacagaagattcaactccttcagc

SEQ ID NO: 12163 - DNA, 563 bp, Oryza sativa
  Clone ID: PAT_MRT4530_18316C.1
ttggttctgctcatactggtccggctttaacccctgctgaagttcttatagccattcatgatattaatcctgaaaaggatagagttgccctgaagaaggtcactgatgcttgcacagcttgctttgaacagcgcacggtatttactcagcaagttttggagaagtcactgaataaattggttgacaatgtaccaattccacttcttttcatgagaacagttattcaagcacttgatgctttcccagctttggttgattttgtcatggaaatactctccaggcttgttaataagcagatatggaaaatgccaaagctgtgggttgggttcttaaaattggcatatcagactcagccacgctcgtttgatgttattttgcagttacctccaccccagcttgaaatagctctgaataagtaccccaatctacgaactcctctttgttcctttgttaatcagcggaacatgcacagcatcttgcccagacagattttgaaagttctgggcttcaatcatgaacccgaccaggcaccaattccatttgtgcctgctgcaatgcaaacg

SEQ ID NO: 12164 - DNA, 253 bp, Oryza sativa
  unsure (1)..(253): unsure at all n locations
  Clone ID: PAT_MRT4530_18317C.1
aatggaaaaaattttttttttttaaaaacttttttttattattgggggggggggggaccggtcgttctcaacaataacctatgcccaagggggggggaaaagcttttgcgttggcttgtggttttttcttcatggccagggtttggtgcaaattcatctttggatttccctntcnctttatcttctgaggaaaatctcntctttnnaaactttatnaaaattttgtttttccttccataacacttttaatttt

SEQ ID NO: 12165 - DNA, 298 bp, Oryza sativa
  Clone ID: PAT_MRT4530_18318C.1
ctccacagttttcgcctcgccgccgccgccgtcgtcgtcgccatggcgatcaccgcccagacccccgacatcctcggcgagcgccagtccggccaggacgtccgcacgcaaaacgtggtggcgtgccaggcggtggccaacatcgttaagtcctcgcttgggcccgtggggctcgacaagatgcttgtggatgatattggtgatgttaccataacaaatgatggagcaaccattttgaggatgttggaagtctagcattcaccagtcaaggtttttgctgagtttggctgagcttttt

SEQ ID NO: 12166 - DNA, 298 bp, Oryza sativa
  Clone ID: PAT_MRT4530_18319C.1
ctcgtccgtgctgagcggcccgttcatggacttcggcgacatgctccggtgaggacaatggtatcatcgttgatggatgcaaccgagaaatatgttttgagtttggagacatccatggatctgcattttacaggctgcaatgctcagtttattgcagcatgtaaaattgcaacgaatgcagacccacctgatgttcaggaggttagtcaaccaccccatagttgatgtaaatgcacagtgtatcactgtctttgtgttggaatgctaatgatattatgcatagaaaaaaaaaaaaaaa

SEQ ID NO: 12167 - DNA, 1373 bp, Oryza sativa
  Clone ID: PAT_MRT4530_1831C.1
atgaatagagtacccactagttggggttttattttcctagggtgaacaagaccgggtacacagagacggtccacgggtcgacggaagcggaccccgtgtgtcaaccgaggcgagtggccgacaaacagactccactagacaccacacgggctgcacacgtggaaaccacgcggctaccgagcggacacactaacaaggtcaccacacgcacaagcgaacgactgccgacaccgatacacgggtaccggggccgacaaccgcacaataggcacgggcgacaccgaaaggacgaggacggggcagcgagggagagggatccttaccaccacgcgacgaggcgggggaacgacaacgacgaacgggcgcggcggagacggacggcgagggaacgacttcggcggcgatccttggacgaaggcgagacgcggccggcacaaggcttgatgacgcggaggcgaggacgaagacgacgacggggctgctgcggcacacttgacggacgcggacgacggagaagaacggcttgatggagggacaaacgccacgacgaccgggaacgacgggaggacgacgacgaccggggccggcgaggaggcaacgagggtagccggcagcagctgcacggatgcgaggacggcgtggaacacgccgcagcgatgcccacgacggaggcggcgccgcgagacgacgagccggcgaggaggaacggtgaagacgacgacggacaccggcggcgttcggtcgaagggggagatgtcgatgaggaggaaggagaggccagcgcggcggcggcggtgtgtggcggcttccgggcgaaaccggggagcagccggaggagaggacgacgatgcgacgtcgacggaggagacggcgacgttggctgccacaccgacgatggacagtagccggccggagggagtacagtggcaccaatgccactggttgctggcgggggcaccgttccggcgagtttccggcgaggagacggtgagaccggtgaaggggacggcgttgcagagccgagggaggcgacggcacggccggacggcgcgcgggcgaggcgggagaggcggctggaggcggccggcggcacgggagagagaggaagacggcggggagaggtggtacgacgtcggggaggcgcggtcgggcgcgcggtcagcgcacgcgcggcgcgcgtgcgcacggctggctcggctcggcctggcttgggccgggctgatgggccgaggcaggccgggaggaaggaggaggagggagaggaggcccgggagagagaggggaggggagggagctgggccgggagggggagggaaagagagggaggagagggagactttgggctgggcttggcccaaaggaggaaggaggat

SEQ ID NO: 12168 - DNA, 258 bp, Oryza sativa
  unsure (1)..(258): unsure at all n locations
  Clone ID: PAT_MRT4530_18320C.1
atcggaactgacattaatttttgatcaggggtaatttagtaacagtccaaattttctaaaaggcaaagcaactagcaacaccatttgtactcagctgatgcaacactcacccgccacggtctatccagtcttagcaggcctgtccagcttcataccaacatttcactatgaaacaccgagtacctgcaggaacttcctaagatcaaacttaggggccnncaagattttcatctttctgatgaacacatttgggagagg

SEQ ID NO: 12169 - DNA, 372 bp, Oryza sativa
  Clone ID: PAT_MRT4530_18321C.1
gagacccgggggccttactgcaaagctttcttctatccgtggcctggccgatctttcttagtaaattgacgtgaaatcaagcatgtgcaacgagaaatccacatgacatggagggctaagtacaaggtacctctggcaagtggacatcaacatgctattggatctagactcaggaaagactaggcgagcgaggaaacgtgaggatggagagcgtatccactattgtgaacaaaaagaacttaaagggcgcgcggtttataggatcgatgattgcctaccgtgacatacgacttaatatctatattatcctgtggaataaagagactacaatggactactgcacagacatcgatgactgtgaaaaccgtgact

SEQ ID NO: 12170 - DNA, 311 bp, Oryza sativa
  unsure (1)..(311): unsure at all n locations
  Clone ID: PAT_MRT4530_18322C.1
aaaggagcctccaccgcgnccttttggttgggggagacagacccagcttcagagagtgtaaaatttggtttatctttggggcaaaaacaagcgggctctccgttacagggccagttcgatgctagaactaccgcctttattttgctggcgaagatatgcttcaaaatccttgctgagaaatttatagcttcctttctcttaaaaaatattgctcctgtatttttatgcccacgcatccaagctttgcagaaacacatattttagggggtcgtcctcatccttttttttttaaaatttttatataatatttt

SEQ ID NO: 12171 - DNA, 937 bp, Oryza sativa
  Clone ID: PAT_MRT4530_18323C.1
gcaatcaaagaagagaggttgaattgactcattagagttacaaaagctacaaagcaagctacccttccatcttcttttagcaagattatcttttgttagaatcacccccttttcaatataccaaaggaaaattttaatttttaaaggaatccttagcttccaaattaaagatttcccaggtattacaccattaagcataagggttttatacatggagttaacataaaacaacccttttttttattgctcttgcaaaagaattggtcttgcttatcattcaaattgatactcaccacctttgaaacaatttcaagccaatcttccaagtttttccctacaattgctcttctaaaagagacattcaaagggacccttcctaacacatcggccactactaagtttttatttctaaccaagctatacaaggttggaaattccaaatgaaggggttggtttcccaaccatcggtcctcccagaatcttacttgtttcccattattcactgtgaagtggccaagtgtctggaagggttcttttgctgccataaggctagcccaaaaatgagaatcccccggttgtttttggacctgaaaaatggatttccttaccaagtattttttcctcaacaaattctgccacactccctattcattaattaacttaaagatccatttactaagcatacacttattttgagtctctaagtcctggattcctagccccccacatttctttggcttgcagagcacactccacctagccaatctatattttttttatactcatcgcattgccaaatacgttatatattgtagaaagttttcacacataacataccgtttaatagtttgaaaagcatgttaacggaaaccggggaaaaatctgtaattttttgcagtttagaacgatgagggatgtaaagtagactttttcccaa

SEQ ID NO: 12172 - DNA, 541 bp, Oryza sativa
  Clone ID: PAT_MRT4530_18324C.1
gcggcgctcgccaccgtcgtgtctttcctgctcgtcgtcctcgtctccgtcgcccacggctggaacaaagactgcccgcctcccggtagcggcagcagcggcggcggccaccacggcaagccgcccggtagcggcagcggcggcggcggtcaccacggcaagccgcccgagcaccaccaccaccacaaaccttccccgtcttcccggtgcccgtcgtgccacccggcctacacgccggcgacgccacgggcggcggcaacttcggcgtacgtttcattttcaccaccatacctgccaacctacattccggcggcgacgccggcatacgtttcaaccttcattccggcggcgacgccggcgtacgttccgccggcgaagccggcgttttcttcggcatacgtggcggcggcgaagccggcgttggcggcggcgtacgtgccggcggccaacccggcggcgaacaagaactgcccgatcgacgcgctgaaactgaacgcctgcgtggacctgctgggggggcctgatccacctggtgatcggg

SEQ ID NO: 12173 - DNA, 1758 bp, Oryza sativa
  Clone ID: PAT_MRT4530_18325C.1
atggagggtttaaggggcggcggccatggcgaggcggcggtggacggcggcgacgagaggtgggtggaggactcgtcggtggattaccaagggcggcctcctctccgcgccgccaccggatcatggaaggccgcaatgttcatcatcttgattgagttcagcgagaggctgagctacttcgggctagcgacgagcttgatgatctacctgaccaaggttctccaggaggagatgaagttcgccgccaagaatgtcaactactggaccagcgtcaccaccctcatgcccctcgtcggcggcttcctcgccgacggctacctcggccgcttctccactgtcctcttctccactctcatctacctctcggggttgattctgctggcgatatcgcagctgtcgccgaggctgaaacccgagcgcaacctgcacctccacgagacgctcttcttcgtggcgatctacctggtgtcggtcggcaccggcgggcacaagccggcgctggagagcttcggcgccgaccagttcgacgacggccacgcggcggagcgggtgcagaagatgtcctacttcaactggtggaactgcgcgctctgcgccggcgtcctgctcggcgtcaccgtcatcgtctacctccaggagaaggtcggctggggcgccgccgccgtcgtgctcgccgccgtcatggccgcctccctcgccgtcttcctcgccggctggcgccactaccggtacagggtccccgagggcagcccgctcacgccgctcgtccgcgtcctcgtcgccgccgcgaggaagaggcacctccacctccccgccgacgccaacgagctctacgaggtgaagccgcagaatatcaagaggcggctgctctgccataccgatcaacttaggtttcttgacaaggcggccgtagtggagcacgacggcggcgaggagcggcgcggggcgtggcggttggcgacggtgacgcaggtggaggagacgaagctggtgctggcgatggtgcccatctgggtggcgacgctgccgttcggcatcacggcggcgcaggtgtccaccttcttcatcaagcagggcagcgtgatggaccgccgcatgggcccgcacttcacgctgccgccggcgtccaccttcgccatggccgccatcggcatgatcgtcgccgtggccgtgtacgacaaggtcctggagccgtacctgcgccgcctgaccggcggcgagcgcgggctcagcatcctgaagcgcatcggcgtcggcatcgcgttcaccatcgtggccatggcggtggcggcgacagtggagaggcagcgcctccgcagcgcctcgccggcgtccatgtcggtgttctggctggtgccgcagttcttgctgatgggcatcggcgacgggttcgcgctggtcggtctccaagaatacttctacgaccaggtgccggacagcatgcgcagcctcggcatcggcctctacctcagcgtcatcggcgccggcagcttcctgagcagccagctgatcacggcggtggaccgcgtcacctcgcacggcggcgccgccgccggctggttcggcaaggacctgaacagcagcaggctggacctcttctactggcttctcgcctgcatcggcgtcgccaacctcgtcttctacgtggtcatcgccaccaggtactcgtacaagaccgtcatggccggcggcaaggtcgtcgacgacaaggccggcgacatcgagtgcgccgccgccgcagctgctgctgcctactga

SEQ ID NO: 12174 - DNA, 1380 bp, Oryza sativa
  Clone ID: PAT_MRT4530_18326C.1
atggacggggtggatctcggccacgcgaacccgacggcggcgacggcgcgtgaggctctgaccactgtaagcattgaggcgtggggtgcgaagagcgacacttcgacattgggattaggttatgccgggttttacagccaacggtttgacgtcgggcggggcctacttgtcatatgtctcttcttcctcccgttcctctccttccttctgtttcttctcccgagcaacaacagagaggaaaagggacagggcgccggtgcttcggtggttgaacggcctcgacggcggcggccaagcgtgttcccgctcgctgcgcatccggggaggtcggtggaaagcatagggggaaaagaggatggctggaacagcggcaacaagagctcagctccggccggctttggtggtgccgttggtggcttgtggaagtggctaaaggagaggggaaataggaaaaatggaatcaccggagtgaggcaaagcctatggctgcggaggtcggttgccgatggcggttcacagagaaggcggcgacggcagcagaaccgcgggcgcaatgccgcggtcggcggcgtctcatggcgtgcggtggcggcgcccacagaggaggtagaaggcggcttcggttggccggctcgactgggcttcggctcggctgggctggcagcgcaagaagagtggaaaggaaaaaggaaaaagtacaccgaaggtccctcaacttgtcatggggataaaaaacatcctcaaactgtaaaaccagatatacagggagaaggtcggcggggcgctgacgccgtcgtgctcgccgccgtcgtggccgtctccctcgccgtcttcctcgccggctggcgccactaccggtacagggtccccgagggcagcccactcacgccgctcgtccgcgtcacctcgcacggcggccgcgccgccggctggttcggcaaggacctgaacaacagcaggctggacctcttctactggcttctcgcatgcatcggcatcgccaacctcgtcttctacgtggtcgtcgccaccagatactcgtacaagaccgtcatggccggcggcaaggtcgtcgacgacaaggccggcgacattgaaggcgcggaggagggcggcgcctgcatcacactggtagcggccatccacgtgcgtgacccgtcgcggcgctacgaggcgttgggcgcgccgatgaccgccggaggaggcctcgggcttgaaggcgaagagcgcatggaggccgtgcttcgcttggatggctccgacctggaggcggtcgtggcgagggcccaccagggccgaccgaaagacggccaccgggctagcgccttgccggtagagctcgactccggcgaagccgaggataaggccgggccggcttag

SEQ ID NO: 12175 - DNA, 831 bp, Oryza sativa
  Clone ID: PAT_MRT4530_18327C.1
atggatgattcgggcattggaccaaaagctgcacatgagcttgctagtcggcaagttggtggttcagtaaaccttggttatacacgtcgtgttctcaagaaccatttacgaaccaagcgtcaaagggagttgatgtatggcgaagccggaaatgaagcaacttttgaggaaactttcagtaccatcagaagcaaggtgcacaagcagacttggctaaacagtatatataaggtaaaagagaaatgggcggaatgctacatgaggaatgtttacacattagggatgagaagcacacagttgagtgagagcttaaataatgacttgaaaaaccatctcaagtctgatcttgacattattcagtttttcaataatcttgaaagagttatcaaaggaaaacgagacaacgaattagatgcagaatatgaagcaagaaaaaaattgcctagaattaaaatgagagttcctatattggtgcaagcaagcaagatttacacaccttgtatatttgaatattttcaaaatgaatatgaaagatccatggctgcatacatcaagtcatcagaacataatgaattcattgttgcaattgaggctcctggtgaagcgtcaacatttgaagaggagtgcaaagttgtaggcaattatgcagagcaacaggcattgtgcacctgtggacaatttgaaaggactggaatattgtgcagtcatgctttgaaagtccttgatgtgatgaatattaagtctttgccaaagagatatattttgaagcgatggactcgagaagcacgagttggtgctattgaggactgttatggcaagattgtcgtataa

SEQ ID NO: 12176 - DNA, 1776 bp, Oryza sativa
  Clone ID: PAT_MRT4530_18328C.1
atgaaatttaaatctacaaaagaggcatgggaattttggacttattatggaggtcgtactggttttgatgttaggataaattatgaaaataagagtaaagttgatggagtaattacttctgcaagatatgtttgttccaatgagggataccgggcaatagacaaaagagatcacaacaccaagcgtcctcgtgctaaaacaagaacaggttgcaaagctcggatcggaatcacagtagatagagaagtggacgattattcagtatatgatttagttctcgaacataaccacgaacttcaattgccttcaacatgccatttgatgccatcacagagaaagatatcatcattgcaagcatttgaaattgaaacaatggatgattcgggcattggaccaaaagctgcacatgagcttgctagtcggcaagttggtggttcagtaaaccttggttatacacgtcgtgatctcaagaaccatttaagaaccaagcgtcaaagggagttgatgtatggcgaagccggaagtatgttgaagtactttcaggacaaagttgcagagaacacttcatttcattatgcccttcagttggattgtgaagaacaaataacaaatattttttgggctgatgctaagatgataatcgactatgctcagtttggagatgttgttacttttgacacaacatttgggacaaacaaagaatacaggccctttggtcgtaccaagaaagaagacacaaacattttgtctgatttcagtgcttgtatgtatgaatatgaagatgaagcaacttttcaggaagatttcagtaccatcagaagcaaggtgcataagcagacttggctaaacagtatatataaggtaaaagagaaatgggcggaatgctacatgaggaatgtttacacattagggatgagaagcacacagttgagtgagcttaaataatgacttgaaaaaccatctcaagtctgatcttgacattattcggtttttcaataatcttgaaagagttatcaaaggaaaacgagacaacgaattagatgcagaatatgaagcaagaaaaaaattgcctagaattaaaatgagagttcctatattggtgcaagcaagtaagatttacacaccttgtatatttgaatattttcaaaatgaatatgaaagatccatggctacatacatcaagtcatcagaacataatgaattcattgttgcaattgaggctcctggtgaagggtcaacatttgaagaggagtgcaaagttgtaggcaattatgcagagcaataggcattgtgcacctgtggacaatttgaaaggactggaatattgtgcagtcatgctttgaaagtccttgatgtgatgaatattaagtctttgccaaagagatatattttgaagcgatggactcgagaagcacgagttggtgctattgaggactgttatggcaagattgtcgtagaagatcccagattggaggataggtgcctcttgaagtttcttattcacaaatttcttggtatagctattcgagctgctgaatctaaagagtgcagcacactagtggacagtgttctagagagcctgaggaaagaagaagcaaacggctctttgcacactgcacgtctgaagaaaaaagaaactcaaaagtgtagcacaaggagaaagaaaaattggcttgataagcagcatcccaccaaaaagaagtaagggaaggggcacgcggcggaaaaaaaaaagcgtgcatcgccgccacctgactccaccgccggcctaagcta

SEQ ID NO: 12177 - DNA, 636 bp, Oryza sativa
  Clone ID: PAT_MRT4530_18329C.1
atgtgcgggctcccccaacggacagccaacacgggcccccaacggcggcgcgggtcgtcaacggcgcggaggaagcgctcggccttaggggtgagagttggtgcccatcgcgcatgcgcgggggcggccgtcggcagcgcgcccccctcttgctttgttgtgtctccactcttcatccacgtcgcgttcatcgagactgcctccggctcagatgcctcatgctcctgctccaaccccaagcctcagaagaggccgacccggactcctcgcctccacggcagcgatgggacggcaccagccaaggggaggacctcagcgggaaccgaggaggctgatgacagcagcgacgctaccttcacctctgacatgtatatgtcggggtcctcttgttcgaggtgcggtgatcgagataaatgcattgttatttctccgcatgcactgcttgtcatcggctcattgctgatttcatgtctacggctgttgttgcagctgttctatacgttcgagacgatggaggagaagatgcgagcaatggcgaacctaccgcagtgcgtcttgcctccacagttgttgctcaagtggcccaaggaagcatcattctgtcagttgttgatgcaccctgtgccggacacctga

SEQ ID NO: 12178 - DNA, 2226 bp, Oryza sativa
  Clone ID: PAT_MRT4530_1832C.1
atggacctcggaaaatcggcttccactagtgcaacgttgaagaaaccccaggaggatggcgctcttcctggtcgtggaaccatggagagggaagcaggatgtactaatcctcagcccatcttgggtcgcatggttgcgatcgaagattatgttctctgcggttttctccctccaccttccgaatttcttctcctggttttgaatttcaatggtctttctcttctccatttgaaccccaattccatcgccttccttagcatctttgtgcatctttgcgaggcctacatcggggtagagccttttcttgatcttttttgcttttactacgaactgcgttggatggaatccaacagggtatctggttgcgtcgggttccgacttcgggatggcctgaagtcgcgttacattcccttccagtgcccttcatctcgcagcaagtggcggaataggtggttttatcttgagatcaaggactcgaaccctgtcttcgtggttcctgaagatcaaccggacaagattccgtcttggaccgcaaagccccccttgaccccctctcttcagtcgtttatcgacatcatcgacgatttccgagcacggggtttgtcgagatatgaagtcgttgcatacttcgttggtctgagcggcgaaaccgtggagcgccgagtcggccaagtgatgatcagtggcccgaccacggcgagtgacatccctgtgcccctttgtgaaaagggggcggcggaacgtgatgaagccatcaacgcccttcctttgactgatatcatcggaccgctcgcggaccatcaggtggcgtcatctctaaaagtgaaggtcgtcaaggaggtgtctgatgctgccaccactagcggtggcaatattccgacaaagccgaggaaattctcgtctgcctcggacgcgtctcccccacgtccacgacaacaacgcattgtgacgatcggcaagaaggaggcgcgggcaaaggctgcgcgagccaagtccggagaagcttccagtgcgtcgcctgtcgtggcctcgacggatgtcgtgcccgcagccgggagccgggaggcgacgcccagtgccccagtcagcgaccgcgcggcaggtcgtgatctgccaactgctgtcctctcctgggaggagctccaagtcgagatagggcgcctcctcgaagctggtgcttgcggaggcgagttggctgaagcccgtgaagagcttatgaagatgagggagttggcggctggcaacgagcgacaacggaaggggctcgaggaccgaatgtcagaactcgggaacaacctatccgagatccggggctcgttgagggtcacctacactggccttcaccagctcgctggggaatgcggcgtcacgtccacgatcccggtgaatcccgatgagttttcgctaacctcctctctcgcggagctggcgacggcgatgggggagatcccctccaagcatgcggccaggattgcggaggagacgtcaaacgggatctacaccggggcgtgtcatgtcctcgcgtgtgtaaggctgtcacatcctgaacttgatctgcgcgagatcttggaccagggggcggccagcgacatgcatactgatgacgaggatgtccagcagcgcgggcagcccgagtcactggcagtaattccggtactcgagtttgaaccacacgtctcgcctgaccatgtggatcaaccccttgatatagagggaaggatggcgacgacttcctcagatctcgagggtgcccttgctagccaagatcgtcatatccaatactggaagacgaagtttgaagtggcggagctcgagaaaaccatgctggccgtgaagaaagagcaggctgtggaaacgctccgaggtcgtgaggtgtggtttaactcgtacttgaagagttgctgcacatccatggccagagtatgcagggagcttcgagtagtccgcggagatcccgaggagttggcggccgggtacatctcgtggcttaatggggcctgtgcccaactcgatggaatcggcaaacgtatcgacgaggccttgaagcaggagtgtcgtcgatcgagccgatatgccggggggcacgtgttggcttgcctacgagatcatcacccgcgcctggaccttgaatatcttcgtgagggttttgctcgttctcggaggactccggcggagatagaccatctggcaaagtcaatgtcgtcgttggccgagaagatcttctag

SEQ ID NO: 12179 - DNA, 270 bp, Oryza sativa
  Clone ID: PAT_MRT4530_18330C.1
tggggtagcctatctatctattgtcgacttggcggtccgaattactgactcgtagtcgacaacagggtagtcttcctcctcgaatccgtgtccggcgagatcaaagacagtgctatgtctctcctatcagtatccgtagacaccgtaggggactagccatgcttatctctaaagtcgatatccggcgtcttgtcttggcgtataactctattcatccttccttatgcggaactcctcctatatccgaatgttgtttccgtataagacatg

SEQ ID NO: 12180 - DNA, 516 bp, Oryza sativa
  Clone ID: PAT_MRT4530_18331C.1
gcacgagaggcagcaggcagcagctctgttcaggtaatctgtattcatgttttggtgaaccgtggttgttttggtagttttgagatccttgtattgctatgtcagaccacatcttattgaataatgtggtagtagtttgatcaagtgttaattcacagggtttgagtttggtattcattggtttaaaaatctctcaatgcttgatgtagggaatatggtcttatttggcaatctaaccttgtctaaggtttttcattcatggctcaacgggtgaagagcaattgtgtgatcatgataattatagaagtatctggtagtaaacaagtggagtcatagatcatacctagggataaagacctaacactgaaaaacttctgtatttaacccatcgactctctgtttaactaaaattgctagttgtgctaagtagagttcataaatccttcctaggaatttgatggacaatgctgaagtgaaaattggcatgccaaattcccaatacaggttaatcaactt

SEQ ID NO: 12181 - DNA, 764 bp, Oryza sativa
  Clone ID: PAT_MRT4530_18332C.1
aacgcggagccaaaactggtcacccgttcttcggcctgaccaagggcgcgcggcgcgggagaggggcgcagctccgtgttgtggaggtcagggcctcgccgctcgtggcttcgacaagcggccgcgctccttttcccctcccgcgctctcctttctctcgtgcaagagcagcggaaaggagaacgagagcagcaacacaagatggcgtcggaagcgagaacaagcaccgggggagaagaggaggctaccagggcctgcctaccgccgcccgctcgccgctgaggccactcaaccacaccgttggggagaagatgatgagcgccggccgtgggaagagacagggtcgccggccgcctgcccctcgccgaccacaccacccaaagcttgtcgtgtcagttggagctcgccagccacctgtccctcgccgaccatgcccggaccggcgtcgacgtcagcggagagaggaggggagggggagaggggcgccggctatgggaggagacagggtcaccggccgcttgcccctcgccgagcacgccacccggagcccgctctgtcggtcggagctcgccgaccacgtagcttggagctcgccggctgcttgccccttgccaaccacgctcggaccggcgtcgacgtcggtggagagaggaggggagggggagaggggcaccggcggcgggggtgttcagtactctgcttctctgccctgcactcctgcctgcctcctggcctgtccgtggattgactgctgctgctactga

SEQ ID NO: 12182 - DNA, 678 bp, Oryza sativa
  Clone ID: PAT_MRT4530_18333C.1
agtagccaaccatctcaaaatatttgcaaactactagcctccattagaatttgcaatctgccctggtggggatttattcttatgctggaagcctggaagtaaacaaagctggaatatgccttattcattatgttaatctgttcctattagctatcaggactgatgataggcaactgattatcaagtttgcatgtatactttcttgcagtttatgtagttacaaagttccttgctactttgtgagtatgctctgactattacttcctgacttctcgtctctctttgttttctccattgacataatcaagtaaagcatcaagatgcagaatatgacaatatacaggttaaatgtcgctaggtattaactaaatgacacttcttcatttgtttccttattgaacatgatgataggaattaggaaatgaaaaagctatatacctattgttaagagaagcaaaggtgaaaaggctaacaggaaacaaacagaaattcaagatatgcaaaccttttgtttcacaaccatcactggttttggaattctttccctggctaccactgctgctatccattaggcgtgaaaaactccaatgaaatgccgagttgagatcttgtgctagctaagatcctcagacccttgttatgaccttatgttttctagggcccttctctcccggccgg

SEQ ID NO: 12183 - DNA, 309 bp, Oryza sativa
  Clone ID: PAT_MRT4530_18334C.1
gccgttttctccctgcacggtgttctgtcctcctctcttggtgtcgtcaagcgtgacggcatcgagagaggagtacgccgaagggacgagaccgggagaccggagaaggccagatccgcgaatgcttcgtacaacaacgaggagttcactttactttcacgtaagggaaactgcagtgatccggtccatgtcgcggagcacgccacatgcgacgcaaaaatcataaggcgcccgtcggcatctcatgatcagtatggcccccatggaacaagtatcatgctgggctctggattcggcgtaggcgcgtag

SEQ ID NO: 12184 - DNA, 373 bp, Oryza sativa
  Clone ID: PAT_MRT4530_18335C.1
aaaaagattacgcggggataatcgatcactaccaactctcatctcaactcatggcgatgcacccgtgcaccactacgctcctcctcgccttcctcgccgtcgcgctacccggtggtgccaaggcatggcatttctgcggcagagcggcgacgtcttcgcgccgaggagcacgtaccagtccaacctcgcgctcctctccgccggcctcgccaagaacgcctccgcctccccggccctcttcgccgccggggggtcggcgacccgccggacacggtctacggcctcgcgctctgccgcggcgacaccacgaacgccaccgcctgcggcgcgtgcgtcgccgccgcgttccaggacgggcagcagctgtgcgcgt

SEQ ID NO: 12185 - DNA, 522 bp, Oryza sativa
  Clone ID: PAT_MRT4530_18336C.1
ctattgccctggcaaagcatagcgtagccctagccatagacgatggcggacttgagcatctggagtgccttggcggatgcgtcgggatccaccttcgtgaactgaatgatttgacaacttgttggccacctccctttcctcgccaacgatattggtgaccaagaactcgaccatcctggtagcatcgattctctccgccagccactccctcccagcgaaacgggtgatctcagcaccgagctttgtagctcgaagtgagcacatgtgtgcaataaatataatggtgtaattgaatcttaacgaaaaatgaatggaattgattaagggaacattcgagttcatgacacaaggacttgtgagagctgatggaacatctcgagacatggctcgactaagaccatgccacttgcctcgctctgtcactcccgcctcctcactgtcgttggccactgccttggccctccgccgcgagacgcacgcagccgctgacgcgtctcctccttggcatctctccctcgccat

SEQ ID NO: 12186 - DNA, 992 bp, Oryza sativa
  Clone ID: PAT_MRT4530_18337C.1
atggcgggggcaggaggagggggagtgcgcgacatggacgcgctggagggcgtgcgctcaatcgtgttgaagccctcggagtccctcgacgaggggcggttcacgaggatcgccggcgccgacttcaacgacgccggcctcggcctccccgggctgctcgcgtcgctcgccaccaccggattccaggcctccaacctcggcgacgccgtcgacgtcgtcaaccagatgttagattggaggctgtctcacgagaagccacgtgaggactgtgatgaagctgagcttgatcctacatatagagaatctgtaaagtgcaaaatattcctgggattcacttcaaaccttgtctcttctggcattcgagatgtagtccgttttctagttcagcatcacatggtggatgttattgttacaactgctggtggtatagaggaggatctcatcaaatgtcttgctcccacttatagaggagaattttctttacctggaacactgttgcggtcaaagggattgaatcggattggaaatcttttggttcccaatgataactattgcaagtttgagaactggatcatgccactttttgatcagatgctacaagagcaatccactgagtacgatcaattttacttacctgcagaatgtttggacaccatcgaagatataagattgatgaatggggaagccattcatgcaaccccaaggaagacagggatcatagttcttggtggaggtctacccaagcatcatatatgcaacgccaatatgtttcgcaatggtgcagattatgcagtctatatcaacacagcccaagagtttgatggcagtgattctggagcacaacctgatgaagcagtttcatggggaaagattaaaggttcagccaaacccgtcaagcttcgcttgaacaaggggacacttcatggaagttaaatcaaatagaatactcgtacataatatatcagaattatacataaaaaaaaaaaaaaaaa

SEQ ID NO: 12187 - DNA, 427 bp, Oryza sativa
  Clone ID: PAT_MRT4530_18338C.1
ttgttttttttttttttttttttttttttttttttttttttttttttttttttttttttaaagccccaagaaacaaggattaaccccccaaggggtaaaaaaaagggcccttaagggggggcaaaaaaaactttttagcaacaaacggggaaaagcccccaaaaaaccccatcaccaagactccaggcaaagccccaaaatcacaaggttcgttacagccaggggggccaaggcccttttttggaaggacccgcgacaaacacaggatttggaaggtttacgggcccaaacacagggggaaggtcaagaccaaaaggggggggtcaataactccaagggtacggggggctaaaatgggagaaaacacagacccgactaaatttctttctttagcgggaagaccccagggggggaaaaaacaaaaccc

SEQ ID NO: 12188 - DNA, 2608 bp, Oryza sativa
  Clone ID: PAT_MRT4530_18339C.1
atgtctcttcgcctccgcggcctcctcctcctccctctcctccgccgccgcagctgctcccctctcctcctccgccgccgccgcctccttcgcggttggcctccgccgctcgtctcagcgatcccatctagagccttcggttcctccggcttacccgcccgagcctgcgcttcctccggcttctcgggcatggcggcggtgtctccgccgacgccgcagcagcagcagcagcggtgcgtggtggaggtgagggagggcgtggagctgacggagaaggaggagcggatcttccgtcgcctgctcgatgtcgtccgccacttcggcctcggcacccagctccgcgtcgccggcggctgggtcagggacaagctattggggaaagactccactgacattgatattgcacttgataatatgacgggccagaatttctgcgagaaagtaaatgagtattcagaattattgggtgaggaacagaaaggaattggcgttattcagtgcaatcctgatcaatcaaagcacttggaaactgcaaggatgcttatattcgacatttggattgactttgtcaacttgaggtctgaaaaatatgctgaaaacagtcggattcctaccgtggagattggtacagccaaagaagatgcattccgtagggacctaacaataaatagtttattcttcaatatcaacactaacacagtggaagatttaaccggaagaggtattgaagatctgaaaaagggtcttattgttactcctttacctgccaaagctaccttcttggatgacccccttagagttcttcgagcaatccgatttgctgctagattcaactttacattaactgaagatttgaaagatgctgcttctgatgaaaaggtgaagtctgaacttggtagcaagattagcaaagagcgcatcggtcatgaggtagatcttatgatgtcagacaaacatcctgttaatgcaatgtgttatattcgtgatttggggttattttatgttgtctttgcttttcctgagaagcccgaccctccagttcctgacaaatgtgaccggctttgtgtttcacatattgaagttgcatggaatcttgctcattctattggctgctctgtgttcagtggtggttctgattccaagtcacaggatgagcaccgaaggctttgcttttatagtgcactattcactcctgttcggaatacaatatatttggataaaaagtcgaagaaggagagatggggcgaacccagcatttctccaggcctcgggcaacccatggtgtatattggcccccacagtgaatacatggtgaaattacataggcttccatgggctttagacttaggccacccaggccatggcccaggtggcctgggacctgggttgtctgcccctgtaggagagtgcaggctagatgcatcatggccatatttttttgtacagactgaacagtggaatggcagattcactgccaccaccattggagtctttttaaaggagtatagaagtatagatgctgaatattatgagattcctgtcactaactatattattcgtgactctctgaagttaaaagctagtgatgctgacacggtacaatttcctgagcaggcctcatcgtcctttttagcttattactgctatttttttcctcgaatattattcccgttactttgtacggttgtcaacgtacatgctgcaagtgaaaagtttgctgaattaattaatctccttgagtcgaatgaaaatctgacaactgtgaaagagaaattggatgatgaataccttgagatcccaacagactcagttaaacgtgttttggcagttacagggcttatacttcgggagataaaggacttttggcgtgtggcactgtttatctgcactcttacctacccggaggttagcagtggtggtgattctctcggccagccagacgaattacatcaaaggaaagaaaaatacacaagagctgaacgtttaataactgaactgggtaaagaatcaactgatgactgccgacttccttatgactttctacatgatgttgtattactgtctgaacacctcaatgtgaaaaccaacttattcatatccttgttaagattttctgatttatatcttactacctcttctccagagcttgatggcgtatggaagatgaaaccgttgcttgatgggaaggccattatggggattatgcagcaacaacgactgttgaagtggcagcttgcttatccaaggggaaccacggaggagtgcatcgtttggatgaagcagtcgcagtcgaaacggcacaaagtttagttcccaagttcctaggagtgcagcgttatcttgcgtgacatgtaacagcgcgttgttaggagtatagctttatcttggccgtcttctcttccgggtatccatggttgaaatttgcaaaattttgtggtcgaatatactgtactgttataccctatgatgaaaaaggaaaatacttagtgtattaaaggagcaaacttctgatcgtgtgtttgcatgtcttcggctatacttgtaaaatgggtttgcacgggccaaattaacccagattttctcaggcttcacattggtctggcccttc

SEQ ID NO: 12189 - DNA, 1046 bp, Oryza sativa
  Clone ID: PAT_MRT4530_1833C.1
atggatgaagtcgggcgtcgatggacattctccagggcaaatgaaggctacacgagctgcggctcggtagtcgagatgtcatacggcggagggttggtgcccaatgctaggggctcagttctgcctgcctgtcccgggtatcccggccgtaggtaggattgggtcggtactcttgtctaaggctaggatgggttggaaactatgtcacatctttacgacgggttccaaggccatggaatgcggagtaaagatgtgtcttgtgggttggcctgggttggcttgggacgagttgggacccaggtcgggttgccagttcggtccaattcatcgtaggccttgggttaaggcagtactagatggtcagctttgcgaagaagaagatgtcgtcagttgtttgccgaagctccggaagactgcaggatccgctagcgaagcgaaggaagcagtgaagccagctgtgaagcaggaaaaaagagttagttcctttaaggtcctgtccctagctctggtctattctttccttgtatgcttcctctctcaacccctaccttgtgacagatggataacactggtaacaaaggctatgggaatgatggatccgatgactcaagaacccaagccaatgggaatgagaaaagcatcaacgaaacctcaccagagctaatccaagttgtggttaaccaaaccaacatgttggcaacagcctttcaactcttacagaatcggaacaacccagcaggggcaaccaacgttcaagtacctacagtccagcaacataccgctgatgccaatgttagcaagggtttccaaccaccaattccaactccaagtcacaatgatcatccccagatggacagctcagcaaagaagacgttgatttgttacaactgcaaagaaccaggtcatttctccagagattgtccacagccgaagcgtaacctgcgccatcactccggccattatgcaagaagaagacaggtcactcgccttgtggtcactggagcaaacgccccctcgcccgacatctcccggaaaccggagctccc

SEQ ID NO: 12190 - DNA, 315 bp, Oryza sativa
  Clone ID: PAT_MRT4530_18340C.1
atggcatctggcatcagatggaccaacatgcactccgtgacgttggctatggcctatggcgttgcaagagagctctccagttctttctttcctttgctcatcggaccctttgtcctctccgtctctggagtcaccatcaccagttcaagtcttctagggaaagctatggtttacttgtttggccaaggtagcttcaacctccactacgaaggccctgacttgcaactagccatggaatcatcctccccaccatcgtcggcacaagatggcttgccgttccaatggaagaagcagaaggacccgattgctttttaa

SEQ ID NO: 12191 - DNA, 512 bp, Oryza sativa
  unsure (1)..(512): unsure at all n locations
  Clone ID: PAT_MRT4530_18341C.1
ccgaattccggtcgacccaccgtncgttctattactgcattgctcccaattgtcttgaaacgctgtccgctgtctggagtcggctaaaggaaatgactctatcgcttatatgcgcttcttttttcgcgaccctcgacaggacgacgcacctgatgtctcctcttctgagagcgaagatgatatcatgacagatgtcacatccgacgatgagtctgagggtggagtaggtctcggcggccattctacattcaacggtacagccaggcatcctttagactcaaaccacaccacagataacagtgaggagcggtctgcgtcgcgcaccaattctggcgataaccgcaatccaagcgacccgcaccacgtcatgtttggtggttctgcgccccgctcatcgatatcctctgtcagttcgcctcgttctgaggttcgcgacgatcctatcgaactcgaagctgtcatatcctgtacttncgatggggctgtcgtgtgtctacgacgtgcgcgcccca

SEQ ID NO: 12192 - DNA, 1125 bp, Oryza sativa
  Clone ID: PAT_MRT4530_18342C.1
cggctgtagctatttcagaatcatcatcatcatcatcatcatcatcatcagatccatagatgtagggaaagacatgattgacctttttaaagcttttcctggcttctgcaaacctttgctcatgtagagttaccttctgtgcaagatgtgacaaactatcaaagtcttgagacgagaacttctccctgatcggagctatcatacccttaaaagccaaatcggctaactaggcatcagttaaactcaagctgtagcatttattcctcatctccctaaacctttggatgtaatcttgcacaggttcatcatgtctttgcttaatcgccgttaaatccgacagtttcatatcatgaaccccactatagaaatagctatgaaaatgcttctccaaatcggcccaactgttgattgatccacatggcaaagaagaaaaccaagtgaaagccgatccagacaaagacaatggaaacaacctgaccctcagggcatccacagccgatgcttccccacattgagctaagaatcggctaacgtgttcacaggttgaaacgctgtcctgtcctgagaactttgaaaaatctggaacattgaatcggttaggcaatggaaccctctcaaaccactcagggtatggatgccgatacaagtttccagcattcttcggcttgagcccaaactgttctcttatcacatctgcaatcatatcggcccattgcctttgctgagacactccctgtgcttgttgtggcacgggctcgaattgattgtattgaggagcaaactgaggctgagccgatcctccttattgatactgaacttgcggtgatggaggctgatattgataattcaaattgcccccttgataattctggaagtttggctgtatattgcacaccaaatgttcgggaatcacttgaggtatcaccgtttgatctggatgcacattatgaactaaatgctctgggacaacttgatttgcagcgtgctgccttggctgattgtcgggtgttctgaacccggccgatgcatttagcaaaccttgctgctgaatcggctgcacaacctgctgcctttgtggcgtctgctggatcggctgcacaacctgcttgcttggtggcgtctgct

SEQ ID NO: 12193 - DNA, 176 bp, Oryza sativa
  unsure (1)..(176): unsure at all n locations
  Clone ID: PAT_MRT4530_18343C.1
atggactgtgtgcacggcgacgtctcacggaaaacaannnnnnnnnnnnnnnnnnnnnnnnnnnnnnnnnnnnnnnnnnnnacaatncccctttcgccaggtgtngtaataacaaagaagcccccaccgatcgtcctttccaacaggtgcgccaactattacttccgcaatttaag

SEQ ID NO: 12194 - DNA, 481 bp, Oryza sativa
  Clone ID: PAT_MRT4530_18344C.1
gcatagcatggaaacatttaccatcaagaggatctaaattttgcataccttgcacagagaatgttcaaccatcaaaaggattctaaagtttgcataatagctagaatctaccatactgctttttccataacagaaacaatcatttaagccaacaaagcagttacacatcagcagggaagaaccaagtcagaaactggcgtttgagacacagcttttccatcacagcctccggaagaaatggagtgatcctccgatttgtcatgttgtacacaccagagtcgccaagaggatcgacacacggaccaaagtactctcgggacggattgtcaaaagtcctgtgcatgaagtagatgcaatcttcttgaactccgccgacacatttgctagcgcgaacaaccttggtgcattctgaaccgaggaagattgccagcagagatggcaacatagtatcccttaaatattagtgctggaacaaggggat

SEQ ID NO: 12195 - DNA, 179 bp, Oryza sativa
  Clone ID: PAT_MRT4530_18345C.1
gggatggctggccggcccaggctgctggccaacgcggaaaatgctggctgtggctgtgcctggtaccccccccccacgatggtgggcaaggatgatgagaactgatgtgcccctacgactgagcctggggggatgcggggccgagtggagtggagcaaggccgaacgcagtgggtgtga

SEQ ID NO: 12196 - DNA, 2844 bp, Oryza sativa
  Clone ID: PAT_MRT4530_18346C.1
atggctagtgctacttttggtgcaatggactctgtcctcagcaagctcaccgacttgctgaccttcgaatacaagttgcttgaggaagtgaaacgagacattgttttcgtgaaatctgagctagagagcatgcatgctttcctaaagaagatgtctgaagttgaggatgagcttgatgagcaggtgaagtgctggaggaaggaggttcgggaactgtcctatgatatagaagaccacatcgacgagtttgcggtccacctcaaagatgagcccggatgtgagctgcatggcatcccaagtttcataagtcaaattgtcaaatcgatcgcgtcaatcaggaatcactaccaaattgccaaggagatgcgaggcataagagcctttgttggggaggctagcaggaggcataagagatacaaggttgatgatactatctccaaacctagcaaggtgactgttgaccctcgcttgcctgctctgtataaagatgcatctgatcttgtaggcattgatgggccaaaaattgagctcatcaggtggctaacagagggcgtgagtggccctgaacagcaattgaaggtggttcccattgttggatctggaggattgggcaagacaactcttgctaaccaggtgtaccacaatcttgaggggatatttgagagccgagcttttgtcactgtttctcaaaagcctgacatgatgaagattttaagagagatactttctggaattgggtacaatggtctcgaagctgcatgggatgagggtaaactcattcatgaagtcagaaaataccttaggtttgtcaggtattgtgttgttcttgatgatatatggagtatttctgtgtgggaaatattgaggtgtgctttacctgagaacaatcgtggtagtagaatagtagttaccacacgtattactgacatagctagagcatgttgtgcaccacgtcattgtgatatctatcatcttaaaccccttgataatacctcctctcgaaggttattttttaaaaggatatgtggttcagaggatagtttgccaagtcatgtaaagggggtagctgagaagattttgaaaaagtgtggcggtatgccattagctataatcagtatagcttctttgttggctactaaagcacagacaaaggaacagtgggagagtgtaaatatctctctggaatctggactagacaagcacattggttttgaaggaatgaactggatattatcactcagctacaaccatctcccacaacacctaaaaacttgcatgctgtacttatgtttgtttccagaagactacattatttcaaaagatatactggtgcagcaatggatagctgaaggatttgtttttcctgaacatggacggaatttagaagaagcagggtattattactttaacgagctcatcaacagaagcatggcccagccagtagatattgagtacaatggtgaagcaatgtcttgtcgggtccatgacatgattcgtagtctcataatatcgaagtcaaatcaagaaaactttgttaccatattttccacatcagaggctgcatctgtcatgacaccagggaagattcgtcggttgtctgttcagtacatcgatgaagaatgtggcatggttccaatgctgccaactctatcacatgcccgctcatttagtatttttggacattgtaataaaatgccttctctcacagagttcaaagttttgcgagtgttggagatggacgattgctggaaactggagaaccatcatcttaagcatattgggaggctatctcagttgaaatacttgggacttagaagaactcctatcagtgagctccctgaacagattggagaacttaaatatttggagacattagacttaaggttaagccatttaacagaattaccagcagctgttgttcgacttcgacggttggtacacctgtttttcgattctaacatcaaattgccagatggaattggagagatgcaatctttgcaacaactgtcatcttttgatgtttgtcggagttcaattacctcgctacaagagctcagtagactatccaatctaagggtactagtgatgtcttggagatcctttggtatgattggtgatgtcagaagctacaacaacaatctggtctcatctcttggtaggttgggaacatgtagtctccggtccatatacattcaaggttacaacagttctctgcaagatttctcactggatttatggtgtcctcctccatctctcctgcaaaaatttgttgccaataagtgtctcagtgtgattccaaactggttgggctcacttatcaacctatcttacatcaacgtcgatgttcttcgagcggcacaaagagatctggatatccttggtgagctacctaaccttctctttctcaggctaggctcagaaacagctccacaagaaagactcatcatccgcgaccagtgtttcgaacacttaaaggaattcaaatttatttgtttgctcacagagggactggaatttcaagtgggcgctatgccaaggcttgaaagactttgctttcagtttgtagcattggaaatcatttatgcaactggtggttttgattttggtatccaacacctgttgtccctcaaggaagcttttgtcaagatagactgttttgctgcttgggctggagtaggaaatgctgctgaggcggcgatcagaaattcagcaagagcactaccaaacaatcccttgctgaacattgagagattcagtgccaatgatgatgacatggaggaagattttggttttgttgttcttgggcggcggatgcagcaaagaatgccccaaccagagacatga

SEQ ID NO: 12197 - DNA, 272 bp, Oryza sativa
  unsure (1)..(272): unsure at all n locations
  Clone ID: PAT_MRT4530_18347C.1
nctctcgncgccgccactcccctctcngcttcctttccccaactaaacccataatacctcgccgccgcctccgtcgnncctcntcgntcggagnagngagacggtggtccttctcctccaccaccagccatggcgacccagatcagcagaacaagaaagtcgtgagcgatggngtgttctacgcggagctgaacgaatgctgacgcgggagctggccgaggacgctacccggcgtggnagtgcncgtgaaccccagcgcacggagatcatca

SEQ ID NO: 12198 - DNA, 348 bp, Oryza sativa
  Clone ID: PAT_MRT4530_18348C.1
atcctcgaacagatccagtggcgctgccgccggatccacaaccgcggggaggcctactgcctgccgctccctcctttgcaggcacagtcgccggtctcctccttccccacttctacattcgattgtcgtcatcgtacacatgccggcccgccgcatctacacctcctcccatgcgccggcttcgcgccccagcacccgtccgagtgcgaggtgggcgaagcctcgccgccgcggtccttgcgaccgcacggctttgccgacggcggagcaaggagggggagaggggtggtggcgaggtcgtcacctcctgagccgcccatgggagggcgacacgctcggacagaagtg

SEQ ID NO: 12199 - DNA, 2175 bp, Oryza sativa
  Clone ID: PAT_MRT4530_18349C.1
atggggaaacactcagctgaatcaggtactagtatgctcttgcatggagatttggacatacagatagtggaagcaaaatgtcttcccaatatggatcttatgactgaaaggatgcgaaaatgcttcactggctacggcgcttgtagtactgagtgtgggaagtctgatccacatacagacgtgaggaagatcattactagtgatccatatgtttcggtttgcctctcaggagcaacagtggcacaaactcgagtcattgcaaactcagagaatcctaaatgggatgaacatttttatgttcaggttgcccattctgttagcagagttgagtttcacgtaaaagacaatgatgtttttggagcagaacttataggcgtggcttcagtaccagttgaaaacatcacaccaggtgataccgtcagtggttggtttccaatatctggtcagtatagtaatcctatgaaggcatctcctgaacttcatttgtctatccagtacaagccaattgagcagaatccattgtacaaagatggagttggttctgacggttgtcagagtattggtgtgccaaatgcttattttcctcttcgaaagggtggtatggtcactctatatcaagatgcccatattcctgatgacttttgtcctaaaattgaaattgatggtggaagagtatacgaacaaaataaatgttgggaagacatttgccatgcaattgctgaggctcatcaccttatttatataattggttggtcgttgtatcaccctgtcaagctggatggactcatgcatacacatgacgaggaagctcggaagtttttcaggcattctggtgtccattgtgtgttggctcctcgctacgctagcaacaaacttagcatttttaagcaacaggttgtaggaactttgtttacgcaccatcagaaatgtgtcattgttgacacccaagtcatagggaacaatagaaaaataactgcttttattggtggcctagacttatgtgatggcagatatgatacacctgaacacaggctcttcaaggatcttgacaccgtcttcaaggatgatttccataatcccacattccaagttaataagtctgggcctagacaaccatggcatgatttacattgcaagattgagggtccagctgcctatgatatacttacaaactttgaacagagatggagaaaatctgcaaaatggaaagtcagcgttagaagagctgtaagttggcaccatgataccttggtaaaaataaaccggatgtcgtggattgtctccccctctgcagatgagttaaatgcacgtgtttgtgaacaagatgatccagaaaactggcatgtacagatattccggtccattgattcaggatcagtaaaagggttccctaaacttgttcaggaggctgagtcacagaatcttgtctgcgcgaaaaatctgcagatagacaagagcatacataatgcatatgtgaaagctatcagatctgcacaacactatatctacattgaaaatcaatattttattggatcttcatactactggtcttcaaatagaagtgcaggtgcagagaatttgataccgatcgaattggccataaagattgcaagaaagattaaagctagggaaagatttgcagcttacattgttataccaatgtggcccgagggtaatccaacaactgctgctatgcaggagatcctcttttggcagggacaaacaatgtccatgatgtacaagattgtcgcagaagcactacagaaggaggggttagatgatacgcatccacaggattaccttaacttctactgtcttggtaagcgtgaagtctcaaatgacgtatctacaacaagccaatccaatgagaattccccacaggtgtacgggtacaggatgtcgctgtgggcggagcacctgggtacagtggaggagtgcttccgttggcctcattccgtggagtgcgtccggcaggtgaatgaaatggcagaagagaactgggcgcgctacgtatcaccggagatggtgaacatgcgggggcacctcatgaggtaccccatcaatgttgaacgggatggtagggttggtccggtgcatgggtacgagtgcttcccggatgtcggtggcaaggtgctcggcacacactcttctcttccaaatgcattgacaacttga

SEQ ID NO: 12200 - DNA, 906 bp, Oryza sativa
  Clone ID: PAT_MRT4530_1834C.1
tcagcttccaccagtgcaacgttgaagaaactccaggaggatggcgctcttcctggccgtggaaccatggagagggaagcaggaggtactaatcctcagcccatcttgggtcgcatggttgcgatcgaagattatgttctctgcggttttctccctccaccttctgaatttcttctcctggttttgaatttctatggtctttctcttctccatttgaaccccaattccatcgccttccttagcatctttgtgcatctttgcgaggcctacatcggggtagagcctttccttgatctttttcgcttttactatgaactgcgttggatggaatccaacagggtatctggttgcgtcgggttccgacttcgggatggcctgaagttgcgttacgttcccttccagtgcccttcttctcgcagcaagtggaggaataggtggttttatcttgagatcaagaactcgaaccctgtcttcgtggttcctgaagatcaaccggacaagattccgtcttggaccgcaaagccccccttgaccccctctcttcaatcgtttatcgacatcatcgacgatctccgagtacggggtttgtcgggatatgaagtcgttgcagacttcgttggtaggcggatccagccgcttcaggctcgggcccatccagcttataactattccaggccagaggacgcgacccgggtttctcctcggggtatctttctcgcatttatcttgacatacttgtgctcgcattcctcttgacttatcgaaggttggttctcgattaacaggtttgagcggcgaaaccgtggagcgccgcgtcggccaagtgatgatcagtggcccgaccacggcgagtgacatccctatgcccctttgtgaaaagggggcggcggaacgtgatgaagccat

SEQ ID NO: 12201 - DNA, 240 bp, Oryza sativa
  Clone ID: PAT_MRT4530_18350C.1
atggcgggggcagcgcggattgcgagcatcgctggttgcgaggatggcggggcacttcggcgacctcgctgccagatccgccgcctcttcgcgctctactccggtgatctccaccttcaaatccgtcaagatggtggcgcgagttcgattgagaggtgggtagtcggaggatggcgtgaggagagagaaccattatatttggcttgggaagggcttggtttggaggacctccaaagatag

SEQ ID NO: 12202 - DNA, 311 bp, Oryza sativa
  unsure (1)..(311): unsure at all n locations
  Clone ID: PAT_MRT4530_18351C.1
ttgaaggagnaaagttatatnggtccggtaagagngccttggttnttngagtaaccagtgaaagtgtggaacggaagacgaaaagagagcctcttggtcttgggttgcagatttgctgtgaggtgaacaaggggttggaaattggtcgggaaggaactgctttgcaacagacgctgaatgaacgaacagcacttggatatcctcatggcaaaatgctagagtgtttagaacccatccccccattcttctcatgtatatttgcattttgattctgttgaagtgattggttcactcttggcaaaaaaaaaaaa

SEQ ID NO: 12203 - DNA, 766 bp, Oryza sativa
  unsure (1)..(766): unsure at all n locations
  Clone ID: PAT_MRT4530_18352C.1
ctcaaatctcaaaacacagcntcggatttaaccacttctatcgaaagtccaatggccatacgggcctacaactgaataccatacagttccactaacatacttttgaggggtcactcattacattgctttagaaagactgatgccttcccttatcttcagcgtgcttcatattgaacaactgcaaacacaagacacttgatcaaaaaattgctcatactatccaagacaagcaatctgtggtggtgacggatgacgttgaacttggtttagctatagcattttcaatttgagcatagcgtactttgcttgtcagaccatatgagaacacaaacaagatgccaagctgataatcagttttcagttttcaaattgacggcaacaattaaatgcagttggtgtgatgaacatttcactaattataagcattactttctaaatgcaacaggaccacaaccagctataaaacaaagcacagagcagtgttataagcacaaaatgcttcatttttagtgttataagtacaatcatttcaaaatgaaaaggagcacanactgcacggtgttctgtaataaatggctgcacttcatacattgacaacggatagcagttggcaatcagtttttgggtaacaatanaagatttatgatgacagctaggcagctactggaatctaatnntagcgggtggagaccgactcacggatactttaggttcactgtacttcaactaaacaactaaattcactttttcagttacaaaattgaat

SEQ ID NO: 12204 - DNA, 783 bp, Oryza sativa
  Clone ID: PAT_MRT4530_18353C.1
cgtgcttccattgtccgtaaaaaaaaccgggaaaaaaacaggcgaaaaaaagtccgataaaaaaatggagaaaaaaatgtccgatcaaaaaaacggagggaaaaaaaacaactgtccgacccaaaaattacgaaccggacgaaaaaaacaggcgaaaaacaacgagtgaaaaaaagtccgatcaaaaaaatcggagcgaaaaaacaggagaaaaaaatatcagctccaagaaaatatggggaaaaaaacgaaatgagtcagtaaaaaaagggcgaaaaaacccggtgaaaaaaagtccgaccaaaaaaaatcggagcgaaaaaaaaggggagaaaaaaatgtccgctccaaaaaatacggcacaaaaaaacgaaacgagttagtaaaaaaagggcgaaaaaattatccgattcctgattgcatgtgacgcggtaaaaaaaaatcgaccagggaaaaaaccgagtgaaaaaaaccgggctaaaaaataaaaaaaattccgataaaaaaaggggcgaaaaaaaaacaaatatgtccgatccaaaaaaaggcaaaaaaaaggaagaaaaatcgaaacgaatccaacttcgtcgacgcagtaaaaaaagggcgaaaaaaaaaaataaaaacggtttaaaaaaacacgtgagaaaaaagtgtcagaaaaaagcgcaaaagaaaacacgctagaaaaaaaagttcaatagtccaaaaaaacacatgagaaaaaagcaaaaaaaaaaaaataaccatcatcgaggttgggctattacatttaacatgttt

SEQ ID NO: 12205 - DNA, 444 bp, Oryza sativa
  Clone ID: PAT_MRT4530_18354C.1
gttagttatatcggatttcacctgtgcatcgtttcaacctgaaaatgcgcagatattgaaccagcatatggcaggaatatctatggtaccaaagcaaggctcagtagacgaaaacagggacagacacactatgctttggggagaaaggtctaatgggaattgggaatgacggtatcgctgtgcattcatgacttgacgacaatggcgctcaacaggaatatacacatgagggtctacactctcaagctacaatggacacaccgacaaatgaggctagaatctggaacctgaaactatacgaggaacactacactagatgtgagacacccagatagatagttgttgcctggaacaaaggctaccatactaccagggacgcctctgaatgaacagtccatgtcagaataggtgtggaagaaatcaacgtgagtaacaaccgagtga

SEQ ID NO: 12206 - DNA, 978 bp, Oryza sativa
  Clone ID: PAT_MRT4530_18355C.1
atggaggggcagggcgccccgctgctcccggaggcaagggaagcgccatcgtcgtcgtcgactcccacctccacgtctgggcctccccgcagcaggcggcggagaggtacccgtatttccctgggcaggagccgccgatccgtgtgtatggatgaagccggagtggacggagctctcattgttcaacctatcaatcatatgtttgatcactcattagttactagcgtgttgaagaaatacccatccaaattcattggttgctgtcttgctaatcctgcagatgatggaagcggcattaaacagcttgaacatctaattgtacaagaaaagtatcgtgctgtccggttcaaccccaacttatggccgtcaggtcaaaagatgacaaatgaggttgggaggtcattattcgctaaggctggagaacttggagcaccagttggaatcatggtgatgaagtttttgccagctgattctaacatttgcatcagtcaggctctgaatggcacaactatgatcacaaatgtgaaattcttttgtatggagggaatcagtacatatattcaggagatagaggagctctgcacagattatccaaaaactactgttattttcgatcatatggctttctgcaagccaccaatgaacattgaagaagagaaggccttcacttcatttctagaactatccagattccctcagatttacgtcaaatacagtgcgctctttcgtatttcaagagaagcatatccatatgaggacacatctcagcttctttcccgtgtgatctctagctatggagcgaatcgaataatgtggggaagtgacttccccttcgttgttcctgaatgtggctacaaaggggccaaggaggcgatctctcatgtcgccggcaagatacctgtttcctcgtcagatttggaatggatcttaggcaaaacagtgacccaactgttccaaggtgcatgggtttctgcatga

SEQ ID NO: 12207 - DNA, 354 bp, Oryza sativa
  Clone ID: PAT_MRT4530_18356C.1
caacaccccctccaccaaatacatggtggtctttattaacactacgggggggttaaaaaaaacccccacccaatcaagctcattaccctacaacaacaacaaatctgtaccaaacccatggacactctgcccctctcgatttcccactctcttaccttcttctatgacgccaacttctccaggcatctgactgtcatatacccacctcctccacccgtgatacccctacaccaccaccatcatatgcttcgcctcgccacccaaagaaccacttcgcatactctcactctattcactaatgtactacccttacaaatagaacccgatcatgtaccacacccttatacaccgcgg

SEQ ID NO: 12208 - DNA, 337 bp, Oryza sativa
  Clone ID: PAT_MRT4530_18357C.1
gccaggggtcataccaaaccaagtccaagcacatgcggcgtctgggcaacatgcccacagctggtcggagacatacccacacgacccaaccatctcacagaggtgccaaattgtggcttcaacttcacaaccagcagacaaactggtccgtaagctctgctgtttttacctatttttaggagaacattggcccgaaatatgcgtcggtgaagtgagacagggagcttgaatctcgctggaatccgacacggtactgttttgactgttatcgggacctagggtccacggtacaataagtaatcccagcttttcggttatatataggagttccccccga

SEQ ID NO: 12209 - DNA, 1782 bp, Oryza sativa
  Clone ID: PAT_MRT4530_18358C.1
atgactacaggaaagaatgaagtagtccttgggacacgtcttgttgaggtcggtgaagttgacacacaacttccactttctgttggctttgcgtaccattactggagtggtgagccactctggattgatgacttctctgatgaaaccagctttgagaagtttgtcgagttcttctcgtatggcctgtttccgatcggaggggagaggacggtgaagaagctgcggctgacgaaggcggtgacgatcccggaggggacgacggtggcggaggcttgccagcggatggcggcgaggagggtggacgccgtgctgctcacggacgccaacggattactctccggcatcgtcaccgataaagacatagctaaaagggtgattgcagaggggttgcgggttgagcaaacaatcacctccaagatcatgacacgaactcctgtttatgtcatgtctgacacacttgctattgaagcactgcagaaaatggtccaaggaaaatttaggcacctcccagtggtggaaaatggtgaggttattgccatgctagacattgcaaaatgcctctatgatgcaatatcaagactggaaaaggcagcagaacagggaagtgcattagcagctgctgtagaaggggttgagcgtcaagtgggagacaacttgccagatcattccagtgtaatagaaactctaagagaaaggatgcttaaaccttcattgtcaaccattatctcggagaacacaaaagtagcaattgtttcaccatgggatcctgtttgtgtagcagcacgaaaaatgcatgaattacgggttaactcagtggttatcactgcaggaaattcattgcaagggatttttacctcaaaggatgtgcttatgcgcgttgtgacacaaaatctctctcctgagttaactcatgtagaaaaggtaatgactgcacaccctgaatgtgctacattagacacatcaattctcgatgctctgcatattatgcgcgatggcaaattcttgcatattcctgttgttgatggagaagggagagttgttgcttgcttggatgttctgcagattacccatgcagccatttcaatggtctctctgcacatgcgtattttttcgcttctcattccttgctttttccttatggtttccgttcatctaacatcattctgtgtgaaggttgaaggaggtcctgagaccacgaatggtgtggcaaacacaataatgcaaaagttttgggactcagctcttgctttggagcccccagatgaggaatttgatagtcgcagtgaaatatctttgctcatgccatcagaggctggagatggcaggagtagcattaatcctcctgttgttggcaattcatttgtctttaagattgaggaccagaagggacgtatgcatagatttgcatgtggttcagagagtttacatgagctggtgtcttctgtggtgcaaagattaggcattgatggcgaaaagggcacagttcaacttttgtatgatgatgatgaaggtgatagggtgttgctcactacggatactgatcttaccggggctgtgctccatgctaaatcttctggattgaagtcattgaggttgtacactgatgagtcaaattccagttctgaggtgacaaaacacagttctgaagtaacaaagcacgcttctgaagtgacaaagcacacttctgaagtgacaaagcaacctccagagttgacatcttcacacacaagtcagttgacccctgctcattatggcctgatggcagatttttcacagatgtag

SEQ ID NO: 12210 - DNA, 1453 bp, Oryza sativa
  Clone ID: PAT_MRT4530_18359C.1
atggtccaaggaaaatttaggcacctcccagtggtggaaaatggtgaggttattgccatgctagacattgcaaaatgcctctatgatgcaatatcaagactggaaaaggcagcagaacagggaagtgcattagcagctgctgtagaaggggttgagcgtcaagtgggagacaacttgccagatcattccagtgtaatagaaactctaagagaaaggatgcttaaaccttcattgtcaaccattatctcggagaacacaaaagtagcaattgtttcaccatgggatcctgtttgtgtagcagcacgaaaaatgcatgaattacgggttaactcagtggttatcactgcaggaaattcattgcaagggatttttacctcaaaggatgtgcttatgcgcgttgtgacacaaaatctctctcctgagttaactcatgtagaaaaggtaatgactgcacaccctgaatgtgctacattagacacatcaattctcgatgctctgcatattatgcgcgatggcaaattcttgcatattcctgttgttgatggagaagggagagttgttgcttgcttggatgttctgcagattacccatgcagccatttcaatggtctctctgcacatgcgtattttttcgcttctcattccttgctttttccttatggtttccgttcatctaacatcattctgtgtgaaggttgaaggaggtcctgagaccacgaatggtgtggcaaacacaataatgcaaaagttttgggactcagctcttgctttggagcccccagatgaggaatttgatagtcgcagtgaaatatctttgctcatgccatcagaggctggagatggcaggagtagcattaatcctcctgttgttggcaattcatttgtctttaagattgaggaccagaagggacgtatgcatagatttgcatgtggttcagagagtttacatgagctggtgtcttctgtggtgcaaagattaggcattgatggcgaaaagggcacagttcaacttttgtatgatgatgatgaaggtgatagggtgttgctcactacggatactgatcttaccggggctgtgctccatgctaaatcttctggattgaagtcattgaggttgtacactgatgagtcaaattccagttctgaggtgacaaaacacagttctgaagtaacaaagcacgcttctgaagtgacaaagcacacttctgaagtgacaaagcaacctccagagttgacatcttcacacacaagtcagttgacccctgctcattatggcctgatggcaggtgcagttgttctaacaggggttgtggtgatgatttacttgagacgctctaaagtgtgattgtctgagataaattttccacacatggctctaatttaaaatataaacagcacgattgaacttcttagcttatcaacagattaagagtgaagagacagatggacatcga

SEQ ID NO: 12211 - DNA, 550 bp, Oryza sativa
  Clone ID: PAT_MRT4530_1835C.1
atgtggaagtacggtagtgctttgcaacagaggcccgagcttaatccttatagtggccgggccgcgagggcgcgcccgaaaagcagcctcgccggcacggccgacaggagggggacgcgcccgcgccccgatggtcaccgccggcgaccaccggcgcggcggagcggcacccgagagagaggagggaagggggaagcgaatggagcggccttcggctcaccccggtcgacggcgacgacgggaacggcggccgaaacggaggaaggcggcggcgcggttcgggacgacgaggacgacggcgctccgacggtcggcgagcgaaacggaggagcggacggggtcgacgacgacgcggcgaagccgaaggaggcgacgccgagaggggaggaagtccggagcgacggcggcggcgaaccggaactcgtcggcgacggcggagagagaggaaagcggcgcgagcgcgattccgacgatggaatcttctcttcacctgacttgtccctggttgaacctttagctgacttcgactgggttgcggcacttgaagatg

SEQ ID NO: 12212 - DNA, 923 bp, Oryza sativa
  Clone ID: PAT_MRT4530_18360C.1
gtgaatagtgcaaaactgcacttattttgggattcgaatatctttttttttcagaggttgtcgaacgtttcccttaggtcatcgatcagttattcgcctgtcttgatcttgacgatgatgtcgtccacatatgcttcgacgtttcgtccaagctgatcgccaagtgctccttggatcccgcgctggtatgtgttgcctgcacttattaatccaaacggcatcttcatataacagaacacactaaagggtgtgatgaacgctgttttctcctcgtcctcctttgccatgctgatcattactggagtggtgagccactctggattgatgacttctctgatgaaaccagctttgagaagtttgtcgagttcttctcgtatggcctgtttccgatcgggtgcgaatctccgcaatttgtacttaactgtcggccacctctccccccctccaatttttccggcggccgccaccgccgccgacgatccctctctccgcccactgccaactacatcgctgattccggagcagcggaggcggcggcggacgaagccatgagtgccgccggcgtggcgctgaaccgccgcacccgcagccgcccgccgtcggtggcctcctcccagaagtccgatgatcccgccgccgcggtcgccgctatctccaccgccgaagccacgccctcccccagccacgccgcgtaccaagattgcctctctctctctctctcctcgccgcctttgatccttacagagattggatttttttttcttctttttcttcagaggggagaggacggtgaagaagctgcggctgacgaaggcggtgacgatcccggaggggacgacggtggcggaggcttgccagcggatggcggcgaggagggtggacgccgtgctgctcacggacgccaacggattactctccggcat

SEQ ID NO: 12213 - DNA, 441 bp, Oryza sativa
  Clone ID: PAT_MRT4530_18361C.1
atggccgacgggttcaacagcggcttggagcgaagtgttgcaaggaggccaggtggcagcaatgacgaagactcgaagacgacggtgagctccatccccatccttctcgaatatgacgaccaaagtggcatgaataagacttggagacctgtcgctgtcctcctcgagctcccatgcaaggaccagcctcgccaaggaattgggactgccgccggccccgtaggggcgggtaaccactgggtccccatcctcatcgaggaaattgccacacctatcgtcatacctcccaccattaccggcctcaatgccgacaccaccaagaattcccctcgcaccactacaacagccgtggcaagatcttctagtgcccgaggcagcaagcggtgctctggaggtggcggttgtggaggacgtcctagccatgctcaggttgctccttga

SEQ ID NO: 12214 - DNA, 1025 bp, Oryza sativa
  Clone ID: PAT_MRT4530_18362C.1
gaattaagcccctctatatctggagttagggagcacatttttactagcagaaatggtgaacatggagtagtgccatattatgtcaagagttatcttaatctaacagaggatacaccgtcaactatatctttctccatcgcactctctaaaatatatatttatcaggaagatgtttgtagaacttattgatttgggtaatatttattcgtcgatgtcaaccatttcttgtccacaatgaatggttgatcgtattcaagatgacaaagccatatttatgcttcatagtttgagactactatatggtgagagaaatttatgtatgcctacaagagtgccttgtatgatttttgaaagatcaccaaaatggattttcctcaaaagattcttctgtacttcaaatgctacgtgtacaaagttcgcatataatgaactagaaaaaaaatgcaggtggctatgtctagctattactatagaccactgcctaacaacatccttatcgtacttatccgcaattttcattgagcctatgcccaatcaaccgtgctttttataaacataggaagtattactgttgctttcttgccctatacatctcttgcataccacccttgagagtttctgagaatatttgcaaaaaaatattgattaaccttgccattagcaggaaaaaacaaagcaatctgaacgcaacacagattcaacaggatgatccaatgacaacagtgaacactatgggttaaggtatccaaacatagcatatgctttcatcacctactgcaaacatcagtcaccttttacaccagctgtatgcaggtggtgcgccaagccgccaagggcgcgcgccccagatcctagtatccttcaacttcaatatgaaagacgtaaatgaacccatgtatgaacatgcctacatctaataggcatccaactatgcaaggaaagcctatttagcctccattaactcttgcttttgattgaatagtatctctcaactccaaaacggggtataacgtctacccatcttt

SEQ ID NO: 12215 - DNA, 393 bp, Oryza sativa
  Clone ID: PAT_MRT4530_18363C.1
atgtgctgcaaggcgattaagttgggtaacgccaggggcgaattcgagctcggtacccggggatcctctagagtcgacctgcaggcatgcaagctttctgaatttatcctcaatggaaggactcaaggagtacacagagaagccctttacttgtatggatataccattttcaccacggaatccgaaacaaaccgccggccatggccatgggcgccgccgccgcatcgattcgcgacggagaacttccgcccggcgatcgtccacgccggcgagtcgatccacgagaaccttactcctcaaggcatccgaggcgatctcgtttccgtcccctcgcttcgcttggcggaacatctcctatctgcaattaggcgtacacccaggaggagcagctga

SEQ ID NO: 12216 - DNA, 240 bp, Oryza sativa
  Clone ID: PAT_MRT4530_18364C.1
atgaggtcgaagctgcacccggggatcaatgacttgacattcccccacctccacgctgaccagatctggcagcccccacctccacatcgaccagatcctgtggcccccacctccaggccgatggatccgaaggtggccactaaggagaaagggctcccgccggagaggttgatggcgactgaggtgcagtggcagtggcaaggaggacgacgacgaggaggaggtggggaggatgggtag

SEQ ID NO: 12217 - DNA, 624 bp, Oryza sativa
  Clone ID: PAT_MRT4530_18365C.1
atgtcgtcgtcgtcttcggcgacgacgacgaagtataggggagtgcggctgcgcaagtgggggaagtgggtgtcggagatccggctgcccaacagccgcgagaggatatggctgggatcctacgacacgcccgaggaggcggcgcgggcgttcgacgccgcgttcgtctgcctccgcggcggcggcgaggccgccgggaacgggatcaacttccccggctcgccccctgccgtggcgcgcaccagcgacccgcaggaggtgtacgcggccgcggtgtcgcatgccaacaaccggccgccgccgccgccgtcggcccgagcaacgtcgtctgcacttccatgggaggaagctccggtggtggcggctcaggaggcggcggcggacatggcgcccgacgtggtggtgctgccatcgtcgccggtgaatgtgctggcagcagctgggagcttcgaatattggtcgcaacaaccactctactcgccgacggcagcaagcctcgatttgcagaggtggatgacggcggcggcggcggccgaggaatcaataatggaggatgacgacgacgaaggaacaagtgatggtctttggagtttccactactcaccgactcgttccaagtggtaa

SEQ ID NO: 12218 - DNA, 470 bp, Oryza sativa
  Clone ID: PAT_MRT4530_18366C.1
gttgtaacattcttcttcatttcggttgagcatataatctgtacagctgattctgatccttacatagcctgcatctacctatattgctgcgtacaactatttttcatgtggtattcacaacagctggtaagacaatcggggtggcatctacaaatgattcaccaattccttcgatcgaactcaccaagcaaatgtacactcagcagtaaaatttggaggacttgttataggtcacgagtacgttagatttttatcatgtgtcggttacggtggctcctgaaagtaaggatgagctaatacttcatcgacacttaggcggtcctcaggatgccatattagtaactggcgtgctagtcgcaatgcccatatattaggaaagcccattttaagaggatctctgatcttcacttgatgcgcattttattcttcagagcatttccaagaagccggccgaaactgaccatgttcag

SEQ ID NO: 12219 - DNA, 199 bp, Oryza sativa
  unsure (1)..(199): unsure at all n locations
  Clone ID: PAT_MRT4530_18367C.1
tttctccccacacacacaaaccaacgcgacgcacganagatttgtacgtgaagcacctgcagcgggcgacccaatggagaccccgactctnaccacgctgctcaaggcggcggtggccacgttcccctcgcgccggccctcgccgtcccgggcaaggtcgacctgtcgcatgnggcgctcgacggctacgtcgacgcng

SEQ ID NO: 12220 - DNA, 234 bp, Oryza sativa
  Clone ID: PAT_MRT4530_18368C.1
atgagcaccttgttcatcctctgttccgcgtacagcggccagcagagcatcggcacgcccgcggtgatcccttccagtaccgagttccacccgcagtgtgtcacgaacacggcggcggaggatgctcggctggggctcccagctgttgacgacgaggccgtggccgtaggcactcatccgttggtcgtcgactcaccattgctcgccatcctggcctgctactggtcgccctag

SEQ ID NO: 12221 - DNA, 249 bp, Oryza sativa
  Clone ID: PAT_MRT4530_18369C.1
atggcactgccaggtcaacgcatggagcgggttagaacccgtttggatttatatgacacacctgggccacggatgaagggagaagggcagcacgtggccactggacaggagctggacactgcggctgcggaagatttccttgtccttgtcagtggccttccagtagccgctcgccgtggcacggttggtcctcatgtgatgcggactaggatcccgatcttccgttagatactgactaaaccgaaacat

SEQ ID NO: 12222 - DNA, 2430 bp, Oryza sativa
  Clone ID: PAT_MRT4530_1836C.1
atggatctcggcaaatcatcctccaccaatgcgtcgctgaagaagcttcaggaagacggcgcccttcctggtcgcggaatcatggaaagggaagcaggaggtactaatccccagcccgttttaggtcgcatggttgcgatcgaagactatattctctgcggttttctccctccgccttccgagtttcttctcttggttttgaacttctacggtctttctcttctccatttgaaccccaattctatcgcctttcttagcatcttttctcatctttgtgaggcttacattggggtaaagccctttcttgatctctttcgcttctactacgaactgcgttggatggagtccaacaaggtgtctggttgcgtcgggttccgacttcgggatggcctgaagtcgcgttatatccccttccagtgcccttcttctcgcagcaaatggcggacgaggtggttctaccttcagatcaaagattcaaaccctgtcttcgttgttcccgaggaacaaccggacaagatttcgtcttggaccgcaaagccccctttgaccccctctctccagtcgtttatcgacattatcgacgatctccgagtacgaggcttgtcggggtatgaagtcgctgcagacttcgttggtctgaacagcgaagccgtggaacgtcgtgttggtcaggtgatgattagtggtccgacaacggcgagtgccatccccgttcccctttgtgagaaaggggcggccgaacgtgatgttgccatcaatactcttcctctgactgacatcatcgggccgctcgcggaccatcaggttgcagcgtctctgaaagagaaggtcgccaaggaggcgtctgatgctgctgctgctactacaagtggtggcaatgttccgacaaaggggaggaagttttcctgtgtaagcgaacatcgtcgcaaggcatcgaccccctcggcctcggacacgtctcccccgcctccacgacgacaacgccttgtgacggttggcgagaaggcagcgcgggcgaaggctgcgcaagacgagtccagagggacctccggcgcgtcgcccgctgcggcctcgacggatgtcgtgctcgcacccgggagccgcgaggcgacaccaagcggcccagtcagcaatcccgcagctggccgtggtccaccggctaccgtcgtcacctgggaggagctccaggtcgagatggggcgcctcctcgaggctggtgcttgcggcatcagtcgcgagattgcagaggcgaggttggcggcgtcgtcggcaaacgagcgggctgatcggctggcacacgagttgtcagaggctcgtgaggatctcaagaagatgaaggagttggtggccggcaacgagcgaaaacggcaggggctcgagcaccgcatgtcggagctcgggaacaatctgtcagaaatccgtggctcgttgcgggtcacctatactggtctgcaccagctcgccggggagtgcggtattaagtctactatcccggcgaatcccgacgagttctcgctgacatcttctcttgcggagctggcggcggcgacggaggaaatcccctccaagcatgcggccaggatcggggaggagacatcgaacgggatctacaccggagcgtgccacatccttgcgtgtgtaaagctggcgcatcctgaactcgatctgcgcgagatcttggaccagggggcagctagcaacgcgcgtaagaaggtgatggaagaagttggtgatctgggggaatctgttcttcccctttttgaagaagatgttgatgacgaggatgtccagcagcgcgggcaacctgagtcaccggcgattattccggctctcacgttcgaaccacatgcgtcgcccaacaatgtagaccagacccttgctacggggacggagatggcgaccacttccttagatctcgagagtgctctcactggccaagatcgtcgtatccaatattggaagacaaaatttgaagtagcggaactcgagaggaccatgcttgcagtgaagaaaaagcaggctgtggaaacgctccgaggtcgtgaggtgtggttcaactcgtacttgaagagttgctgcacatccatggccaaggtttgtagagagctccgagtacctcgtggggatcccgaggagtccgcggccgggtatatctcgtggctgaatggggactgtgctcaactcgatggcgtcggcaaacgtatcgacgaggccttgaagcaggagtgtcgtcgatcgagccgatatgccggggggcacgtgttggcttgcctacgggatcatcgcccgtgccgggacctcgattttctccgtgagggttttgctcgttctcggaggactccggcggagatagaccacctggcgaggttgatggcgccgttggcggagaagatcttccagtctatggattggcgttggccttcttggtag

SEQ ID NO: 12223 - DNA, 2128 bp, Oryza sativa
  Clone ID: PAT_MRT4530_18370C.1
atgtggaagatggtggacgcgctgctgcgttgctccgcgctcgtggcgctggttcttcatttcgtcgtcaatggctgctcggcggtcaacactgaagggtcggcgctgctcaagtttcagtcgagggtggaggaggatccgcatggcgccatggcaggttggagcgagcgggatggcgatccttgcagttggaacggcgtccgctgcgtggatggcagggtggtgattcttgattctgattggaaatgcagtttacccattcgatcaaggatcattgttgcaaaatgtagcaggaatctaaaggatctctcactaagaggtaccttgggtccagaactaggaagtcttagtcatctgagggctcttgtactctccaacaacttgttcgatggaccaataccgaaggaaatgagtgatcttgcaatgctggaaatactggatttaagcaataacaatttgactggtgaagttccgcaggagatagcagaaatgcaatcaattaagcacttgttgctttccaacaataactttcaatggcctctcatccaaaattcctacaggaattttgatcaggaaattgattttgacgtctatgatgagaggggcgatgtgtatcaaagatctgagaatggattcgagtctgattcttcatcagaagagaacacaaaagacaataacaatctttctgctcatctttcttcacaatttgctgcaagaaatccaactgtacaacttagccggcgcagactattggaggataccaatcttgctgcagcttcagcaaatgctcctgttccagctgttgcttctgttccttctactggaactggatcattttcagcatttaaggaaatcaaggtgcctccaccactaagtcctccaagtagtccacccatgtccagtggtcctccacaaagatctaagagatggttgtatgccattgtgatttcatcaatcgctctgctgtttatcggcatagcatgcatgtttttgctatgccgcaacaaatcagtggcgacaataggtccatggaagactgggctcagtggacagctgcagaaggcatttgtgacaggagtaccaaagttgcagcgctcagagctggaaggtgcttgtgaggacttcagtaacattgtcgcaagctatccacactacactgtatataagggaaccttatcaagtggcgttgagatagctgttgtatcaactgttattgcgactaacaaagattggtcgaagcattccgaagggagattcagaaaaaagatagatttgctctcacgaattaatcacaagaacttcatcaacctgcttgggtactgtgaggaggagaatccttttatgaggatgatggtgttagaatatgcacccaatggaacactctatgagcatctccatgttgagggattcgatcatattgattggaatggtaggatgagagtaattatgggggtagcatactgcatccaacacatgcatgagctgaacccttctatcacacatcctgacttacattcaagtgccatattgttgtctgaggatggagctgcaaaggtagcagacatgagtgtttggcaagaagtgatttctaaaggaaaaatgcccaagaacgatgacattgttgatcaccatgagcctgtgtctgccgatccagctgggaacgtgtgcagttttggtctactcatgctggaaatcatctcaggaaggcctccatattctgaacacaagggctcccttgcgaacttggctatggagtgcattaaagatgaccggaatatatcatgtttgcttgatcctaccttgaagactcacaaagaaaacgagctagaaatcatctgtgagttaatccaggagtgcatccaaagcgacccgaagaagagaccaggcatgcgagaggtcaccactagactgagagaagttctagcaatctcaccggaggcagcaacgccgagactgtctccactttggtgggcagagcttgagatcctttcggttgaagcaacctaggagaaagaaagtgtcaatatgatgtggttcttacagcaactctgagtttctgtgcgcaaacttgtacatccccgtttgtgcgtttctgcatttctggtgagttcgctgtccgcattgcggt

SEQ ID NO: 12224 - DNA, 1154 bp, Oryza sativa
  Clone ID: PAT_MRT4530_18371C.1
ctcggtcactcttcatttcgtcgaacaccttgcctcacaaccaccccccatggccgaccgcgtccaccccatgcccgctccaccgccgccgtcctcctcccctccgccgggacacgacgccgccgccgccacggagaccacgccgctgcatcccagcttccgcggcgcgccgccgccgtctccgggcacgtacatcatccaaatccccaaggaccaggtcctccgcgtcccgccgccggaccgcgcgcgccgctacaagaagctcgcggcgcggcccgcacgccgccgccggctccgccacgcgtgctgcgccgccttctgcgcggtcctcctcctgctcctcctcgccgccgccttcgtcggcgtcgtctacctcgtcttccgcccccgcgcgccgtccttctccgtcgcctccctctccatccgcgggctcgacgccctcgccgtgtcatcgttgactccgcagatcgacgccgccgtgcgcgcggacaacggcgccaacaagaagaccggcatcgactaccgcggcggcggggaggtgaccgtctcctacgccggcgagcggctcgccgccgggccgtggcccgcgttccaccaggcgccgaggaacgtgacggtgttctcgacggcgttggccggaggaggcgtgagcctcacggaggagcagaggaagcagctcgccgcggatcaggccgccggcgcggtgcccctggctgtggacgcgatcgtgccggtgaggttgaggttcgggaaggtgctccggacgtggacggtggacgtgaaggcgaggtgcgaggtgacggtgaacaagctggcggcggcgccggcgaacagggggtgcatggtcaaggtccggccgctctggtggtggtggtgatcgccggcggcgggggggcccccgctgatggttggatgggtagtacattaacggctacagcctagtatagctagtaacagctgtgcattgaacagagagatattacattacttattatacctgtgaattgaattaatttcataattagtgtccaattttggggtgcatttcaagctgttgatgaggggattagtggattacccccagtgtagcattttgcatacttgcagttgcagaggtaattggtgaaagggttttggttttttccggttggtcc

SEQ ID NO: 12225 - DNA, 243 bp, Oryza sativa
  Clone ID: PAT_MRT4530_18372C.1
atgagaggtgtgaagcaaaggtacacaaatgcaaatggagttgtgcacaggagggtgatcaagccggtgctggaatttgtgcagatggatgcgtggcggcgtggctcgtgttacactggaggtgctcggtttgatccacgcggggccgtgccgcaggtgacaggcgttggaggactaccgaggcgagtaaatttgcctacgataagaccgtcagcgaacgagatcaaatgcagttgctactag

SEQ ID NO: 12226 - DNA, 1517 bp, Oryza sativa
  Clone ID: PAT_MRT4530_18373C.1
atgggcctcagcttctggagtctggaccagcccacgtcacttcagaaggagaaccgccagatcagttttctacgccacgcacgcttgatccttgaacagacgcatatgctctccttcctgccgcacgacaacaccctcaggagggggaacatcgttgccggtccggccaaggccgggctaggttttcacccgctgctcaccacatgcaaatctacagctggtgtcccgatgctccaccactgctcaagctctgccgacatgtggcacacctgcaccgccgccccccgccgaccagccttcgtgcgcggaagaccgcgccacacccaccggcagctcctcctcataccgagacacgatcaccaccaccgctgctgccaaacacccgttgccatccacacctcgcacccgactccttccccgcctcaacctgctgtcgccggcgatcgtctgcacgacgtcgccagccgctgccgcatccagcgacatcagcaccgcctcacagacccgaccgccgcaaaccagccgccgttgccgctgtcgctgtcaccagccaccgacgacagccgccgtctccgcaaaccgccgccaccgccaaagaagccactgcaccgtcgccctccaccaccaaagcagccagcaaccggcccgatgccgccgccatgtcctcagctgccgcagcaaccaccaccggccaccctccagatccggccgagcggcacggatctgaggtacaccgccgacgtcgtcaccgagcaccatgccaccgtcccctccttcgctcccgccaccagcgccaccatgccggcctccgcctgccgtgcaccaccgccaccacgcacgcaccgctgccaccatgccatgccgggttttgccgtcgctggccgagccgccccgccagtgctgcgtcagtcgaagctgccgccgtcgcacgggctccgcgcgcctccgtcggccgcggacttagcctcgcccgccgccgcaccaccgggcgccgcccacgccgttgccaccgaagccggccgctcctccttccccgtcgtcggacgcctccgccgcgcggggagcgcaggggagctagatccggcgtcgccgcacgccggcgagcccgctgccgcggcctctaccccgccgccaacctcgcctcctacgcccacgccgccactacaacctctgccgcaccgccgcctccttcaccccgccaccgactcctccaccccgctgccttcttcacctcgccagccggtcgggcaggccggtgtcgccgtcttcgcgccccagaccgtgtcggtgcccccaccgccgacgggagggagagacgaagccccgccgccgccgtccttgtggccgtgcggctttgccggcggccgctcgggcggcggcgaggcggcagaggcaggaggggggcggcgcgggcgacggcggcggtggtttctgcctcccgtgtcgcccgtgagggagacgatgcgggggctctctttcgatacgaatgctcaggttacagattaaattggccttaa

SEQ ID NO: 12227 - DNA, 2653 bp, Oryza sativa
  Clone ID: PAT_MRT4530_18374C.1
gtgttcccaactcggcaactgcttcttcctcctcctctccctcccagatctcgatgctgcggaggcagcccggcgacgcgccggcgtcggcggcggcatcggaggccgacctcgcgcagctctccaccgccatcgccgccggggaggacctgggcccgttcgtgcggcgcgcgttcgcgtgcgggcgccccgagccgctgctcgcctcgctccgggcggcggcgcgggaccgggaggccgagatcgaggagctctgccgcgcccacttccacgacttcatccgcgccgtcgacgacctccgctccctcctcgccgacgccgacgcgctcaagggctccctctcggcctcccacgccgcgctcctctcctccgccgccccgcttctcgcctcgctcgagtccttcctcgccgcgcgcgggctcgccgggaacctctcctccgcgctcgcatcctcccgacgctgcgtccgcctcctggcgctcgccaaccgcgccaacgcgcacctgcagggcggcaaccacaacctgtacctcgccctgcgcgccgtcgatgccattgaccgcgacctcgcctccggccccgagccgctgccgctccccaccctccgccgcatgttgctcagcctcgtccccgcggtgcgcgcccacgccgagcgcgagatctccagggagttctccgattggatggttagcatccgcgccgcgtcgcggcaccttggccaggtagccattggccgctcagctgccgccaggcagcgccaggaggagctccgatccaagcaccgcccgctggaggagtgcataacgctggacgacgatggcgtcggcgaccttgatgacttcgcagctgccgccgcaacagcagacgttgcagatggtgccgctgcagcatcattcgacctcacgccactctaccgcgcgatgcatatacaccataccctggcacttggcgagcggttcaagaagtattacctggagaacaggaagcttcagctgacatcggatttcgatgtgattgcagcaacaccgttcctcgagtctcaccaggtgttcttctcgcagattgctggtttcttcattgtcgaggaccgcgtgtttcggacagggggtgggctcacgtcccggcctgatgtagatgcattgtgggattctgctgttgcaaagatggtctctgtaatggaggacaacttctctcgcatgcagacagcaaatcacctgcttctgataactgattatgctgctttactttctgccacgatgaggcggtatggttatccagttgggatgctgctcgatgtgctggctaggcaccgggacaagtaccatgacttgctacttgctgattgccgtaggcaggtggtagaggcactggctgcagataagtttgatcagatgctgatgaggaaagagtatgaatactcaatgaacgtgcttgcatttgggatccaaagctcggatatcaccccagcgttcccgtatgttgctccattctcatgcaccgtgccagatatttgccgcatagttcggtcattcatcgaggattctgtaagcttcatggcacatgggggtggtggggacacttatgcagccgtgaagaagtaccttggtcggattctctcggaggtggttgatgcatcgatacaaaagctcgtggattctggtggtggtctgagtgtgtcccaggcaatgcaagttgctgcaaatatgtctgttatggagcgtgcgtgtgagtttttcacaggccatgcagcgcaactgtgtggtgtgccacttcgtgcagtggagcgtgggcggcgtgacttcccacttcgcaagtcccgtgatgctgcagaggcacttttactacggcttctacgttccaaggttgatgagttcatggggcaatctgatggtgtcacttggatggctgatgatccaccagctggtggaaatgagtatgcaaacgaggtcattatctatctcgagacactcacttcaactgcacagcagatcctccctcttccggtgctccgccgtgtccttgtggcagtgcttgcccacatctctgagaggattgtcgggctcttcttgaatgattcagtcaagcggtttaatgctagtgcagtcaccggaattgataccgatctcaaaatgttcgaggcgtttggggagagcatgtccagtttgtttgtggactctgatcaagagtctgcagcaaatgaaatgaaggctgcacttgtggaggcgagacagctagtgaatcttcttatgagcaacagcccagagaatttccttaatccagtgatccgtgagaagagctataacaagcttgattacaaaaaggtggcagccatatcagagaagtttcgggattcctcagagagctatttctcaacatttggaactaggggtgctaggcaaaatccgaagaagaaatctcttgatactctcatcaaaaggctcagagaagccagctagagttgctagtcctctcctctgcagtaagataatatatgttctttgcctttcaccttctcatgttttcatgtaatttagcctgcatttggtgtgcattattcatattaaaatcaccatttttcaatatactgtaattttgctaatgttagagtgcctgcttcatatgtgttgatattgcagtgttaattctttaactc

SEQ ID NO: 12228 - DNA, 937 bp, Oryza sativa
  Clone ID: PAT_MRT4530_18375C.1
cctccaggcccatctccatctccgccgccccgtccgacctcctcgctagcgtcgagttcgtcgcctccaccgcctccgtcctcgccaccattacctggacctccttcgcaaccaccccgtccccgatcgcctcctcgtcgtctccgcgggcgtcgccgccaacctcctatctgccttcctcattgtctacgccctcgcccgccccgcccgtgccccccgagccatcgccccgatccaccgcccgcctcccgtgaccaagtttcccgcctccatcgcatgtggcaaccctaccaccatcccccctcccccctcccccaggtccccctctgtagccgcactcccgagcaccggtgaattcgtcgccggcgagcacgagtccacgtccgcgatccgcgtgatcgcctcccattggctgccgccccgaacccccccgacccctatatatcccagcatctcagctcttcccttccctagtcttctcgcgccacgcgaatccacgccgccgccgcctcttgacctagcgccgccgccgctgccgctgccccttccgccgagcgcgtcggcgccggggcccccgtctacctcgccgccctcggcggcgccaccatcgccagcggcggcgtgatgcccaacatccaccagcacctcctccccaagaaggccgggtcatccaaggcatccaccgtcgacgacgacgacaactaggccgcccgccgatccgacggccaggatggatccccagcccccacgccctccaacgccacgtcaccgatccgcgccggcaagtacgccgagagggtcggcgccggcgccccggtctacctcgccgccgtcctcgagtacctcgccgcccgattccccaatccgccaaccccaccccaagaacaagggaggaaaagagaaggacaggcaagtccaagcccgggaaattcctccc

SEQ ID NO: 12229 - DNA, 394 bp, Oryza sativa
  Clone ID: PAT_MRT4530_18376C.1
ggaaccaaaactttacaattactttttattttggtcgacccctgggacatttttttgcaaatttcctttttgggggccagggaaaggaaaaaaaaaaaaatgtttttttttttctggaggggaaagtttttttgccaaaattttgtttaaccccaaaagggggggccttgtttttttttacaaagggttttaaagtttaattcccattgacaaggtgggggcttttttgggggtcctaattgcatcccccaaaattgttccccccctttggaaaaagctaattaagctgggggcccttgtttgaaaaaattttttggggagtccttttttaagggttcaaaaacccgccgttttttttggcccgaaattgctttgggggtcgttaacttcaaaa

SEQ ID NO: 12230 - DNA, 153 bp, Oryza sativa
  Clone ID: PAT_MRT4530_18377C.1
ttcttttttttttttttaggctgagcgcatctaccccgtgtaccaaaacaacgagaattcatcgttacatcgtcgtgttgtcgtgacaagacgtatagccaccaaagcaatacgttcccaacacatttttttttgacactactgtaaatttgg

SEQ ID NO: 12231 - DNA, 195 bp, Oryza sativa
  Clone ID: PAT_MRT4530_18378C.1
gtccgcaccacgcgtgcgctaccgtggccttcgactttcccctctctctctctctccggcggcggcgaggccaacaaagggctacagatcgatggaatgcgacgcggaggtgatacactgtgtacttggactatgtcgtaaaccaatgtaaaaatgggatactcgttagataatatgtcctctcttggggggggg

SEQ ID NO: 12232 - DNA, 331 bp, Oryza sativa
  unsure (1)..(331): unsure at all n locations
  Clone ID: PAT_MRT4530_1837C.1
gagatacacaaacgaactnctaggttagaataaacacatttttaaaaaaaccaagaaaagattttcctcttctgttacattccttcttccttctccggccaccggagccgtagccgaattgtgcctcttctccggcgaggggagagggagagagggggtgtgagtttctttccttccatacagagggggcacttcgctggcggaggatgcgatgtttcttgatatcgcactaggggtgatgaacaagaaggggtttgccggttctgcctacagagatttaagacgggcacgtgtagaccacggagaacattctccagccgagctatggtaa

SEQ ID NO: 12233 - DNA, 136 bp, Oryza sativa
  Clone ID: PAT_MRT4530_18380C.1
cctacagacgttactcaactataaacagccatgaactactggtttgaagcggatctacaccgacacatacttatgaatttcaaccgtggatggattatggtacaaaaaagtgtactacctttcattgtaatttttg

SEQ ID NO: 12234 - DNA, 1724 bp, Oryza sativa
  Clone ID: PAT_MRT4530_18381C.1
tttttttttctagacaaattgatctggtattgtgaatttctgatcatgaagagtacatatgtatagttacaggaagtcaggaacagtctgtatcctagctatactgcagattatatacgaacatttactcaggacagaataatcaatttacattacaccctctctgtctctctgattctctttctctagatctctcatcctcttcttccactgatcctctctctgtttatctgcaagaaagcatcaaatggtgtcgccgaatctcgcgctgctggcggtgccatcctcccggagcaggtcggcggcggcgctcctcccgccgtcgaacctctccgacaggaagaagctccgcagcgagttgaggttcctcctcggcgcccccacctccacctcgaacagcgccctcaccggccggtggtccgacagccgcgactcgcaccggtcgtaccgcttctgcttcagcccggcgccgcgccatagtatccggtcacaccacgccggcgcgcgccgcttctcgcctttcctgccatgggaggcgcagccgtagtaggtgtcggagttggggtagtacttgtacgtcggcgagaaggcgatggcaccctcgttccagccatggaatgcgcctccttccgattccacctcgcttcgcagcagcaacctcgtcttcgcctccggcagggagatcctgtagttgaggtccccaagcaggatcactcggtcgtggtctagaatcttctgggggaggttgagcgagtgcccccgggggaaggtcgtccgggagaggatctccgtggcgtcggcgttgcggtgcgcctcgtcgccgtcgcggccgccggacgcgaggtggcagcacgccacgcagaagctcgtgtcgtggagccagaacctgacggacacggcgcccttgttgccgaggcagcccatgacgccgcagccgacgcaggagacgctggcgcggcggacgaagcgggcgaggtcggcgcggacccagacggtgaggaggatgccgaccatctgcttgctcaccacgcaccggtagtccctgcaggcgagctcgccgccaccgccgccgatgccgccccgcaccgggtgaaccttctgctgcgccgcctgctgctttatctcccctcctccggctgcggctgcggctgcgccgccgccggtgcccttggcctctctctggtcacgggaggagttcggcgccgacggcgacgaccggttcagcgccgcgcgcacgagctcgttccagcgcatcccgacgcgcttcttgtccgcgcccagcacgttccgcgcgctcaacggcaccacctcctggaatccgaggacgtagatgtcgtaggcggcgttcctcgtgtcgagccagtccgacaggtcgaggtcgtccggtggcgcgacgccgccgacgttccacgtgctcgcgaacagcctgtacttgagcgtcttgttgctcgctcgctgctgcggccgcggccgcggccgcttcacgctgcggcaggcgtcggcgtcggggctgcaaccatcgtcgtcgaacgactccaccgccgccggcaccgcctcgccatcgaagtcgtcatcaacggccatcgggaagtcggcgacgaaggcatggctgccggatggcttcctgaagagcttgttcgccaccagcctcggccaaagaacctccgcttgcctctggttctctagcatggcgaccaatccgtagggaggtaggtagggatgga

SEQ ID NO: 12235 - DNA, 396 bp, Oryza sativa
  Clone ID: PAT_MRT4530_18382C.1
aaaaataaatagccggagcttcaatatattttagaaacatatgcctaacccaacaacatatagaagtagcagatgccacttttacataaagatagagagagatcaggtgcaacaaaaacaaaagcggaggacgggcggtcaaatcaagagacgatgaacaaactgggaacacacgaaacagggggggagacatcagcgaatgagagatgaacaattaaacaaggctgtatatgacgatgacggcgtgacgtgccactagactcctcgcagaccgggggcttgtaggcgaagaagctgatgagctgcacctgcctgacgttgtccaagccggtgatacggacgaaggcattagggtacgccatcttggcctacatgagctgcttgagcacctgggtg

SEQ ID NO: 12236 - DNA, 921 bp, Oryza sativa
  Clone ID: PAT_MRT4530_18383C.1
atggcgaggagcgaagctgttgatctgatgatggcgaggagaagaagatgcagaggttggtctgttgatctgatgatggcgagcacgacgtcggcgacgaccaccgtgggggcattcgccgccgcctccgcctccgtcgtgaagacggtctttcgccacgaaggagtgggtgtggggttagctgtgattgtgacgggagacgcgtgcacgagggtcacagcctgcgggcgaagccggtctagcgtggtggggtacgacggccgccgagggggcgttcgccgtcgcctccgtcacgaagacgcggggtgtgacggtcgtcgtggggcgttcaccgccaccaccgccatgaagacgcgggcggggtcagctgcggttgcggtgggtggtgccagtacattgtcggtgacggctgccgtgggggcattctcctggcattgttcaccgcaaaaggcgcgaacaagccgccacggtggtgttcaccgtgaagacgcaagcggggtcggttgccgctgcagcacggcggcggttgtgacagctggcgcgtgcgtgatccagaggcctctcccgcctccaggctcgccggccgcccgcccgccttcgctgccgatggcggaggaagccactgggaagaaggaggaggaggaattcagtacggggccgctgtccgtgctgatgatgagcgtgaagaacaacacccaggtgcttatcaattgccggaacaacaagaagttgcttggtcgtgtgagggcatttgatcgccattgcaacatggttcttgagaatgttagggagatgtggactgaggtaccaaagactggtaaaggcaagaagaaggctcttccagtgaacaaggacaggttcattagcaagatgttcctacgtggggattcggtcatcattgtgctcaggaacccgaaatga

SEQ ID NO: 12237 - DNA, 417 bp, Oryza sativa
  Clone ID: PAT_MRT4530_18384C.1
tgttcacttggttgaaagggcttggtctggccaccatcatggttggagttagcttattcaattggtacaagtatgagaaatacaaaaagggtcacataaatgaggatgaagttaattcaccttcattcgatggagatgccaaatacatcattctagatgacttggaggaccaggatgagtttcaggatgaagatacataattttgcaatgtggcaacattttaactgtcacttggatttttatgccctgaaaccattcatgtctgcttattgattgaaactataagtacttatggatgtttccacttaaacgaggtgtcacggacaagggcactgctagacttgctgatgttctgcaaccaaacttaaaaattatctgccggagcttgtccgtctccaaacaatgaaatggtttctc

SEQ ID NO: 12238 - DNA, 366 bp, Oryza sativa
  Clone ID: PAT_MRT4530_18385C.1
atgcgcggcggtggcctcccttccccgacggcggcgggcggcgggctcggcgacggcctgcggcggcggatccggcggcgccgtcctcgggagggccggatccgccgccctacggaggagctcggcgcgcggcgggcacggcgacggccggcggcggcgaccctcccccctcgtcaacgctgcagccacatccccgatccacgccgcatctgccgcatcaccggcctgccctcctggctggaggaggcgaggtcgggccttctcttcgggggcagcagggaggtccggaggagggtgctcaagtggcttcccgtggagcgccgatgggtcgagcactcatccgccatcatcgagccacaacagtaa

SEQ ID NO: 12239 - DNA, 199 bp, Oryza sativa
  unsure (1)..(199): unsure at all n locations
  Clone ID: PAT_MRT4530_18386C.1
cggacgggccaaccttntnggtcnctcccnatanatnacgcgtttttgnanaagtgnacagtttgggtttaaaaanggcactggnnntagggttttttnttggcgagnagcttttaaaaatgnccccaaatacaaaacactgntccgttttcaggggggnaaaangtcactnggtattcannaattttgttnngggtgg

SEQ ID NO: 12240 - DNA, 195 bp, Oryza sativa
  Clone ID: PAT_MRT4530_18387C.1
ccgggctgcaggccgcagtcgtcgcactaccagcgccggcgcttacctgtcgttacctgacgcagcctcgcctacactacaccctcgatccttccccaaccaccaccgcagcaaatacaccgccgcggcgccgcgcctcttggaggcttcgacgcgcgcccaaaaagcgaccgcggcttcccgttcccgaacacc

SEQ ID NO: 12241 - DNA, 2148 bp, Oryza sativa
  Clone ID: PAT_MRT4530_18388C.1
atgtgggcgttctacctgctgtcgctgccgctgacggtggggatggtggtggcgacgctgcgctacttcgcgggccccgccgtgccgctccacgtcctcgccaccgtcggctacgcctggctctgctccctctccttcatcgtcctcgtccccgccgacatctccacgacaattactggcagtcaggagggtgacgttggattcttttggagctggacgtattggagcacatttttcctatcatggtctattgtacctacactccaggggtatgaagatgctggggacttcacagttaaagaaaggctgaagactagtatccacaagaacttggtctattataaaatcatagggtccattggtctcgttggagtaattctgattataaccatgcgtcatgattgggctggtggtatcatggggtttgctatggcgtgttcaaatacctttggattagtgacgggtgcctttcttcttggttttggtctgagcgaaattccaaagaatatatggaaaactgctgattggacccgtcgccaaaaattcctctatcacagaatcgcaaatatggctggcaaatttgataatgctcaccaagaatattgccacgcaatagctgttgttcaagccacctcgaaacaaatgaccaagcgtgagcctctaaggccttttatggatatcattgatgatatgcttgctcaaatgctgagagatgatccactgttcaagccttctggtggaaaattaggagaagatgatatggactatgatactgatgaaaatacaatggcctcacttcgacgtcaacttaggagagccaatgaggagtattataggtgtaaaagcaaatatacaagttacgttatggaggcccttgaactagaagacaccattaaaaactacgagcaacgtgatgcaaatgaatggaaatatgtatcaggtttaagggaaagtagatcttgcacactgggatccttccttgacttcatagagttcatttggcgttgtatactgaaaaagcaactcctgaaggttcttgctgtaatcctcggttgcatctcagctgccatactattggctgaggccactttactgcccagtgatgttgatttatcgcttttctctgttcttacaaatgttgtaggaaagcaagaagttctagtccaggttgttgcatttattcctttgatgtacatgtgtatttgcacatactattcgctcttcaggatagggatgatggtggtatattcactgacaccgaggcaaactagttcagttagcttgcttatgatttgttcaatggttgcaagatatgcagctcctatttcttacaacttcctgaatctcattcaccttggtggtaattctaaaactacatttgagaagaggatggggaacattgatgatgtcgttcccttctttggaagaagcttcaacagaatatatccactcattatggttgtttatacactattggtcgctggtaatttctttgggtatgtgcttgaattttttggaagctggaaaaggttcagattctggactgaacaagaagaagatcatacagatgggttcgatccatctggagtgcttattctgcagaaagagagatgttggattgaacaaggacataaagtcggtgagctggttgctccattagcaagaaatttcactggtatatacaaagacgttgaatctggaaatgtgcaacaggatgaagaaactgcagggatgaaagcaacaacacttccatccaaaaaggaaggaagactccagtcgaaatatgctagtaacgttgctcttaaatattcttctataagagaacaaaacagcagccatcaagcagttaagcaagcccagacagaaacccaatcgacctctgttgtgcctgaaactggaaactcagagacaccctcttctgtcagtaaagaaccagattcatcagctggaatcgcatcgagatggaccttaatgaagacgggatttcagaacttcaaagcaaacatgagttccaagaagtttcttcctttgagcctgtcatcaacacaatcgtctagttcagggtcgcttgatgagatcttcgagggacttaaacggcattcaagcaatgcaagtgtggattacctcgacgatgatgacggcatttag

SEQ ID NO: 12242 - DNA, 130 bp, Oryza sativa
  Clone ID: PAT_MRT4530_18389C.1
aagccaaggaggtggcaggccccttcatggttgtagcacaggtgaatcgtctgtcctcgagtttcgagtgtaatagtcgtgaaaaatgatggttggaatccaatattagatcgttataccgttttaaaaa

SEQ ID NO: 12243 - DNA, 2091 bp, Oryza sativa
  Clone ID: PAT_MRT4530_1838C.1
ttaggttgcattgttgcgatcgaagactatgttctctgcggttttctccctccgccttccgaatttctcctcctggttttgaacttctatggtctttctcttcttcatttgaaccacaattctatcgcctttcttagcatctttgctcatctttgcgaggcctacattggggtagagccttttcttgatctctttcgcttctactacgagctgcgttggatggagttcaacagggtatctagttgcgtcgggttctgacttcgggatggcctgaagtcgcgttatatccccttccagtgcccttcttctcgcagcaaatggcggaataggtggttctattttgagatcaaaaattcgaaccctgtcttcattgctcccacagaacaaccaaacaagatttcgtcttggaccgcaaagccccctttgaccccctctcttcagtcgtttatcgacatcattgacgatctccgagtacggggcttgtcggggtatgaagtcattgcagacttcgtttgtaggcggatccagccgctccaggctcgggcccatccagcctttgactattccggaccggaggacgcgacccgggtttctcctcggggtctgaacagcgaagccgtggaacgtcgtgttggccaggtgatgatcagtggtccgacaacggcgagtgccatccccgtttccctttgtgaaaaagggacggctgaacgtgatgccgccatcaatgctcttcttctgactaacatcatcgggccgctcgcagatcatcaggtggcggcgtctctgaaagagaaggtcgccaaggaggcgtctgatgctgctgctgctactacaagtggtggcaatattccgacaaaggggaggaagttctctgtgagcagacatcgtcgcaaggcatcaaccccctcggcctcggacacgtcttccccgcctccacgacgacaacgtcttgtgacaattggcgagaaggcggcatgggcgaaggcggcgcaagacgagtccggagggacttccggcgcgtctcccgctgtagcctcgacggatgtcgtgcttgcgcccgggagtcgcgaggcaacaccaagcggcccagtcagcggtcccgcggctggtcgtggtccaccggctgctgtcctcacctgggaggagctccaggtcgagatggggcgcctcctcgaggccggtgctagtggcatcggccgcgagattgcggaggcgaggtcggaagcggcgtcggcgaacgagcgtgctgaccggctggggcttgaggaccgcatgtcggagctcgggaacaacctgttggaaatccgtggctcgttgcgggtcacatacactggcctgcatcagctcgccagggagtgcggcattaagtctactatcccagcgaatcccgacgagttctcgctgacatcttctcttgcggaactggcgacggcgatgggggagatcccctccaagcatgcggccaagatcggggaggaaacatcgaacgggatctacaccggagcgtgccacgtcctcgcagatgttgatgacgaggatgtccagcagcgcgggcagcccgagtcaccggcgattattccggttctcgcgtttgaaccacatgcgtcgcccgacaatgtggaccagacccttgctacagggacggagatggcgacgacttccttagtgaagaaagagcaggctgtggaaacactccgaggtcgtgaggtgtggttcaactcgtacttgaagagttgctgcacatccatggccagggtctgtagagaacttcgagtgccccgtggagatcccgaggagtcggcggccggatacatctcatggctgaacgaagcctgtgctcaactcgatggcatcggcaagcgtattgacgaggccttgaagcaggagtgtcgtcgatcgagccgatatgccggagggcacgtgttggcttgcctacgagatcatcgcccgcgcatggacctcgattttctccgtgagggttttgctcgttctcggaggactccagcggagatagaccatctagcgaggtcgatggcgccgttggcggagaagatcttccagtctatggactggcgttggccttcttggtag

SEQ ID NO: 12244 - DNA, 1209 bp, Oryza sativa
  Clone ID: PAT_MRT4530_18390C.1
atggcgggaggaggaggagagctccagtggatcgtgatccatggtgtccgcgatgcggtcctcagagccgccgcgatcatcggccctcgcctcgccgtcatcggcgacgttcgcgtcagcgacgcccctgcggtgctgactctgctggagaaggaggtcgtgcgccaggactgggagatcgagcgccgccaccgcctggacaggcttgccaggctcgaccacgagctcgccatcattctggaggccatcgtgccgatgctgatgcatactccgttccacatcgtcgccggccgggagctgcagcgctacgggtggtcgattcagcatctagcggcgtcgatcttcggccccgtccacgccctccacgccgccgtcggccccgtcggacgcttcctccgccgacatgctcgacatcagcaccacggcacgagggatgctgcttggctcgccggcaacatcctggaggtgcgcgatcgggtttcggccctgaggtccctggttgtgatgttcccggaggaggaccctgctgccgctgcagccgctgcgggcgacgacgaccacgacgacgacggtgcagagttcgtggaggacgatgctggttctgatgtcgagggaggaggaggagagctccagtggatcgtgatccacggtctccacgatgcggtcctcagagccgccgcgatcgtcggcccgcgcctcgtcatcatcggcgacgttcgcgtcagcgacgcccctgcggtgctggctctgctggacaaggagggggtgcgccagggctgggagatcgagcgccgccaccgcctggccaggcttgccaagctggaccacgagctcgccatcgttctggaggtcatcgtgccgatgctgatgcatacgccgttccacatcgtcgccggccgggagctgcagcgctacgggtcgtcgattcagcatctggcggcgtcgatcttcggcccagtccacgccctccacgccgccgtccgccccgtcggacgcttcctccgccgacatgctcggcatcagcaccacggcacgagggatgctgcttggctcgccggcaacatcctggaggtgcgcgatcgggtttcggccctgaggtccctggtggtgatgttcccggaggaggaccctgctgccgctgcagccgctgcgggcgacgacgaccacgacgacggtccagagttcgcagaggacgacgacgaggagtag

SEQ ID NO: 12245 - DNA, 215 bp, Oryza sativa
  Clone ID: PAT_MRT4530_18391C.1
gaaccggctcgaccgacccacgcgtccttgtacggacaaggcacgcacgcacagaatgggggccctttaataggcgacgaggggtatatctctattccactcaggcggggagatcacgatgaggaagacgacaggggggaagggacgaagggctattgacaatcgccggccccaggccataaccagggtaaaatgccccgcaccggggttagacc

SEQ ID NO: 12246 - DNA, 322 bp, Oryza sativa
  Clone ID: PAT_MRT4530_18392C.1
cgggtcgagccacgagtccgcatttccactatcgaaaggaatgatcatggcaaacaagaattcttcgcgctcgggcaaccagggcggctcccacgaacagcacgtcaaggctggccagcaaagccacaagaacgacggcaacaaacagtcgggctccggctcgggctcgcgttcgggcggctcgggcggcacccgcggcggcaccccggagcagcatgccgaggctggccgtcaaagccacaagaacgacaacaagcgctgatcgcggcgcgcgccggaccggtccgatcttccgggcccggttagcaacggtagcgacaag

SEQ ID NO: 12247 - DNA, 1760 bp, Oryza sativa
  Clone ID: PAT_MRT4530_18393C.1
gattctgatctcttcttctctctgcctgcagacacaagcaggtgactcctccatcctcccaaagcaaagcacccatgtatcccgctgctgccgctgctacctacaagtgcaccctgcagaagctgcttctccttctccttctgatctgaggagctgcagctgctgctccagcagcagaggctgcagtgcaatccgctgccaaattcctcttcttctccttcctactagcttttctcttcttcttcttcttcttcttggaaagctggaacttggagctgcttaagcttacacctgctgattcatctccagctgctgctgctgctgattcagtattattatgtgtggagatgtacagtagatgaggaggaaggaagtagctactggatagctagctgagctgagctaagctgagctaagcttcttggctaggtaggtagctagaggtgaggtgaggtgggggaagaggggattggacatggaggatctgtacagcatccacccgggaatctcccgcggcggcggtgggggaggaggaggtgcggccagcgaggcgtccggggtcgccggaggggggagctcgccgccgcatcccccaccgccggcgacgacggcggcggcggcggatctgacggagctgatgaaggcgcagatcgccggccacccgagctacccttccctcctctccgcctacatcgaatgccgcaaggttggtgcgccgccggaggtgaccacgctgctggaggagatcggccgggaggggcgcggcggcggcggcggcgcgacagccggcggggaaattggcctcgatccggagctcgacgagttcatggagacgtactgccgggtgctggagcggtacaaggaagaactcacacggccgttcgacgaggcggcctccttcctcaccggcatccacacccagctcgcctccctctgtggcggcgcgccgccgcccaccgacaactccgatgaaatggtggggtcttcagaggatgagccgtgctcaggagacgccgatgcagcagattttgggcaagaacacagctcccgcttggctgaccatgagctcaaagagatgttgctcaagaagtacagtggctgcctcagccgcctccggtccgagttcttgaagaagaggaagaaagggaaactaccgaaagacgcgcgatcggcacttatggactggtggaacacacattaccgttggccttaccccacggaagaggataaggtgaggctggccgcgatgactggcctcgacccgaagcagatcaacaactggttcatcaaccagaggaagaggcactggaagccatcggaggacatgcggttcgcgctcatggagggggtcaccggaggatcctcctccgggacgacactgtacttcgacaccggcacaattggtccatgatcagattgcactccaaattaaatgtagcaccttgcaacagacattggcaggtattacctgctgctacaccctctgtgaggagcaagggatgatcatatattaaaaggaaaaaaagatgaaatcaatcaataacctcatcattttgtcgaaattattgtgtatatggtgttgtaagagggagttgggatgacctgtaaaaacttgcctgcattcagctaccataacattaattaattgtttgtatccctgacaactgcatccccagttaaaaccattttagacaggaaagagtgaactatgagtaatagtaacatgtagcaataataaagatacttattttttcccttgc

SEQ ID NO: 12248 - DNA, 807 bp, Oryza sativa
  Clone ID: PAT_MRT4530_18394C.1
gaaaaagaggacccagtgaatgttcagtttcctatgaaattcttatgaaatcataggtgaaggaaaaaaaatcttccaattttcacatgcccaattcctccaaaccgaattgagtgaacaatacttaaatcctgtaggaattggatcctccaattttcttctaaagttcctacgatccgaagaaaccctgaagatatatctgccctcatttagtccatgattgcatatcttttttttttcttgcctcttttcctaaattttatttaatttgtcaattattcccaaagtgggctgtacggctgctcgacatgtgagctctcgttgtaaccgtagccgtaagtgtagtagcacggctctctgacgaactcgtaccctgccacggcggcggcgaggccgtcgccgtcgccgtcgacgcaccagccgccgcccatgtcgtgccccatcgccggcggcaactccgcccgcgcccagtactcgaacggcggcgccgagcacgagcccggccggctgctgccaccaccgtcgaagtcggacagcgacagcacgtcatccagctgatccagcctgccgccgtcgccgctcgccggcgagccgccgtcgccggaggaggaccccaacggcggcgccgacgtcggcgccggggcagccccggcgccgccgagctcggcctcgagggaccgcatgacgcggctcagccggtcgtcggcgtcgtcgccttccggctgctgctccgccgccacagccgccgccggcgtgtcgtcgagcagctccatcaggaacgccccgtcgacgacgaccacatccgcc

SEQ ID NO: 12249 - DNA, 7810 bp, Oryza sativa
  Clone ID: PAT_MRT4530_18395C.1
atgctgggccctcctcgccgcgggccggcgtacaagacgaagctgtgcgcgctgtggcagcgcggcaactgcaaccgcgacacctgcagcttcgcccacggccacggcgacatccgccgcccgccgtcctcccgcggcgccttcacgcaccacccggactctgcagatatgttgactcaactgctgccagaggatagcatgacctttttcataaattcttcacttggtatttcgacgatttgtgttgacgataatgcttgtgctgtaccagaaggtgaacttggagaagagattatagagccggtgatttcagaggcaggattgataggaggttttcacctcggaggaggcattcccctggaagagagtccaggggtcatcgtcccctttatgatagaaggccatcttctcgagaaagagattctagctattcacgatctcctagcaggaagagaatgtgagaggaggcatgaaaagaagactgacgatggagaaaccaactcatctaggagtttaagtctctctgataacaacgatgaaaagaaaaaggacaaattctcaagtggtgatgagaaagaagaccacgaaaagcagctgaaacaaatacggctggatatggaggctttgcgtgacgataaaactcagatggaggtcattttggatgagaagatagatgaagtgcgcaagatctctagcaaagttaatgatcttgaggtgcagcttagaagggagaaagatgaatgccataggatgacctcaaagatgaagaagtttattaaagctcatgctcggtttttgaaggcacaagaagaagtgaaaaggtcacaagctcgtttcgagaggcttggtgatttgcttgcttcagatattttgaagcgtggtgctaatgaagaggggtccagtgtcaatgaagacctaaacgaaaggagtcctaatactgcagcaactaaaaagagatcaatcccatactcaacaagtgaagaagcgaaagctgtgaagaagagaagagagcgagactctgatacaatgactaggtcagataaatataggtcagatgttacagattttgataaaacaagtaaggggactgaggcaaccaagtctttatatttgaagaagaaattatgggaagatgaaaaaagcaaatattttgttaacttgcaggtcaaaggttctcccgtcagacatgttttgccctccactggcatggctgctcatgctattgatgatctcaacgaagctattgaactggaggacagacatgaatccatagacgcattactagaaaatgatgctgatgacaaaactagatcacctgctattcccctgcagccaccaccagtggtacagaatgcttatgagcagagcggcttcgaacatatatcatttgatatcccctttggtttatctatctattgtgcaaagtttcctttaacacaactagctggttccacgcaagcgacaaggttcgctgctgcacggcaaattggagaaattgccaagtcccacccccaggagctaaatgtcttactcaaaaaggatatctgcattatcattatattaagaaggaaaagggtttctccatatttacgtagtaagaattgggacacaagggtcgcagcagcccatgcgattggtgccatagcagagaacgtcaaacacacatcggtgaaagacttgttcgcatctgcagaagcagaaaaacatgcttctgggttgtctggaattggtgatgttgggtcaacgttgcggcatgctgatactactgcaacatctgagcttgcttttggaagcttcgatataaacagggtgttggaatttggatctcctttattggcatcaggtggacaggaatatgacattgcaaatgataacggcaaaaatccagcagagcgtttagctcgccaaaagcaaaatctccggcgtcgtttaggtctggatgtatgtgagcagttcatggatttcaatgatgttatcaaagacgaggaccttcttgcccaaaagaattattggggtgcaaatatgcaaaacaatggattctattcatttaatactggtcagaatattcagcacttggttgcatctatggttcccagtgcaattgcactggagcattctgttgggatggctttgtcttcaatctgtgatgatctaatcaccccacttacattttttcaggatacagttgatgcaatcacagatgaggacaatctggagtacagtgagaatgggagatggccttttcaacagtttgtagatcaacttattcatgacatgtttgaccctatttgggaagttcgccatggcaccattatggctttgagggaaattttgacgcatcaaggtgcttgtgctggagtatattttcctgatctgaactcacctttcgctgaccttgatgataaaaacaatttggactccctgaaaagagcacatggtattgatcttaatgaagacattgattcgggacagctcgagccagttttgaaaagacaaaagaaagaggagtctaatccagaggttatggacattcagttggataaggagccaagtaacggtgattattccaaaacagaggcaagtctgagtactgagcctactgtatctagtggtgaaccaaatcttgctcatgcaaaggttgaatcacccttccaggttgatggttcagctaacccatctaaggtggatccatattgtacaccacctcacgaaacactcaactccatgcccaaactgagttctacccatctccctgaaaattcaaaatttataaagctgatgaaactagcgaactactcagcggtaaaaaattgggaatttcttcaagactgtgcaattcgtttcctttgtgtactttcattggaccgctttggtgattatgtatctgatcaagtggttgctcctgttcgtgaaacttgtgctcaagctcttggtgcagttctgaagtacatgcatccgactctagtatgccatacactgaatattttgctgcaaatgcagcgcaggcaggagtgggaagttcgtcatgggagtctccttggaattaagtatttagttgctgttcgtcaggaaatgcttaaagacttgcttaattatgttcttcatgcctgtaaagctggtctggaggatccagatgatgatgtccgggctgtggctgcagaggctctgatcccagctgctgcttctttagttagactaaatgatcaaatgctacattcaattgtgatgttgctttgggatatattgcttgaccttgatgatctaagcccttctacaagcagtgtgatgaatttgttagctgagatatattctcaaccagagatggttccaaagatgcttggcacaacagccataggtggagacaacgaatttgatctaaacagtgtaactctggttgccggtgaagaaaaaatgggttctaatgataatccttatgtcttagccgctctgacaccccgattgtggccttttatgagacatagtattacatcagtccggcgttctgctgtacgaacattggagaggcttctcgaggttgggaacaccaggaattcagctaaactatggcttgcatctatattaggtgatgcgctgcaagttgtcttccagaatcttcttttggagtcaaatgatgagattattcgatcttctgaaagggcttggaaacttttacttcagtgccctacggaggaccttgagtctgctgcaagttcatattttagtaattgggtgcaacttgccactactccatatggcacagcattggattctgcaaaaatgtttttgccagttgcacttccacgaggaagtcgttcaagagctgctgcaaagatcaaatctgcaaggttagaacatgaaaatacgagaatgatatcttttggttctaccggagagaacacttcacaggaaaagcattctgaagcttccttgagtgtttcaaaaataattgtggggtctgattcggacaaatctgttactcatacgcgagtgctgacgtcaatggcccttggtctgtttgcctctaagttgccagaggggtcgtggcaagttgttcttggtccactagcaagcgatctcatgtctctctcaggagtccagagacaggtggcttctatggttattgtttcttggtttaaagacctcagaaaaagtgatcctgctgcggtgggtacattgctagctttcttatcctccctgaaagggtggatgttggacttactggcttgctctgacccttcatttcctacaaaagattctccgcttccatatgctgagcttgcaagaacatacaggaagatgcgcaatgaagccaataatttgttccagtcaatagaatcttgtgctcttcttaaagagtatacaagcaacttaaactttgaagctgacatgctgagtgttgatgatgctattaacttcacttcaaagcttttgttaccatctgaacctgattttagtttggacagtgataaaattgtcttgaacaatatagagtcagcaaaacaaggtctattgtctacgtcaggctacttgaaatgtgttcagaataatttgcatgtgacagtttcctctttagtggcctctgctgtagtctggatggcagggctgcctagtaagttgaacccagtcattttgcctttaatggctgctgtaaaaagggaacaggaggaaatacttcaggacaaagctgcagatgcacttgctgagctcatttttagttgtgttggccgcaaacctggcccaaacgacaaactaacaaagaacctctgcacgttaacatgcactgatgcaagtgagacacctcaagctgcagttataaactcaattcaggttattgaggaccaaaacttgctgtcgattggtaagcgttttagcaatcacaaatccaggggccagatgacttccggtggtgaatcgaagtcggagggttttataagccggcgtggatcggagttggcttttaagcatctttgtgagaaatttggagcatccttatttgaaaagcttcccaagttatgggattgccttacggagtttcttaaacccgtcaagactggagatgatcttatgaaagaagatccaagtattgcgcagttaggaagatcttgtgaggacaaggaaccgcagtcccttataaataatatccaggttgttcgttcggttacacctcatttggctgagcccttgaggcctcaattgctaagtctccttccctgtattcttggttgtgtgcgccatcctcatgtcgctgtcaggttagctgctgcaaggtgcatcacatcaatggcaaaatcattgactgctaatgtaatggtaattgtgatagaaaatgtcataccgatgttgtcagattcatcttctgtctgtgcaaggcaaggagctgggatgcttttgagccttcttgttcagggtttggctgtggagttggttccttatgctcctttccttgttgttcctcttctaaggtgtatgagtgatcctgatggttctgttagacagactgtaactcacagttttgctgctctggttcctttgttgccattagcaaaaggttctttgttaccggatggactgagtgaacgcttatctagcagtgcagaagatgcgcagtttctagagcagctcctcgacaactcccaaattgatgattacaagctcagcattgatctcagtgttgaactgcgaaggtaccagcaagaaggaattaactggctagcattccttagacggttcaagttacatggaattttatgtgatgacatgggtcttggcaaaacactccaggcgtctgctattgtagcagctgatattgctgagtcacgtgcacggaatgatgagcaagatccgaaatctttgattatctgcccttctacattagtagcacactgggaatatgaaatagagaagtacatagacagctctatcatgaaacctcttcagtacatcggttcatcacaagataggattatcctccgttctcagtttgataagttcaacgtaatcataacgtcatatgatattatacgcaaggatattgattttcttgagaatgtcttttggaactattgtgtgctggatgaggggcacataataaagaactcaagatctaaaataacatctgctgtgaaacaattgaaagcacaacaccgtcttatcctcagcggtactccaattcagaataatgtattggagctctggtctctatttgactttcttatgcctggatttcttgggacagaaaaacagttccaagctacatatggaaaaccattgctagcagcaaaagatccaaaatgttcagcaaaggatgctgaagctggcattcttgctatggaggcactgcataaacaggtcatgccgtttctacttagaagaacaaaggatgaagttttatctgatcttcctgagaagattatccaggatagatattgcaatctcagtctattgcagctcaaactttatgacaaattctccaactccaatgccaaacaagagatttccactatagtaaaagaaaatgaattagatcaatccacttctcaaccaaaggcaactcgtcatgtgtttcaggcactgcaatatctattaaaactttgtagccatcctttacttgtaactggggaaagcccacctgattatcttgtggaccttctaaaggaaatcggtatgggaactggtgatgagcttcatgacctacaccattcccctaaacttgttgctctccaagagatacttcaggagtgtggtatagggtcagaaatatcaagccctgatgcttctgcagctattgggcaacacagagttttgatttttgctcaacacaaggctttgcttgacattattgagaaggacctgtttcaatcccatatgagaagcgttacatatttacggttggacggctctgttgaaccagagaagcgatttgaaattgtgaaggcattcaactcagatccaaccattgatgtgctcctattaacaactcatgtcggtgggcttggattgaatttgacatctgctgacacattggtctttatggaacatgattggaacccaatgaaggatcttcaggcaatggacagagcacaccgtctgggtcaaaggaaagtggtaaacgtgcaccgtctcatcatgcgcggtaccctggaagagaaggtgatgagtcttcaaaggttcaaggtgtcggtggccaatgcggtcatcaatgctgagaacgccagcctgaagacaatgaacactgaccaactgcttgatctgtttgcttcgacacctgcttccagaaaagcgtctgtactcccaagcagttcgggtggtgatcagagtaaagattccaaggggaaatctggtgggaacggtttgagtccattctgaatggtctggacgagctatgggatcagtctcagtatgcagacgagtacgatctcaaccagttcttggcgaagctcaacggctgaacaaagactaaccggtcctgtccagtgtaaagcgaattggggcgtgtgatgtacaggttgccagattttgttggcaaggcgatcaggagtcagaaatttttttgttgtttcatacggaagaagggaaaaaaaaaggaagatcgcaagatctagagcaatgtggctaacatataggtgcttgagatggtgatctcaaatttttgtcttttgagcttttggttaggagggtttagagagagatagagctagtcttgagaggagttgtatatactatctgctcattataataattaatcaaaggctgcagctccttgtacatattgcctggaaaaaaaaaaaaaaactcgagactagttctctcc

SEQ ID NO: 12250 - DNA, 343 bp, Oryza sativa
  Clone ID: PAT_MRT4530_18396C.1
accgagataacattaccttaacaatgtgttaaaatttttaaaccgggaaaaaatcccggggaaaaggggcccaaaatttgaaaaaatgaaaaaatttgggggaaagggaacccccggatttgtatacccgaaaaaggttaacaaaccggatgcttgggtgtctaagagtaaaaaagggggaaaaaaaaaaccggggccatccgcccgggggcaaaattggtggggagaatgaaacgcctcctagccagggacccccttatccatgagacccttaaaaaggcactgaagggggggacccattaatcttgggcccctcaaaaagaacgggggggggagaaccctt

SEQ ID NO: 12251 - DNA, 1083 bp, Oryza sativa
  Clone ID: PAT_MRT4530_18397C.1
atgaagaaggcgtcgtcgctgtctgagctggggttcgacgccgatggcccgtcattcttccggcacctgacgctgaccgatggcgacgacggcacgctgccccggcggcggctgatcaagatctcggtgatcggcgcgggcaacgtgggcatggccatcgcgcagacgatcctgacgcaggacctcgccgacgagatcgtgctgatcgacgcggtggcggacaaggtgcggggcgagatgctggacctgcagcacgcggcggcgttcctcccccgcgtgaacatcgtgtccggcacggaggtgtcgctgacgaggagctcggacctggtgatcgtgacggcgggggctcggcagatcccgggggagacgcggctgaacctgctgcagcggaacgtgtcgctgttccggaagatcgtgccggcggcggcggaggcgtcgccggagtcggtgctggtgatcgtgtcgaacccggtggacgtgctgacgtacgtggcgtggaagctgtcggggttcccggcgagcagggtgatcgggtcggggacgaacctggactcgtctcggttcaggttcctcctcgccgagcacctggaggtgagcgcgcaggacgtgcaggcgtacatggtgggggagcacggggacagctcggtggcgctgtggtcgagcatcagcgtgggggggatgccggtgctggcgcacctgcagaagaaccaccggtcggcggcgacggcgaagaagttcgacgaggcggcgctggaggggatccggcgggcggtggtggggagcgcgtacgaggtgatcaagctcaaggggtacacgtcgtgggccatcggctactccgtcgccagcatcgcctggtcgctgctccgtgaccagcgccgcatccacccggtctccgtcctcgccaagggccttgtccgtggcgtccccgccgaccgcgagctcttcctcagcctgcccgctcgcctcggccgcgccggcgtgcttggcgtcgccgccgagctggtgctcaccgacgaggaggagaggaggcttcgcatctccgccgaaaccctctggggatactgccacgccctcggcctctaa

SEQ ID NO: 12252 - DNA, 719 bp, Oryza sativa
  unsure (1)..(719): unsure at all n locations
  Clone ID: PAT_MRT4530_18398C.1
gtttattcttctctgctgtatcaatcaaatcaacggagtttgagtttcttttccgattccggcgatggggtcagtccccgatccaggcgagttaactgagttagctcagccgagtttcgaggagtttcagaaacagacgtcgttgatgactagctgtactcttctatggcaagagctctccgatcacttcacttctctagagcagaatctgatgaagaaatctgaagcgttgaagcagatgattgaaactctagataaccagactcagacctcgctcgagtctctgaagcgtagagaggtaacaatcgaccatagcgttgagatcgtagctgggaaagtaggtgaacgagctagagctgctcttgaatcgttagagaaagctagagatggttgtggtgatggttctaatgatgattccggtgatgttgacgatgaagaaggtcttctttctgctttgaaatctctttgtcttaaaatggatgcgagaggtttttggaactttgtgacggcgaggaagaaggagttggagaatctccggtcaaagattccggcggcgttggttgattgtgtagatccggcgatgttagtgcttgaagcgatatctgaggttttttcgggtgatacccagaggagataagttangcatgattatggatgggccttgtgttgtgattctttgagagtttaacacctgttattgggtgatnccagtgattggg

SEQ ID NO: 12253 - DNA, 366 bp, Oryza sativa
  Clone ID: PAT_MRT4530_18399C.1
tttttgttttggtttttttttttcttttttttttttttctttggctttaaaagtggtttttgttctaaaaaaacaaattacgggggcaagatggacaaatcctgggcaaaccgggtttgaaccccccccccagggcacctcccggcttggccacagaaatcccattcaccgaagggcaattgggattcacaccggttacagaggaacaccttggaaaagaacctacctccagatatgaacggggcccggcgggccccacggggagccctcccttttgaacccccccctttgggaccgcaaggggcccaaccagaggggggggacctccgggcctggaaatttgacccgccaggttaccccaggaac

SEQ ID NO: 12254 - DNA, 2316 bp, Oryza sativa
  Clone ID: PAT_MRT4530_1839C.1
atggacctcggcaaatcagcttccaccagtgcaatgttgaagaaactccaggaggatggcgctcttcctggccgtggaaccatggagagggaagcaggaggtactaatcctcagcccatcttgggtcgcatggttgcgatcgaagattatgttctctgcggttttctccctccaccttccgaatttcttttcctggttttaaatttctatggtctttctcttttccatttgaaccccaattccatcgccttccttagcatctttgtgcatctttgcgaggcctacatcggggtagagcctttccttaatctttttcgcttttactacgaactgcgttggatggaatccaacagggtatctggttgcgtcgggttccgacttcgggatggcctgaagtcgcgttatattcccttccactgcccttcttctcgcagcaagtggaggaataggtggttttatcttgagatcaaggaatcgaaccctgtcttcgtggttcccgaagatcaaccggacaagattccgtcttggaccgcaaagccccccttgaccccctctcttcagtcgtttatcgacatcatcgacgatctccgagtacggggtttgtcaggatatgaagtcgttgcagacttcgttggtctgagcggtgaaaccgtggagcgccgcgtcggccaagtgatgatcagtggcccgaccacggcgagtgacatccctgtgcccctttgtgaaaagggggcggcggaacgtgatgaagccatcaacgcccttcctttgactgatatcatcggaccgctcgcggaccatcaggtggcgtcatctctgaaagttaaggtcgtcaaggaggtgtctgatgctgccaccactagcggtggcaatgttccgacaaagccgaggaaattctcgtctgcctcagatgcgtctcccccacctccacgacgacaatgcattgtgacaatcggcgagaaggaggcgcaggcaaaggctgcgcgagccaagtccggaggagcttccagtgcgtcgcctgtcgtggcctcgacggatgtcgtgcccgcaaccgggagccgggaggcgacgcctagtgtcccagtcagcgaccccgcggcaggtcgtgatctgccagctgcagtcctcacctgggaggagctccaagtcgagatggggcgcctcctcgaagccggtgctcacggcatcggccgcgagattgcggaggcgaggttggaagcggcgacagcgaacgtgcgtgctgacagactggtgcgcgagttggctgaagcccgtgaagacctcacgaagatgagggagttggcggccggcaacgagcgacaacggaaggggctcgaggaccgaatgtcggaactcgggaacaacctatctgagatccggggctcgttgagggtcacctacactggccttcaccagctcgccggggaatgcggcgtcacgtccacgatcccggcgaatcccgatgagttttcgctgacctcctctctcgcggaactggcgacagcgatgggggaaatcccctccaagcatgcggccaggattgcggaggagacgtcaaacggaatctacaccggggcgtgtcatgtcctcgtgtgtgtaaggctgttgcgtcctgaactcatctgcgcgagatcttggactagggggcggccagcaacacgcgtaaggagagatgttgatgacgaggatgtccagcagcgcgggcagcccgagtcactggcagtaatttcggtactcgagtttgaaccacacgtctcgcctgaccatgtggatcaaccccttgatatagagggaaggatggcgacgacttcctcagatctcgagggtgcccttgctagccaagatcgtcgtatccaatactggaagacgaagtttgaagtggcggagctcgagagaaccatgctggccgtgaagaaagagcaggctgtggaaacgctccgaggccgtgaggtatggtttaactcgtacttgaagagttgctgcacatccatggccagagtatgcagggagcttcgagtagtccgcggagatcccgaggagtcggtggccgggtacatctcgtggcttaatagggcctatgcccaactcgatggaatcggcaagcgtatcgacgaggccttgaagcaggagtgtcgtcgatcgagccgatatgccggggggcacgtgttggcttgcctacaagatcatcgcccacacttggacctcgaatatcttcgtgagggttttgctcgttctcggaggactccggcggagatagactatctggcaaggtcaatgtcgccgctggccaagaagatcttccagtctatggactga

SEQ ID NO: 12255 - DNA, 360 bp, Oryza sativa
  Clone ID: PAT_MRT4530_183C.1
atggctactatagatacaaccgtcgttcacatcaagatcaagccgtccaaagtcctctttctaacggatccagcctcatcaccaaactccatatcgtttggccgcaaacacaaaaacaaggcacacgacttcgcgagaccgcgagccagcggcggagcatcgcgctccgcgcaccgccagcgcccaccgcccggcgcccgcgccaccgcttctctgccgtcctctgctcctcgcgacctcgcccccaccgtcttcgccgtctcgtaccgccgctatcttgcggcgctgtcccgccgtttcgcggccccgtctcgcagccgcggcgtcatcccgctgtctcgccgccgctaccaccactga

SEQ ID NO: 12256 - DNA, 210 bp, Oryza sativa
  unsure (1)..(210): unsure at all n locations
  Clone ID: PAT_MRT4530_18400C.1
caacgtccagtccatccgctactacagncacaccggcatcctcgtcaacgtgccgctccacgcgcaccgncaccgtcgccgccgaccncggcncgtcgtcgactacgtgacgncgacgnttaaccgtganagcttactgnctagtccctngtngtccgcgactttttactgntngtacccaatgacttacnncnggtaacaantggccct

SEQ ID NO: 12257 - DNA, 223 bp, Oryza sativa
  Clone ID: PAT_MRT4530_18401C.1
tctgcttctgcggtcatctactcctttttcgctatcctactgctccttgctatggtcctgcctagcatccacgatcactctccctccacccctttacttttacatccactctaccttcatccctccatccatttatcccttttcctgcacatatctcccctgtaaaactcctccatcatcccttcttaccacatcaaccttcacctgtgattctagatttcaa

SEQ ID NO: 12258 - DNA, 225 bp, Oryza sativa
  Clone ID: PAT_MRT4530_18402C.1
atggcacgcgtggcggcggctgatttgagggacagtggcggcgtggggccgagcggcgagaaagccgtcaccgagtgggggccacggcacagagccaagggcacaagtcgccgaggtagggtccgcaggtccggcaaagatcgcgagtggaggcagagagggtgcgtccgcgggcagcgcgcggtcgggaggcggctcggcgcgttgcttgtccgacgcatgtga

SEQ ID NO: 12259 - DNA, 720 bp, Oryza sativa
  Clone ID: PAT_MRT4530_18403C.1
atggcggccaccaccagacaacatcgcggcaacgaggctactgaacattgtgctggcaactgccgcaatagtgccgccagacaaaactgtggccgagaggatgtccaaggagctgtcagccacgagcccaatgtgtgtgtcaccgccatcaagactaagattcttcgctactatcgccttgctgctactagccactacccaccgagaagaagacacgggatcccatcggcctctctacgctgccataagtcaattaatcgtctgatgaagagaagggaacacatcgatgctgtcaaagtggctcgtgctttcaatttgattgataagttccctccagtttctgttatcaaagcatatgttgaaaaagtaaaagaggctgctcaagacatggatcgcgctatgcaagaggatgttgctgctctgagatctgctaaggaagcaattgaagcgcatgacagtggatctgactaccgctacactataatgcaagaagtccacaagttgatgagatcttatgagaagaagaaacggagtttatcttttggttccacctcaagttcacatgagcacaagaacaagaggcacaggagcaatcaggctatgcctcgttgggaaaaccaaaccataccaggtcctcctgtatattttccagtccctcctccatattttggtcactacaatccttatcacccctttggtccacaacctcgtcgtaattaa

SEQ ID NO: 12260 - DNA, 516 bp, Oryza sativa
  Clone ID: PAT_MRT4530_18404C.1
atggcctctcctgtcctccagaactatgcgtctcctgcacatgccctgtatcttcaccatgaagacgagttgctaggctgcaagactactgctcgtgacttcctgagacaaaatacctctaaacatatcccagtgcaagcactagaagataatgagatcgaactagagcagcaagatgatggctccttgaatatgtcagacgttggcggtatagaatcgacatttaacagccgccaacaaaaccccccacacttagcactttgctcgtccctgagtaaagctctagtactataccatggtggagatatacagataaaggacgtgcttacctgcttacctgtgaaaactgagagggataggggccagcactggttcggccgaaccactctggtgcctgatccctctgcaactttctgcagagttcagtgcttccaggtgttcagatatttcaacaattctcagggcatatgcacgttagaagctgggatatctcgcccacacttattcaaaacctga

SEQ ID NO: 12261 - DNA, 1599 bp, Oryza sativa
  Clone ID: PAT_MRT4530_18405C.1
aatcggcacgagggacttattcctcgtagcctcatgggtgctcaagttcatggctgatctgagagagatgttcgtggacctaagaagtagctctatgatccagtgttcatcgatcctccatgtgagattcgcgtgaggagttcatcgtctttgcttgctcggataatcaatcaccaatccagcgggcggccggccgctggcttgtggtttggttttgggggagagattgagattttgcttactttgagtgagatctagttcttcttgagttcttcctcatcaagaagaggaagcagctcgcatgcccatctcccctctcctcgcccacctcgctccgtcctcggttgctccggcggcatttggtgcccgtccggcgcggcggcgcttcgttggaaagtgtctgatgtttttatagtttgaaactgctgctagctgaaaggaaaacaggcatgggcaatagaagttttgacttgagttgttctttgagaaaagaggaggaaaatggcacaaatttgtcgccatttgtccgcaaactttttaaagaggtactacctggtgaacacaattttgtggcgacattaatagaaggacgtgaccagaagaagcggcctactcaatttggaatgaaccaagtcctgcagccttttgatagcgtgaaattcaatttcactaaagttagcccagaggaagtgatcttcacattcaaagaatctcagaatgactctgtaaagtacttcgacaatgttcctcatgctgttgcagcttctcctactgccattttgatcaatgtgagtccaattggctactgccatgtgcttctgatccctcgaatccaggattgcttaccgcaaagggttgataaagagagcttcctacttgccatgtatgttgcaagtgaagcaaaggatccattcttcagagttggttacaacagtctgggtggtttcgcaactatcaatcatctccacttccaggcgtactatctgaaagtgcaatatccagtcgagaaggcactgacggagaagcttacgactctggggaatggtgtcagcattattcagctggttcagtatccagttagtggttttgtatttgaaggaggggcatgcctggaggatttgtccgatgttgtttcaaaagtctgcatcttcttgcaagagaataataaacctttcaatgccctcatctctgaatctggcaagagagtgttcctgctaccacagtgctacgccgagaagcaggccctcgggagagtgagccaagaattcctcgacatgagaataaacccagcagtctgggagctcagtggccatttggtactgaagaggaggaaggactacgatgaagcatctgaagcaaccatatgcaggtttttggtcgaagcgtctctgtctgaatcagaattccaagaactgaagagctgcatcttggagttcctgtccagtgcagctcctgaagaataaaggaggccaaacagttattcagagagataccgatttgtaaccgtaggtgcaataaaaagttggcccgagtctgttcttcagactgatgtacaattgaaacctctttgataaattttatataacagatgttggtgtt

SEQ ID NO: 12262 - DNA, 384 bp, Oryza sativa
  Clone ID: PAT_MRT4530_18406C.1
atgcatgacgctgctgctgcctcggcccagtactacgtgccatccatccgtccatacatccatcagctagctgctgccctgccttctctgcttgcccctgcctgccagtgccaccagtacgtagtacgtcaagcagagcagcagtgtgacgagtgtgacgaaaccgcccctagctcagctcgatccagcttacgccgcggtctctcccccggcctcccctcgcttgactggccggttcgatccatccctgcgctgcgcggccgccgcaggctttcgacgacagcccgcgcgcgcgcctgcgtggccgcagttctgatcgtcgctagcgctggatctaaggcgccgcggcacgctggaaacggcacagctgcgtgctactgctaa

SEQ ID NO: 12263 - DNA, 498 bp, Oryza sativa
  Clone ID: PAT_MRT4530_18407C.1
atggtgcgcgcgtccagctgcgctatccacagctggcggagcggagcagcggcggtgacaaggggcccactatatgttctataccgcagcaagacaatgatcgtggagatgaacgtccacatggactgcgagggctgcgagaagcgcgtgaggaaggccatgtcccggctcgaaggcgtgagcacggtggagatcgacatggacacgcagaaggtgacggtgacggggtacgtggaccggcgggaggtgctccgggcggcgcggcggacggggagggcggcggagttctggccgtggccgtacgacggcgagtactacccgttcgcgatccagtacctggaggacgacacctacatggcgacgcacaagtactacgtccacggctacaacgccccggtgatcggctcctaccccaaccacgccttcacccacatcgtcgacgaccacgccctcgccttcttccacgacgacaacgtccacgcctgctccatcatgtga

SEQ ID NO: 12264 - DNA, 537 bp, Oryza sativa
  Clone ID: PAT_MRT4530_18408C.1
atgaagcaagcacagctgcacaggtgtaacaccccagtccaagggtgctactcccaccccatgccgatcaatgtcattaggtacctaaaaaccaaatcaaacataagacaacaagcagcagcaacagtcagcagcagcagcaaccctagcagcagcagtcgcatggtactagtagcagcagcagcaagcaaaaatcagaccgcggcagcaacagccagccgcagatcacagcagccgcagcaacaagccatcaaatcggaaacgatagaaggagcagcagcaggaactcaccgggaagaagcaaaacggaaaggaaacaccgattttgtgatggatgacgacggctgtggcctcccgctatggccgtggtggcggtgcaaagacggcggcggcaaccggaacaacggtggcggcggccagaccgcaggagcggttagggctggctgtagcgatccccctgctgttgggaccacctatatatttgtcgataaattttctcctaaaaatttgacagatgtaattatagtacaatcgtag

SEQ ID NO: 12265 - DNA, 156 bp, Oryza sativa
  Clone ID: PAT_MRT4530_18409C.1
atggagtacggtcacctggcatcggctgcacaggaggtgaaggaggaggagggggctgaaaaagacaatgagccggagcagcaggagttgaaggacttgatcgacatcttccttgatctcttcctcgtcaatagcttactctatggatggatctaa

SEQ ID NO: 12266 - DNA, 828 bp, Oryza sativa
  Clone ID: PAT_MRT4530_1840C.1
ctataggaggatggcgctcttcctggctgtggaaccatggagagggaagtaggaggtactaatcctcagcccatcttgggtcgcatggttgcgatcgaagattatgttctctgcggttttctccctcctccttctgaatttcttctcctggttttgaatttctatggtctttctcttctccatttgaaccccaattccatcgccttccttagcatctttgtgcatctttgcgaggcctacatcggggtagagcctttccttgatcttttttgcttttactacgaactgcgttggatggaatccaacagggtatctggttgcgttgggttccgacttcgggatggcctgaagttgcgttacattcccttccagtgcccttcttctcgcagcaagtggaggaataggtggttttatcttgagatcaaggactcgaaccctgtcttcgtggttcccgaagatcaaccggacaagattccgtcttggaccgccaagccccccttgaccccctctcttcagtcgtttctcgacatcatcgacgatctctgagtacagggtttgtcgggatatgaagtcgttgcagacttcgttggtaggcggatctagccgcttcaggctcgggcccatccagcttataactattccgggccagaggacgcgacccgggtttctcctcggggtatctttctcgcattcatcttgacatacttgtgtccgcattcctcttgacttatcgaaggttggttctcgattaacaggtctgagcggcgaaaacgtggagcgccgcgtcggccaagtgatgatcagcggcccgactacggcgagtgacat

SEQ ID NO: 12267 - DNA, 454 bp, Oryza sativa
  Clone ID: PAT_MRT4530_18410C.1
attcgagctcggcaccctttctccctatcgccttcaccgcctttacccaggtcgtgccactcctgtccgccgttttccgaagtgctgccgtcgctcatcccctcccgctccggtcgccgcccctccggtgaggactccctccccctcccttttctccccttcccgcgtgcgccgccgcctttggccgtgccaccgctctggccgtccgccgtcgcctttctcgccatccgccgccgcctccctccgccggtcgtcgccgtcggcagccgcgcgcgccgccgccgcttgccatggccggtcggtcggctttgtgccgagccgagccgtgcctagccgccgcccgcgccgtccgatcggcctcgggccgatccggaccgtcggtcccgtggaccagcggtggaccacctgcgtggtcccggtccacggtagaccggccaccttgtgccgctgctag

SEQ ID NO: 12268 - DNA, 281 bp, Oryza sativa
  Clone ID: PAT_MRT4530_18411C.1
gtctacacacattcggctgggtggtggtcttggtgttctgttgctgctgccgcggctgccgcttgttggagtgaggagagtgggtgagtgatggggagggggagcctggcttgactgttcggaggctcggaggcggaggctcgtgctggacggcgacgcgcactgtgctgtgaccgtacgacacgaaggcggtactcgtcaacggtcacaggaggattgttttatccggatgcatacattacccgaagagtacacctcaaatgtggcaccgtctaatagat

SEQ ID NO: 12269 - DNA, 297 bp, Oryza sativa
  Clone ID: PAT_MRT4530_18412C.1
atgaagtgccaggggaagcaagaagcaatcaattgtagatccatcttccaccatcggtcaattcctgctttggtgaagaaatggaagaagaggctcaacgagagcaccatggatcctactgagggcgtcgggcaggctggcagccgagaggaagggcgccagggaggaggccgccgggtagccaggtggctagtagggcaggaggccgccagggaggaggttgccggccagggagatgattcgccggggaggagtgcggcgaggaaggagttggccagtcggagaggacggcgctga

SEQ ID NO: 12270 - DNA, 1694 bp, Oryza sativa
  Clone ID: PAT_MRT4530_18413C.1
tcaccaccggagctccgattccctcgcgccgccggtgagcttgccattgtttccatctccagccatttctcctcgccgtgccgcggctcctctcttctccctaaccccttcactgccttttcccaggtcgcgccgctcccgtccgccgttttccgaagtgctgccaccgctcattccctcccgctccggtcgccgtccctccggtgaggactccctccccctcccttttctccccttcccgcgtgcgccgccgcctttggccgtgccaccgcctttggccgtgtcgccgctccggccgtccgccgcagcctttcgcgccgtccgccgccgcctttcgcgccgtccgccgccgcctccctccgccagtcgtcgccatcggcagccgcgcgcaccgccgccgctcgccatggccggtcggtcggctttgtgccgagccgagccgtgcctagccgccgcccgtgccgtccgatcggcctcgggccaatccggaccgtcggtcccgtggaccggaggtgaaccacccgccgccggccgcctgtgccgcctcgcctgtgcaccggccgacatcgccaccacctccctcggctctgcaatgccgcccccttcaccggcctcaccgtcccctcgcccgaattttgccggaacgccgtcgtccccgccgcccctccctcggtctcatcggcacccactccggtagccccttccgccgtgctagtgcgccggccgacgtcgccgtctccaccttcggcatcgcagcggcgtctcctccggttagccgttcctctccatcgtctcatcgtcctgcggcgccgcctctgtcgtcggcatcggagcggcgcatttcatgccgtcctcgccttcatgcagctgctgccggctgccctcgtcgcctcctcgctggccccgatcgttgtcgtcctctcgtcgttcctgctcgtggtgacgttcgtccctccgtcaagccgttcttgtccgtcgtctgtgttccgtcaagtgagccgctgcagccccgtcgtcgtcttcgtcctcggctccgcgtcgtcaagccctgtgccggccgcgtctcgcccgtgtaccggtgttggtagtcgttcgtgtgtgcgtgtggtaaccgtgtttgtgtgcctgctcggtagccgcgtggtttccacgtgtgcagcccgcatggtgtctagtggagtccgtttgtcggccactcatctcggttgacacacggggtccgcttccctcgacccgtggaccgtttctgtgtacctggttttctttttatgtattgttattgcttctttataggcttgtagctttgcttgtgtgcttcgcgtagcttctgtcgttccagaggttcccgaaacgtggttcgcggtcgtcgccaaaggttcggaaggccgttcaccccttctcctcaattcaaaacccccaaaatggttttaggctaggctcgaggtgcatggttttgatagtagcacctcggccactataaggaccggtcttcgggcctctgttgcaaagcactaccgtacttccacatgtctagtgggtaaggcttagtttgtggctcagtctggtcatgggcaaaagtacacggatagggatggacgaagtcggggctcgatggacttctcccggcttttcctgggacggggattaatacactagcgttctggaaaaggtatttttttcgggtgcgacaaccg

SEQ ID NO: 12271 - DNA, 330 bp, Oryza sativa
  Clone ID: PAT_MRT4530_18414C.1
atggaggtgaaggcggagacggtcccaacaccgttcgcccttccacctccaaatcggtctacccgaggtcagggatcaccggatctgaccgtccttgacctcgcagcggtcagatccggtggggacagatggtggcgcttgggaggtggaggtggatgcaacgacggtgctcaggaggtcaaatcttatcagaaatgcgagactggtgggcggcggatctgccggctggggaggcttgagggcgcggaggtggctgagttttggcagccgcctcacaaagttgccgccaccgcctgcttcctcgacatcgccactagcgggagatgttaa

SEQ ID NO: 12272 - DNA, 248 bp, Oryza sativa
  Clone ID: PAT_MRT4530_18415C.1
gcgcttgtgcggaacacacaagccaggctgagcacacaatgcacactgtggtgggagctgagcacaggatagacacactgagggcgttgtgctgctgactggatgatggtgaacatgggatgcacaatgtgctgtgctgtgatgatggtgaaatgacaagtggaaacacttgcaaacttggttggaattgccaaaatgctgaatcatccctgatgctgtttgaagtgggttgaaaaaaaaaaaaaaaa

SEQ ID NO: 12273 - DNA, 435 bp, Oryza sativa
  Clone ID: PAT_MRT4530_18416C.1
atgtcgcgctgctcgccgttcttctcgtaccaccaccacccgcaccactcggcggctggcatcgagacgtcggcgacggcggtgccccacggcgaggcggaaccactcgaggagagggaggagggagagcacgccgccgaggaggtcgcctcacgccgtcacccctcctacgcggccgtccaccgagcggagaagcgccatgatccaatcgccgccgccactgccaccgcttcccctcgtcctccctctgccacgagccaccgccgccctcgcccgcccgccctcccgccgccgccggctccccactgccacaaggcacccaccgctgcggtggagctcagcccgggcgccaccgcggcacctctgccgctcgctgcggtctccgcccgccgcgagacagagagagagggagcggcgaggaaagagaagaattga

SEQ ID NO: 12274 - DNA, 2310 bp, Oryza sativa
  Clone ID: PAT_MRT4530_18417C.1
atggcgtctcacatcattctgccgaaggaggaggaggcggcgctgggcgtggcggtggaggaggaccacgactcgccggcggcgccagggtaccagcatcagcaggggccgccggtggcgaaggcgctgccattctcggccacgtgcgtgcggatctcccgcgactcgtacccaaacctccgcgccctccggaacgcctccgccatgagcctccccgacgacgacgccgcctacgccaagctcgaggagggcgactacggctacctcctcgatgacgtcccgcacttcacggactacctctccgatctccccacttttcctaatccactgcaagatcatccagcctattcgaccgtcaagcagtattttgtcaatgcagatgatactgtacctgaaaaggtggttgttcagaaggacagtcccagaggagttcacttccgtcgtgctgggcctcgtcagagggtgtacttcgagtcagaagatgtcaaagcatgcattgtaacctgcggaggcctttgccctgggctaaatacggtcattagagagttggtgtgcggcttgtcccacatgtacaatgtcaatgatatcttcggcatacagaatggatacaagggattctattcgagtaattatcttcctatgacacctaaaagtgtcaatgatatccacaaaagaggtggcacagttctgggaacatcacggggtggtcatgacaccaaaaaaattgttgacaacattcaagatcgtggtattaatcaggtatacatcattggaggggatggaactcagaagggagcatatgaaatatataaggaaattcgtagacgtggtctaaaagttgctgttgctggtgttcccaagacaattgataatgatatagcggttatagacaagtcctttggttttgatagtgctgtagaagaggcccagcgtgccattgatgcagctcatgttgaggcttcaagtgctgagaatggaataggcttagttaaactgatgggtcgctatagtgggtttattgcaatgtatgctactcttgcaagcagagacgtggactgctgcttaattcctgagtcaccattttatttggaaggggagggtggactgtttgagtacatagagaagaggttgaaagagaacaaccacatggttattgttgtagctgagggagcaggacaggatcttattgccaaaagtatagctgcagcagatcaaatagatgcatctggaaataagctacttcttgatgttggtctttggctgactcacaagattaaggattactgcaagaacaaaaagatggagatgactattaagtatatagatccaacctacatgatccgtgcaattccaagcaatgcatcagacaatgtctactgcacactgctggcgcacagtgccattcatggggcaatggctggatatagcttcacagttggaatggtcaatggcaggcatgcatacattccatttcacagggtaacatcaacaagaaacaaggttaagataaccgacaggatgtgggcaaggctgttgtcctcgaccaaccagcccagcttcctgagccagaaggacatcgatgccgcaagagaggctgataagctagccagcaaatcgcctgtgccagttaacaccaaggagcacggagagaatgtaaagaagccggcaaatggagaaggctccagcgacgccgtcgtccaagagccgttcgccaccacgcctacttcgccggctgccctcgccgccggcgccgtgtcgaatccggcgctaacaccagcagcagtgtccatgtccttctacgacgtgaacgctggcgagcagccgagccgagaggacgaagccccggaggaggtggtagaggccgctgtggcgaacggagcaccgacggccgtggagaagcataataagctgtactctcccgcagaaacgccggcggggagtgggacgcggccgcacccaaccgcggacgccgtcgccgagacggcgggggcggcgcccgatgacgtcgacgggtgcacgacgccgccgccgccgccggtgcacgactcggaggggtccgacacgcagagcgcggacgatcacggcagcccacagagggagaagccaaggacgacatcgacggccgggggcgtgaagcgggacgtggctccctcctggtcgtcgaggctgctcgcgttccggtcgttctcgcgggacaagaaggcgaaggcaaccgtggacgcgcggccgccggcgcacggcaaggcgcgggatgagggcgatgagcacaaggagaagggcaaggagaggcggaaacggttttggaagtga

SEQ ID NO: 12275 - DNA, 132 bp, Oryza sativa
  Clone ID: PAT_MRT4530_18418C.1
atgacgactcaatggcgggaagctatccttgggatcacaatagatagtggacagaaccaggttggagatgaagctttggaggatccttacgcgtactaccaggagggtgatgaagacgaaggcgcccagtag

SEQ ID NO: 12276 - DNA, 1829 bp, Oryza sativa
  Clone ID: PAT_MRT4530_18419C.1
tgttcccagctgaaaaactagtaaacccccctgtccaactgctccacctcccacttccaccagtccaccaccctgcggcatacggcgcgtcacgagcatcggcggcggaagcgtcgccgtcgttgttgccttgcctcgcgacgccgctcccgtccctctcactctcccgtggaccgtgcgcgctctagctcgtgccttcttgcggagtttgcagtgcgcgcgtttcgtttgcccgcaacagcaaggcgaggggggagagagcaaggatggcgagggcggaggcggcggcggcgctggagttcacgccgacgtggatcgtcgcggcgatctgctccctcatcgtgctcatctccctcgccgccgagaggtgcctccattacctcggcaagacgctcaagagaaagaaccagaaggcgctattcgaggctctcctcaaggtgaaagaagagctgatgcttctggggttcatctccctgctgctgacggtgtcccaagggattcttcagaagacatgcgttcctcccaagtggaccaactacttgcttccatgtcgaaagatggaggaccagtccaaacaacgcggcccgtcagaagctcatttcgttgctgccggagttcttggccacctcggtcggcggctgcttgccgatggtggaacaggggccgaccattgccagaacaagggaaaggttcctttgctgtcacttgaagcactccatcagttgcatattttcatttttgttctggccatcacacatgtgattttcagtgctctgactatgcttcttggaggagcgaaggcatatgattcatattcatcatggttatatttttttcaaaattttattgagcagattcatcaatggaaacactgggaaaatgacatccagaaagatgttgctcaaaatgcgcccaagaaggtgacccatgtgcatcaatttgaatttatcagggaacgctttaagggtattggcaaagattccataatactaagctggctgcattcttttgttaagcagttttctgggtcagttactaaatcagactacataacaatgcgacttggatttatccagacacattgccgtgcgaacccaaagttcgatttccacagatacatggtacgagctttggaagcagattttaagaaagtggttggtataagctggtacttgtggatattcgttatgatattcctgctgctgaatgttaatggttggcacacatacttttggatctccttcgttccccttctacttttgctggccgttggcaccaagctagaacatgtcataacccaactagcccatgaggttgccgagaagcactctgcaattgagggcgacttggttgtgaatccatcagacgagcacttttggtttggacggccgaaggtgatcctatacctgatccattttatcctcttccaaaacgcgttcgagatcgcgttcttcttctggattctgaccacctacggtttcaactcctgcatcatggaccacgtcccttttatcctgacaaggcttatcatcggggccatcgttcaaatcctctgcagctacagtaccttgcctatatatgcaattgtcacacagatgggctcctttttcaagaaggagatcttcgacgagcatgtgcagcagggccttgttggttgggcgcagaaggccaagaagaggaaagggttgaaggagagcaacggcgccatggctggagctggatcaacaaatgggtcatcacagccatcttccattctacaaatggtgaggcgagccgccgctagcgaggaaggcagcagcaatggcggtgacatgcgcactaatcagtag

SEQ ID NO: 12277 - DNA, 1623 bp, Oryza sativa
  Clone ID: PAT_MRT4530_1841C.1
atggagagtgaagcaggaggtactaatcctcagcccatcttgggtcgcatggttgcgatcgaagattatgttctctgcggttttctccctcctccttccgaatttcttctcctggttttgaatttctatggtctttctcttctccatttgaaccccaattccatcgccttccttagcatctttgtgcatctttgcgaggcgtacatcggggtagagcctttccttgatctttttcgcttttactacgaactgcgttggatggaatccaacagggtatctggttgcgtcgggttccgacttcgggatggcctgaagtcgcgttacattcccttccagtgcccttcttctcgcagcaagtggaggaataggtggttttatcttgagatcaaggactcgaaccctgtcttcgtggttcccggagatcaaccggacaagattccgtcttggaccgccaagccccccttgaccccctctcttcagtcgtttattgacatcatcgacgatctccgagatggttctcgattaacaggtctgagcggcgaaaccgtggagcgtcgcgtcggccaagtgatgatcagcgacccgaccacggcgagtgacatccctgtgcccctttgtgaaaagggggcagcagaacgtgatgaagccatcaacgcccttcctttgactgatatcatcggaccgctcacggaccatcaggtggcgtcatctctgaaagtgaaggtcgtcaaggaggtatctgatgctgccaccactagcggtggcaatgttccaacaaagccgaggaaattctcgtctgcctcagatgcgtctcccccacctccacgacgacaacgcattgtgacgatcggcgagaaggaggcgcgggcaaaggctgcgcaagccaagtccggaggagcttccagtgcgtcgcccgtcgtggcctcgacggatgtcgtgcccgcagccgggagccgggaggcgacgcctagtggccccgtcagcgaccccgcggcaggtcgtgatctaccagttgcagtcctcacctgggaggagctccaagtcgagatggggcgcctcctcgaagccggtgctcgcagcatcggccgcgaaattgcggaggcgaggtcggaagcggcgacggtgaacgtgcgtgctgacagactggtgcgcgagttggctgaagcccgtgaagacctcacgaagatgagggagttggcggctggcaacgagcgacaacggaaggggcttgaggaccgaatgtcggaactcgggaacaacctatctgagatctggggctcgttgagggtcacctacaccggccttcaccagctcgctggggaatgcggcgtcacgtccacgatcccggcgaatcccgatgagttttcgctgacctcctctctcgcggaactggcgacggcaatgggggaaatcccctccaagcatgcggccaggattgcggaggagacgtcaaacggaatctacaccggggcgtgtcatgtcctcgcgtgtgtaaggctgtcgcgtcctgaactcgatctgcgcgagatcttggaccagggggcggccagcgacatgcgtaaggaggtgatggaagaagtcggtgatctgggggagtctgttctccccctttttgaagagtag

SEQ ID NO: 12278 - DNA, 210 bp, Oryza sativa
  Clone ID: PAT_MRT4530_18420C.1
gttcaatgctcgagcaacatcaaacaggcctcctttgcactcagttgcgggactgtgctgatgtcagagcatctacgctcaagcaatgcaacatcgtatatagcaggaaagaatgctctgcggtgtccaatgatattctggcggacagtcgcgtcgcgccgccaccaaaccccagggacggtggtggaggcgtggagccacctggagaac

SEQ ID NO: 12279 - DNA, 174 bp, Oryza sativa
  Clone ID: PAT_MRT4530_18421C.1
atggtggaggagccatgcacctcggccttggctgctagggtgggagtagtggattcgggcctctgcgatgatgatgatgatggtagctgtgacaatgacggaatgtggatttgtggaatatgtggatttgggattctgagggagattttaaaatgggaacatgaatttggatag

SEQ ID NO: 12280 - DNA, 360 bp, Oryza sativa
  Clone ID: PAT_MRT4530_18422C.1
atggggagcgtgcataaaaaactcacggtcaactgcgtctatctcctcggcaacgcggcggcaagcggtgctgagcagcggccggcgaagcggaatggagcggaggcgcggagcgccggtggcggcaggcgggtgagcacggtggccagcgtcctcctcctcctcctccatcgccgcatcgacggtgtgtgccctgcttctcccggtggtcgtcggcgtcctcctcggctcctcctcctccgccgccgcatccgccgcgtcaccggcaccggcatcctctggccggcggagctcgccgctccgttcaactcgcacgcgatgctcagctcctccacgagctactccgccgtttgcccatga

SEQ ID NO: 12281 - DNA, 524 bp, Oryza sativa
  Clone ID: PAT_MRT4530_18423C.1
aaggaaggaaaaagaaactaaaatatgcagaaaggaaaaaaaaaagacaatagtaaatagttagtttaaacctaaacatatcaatagtacattaaaagtaagtgaattaagtgctcttataaaaaacaaaaattctcaggtggagcataaaaaccaacccaaatatatgctgtttcaacgagaaatgatttaaatataaggacacaggatacattaaagaaaaaagatggaaaatatactatgcaaacactaaccaaaagaaagttagctttgtaatagtaatattagatgaaattgactttaagggaaaaaaggataaagagtaatactgtgtaattatgaaatttagttcagtgggaaaatgtagaaattctaaatgtaactgcatttaatcatgtagcctcaatataattaaagcaaaaatggataaaactaaagggaaaacatgaataaacatattaagagattttaacatacctctctcagtaactataagaataaacatacattttgaggagtgaata

SEQ ID NO: 12282 - DNA, 711 bp, Oryza sativa
  Clone ID: PAT_MRT4530_18424C.1
atgtcggccccacgcggtgccaagcagggaaggagaggagaggatggcgggctcactaatgaggactctacggcgaggagaagacggaggtggccggcgacggcaaacccgatggcaaactgcaacctgagaagcttcggcgccggtgggccccacctgtcggtgcgggaggggctgccctgggctagctgggcgaggcggcccaaggcggagatcaattccaaattgatgaccctaaccctccccctcccccttcccccagctgagccggccaccaccctgcgcccaacgcctcctctccccctccctctctccccaccggcgccgcttcccctcccctcccctccggcggtgccgctccctctccccatctcccgcttctccccctcccccaagctggccgcctcccccaccaccggcgccgtctctcccaccaccgatgctgcttcccttcccttctccctcccttctcgccggcatggcgcggcgacgacagggtgcggcggagacggcgccctcccaacggcggcgacgacggcgttggcgttcgcgctccgtctcccgctctccttcccgtctcaccggcacggcgcagcgacggcgggcgtgaaggctggcaacgacctcaacttctccggatctggtggtttcgccatcgatctagtgccggacctgaagaagctgaagaaagaggtcaagatggatatgtaa

SEQ ID NO: 12283 - DNA, 1035 bp, Oryza sativa
  Clone ID: PAT_MRT4530_18425C.1
atggcgagggccgtggcgtccggcagcagcggcggcggaggcggccagccgttcgaccccacggcggaggatatcgtcaaccggtacctgccgttgcgccgggcgctgcggtgcgacgcgctgccgaggcaggtgcacgacgcggatgtgtacggcgcgcacccggcgctgctcgcgtcggtgtacccggcggcgaacgagcggttcgagtggttcttcttcgtgtgccgccgtcagtgccccggtggccggcgcagggccgggcccggggactaccgcctctcgcaggaggcgaagcaccgcggcaacgcgttctgccacagcttccggtactacgagtacgaggacgccggcggcggcttcagggagaccgagtggcgcatggtggagtacggcgatcgcggccgcgacgccggcgccggaggctccgagggcttcgagctggtcgtctgcaaggtctacccggcgcgcggcggggcgctccacgagcggctcggggccgaccgggcggtgctcgcgacgcgccaccgcgccgacgaggacgccaagccgcaggtgctcgtccagctctacctcgccagcctccgcctcgggaacccgctcgcgtgccgcgtgcaccgcgccgacgacgtcttcgacgcgcacccggcggtgatcacggccgcgctccctgctgccaacgaccggtgcgagtggttcttcgccgccgtgcgcccgcgcgggcacgcgcaagggcacggggacggcgcgccgccgcgcccgcggaaggccgggccaggggcgtacgtgccggtgcgcgagtgccgcgtcgtggacgggaggcgcggggacatgggctgccgcctcgtgttctggtacagggaggacgacgaggaggcgaggcgggcgtcgcggaggacggagtggtggatggacgagtacaggttcggcccggacttcccgtacggcgagctgcccgcgcccatggcgcgcggcgaagacgaagagctggtggtgtacaaggtgtatcctaggctggtcggtaaccggcgataa

SEQ ID NO: 12284 - DNA, 513 bp, Oryza sativa
  Clone ID: PAT_MRT4530_18426C.1
agccctatgccatcctttgttatcctacgaggatgcctgttggtatttcttacgaccacagataaatccgcaagcgcacggaatactgctgtagcacttcactttcgggtgaccccaaaaggatatcgaactcagggaatgattactaggacgggattcagggctgtcaccacctgccgtctacctctgacaaatccatgggatacacaacaaacaaagaagaagttctccgaccccagagcagagtgtatcaaaagctccggtactcctccagaattcctcctacgaagctacactcatcgaggtagaagtcagataagtgccaaacttccgggcactcctccaaagctccccctcactctctaccttattctaatgtataaaagatacaatagagtctcttgtaattcagctcaaagttgtgtgtattggaatgagatgaagatctccttatataggctccaaatgacggttaggggtatgggaaatggccaaaacaccctgcaactgcca

SEQ ID NO: 12285 - DNA, 481 bp, Oryza sativa
  Clone ID: PAT_MRT4530_18427C.1
cacacacaaaatatacatacaaaaaaacagagtccaggtttaccaggttcacgcaagaaaacaatatcgcatacgagtcaggttggttcgcccacaccttttcctgctcctgtttgcgcagcccaagtcaggagttagattctatcccgattctatcccgagtcagattctatcccgcttttgtttccgctatatttagctagcactcccactaacgtgattttatagatttttctcgcaggacaaaatacacaaatatgattacaggcaatacaaataatagaagcgcacaagaagatatagatcacaaggctcttcttcctctaggatgtcaagccacctccaattaatgtcgattccaggttatcaatgaactcaacccttatgtccgctctgcttttattcttatttattggcagtaattaccggaatatttttggcaatcatctcgattctatacctccaacccatcaaagggtga

SEQ ID NO: 12286 - DNA, 781 bp, Oryza sativa
  Clone ID: PAT_MRT4530_18428C.1
cggacgcgtgggcggacgcgtgggctcgtcgcaacagctacaaacgcccacatcacacgcagaaatccgcatcaacagccagccatggcgtccacgctgaccaacgtcggcctgtctaccccggcggcggcggcgtcgtccctcgttaggccggtcgccggagctggacgcgtggtgtttccccgtgttggccgcggcgggttcgcggcggtgagggcgagcgggccggcgacgccgccggacatctcggacaagatgtcggagagcatcgacaaggcgaaggaggcgtgcgcggaggacacggcgagcggcgagtgcgcggcggcgtgggacgaggtggaggagctgagcgcggcggcgagccacgcgcgcgacaagctcaaggagacctccgacccgctcgaggcctactgcaaggacaacccggagaccgacgagtgccgcacctacgacaactgattcttaccattatatgtttgctaatctctctgtaattaattataagttactgggttgaaaagattatttgtcgtagaagacagaggggagtttggtggaatggtggtatttacggatagttcaagggggaaatgggaaaaaaaaggttttttacacttgtttgtctggatgaatttgtatggaacttttctgcttgataattttcgcatgtgttagtatttgtatatgatgatataagtgggaaataaatcatcaaattttccagcaggaactttgtggaaacttttttttaattttttcgtcaatcagtgcgctttggctc

SEQ ID NO: 12287 - DNA, 237 bp, Oryza sativa
  Clone ID: PAT_MRT4530_18429C.1
atgacaatgcatcaacaaaacatgaacctccatgagcaaagcaatgccaagaaaacaagaaccggcacgaagaaacccaagaagcgaatggatccaacgatgaagagcatatacaaggacctccagcagacaatggatgcggacaccggtaacgtgtgcactacatatctaaccaaaaagaactttcattgtaacaggtttagcaatctcaagaagctcatggttctgattcagtga

SEQ ID NO: 12288 - DNA, 648 bp, Oryza sativa
  unsure (1)..(648): unsure at all n locations
  Clone ID: PAT_MRT4530_1842C.1
aattgtaatacgactcactatagggcgaattgggtaccgggccccccctcgagttttttttttttttttntttgtacaacacacaagatgttgattattatttatcatctttttaaacataataataggatatgatcttaccaacctggttgcaagcactaagcggcctgtgtcctcttctcagcttcctcgggancatcatagancaatcacacccttctgatgagtggctgtcagcaantttttccctctgcttctctcccctcncccntcggtgaacanangatgtngtggctggcgggctaggggctaaccgaggccngggcgggcggggacggnagctgctgctggcngntggcnccgtgggcgangatccnncgcgggtccgacccagcncnggcngcccngntcccgggangaggtgcnncnnctccagaacaggctgnccgtnagttacggntccgctgttntagcngttntatnctangggggggctccnttntcnaacnagatatctgaggctttannttccgttnnaanaagangttgnanngggctgcncccgtncgangcgttgtnccgangnatttnncctcggaantctctctnattatttaactgncaccngggncnggtcgnnctcctntt

SEQ ID NO: 12289 - DNA, 414 bp, Oryza sativa
  Clone ID: PAT_MRT4530_18430C.1
atgcggagacaaagagttctctcgagaaggcgctgccagtgggcccgagctaccacctgcgtgattggccccggaccccaccagccagtggatgtcggccaaccacgtgtaacacagctcagactccgtcccgaccgatccgatcggcacggcaccagatccagcccttcggaccccgggaattctggcttctcgaacccgatctgggtccagccggtcatcgacacgtgcagggttgggcacgaacgaattgatttttccacggtgacccgccgcccggcgagtctcgtgcgggtccatttaactctgcccagcgtctggctccgtttgattgcgatcagacgggccgtgccgtcgcggcgcaccggctggctccaccgcgcggacctgacatggcctgacaccatctcatga

SEQ ID NO: 12290 - DNA, 1203 bp, Oryza sativa
  Clone ID: PAT_MRT4530_18431C.1
atgtccgaggcggtagatgaacagatatcggcggggaagcaggcgaagcacaagcactggtggacgaggaaccggaaatggatgatcatggcttgcgtgccgcacgtcgtccgcggcgaccgtccgcggggctttgattgcgggatcaagctgaaaattcctccgcgcgccacccgactcgccgtgcaccggagcatcgcgccgcgccgcaagaccatcgacgaccacccctacttcgtcgccagcaccgatcaccatggccgcctcctcctatgcgccagccaggggcccgaaccggagcctcccgtcctcgacgccttctaccgtgggccgctcggcgtgcaccacggcttccccatggcgtacttcatctgcgacacgcgcacccggaggtgcacccgcctccccgaccgccgcctccccatcctccaccccgggaacgtttgcctcgtcggcactgcgagcggcgggttcatcgtcaccgatctccaccctacgcccggggaccaacaggctatcctgttcatgtacaactcggcttctggagtctggaaggaccgtgtggtcaactaccctccgcgcgatcgtccctggggcggcaacggcgtcgtcgtgcaccagatgatgatctggtgggtggatctctcctacggcctcctcgcggacctcgccttcgaccaactccgccgcgtcgtccccggcatccatcacgatctgcgcttcatcccgctccccgatggctgcgagcttccaccgggcacggcggacctcgacaagtgccgctgcgtggggctgaggcgcgacgatctgcgttacgtgcagatccacaagcgcgacggcgacccggcggtcagcatgtggacgctcgatcagcttgccgggacttggagcttcgactgcgaggcgagcttcaaggcgatctggaacgacgagggctacagggcgaccaagctgccgccggaggtccccacggtggcgctcatccacccggagcaccccggcgaggtggcctacttcttcctgcactcgcgggtgttcggcgtcgacctgcgcgcgtgcagtgtcctggagtgcgagttcttcgcgatgctgaatccgccgatgcgttaccactcgtcccgattcgtgcgtgcctggcgtctcccagtctcaaattctgccgatctatccgtgcccgtgcgcgcatttttcgccgtggcgtag

SEQ ID NO: 12291 - DNA, 319 bp, Oryza sativa
  Clone ID: PAT_MRT4530_18432C.1
gggaaaaaagccaacacccccaattcaaaatgccccccaagggaaaaatccaaaaaagggaccaaaaactgaccccaaaaaacggtttcaaatccctaaaaaaatggaaggggggaaaaaaactaaccctttcccaaaaatttttgggctttgcaaacaccccctttttcaaaaacaaaaaaagggactaaaaaagggaaaaaaaaatggaccccaaaaaaaaatttcaaacccaatcaacctttgggggcccctgaaaaccccccaccaattaaaggagggggactaccccacccaaatccggccggggggggggccc

SEQ ID NO: 12292 - DNA, 380 bp, Oryza sativa
  Clone ID: PAT_MRT4530_18433C.1
tttttgtggttttttatttttttttgtttttttttttgttgtttattgttaattttattacaatttacaacatgaaatgtacttgcatagcgtaaacatggacattgaaaaaaacgctgtttatgaccagctaaaagccagtcaaacgcaaaccaccacagttactacagggctaacaaaaaactgatcatgccataaggggtatagcaaaaggctgtatcagatgcatttagatggtcgctaaaatgtaacaagcgtcggcaaactggaggttgttctagcatattgcaaaaaatggacaaaacaagaattaaagaaactagctggccctaaaaaaccatttgaaaacatgcaagctggatctagctgcccttttctga

SEQ ID NO: 12293 - DNA, 307 bp, Oryza sativa
  unsure (1)..(307): unsure at all n locations
  Clone ID: PAT_MRT4530_18434C.1
ggcnttcggcacgagccatgaccttatcttctcactctcgctctctcggcgactgcaaccggtggcaagcagtggcccacaccggatcaggaggcatagcagtggcccacgcccctcggcaacggcggatccgacggtggggccgtaggctanaggtgcaatggcatcggaggccagcgaatccacctcttcccctccctcttgtgattccttattgttgatgtttattcatgtttgatttctcanatttgatctanatctgttgtttttttttaaggattattgattatagtttatgtnttcatga

SEQ ID NO: 12294 - DNA, 153 bp, Oryza sativa
  Clone ID: PAT_MRT4530_18435C.1
atggtgatcactattttaaaagggtgcgtcagaaccgaggcggatttggaggaaatcaataatcatggaaacagaacccgcatcagctatgggttgcatcggctgtcgtctgcatcggctggtactgaacctgatagggagaagccaatgtag

SEQ ID NO: 12295 - DNA, 246 bp, Oryza sativa
  Clone ID: PAT_MRT4530_18436C.1
atggggaaaaggagcgcggcgggcttacctaagggcatggtggccggcggcgacctccgtgtcgccaccgacgcaataagaggcgagcgcgcgcccgaggacttgggcaccgtcgagcaacgctcgacggggatgcgcgccagctatggcggcacgcagccccggcgagcaaggctcggcggcgccatctccaccccgtcgtgcgccgcttcgccgtcgtctcgctcaccgtcgccgcgggcgtga

SEQ ID NO: 12296 - DNA, 834 bp, Oryza sativa
  Clone ID: PAT_MRT4530_18437C.1
gagggaaagcttgtccatgcagctattttgctccttgcagctcaacggaaaattcgtacatgtgcttcctctaagagaaacaccaaccataacctgagtgggtttgatattatcaaggatcgtattacgggatccatcatttccatagaaacagaagggcctggactaacaggtggtaaaaatagcaaggcacgtaaacagcaggatgatatgcgaatgttttttcgtaatgcattggtgcttaattctatgatttctgaagctggtgaagctcttgatgaatatatccagactcattcagaggtatctcaccggggtgtccttggaaatatttcatcaattctcaaggatcatggcgttgctcctactggaaaaggaattaacataggagacctgaaatgctgtccctatgactgcgaagagtcagatagtgtgctaaagtgcaaacatgaagattctggcatgaccaaggcatctggagaatcgcctaatcggaatgttgaagctaaaaatgctgttggaaataaattaccaagtagacaagaacttgaacaaacaaggaatatgttcttcccatattggagatcagtgttaacatctcgctttactgtaaaactcttcccatcctatgcgcccatggatgactgtcagccatctcttccaaagctttatatggccggtggttctggaaataaactgaaggataaagggtcttttccagttgatgttggtttgttgggaaaaaccccacaactaacaagcatccatcagtccagaaggctatttggcactgctgcatttacactactgaagatgttaaagaagcgtgcatga

SEQ ID NO: 12297 - DNA, 152 bp, Oryza sativa
  Clone ID: PAT_MRT4530_18438C.1
acgaggagtgatactacttcaacatcagaaaatttctagctactgcagggcaacgctggtgccaagcatcagctacccgccgcaaacgcctctggatctcgcatcccaccacgtcgaggcaggggtcggttaggcctggcaaaacattgaca

SEQ ID NO: 12298 - DNA, 1274 bp, Oryza sativa
  Clone ID: PAT_MRT4530_18439C.1
aacagtagcagctaccgcgaggtttgcatccaaagcacggcgatctcatcccagcaacgtacaccgcgcgccgtgacacgcacaagccttctccgcgtacgtctgcccgcgcgcgcgcgcaagctggcaatggccgacgacgtcgtcgaagccgcggcgtcgtcctctcccagtacgcaaggcggcggcggcggcggcatccatgtcgtcgcgaagaacgcgatgaacagcagcaagcagttctcctcggccctcgcgcccgtggccgtgctgctcgccgtcgccgtcggggccgtctccctgctgccatcgctggcgcaggcggtgtgggaggtgccccacctcttcctcctcggcctcgtcgtctcctatggcgtcttcgcccagaagatttccaccggtggcagcggcggaggcggcggcggcggcggtggagatgatggcgccagggcgtggaactctcggtacctcagcgacgaccccctcgtcgtggtcgccgacaatgcggcgagtgacgacggcggcggcggcggcgcgagcgggaggccgctttccttgccggtgcggaggctgaagccgccgccaccggcgccgacgatgccggggatagagtccgaagccggcgatgccagcgacgacggcattggcgcagagacggacagctccgcatcgacggcgggattctggggcgccgccccttcgccgccctctgttcttgacgccgtctgcaggtcccggaaacccgctgctactgcgacggcggcggcgccgtccgccatgtcgaagggcttcccgagctacatttctccggcgcctcgttgcgaccagtcgttcagcgacgacggcgaggtcaccgactgggacgacgacgacgacgagaaggctgacgtgcaggacgagatggccgcgtcgccgcaaaggtcgtacgtcgaccatgacgactacaacggtgacggtgatgagctctccgagctggcggcggaggtggaggacgaggtggacaggaaggccgacgagttcatcgccaagttcagggagcaaatcaggttgcagaggttgtaggcgttcatggcaacttggcaagtatgcatacgtgatgcatgcagtcatgcaccgtaccgtggagtgagtaaaaccattatgagccattttacgtacgaagggggatcgtgacatgggtgtacttgtgaacagctgatctgttcatcggtaacgtcatgtttcttgtatcaaaaaaaaaaaaaaaaaactcgagggggggcccggtacccaat

SEQ ID NO: 12299 - DNA, 2622 bp, Oryza sativa
  Clone ID: PAT_MRT4530_1843C.1
cccacttactggatgggggataagtactgggactatgactacagaacacatgatctctgtttcgcaaatataatgcaatatgaataatattaaacagaagtcgacctactaaacaaagggcgaagcctgtagcgcagtgaagccataaccaggatgatttgatctaatccatgctatcctcgagttccaggttcctggatccttaagtagccgtcacagtctggagggttttcatgttcaatcagacttcaccggagagggagagcgggataagctcctgcttgggcttttactaacagatcttccacgagaaggtgaagaaacaggagtccgtgatcttgatattgatctttcatccacaggtgacggtgaccgagaaacagattccctcaccctgatatatgcccgtgaaaatgcatttctgaactctgagtcatcaagcttcctaatcgcatacttcatgtcttcataggttgtataatccacaattccaacggttgctccagcctcacggtatacatcagagaagcagacatcaccagcccgccgcatatggtccttaagatcctgccatgatgccgatgaaggtaagccagtgaccataacgcgatattcagaacgcctagaaacacctccacgtcgtccactgctatagcttcttgggcgatcgtatgagtaagattgacctcttccaccatgagctaattccacccgcaacctgtagccatcaaagttatacccatcacggccgcaaattgcatcatcagcatcacggggatcctcaaacttgtaaaagagatcctcaacctccctctcacgaatgtccccagggagattgcctacatagatggtgcggctgttgcgtctgctcattgtttctgccaaataggtataaataccagctgtacaagcattctgggtccgcgccgatttgcattttgcaacttcataatggattttcgaccagctaccaaccgaccctgcaagatctatatccttatggaacatcggacttataccaaatccagtagcagttttagattccttcatgtcccatctttctctttgacgactgcccactatcacaacatcattttcattgtctgtatcttcgacttgttcaacattggaagcctcagccgccatatttgttttccaacacagtaatataccggctaacttgtacctaaaaagttcaatatctttctgtgtaacaggataagaaaatttatctccagtaaaaaactccataaatttgagcatgaagagcccacaagaagaaccatctagttgaattttgacttgtaattgttctatgatcggccatgtcacgacatttagatctatccattcatggctaggtaagtcctgccgccgtgtaatgatatcaagatgtttttgtactccttgtatcgctatatggaggtcaacacgatcgaagtcctcacagagagaatcaagtacatgtatcactttttttttgggtcgagaacagctaaataccaatgaatatttcttcagttcatgaaaaagatagttcttcactgtatttgtaataaagttgtctatatgttcatctattatgtagaccgcatctcgttgtaacatggcaatgagaaaggggttttcataatacactttcttatcggtctttgattgcgcctcctttatacagtgtatgtatgcactgatgacgtcgtcgttcacccatttatctttagtgagaaggcacgataggtgatgttttttgacagaaaaacctcccatgttcaccagtgtctcattttcagatgataccagaataatgtcttgagcagtaacatcctggttggttaatacataatcttgagggaggtagtcgtaagtctggccaattatagatcgtatcaacttcgatggtacgccattattgggcatgctaactttggatcctacatgctcccctgactccttatcctgcaatggttcttctggttctgttcctttggctggcttcatgattaataggatatgttcatgtgggaggccccgcttctgaaactcagtaacatgagcatatgcctgaacctcaccgaaatacttttttttggtgaacaagtctaacatgtctcttagcttggccctaaatacccttgcaacaaggtccggtcgatcttgcggttgttggccaggatagagattttctgttatctcctcccagtttggattgcaggtcatcgtgatgaagtagtctggtctcccaaaacgttggacaagagccattgcattaagaaaccgccgctgcatgtcgcgatcgccaccaggaaaagaccgaggtagcacaatcctctttcctacctctttaccccttgtctctccagaattgatcacgtcgacgacaccctgtagcctaaagcaatagtactctcttgcagtgacaaatctatctttcttccgcttgcatgacctgttatccacctcattagtgtcttcatcgtataaagtatcgccaacgtcatcattctcacgaagctcgccaaaagtgttttcttcactgacgtgcacattaccatccattggtgcagcacttggtgcatcaatgtccataccgtctggaatattgttgggtgtttcgtacggcat

SEQ ID NO: 12300 - DNA, 2174 bp, Oryza sativa
  Clone ID: PAT_MRT4530_18440C.1
ctccatcaatcatcacagaaggttcaagtggagggccttggagaaagagaattacagatttagatggaaccgagagcgatatcccatggtggattgtggactgtgttgagcataatcgatttccaaaagagaatacaaagtgtggattctacttgcatcctgctgaagggtcacctgcaccgaacataacacaagggaaacttagtgctccacggatattgcggattcacaaagtagctaactatgtggtcgagaaacttgatagaccactggatggcaatgctgacgagcacatttgggatgggattgacttcttcccaatcacaattttcagcgctagatagttcttcacggcttggactaaagccatggcaaaaattgaaaccttctgtagagatattgtgtaacagccaggttttggcacccgaaatgagcttggccacagtgcgggcttatgtctggaagaagccagaggatttgattcttaactacaaagtggtccagtcaagatgattgcaacttgaaacgaatgttcaccctaggagctgaggaaatcagtgcggagcaggtcttgttgaagataaccatacgacctagagagaaaactatcatcacgctagagacagaagcgtttcgcccttgtgtgcctccttagcgaaaccgcaaaaattctacctctgtaaagttctctgtgaatgttgaactaccaccaggccctctagtgaggtgtcccatagcacaggtgtaatgatctcttctggctaccaagcttgtaaatttagggatttggggtgcttaaataaactttaaatgggatataatttccccttctctttttttgtgtttacacatataagatttgtaaggaaggtatcaaaccgtgcagcgatttgctgtttgatcctgatcttggactgttaataaaagaatagaaaaaagctgaaacgcatgaacccctaaagcttttccaaaaaggttcttcattcttagctggcaatttgtcattctccagggcaagggcttctttagaaggatcagcacctgtccctatacacaaagaaccatcttcaattattcctggagttccagcaataactcagcatgagatcctgaataatagaagacatgtattgacgaaggatactgctggttctgtcaaattgtgggagattactcgaggagctgttattgaagactttggcaaggtttcttttgaggataagaaaaaagagttgtttgagatggttagcatacctgcctggtttaccatggatgctcgattgggatgcctgtctgtccacctggatacacctcaatgcttttctgcagaaatatatgcagttgacttaaacgttgcaggagcacaggaagatcttaagattaatttggctcaggagactctccgtggtttgttagttcattggagtaaaaaaaagcagagatctggctcacacggcttgtcaaatggtgacacttcaacaggaaaagatgtatccttgaaaaatttgccccatccaagatctgaggttgatgatggggctgaaaatcatgcaagtcagatgcttccctcatttgagttttccacagtttcgcctccatcaatcatcacagaaggttcaagtggagggccttggagaaagagaattacagatttagatggaaccgagagcgatatcccatggtggattgtggactgtgttgagcataatcgatttccaaaagagaatacaaagtgtggattctacttgcatcctgctgaagggtcacctgcaccgaacataacacaagggaaacttagtgctccacggatattgcggattcacaaagtagctaactatgtggtcgagaaacttgatagaccactggatggcaatgctgacagcacatttggaatgggattgacttctggccaatcacaattttcagcgctagatagttcttcacggcttggactaaaaccatggcaaaaattgaaaccttctgtagagatattgtgtaacagccaggcaaatcattatgcttttcttgcattaggttcttatacctctgtgataaatattactaatatgaagcaggttttggcacccgaaatgagcttggccacagtgcgggcttatgtctggaagaagccagaggatttgattcttaactacaaagtggtccagtcaagatga

SEQ ID NO: 12301 - DNA, 345 bp, Oryza sativa
  Clone ID: PAT_MRT4530_18441C.1
gagcgcggcgcctggcaaaggggcgcggctctttgcaaggagcgcccattttttgcagagcaacgaccctcgacgctgggaggagacccactgcaggctcctgtctcctcgctactccccccaaatccctctcctaccctcgcccctggcccctctcccatggcgccgcccgctcgtcgatccgctccacgggccgccatcgtgacgacggggaggagctcggcggccttgaagaggagggcgagccagtcgtcagcgaggcgacccgcgaggcgatgttgggcgggggtgccaggggcggcgaagtcggctgcgctgggcggcggagtcgtcggcgacggctag

SEQ ID NO: 12302 - DNA, 723 bp, Oryza sativa
  Clone ID: PAT_MRT4530_18442C.1
gattacttcgtctacaacgccggcgacgccgcgcggccgccgtcgttgacgctgctgcctcacaactatgtcgatgcgacacccaagctgatcttcataatttagagaatatgcttgcagcttgctttctgaatgaggaacctgacatcaggcaaaatgatcgttctggcattcttacttccaagcagatatatgaggcaaaattcccggcagagtttatctcaccaaattggaagattatctgggcatgcaaagcaccgttgaaggtaaaacttttcgcttggatgctgatccgaaatagactgtccacaaagtcaaatctattgaagaaaaagattgttcagtcagcaacttgcgcgatttgcaactgtgcggacgagacggcaaaccatttatgcttctcttgtccttttgctgtaaggttctggactaagtattggaattcatccctcaatccaagaccttcgacttttttatcggctaagtccatcgcagcttctgccggccaaacacttccatgtattctacctactttgcttctgggtgctgtggaatcacaggcatgatgtggttttcagagggcttcaaccttctttagctgcttccctttatcgtgctgttagcgaagcaggtctttgggcagaattgctagtggtgcaggatagaactgtaatagatgtgtggaaacaaattttctcctcctgtcttcaatctctcaatcta

SEQ ID NO: 12303 - DNA, 279 bp, Oryza sativa
  unsure (1)..(279): unsure at all n locations
  Clone ID: PAT_MRT4530_18443C.1
atattctacaaattctacccttcaggcgtaggggtaacacaaaagacataggtcttccaactccaaccatacantctacacaatggtacaccaaaaaccattctcacagatcaggtgcttattgtccaacctaaagttttcattcatgttaagacgaaacaactaaaagctcaaatatcttcaggcttctggtactcaaaaatttaaggctaactcacacctccaggtatcatcctccaattccgattatcccccaagcaacacaaaaaccaccttttt

SEQ ID NO: 12304 - DNA, 1263 bp, Oryza sativa
  Clone ID: PAT_MRT4530_18444C.1
gaaaaaatgccgcgcgaagaatatagggccaagcgccgccgtttgccggcggcggagccggacttcctggccggcctcccgccggagatcgtcgacgacatcatctcccgcctcgacatacgcgacgtcgtccgcacctccgccctctcccgcgcctggcgccgccgctgggagtccgtccgcggcctcgacctcagcttcagatcctccgcccccgccgccgccatctcctccgtcctgaagcgcgccgccgcgccggtccgcgggctcggcctccgagtccccggtcgccggttccgccgcgccgtccactggctccgcctcctcccccgcaagcgcgtccagtccctcgacctccacttcgagttcgtgttcggcgagaagcccagcctcgaccccagcatcctctcctgcctggagctcaccacgctggtcctcgagggctgcatcttcccgccgtcgccgccgccgccgtcgtttgtggggttcccggagttgaccaagctgtccctctccgagatcgacctcccgcgccacggggggaggcggctggaggcgatgatcgccgcgtcgccgcttctcgtcgagctgtctctctcgaacgtgcgcagcctccatcactgggagaggtggttcatccggggaccaaacctccggtccgtttggatctggacggattacgattatggctgcaggataggggagctcccgcggctagagcacgccatcgtcttcgcgtcggccatcaagactgaagttttgtgcaaaattctggaagggattagtcatgcggagactcttggattcgatgcaattacagaccagttcaatggtaacccaccggagaggttttcattcacttttcagaacttgaggtcgttggacctgcatgcttgtctagatcaaatctcaagtacttcttgggtcttttgcatacttagaagtgccccgaacctggaaacacttgaaatcgaggttgattgtgatgatgatgaagtggatgctggatctgtcgaaggattcgcaaacgcacaagcaagtgatgacattttccctagacttcgagatgtctggttacatagtattgactgctcctcaaatgagatgtgcttcatcaagtttgtcctatccaaagcaagatcgctagaactgttctctgttcgtgtcacctccagtaggttatcttatcaggaggcatgcatagagatggcaaaatacaaaagagcatcgccgttagctaagctcagactcatccgtggatga

SEQ ID NO: 12305 - DNA, 471 bp, Oryza sativa
  Clone ID: PAT_MRT4530_18445C.1
aataaaaaaagtggtgagtaataagttttaaagagaagaatcaatggattcatgattaaacccctcctacttcttgtattttattacaattttgattaagtgagggatcaaatataatatgtagtcaactttatttgatggtaacttggaggattagaaatatgactattgctttccaattagctgtttttgcattaattgtgacttcctcagtcttagtcattagtgtaccccttgtatttgcttctcctgatggttggtcaaacaataaaaacgttgtattttccggtacatcattatggattggactggtctttctggtagctattctaaattctctcatttcttaaatgtgtttagtatttagtagcccgatacaaaataaaaaagggccgtttattcggattgtgagacgcattaaaatgcaatttgcgccccgaattgattgacagacaatttaggttgttcacc

SEQ ID NO: 12306 - DNA, 980 bp, Oryza sativa
  Clone ID: PAT_MRT4530_18446C.1
caagtccaagttgagagagagagagagatcgagctagcctgactaaacttgaaaatattgcatttgcgtctttgatcttagctatagcttgctgctgctgctgctgatagtttagcttgagagagctagcggcaagagcaaagatggttggggccgtgcaggaagggatagtgcgtgagatgaacggaggattcgaggttatgagcgggtatgacaggtcgtccatggcgccgaagcagcagcagagggaggaggagagcaagtggtacgaggaggagatcgacgacgacctcaagctctgctacgctctcaacagtgtgttgcaccggggagcaagcaagtaccaggagatcgctctcattgatacaaagcattttggcaaggaggtggtggacttctgccggacgtacctgaccgtcaactgggacgccttcgccagcgacaagctctgcctcatcatcaacgacgccagggcggagctggagaagagtagggagaagttcgacgtgatagtgggagacttggctgacccagtggaggggggcccctgctaccagctctacaccaagtcattctaccaacacatcgtcaagcccaagctcaacgaccgcggcgtcttcgtcacccaggcagggccagccggcgttctgacccacaaggaggtcttctcctccatctacaacaccctcaggcatgtcttcaagtatgtcaaagcatacactgctcatgtgccatcctttgctgacacctggggctgggtcatggcatcagattatccatttagcatgaatgctcagcaaatcaatgagaggatcaaggagaggatagatggggagctggtgtacttgagtggggagtccctcatttcctctaccatattgaacaagagcgtttaccagtcgctgttgaatgagacgcatgtgtacaccgaggatgatgcaaggttcatctacggacatggaagggcacgttgtgcttga

SEQ ID NO: 12307 - DNA, 141 bp, Oryza sativa
  Clone ID: PAT_MRT4530_18447C.1
atgcggaggaagctaagaacagaaggccagaagccagaagctagtagcttgcatcatatggccagctcgatcgaacgggacgtcattgcccgtgtgacaggaacggctcaaccaccggtggaaaatataccgacgcactga

SEQ ID NO: 12308 - DNA, 228 bp, Oryza sativa
  Clone ID: PAT_MRT4530_18448C.1
atgtggccggtcagaccgtgctactctgcaacggctagaaaactagccgttgtagcccagtcagagggccccatcggcctggctggtcagaccgacatggggtggccggtcagaccgacctcggctcggtcagactgccatcgactcggtctgaccgaatacggctccgtcggctctgtatcggccatccagagcagcaccatcccgatctcaaggaggccgatctga

SEQ ID NO: 12309 - DNA, 465 bp, Oryza sativa
  Clone ID: PAT_MRT4530_18449C.1
atgcgccggtctgaccgcctgatgaaagtcggtctgaccgatgtagatcgattggttgaaccgccgaaatcacctgccactgcctgtcgccgccgccggtctgaccgcctacatgccgccagtctgaccgccgaccgtttccaaggattcggcacccattattttgctcacatcaaatacatcgttgtcgtcaaaactgtttctaaggattcgcgcgtccgccgcctgccgccgccccacgcacttccccggccgtctaccacccgcatgcgccgacgaagaaaagatagactcattagggacctgccaagtatcgaaccaggactcacggttggtgtcaaaaaaaaatacccgtggagattaaagctcattagggacctgccaagtatcgaaccaggactcattagggagctgccaagtttcgaaccaggactcacgaaaatacccgtggggattaaagctcat

SEQ ID NO: 12310 - DNA, 405 bp, Oryza sativa
  Clone ID: PAT_MRT4530_1844C.1
atgaaggtgcggggctacaatagtgactcgtcgaggaaagggggacagcggatccatcctcgtcgaagctcttgccgtcggcgaggagaggaggaggacgtggggaaggcgacagtgactgggtgggcagtggtgatgtgggtgcaggaagggcggctgcgacgtgggtgcgggacttgctcgtcgccactgcagtttggggagctcgaggacgggcgttcagcttcaatgacaggacaggatcctcccacaactatgcgctctcccatctatcgtgcgctcaaggagctatacctcattgatgctgttggttggcgccgatgctcgagttggagatggcgacagcattcacgaggcgtgggccacaaatggaagagaagatatggatctaactgcaatgattga

SEQ ID NO: 12311 - DNA, 3652 bp, Oryza sativa
  Clone ID: PAT_MRT4530_18450C.1
ttttgaacatatccggagtctccggacgaccggacccaagcaatacttcaaaatattccgattgagcaacaaaacaatgttatgcacacagtgccttctgtaagcaccggccttattgcgatatactatacagttagagaactcatcatcatcagttttacattggataaacagaagcaagtctgtatcccccatctctggttgcagcaagggccatagaacgatagcccaatgttcaccagggtgcaaagcttattggtgccgtgtgagatgatatagaaccgcagagagggagccctactgctcgtttctcaatctcgatcacgtagaataaatgctacttgaaactacttgatttctctcaaagttaaacattgtctttcagtataccaaattgttgtagagctgacttaaggttatctggaccatatccctcgattgaagtaattcctggtttgtcaaaggatatgacatcctgtaatgaataacttctggcagcatggacttggttaggaacagcattaaatgagcctttgagaataatggtcttgtgcacgcctcctaatagtccttcataatcagtatcaccactttcaccaacaaccactgtcatatttgacagctctaccccccatcttatatacaagtaccttagagcctgcgatcgtgatgctaaaacaggaataacattcaacttgctaccatcatgactgtacaaaacatgacagcgcagtgcttgaattctcattgtcttcctaagctctttcacaggaggtacagcctcagcattcttcactctaaatgaaatacaataagtggatgaacattcttcatcttctacaagtaccacttgaccaccctcgcttttttctgctgcccaacaaattagtgtcttccttaaaccttctccaccccaacggtactcaatttgagtgtgataatcaagatcaatcataaatgggagctctgcagggctaagcatgtcttcagaatttgaggatggatagcaaagatcgctaccactgttgcatatgaaggcatcaaaatcagtagcttctatgcccccagatgttagcaaagaatgtacctctgatattgctcgggatgttgacaaaacaaaaccaacagaaccagataatctctcattgcttgaagccacaaaaatatttttgataatctcaaccaggttagcatcttgcacagaatctatagcaatgactacaatgtgtttccttcttcgcaaagatggccatttattgcctgtggtagcctccatattctcaacagactctgtctttctgttggcactaacacctcttgacaacttttgtacagcatcctcaaggtttcttcttacactattttcctttgtgcttgatttctcactgtccaaggaaagcttcaagttaagagatatatcatgaacatccctcaaggaatctccaggtgagtcagcttcggaaacttcagtagcatcatcactcttttgccatcgaggatgtcgtggcttgagtgtaccaacccgtgacaaatagtttttgcaatgttcaggccaagaaaattgatgaatatttttcagaccattttggcggcactgtgcccacaactgcttatcagaaacaagcttataaagtgcctcagctatttcattttgattgtggggatcaacgagaataccattgtcaagaacccgatgtatatcaacgggcccaccatttcgagtagcaaccattggtagaccataagcagcagcctcaatcaaggttagtccaaatggctcgataaaagcacaattgataaacaccccctttgttcttgccgctaaacgataaatatctggaacttcagattgcttatggtgcttggggtatgccacttggccatatagatcatacttgtcaattaacttgagtattgatgtcaaaacagctgaatttgtgcttgacatttcatcaataacatcacggttacccatgataagtgtaaggtttgctaaatttctcaattcacgatgttcaccaaatgccttgaccagtgtagtgatgttcttcttaggatctggacgagcaagagctagaatcatgggcttgcgagggttggagaagaatcgcattatatcagcccaaataggtggatctgttgaacctgaaccatcttcattagcttcttcaccatcctgatcaacatcatgaggcactatatggctaaactccatgccaggaggaactgcaatcatacgaggcatgtagcgaccgtagcagctcacaccacgctttattcttgctctaagtttccttgccatggttaaatcaaaaccatcatataatccccattgttgttctatctcttgtctagtgcttgtaattatgatttcagatgcatcaagacaaagttcctcagcctcaattcgacgcattatcttgtatattgtatttatttcatccctggtttgacgcccttgcttcaaaagttgctccaacttgtctctgccaagagaatgacctgtgaatatcattgggacattgagtgccccagatagcaaagcagcagagtcacctgcatcggcatagtgtccatggataacaacaggccatactagctgtccactgccaacttgttctccaagaaccttggacatctgcatgatatggacaagtgcaccgtcaacaaattcctggatgtggggccagagatgctctttggggatatatttatctcttggtccaaaaggtatcctcacaatataagcaccactgctttcacccatatcatgcccaaaattctctgaatttcttggactcagcatctctgtaggttccccataactccaatcaacatcaggtgcagaaatctgccttgtcagaagatcaaccctatatactccaggtgttgaacctaatgcccgagcaagttctacaacatatttgacctgaccaccagtgtctgaatcacgcccaagctccatattttcaccacgtataagaccatgaatgcttatcagaacaatgtatagctttttatccttgtgctgacttgcccatgcctcaatagcatctgttgaacctatcctaggcattctcccccttgtgctctcgtcatgagtagatgatgattcattaatgttttctcccttttcaccctcagataggtcttcagacatatcggcagcagcatatctacgagccttctcacgctcaagacgttgtttagctaaacgggaggcttcttcaccttcaatctcctcaagcagggatatgtacgtgttctctggcacgagagaaattcctccagatacaccaaaagacagattttctagcaaatactgcttcttctttctggcaaggttccagatcctccacgacatgttctccagccgcgtgttcctctcctgcgggctcctcatcgccgccgtgcggacccaggtcttgtagaggtcggtctcgtcgaacccggagatgacctcctcgacgaagtagcgcgcggggctgaaccggccccgctcccggagcatcagcgacgacttgtcccgcttctccccggtggccgccgctccatctccacctccccccgccgcggcggagatctcccccgcggccccgcccgcgtcgaggatcgcctccaggtagctgttgatccagtcgttccccgccat

SEQ ID NO: 12312 - DNA, 234 bp, Oryza sativa
  Clone ID: PAT_MRT4530_18451C.1
atggatgtccaggtcgagatcccgtctgggacgccgtggagggaggcgtcgggctcggggacgctggtcttgggcggtgccgggctcggggacggcgtggagggaggcggtggccgtcggggaggccggatcttgagcggccccggcctcgggaacggcggtcttgcgcaacggcggcggtcggcaatcagtagagggaggcagcggcgtgaaggaggtcgacgcggcggctag

SEQ ID NO: 12313 - DNA, 339 bp, Oryza sativa
  unsure (1)..(339): unsure at all n locations
  Clone ID: PAT_MRT4530_18452C.1
atgcagtcgaatntcagcgacgatcgggttgctgcatgcagtttgctgatatctaccgctctgcaaaacgtcacttgtccgaacttcgtttgatggacaaagtcaaagcttcatcagtcaaggaggcaccctcagcaccacctttagagatccaaattacagaggaccaagttcgtgatactgtcaagtctctaatgaatatggcaacaaataagtgtgttgagatgaaggcccaaggcatgctagcttttgctgaactaacaagttctgattccaatgtacagaaaatgatggcctgagagggcgtttcatatgccatgattgacgagctctattctg

SEQ ID NO: 12314 - DNA, 961 bp, Oryza sativa
  Clone ID: PAT_MRT4530_18453C.1
aagtaattcaaagttggacctacagaagattaaaaaaactcgttttgcttctcactaccttttgcttttgaggctcactaaatgtcaagaagcacttgccaccaccatagtcaccaatcaatggaaagattggatgaaaggttgcaccaatgatctgcggcagcaagcaagagccattgttcaagaaatcaattgtgaggacttttggaataatgttgagaatattcttgctatcacaggtcctatatatgaagtattaaggttcagtgatggagagggtccaaaaatgggtgagatctatgagagaatggattgtatggttggagagataaaggatatcatgatgaaagatgacaatccatacaaaagttcctttccagagatagagaacatagtcattgaacgttgggaaaagatgagtatcccacttcattgtttggcttatgctgtttgcccaaggttttatgatcaaaattatcttcaaaaacctgctcccggtggcacattaaggagagcaccgaatcaagatgttgaggtcatgacaggtgtgctaaaagcatttgagagaatagcagataataaagaagaggaaaaagtccttcgcgagcaactcaatgactttattatgaagaagggattttttgcactagaatatgtgcaggccgatgcagcatcgatggaaccaattgagtggtggtgcagctatggatctgagacaccagaattggcagaggttgccaaaagggttctctcgcaacctatcagcagttcatccgctgagaggatttgggggacttatcagttcatccataatgcaaagagaaacaaactaaacgctgcaaacgcggataagcttgtgtttatccactcaaacttgtgtcttcaatcaagatttactgaaagctataaatcagggcctaacgccatgtgggatgcacatcccgaagactccaccatctaa

SEQ ID NO: 12315 - DNA, 404 bp, Oryza sativa
  Clone ID: PAT_MRT4530_18454C.1
gcgcaaaagaagtgcgctcgtacggaaaggaacacgattaaaagaagatctttttgtggcctggggggagtgcaacagctaatgaacggaagagaagctctggggcgtcgcgttaaacgggaccaactataatcgcgggtgctgctacaataccactgtcactacgtgtgccaaaaatccaatcggctgcctaaacgttatagatacaagcggacctggccaaaacctggtagcatcccaattgatgcgctaaggagaactgcagacattttcaacgctgacggtacacgaagaaaggaccacacttgcgaatctaactaacatgaggcggccctgagggatcatggcaactgcagctggaccggggcattaagatcaacttgggtgggagttaccctcagggt

SEQ ID NO: 12316 - DNA, 201 bp, Oryza sativa
  Clone ID: PAT_MRT4530_18455C.1
ggaaaaaaacagggggggcattttattagggcttcaaaaacttaaaacagaccccccacaaaggtggacatcctgggggcatttaattttttttggagccccctatcctttttcattgggccatcactcgggggccccgttctccgcctcattggaaaagcctaggggggtctgttgttgcggccccgggggcggccccgg

SEQ ID NO: 12317 - DNA, 228 bp, Oryza sativa
  Clone ID: PAT_MRT4530_18456C.1
atggccttggagctccgagcgctgctactccgtgtggtacccctgaagctccgagtgccgttgtttcgtgtgatggccttggagctctcggtgcacctgctctgtgcggcggcggtggcccgaactgctgctctcctgcaacgaaataatctatcgccggaaaaatttatagaaatagaccttgccgcctcagtggagggcggcaagctgacgtggcagacggcgact

SEQ ID NO: 12318 - DNA, 435 bp, Oryza sativa
  unsure (1)..(435): unsure at all n locations
  Clone ID: PAT_MRT4530_18457C.1
aaatcaaattaagagcaccattttttatagttctgtgaacaattcttacatattcatttgcaaaatttccaagaaacacatgtcagttaatacacactacacacaaaaccctaacttgtgttacatgaaaggaatttatgggttactcgtgggcaaggagcttaaatagaactaatgttaccactcactatacggtgcccatacaattaactgtcgttcaccttaaagaatgcgtaagaaaggacaatattgttcaccccttctcttttggggactgtctnaagcccaggatcgatgctgaagaacacccacctgtcaatgtggtcccctgggagaagggattgcttctgaaagcataaacattgtatcttgttgaaatgtattgggagcttgatagggtcttccgtgtcgcgtggtgtcgatccgtgttttttg

SEQ ID NO: 12319 - DNA, 300 bp, Oryza sativa
  Clone ID: PAT_MRT4530_18458C.1
atggcggtgctagggggtcggccgaacaaggtttggctgaattacccttgcggccactcatccccgcccagtggcggatgcgcgatacagaaagagtcgaggcgagagcggcggcggcagcaacgacgtcagagccgcggaggtcctgcaggacggtacgacgagttgcttgcagccttcagcgatctcatctgctgcccggccggccagcacgacgtccactcgtcagcacaatgccacatccaaccagtacaggccattgatggatttttatgtgtttatggcatcgtatttgattaa

SEQ ID NO: 12320 - DNA, 847 bp, Oryza sativa
  Clone ID: PAT_MRT4530_18459C.1
cttctctctctgtccgtatgcccattgggttgtccagaagccatccttcattgtcacatcgaagatctttatcaatacagtcaacatgctcaaacacatccgagtattcatcaaacctttccctcatgtctgcagccacttcgagtacatccgattgcaaaagaacccgtccacctaaacagaggttatttgtgattgaatccaccaactgcgattgtagaactcttctcttgtgatgcctcttcttaaaatggggatcaggacacagtatagaaacaagtgacaggggaccagggtacgacgacgcaatctggttgaaagacactgttgcatttgcaaacataaaataaacattcctaagccccaactcggttacccagaactgcgaccgctccaccaacttctgccgaatctccaggccgaggtagtttcgcctttcaccggagttcttggcaagccaaatcaagaacctcccgctcccgcagccaatgtcgaccatgagtggcagcaggggatcctcgaacacctccttccactccggtggctccgtgggctccgagaaagaggagctgagcgggttgacgtgctgccggatgcgcaggtgatggcccctgttggggtagagcgggcggaggttgaggtcggcgtactccctgtccaccgcgtcggggctctgcgcggcggagcaccgggtcgagagcggcgagcggcggcgggcatagggcactaacaaggggaggcggacgaggcggcagcacagggaggccgtcgccgtcgccggcgaggccatgggtaacgcacgcttgtaccgcggacgaggcgccgccgccgccgcgccgcctgttcg

SEQ ID NO: 12321 - DNA, 600 bp, Oryza sativa
  unsure (1)..(600): unsure at all n locations
  Clone ID: PAT_MRT4530_1845C.1
ggctgcaggattcggcacgagcaatcgggcttcggcaacgtcagcaatggcggaaggatcaagtgcatgcaggtgtggccaattgagggcatcaagaaattcgaagaccctatcgtacctgccaccactcaccgtgggangatcttttgaancanatccaattaccttgcttcnatccaantgggtgccntgccnccaattcaacaanggtggattcctccnaccntganaacccaggttccccnggttcnaccanggcnggttttggacctntngaaaccncccnttttccggngccccnaagcccccnagtncnccaggacccangaggccanaagncnnccccanncccttgttcntatcctccgcctccanacctccgggcgtgcagtgantaactcctcccnacaaacccccnngttcnaagaatccgtggccacnaaccaaatcnacntcccnccnggggantgcgccntaanaanaatntgcccnntgttttgggccncgttgaaaaatanccanatntnanatgccacnttttattttacntttggntatttccccccatggcccngccctnacncnnnnttataaccnccc

SEQ ID NO: 12322 - DNA, 234 bp, Oryza sativa
  Clone ID: PAT_MRT4530_18460C.1
atgaaccaggttcggtattaggatcaaagtggatttggcaaagagttagatttgaagaacagagtatgcatcggctgtgaaggcatcggctggattttgtatcggctgaagcaaatcggacagaggatagccgatacgactgattcaaccgatacagccgattttgctgaagacagttgtgaaactgcttctgggatcgatcaacgtgctacacaaggattgccacgatggaga

SEQ ID NO: 12323 - DNA, 408 bp, Oryza sativa
  Clone ID: PAT_MRT4530_18461C.1
cccacgcgtccgccaacccttccggaaaaaaggtgggcattattttaattattgacattgggttaaagattattttttcaatttttacccattaaattaaaaaccttggaaaaaaacacttgaaacaccaaattccccaggagaggcatttgcttattaaaagccttgggattttggaccagggccttgcaaaaggccttgcccttgaagttaaagcccaaggccttgcttccaattccaccaccaccattaacaaaacttccaccacccttaaccggattattattaaaattaccaccacccgaaccgccgccattcaagttgaaccgcggcattcaaacattcttgcaagaaccaggcagaaccagagggacaagcacaagcacaagcacaagcacaagcaccagc

SEQ ID NO: 12324 - DNA, 219 bp, Oryza sativa
  Clone ID: PAT_MRT4530_18462C.1
atggcgcatcgatgcctcctctcctctctccctcccggccatacctcctccctccccgagcttccgcttccgtcggccggctaccgctgtgccaccttcccgcagccaccgccgccgatgaccacgacagcccctgccgtcacaggctcacaggaggaggacggggtggtgtcgttgcggcggtccttgaaggcggaggcggcttcaatggagatttga

SEQ ID NO: 12325 - DNA, 124 bp, Oryza sativa
  Clone ID: PAT_MRT4530_18463C.1
gtattgccgattgcacacaacaatgacaaaacgctgagctaaacatatccagaaggactgcgcgcgcaagctgagaataaaatacaatccgcatacaactaatcacacgggggcatcctcctag

SEQ ID NO: 12326 - DNA, 249 bp, Oryza sativa
  Clone ID: PAT_MRT4530_18464C.1
atgacgagattaattaagtaacagacttataaaggagtagagtggtggcggttgatgggacatctaaaaactattaataaaacaccaaatagaatactaaagatgattaaaaggaaggacgataggcaggtcatgaaacaatcggtcaaggcggttgtgataataacaaagggaggcagcaggcgagtcgcagaggagtacagtgacaaagtcgctgacgttttagcggaacttctaaaaagtaaaaaa

SEQ ID NO: 12327 - DNA, 401 bp, Oryza sativa
  Clone ID: PAT_MRT4530_18465C.1
aaaaaaaaaacaaacaaccaaacccaggggacaaaaaatttgggggggggcaatagttatggaaaaaaaaggggtcccaaatcattccccctaaaggggcatgggccccaaaaaaaaatcctcccccaaccggaatggcccctttggggagccccagaaacccttttagggccctttttggggcggccgggtttaaaaaaccaaggaccaggtaccttttgttttgcggggggcccacccggttgtttacccgaaactggaggggcgaacccaaatagggggcctaaaaaacttcagagaaaaaaaactggcacctggggggggaaaaaccgcccgtttttaaggcattgggatttttttttttggccgctttttttccttcccagaaaaaactatttttt

SEQ ID NO: 12328 - DNA, 257 bp, Oryza sativa
  Clone ID: PAT_MRT4530_18466C.1
gcaccacactgggcaacaacctgcctgtgtggcccggagtcaggttggatgccaggaggaggcaatgcttgtgccccaaaatggctggcctggtgtggccgagtgtggcaatgctgtgtgctgtgtgggggcgccaaccaaaccacatgtgctgcaatgtgttgctggagggtgaaacccaccatgggcactgggagggttggatgtttgggagggaggcctggtctggtgcggtgcaaaccccctgcggatgttga

SEQ ID NO: 12329 - DNA, 385 bp, Oryza sativa
  Clone ID: PAT_MRT4530_18467C.1
ttttgggatagggaaccacgaaagtgagtattcaagctgtaaactgatagtgaggaccccacttttgtgaccatagtcatgcttttacccagataacaatcttgaaaaataattgtagtaggcagtgtgtggtgctatgctaaccagggaataaccctaggatctgcactatcacagctatttcagtgatagttgtggccgaagctgttaaatacagggcaccataatttaaagaccaccaaaaaagcattgaaaaaatacatgggaaagaatgctttaccacgggcgaagagcacccttgacggcgcgggccagggcctgtcaaaatctgggaggtcaagtttgttaagagacctgcatgagctggcttctgcgaattctacca

SEQ ID NO: 12330 - DNA, 501 bp, Oryza sativa
  Clone ID: PAT_MRT4530_18468C.1
aacaccaaacaaataccatatttttttcattcgcgatcattttcacaaagcgcgttgacaatcacaccctttaaccatcctcttgtacatcaggatccttacttacttaacagcatgcaacttccccccacttccacaggaaccatcttattttacaacacaactatgacagacccaacaactcatcatgatgtctatcctaaatactgttagagacatcacattttacagacatggcgtgaggcttttcattaatcctatcaactaaaatgctgatgatcaataagcattcgacatcaaactaaactctatactcaaattagtgataaaacaactacttctaacacaagctcttatcttttatctgtagactcctatcgacaaacgatctttccttataaacttttctggacctattcatcttactcttatggcaacataaattttattctgtcttatacacactatcaacagctttccttatttttcacaaagaccttc

SEQ ID NO: 12331 - DNA, 495 bp, Oryza sativa
  unsure (1)..(495): unsure at all n locations
  Clone ID: PAT_MRT4530_18469C.1
cggacgcgtgggggaaaactgttagatgccaagactgaaaggcgattggctcagaacagagaagctgcaagaaagagcaggctgaggaaaaaggcttatgtgcagcaacttgagactagccgcataaggcttcagcaaatcgagcaagagcttcagagagcacgctcacagggcttgtttcctggaggatgcagtgcacctggagatatgagctcgggtgctgtaatgtttgacatggattacacccgatggatagacgacgacagcaaatgcatggcagagctccagggcgcgctacaggcccagctccccgacggaaaccttggtgccattgtggaagaatgcatgcgccactacgacgagctcttccaccttagggccgtgctcgccagcttccgcgtgttccacctgatgactggcatgtgggcggcgccggcccgacggtgcttcctnncttttggggcgttcggccatcagaaattctcaaaatgctga

SEQ ID NO: 12332 - DNA, 563 bp, Oryza sativa
  Clone ID: PAT_MRT4530_1846C.1
agtcaaccagtcaaactctaaatcctccacccaaaatcccaaacctccagatccagtctccagttctccacccgcacagccgcacacccgtgccagccaccaccatcgtccgccagtctgccgagagccaggcgctccaccgtgcaccgccagtccgccagccaccaggcgcgccaccgctcgctgccttctctcgcacggcgtgggcacgggcactgtcccgcccctccgttgatgcatcatcgggagacgccatttatgggagccgccgtcgccgggagccttcgtcgacgcgctaccgagagacgctaccgccggacaaagccatcgacgcgccaccggacgcggcgcctgcagccgacgtcaccgggagctgcgcagccaggagccgccgtcgccgcaccgccagggcctctattgacttccgccagcgccctctgccgtcactacgagccaccatcggcctctccccgataacagacagtgatgaaaagttcaattgctatacctccagggaaatggttaataatataaggacaatacaatatggccgccaacagtga

SEQ ID NO: 12333 - DNA, 261 bp, Oryza sativa
  Clone ID: PAT_MRT4530_18470C.1
atgacgggaggagcagtagggccacgctggagatcaaaacgcggcggcgagctcggtattcacggcgacgaaggtcttcccggggtcttcggtttcggcgagatggctgccgggctttctcttgtccttgcagagccgagggaggcaccggagtcgcgcgccaagttcctcggcaactctgccgctccagcgcccacccgccagccggccacctcacgccgtcgtcgctactcgaggccccgccccgccggcaccggatga

SEQ ID NO: 12334 - DNA, 756 bp, Oryza sativa
  Clone ID: PAT_MRT4530_18471C.1
gattataatagacgcaggaaataattaatagatagatgtgctgcgtatatatacactgttgatgggtggtaaaaacagcgatccgatgagaaagatggatcatgcatatacaaccaaatcggagtacgtagctagggaggtgtgttgtggtgggcggtggcggtggcggtggagaaatcgtgcagcgtgggcaggtcgacctccccgcacctccggcagcggccggggagagggaggaataatgtactagtcccgacggtggcgcggcaggaggggcaggtggcgtgggtccccagccacgtatcgatgcaggagacgtggaaggcgtggccgcagtgcggcagcaagcgtagctcctcccccccggcgaactcagccaggcagatggcgcactccgcctgctgctgctgctgcttgagtgcgaaggacacggtggggagcgcgtcgatggctttcttcttcaggcctttgggtgcaggggatgtagcagccggtgtagtagtagtggtggtggtggtggtagcggcgcctcggcggcggcaggcacagcgggccacgagggccaggccggcgacgcagatgagggcgcagaggagggaggccaggatgaccaccatgtccgagtcgatggagatggccgccgccggtgttgccggggactcggcggagtggacgagaactcgcattcttttctgctcgacttggatggagccgcctcggcctcggactgacaaatcaatcaatctatcggagtga

SEQ ID NO: 12335 - DNA, 384 bp, Oryza sativa
  Clone ID: PAT_MRT4530_18472C.1
atgcccccatgtgctacctacgtggagcggccatggtcgacgactacaaccttgcatgaccaaccagttgtagtggcggcagcagggggtagcctgtgcgcttgtgctggctgctcaaagaaagggaagggagaagaggggcggtggtgctggtgcaagtggagccgaaggaggaggaggcggcgttgcggggcgaggcggaggatggtggcggtgctgttggcgcgggtggaggagacgacgacactgtgtgggggtggaacaggggacggtggtgctagcacaggtggagggggaagtagtggtggcggcgatgttgtggtgacggtcacgcaccaccacgtcctccttctccgccgctctccaatgatcgggagttcctag

SEQ ID NO: 12336 - DNA, 522 bp, Oryza sativa
  Clone ID: PAT_MRT4530_18473C.1
ttatataccaaaaataaggaattatacttattatttatataaacatgctactaatcattcatcgtaaacaagcgattcattaatatttatatttcttgatgtccatgtagccaatcttatgtggaagaatgaagagtcacgcattgaatatgacaaaatcattaagatgataggttgttggattgaaatatgcgttgcaaaaataaaattttcagatttagaaatatgactatcaaaagtagatgaatggagttaattaaacagaaagagcgtactgaacgcttatcaatgataaagggctccatttaatgctccatttcctcgaaaaaaataatgcttcatttactcgaaaaaataatgctccatttatgtgcaaaaatgaactaatagtaatggaatctcaaaaaattacccattgcgttgaactattctaagcaaatattttttttcctaaaaagttgtgtttcccagagagagttagagtgtgatagagagagagataatgatagagagagagagttt

SEQ ID NO: 12337 - DNA, 411 bp, Oryza sativa
  Clone ID: PAT_MRT4530_18474C.1
atggcgcggtcatgggaggcggtgtcggtggacgcggcgccatgccgcgtcgtgctcctcctcaccgtccatggccgccgagagagaggggggttagcaagcctcctccacactaccactgttgccaccaccgccacctcgcccatcctccgcgccgccgcgggatctccgtgcctagcctcggcgccgctaccggatatccgccgtgctgctgtcgcggctgccaccgccacagctctactgtcgcggctgccactgccgccactaccgaacgccgccgccgtgggatggcaatgccgccgccgccggatgccgacgccgctcgctctctttgtccctgcgcgccaccggccgaaggggaagaaggggagagaaagagagagaagggagagagggaggaggaaggtctaa

SEQ ID NO: 12338 - DNA, 102 bp, Oryza sativa
  Clone ID: PAT_MRT4530_18475C.1
atgggagttacggtgcgagagattgctgctgtcgactggttcggaaaccagcgagttgaattatctctcgaaacaccaatggaagttacgaatttattttaa

SEQ ID NO: 12339 - DNA, 2030 bp, Oryza sativa
  Clone ID: PAT_MRT4530_18476C.1
ttttttttttttttttttttgtgcaaacgatccatctcactatcaagacccagagattgtaattacatcatctaaagcagtcagtgtaaagaaaaagggactatccaactccgacttgagccataattgacccagaaaatttctaccaacagattattgttgagacctcaacctcccaagctacatggtatcctaaaacgaaaacctgtaacctatatcatggttcatccggtacaaatcgatgctgctgctactgatcgttgatcagtgcaacgtcaggccttggcagaatcaaggcagccaatacactgggaaggctcagcgaggccgtaaatggcctcaatgcagctgctatggaatgcatggtggcagcccaggacggccgcgactggaggagcattgtcgcgagcatcgtcaccttgaggcctgaatgctatatcgagcttgcacagctggcaccttgtccccaatggctcaactggtggcgcctcatccttgtccgtcagagctggtcctttgatgtggacctgcggttgtgaatttgccgatttaaattgctgcagcagctgttcttgctgcttgatcaacaatgccttcacgttcgcgtaagcaggatctgagagaacattggatgacgagcccttagctttcccgatctctagtttcggtgagaccaatggagcagttgcaccagcctggccactgggctgtttcctagcaatgagtaacttagcaagcttcctttgaagatcatcttgcaagttttgtctgggagctgcaatgaccggagaaggcaacttattgtgtgcagcaacttgctgtgctctgttggcaatagctttggcattgactggagcaactggtttattaacaaggcttgttctgttgatcatagcttttatatttaatggaccagctgagtggttgacttggtgagttctgttgggtatagcttctgcagtgactggaaaagccgacagattgacttggcttgatccgctggcaatagcatcagtagtgactggagcaacaagcagatcagcttggtttgttccataggcaatagcttctgtaatgatatcattggaattattttttgtatcaagctgcagctgctgtgcaagttcagctgactgacaattgtcatttgtagtagcaggaccaatttttgaggaagcaatgacagaactctctccgctttcagtctccaacttaaccatagacagtggagcagctaatttaccgtccttatttctgatagttggtttcctttttggaagtacatcagaagggctcttgcccgtttgcagcttctttgatggagatgggatgactgccccatccaactgatcacctttgctcgcgctttcttcatttctctttttgcctctgtgaacagttgggctatcttcagcagcttgagacgaagcaactctggagcgcttggcagaaggattggttgaaggaacgcttgcccgcttcaggtcttcactcataacaataggctgggtaaggggcttccaagcagatgaagccactttatgaggggtgcggacacgggttacagatggtcttgcagcagcagattgggtgttaaagcaagggtctgtagaatctctacgcttgcttgtactagcagattctcctcccttcacatcagatgaagcagcagcagcagcagtaggcttacgggtcatagaccgagtaacagggcggaaaacctgatgatgagcaggtgtgctgcaagatggctcagcatggccagcatcgctgcccatctttacaagattccatagcataacaatcaaaacaacagcagttacttctgaattatccatgactccggactccggagtccgtaggccccaacaggccgcaaaagaccaatcccagaagcggcccaccgaaaacgtggcgagtggagaacccagatcgccgccgcggccggccacgggcgcgaaaccgatcagccatggcatcttcctccggcgaatcgccgggttttcaggaggcctcgccgcgccgcgcat

SEQ ID NO: 12340 - DNA, 417 bp, Oryza sativa
  Clone ID: PAT_MRT4530_18477C.1
atggtgctcatggctgatgtagaccgggagtggttacagcatggcacatgcgctggcactggacacatggacgtggccaagagaggacgtttctggcctagggttgattctggcctagggcgggacattacatcctccatctggcgggctccagcaccagcgcctcgcctcctccgctgccgccggcaccagcaaaccggctctcccactcctgccgctgatccgcgcgtccccatctcgccggcggcgtcagtctcctcctcagtccgtggtgaactcaagcaagccgggcatgctcggcgccagtgccaaggaggcggtggcgcgtggggacgaggccgtgagaacggtggaggaggccgtgaggttcctcgactggacccaaggccgccggccgcgaccacgtgcggcggctga

SEQ ID NO: 12341 - DNA, 158 bp, Oryza sativa
  Clone ID: PAT_MRT4530_18478C.1
ttcgtccaaccgattccgcagcgccagcccactgagtcctcaccgaattctctcattttttttctctctttccattctccccggcgatcgagtagtcggcttttgttcgccgcctgcacgccggagggaggctaggttcccttttatttgaaattctc

SEQ ID NO: 12342 - DNA, 304 bp, Oryza sativa
  unsure (1)..(304): unsure at all n locations
  Clone ID: PAT_MRT4530_18479C.1
gccgcgtaccgtccgtatcccggtcgccccgcgtccgcccgcgtccgcaaggtcgtcttcttcgcgggggctcatggcggcatggtggccatctcggcgcgcactgacgagtcggagatgaggtcagggcaggcagtgccagcgggagggcaggacagcccgtggcgcgtgccggaggtgctcgaccggactcaccggggggagaggtcaccgatgtccgccgccgggcgcgctcggcctgggatgcatgctgccacactgaggactgagcccgatgccgttgcccgctccgngatggtaggag

SEQ ID NO: 12343 - DNA, 1670 bp, Oryza sativa
  Clone ID: PAT_MRT4530_1847C.1
aaggaaaagatgcagcattcaacttgctgcacaaatggcacacccaaaatttcttgggaaaaaaacatgaagtttaacatacatttttcactactaattggagctcaacaccagagaaagctagaaaaagcaaatcaacacccagagaaagctagaaaaagcaatctggaaaacaaaacagctaactaagatttacaaatacatgtgcatttaaccccatttacatataacaatgttggtacaaagaattatctacaacaactgcacgcatgagtgcaaaagtgatcatctagcactcctatgttctagccggcttcaccatccgcatcttcatcaggacgccattctagtagagcttggttctgtggcttctcattggaagatctaacatcaactagtccttcgatagagcagttagacagctctaacaacattgcgcagaacccgcaggagcaagatctgcaaactgtcccatggttcaacgcagagttaaacctccctaaagaatccttcaatttctttatctccatagattgcttctgagctagttcatgtgattcctgcagtttcctcagggctccactcaattttctctgctctttggaaacctgagcctctagttcctggatttgttggatagctgcctgctcaatgcaagaccgacgcttgtattcttcctcaagcatgccagttatttggtaccttagttcagccatttcttgggtgagatcttctgcatcctcctttgccttcagtttttgttctcgaagctcttccttgagctgctcaatcagtagttcagattcttcacttcgctttgccatattttcaagtattgcaccgcccctctcatagtattgaccatcaatcttctcaattgttttgtcaacttgctcatcagatgttaaagcagtggcaactcctccagggaacaaccgttttagttctttattctcaagtaaaagatggtcaatagtcttatgtgcctcttgcagctggagctcatactccctcagtttattatctgctatggctttatcagcagaaacatgctgaccaaagctgtcagcatcaaacagtctctgttcaagtgtagttaaatcaagttttaagctctcaatctcacattgtgaatccaaatttacattctcaagcttctctatttgtaaggctgcctttttcaatttctcttcttggcatcggacttcttccatcagaagccagcactgagaatcagaccgcatcagctcatcatctataactctaactctttcaggaaacttttcaagttcagttagtttcagttcaagactgtggatatgctctcccatgatgtttgcttcaacatttcggatatttagctgatcctgcaaatagtcaatttcctgatagcagttcctcagttctgtttccaatttctcgatgtaatgcctgtccttctgacaggccctaaaagctgcatttttgtctagcagcattttctcttgattgttctctcttttttgcagaacctttgcaccattaacaggataatgcccattgccattggagctactagacatctgcaaagaaagcaacggataagccctactgacagaaaatttggggaactcaattaagatgacattatcttgtccccacttgttcttcactatgacagcatcacccat

SEQ ID NO: 12344 - DNA, 2452 bp, Oryza sativa
  Clone ID: PAT_MRT4530_18480C.1
atctcttctttgctgctgctgctgttgatcggcccagcgagcagtgacgatgctgctgctgctgctgctgctcgtaccagtacaggcggcgtcgccggcgacgaactcgcgctgctctctttcaagtcatccctgctacaccaggggggcttgtcgctggcatcttggaacacgtccggccacggccagcactgcacatgggtgggtgttgtgtgcggccgccgccgccgccggcacccacacagggtggtgaagctgctgctgcgctcgtccaacctgtccgggatcatctcgccgtcgctgggcaacctgtccttcctcagggagctggacctcagcgacaactacctctccggcgagataccaccggagctcagccgtctcagcaggcttcagctgctggagctgagcgaaaattcactctctggaggtatcccttcgtctctgtgcaatctcaccagcctctcctctctctatctgaacaagaatacactgtctggaacaatcccttcgtgcttgggcaatctcaacagcctcttggagcttgctctgtctgacaacacgctgtctggagcaatcccttcatctctgggtcgattgtctagattgtcttcccttcacttaagctctaacaatttaagtggactgatcccggatcctatttggaacatctcctctctcaccgtgttcggtgtccagtacaacatgctgagtggtatgcttcctgcaaatgcattcagtacacttccccatctccaagaggtatacatggataacaaccagtttcatgggcatatccctgcatcagtagctaatgcttccaacatctccatgcttacctttggtgttaattcttttagcggtgttgttcctgaggaaatcgggaggctgagaaatctcggcacgctggttcttgcggaaacccttctggaagctgaaggaccaaacgattggaaattcatgacggcattgacgaattgctccaatctccaacacgtagaaatgggtgcctgcaagtttggtggtgttcttcctgactctgtttccaatctttcctcatcactagtatatctctctattggagccaataaaatttcaggaagcttgcctagagatattggtaatctcattaatctagaatcccttgttctctttaacaactccttgacaggatctcttccatcttccttcagcaagcttaaaaatttgcatcgtctcattctattcaacaacaaattaagtggttatctgcaattgaccatcggtaatcttacacaaataactaacttggagctctatggtaatgccttcagtggcacaataccaagcacacttggaaacatgaccagattgtttgaactaaatcttgcccacaataactttataggagcaattcccactgaaatatttagcattcccacactctctgaaactttggatgtgtcccataataaattggagggatcaataccaaaagaaataggagaacttaaaaatattgttgaattccatgcggattcgaacaaattatcgggtgaaatccccagcaccattagtggatgccaacttctacagcatctctccctgcaaaacaatttcttaaatggcaacatcccaattgctctgactcagttggcaggtcttgacacacttgatctctcagggaacaatttgtcaggtcagatacccaagtccttaggggacatgcctctgctccactcgctgaacctttcattcaacagctttcaaggagaagtgccaaccaatggtgtttttgcaaatgcttctgaaatttatatccaaggcaatgccaatatttgcggtggcatacctgaactacgtcttccgcagtgttccttaaaatcaacaaagaaaaagaaacatcaaattctactgatagctcttactgtctgtctcgtttcgacacttgcgatcttttcattactctacatgcttctaacctgtcataagagaagaaagaaagaagtccctgctatgacatccatccaaggccacccaatgatcacttacaagcagctggtaaaagcaacagatggtttttcaccagccaatttgttgggttctggatcctttggctctgtttacaaaggagaacttgatagccaacatggtgaaagtacaagttctgttgcagtcaaggtactaaagcttgaaactcctaaggcagtcaagagtttcactgccgaatgtgaagcactacgaaatatgcgtcatcggaatcttgtcaagatagttactatttgctcaagcattgataacaaagggaatgatttcaaagcaattgtgtatgacttcatgcccaacggcagtctagaagattggctacaccctgaaacaaattgtgatcaagcagagcagaggcacttaaatttgcatcaaagagtgaacatactacttgatgtcgcctgtgcattggactatcttcactgcc

SEQ ID NO: 12345 - DNA, 2472 bp, Oryza sativa
  Clone ID: PAT_MRT4530_18481C.1
atggcgctccaggcatcgtcgtcgccgtccatgttccgcgcgatcccgacgaacaccaacgcttcttgccggcgaaaggtcagggcgagcgcggcggcggcggcggcgaacggcggcggggatgggaaggtgatgatgaggaaggaggcggcgtcgggcgcgtggaagatcgactactccggcgagaagccggcgacgcctctgcttgacacggtgaactacccggtccacatgaagaacctctcgacgccggagctggagcagctggcggcggagctccgggcggagatcgtgcacacggtgtccaagaccgggggccacctgagctccagcctgggcgtcgtcgagctcgccgtggcgctgcaccacgtgttcgacacgccggaggacaagatcatctgggacgtcgggcaccaggcgtacccgcacaagatcctgacggggcggcgttcgcggatgcacaccatccggcagacctccgggctcgccgggttcccgaagcgcgacgagagcgcgcacgacgcgttcggcgcgggccacagctcgacgagcatctcggcggcgctcgggatggcggtggcgagggacctcctcgggaagaagaaccacgtcatctcggtgatcggcgacggcgccatgaccgccggccaggcgtacgaggcgatgaacaactcgggctacctcgactccaacatgatcgtggtgctcaacgacaacaagcaggtgtccctcccgacggcgacgctcgacggccccgccacgcccgtcggcgcgctgagcaaggcgctgacgaagctccagtcgagcaccaagctccgccgcctccgcgaggcggcgaagacggtgacgaagcagatcggcgggcaggcgcacgaggtggcggcgaaggtggacgagtacgcgcgcggcatggtgagcgcgtcgggctcgacgctgttcgaggagctcgggctctactacatcggccccgtcgacggccacagcgtcgacgacctcgtcgccatcttcaacaaggtgaagtcgatgccggcgccggggccggtgctcgtccacatcgtgacggagaaggggaagggctacccgccggcggaggccgccgccgaccggatgcacggcgtggtcaagttcgacccgacgacggggaggcagttcaagtccaagtgttcgacgttgtcctacacccagtacttcgccgaggcgctgatccgggaggccgaggccgacgacaaggtggtcggcatccacgccgccatgggcggcggcacggggctcaactacttccacaagaggttcccggagcggtgcttcgacgtggggatcgcggagcagcacgccgtgacgttcgccgcggggctcgccgccgaggggctcaagccgttctgcgccatctactcgtcgttcctgcagcgagggtacgaccaggtggtgcacgacgtcgacctgcagcggctgccggtgaggttcgccatggacagggcggggctcgtgggcgccgacgggccgacgcactgcggcgcgttcgacgtcacctacatggcgtgcctgccgaacatggtcgtcatggccccgtccgacgaggcggagctctgccacatggtcgccaccgccgcggccatcgacgaccgcccctcctgcttccgctacccaagaggcaacggcatcggcgtcccgctaccacccaactacaaaggcgttcccctcgaggtaggcaaagggagggtactgctggagggcgagagggtggcgctgcttgggtacggttcggcggtgcagtactgcctcgccgcagcgtcgctggtggagcggcacggcctcaaggtgaccgtcgccgacgcgaggttctgcaagccgctggaccaagcgctcatcaggaggctggccagctcccacgaggtgctcctcaccgtcgaggaaggctccatcggcgggttcggctcccacgtcgcgcagttcatggccctcgacggcctcctcgacggcaaactcaagtggcggccgctggtgctacccgacaggtacatcgaccacgggtcaccggcggatcagctggcggaggcagggctgacgccgtcgcacatcgcggcgacggtgttcaacgtgctgggccaggcgagggaggcgctcgccatcatgacggtgcccaacgcgtagcagatgcgtggcgcctctggtagagacaatgctttgtacatgtagagatcagtgaattgtatattagtcggcgtcgggataaatattgattagtgatgctgaggggaacagttacagcttttttgctcttcagttgttcgtggacggagacccggctgctcgatgttcgatcgcttgtatatctaagaaatgttgtaagtggatagatttattgatcatgataaggattagtcgggtattaattgaaagcatcaccctccgactcaacggaaaaaaaaaaaaaaaaaaaaaaaaaaaaaaaaaggggggggggcctcgtgc

SEQ ID NO: 12346 - DNA, 459 bp, Oryza sativa
  Clone ID: PAT_MRT4530_18482C.1
atggcgacggcgcgcggcgacgcgacggcgcgatgggacggtgacggcgacgacaacggcgcggcagcggcggcgcgaggcgcgaggcggcggcatggggctcggggcgacgcgacgggtggcagcggcgatacgcggggcccgaggcgacgtgatagcgagcggcgcgaggcaacgcgatgggcgggctgcgcggcagcggcgatggcgacggcgtgcggcgacgcgacggcgcgacgggacggcgatggcgacggcgcggcagcggcgacacgggatgcgagtcggcggcacggggctcggggcgacgcgacgggcggcagtggcgaaccgcggggcgcgaggcgacgtgacagcgacggcaacggcgacgcgacggcgacggcgacggcgcgcggcagcggcggcgagttagggcaagagaccgcaatcgagcacctatggggcaatgaacagtga

SEQ ID NO: 12347 - DNA, 231 bp, Oryza sativa
  Clone ID: PAT_MRT4530_18483C.1
ttctttttttttttttaactaaggatgcccttgtgttgactacgaacgcagcgcagcaaattctatcagccgacctaaaaatcaagaacggagaccgacattggtcggtcagaagagtggcagcagcaatcaacagcacctgagaactaacgtaccaaactgcggcagcagcagacccgagtcctttatagctagctggacacgcacaggggccaaactaagacagggatc

SEQ ID NO: 12348 - DNA, 1008 bp, Oryza sativa
  Clone ID: PAT_MRT4530_18484C.1
tgtggcgccgtggtacgaggcacgacgccagtgtgactggcgccccaccctactgccacgtcagctcggtcgcctacatggtgccacggtggcacgaggacggcgccagagtatctagcgcagccatgttagaggacagcgccagcctctcgatttctaacttcaaatcttcaatcacagtcacagtaggctgcgactgcgtcgttgactcgttgctgccttgccggccactgtgccgctgacctgctgcctgcctgcctcggcgccttgcgccctcgcggcacctcgccagcgagcggctcgccaccttcccggcggcgtggcggcgcaggcgctggagtgctggaccaccgcctccgcctggcctgcctcctgtctggcccatcgccggctcactggacgccgccacggcaccttgccgctcggcgctcgccagcttgcaggcttgcagctcaccggaggtcgccacctgctccgggcatgcactggaccaccggggcaccgcctggcacgcctcccgtctggcccctcgccggacgccaccgcctgctcggccgccgcccgccgcccgcgcctattcgcctgtccattggtctttgtggcttcttgtctaccgatttctaacttcaaatcttcaatcacagtcacagtaggctgcgactgcgtcgttgactcgttgctgccttgccggccactgtgccgctgacctgctgcctgcctgcctcggcgccttgcgccctcgcggcacctcgccagcgagcggctcgccaccttcccggcggcgtggcggcgcaggcgctggagtgctggaccaccgcctccgcctggcctgcctcctgtctggcccatcgccggctcactggatgccgccacggcaccttgccgctcggcgctcgccagcttgcagctcaccggaggtcgccacctgctccgggcatgcactggaccaccgaggcaccgcctggcacgcctcccgtctggcccctcgccggacgccaccgccgccat

SEQ ID NO: 12349 - DNA, 792 bp, Oryza sativa
  unsure (1)..(792): unsure at all n locations
  Clone ID: PAT_MRT4530_18485C.1
tttggtgnttgtttgttgtgttggttgggcggcgttgactttgncccgggtcctggtgtgttcgtgtttgtccccatgctgtaatntgtnctcttttgtgggggatcggttgtccnnccttcaggtctcctggtccggttttcccggggttgcaaccccatggtgtcggggcgtcgtngtccaagatgtggaggaaggagngtggttcacaagcccnacttcatcccagcgttgacaaaccatgtcacccaccaaagntccgacgagcccctgaccgttccaaaggagcccagcttcctgagcgtgaaatgctgcattggaggagagtgtcatcccatttttctacaatcgccaagccatcaaaataatattaatacancactaatagaggggaattattgcacatatataccatcaccctgctccatgaacnaactattttttcccgtctgttcatcagttaatccatctgctattaagtacagtntcgtttgtctcacatgtaccaaaccgttgtttttaatntcgtgttgccttctggcacgaatcttcacgtaggtatagtagcatagagaaacgaaatggctgccacatatgtaaatgcctgtgttganngttgcctttcgctttcacttctttgttgcctttgctttttggttgctctctcntgtggtgnccccgtttcttcactgaagactaggagagatatatgtgcgtcatccatgtatatgtccctgatctggtggtaacatgataataaagctttgcattgtgacaaaaaaaaaaaaaaaa

SEQ ID NO: 12350 - DNA, 399 bp, Oryza sativa
  Clone ID: PAT_MRT4530_18486C.1
cgccgcggcagaaccgccgggacccacgccgcttgtttcaacgcaggcctggacgatctgggggtggtcttataaaatgcacaggcgaagcttggagcatatgcggatctcgcaactgaacgtggatggctgcttgcacccttcgcctaggcggcaaaacttgatgaatgttgtcaatgtacatctgcacccctgctgtctttagcaccataccaaaagctatcctgttcctagtgcacttggtgggttaccggataccgatggatgataggctggatggccgtgttggtacttggcgaggtaatgctcatcacttggagtggtttgggagtatatgccctgggagagttatgaataaccatatcgttccaggttatgacatgctatgcaatgaacaat

SEQ ID NO: 12351 - DNA, 280 bp, Oryza sativa
  Clone ID: PAT_MRT4530_18487C.1
gttgcggtaacagaaaattaacatcaatcagcagtttaactgaaattgtggcactggctggacatattacattggtgctccgggaacaatatacaccccaagccttgcttacggttacaactgttcttaaaattcaatactatatttcagagtgatcagatactgggcactattacagtgtgaaactctgaaagaagccatgccataatccaatgcttacagtgcccagggcttgaagagctccaatgcatgctgcatggagagcttgaaacaacttttt

SEQ ID NO: 12352 - DNA, 1095 bp, Oryza sativa
  Clone ID: PAT_MRT4530_18488C.1
atggcgcaaaatgtccaagaaaatgagcaggtgatgagcacggaggacttgctccaagctcagatcgagctctaccaccactgcttggccttcatcaagtccatggcacttagggccgccactgacctgcgtattcccgacgccatccactgcaacggcggcgctgccaccttaactgacctcgccgcccatgtcgggctgcacccgacgaagctctcccaccttcggcggctcatgcgcgtgctcactctctccggcatctttaccgtccatgacggcgacggcgaggccacctacacgctcacccgagtctctcgccttctcctcagcgacggcgtcgagagaactcacggcctctcgcaaatggtgcgcgtgtttgtgaacccggtcgccgtggcttcgcagttcagcttacacgagtggttcactgtcgagaaggcggccgccgtgtcactgttcgaggtggcgcacggctgcacccgttgggaaatgatagcaaacgattccaaagacggcagcatgttcaatgccggcatggtagaggatagcagtgtcgccatggatatcatcttgaggaagagcagcaacgttttccggggcatcaactcgcttgttgatgtaggcggtggctatggcgccgtagctgcagccgtagtgagggcattccctgacatcaagtgcacggtgttagatcttcctcacatcgtcgccaaggctcccagtaacaacaacatccagtttgtcggcggtgatctttttgagttcattccagcagccgatgttgtgctacttaagtgtattttgcactgttggcaacatgatgactgtgtcaagattatgcggcggtgcaaggaggcaatctcagcgagggatgctggaggaaaggtaatactcatcgaggtggttgttgggattggatcaaacgaaactgttcccaaggagatgcaacttctctttgatgttttcatgatgtacaccgatggcatcgagcgggaggagcatgaatggaagaagattttcttggaggctggatttagtgactacaaaatcataccggtgctgggtgttcgatcaatcattgaggtttacccttga

SEQ ID NO: 12353 - DNA, 751 bp, Oryza sativa
  Clone ID: PAT_MRT4530_18489C.1
catagtaattaccctcccgctaccgactgcccgtgtccatttctcggcactttgttttcagtttctcatattctaaccttcgctgttgtcttaattggctcttttgttcagtattgcttttagggtcataacaacccagcaaaaactcccaaacttctcctttgatatttgggtgggtacccccacgctgcactcttttgatcattccagctatgtctaggacaccttcttcattgtgaagcagcttccatctccttggacttagagtgaggccaggcctgggcttgaatcgcgtcttggcggcgtcttcgcggcactcggggcggatggggtagaccgtgtccggatcgatgagcatgtccggatcgttgtagcagcacgccatgaacatcatcctgttcatcttgaccgcccaaatcgagccgcggccaaagaggcaggagggatcgagacgagaagacgccggccgctgctggtgatcagctggaaccacacggacgggggggcagtgcgcagtgaggacgaatcaagatttgttcttcactccctcctttcctctcctttcttccttcctttcctgatttgtttgatgatgtgccttctctgtgattgagatccttggccgtagagagagagagagagaggagagagaacggaaggtggtgtaacggctaaatttggggggtcgggaggagagagacggggagacaaagaagcgcagcagctgctgctgcttggtttgtatcagggc

SEQ ID NO: 12354 - DNA, 299 bp, Oryza sativa
  unsure (1)..(299): unsure at all n locations
  Clone ID: PAT_MRT4530_1848C.1
cagtatcaggagtatggtttcaggggaggccacctagaattagcgggnaaaagatctgaatctcattgtctttttgggtagatgaggtttatttgcgatctatgctttgattgnnctgtgggtatcatttattgatatggatgttgttaatctgaatctaccactgctagtncgggtctatcatggttgctaattaagatgaaggttgaaattatggtgaattcattttggtataatgatctgtgaccatgagttcatgctgnaaaaaaaaaaaaaaaaaaaaaaaaaaaaaaaaaaaa

SEQ ID NO: 12355 - DNA, 1303 bp, Oryza sativa
  unsure (1)..(1303): unsure at all n locations
  Clone ID: PAT_MRT4530_18490C.1
gggccggnnttcccgccgtcgccccgcgtccggcctatttacgctttatcagccgatgtggtggcaagcttggttgccttgaggaacaacaggtaattaacagtactcatcctatcttattgtgaagcagcattcttcaacttgccttctcaaaccagttagcctatgaaatagtattcaatgttggtttgggtctatggtttccctgctttgatggccagtgatggtgaggccaccgctcactgtatgactaacatgagcaacactactgcactgcaaatccatatacttctgtaaagaagttgtattgactgttactgctgtcttactggctttcatattagccttgttcccacaattctgagctattcttggtagttttagccctctcatgtaaaagaagtggtgtttcttttcagcaaaactttcccttttctggctcaacaaattaagagcgaagggaaatagtgtgtggttattgattaattgctcacgatatattaaactcagaagccctggagcctaaagtaaacatactacatggttatgtcatgggcttcagcagtagaagtttcgtacataagactgttgttgcattcatgtttttcattttgcatcactgttaaacttcatccacgatcgcctcacgttatatgtttgtttaatggattctcacatatgtttctcgaggatgcgtatgttcagcgatggtgctgttactattggatgctggatgcctgccaaggcagtcttttatgcaagcacacatgtgctttgttcacctcagtgcagctgacgcatgctagctggttcccaaatctatcatcatccagggctatgccacccggaggtaaagatgctggagcttcatcgaaggaaggaatgtacaggtggtccatctgcggtgtctgaatctgacgaccgataaattatcgtccctacacggactacagtccaggcaacatgatgacagaatggttgaccactgacgcctcgaatggattgcccgagcattcactgacttcaccaggcacaatcattgcctggggcgcgccgtccaggcagccaacaccgccgatttcaggcgtcagatacacgggatcacagagctcttgttccacattcttgtcacattctcatttgcttatgacttcagaacttggtagtatattcttgccaggaatgctcatcatgtgcccttgtgaagcagttttgttgtatagtagtagaatgcatcccaaattaacacccagtttctatgcttcgtacttttgaatatatttttttaaccttcgctatacgt

SEQ ID NO: 12356 - DNA, 354 bp, Oryza sativa
  Clone ID: PAT_MRT4530_18491C.1
aaatacaacttatacgatcatatatttatatgcagggaaccatcacaattggatgaaaaggtttggtcacaagcgtatatgggaagcactgattgagtttagcaaacaaaaaacggctgaccaaaaactattcagaaaggctaaatggtcaatctttccctgtacaatacgatgatttgccacattattggctacggtgtatgacactatgttaggctgtagactctacgcaggactcacaggtgagatgtctttgcctaaaagcccagcggttgcttagacaggattctacaggatgactagagactcccaaaccagaacagatttaaacccaggaatctgaacggatgaaaa

SEQ ID NO: 12357 - DNA, 545 bp, Oryza sativa
  Clone ID: PAT_MRT4530_18492C.1
cggaggtggctgcaggaggagtgaagcagcggcgggtgagctccgccggcctactctatccaccgagaaggtcgagaaagctcgccggcctccccaccccctccctcatcggcgtctccctctctttctgcaccgccgtcgtcgcctgccgccgccgctgtcacctccacctacgccgaccgccggatccgccgcccccatgcctcccctccaccggatctgcaaggggagggaggggagccgaagggagagggagggaggggccgcgcgccactgttgtcacccgccgccagatctgccgcccccatgcctcccctcagccggatttgcaaggggagggaggggagccgaagggagagggagggagggaccgcgaggcgccgtcgtcacctgccgcctccacctgcgcctgccgccggatccgccgtccccatgccttcccttcgccggatctgcaagcggagggaggagaggggaagggagccgaagggagagggagggagggaccgcacgccgccgctgtcgctgctgtgaggagaggatga

SEQ ID NO: 12358 - DNA, 394 bp, Oryza sativa
  Clone ID: PAT_MRT4530_18493C.1
gatccaaacagcacatatattattatagcacaggggtgatacatatcaaagtgctctgaaccaaaacgcgcaaaataatctaattcacaaggctggtacatgcggatgccaacgtgccgaggcatacatcatatgcacaatcaaaatcagatgaaccatcatctgttcattcatcacaagccacaacacacctgaggccggcactctgatgcagcaggtcaaacgcctcgtcgatgccagtcccgtacacgctacaagtaacgtactcgaacaccttgctgttcttgacgcagtacttgggaacgagccatgaatctaggcttccgctgacgaaaccggcgaacgctgtttacttccagacacggccagtcacgagctggaacggtcaggtcga

SEQ ID NO: 12359 - DNA, 346 bp, Oryza sativa
  Clone ID: PAT_MRT4530_18494C.1
gctgcaggaattcggcacgagggtcctgctccggctgatcaacgctgcgctcaacgacgagctcttcttctcgtgtggccaaccacacgctcaccgtcgtcgacgtggacgcctcctacgtcaagccgttcgacacggacgtggtcctcatcacgccggggcagaccaccaacgtgctgctccgcgccaagccgacggccgaggccgccggcgccacgcacctcatgatggcgcgcccctacgccacgggccgccccggcacctacgacaacaccaccgttgccgccgtcctggagtacgcgccaccggggcacatcaagagcctcccgctcctccgcccgtcgct

SEQ ID NO: 12360 - DNA, 939 bp, Oryza sativa
  Clone ID: PAT_MRT4530_18495C.1
atggcgcgggtgcggcgaccgggaatccgggatgcgtcgtgggcattagtacggcatcagcgtgggcggccgcgcgggcctggtcaggcagtggctgcgtgggcactcggtgccagcgtggttgtggcaccggcgcagcgtggcagtggcgcggtggctcagccaccgcatggtggacagcgcggccatggtgcggcggctggtcagcacagcacggccctgcggcggcatgtctttcgttttctcttcttcatcaccttcttcttcgtttttctttctcttccccttttcctgtcacaggccaacaccttcactaagtgtggcgacacggcggaccggttacgcacaggcgcgccggctacggcttgggcaccggcgcccggggccaagtggccgcggcgggtggcgtcgtcggcgccgcggtggggcgacggacgggagaggcggacggaaaccccccactgctccgccttggagagaaggtcgcggtcccagccatggcggtggccactgatactgcaagaaagaattgcctttggagaggaaataactttggatcaaccagaaaatctctggcctcatgggagaagaggtattgccaaatgtaacataaggactggaaccacagctctattctggactgacctgtggaatgatcaattcaaatgtcagcagtatcagcacctctatgcatcattcctatataaaaatgattcagtacaggccatgtgtgcaagaccattggaggattctttcatgccaccattttcttatcaggcttattgtgaatattttcatcttcaaactgaactggcacatcttaacctacagcaaggaactggtgattcatggagtttcatttggagtagcagttgttatactcctaaaaggttctacaaactcaattttgctaccatccaggatgaaggatccccttaa

SEQ ID NO: 12361 - DNA, 792 bp, Oryza sativa
  Clone ID: PAT_MRT4530_18496C.1
atgcggccgcctggcacgttctcactcacggatgacgcgaagcggtcccgacccgacccgacccggagcctgactggccggtcggtcagggtccagccggagaaaaaccgggagccatggccaccaccaccccagtacaaacaccttgcgtcctctcaactgtaccctcctccgcctctccaagaacccaccacctccgccgcctccgcttccgccgccggcgccgccattgccaagcctcgacgtgaagcagccatcatgaagcgtctcctcaggcgcctctcccgcgtcgccgcggccgacgcctgcgccgccgccgcgtaccagccgctccgggctgaccggacggcgaagctgtccgcgtcctcctcctcctccctcgccggcgcgaggcggctggggtgcggcgcgcgcgtcccggaggggcacgtgccggtgtgcgtcggcgaggagggcgggcccgtggagcgctacgccgtgcggacggacctcctcggccagccggcgttcgcggcgctgctccggcgggccgcccaggagtacggctacggccacccgggcgcgctccgcatcccctgccccgtcgccgacttccaccagctcctcctccgcctctccgccgccgccgccggcgacggcgacgacgacgacgaagacggcggcggcctggtctactactagaagaccagcacgttatttcctttacacggtcgggtacgagactggcgcttatcgctcgcgggagctacaccgtacatatcgagggcgtatcagtctttcgtacccgatgtg

SEQ ID NO: 12362 - DNA, 516 bp, Oryza sativa
  unsure (1)..(516): unsure at all n locations
  Clone ID: PAT_MRT4530_18497C.1
cggaattcccggctcgacccacgcgtccggccatctcttacctgagggaggcgatcgtgaaggggctggggttccagtcggaggagctcaaggtgcacggcgctcgccgagatccggcgtggcaagagcgggaagcgagccttcgacccgaccctgccaccgttccagctcgccgggcccatggagctctggatccaggacggcgacgacgttaggctcgccttgccgcatttttttgaagcagggacgctgaagaaagtagtgctatcagatgggtgccgtggtaacagtgaagggtgccaaggctgtgagcctccggttgccacttgaattaccgctccctctcaaccgcaccancttacaagggccggttgtcaagcttgatatccattgcgcaaacgctacggggcgccgcccggtcgaaccagaagccgctgctctccctccgcatcgaaggtccgacgtcgntgtcctcgactcctttcatgtctcccaatgacaggctcaagctcaaac

SEQ ID NO: 12363 - DNA, 809 bp, Oryza sativa
  Clone ID: PAT_MRT4530_18498C.1
gccacgcgtccgttcctcctctcgcaggagaaaatttcgctggttgaatcggagggaggcagcaatggccgctcgagctcggtggcgaatcctcgcgctgccgctcgctcttctcctagcggtcgggtcgtcgcctggcctcgtgaggcaggcgtcgtcgtcggcggcggccaagcctcccgtccccaaggccatctcggacctgagggaggcgatcgtgaaggggctggggttccagtcggaggagctcaaggtgtccgggttcgacgtgcgcgacgcgctcgtggggcaggcggtggcgtacgagttcgacatcgaggtcgggaggaaggtggtgccggtgcgcctgctcgaggacgtcaaccgatgggacttcgtcgacctgcccatcttccggtcccaggccgacgccgacgacacggcgctcgccgagatccggcgtggcaagagcgggaagcgagccttcgacccgaccctgccaccgttccagctcgccgggcccatggagctctggatccaggacggcgacgacgttaggctcgccttgccgcatgatgtggaagcagggacgctgaagaaagtagtgctatcagatggtgccgtggtaacagtgaagggtgccaaggctgtgagcctccggttgccacttgaattaccgctccctctcaaccgcaccacttacaagggccggttgtcaagcttgatatccattgcgcaaacgctacggggcgccgcccggtcgaaccagaagccgctgctctccctccgcatcgaaggtccgacgtcgttgtcctcgactccttccatgt

SEQ ID NO: 12364 - DNA, 2900 bp, Oryza sativa
  Clone ID: PAT_MRT4530_18499C.1
ccccacccttttctccatttcgtggccaactcctccgcagacctgcccttccgtatgggccttcccggccgtcgccaccgcggcgccatggccggccgcgccctcgtcgtgctgctgtggtgcgtgtccgcctccgtgttcctcccctccgcccgcgcgcagaccaccaccttcaccagcgccatcgacggcaagaaggcgaccaccttctccttccccacgttcgacaagtccctgatgcagctcggcgccaacctgaccttctccagcaacgccaccgtcagccagagcgcgctgcaagtcaccccggacagcagcaacaatcctctggactacctcgtcaaccaggccggccgcgtcttcttccccaccccgttcgtcctgtggtcctccaactcgtccaactccaccgccgatggcaagtacgtcgcctccttctccacggtgttcagggccaacctctaccgatcaaacacgaccatgaaaggagaggggctggcgtttgtcatcgcgtccaccaacgccatcaacccgccgccgggcagctacggcgagtatcttggtctcaccaacgcctccaccgacggcaacgccaccaacgggttcgcggccgtggagctggacagcgtgaagcagccctacgacatcgacgacaaccacgtcggcctcgacatcaacggcgtccgctccaacgcctccgcctccctcacccccttcggcatccagctcgcgcccagcaacaccaccactgacgacggcaactacttcgtctgggtcgactacaatggcacgtcgcggcacgtgtgggtgtacatggccaagaacgacaccagaaagccctcgaccccggtgctcgacgcgccgctggacctctccaccgtcctccgcggcaacaagggctacttcggcttctcggcgtccaccggcgagacgtacgagctcaactgcgtgctcatgtggaacatgaccgtcgagatgctccccgacgagggcgccaccaagaagaaggcggccctgcccggatggaagctcggggtggtcgtcggcgtgtcatcctgcgccgtcgccgtggtgctcgggctgttcgccgcgctgtacatccggaagaggaggaagaggatcggggacgacccgagctccgtgttcaacaccaccattgatttcaggagcatcccgggtgtgccaagggagttcgattacagggagctaaggagagggaccaacaacttcgacgagaagatgaagctcgggcagggcggctacggcgtggtctaccgcgccaccgtcgttggggagaacggccagaacatggaggtcgccgtgaagcagttctccggtgccaacaccaaggggcaggaggatttcctcgccgagctcagcattatcaaccgcctccggcaccgtaatctcgtcaagctcgtcggttggtgccaccaaaatggcgtcttgttgctggtgtacgactacatgccgaacggtagcctggacacgcacctcttcggcgggccggagtcggaggtgctggactggcagcagcgctacaacgtcgtcgccggcgtcgcgtcggcgctgaactacctccaccacgagtacgaccagatggtgatccaccgcgacatcaagccgtccaacgtcatgctcgactccgccttcaacgcgcggctcggcgacttcggcctcgcccgcgcgctcgagtccgacaagacgtcgtacaccgacatcatcggcgtcccggggacgctggggtacatcgcgccggagtgcttccacaccggccgcgcgacgcgggagtcggacgtgttcggcttcggcgccgtcatcctggagatcgtctgcggccgccgcatctcctgcagcaaccccgccgggtgcagccagctgctggaggccgtctggaagctccacggcgcggcgggcggcggcggcggcggcggccgcatcctcgaggccgtcgaccagaggctcgccggcgagttcgacgaggccgaggccgagcggctcctgctgctgggcctcgcgtgcagccacccgaaccccggggagcggccgaggacgcagaccatcctgcagatcctgacgggcgccgccccgccgccgcacgttccgccgtcgaagccggcgttcatgtggcccgcgatgcccgtcgcgctcgatggcgacgacgacgacgagacgtcgcgcagcagcacggtgatgaactcgtcgtcgtcgtactacgtgtcctcgtcgggttggacccagaactaccaggtcagcaaggagcacgaggtggcggacagggacgtggcgacggtgtgaccgtagacgagtccacggcccacacgtgcggccgggacccgacccatcgcatcggatttggcacgttaccgtggagttggtgacaacgttgagaacaaagatgggacggatgaaaggtgtaaataatgtccatgaatatgctatcgagctttgcattggttgtttttttgctctgggagcttgttttatacagtggaatacaaaaatactgggggtgagatggtggtggattgggtggggcctgtgagttaaaactaagataatatcaattggggagacaatgtaggtgtagcactggcgaggagaatatttgctatgattgttaagggtatgcgtaattgatagagtgtatagaaatgtttatagtgcattcagcgcccagaatgcgaatttttatttaatctatcaacattcaaatgtataaactacagtgagagtagtgatatttcgaatttatggcaatcgtgagttggaccgcgaagtgaatcgtagtggtagagtaccaaggtatatatatattgaggcgaataaaactatatcatattatgaatgcgatgaaggaagataggcaagagagatgattgataaacgttgttatataa

SEQ ID NO: 12365 - DNA, 2554 bp, Oryza sativa
  Clone ID: PAT_MRT4530_1849C.1
atgaagaagaggaagggtcctgctgttgatttgaagtcctttttggagaaatctgctgcaaagaaggcaaatcgaagccaaactcctggtgagggcaatttgaatccgattgatagtaatttaaatccttcttgcaatgagagtcagatgcaattagtcatttatcaaggtcatcatcatgagaatgagagtggtagtccagcaagtagtagcacaataccaattgatccagcgattagtgatatgccaggatcaaatgatgaatctcaatctagtgatgaagacaacgatggtggcttgtatgacatagagcatgatcctggactgaggactcctatctcaaggtatgatgtcaatgaccaagattcagttagaagggcatacattgcattggggccatgccgaccaaagatgaagaaagatgatttcccgcaacatagttgtggaggtatgcgccgcttcttaccaaaatggtttgatgagttcaagtggcttgagtatagtgtgaatcgggatgccgcatattgctttgtttgctatttgttcaaagaaagcaatcatggtggagatgcttttgtcaatggagggtttagaaattggaacatgaaaggtagattccataagcattgtggcgccgttaatagtgctcattgtgaagctgaagagaaatacattttgttcatgaaacctaaatcatcaattcatgagtcctttgcatcaaatagtgcgcaagttaaggccgagtatgaagctcgcttgttatggtcgcttaagtgcataagatatatattgcggcaggggttggcttttcgtggtcatgatgagtcaaggaattcagagaataaaggaaatttcagggaacttttgcaatggttggcagggaactttgaagaggttaataaggtggttctaggaaatgctcctatcaattgtcaaatgatagatcacgagattcagaaacaactcattcgctcatgtgctcatgaaacaactaaatttatcatagaggaacttggtgatgagtgttttgcaattcttgctgatgaatctagtgatgcctaccaacaagagcaattggctctttgcttgcggtttgttaataaagcaggacaaccggttgagcggtttcttggccttgtccatgttgaagataccacttccttgactcttaaagaggcaatcaagtccttgcttatgcaataccaattgccattgtccaaggtacgtggacaaggatatgatggtgctagtaacatgaagggtcatgttaatgggttgaagaaactaattatggaagattctccttctgcttattatgttcactgctttgcccatcagcttcaactaacccttgtagcggttgctaaggagaacactgattgtgcatggttttttgggcaacttgcatatttgttgaatgtctttggaatgtcatgtaaaaagattcgcatgcttcgcatagctcaagctgagtatatgattgaggcatttaaattgggtgaaattgaaactggccagggtttgaatcaagagatgggcttagcaaggccaggtgatacacgttgggggtctcactacaaaactgtaatgcatgtgatgtctctatatccatcaatcaagaaagttctcttcagaattggcaaagagtgtacaggggttgaggctataggagctcaaactatgctagaagtatttcaatctttcgagtttgttttcttgctccacttgatgaatgacatatttggatacaccgctgacttttgccaagctttgcaaaagagggagcaagatgtagtgaatgcgatggatcttcttgcgttcacaaaggtagaactagatgttttgagagaagatgatggatggcgagaattccatgggaaggtcacttctttttgtgtgaagcacaaagttaaagttgttgacatggatgggaagtataagcctatacaaagatcaaggaagttctttaaagatgccattaattaccatcggtttcatgctgatatgtttttgggtgtcattgatagacaacttcaagagttgaataacaggtttgatgaggtaaacacagaactccttagatgtatggcatcattcaatccatccaaaggattttcagcttttaatgttgagagcttagttaagcttgctgagttttatcctcatgattttgatttcgaagaaatgaaccagctttcttttcaactcaaccgctatattagtgatgtgaccaaagatgagaaattcactaatttgaaaggtctagcagaactatccatgatgcttgtcaaaacagagagggttcgtcggtatgaacttgtttatagacttctcaaattggttctagttctccctgttgcaactgctggtgttgagagggtcttttcttcaatgaactacatcaaaaacaagttgagaaccaagatgggacagaaatacttgaatgattgtttggttacattcattgaaagggaattctttttgcaagctaaggacatcaatgtgtgcacttatgctcaattttatgttatatacactatatattatataatta

SEQ ID NO: 12366 - DNA, 1419 bp, Oryza sativa
  Clone ID: PAT_MRT4530_184C.1
gctggccggcccttgaaggcggcccaaaggcacgcgcgggggagagagggagggggagccgttgggccgggtccacctcgcgcggtcccgagtgggacccgcttgtcggcggctcggctcaccgtgccgaggaagcacgcgacgcgacgctagggtttggaagaggggcgcagtgtacgcgcgcggcgggcccacgcatagcctctcggctctccgtgggccgcgcacacgcgagcggggacggagggagcggctgaccggggtcggcttgacccggtccggccgagctggcgccgacgtggcgcctacgtggctgccacgcgggccggcgggaggaagacgacgacgcggccgtgaacggacggcggacggtagcggcggcgttcggggcgaagcgcagcgacgcaggcaagggcaagcacaccgggaggtttcatgggacgaggggagacgagccaacagctcggatttgccggagggggctcgacggcggcggattgcggcggcagccaccggcggcgagatgagagggaaacggcgacgacgcgacgggggatcgattcctacgcactagagcatctacgcgactccgggaaaccattcctagcgtcggattaggaggaaacacaccgaggaaggccggcgacgagaggcgtctactgaactcgggcgacgacggcggcgagcacacaacaaacagcggcagcggtcggggcggcgccagctagctacaagaggtctacacatgctactgccgaaagcggcgcagtgacgagagccgacggcgcgaaacgtgatcatttcggcctcgggccggggaagaggaggaagacgagcgcctggagtccacgtcacgtgtccacgaacgcgcctactcctccggcacactcggcaacggacggcgacagcaaaacagggcaagggggagggcagaggccgggccgaaagaggaaagcgggaaacagaggggggagaaagagggctcaaactttgccgagttggggagggagagggatgggagcgggagctctgcctccaggttttggacggatgcgggtggcgcggctcgggcatgtgcgctggctcgcggggcagggcgcggcgcaggtggcgcagtgtggcaggggcgaggggccaggcggcgcaggcgcggcacgggcgcgcgcgcgcgcgaaacaacgatgcgcggaggattcgaaaatcgcgggcggggagctcgacggggatggaggcggggagagggagagcgagataactagagagagagatggcgctcggcttggcgtctactcacgcgctcgcgcgtgagacgcatgtgcggagcgagggagaggagggctgagggagggagagatgggccgagagggaattcggcccaccaaacctgagggaggcaaactagacttttacagagggatt

SEQ ID NO: 12367 - DNA, 2230 bp, Oryza sativa
  Clone ID: PAT_MRT4530_18500C.1
cggacgcgtgggccgccgtgccgccatggccgtgctcatgctagtgtggtgcgtgtccgttttcttgctcctcccatctgccaccgcgcaggccaccaccttcaccagcaacgtcgacggcaaggagttcaccacattctccttccccaagttcgacaagcccctgttgcagctccccgacaacctgaccttctcaggcaacgccaccatcgcccaggacgggttgcagctcaccccggacagcggcaacaggcccgagatattcctcgtcaaccaggccggccacgccttcttcaccgccccgttcgtcgtctgggaatccaagtcgtcgtcgtcgtcgtccaactccgccgccgctgccgccgatggaaagtacgtcgcctcgttctccaccgtgttcaaggttaacctgttccgctcgaacctgaacaagacggtcaagggcgaggggctcgcgttcgtcgtcgcgtcgagcaacgcccgcgggccgccggtcggtagccacggcgggttcctcggcctcaccaacgcctccaccgacggcaacgccaccaacgggttcgtggccgtggagctggacacagtgaagcagcgctacgacatcgacgacaaccacgtcggcctcgacgtcaacggcgtccgatccaccgccgcggcgccactcgccccactgggtatccagctcgcgcccaggaacaccaccgtcgacgacggcatctgctttgtctgggtcgactacaatggcacgtcgcggcggatgtcggtgtacatcgccaagaacgagagcaagccctccgccgccgtgctcaacgcgtcgctggacctctccaccatcctcctcggcaagacggcgtacttcggcttctcggcgtccaccggcgccgcgacgtaccagctcaactgcgtgcgcatgtggaacatgaccgtcgagaggctccacgacggcaccaccaccaccgccacgaagctagccggcacgtccggctggaagttggccgtcggcgtgttgtgcggcgtcgccgtggtgctcggggtggtcgccgcgctgtacatccggaagaggaggagacggagcggcggcgacccgagctcggcgttcaacgccgccattgatttcaggaagatcccaggtttgcccaaggagttcgactacatggagctgaggagagggacgaacaacttcgacgagaagatgaagctggggcagggcgggtacggcgtggtgtaccgcgccaccgtggtcggggaagatggccggagcacggacgtcgccgtgaagcagttctccggtgcaaacaccaaggggaaggaggatttcctcgccgagctcagaattatcaactgcctccgtcatcgcaatctcgtcaagatcgtcggttggtgccgccaaaatggcaggctgttgctagtgtacgactacatgccgaacggcagcctggacaggcacatcttcggcgagccgggcgcggcggcgctggactggaagcagcgctacaacgtcgtcgccggcgtcgcgtcggcgctgaactacctccaccacgagtacgaccagatggtgatccaccgcgacatcaagccgtccaacatcatgctcgactccgccttcaacgcgcggctcggcgacttcggcctcgcccgcgcgctcgagtccgacaagacgtcgtacaccgacatggccggcgtcacggggacgctggggtacatcgcgccggagtgcttccacaccggccgcgcgacgcgggagtcggacgtgttcggcttcggcgccgtcgtcctggagatcgtctgcggccgccgcgtctcctgcagcgacctccccggctggctcagcctgctggagtgggtctggaagctccacggcgcggctggcggcggcggcatcctcgaggccgtcgaccagaggctcgccggcgagttcgacgaggtcgaggccgagcggctcctgctgctgggcctcgcgtgcagccacccgaaccccggggagcggccgaggacgcaggccatcctgcagatcctgacgggcgccgccccgccgccgcacgtgccgccgtcgaagccggcgttcatgtggcccgcgatgcccgtcgcgctcgatggcgacgacgacgacagcgagacgccgacgtcgcgcagcagcatgctgctgacctcgtcgtcgacggggtggaccaaaatcttccaggtgagcaaagagcatgacgtggcggagaaggacgtggccgcagagtga

SEQ ID NO: 12368 - DNA, 418 bp, Oryza sativa
  unsure (1)..(418): unsure at all n locations
  Clone ID: PAT_MRT4530_18501C.1
cggacgcgtgggctcaagaagaagaggaacctctntgtngagggtggtgatgccggtgtctatgaggtctacatcaactagctcattcggaggattaactatgctgttgttctattattggcgaatatgaatttttttttataatattcgatgatgatatttatgatcacgatcggtcgaccttctcactatggatatgtcctggttcgttcatccgttactaagacaatccttgggcagatattgatgggtgttttcctgaaggttaacaatgctgccattatcatgctgcgcagggttgagccatatgtatgatatggctactaaaacctcataagtgtcagggattatatcttcatgagggtttagggaatgcttatctagcagaggattccttttcagaacatcgtagtcatag

SEQ ID NO: 12369 - DNA, 1976 bp, Oryza sativa
  Clone ID: PAT_MRT4530_18502C.1
acacgttcaatacaatcttggcgcatcgccacccttttgctttagttttgtttcgacgagttcttgctttcgggttgagctgcattggtttcgatcttcaacaagaggtaaaactcgttatgaccaacgccaccgtcagccagagcgcgctgcaagtcaccccggacagcagcaacaatcctctggactacctcgtcaaccaggccggccgcgtcttcttccccaccccgttcgtcctgtggtcctccaactcgtccgcctccttctccacggtgttcagggccaacctctaccgatcaaacacgaccatgaaaggagaggggctggcgtttgtcatcgcgtccaccaacgccatcaacccgccgccgggcagctacggcgagtatcttggtctcaccaacgcctccaccgacggcaacgccaccaacgggttcgcggccgtggagctggacagcgtgaagcagccctacgacatcgacgacaaccacgtcggcctcgacatcaacggcgtccgctccaacgcctccgcctccctcacccccttcggcatccagctcgcgcccagcaacaccaccactgacgacggcaactacttctcgcggcggatgtcggtgtacatcgccaagaacgagagcaagccctccgccgccgtgctcaacgcgtcgctggacctctccaccatcctcctcggcaagacggcgtacttcggcttctcggcgtccaccggcgccgcgacgtaccagctcaactgcgtgcgcatgtggaacatgaccgtcgagaggctccacgacgccggcacgtccggctggaagttggccgtcggcgtgttgtgcggcgtcgccgtggtgctcggggtggtcgccgcgctgtacatccggaagaggaggagacggagcggcggcgacccgagctcggcgttcaacgccgccattgatttcaggaagatcccaggtttgcccaaggagttcgactacatggagctgaggagagggacgaacaacttcgacgagaagatgaagctggggcagggcgggtacggcgtggtgtaccgcgccaccgtggtcggggaagatggccggagcacggacgtcgccgtgaagcagttctccggtgcaaacaccaaggggaaggaggatttcctcgccgagctcagaattatcaactgcctccgtcatcgcaatctcgtcaagatcgtcggttggtgccgccaaaatggcaggctgttgctagtgtacgactacatgccgaacggcagcctggacaggcacatcttcggcgagccgggcgcggcggcgctggactggaagcagcgctacaacgtcgtcgccggcgtcgcgtcggcgctgaactacctccaccacgagtacgaccagatggtgatccaccgcgacatcaagccgtccaacatcatgctcgactccgccttcaacgcgcggctcggcgacttcggcctcgcccgcgcgctcgagtccgacaagacgtcgtacaccgacatggccggcgtcacggggacgctggggtacatcgcgccggagtgcttccacaccggccgcgcgacgcgggagtcggacgtgttcggcttcggcgccgtcgtcctggagatcgtctgcggccgccgcgtctcctgcagcgacctccccggctggctcagcctgctggagtgggtctggaagctccacggcgcggctggcggcggcggcatcctcgaggccgtcgaccagaggctcgccggcgagttcgacgaggtcgaggccgagcggctcctgctgctgggcctcgcgtgcagccacccgaaccccggggagcggccgaggacgcaggccatcctgcagatcctgacgggcgccgccccgccgccgcacgtgccgccgtcgaagccggcgttcatgtggcccgcgatgcccgtcgcgctcgatggcgacgacgacgacagcgagacgccgacgtcgcgcagcagcatgctgctgacctcgtcg

SEQ ID NO: 12370 - DNA, 1025 bp, Oryza sativa
  Clone ID: PAT_MRT4530_18503C.1
atggccgtgctcatgctagtgtggtgcgtgtccgttttcttgctcctcccatctgccaccgcgcaggccaccaccttcaccagcaacgtcgacggcaaggagttcaccacattctccttccccaagttcgacaagcccctgttgcagctccccgacaacctgaccttctcaggcaacgccaccatcgcccaggacgggttgcagctcaccccggacagcggcaacaggcccgagatattcctcgtcaaccaggccggccacgccttcttcaccgccccgttcgtcgtctgggaatccaagtcgtcgtcgtcgtcgtccaactccgccgccgctgccgccgatggaaagtacgtcgcctcgttctccaccgtgttcaaggttaacctgttccgctcgaacctgaacaaaacggtcaagggcgaggggctcgcgttcgtcgtcgcgtccagcaacgcccgcgggccgccggtcggtagccacggcgagttccttggtctcaccaacgcctccaccgacggcaacgccaccaacgggttcgcggccgtggagctggacagcgtgaagcagccctacgacatcgacgacaaccacgtcggcctcgacatcaacggcgtccgctccaacgcctccgcctccctcaccccattcggcatccagctcgcgcccagcaacaccaccactgacgacggcaactacttcgtctgggtcgactacaatggcacgtcgcggcacgtgtgggtgtacatggccaagaacgacaccagaaagccctcgaccccggtgctcgacgcgccgctggacctctccaccgtcctccgcggcaacaagggctacttcggcttctcggcgtccaccggcgagacgtacgagctcaactgcgtgctcatgtggaacatgaccgtcgagatgctccccgacgagggcgccaccaagaagaaggcggccctgcccggatggaagctcggggtggtcgtcggcgtgtcatcctgcgccgtcgccgtggtgctcgggctgttcgccgcgct

SEQ ID NO: 12371 - DNA, 230 bp, Oryza sativa
  Clone ID: PAT_MRT4530_18504C.1
gacttgccacaccatccacacaggctactccattgtagaagtcagtgagactgcccagacactcaatatttgtatgttttgctttcaggtgtcggttctacgctatatatcaatgtatcattatccagccagtttagtctagatgcaaaactattgctccttaaactatcatcttcggtaccgtcacttatcgaacgcattctttgttggcttgcaaaaaaaaaaaaaaa

SEQ ID NO: 12372 - DNA, 627 bp, Oryza sativa
  Clone ID: PAT_MRT4530_18505C.1
atggcggctatgggcaacgtggcggcggtggggggaggagctgttggcgggcggcgggtggccgagctagagcaggaggctgacgcggaggaagacgagtgtgcagcggccggtgacgcgaacgacggcggcggtgtggagcggctgaggcggcggctcgcggccgaggggaggtggagaaaggccacgctggaggagctggagaaggataggtgcgcggcggccgacgaggccgagctggagcaggaggctgacgcagaggaagacgaatgcgcggcagccggtgacacgaacagtggcggcgcagaggagggcgacaacgtggagcgactgaggcggcggctcacggccgaggggagatggagggaggtcgcactggaggagctagagaaggagaggcgcgcggcggcgtcagcggccgccgagctggagcaggaggccgacgcggaggaagatgagtgcgcgacggccagtgatgcgaatggcggtgacatggaggagggcggcagcgtggagcggctgaggcggcggtttgtgacagaggagagacggagggaggtcgcgttggagcctggaggagctagagaaggagaggcgcgcggtggcgtccgcggccgacgaggctga

SEQ ID NO: 12373 - DNA, 566 bp, Oryza sativa
  Clone ID: PAT_MRT4530_18506C.1
ctgcaggaattcggcacaggctggaaagtgccatactcggctgatatttgccaatgatggtgattgggctaccatggtggtaagtaagaagtttgatgtttttctaatggccaggccatcttgttttcttttcctgcttgttgcccagttgggttggcatatttatttttcatcttatttcatgatagtagctcagtgttctgattaacttggccttatttttggggagcttcattattgcaatttgtgccattgtgatggccacattttctactggaatcgacaccagatccttccaagtaggttgcccttctctgctagcaagtttataagtgaacaatcaatagtaacgtccttcaagtggatgaaactgaaacaatatctctcttcaatattgtgcaaaccataattcaaattatgttgactatcaagaatttcttctgaagagttagctaactttaaacactacgaaaagtgtgttacctcttcagttatcatgacagtaactgaagttccaaagtgttcctctttcagttccgaaatgacgaggaccaattggaggacga

SEQ ID NO: 12374 - DNA, 2154 bp, Oryza sativa
  Clone ID: PAT_MRT4530_18507C.1
gcacgaggctgacccccgcacctgccgtccgggctcgccgccgccatgcaacgccggggctccttggccgccgccgctgctgcgttccggtgcctcctcctcgtcgtcgtcgccgcggcggccgacgacgccggtggcgccgcggccaagccggtgatactggccacggtgtgcgggaacaccaccgcggccgaccaggagggcttcgacgtcagcttcgtcaacacgctggagctcatctaccagaacgtcacgcgctccggcttcggcgccgcggcctccggcgagggcgccgacaccgtctacggcctcggccagtgcatgggctacctctcgccgaccgactgccagctctgctacgcgcagagccgcgtcaagctgccgcactgcctcccggccaccggcggccggatctacctcgacggctgcttcctccgctacggcgccgacaacttcaccgccgccgccaccgacgccagcgacaccgccgtctgctccaacgccaccgtctcctcgccggcgtcgttcgccgcgacgtcggccgcattgctgcggaacgtcacggcggccgcgccgggcgccagggactactactactacagcgcgtcgtcgtcgtcgtcggcgtcggcgttgccgtcggtgtcgccgcgggtgtacgcggcggcgcagtgctggaggtcgctgaacgccaccgcgtgcgcggcgtgcgtggcgaccgcgcgcgaccgcgtcgtcgggcgctgcctgccgcgcgccgccgagggctacgggctcaacgccggctgcgtcgtcaggtactccacgcagccgttctacttgccggcgaacgccgccgccgccgccgggtcatccacacggcacatagttatcgtggtgatcgcctcagtcttctgtgcactggctgtcatcggcatagcattggtctgggcaaaaatgaggaacagaagaaatgatcaccatgatgacatggatggttctagtgagatcatccgcaccatcgccgcatcgcagctcagtttcaagtatgaagaattgtgcaaggcgaccgacgactttaatcagatcaacaagcttggccagggtggatatggatcagtctacaagggtgtgctactagacggccgggagattgccgtaaagcgcctcttcttcaacacgcgggagtgggccgatcagttcttcaacgaggtgcgccttgtcagtcaggtgcagcacaagaatcttgtcaagctgctcggatgcagcatcgagggaccggagagcctcctggtctatgagtacctctgcaacaccagccttgatcactacttgtttgatagattcagatctttcatggttgatgttgcagatgcattcaagaagaccgcattggattgggaacggcggttcgagatcatccttgggactgcagagggtctgtcatatctccacaatgcttctgagatcaggatcatacatcgggacataaaggcaagtaacgtactgttggacgagaggttcaggcctaagattgccgatttcggtttggcgaggaacttcatggaagatcaaagtcacctcagcactggcctcgcgggaacttttggatatatggctcctgaatacattgtccatgggcaactgacagagaaggctgacatctacagctacggtgtgctagtcctcgagatcatcaccggtcggaagagcctcaactcggttgcttcatcagcagaagggcattccctcatgtcactgatatggaagcactacaatgaaggcaccctgatggaactattggacccaaacctccaagagcaatgcacggaggagggagctctcaaggtgttccatgttggactactatgtgcgcaagcttcaccgaaccttaggccaccgatgtggaaggtggtcgagatgttgggtagtaggaacaatgagcttcctcggcctacccagcccccattcatcaacataaaggggtcgaatgcgaagagcgacagctcgggttcttcgtctttgaagtcaagctcagacaagtcccccttctcgctaaaccagctttcagtgagtggagtacaggccagggaagtcaaaataatcctgctgatgatagcatcatgtgaggaaacagcaagcaaaattaatggattgaacaatagagacaaggaatag

SEQ ID NO: 12375 - DNA, 300 bp, Oryza sativa
  Clone ID: PAT_MRT4530_18508C.1
atggcactagaaaaacaacctccgccattaacagacaagtcgtcagagcctcaaaccaagatcctgaagctaactggggctgaagttgatgacggaaatgatgttccaatcactgtagacaagctgtcaccagagcagaagaaggagtttgaactgatgatgaaacatacacaacaacagttcatgaattcattcacagagactcggcaaggaagagttgttcagaagtacaagttgaaactagttgccgacgtccctggaacaggttcttctaaagatggtgaggtgcaaaaaacttaa

SEQ ID NO: 12376 - DNA, 373 bp, Oryza sativa
  Clone ID: PAT_MRT4530_18509C.1
gcacgagggtacacacagccataccggtggacaaacacgcagcagcagcagcagctcagcagcagcagcggagtgcgcagcgtgacagcagcccatgggagggcagctgacatgcatgtacataagcagtggtggagacccagcgggttttgcagtgtgtgatgagtgtttagcagcagtttgcgccgcagcgactgggtgccttgcgggattgggccacacctgcagcgcccagtggcatgcgggccggcatcttgcaagctgtcccgcgattggtgggtgcccaggtgcgctgccagtcagcgcaagcttgctgcatcaagcaatgcattactgctatgcatgatctacaagtaaacagggcgtaggcttt

SEQ ID NO: 12377 - DNA, 2013 bp, Oryza sativa
  unsure (1)..(2013): unsure at all n locations
  Clone ID: PAT_MRT4530_1850C.1
atggctgcggcgggcgacgagtcggcggctgccgctgcggctgcsgcggcggcggcgggcggtgccgccgcgggggargcggcggttgactccaargacctgcagcagcagagcaaggcgctggacaagctcaccgaccgcgtcgaggaccgccagctcgattcctcccgcgtccaatccnnnntgccgctgcggcttcggcgcgccgccggggcgttcccccccgcggggagggcggcggttgactccaaggacctgcagcagcagagcaaggcgctgacaaagctcaccgaccgcgtcgaggaccgccagctcgattccttccgcgtccaatccgctatggcagctcttgcttcttccaaagaagctgattggaatgccatgagattgagggaaaaagaattagctgccatcaagatcaaccctgctgatgttgaaattatcgctaacgagcttgagcgagaccttcaccggccgtacgtggagggggataactccacgggagcatccacgtggcacgaggcttctgcctcccctgaccaaaaacacgtcgctttatacacgcgtcgccctcctattggccacgctcccgtatcccagtgcactattggacagcggccgtgggccatgccatcccacgtgtacacgcgcggctcgtcactccccgtgggccagataccgccgtcccggggggtgatggcgatccccagaaggtcggcggccgccgtcgctgccgtggtggcgctcgcgtccgtggccgctgtcgccggcgaggtcttcttccaggagaagttcgacgatggatgggaggatcggtgggtcaaatctgagtggaagaaggatgacaacagggccggcgaatggaaccacacctccggcaagtggtacggcgacgccgacgacaagggtatccagacgtcagaggactacagattctacgccatttcggccaagtaccctgagttcagcagcaaggacaagaccctcgtgctgcagttctcggtgaagcacgagcagaagctcgactgcggcggcggctacgtgaaattgctcggtggcgacgttgaccagaagaagtttggtggcgagacgccgtacagcatcatgtttggaccagatatctgcgggtatgccaccaagaaggttcacgctatccttacaaagaacggcaagaaccatctaatcaagaaggacgtgccatgcaagaccgatcaactgacgcacgtctacaccttgatcatccgtcctgacgccaaatacagcattctgatcgataacactgagaagcaaactggaagcatctatgatgattggaacattattcctccaaagaataagagggatcctgaagccaagaagccagaagactgggacgacaatgaatacattcctgatcctgaggacaagaagcctgagcctgaggactgggatgatgaggaagatggagaatggacagctccaaccattccaaaccctgagtacaarggaccatggaaccaaaagaaacttaagaaccctaattacaagggcaaatggaaggcaccattgatccccaacccagattacaaggatgatccttacatctacgcttttgatagtttgaaccacattggcattgagctgtggcaggttaagtcgggaactttgtttgacaacattcttatcactgatgaccctgagtatgccaagaaatttgcagaagaaacctgggccaagcataaagatgctgagaaagccgcctttgatgaagctgagaagaannnnnnnnnnnnnnnnnnnnnnnnnnnnnnnnnnnnnnnnnnnnnnnnngaatctgcaaactctaaaatcgacgacagcgacgacgacgctagtgatgatgaggatgaggcggacgatgacaaggctgatgtcgttgctgagcagaccaaggacaagggtgatgagaaaccgcaggacatcaaggtctctgctgatgagaagccaaagagcagcaaggatgattcttccgctgcgaagaaggacgagctttag

SEQ ID NO: 12378 - DNA, 627 bp, Oryza sativa
  Clone ID: PAT_MRT4530_18510C.1
cacgcgtccggcttcattcttcactcaaccaacagcgccaacaccagtatggccctatggtagatgcaaatgatcgttaccaccgtattcctggccatttttcgcagcagaactttgttcagccaggattcgacatgaaccttgccttctgcaaccaagagaagcagagaaatgaggagagttcggtggactcatcacagtggagaaatatctttctttatgtgctaccttatggttcttcaaggccactcacccgcaagctctctttggacgcatcttcaagcgattcaagaggcatggaggcatcgacgagcatgccaacagataacactgctatggctatcaatgccccaaagttactgagggtgttgattatggggaggcaaccaatggtggcctcctccactttggtagaactgacaactaggctagacttcttcaaagagcggaggtcgcaactgatggaacaactccacagtctcgatttaggacatggatccgcttctcagggttttccatacaacaaaccgccctctccttgggacagtccaaggaaaggatgttcattcagttccacgattgtatattctttggtagttattcttttcccatccatgttaatcattt

SEQ ID NO: 12379 - DNA, 649 bp, Oryza sativa
  Clone ID: PAT_MRT4530_18511C.1
cgggctgcaggaattcggcacgagggtctctctcgctcgctcacgcagtctctcaccacgactctcacgacctccccctgacctgacccagaggagcaggagagagcatagcacggcctgcacggatcgagcagcggcagcaggagctcgtcgcctctgcttaaaccccccccccccccccaatatcggtctctcgccttgtcaccttacttgcttggctactactacttcaccacgcacagctggttggttggttggattagctagctactaggatcagtgcttcgcttctctctctctttgcgttgccgtcgtcgtcgccgctggtggtggtggtggttgttggtgagggagagatggaaggaggaaggggggtgacgagggtgctgctggtggacgactcgccggtggacaggagggtggtgcagctcctcctcagcagcagcgcatgcgccggctcattccacgtaatcgccgtcgacagcgccaagaaggccatggagttcctcggcctcaaggaagaaggcaaggagcaggccatcgacatggtgctcaccgactactgcatgcctgagatgactggttatgagcttctcaaagccatcaaggcgctgagccctctgaagccgatcccagtgatcgtcatgtc

SEQ ID NO: 12380 - DNA, 464 bp, Oryza sativa
  Clone ID: PAT_MRT4530_18512C.1
ccaccgcgtgcggacgccttagtgttggagctgctggtgagcctcgcgatttgcgatcgcttgcgtgctaaccgttgtggtggtcttggtgctgctcgcggtcgcgctgttccaagccttccattcccgcttggtttgtatagagttttgatgccgatcgcacttaccaaccgctcggatcaacaagaactagccgcctttaccaacgactctgggtatagagagagagtgtactctcttagctggacctcggcagctcgacttattttttggcgacacgagttgcggctgcacccacagtgatgtgaacgtcctaaacacgcctttattgttctggatagtggagagtgctctcatggatatatatatggtacatttcagggctgtctgaagatatgtcaaggggcctcaggacataactatgacagtctattgcgctgttcttacagtcctctttgcatggc

SEQ ID NO: 12381 - DNA, 495 bp, Oryza sativa
  Clone ID: PAT_MRT4530_18513C.1
atggagtcatgtgtgcctcctgggtttaggttccaccccaccgacgaggagctcgtcggctactacctccggaagaaggtggcctcgcagaagatcgacctcgacgtcatccgcgacgtcgacctctaccgcatcgagccatgggatctccaagagcattgcaggatagggtacgaggagcagagcgagtggtacttcttcagctacaaggacaggaagtacccgacggggacgaggacgaacagggcgacgatgacggggttctggaaggcgacggggagggacaaggcggtgcgtgagaggagcaggctcatcgggatgaggaagacgctcgtcttctacaagggcagggcacccaacggccacaagaccgactggatcgtccacgagtaccgcctcgagtccgacgagaacgccccgcctcaggcaagatctccatttatctctctctcaatcaacaagatcgatctacagtttctagaaaagattaattag

SEQ ID NO: 12382 - DNA, 2875 bp, Oryza sativa
  Clone ID: PAT_MRT4530_18514C.1
atggtgacacgcgtgaattggggccgagtggagagagaatttgagggcgggagatttgtggcatggtccatgcacagtgattttctccagaaaattaatttgggaattcttggaactgtttttattcatcatgttgagcataaagcaagtaccttgccccagagaggtggtgaagtgaatgttactctgggaggaattgacttgaataattctgggagtgtggtagtcagagaagacaagaagttattgactgtccttttcccagatggccgtgatggtcgtgcattcacccttaaggcagaaacttctgaagatttatttgagtggaaaacagcattagaagaggctcttgcgcaggctccaaatgcagctcttgtgatgggacataatgggatctttcggagagagaagaggccgatcaagtcgttagttgttggcaggccaattcttctcgcacttgaggatattgatggaagcccttcttttctagaaaaagctctgcgttttcttgagaaatatgggataaaggtggaaggaattctacgccaggctgcagatgtagaggaggttgacaggagattgcaggaatacgagcaaggaaggacggagtttgcaccggatgaagattctcacattgttggtgattgtgtaaagcatgttctccgagagctaccatcctctccagttcctgcttcctgctgtacagcattattggaagcttttcggctggagactaaggatgctcggataaatgctatgcgctcagctatagttgagacatttccagagcctaatcggcggttactgcagagaattttgaaaatgatgtatactatcgcttctcatacttccgagaaccgaatgacagcatcagcagttgctgcctgtatggctcctctgttgttgcgtccacttcttgctggtgaatgtgaaatggatgaggtatttgatatggatggcgatgattctgcacagcttcttgctgctgcaaatgccgctaacagtgctcaaggcattgtcacaactctcttagaggaatacgagagtatatttgatggtgaacacaaccttagatgctccctgtcgccagagtctcaaattgaagatagcggtagcgaggcatcaacagatgatgtaaatttggatgtcaagggtaatggatttcatgatgctgaaaatgatgtagatcaggaaatggatgatgagaatggcgcagaacgtatacttagtggaaaactgagtgagagcagtggatacgctggcagtgacctctatgactacaaggttgttcatgctgatgattcagatgctgaacgttctgaagatgctaaggcagcggaagtaaagattgagttaagcaaaggtccaaaaagtcattcagctgaaaacggttcagcatatatggaaacattgctgagtgaaaagaatccttctaacccaatatctagccatgagactccactgtctatgggagaaatactttcttctttggatcctggaatatctttagctaatcacagtggtgaatattctgtagaaagcagacagccagccaaaatcaatggatctcacccacatgtgaaacgcagtaacttctgggggaggaataatgcaagaaagagtcaacactctgaatcagtcgactcatctggtgaagaagagcttgctattcaaaggctcgaaatagcaaagaatgatctgcagaacagaattgccaaagaggctaggggtaatgcaattctacaggcaagtttggaaagaaggaaacaagcactgcatgaacgtcgtttggccctggaacaggatgtgtctaggttgcaagagcaactacaggcagagagagatcttagagctgcattggaggttggattgagcatgtcttccagtcagttttctagttcacgtgctatggacacgaagacgagagctgaacttgaggagattgctcttgctgaagctgatgttgcaaggttaaagcagaaggttgcagagcttcatctccaactcaaccaacagcgccaacaccagtatggccctatggtagatgcaaatgatcgttaccaccgtattcctggccatttttcgcagcatggccccatttctgtaaagagtggctgcaggaactttgttcagccaggattcgacatgaaccttgccttctgcaaccaagagaagcagagaaatgaggagagttcggtggactcatcacagtggagaaatatcaagcagcatgtgctaccttatggttcttcaaggccactcacccgcaagctctctttggacgcatcttcaagcgattcaagaggcatggaggcatcgacgagcatgccaacagataacactgctatggctatcaatgccccaaagtttactgaggttagggaaatcacagccactctatttagcactactaatatcctccaaaggaagattgttcttatttttatcgtatggcagggtgttgattatgggaggcaaccaatggtggcctcctccactttggtagaactgacaactaggctagacttcttcaaagagcggaggtcgcaactgatggaacaactccacagtctcgatttaggacatggatccgcttctcagggttttccatacaacaaaccgccctctccttgggacagtccaaggtaggatgttcattcagttccccgattgtatattggtagttatcttttccatgttaatcatttgtaggaattgcgttgagaatgtaaatttatttttgttttccaaaacgggttttttcgtatccctttgcccgagttagcaacttgagtgtgatgttatagtctcctgtatgtaatgtgtcaaggtggggtgccattcaaaacaaaaatttccagcgctataccagttt

SEQ ID NO: 12383 - DNA, 2792 bp, Oryza sativa
  Clone ID: PAT_MRT4530_18515C.1
atgaaaggcggcagctccgccaccgcggcgagcggcggcggcggcaacagcctggcgatcgtcgagcggcagaagccggcgacgtcgtgcgtggcgtcgctgttccagatgctcgccaagaagaagctcttctcctcgtcctccaagaagaccaagctgcttcccccagtgcgcacacagaagttctcgcctgggagaccacctgccggcggcgagaagacgccggcggccaagatgaggactctgctgcttgatgctccatactatccaaatgaagttaccactcgcttgccacctcctggccaagacaacaaaagcagtgaaatgtgcacaccgggtgtggtagccaggctaatggggctcagcgcaatgccagccaccagccatcaaaaggcagtaaaaaccatggatgcctccgagcttggtggtcaccggagtgaatgctcctatggaagcatatacaactcgcatcagaagcaacaaaagccagggcatatcagagatggccggcatgacaatggcaatcagctcgatgcagatgcgcagccggtgtggtcacggaagcatgcagcacacaagttagcctcacctattaagagtccaagatcagtttcaagcaggaacaaggttaggctgattgaagcagcagtcaaggtcctggaacccggtttacaatccaggcaccaccatcaggctcggaggcaagcgcgcctcgagtatagatgcaacagcagtgatgtgcagagtgctgctgaagccatgcacgatttctccgatcaattcgcaagagaaatgtgtgatgttgatgcatcaaggtcaggtgctcaaaatgtaggagccacctctctgcacaattctacttccaatcagtggtccgaagaggatactatgaggaatgtttctgttaggaggccaaaccagaacatatcatgtcaagcacaatctgaaggaaaccataagggtcagaggaacggatttaaggacagtggtcagagaacatcagatgatgtccttgtttcaagtcaaggtgtccaaaaaatacagccgaaaaacatatcccgagagaatgttgattgtagacctcttaaacagaacaatctgaagcagaatgcattgcctgaaacttatagagcagcagatacagggcatatggtccaaaggcagaaacatagagctaaggagcaaaatgtggcaaacacagccaatgactttgtctgttcaaacagaggtatgaacaacagtgcatctttgaggtccaaaggaaaagtaaaggataaaatcggcatgccacatggtagtgcggagaacaggaacttgagcacaaaatgtcaccgaaccagtggcctgcatggtgattgttctaataaacagatatcaaagactgcaacactgaaagctacagagaaagacatgataattgcaaaaggtgcagggttagttagtgagaagccaaagtctaccagtccaaactctgtaaggaatgactcgcggagaaaggtagagtcacgcattgcttctaggggtaacaactcaggcatcatttccatctcttctaattcaccgagaaaggctgtcctcgctttgctgaatggtcatactaaaggatcagatagtgttgttctgggatctccaactggttcttgtcctaagagagactatcgtagggactgccaaaatatttcttcagaaagggaattggtcttgagtgaagctttacaaggcatatcaagtctggaaagtgcagaatcagtgtgctttaatcgaaatgagttgagaaacagagaaattctggacgacagagtaatgtcttcattgtttcgaaagacgagtgctatcaatgtaatggaagaatctccaagtgatgaatttctatggcagtgtaactttctggacagtctgacttttggcttcagagaggttcctagaagtggtaaattgcgtgaaactcataaaaagcatgaggttactacaaatgctagcgatccatcttattatgcagatgatgagtgcttttctgggagcctgctcaaaactgcagcatcagaagctggattcagagaccgacgccgctcggagaattgcacaatgcaacaagatggaactaacaaaagaaactccaggtgctctgaaactaattttggccaagacagcagcaacctgatacaccctggagaggttgcagcaactgttgagctgctactaacaaacgttcgccggtctacttctactactcctccacggacatcaaaggcaccattcaaggcgttccttgtcaagacattcgagtctgctctgaccaccgtgaccaccacaagctccacgaagaagaagaagaagaagaagaacgggttcagcttcaacgccggcgtcgtcaaggccacagaaggggagaagagcaggagcccgctgggaagcctcgcgttcgattccgtcatggagtgcttggactcgctgttcacccagttctgcgactcaggatacaggtcgttctcgagggttcccctgatctgccccgaggagaggctggctgctcaggtggacagggagatcgcgaggtgcagcggcatggccgggaaggaggtggatgagctgatcgcgagcgacgtccagcactcgggggtggagatcggcgtggatgtcctgcacgaggcgtttgagattggtgcccagatcgaacgggatctgctccaagagctggtggccgagatcgggatggatatgttgaggcgtttgtgacgtgatgatgatgatttcgtagcaatatggtgaaattatatgttacaagtttggtc

SEQ ID NO: 12384 - DNA, 427 bp, Oryza sativa
  Clone ID: PAT_MRT4530_18516C.1
ctcaggtctaacagaacactgcatgaatgacggtggccaccacgtcgctctcttcgccggcgttggtcaggacaacgccctggagccgattgtcgctcctgagatagtcgcggaccaccatcatcaagaccacaggacatcccaagtcgcgcagatcgtgtgggcgcgagacctactttacatggccgataacaatgtatgtccgtgtcatcctgccaagcaatgcatgagacacagtgccgaggctacgcagggcaccctgagctgttctacacaccataagctctcacaaagatccactgcgaccgcatatgtctcgcgggggcagcgaggtgagcgaccaaactgaccgataaccaggccaacccgggacgtgcgtctcgacggaggcgctgagaacactgctaagactggcggcagcgagacg

SEQ ID NO: 12385 - DNA, 1178 bp, Oryza sativa
  Clone ID: PAT_MRT4530_18517C.1
actaaagataaatagaatacttctaaaaagaagatccattttattccagcaacttaatttccttcccatatcacttaattttgtcaagttcttcaccagctacctcctcagttaatgtaaattggtgtacaatgcagagcattgccatcgaaatgaaagaagctgatatatcgaactgcaaatatgggaattggggaaatatgcttctctttgccggtgcaatccacgttttgcaaaatttaacctgatataattttaccagaacagcttcatgttttcattcatcacaggtaatgattcagattggtaggttaggtaggcatcctatatctctgcggcgaccgctactgattcgccgcaaaccaccaaattcctaacattctcacgagttcaactgatgcttttgctaccctcaaatttcccacaaaagaaatgggaacctcgtacctcttccggcatcaaaccatcccccaattgccaagctcaaggcatgatatatcagcaaaatccaatgaaaatgagtttgatcagtcgatgagctccaagatcgtctctgcgacctccttccgcagcatgtcgagccgcacgcccaccttgagctcagccagccgcagcctcttcgccttcgcctccagctccgccgccttctcgtcgccgatgcgccggaacgacctcctgaacaccccggggacggcgcacagacggctcgcctcgaccgcctccacctccgcggagaggcaagggtacagcgcttccagctccccgagctccctcgcttcgtggcgcgcgatgggcttcctcgcgccgcagccgcggctgccctcccagagcgacttggagagcctgtagatcctgaggtcgtggtccttcaccgggacgacgccgcgggacgagagccgcctccaggcggcggcgtaccggcggcggagagaggccagctgccgggagaccgcccgggcgtcgaggtggtggtcctccgtcaggaggcggccacggagggccgcggcaaggtcgcccggcgacggcatccctccgtgccgctggcggtgggaggcggcggcctcgaggagcgagatctcgtccgcgggggcccacctgcgctggaacgcacgaggagacgccatggcggtgccagatccggaggagacgccggaggacgagtcgctcccttccttcat

SEQ ID NO: 12386 - DNA, 573 bp, Oryza sativa
  Clone ID: PAT_MRT4530_18518C.1
atggttaagcatgtgcgcacaagagtgatttgtgcaataaaactaattagaataaaccgtcaacctagtattttgatgcagcagcttagcttagtatgtaccgttttggtcaatgagtggcatgatgcgtatttggttagtcgtctaacacaaccgttgaagtgtaagccagaggaaaagtttgcccttcacgggaccaatgctgcgtcaaactctttgggccgacacacgttgggccaagcgacaaggcaactcccgccatggaccgagtctgactccttccaaaggaaggttggccactatttgtcaacgactttcaagacccaatctagcaacccaatggcaagggagatgtgtgccggggtggaggggacggattgcaccaaggcactggaaggggttcatgaggtatctcacaatagaagaaatggagaagagaagaaggaaaagcgaaaaccaaatatcagctttgatggcttcatctcaggtcagttagatcaattccacattgttgtcgaacgacaactgcgtcacgtcgaaagacatggttctctcaacaatggttggaaacga

SEQ ID NO: 12387 - DNA, 783 bp, Oryza sativa
  Clone ID: PAT_MRT4530_18519C.1
atggctactatggatacaaccattgctcacatcatggatgaacagcatgatatcaagttcaagtcctccaagtgctggaatccgattcggccacctgctatactgctgatttcaaatggccgtcgaatctgcatacgacctttgtttttggcccgtgaatacttgatggaaagctctcggagccctctttccaacggatcttgcctcatcgccagattccaagtcatttggccgcaatcatataaacaaggtgctgcatcacctatcttgggcctctgggcttgtaactttgtttgggaccccggcccaagaataaggttgatttgcatcggcaagatcaacatcccacggagaggtgtatcgatcgctaaggcgcaacataacgtctcgtacggttgtagtcggatcgtcaacgtcttctccaaaaatcgtagttatcagtactcaccgaaagatcaggccaacaacagccttgagtgtcgagaggaactcagggttgaatatgttgaaaggggtaacaggcagcccttggctgtagtctacctcaatgcccgtagagaagatcgtgtacattctagccttcgtgatcttgaagtccagaagactgaagtattttttggagagggacccgcggagttgcaggccggatccgccaaccagacagggatttctcttgttaggctggagtttgaggaagaagatgcagcgaaaaagaataaaatggggctgaataccaaggaaggcttcgcacagatgaatgaagacagaaatgtgaagaattga

SEQ ID NO: 12388 - DNA, 1322 bp, Oryza sativa
  Clone ID: PAT_MRT4530_1851C.1
atggatgtcaccggagacggcggaggaggagggcaacggcccaatttccccctgcagctcctcgggaagaaggaggagcagacgtgctcgacgtcgcagactgccggggcgggcggcggcggcgtcgtgggcgcgaatgggtcggcggcggcggcgccgccgaagcggacgtcgacgaaggaccggcacacgaaggtggacgggcgggggcggcgcatccggatgccggcgatctgcgccgcgcgggtgttccagctgacgcgggagctcgggcacaagaccgacggcgagaccatcgagtggctgctgcagcaggcggagccggcggtgatcgcggcgaccgggacgggcaccatcccggccaacttcacctccctcaacatctccctccgctcctccggctcgtcgctctccatcccttctcacctccgccttgccggcttggctggccctcgcttcggcggcggcgcgcgggcggcggacgcgtgggaccgcgtcgtcggcctcgggttcggcggtgcggccgacgccccgtcctccgccacctcctcctcctcgtcgccgcttctgctgagcttccactccggtagcgtcggccttgacgtgtcgccgccgtcggcgtcgacctccccggccgccgccgacctctcccggaagcggcggtgggagcaagaaatgcagcagcagcagcagtaccagcagcagatggccgggtacacgcagagccaaattcctgcgggcacggtgtggatggtgccgagcagcaacgcgcaggccgccggtggcggcgctccgccgggaggcggcggcgagtcgatttggacgttcccgcagtcagggagcggcggcggcggcggcgcggcgacagtgtaccgtggcgtgccaagcggactacatttcatgaacttcccggcgacaccaatggcgctgctccccggcgggcagcagctcggcctcgccggcgccggcgggggtggcgaggggcacccggggatcctcgccgcgctcaatgcctaccgcgcacaggccgcgcagccggacgccggcgcggcggcgcagaatggagcgcaaggctcaagtcagcatcgtcagcatcagcatcacggcggcggcggcggcggcggcgacgagcggcatgagagcatgagcgccagcgactcgtagggcttccgttccgtccggtgtgtgccccgcattttctctggttttgatctgttcttctttaattttctccgtttttgtttgagttgttgtctactaatgtctatggctttcttcctcgacccatcatatattcatgcaaggatcatacagttgcattc

SEQ ID NO: 12389 - DNA, 492 bp, Oryza sativa
  Clone ID: PAT_MRT4530_18520C.1
ttcggcacgagggcagattctgtctcggtcgctcctcttcgcgttccaggaatccgccgcttctcgggaaggcgggcgcggcggcgcttccatgttcccggcggcggagcacggagctagggctcggccagcgccagatctaacggcgtcttcctagggaagagcaagagcaccggcagatgcctcgtggtcagctatatcggccgtctgcggcggcctcggggcccaccagatctggcggtgggcggcgacatcgagctgaacgacctccatcggcgccaagcagaccctgccgtatcgtcggcgtcgagcagcttcgccaacgacctccacttctgcgacctcggcggcggctgctcgttcatcccctggtatatttctttgctcttggcaagaacaagaacactctttgttcttggcatgaacaagatgatcgtgcctgctgcaattgtataaacagagaatttgttggatctgtggctgcagcgtcat

SEQ ID NO: 12390 - DNA, 2729 bp, Oryza sativa
  Clone ID: PAT_MRT4530_18521C.1
cacgcgtccggtccgactaaacaaaacaccacgccatcttgacgatctccgtctcccatccccgcctcgccgcgccgcgccctcctcctcctcctcctcccaccccgccgagcactcacccgccgcctcggtttcgtgcgcctctgcagcggcaggccgggggcgcggggcagcggttggcgtcggccgcggccgggctgtcatggaggatctgggcatcgaggcgaaggaggcggccgtgcgcgaggtggcgaagctgctcccgctcccggagctcctctcctccattgcctccatcaaatccgactacctcgcgcggcagcagacaaatgatgcacagctcagtacaatggtagcagagcaggttgagcaagcccatgctggcatcaatgctcttgcactatctcaggaaacaataaacaaactacgcgagaacttcatagatatagacaagttgtgccaggagtgtcaaacattaattgagaaccacgacaagattaagcttcttagcaacgcaagaaataacctgaacacaactttaaaggatgtgggaggtatgatgtctatttctgttgaagcagctgcagcacgcgactcgctaagtgatgataaagagttaattcgcacttatgagagattaacagctcttgatggaaagagacgttttgctttagctgctgctgcatctcacaaggaagaagttggtcgattgagagagtactttgaagatgttgatcgttcatgggaaacatttgagaaagcattgtggggccatgtcactaactttttcagactttcaaaagatagccctcagacgttagttcgagcaataagggttgttgaaatgcaagagatcctagatcaacaagttgcagaagaagcagctgaggctgagggtgcaggtgctatggcgacaatagcaaaccagcgtagaactgcaaacaggaaaggtggaggagcaacatctaccccaagaagcactcaagataaatcaaaggtccagggaaagggctacaaggacaaatgctatgagtatatcaggaaggctgttgaggctcgcttcgacaaactgctcaccgagcttgttttctcagaagatttgatggaagctttggaggaagctaaggcaattggagatgagcttggtgatatctatgactatgttgcaccatgttttcctcctagatatgaaattttccagctcatggtaaacctgtatactgaaaggttcatccagatgctaagacttctcagtgatagagcaaatgatattccaaatataaatattcttaaggtaacaggttgggttgtgaaataccaagaaaatcttatcggtcttggtgtggacgagtctcttgcccaagtttgttcagaaagtggtgcattggatcccctcatgaatatgtatgtcgaacgtatgcaagcaacaactaagaaatggtacagtaacattttggaggctgacaaaacacaaccaccaaaaagtacagaggatgggaaactatatacacctgcagctgtggatttgttcagaatattgactgagcaagtgcagattgttacagaaaatagcacagatgtcatgctgtatcgtattgctcttgcagttatacaggtcatgcttgattttcaagcagctgagaggcaaagacttgaggaaccagcttctgatgttggcttggaatctctatgtgcattgattaacaacaacctgcgttgctacgaactttcatcagagctaagtagcagtacattggaagcgcttccacaaaactatgctgagcaggttaattttgaagatacctgcaaaggatttcttgaggttgccaaggaggcagtccttcaaactgtcagcgttatttttgaagacccaggtgtacaggatctactagtgaaagtttaccaaaaagattggatggaaggaatggttacagaatatcttgtcgcaacatttgctgattattttggggatgtcaaacaatatattgaagaaagatcatttcgaagatttgtggaggcttgcctggagcaaacaattgtggtatacgttgatcatctccttactcagaaaggccatataaaagaagaaacaatcgaaaggatgaggcttgatgaagaagtgcttatggattttttcagagaacacattaatgtgacaaaagttgaaaccagagtgcggattctggctgatctaagggagcttgcttcagctgagagtctggatagttttactctcatttatacaaatattctggaacatcaaccagattgcccgcctgaggttgttgagaagcttgtgggaatgagggaaggcattccaaggaaggaagccaaagaggttgtacaagagtgcaaggaaatatacgagaactctcttgtagacgggaaccctcaaaagtctggttttgtgtttggcaaattgaagtgcctaacagcacggaaaggcatatggagcaagcttggacagtaaatgatgctgcgactttcgagtagagtgaattcacgccctaagagaattgtttcatgttcatgtgataattcttttgttcatttgttaagcttatggtattgtcaccatgcccttgtgtgattttttgcacgggaagagcttagggtgtatattctcgttggtagtaacagatgatttaagtgtatagatctaatctttttgaaattctatttttatctattccctaaagtggttggagcgagcaaaaaaaaaaaaaaaa

SEQ ID NO: 12391 - DNA, 1251 bp, Oryza sativa
  Clone ID: PAT_MRT4530_18522C.1
ccacgcgtccgcgcactcacacacactctccgacgatattttccttctctgttttttttttccttcgccatcaagccggattcgaggacggagggatcaatggaggaggagggggagggcctctgcgagatcgcgcggttgccggaggagctcctctccgccgcgatctcacgcgcctcgccgcgggacgcctgccacgccgccgccgtctccccggcgttccgcgccgccgccgactccgacgccgtctgggctagcttcctgccgcgcaatctccccgatctcgccgacggcgagctctcccccgcgccggcttccaagaaggagctcttcctccgcctctccgatggcccctacctcctatcagaccggctcatgagtatgtggttggacagggagactggggccaagtgctacatgctctcggccagatcgttggtgattatctggggcgatacaccgcactactggcgctggattcctctcaccgactctaggtttgcagaaggtgctgaactcatagatgtgtgctggttggaaatccgtggcaggatacacagcaagatgctctccccaaactcaacttatgccgcatacatggtgtttaagatagctgatgagttctatgggctggatgctccattccaggaggcatcagtcagcctgggaggtaggggatcaacaaaaattgtttgtgtccaaagctatgacagcgaagatgaggaggtgcctgagaattactggcctatgagtattggtccattgctgcgacgaagggccaggagaagagaccgtcgtctagttcttgatgaaggtgtaacggtccctcagaaaaggactgacgagtggatggagctggagatgggtgagttcatcaacgaggaaggtgaagatggagaggtgtgcttcagcctgatggagaccaagggaggcaattggaagagaggtcttattgtgcagggcattgagatcagacttaagaaatctggctgatgaacttctaagatcaaggcgcgtgtaattaaataagactcataatgcgccattttttttgtttgtggttttggcttttgttgccaatgctgtgcaaaactacaggtgtgtttcttttttcttgcgggcaaactgaactttctgccgagaagaaaataccatagtgcgatgcttgataatagcctacatttggtttgcaaaatataattaaaagaagcggttgccattttaaaaaaaaaaaaaaaaaaacagaaaaaa

SEQ ID NO: 12392 - DNA, 2306 bp, Oryza sativa
  Clone ID: PAT_MRT4530_18523C.1
atggcagctaccaacacggccatgagcttggtgctgtgcctgctggtaatgatcatctgctccacgcaccggttgctgcatccccaaccccagcttgcggcgacggcggcgtcgtcgtcgtcgtcgccgttctcgtcacgcagcaagataggcaaggacatcatcgacaagacggtcagcttcaccctgtaccagcaggagaccatgaacaggacggggtacgtcgtcgtccccggcgtcgacgcgcccgcgcccgcgagggtcgtcgtcagcgacgccggcgagccctccgccgacaggcagcccttcggcagcatgtacgtcttccgcgacaacctgacggtgcgcgccgacagctcctcccgtgtcgccggcgtggcggaggggacctccatctcgacgagcttcgactgcgaggacggccggaggagcgtgtcggtggccaagatcacgctccaccaccgcggataccggggctccgtgtccatcctcgggggcacgcccaacatcaccaggccgtccgtgtacccggtggtcggtggcaccggcgacttcctgtacgccgtcggctacgtccggtcgtcgccggtggacacgcccgccacccgtagacgcgacctcagcaaccccacccacttcctctccgtgggcgcccgccgcgcgtcttgcccccagatccggcgcccaccccaggtaaaagccctcgcccgagctccgttgctcccgatgcgcgcgtgcagggagggatgggatcaggggaatgggattggggacactaggcagaaccatatttatttcagacatctatctgctaccagagagttagaagagattgaggaggaacatttccgcttgccacctcctcacaaggttaatcctcgtgcagtgaaacggcgggggcctcgcaaggctccaaaggttattgatcaatatctggatgagtcatcagcagtgcatgccttgttcttccctgatgaaagaagtgcagtgaacccaacaaaaggtggaaatgacagtatgtacttctatcctggtagggtgtggctggacactgatggacatgccattcaagcccatgggggtggtattctgtatgatcatatcactgccaaatactactggtatggagaaaacaaagatgggctaacctaccaaactcaccccaagagtacatatcgggttgacattattggggtaagctgctactcatcaaaggacctatggtcatggactaatgaaggaattgtgcttcctggagaacctactaatttcacccatgaccttcataaatctaaggtgcttgagagacctaaggtgatatataatgatcatactggacaatatgtcatgtggatgcatattgatgatgcaaactacaccaaagcatctgttggtgtagcagtcagcaactctcccactggtcctttcacctacctctatagctttcgcccacatggatttgaaagtagagacatgacaatcttcaaagatgatgatgggtcggcttacctcttctactcttctcgtgacaatactgagcttcatgtcagtccattgacaaaggactatcttaatatcacggtagcaatgaggagaatattaataagacggcatagggaagctccggctgtcttcaagcttcaaggaacctactacatgatcacctctggttgctcgggttgggctcctaatagagcattagcgcatgctgcagaatcgatcatgggcccatgggagacattgggcaacccatgtgttggaggcaacaggtttttccggttgacaacattcttatctcaaagcacatttgtgcttcccctccctggcttgcctggaaatggcgcctacctgaaagttggaagggttatacctgaattttgccctacgcacatgaagtacatacaaaaattacagatgatagatgcaatcatggaacagacatagagttttggattcccggcatgtcgagggtgtccatttattggcacaggaaatggcgcctacctgaaagttggaagggttatacctgaattttgccctacgcacatgaagtacatacaaaaattacagatgatagatgcaatcatggaacagacatagtttgaagagtttggtgattgttccgaatatttcttgagatatctagtcagtgctttcgtaggcctttttgtaacgcaaaaatagtctgtcaagaaaaattgtataacagtgcagctctcaaaacaaatatttgacttgctgtaacatcctccaaaaagaaagttgaaatagcttgagcgtgtgttcatccaaaaaaaaaaaaaaaa

SEQ ID NO: 12393 - DNA, 423 bp, Oryza sativa
  Clone ID: PAT_MRT4530_18524C.1
atgcctgtgacaagggagatcatcgccggagccggagccggatcggcggcggcggcggcggctgtactggcgttgctggtcgcggccgccggcggtgacgaattagcggcggcggtgggtagcagcagcagcatcatgccgccctgcttccacgcgtgcttcgaccagtgcgtgcagcgcgaggagtactggttctgccagttctcctgctaccgccggtgcggcgccggcgccatcgccatcgccatcgccgccggccgcttctccggcaccggcgactgcgagcacgcgtgcgcgctgtccatgtgcggccagatcgacccgggcagcaagatgatggccgtgtgccgcgacacgtgcggcaagagctacgccgccgccgggtgccgccgccggccgaccagccttacggcggcagtgtga

SEQ ID NO: 12394 - DNA, 438 bp, Oryza sativa
  Clone ID: PAT_MRT4530_18525C.1
atggcgcgtggatgtgcggccagtggcggcgggatgccgacgatggcgcgtggatgtgtggccaacggcggcgggaggcaggtgcggcatgtggaagtgtccggcggtgtggaggccggcgaggtgcagccggtgtcgatgggaggctggccagcagggggcgtcggtgcagtggagtccatgcgctggcagagggccgacaatgacgacgcttcaggcgtcatcttccctcttgtgggcattgtcgagctgtccacttcctctggttgggctgtcggttggtgctggctcactctagacgcctgtccgcttgcggtggaaaacccagtcgtcttttctttccgcgagaacttcgaccaggcaaaaatcggactagcccgcccgatggtcgcttttgcagcacagatcgaccgagccgcggccaaccgccagaggtaa

SEQ ID NO: 12395 - DNA, 115 bp, Oryza sativa
  Clone ID: PAT_MRT4530_18526C.1
gaggtgcgctttcagcctcaccaagctgctcacgattcttataagctggatttctacgatctgcaacatgcttgttctgttcatgacaatcatgggtgtccctaagcccgactga

SEQ ID NO: 12396 - DNA, 528 bp, Oryza sativa
  Clone ID: PAT_MRT4530_18527C.1
atggcgacatgtgagtacaatgcacttgccatctgctgtagaactgatgataaatccagagcccgcaccatgcataacgactcgacggccatcaatcactttgacagggtaaacgataacaatgctgggccgatgttgacgagcacgctccacatcgacttgaggtggattggaaactgcgatcgagcggcacacgcccgcaacccgcgcaatgtcgccgaccagaggtacttccctctcgcgcggcacctagrtagtccacgcgatagatcgatcgaggcgcgcggctgctacaagtcggggtcgggcgcgaggcagacgtcgccacgaccaccaagcatatgctgcggccgcagtaagaaaaacatacactattgctcatacgaatcaagccagcaagatataatatacaaagatgatgtatgcggagagggagaggtggcgtaccacggcggcgatgcctttgacggtctgcgcccctccgccctcgagtacgtagacatagcaggcgtgccaggtgtttcatga

SEQ ID NO: 12397 - DNA, 412 bp, Oryza sativa
  Clone ID: PAT_MRT4530_18528C.1
acccagggttacctcatgccacatagaaggatcaagtcctcacgtaagcttgcatgcctgcaggtcgactctacaaatccccttccaaccaccttgatcggcttcacaaacccatttcccaagttttcgacaatcaacggtgtatgcgggatatttggtacacgcgctcagagagcacggataccaaggtaccacaagggtggagagacaaggattataggggcaattgatcaaagggtgacttgccttgctcaaggtcttcacggagcttcacgaatcttcgagaaaacccgcgatcggcgaaaatccggtaaccacaactatacgcaaacaaacaaaaacaggcggcggcgctaagcggtggcggaaggggcggcacggcgcgagagcgagaggggaggccggcggccat

SEQ ID NO: 12398 - DNA, 452 bp, Oryza sativa
  Clone ID: PAT_MRT4530_18529C.1
gtataatccggccgcaaataatctgggaagcagatactgaatatggatattttttgctgatatgaatacaaatactatgacgttggcgaaagggcttgtaccctagtggttacaagagcatcagtacgcatctgaggtcctgggttcgactccccatgggagcgaattttccagaatttaacggcaattgtgctttcagtagtaggcgacgtacccgtcgacagcgaggctcacatgtggttgacttcttcaatctatcaaggaggatttgccggccctcaccaaatctatcaaggaggatttcccttcttcaaatctatcaaggaggatttgccgcccctcaccaatctatcaaggaggatttgctcgcccagtcttcgaagatgctcacaggggtagggtttgcgtgcgtgtgtttataggggtaattctaaaaaaaaaaaaaaaaaaaa

SEQ ID NO: 12399 - DNA, 974 bp, Oryza sativa
  Clone ID: PAT_MRT4530_1852C.1
atggcgtccccgcaggcgcctcccctcccgctttcgtcgctccaagaatcgagaagcgctcgtatccgtatcccccgcgacgagccgaggccgacgccgcccgcgcgcagcagcagcagggaggagccccggttcgtcgcggagaccaaactcatcaccgtgcattcctgcgcggggcggctcggggacgcacgggaggtgttcgacggaatgggccgcagggacctgctcgcctggtcggccatgatcggcgcgtacgccatcaggggaatgtacagtgacgtcctcgcgctcgcggtgaccatggtcgaggaaggggtgctcccggacaggttcctgatcacgcggattttacaggcgtgcgcatatgccgaggaccttgagcttggtagggcgctccattccatggctatcaggagagggttcatggggagggtaaaggatgtgccggttgggaactcggtgcttgtgatgtatgccaaatgtggagatttggggtgggcgcgcaaggtgtttgacaagatggtgtgcagggacttgggcacatggaattcgatgatttttggttattgccggttcggggatcttgatgtggcaatggaattgcttgggcagatggaggagtctggagttgcaccggatgtcgtcacatggactagccttgtctctggctttgttcatatggataggagtgatgaggcacttcgatgtttcattcggatgcgtcttgctggagttgaacctaacggcatgtcaattgcatgtgctatctcagcttgtgccagtttgaagttactaaaccaggcaaaggagctccatagccatgctattaaggttggcagtgttaacaacgtgctctcagggaactccttggttgacatgtatgcaaaatgtggagaaatagttgcagcttggagaatatttagtgggatacctgacaaggatatattctcctggaattcaatgatttcagg

SEQ ID NO: 12400 - DNA, 573 bp, Oryza sativa
  Clone ID: PAT_MRT4530_18530C.1
atggcattgctcgccgtcgttgtggtggcggcggcggcgttctcgacggcgtccggcgccagctacggcgtcggcaagcccaacggcgggtgggatcttcagaccaactacacctcttgggcttcctccatcaccttccgcctcgacgacaagcttgtgttcaagtactcagcggcggcgcacgacgtggtggaggtgaccaaggacggctacctctcatgctcggcgtcgagccccatcgccgtccaccgcaccggcgaggacgccgtcgagctcggccgcctcgggaggcgctacttcatctgcggcgtgccggggcactgcgacgccggcatgaagctggaggtcaggacactctgctcaatcccgtcgccgccgccgccgggcagcgacggcgacggcaacggcacgccgggcggcatctgcatcgacggctcgtcgccgccgacgatcatctccacccccggcgtcgtctcctacggttcagctccgggatcttcaggcagtgccaccactgcacttgccatcatggcagctgctacagtgatgctgctatctctcatcatagtttaa

SEQ ID NO: 12401 - DNA, 338 bp, Oryza sativa
  Clone ID: PAT_MRT4530_18531C.1
cgcctccaccctcgccctcatcctgccgccaccgccggcgcagtactgcctccgccgctgtactcctacccccgtcgtcgctgtcgtccttcacccccatcgtctccgtccctcacaaccctaaacccgccaccgccgtcgccatcgtcaccccgtcgaaaccttcgcttcaaaaccatgtcggccacgacacgcggcgaagaggcgtgtccatcgacgacaaacccgtcctgcaccaccaccaccaagagcaagaagacgacgcgaagacgaaggaggccttctcctccaactccggtgacctcctcttcttctccagcgccagcgacaccctatga

SEQ ID NO: 12402 - DNA, 519 bp, Oryza sativa
  Clone ID: PAT_MRT4530_18532C.1
tcgtccgtctccgctccagtgtctctccggtcggggaaactgcctcctccgccgccgccccacggtgaccatggccgtcgacctccgcgtttccatcgcccaccagacctccttcgcgctccgcctcgccgccgtcctgtcctccccggcgcacccggcgggtggcgccgggaggaacgtcgccttctccccgctgtccctccacgtcgcgctcagcctcgtcgcggccggcgccggcggggccacgcgggaccagctcgcctccgcgctcgggggcccggggagcgccgagggcctccacgcgttcgccgagcagctggtgcagctcgtcctcgccgacgcttccggcgccggcggcccgcgcgtcgccttcgccgacggcgtcttcgtcgacgcgtcgctgtcgctcaagaaaaccttcagtgacgtcgccgtgggcaagtacaaggccgagacccactccgtagacttccaactaaggctgctgaaagtgcttctcaagtgaactcatgggtagag

SEQ ID NO: 12403 - DNA, 502 bp, Oryza sativa
  Clone ID: PAT_MRT4530_18533C.1
attccaaaattaaccctaatcaaaaaaaatcaaccaaaagggggggggggaaaccgaacaatcatccaccaaaaaaaaaacaaaaaaaaaaaaaaaaaaaaaaaaaggaggccaaagcgctagcaaggcaccaccctgaaggctgaaggacctcggggcggaccgagcaactagctcaccgatcaataattaaccgaaaaaaaaaaccactgaaaaaccgaacaaaaaaaggaccaaccaaaaaaaaacaaacaagaaaggggcaacaaccgtgagggagagaaacgatgtccggaacagaccccatcccggccggaatcgagacgggggggcaaagaaagctcaaggcaagcaaagaccacgaccgggccccgcccccgccgaaccccgggggggcgaagggcaggccaaccggaaagcacccggaaagcggacaaaaaccgaaccccccgaaaaggccccgcccggggcagaacaagggggggagcatggaaggaagggg

SEQ ID NO: 12404 - DNA, 284 bp, Oryza sativa
  Clone ID: PAT_MRT4530_18534C.1
gagtagtcttcgatcggaagggaagcgagcgactaagctaagaacgtaatcgcggagtgcgagacgtgaactgtcatgcgctcttgaattttatttcaattcttttaaaaaaaattgggagtgatttgtctgttgctctcgatccattgagagggggaagaatgtgtaagcaagatgacaaaacggcctcgcgctatctccagtttcttgcactcaaccaaggggactaccaccgctagggctctgctgctctctggtgaccattcaagaacgcacaaatcttg

SEQ ID NO: 12405 - DNA, 354 bp, Oryza sativa
  Clone ID: PAT_MRT4530_18535C.1
atggcggtggatggcggcagcggcgacgcgacgcgcgaggcggcacggggctcggagcgatgggacgggcggcacaagcgcgacggcgacgagcggacgcacggcaaggcgcaggcgacggtgacgcgcagcaacgcgacggcgcggggctcggagcagcgacgcgacgggcgggcgatgcggcgcggggctcggcgcggcttggcatggggctcggcgcaacagcgacaggcgacgacggcgcgcggcgcggcagcggcgatggcgacggcgcgcggcggctggcggcgatgggacagtgcgcggcgacggcgacgcgacggcgtcggcggcgcggggctcggggccggctag

SEQ ID NO: 12406 - DNA, 348 bp, Oryza sativa
  Clone ID: PAT_MRT4530_18536C.1
atgtggattggcacttctgctgtgctgtcaaaacttgcctcccaaccaggcaaccaccatgctgaaaactctggttcatatttcatactagaagaatgtgggggtgtatgccatgcagctcaggcaatgatttatgcatatgagaaagaagcaactttggaagaaacaggtaatactgccaacaaggaacaacagcaagtagaagtcacaaacttatctcccatccctgcaggagaatctatgatattggagcttgaggccgctcctatcaaaatttcaacaaaatttgcaggatcagcaattgcagaaatcaatgcccaaggtcatatgaaagaaatcagcatataa

SEQ ID NO: 12407 - DNA, 2550 bp, Oryza sativa
  Clone ID: PAT_MRT4530_18537C.1
atggagaacaccatcaacggggagcacatcgtccagatacgaggtgtacaggccgaaggcaagatggccgccccagaaaagaggctgaatcgcttcgttcacttggttgcgatgaccgagagattgggcaacgccctcggcgcgatggccttcacctgggccaccgtcgtcctgctgggtggctaccctgacaatctcgactcgactgatttttggttagccacagcaatagttttcctcgaagccatcaggatgtttaccaacgataacaggctggattaccaactgttttttggtactagaggggattttagacttcttggctggaatgggctgctggttgtgatggtatatttgtcggttgtgccggtgctcctgtcaaaaaaactgttaccttggcgtcaactcgttctaaacatgtgtatgcttgctgcgatagtgatgctggtattcattttcagtgatgagctaacttatcaacttatgataatagtatatgaagtttctgctttactgtttctgtcatctggcaacttccagattccagcagctgttgtgcgtgtcgtcctcgcactgacacaacttttaaatggtaatgatggtgagaacgataacgagcaaaacctcaagacatcactagacatcttctatgggatggtgctggggcaagggatactctacattgtggcctgcttggtggaggcattttcattcatccctcggagatacctcatccaccgtggcggatttggaggtcagatgggagtggaatatgccaattcgtactatgcatatgcctttgagaaatgcatgggaggggctgtgcttgctccaaagaagatcagcctcatcacatttgccatggattcactcaactcagactcatccaggaagaagctctatggggctcagatgctgcacaaatttctcaaaaaggagcagttaaggaccaaaacaatcacaaaactcaccaatgacaccaggacagtagtctcattgttcgatatgctggactggaaaagcgatggggatgaacaaatcagattatttgccgcaaagatcactgccgagcttgctggtagcctccgagttgttcaaatccctggggcaacacagcttgtagcctcactagttctggacactgatcaccaacagacaacaagggatcattttctgttcattgatagccaagtgggaagagaagactcaccaattcagcaagttggcatgggccaacagaactccccagtacttaagtacttgaaacaagtggcaagatattgtttgattccggtggatgagccatctaacaggcgtcaacaaaactcaagtatgctcagatggtggaagcggatcacaaaacgctggtcaattccagaggaggagccatccagggaccaagatttcctcccagtacaaggactgctaattcttgagaggcttgctaactttgatcctggaaactgcatggaaatcagcagaacaataggcctcatctcaaagatgatagattttacaagctacagaaatcatatgacaagtactaacgaagcccaccaaataatgttggcaagtttgtcacttagggtgctgagaagacttgcaagtactgaagggaagctaggtgtaactctgcgacaacagattttggaacatccattcgtattgagcaacctttcagagatcttgaatgacagtgggagcaaccatgaacagaagcagttggcagcagaaatactgaaaaaccttgccatggatagaaacactagtaaggacatcgagcacatccgagtaatcatcagcagtttgatgtgtagatttctcagccgagatccatcctcaagtacaaattgtaatcacttgctacggaaaactgctggtcaagcactggcgatgctggcaatggagagtaaagataactgtttggttatgttaatggaaccagggtatgcgttcattagagaacttacagctacgatccataatgacaggtacaaatgtataacagcaagcctgttgtggagtatgtgcgagcatgctcagtgtaagctcagcaactcagacctgaagggactatctgacatcttgagattggtgctggaaggaataatgcatacaaaaggagcagaactagaggtccttattggccttagttcacaaatatgtaaatgcattcctgaagacttcgcccgagaactagagaaaggccagattaaggagagatttgtaaagaggcttgtcgatgaacttaatgcacatatgagacccagtccttattgtcccagtatcaggagggtgattgttcaacatgctatatacttgatggagttcaatcctcgctacgcaaatgatttccataaatgctggatggtggaagcattatcaaaggtagaaagtacaccctcaagggttgaaaactacaggttgctttcaggcgacatgggactcatggagcacagcacagcagtttccactcttgtggccagagcaaaaaagctgatgggtcgtgactctcgtgagtgggcacggagcatcagcagtgccacctga

SEQ ID NO: 12408 - DNA, 500 bp, Oryza sativa
  Clone ID: PAT_MRT4530_18538C.1
gcacgaggggagcgccgctcccaacgacggcgacgacggatcgccggcgggtctctcatttcatctcctcccatcttccgacgccgccgtcggtcgtctgctggtggcacgcgggttctgttccgctcgctactgaccggttaatctgttgtcagaccacacaaaggagagaggcactgcagtaccaatgggcatgaagttcagagttgtttgcaggaagttgtatgattacgtcagatatgatctcaaggagattgcttttccttcatccttgccagatcctccacacatcaagaagcggccaaagctcaccttgaaagacaagtggtgtattctgaaggaggcaaccaggctgtacggggcttcttgggtcagagacattggccctgatctcagaccgaatgactacaagaaggtcaaagaggaacccgacatcaagactgaggagggaagcagcgagcctaccacggttgaggaccttctcggcgcattaaagggtg

SEQ ID NO: 12409 - DNA, 4860 bp, Oryza sativa
  Clone ID: PAT_MRT4530_18539C.1
atggcgcaaggggacgacgctaccgagcagcagccatattgggagtacacgctgcggaagtacctcctgctgctggcctcgctggtggccacggtggcgtacggcgccgggttcagcccgccgggcggcgcgtggcaggtcaccgccggcgggcacaccgccggcgaccccatcatccgggacctctactacggccggtacctcgtcttcttctactgcaacgccaccgcgttcgcgtcgtctctgctcgtcatcgtcctcatcctcctcttcgccgtgctccacgagaagcggaacatgtgggtcaccgtcatgccgctccgggtggtcatggtgctcgacctgctcagcctcatgggcgcctacaccgcggggacgtgccgggacgccaccaccaccaggtacaccgccgtgctcgtcgccgccgtgttcgtctacctcgtcgtgcagatggtgctcgcctcgctcgccggcggcgacgacgaggacgagcacgtcgtcaccaaggagcggtcgcgcaaggtgctcctgctgctcgccacgttcgccacgagcctcacgtacgtggccgggctgagcacgccgggagggttctgggcggacggcgtcgccggccaccgcgccggcgaggcggtcatgggggagcggcacccggcgcggctgacggcgttcctcctctgcaacaccaccgcgttcgtcgcgtcgctgctcatcatcgtgctgctcctcgaccggaagctgcgcgacggcacggtgcggtcctgggagctgtacgggtgcatcgtcgtcgcgctggtcgggctcgtcggagcgtacgccgccggcagctcgagggcggagcacaccaccgtgtacgtgctggcgctcgtcggcgccgtgctcgtgtacatcgccttccacctcaccgtcgtgccgtgcgtcaagcaggcgcttggcaacacgaagctcgcacggatctactcttcgatatcaaaacgacgatattgtcccaagcaagaccaagaagtagatcaggccactattgacagggaggcggaacataaccgagctatggagaaggctcgctctctcgttctactgctcgccactctagcagcgaccgtcactttccaagctgcgctagatccgccgggtgggtattggcaggatgacaatggcgaccacaaggccggtaacccgattctcctaacaactaaccctagaaggtacaaggcattcttctactgcaactcgaccgccttcgtgtcatccttacttgccatcatcctagtgcagagcaggtctctgctcaagcgccacgcgctagaggcagccatgattctggatttgtttgggctcatgggtgcatatgcagcgggaagctgtcgggatgcgagtacctccatttatgttatggccatagccggtgccgtgctggtgtatgttgtgatccatgtcgtgttcttcacactagaccagagaggacacgacgaagatgtattgctggagaagaggcgcaagaggttgctccttttcgccatcttgtccgcaaccatcacctaccaagccgggctaaccccaccaagtggcttctggcaagatgatagtgatggtcaccgtgcaggcgagccagtcctcttcagcaacaacccttaccgttttaaagcctttttctactgcaacaccaccagctttatgtcatctatcgccctcatcatccttctcgtgaacccaaatttgtacaggccagccattcagagctatgcgctctccgtttgcatggtggctggcatgtttggtctcatgggtgcctacgccgctgggagctcacagcatatgcgtacatccatctttgtcttcgcattggtgcttatttttgtggccatacttcttgtggtattcgtggtgcgccagaaccatggcaacactaccaccagacagaactcccagggtgaccaaaaccagagaggtgacaacagtggaagcgaaaatcacaccaagcgcaagtacctgatgctactggggatcctggcagcgagcgtcacctaccaggccggcctgcacccgccgggcggcgtgtggcagagcgacgacgacggcgcaggccacgcggccggcaacccggtcctccgcgacaaccggaggcggcggtaccgcgccttcttctacagcaactccacttccttcatggcgtccgtcgtcgtcatcgtcctgctgctgccggagtcggcatcaccgcatgtcaacgagtggttgctgaaggcgatgaacacgacgattgttctcgacatgattggcctcctggtggcctatggggcagggtccagcagggaatgggagacatctggatatgtcatcgccatggccgtcgtcgtgctgggctacattgcagtgcacggggtgttgtcgaccttcggccagggtcacaaggcaggtgagtaccagctgaagaatcaccttctgctgctggccactctggtcgcaacggtaacatatgccgcggggctcaacctgccaggggggttctggcaggacacacaagaagaccatctcgcgggcgacccaatcctaccaggcaaccacaaagaacaatacatcatgttctactactgcaacgccactgcgttcgccgcgtcactcgtggtctgcctcctcctcctcgtcctggacaaggagaactcaggctgcgcagctgccctgcgagtagtcatgctgtttgacttgcttggtctaatgggggcctatgctgccggaagctgcagagatgaattcactaccatctactcctcggtgatcatgtcgatggtatttgcctatattgtgccttctttgtttacctatgcagtgtccaagttgaagaagaaagacaaaaatcatgggaagcaaaacaaggattcgggtgaaccaaaggatactgagaagcaaacctggtatcctgatgaacacaagcgcgaagaactgcatgaggtcttgatgctgctagcaacatttgcagttaccatcacctacgtggccgggctgaacccaccaggtggcttctggggcagcacccaggacggccaccgggtgagcaacccagttctgcaggacatcaactccagacgctataaagcgttcttcgtctgcaacaccacagcgtttgtcgcatccctgctcatcatcatgttgcttctggacaagagggtcaacacggagcaaatgtcattgcagtttggtgaactgtatgggtctattgttgtggttctcttcggcctcgttggagcctatgctgctgggagctgcagggacaccgatgacactgtatacgtcatctgtttgattgctgcaattcttgcatacatcttcctccaggtggctgttacacaattcttaaaaaagaggatcaagaatgatgggcatactgaacgaagtatatcatctgtaaagtcactgatccgtaatgaagatggtagcaggaacacaaaacgcaatattgcaatggaaaaggctcgctcccttgtcatgttacttgctactcttgctgcaagcatcacataccaagcagggctagatccaccgggtggtctctggccagatgaccgggatgggcataagggcggcgacccaatactcctcacgacaaacccggcacggtacaaggtgttcttctacagcaattcggtggcttttgtgacatccttagtggccataataatggtccaaagtaaacatgtactgaagaaccacactctagaggcagctatgctgctggatctgttcgccctcataactgcatatgctgcagggagttgccgggacgtgagcacatccatctatgttgttgctctggcaggtggtgtcctcgtctatgtggtgattcacataatcttcttcacactagacaacatggacaatgaatatcatgatcctgatgaggaggataagaagcgtgaagttttgctgctccttgcaatcttggttgccacgctcacttatcaagctgggctgacacccccaggtggcttctggtcagaggatgataatcttgggcaccaccaccgagcaggctatccaatcctgctcgaaaactatccaccgcagtacgaggcattcttctactgcaacgcgacgagcttcatggcatctatagctctcattatgctccttgtgaacccaaacctatacaggccaggcataaagtgctatgcgctttatgtgtgcatggtggctggaatgttcggcctcatgggtgcctacgctgctggaagctctcggcgtctgcgcacctccatctatgtattgacattggttggtgcagtgtttgccttggtagccttgcaggtagccatgttctggaacaagaggacctctaaaacaggaggcaacatgacgaactcctctgcgcaagaaggtggcagcacagacactgaagcctcacaaccagcacctctgataaaagggatgggatccacttcacaagcaactcagatcacagatattacagatgctgcactgagaaacactgacaaaggagaggggtcatctgaacaaggaggcagcagaataaattctgtcacttctgaaccaggagcccatggcacaggaaatggagcctctctacaagaagccaacagtgaagaagataaatctggatcaaccgagaaggacatgcgggagtacttgatgctgctaggggtcctggctgcaagtgttacatatcaagctggcctaaaaccaccaggtggcttgtggcaggaaaatggcaatgggcaccttgctggccactacatcctccacgacatcaacaagcgccgtctaaccggcgatctaccggcggtcagaccggcggcggcggcggcggtgataggcgcggcgagtagcttcggcggtcagaccggttga

SEQ ID NO: 12410 - DNA, 3769 bp, Oryza sativa
  Clone ID: PAT_MRT4530_1853C.1
cttccaaagctcttccttctaagcttggcccctcgcgatctgttgttgcatctgcagcctgtgagcacggatcctcctctcctcgtagccggacagcacccgcaccacgaaccacgccttcctcccgaactgcaccagcttatccatccccggcgagcggcaggggcacacggcctcgcctccctcttcaccaaccaccttcgtcctttttgcctcttgaagccttgctagcaggaaaatgaagccttgcgtaaagcggtcttggtgccctcaattccctatcaaagcccctgacgcacacaaatcctctccaaaagcaatgttgtatctcttcagttgacaaacctcgaaatattgtaggaactgaggttccaaagtaaactgttcgtcttgggaggttccatatccaacttcgtggaacatcaaatggatttttgctggagtagtgatcagcaaatacctcattaacttgaaaatatgtcccgttaagtggaaagcttcctctcatcgctgttcggcatggtatcagaagggttcctctaactttctgagactgcatttcccgtgtactgttgcagctaaagcatgtcgaactctcacagagtttaccagtttccttggagttgcaaaatgtcttgggtgcatcagttgattgtgccgtttcacctggggtccatatagaaagaagatatggggagggatcatctggttctctttgatcaaatccttccagtagagggtgtgagtctggcaactcataaacttggtgttcagtcctcaagcggttgacattcttgagcttggaagttggaactgaagcagcttgagggcttatggcaaccagtgcattcgacatgtcagcatcttcgatctcgatattgtttgcatgaatataacttttcaagttctgtgcaaactcctcgacattaagatttataataggaatttcatcgggatcttcactgaaaaaatcctctatttcggcctctcttgcctctgcaatgtcaggttcaggttctggggttgatggttcttcgatgataggttgttattggtcaccataaacatgcccaggatggttcgtgttccagctaagttggcccataggccttgaatgtgtgtattttttgtgactgctctctgcatcatttggatattctggtttagaagtcttctttgaaggtccaggaagagcgagccgtgcacttgcaaatgcactagcaaaatgcttacactcagctctcattggacatgaattgcaattaggcttgctttttgaacagaaaacctttccaaaagttatcatttggtagtgaagctcatacaatatcaattgatcaagcttgcacaatcgaggccaaatatatttctgtatgtgttccagcaaggggtacagttccaacaagtgtagttgaagagactccggaaggggttgaagtggcacccatccaagcctcacgcatatccgtgcaacatttgtgtccactggaaaagccatttggtgtagtgtcaaaagacgaacacactccgtgctttttagtccaagccctctaatgctcagaaggaagccctttgctttgtcgggttcaatatctcttagccattcaagatcaatgcttccatggtctctcaccagccggtttagaaagtcttttatccgttcggctagcatgttattcattcctcactctttgataacaaaagatatttcattcacatttgcttggcatactgcctcccaatcgattgtgtccttcgctttgtcacttctttgtctgttcccatgattgtgcagcacttcttttcgtaaattatcccagtcataatgtttcattttagtccgaccccgcacattcctagcttttggtctcttttcagtatgtttggattttccaattgagcctgaagcaattcctaggggaacatctgaatgagagttcatgtttccacacaagtttgaagaggaatgcttttcacatgtttttgcttgaactctgatatcgttgtcctgctgctggctgcattctggttgagatctttcactattgatctggattgttcttgtagtgtatgcttcttgcaaattattgaaacaatcctgctgttctacatatggatcttcagttctgttactagtaaaactattgtcataaaaagagtgaccggtagaaatgggcacttcctctgaactaataaattgctggaagaagctttgtttaactgttgctgagcattcagcttcctgtgaaggctgaaaggggaaagaagaatacatgtgctgactcaatgacccatctctattatcatataagaagctgcccgatgaataatctgtcactttggctttgtttttgttgatagaagcatcaattggatgctgctgatagagactaacttcggattgcgcgacatctgagatattcactccatgatcaagtcctgtacagatctgatatgtcgtgtctagatcaaacggtgcggccttgttcagatctgaggttggaagaacactgacttgatgacatcctgatgatccaacctcttgtgtgaatttcaccaatgagctagaagaacccattgtatatgttccgtttagaagatatttagagaaattccgaggtgaaaccacggaattttgcgaggaaagaacaccctcaagagacccatcatccacagtattgaatgatcccaagtcacctatctcttcaacaaagaaattaccttgcaacttggcagattcacccaacactccagaacaactatctttctgtttaggaggtgtaggagtagacttctccactgctgcaggcttctcagggccttctgacttgacagggaacctcgcggcaagcgccatgaaagcagaactgaaatttttcaaagaacaaaagaaaatataattgaaacacgaacatgcaaaattgcataaaattagccttattccaaataggatagaagttctcatttcacctagaaagatggtctgaaacattctgagtaagaaagacgtccacaaccgagtccacaattgaccctttccatggtgaaaaacgcctgtcgccttgaaccagatgcatgtgagcaataaatgaatcaatccgtcctcggaacattcttctttcttcttcaagaagcctctccttatcttcatcaattccttcaacaccttcacacttatctagcgccattaataagttccacatcaaattggtgactggatcaattttcacttcggcccgagaacctcttttctttacctttccctctaagggaaccaatgcaccaagatcttttggtgtctcttccacggtattgtttgatgtcatgttgatgcttaagagcttcaacttctcaattatggcttctaaataatccaagtgatgatggtataatttcacaaccatcattttctttcattgtaggatctctatcttctgccttcccattagcttcagttgttttccttacacgacccctaggactcgaacgaccgggcggcgttgctggcggctggcgcgtggccggtggaagcctggtagcctgcctactgctgcagtgctgctgcctgctggcgccgtggcgtggtcggctggccgctggcggcagccggggcggcgcgagcgtggagggcctgaccggggacctgggacggcgggctgcggcagcgacacgacgcgagaccgcgacgccgcgacggggcgggggcgacgggcgggggagacgggcgggcggcggggcagggcgatcggcgcccacgcgtccaagagaa

SEQ ID NO: 12411 - DNA, 1887 bp, Oryza sativa
  Clone ID: PAT_MRT4530_18540C.1
gaagaactctcttcttcctttctttttggcaaagacaaaggcaccatttgtccatttgccgtttttcagtctacagcctagagagccatcttactacaatagaaggcaatgtatcaactcaggttgattacatacacaagatatgctgaaacttctatgtggtatcacacctaagatgttcagacaaaatcatgatgacggtgactgtggtggctttgttgcgtcattgccttgccgatgtcctttacccatagcttcttcctccaagtgctctttcagaccttctttgtaggactcgacatagttcttcagtgcatctgtgtagtttgaggcgcgagccatgtacatccgctgtaacgcaggcttggctttctctgctccaccctttaatgcgccgagaaggtcctcaaccgtggtaggctcgctgcttccctcctcagtcttgatgtcgggttcctctttgaccttcttgtagtcattcggtctgagatcagggccaatgtctctgacccaagaagccccgtacagcctggttgcctccttcagaatacaccacttgtctttcaaggtgagctttggccgcttcttgatgtgtggaggatctggcaaggatgaaggaaaagcaatctccttgagatcatatctgacgtaatcatacaacttcctgcaaacaactctgaacttcatgcccattggtactgcagtgcctctctcctttgtgtggtctgacaacagattaacgagtgccacgcccatccacttcttctgccatcccaaacgtcggggtgtgcggtcagtagcgagcggaacagaacccgcgtgccaccagcagacgaccgacggcggcgtcggaagatgggaggagatgaaatgagagacccgccggcgatccggaagcggcggcgtgctcgcaaggccggactcggaaccagaatccgctggcgccaagcggcggagaggtagatacgagaaggcggcgtgcggcgaggtgaggtcggagatatactgaccgtcgtcgccgtcgttgggagcggcgctccaggcggagggaagcggcggcggcagcggcgctggtgaactcccgaccctgtcgtagtcgccggcggcggaggcggaggcgtcggcgctctggccgccgtcgagcgggaagaagaatgggtaggtctcgtagcgcgccatgcagctgctgtacagcacgcggcatcctcgccggaatcggcagtagttgggcatctccgccaccgcctgcgccacgcacagcccgcagtccgccgccgtgatgtcgcgcgtgcaccacccgagcccgtagatggtcaccccgtccttgaacctcgcggtctccctcgccagcccgccgccccccgcgtcgccggcgtccgccgccacgcgcgccatcaccttcctctgcgccttctcgaacgcctccgggtcggtggcgttctgcgtgttgaggaggatgagcgcgtagccggtgtccgggaggccgacgaagtcggcgtcgtcgtagcgcgcgaagcagtagtcgtaccagacgcgcgcgtcggccctgccgcggcaggccccggcgagctgcctggcggcggcggaggcgcagagcgcgcagtcgggggccgggatgtcgccgcggcactgcgcgaggccccagatggcggagccgtcgccgccgcggccggcggtggccgtggcgtagtagccggcggaggcgcgcggcaccagctcggagagcacctgcgccacgctcgcctgcgccggcgcgccgctcaggttcctggcgcagtacgtgttcaccgggtccacggcggcgcacggcgccggcacagtcgccgccacgagcagcagcgccaccagcacggctactagtggtgaacacgacgacgccatcgccat

SEQ ID NO: 12412 - DNA, 457 bp, Oryza sativa
  Clone ID: PAT_MRT4530_18541C.1
aaaaccaaacaggggccctgaacattactacttgattcaacagggggtaccgattcaaacattttcaaaaaggcccaaaaactagggagctcatcgacaattttattcccacaagttttttgcagacaaatttaaacaagattgacccgataggcccaagggatcgctgccgttcctaaaagctgaagcttttacagggccttgaggatctcctcaaccccaaaaattgggaattggccaccttcctaaatgtttgcaacaaaaaccttgaggttggcaacaaggaaagcaaaccgtcttaaacaaataccaagccctttttccaaaagggtaagctcaaaaccaagtgccttggtgtatgttcccaaaccatcgggaaggaatttcacatgcttattctcaggggatgactttgcccacccctttatgaaaaagggggcgttaacactgacaagca

SEQ ID NO: 12413 - DNA, 723 bp, Oryza sativa
  Clone ID: PAT_MRT4530_18542C.1
atgcaacgccgttgtccacccctcctccttgctctcatcctcttattctccgccgccgtcaccgttggcgtcgccgccggcgaccttatcgccatccccaccgcactagacggcagccgcacctctcgccgtcgccctattgatgatccacagttcaccgtgacgctctgggaggaggaggagatcaagactagacctatagcgtcccgaaatcttgaggacggcagcggagtctcgtacgtcgtgcccatggccttcatagagaagctccggcggcgatgcgccggcgatgacggcggacaagtgcccaccggcggtagccatcgtcgctgcgacgccacggcgatcaggcagcttgaggaggagatggctccatgcctacttgagcagttcaaggagaacatggagatcatgcgcacaatgaatgatgtttttacttggagattcgagcacccctattttatggccgtggaacaaagacttgttactccacaccaccacgttccttgtcgtcatttcgtcgaacacatggttggcgtcactcaaccgttgccgccgccaccggcggtcagcccgcgcgtcgccaccaccgacgctactgacgcccgccgccggcacggccaccagtcaggccacgcgccaccgccaacgccggccgtcaccccgtgcgccgcttgccggcaccgccaccacctagcacgtgccactgccaccaccacctag

SEQ ID NO: 12414 - DNA, 162 bp, Oryza sativa
  Clone ID: PAT_MRT4530_18543C.1
atggattcaccaagacaactaccgtcttaccatcccatcactggaataaaggcaaggttgcttcttgctggaatgctggttgaagacttgaagatggatagacaagaagatttgtgttttcccatgcttggaactcttctccccaagacaaaggacagctga

SEQ ID NO: 12415 - DNA, 334 bp, Oryza sativa
  Clone ID: PAT_MRT4530_18544C.1
tttctttttctcactcgctcgccgctcgccgtcgccgccgcttcccaccaagcggagagtccagggaatggcgtccgagggcgtgctcctggggatgggcaacccccttctcaacattctcgccgtcgtcgacgactccttcctcaccaagtatgacgtcaagctgaacaacgcatgtctggcttaggaaaaccccttgcctctgtgtggtgcccagcccagccagggcgatgacctatctattgcctgtggagccagccagaactttcttaatcatgcccattgggagcgtcatgctcctggtgcaacaagtgacattccccagcttggcaag

SEQ ID NO: 12416 - DNA, 269 bp, Oryza sativa
  Clone ID: PAT_MRT4530_18545C.1
aagctttttttttttaggattaacagtttgtactttgtaatgcatcccatcaaaaaaccaacattaaaattaccatgccatttatatatccacacaaaaaaaggctgcttctaatttaaaacctcctaacatccctttccagcaacggaaaacataatctaattacaaaagctaactaaccctctctgtccaataatcaaaccaattcaaaggacatggcatcacccatggtaaggaacatcgggtgcataaattaatggtgcaagctt

SEQ ID NO: 12417 - DNA, 1617 bp, Oryza sativa
  unsure (1)..(1617): unsure at all n locations
  Clone ID: PAT_MRT4530_18546C.1
attgttacatccccttctcctcccccgtctccttctccggtcggtttcccaacccgagagggcctcgccgccattgccgcctcgctcctcgtctcgcgggaacgccgccgccgccgccgccgccattagggcttagggctcaggaggctcgcggcgatgtggtggagggccgcgagggctcgccggcggatcgccggggcgcgggcggcgtccacgtcggcggcggcggcgggggagaagagctgccgcgccgtggtggtgcctcggttcggagggccggaggtgctggaggtgaggcagggggtgccggtgcccgatctgaagccgggggatgtgctcgtgcgcgcgcgggccgtctccatcaaccctctggacctgcgaatgcggtctggttatgggcgttcaatatttgagccagtcctacctctgatcattggccgggatataagtggtgaagttgcagctacagggacttctgtgtcgtcctttactattgggcaagaagtgtttggtgctttgcatccaacagccataagagggacatacaccgattatgcaattctttcacaggatgagcttacttccaaaccatctacactcagtcatgtggaggctagcgctataccatttgctgctttgactgcatggcgtgctttacatggtacggctcgaatttctgaaggacaaagagtacttgtgattggtggaggtggggctgttgggctagctgctgttcagcttgcagtagctgcagggtgtagcgtttctgcaacctgtggaactaaaagtattgaacaagtgttggccgctggtgctgaaaaagctatcgattacactgctgaggatactgaatcagcagttaaaggaaagttcgatgccgtgttggataccataggagtacctgaaactgagagaattggcattaatgttctgaggagaggcggacactatatgacccttcagggagaggcggctgccctagcagatagatatggattagctgtgggacttcctgctgctactgctgttttactaaagaaaccccacgcgtcccgttattctcatggaatagattattggtggacatacatgagagctgactctgaaggacttcatgagatacagaggctgtctggagctgggaaattgcagataccggtggagaagacatttcccatcagcaaagtaagagaagctcacgaggccaaggagaaaaggctggtgcctggcaaggtggttttagaatttgactagttttagtaagattcttctcttgtaggaacagaagaaccgcacctgtctgtaaatcgtaagaactttctcctttttctttacctctattttggaaatatgtatcggtttgttggcctgacaaaatttggtcgtcctgtcaagatgcatttgtcatacatggaaatgcagtaagcaataacgtgaggcccgaaagaaattttcatttcgganccaatcgnccaaaggggcgatacatcacggcgcgttaaagcggacggnacccgggnccactaacgctgngaancccttgaacggggaatgaaggcnacggtgcntccaaagtgcngctaatggaaggaatgaangaaatngaaaancggaatt

SEQ ID NO: 12418 - DNA, 2151 bp, Oryza sativa
  Clone ID: PAT_MRT4530_18547C.1
atgcatgcatgcaactctagaagctccagggtgctcagagtagtattggacgaggttggcgaagcttggtcgtcgacgacggcgttaggaacggctcggcgacggcgctccttctcggatgaacggcatcggcttgactcactacaagaactgccatgcatgtatgtctcccatgttaaagatgtcctaggaaatctatgtgtgcacggaatcgacttggagctcaccggagaaagaggaaccaatgatggagctcagcggcttgacttggagaagaatagcttgatctctctcctcggtgctcagatcttggggattcttgagggcatttggagaggacctcgaggggaagatgttggcgcgacggctcggccggattcgctccacagcagccggggcagctacgaggtcgtggcggcggcgctccgggcgcgctctggagctcccgtgggcatgatggcgttcccaatgatccgctgcacgagagagggtgaggtcaaaagtcagttcactgctaagcttgatgatggtagttttgttcatgtaccccacaaatatgaggaatgggttgtggactaccgtcaatgcacattagaggtcttggtaaaggactttgcagctaggataaattggggtaggtgccagcgggtggttgtgtgtggatatgacactttcactgacaatatggatctagtgcatgcattctatgttaggaagagtcagaggaggttagttctatttgtagatgtggtggacaaacctgttcagcttgttactagctcttctgtttcagagattaatgagacagtcatggatgaggttgttacagccaggcaagttttctatgacaggaatgaccctccaatagaagttggaagttcatatgttgctttaaataaatttctccatgcttgttcatcaactggcagagtaaagatcaagatggcaacatataagtgggtggcagagaaggcaattccttttttgaagaaggattcaaatatggatgtgaagccatatttggaaacatatcataatctgctttggatgaggagcaaattctcagaagacataaaatgtgacttcatcatcaataatctagcagagtcatggaacaaatggattaaggaaaagaaagatcttccaattgcagagcttgcagatggcatcagatcaaagacaatggatctactggctaggaggaggaagataggtcataaattggatgaaatttgggccacttaccaggcagaggtgacagtgatcactcctgaacaagacattattaggcacgcagtcaatctcacagaacatacattcacctgcagagagtggcaagtttttgggaaaccatgcccacatgcattagctctgattaaatcacatagaaatcctagaatggctgattatctggatcccttctattcagtgcaaaagtataagcttgcacatacaggtgttattcaaccatttccaggagtagggaggcaaaggaagaatagaatagttggatgccttgagaaaggacaaagcaagcccaggaccgaaggcaagtggcaggtaaccggcaatattgccaaatcctgtcaacaattgatcaatgtatttacagtcaaaaaattgatacatgcttttagatcaccactgtacaacaatttgcaaaaatgtatgttacagatacatgcttttagaggtgccgatggagctcatccaaactctaaaatgctattggagactgctcatccagtgccggcgctcggcgttggtggcggagcgcccgtctttctcctcggcgtggcggcggggtggtggcgctcgggggtgccgatgccggtggcactaggcggtggaggcaatgggggtgtcgacctcgggcagcggggcaggtggcgcaccctggtggcggccgctcggcggcgcggtggtgggggcgacgagctggggtggcggccggggcggtggcgcaccctggcggcggggtggtggggcggcgccgctcggcgatgcggtggtggggtggagcagcgcggtggggggggggcgacggcggcggggtggtggcgtcactggtggctggtggcgctcggtgctcagcctggaggaaggattgaccgattcgatccagagagagatttctcgctttggatctga

SEQ ID NO: 12419 - DNA, 406 bp, Oryza sativa
  Clone ID: PAT_MRT4530_18549C.1
gcacgaggctggatactgctgtgcagaccctatcatgttctgaactttctgaacttctgatgatcatctcagccttaatttcccatatagtctctctttgctataggtttcttaatttcactgagttaatttgcacttgtactagctgtttgatgctctctctctctcgatgatcttgtgcttccggtaataaaccgttggtttaatttcctcaagaaaaagcaatccacctggaaataatctggttggtttggagaaatattgtcagttctcaaggatgtaataaaaggattaaagctgccataattcgttgcctgatatgcaatgttcttgttgtttttggaaaaaaaaaaaaaaaaaaaaaaaaaaaaaaaaaaaaaaaaaactcgagggggggcccggtacc

SEQ ID NO: 12420 - DNA, 2982 bp, Oryza sativa
  Clone ID: PAT_MRT4530_1854C.1
atgatcggcgcgtacgccatcaggggaatgtacagtgacgtcctcgcgctcgcggtgaccatggtcgaggaaggggtgctcccggacaggttcctgatcacgcggattttacaggcgtgcgcatatgccgaggaccttgagcttggtagggcgctccattccatggctatcaggagagggttcatggggagggtaaaggatgtgccggttgggaactcggtgcttgtgatgtatgccaaatgtggagatttggggtgggcgcgcaaggtgtttgacaagatggtgtgcagggacttgggcacatggaattcgatgatttttggttattgccggtctgctgagtgggaggaggcacggcatctgctcgactccatgaggcaggaaggtacgcagccaggggttgttacgtggaatacattgatttcgagctatgccaggttcggggatcttgatgtggcaatggaattgcttgggcagatggaggagtctggagttgcaccggatgtcgtcacatggactagccttgtctctggctttgttcatatggataggagtgatgaggcacttcgatgtttcattcggatgcgtcttgctggagttgaacctaacggcatgtcaattgcatgtgctatctcagcttgtgccagtttgaagttactaaaccaggcaaaggagctccatagccatgctattaaggttggcagtgttaacaacgtgctctcagggaactccttggttgacatgtatgcaaaatgtggagaaatagttgcagcttggagaatatttagtgggatacctgacaaggatatattctcctggaattcaatgatttcagggtatgcacaagcaggttattgtggcaaagcatacgagctcttctgtaagatggaaaactatggtgttcggcgcaatgtgataacctggaatacaatgatctcagggtacatacggaatggggatgatgagagagcttttgagctattccagatgatggaaagtcatggagtaaaaagggatacagcaacctggaacatactcattgctggatcagtgcataatggttattatgatagagccataagaatattccggcagatgcaggcacttctgaggaggcctgactacattaccatccttagcattattccagcattcacaaatctagttgcgtcctggaaagtacgggagatccatgcctgtatttttcaccacaatttagaactggatggcaaaattgcaaatgcacttatcaatgcatattcaaaatctggtaatcttgctagtgcgtgtgctgtgtttgatatgcattcatcaaggaacattatttcttggaactgtatcattctcgctcatgtgctgcatggttctccaaatgaagccttggatcttttctgtcaaatgaagcaagaaggtgttgtgccagatcatacaactttggtcactgttatcaaggcctatggtctcacgggaaaggtatctgaagggtctcagacatttttcaacatggccaatgattacaatatataagtcgggaactttgtttgacaacattcttatcactgatgaccctgagtatgccaagaaattggcagaagaaacctgggccaagcataaagatgcatacccaattcaacagtctgggacacatttcttactgcagctgtaatgcatggaaatgtaagactggctcacctggcagctagagaactgtctgcgattgatcctggagatcccagagtccaaaggttaggttctagtctgcaagatctaactggaaaaactgttgatgtgccagaggagatgacacccaacaaaggaagaaatttagatgaggtcgagagctgttcaatagaaatcaggaataaggtgtatgtgttctcaaatggtgataatgttggcttggaggatacagtagcagaattaaagtcgatgatgtttaagatgggacattctatgcttgacattggcattggaactctagatgttgaagaagaaaaggaagaagttgttggagtccatttttatgtctactgggtaaaatatcttgccaagtgtccttttgcaggattacacgctgctaacctcttgaacagaatttcacttgccattaaactgattcatcaagttgatctgcgtgttggttcacatcgggaatattaccacattgaggatggccagacaaccttgtcaaaagggacagaggttcagaagcatgaacatggcaatgtaactttgagagttatagacttgaatggaaaaaatgaaattcttcaagtggttcctatttatacactgctggagcaaataagaattatcttagtagattttaatagcaccataaacattagggataatggatgggaggatcggtgggtcaaatctgagtggaagaaggaggacaacacagtcggcgagtggaaccacacggccggcaagtggaacggcgacaccaacaacaagggtatccagacatcagaggactacagattctacgccatttcggccgagtaccctgagttcagcaacaaggacaagaccctcgtgctgcagttctcggtgaagcacgagcagaagctcgactgcggcggcggctacgtgaaattgcttggcggcgatgttgaccagaagaagtttggtggcgagacaccgtacagcatcatgtttggaccagatatctgcgggtatgccaccaagaaggttcacgctatccttactaagggtgtgtttgaggagaaggagatagagaagattgggaagcctaagaacggcaataaccatctgatcaagaaggacgtgccatgcgagaccgatcaactgacacacgtctacaccttgatcatccgtcctgacgccaaatacagcattctgattgataacactgagaagcgaactggaagcatctatggtgattgtgataatcttcctccaaagaagaagaaggatcctgaagccaagaaggttgatgtgatgggaaaggactga

SEQ ID NO: 12421 - DNA, 1581 bp, Oryza sativa
  Clone ID: PAT_MRT4530_18550C.1
atgcatgcatgcaactctagaagctccagggtgctcagagtagtattggacgaggttggcgaagcttggtcgtcgacgacggcgttaggaacggctcggcgacggcgctccttctcggatgaacggcatcggcttgactcactacaagaactgccatgcatgtatgtctcccatgttaaagatgtcctaggaaatctatgtgtgcacggaatcgacttggagctcaccggagaaagaggaaccaatgatggagctcagcggcttgacttggagaagaatagcttgatctctctcctcggtgctcagatcttggggattcttgagggcatttggagaggacctcgaggggaagatgttggcgcgacggctcggccggattcgctccacagcagccggggcagctacgaggtcgtggcggcggcgctccgggcgcgctctggagctcccgtgggcatgatggcgttcccaatgatccgctgcacgagagagggtgaggtcaaaagtcagttcactgctaagcttgatgatggtagttttgttcatgtaccccacaaatatgaggaatgggttgtggactaccgtcaatgcacattagaggtcttggtaaaggactttgcagctaggataaattggggtaggtgccagcgggtggttgtgtgtggatatgacactttcactgacaatatggatctagtgcatgcattctatgttaggaagagtcagaggaggttagttctatttgtagatgtggtggacaaacctgttcagcttgttactagctcttctgtttcagagattaatgagacagtcatggatgaggttgttacagccaggcaagttttctatgacaggaatgaccctccaatagaagttggaagttcatatgttgctttaaataaatttctccatgcttgttcatcaactggcagagtaaagatcaagatggcaacatataagtgggtggcagagaaggcaattccttttttgaagaaggattcaaatatggtgtgccaaggtaggcataaggctttagaaaagatttttgggtcatgggaagagagtttcgcatatttgttcaacttcaaggctgaggttgagctgaaaatgccaggaagtgttgtggagatagatgtaccggagaataatgatgggtttattttcattgatttttttgtgcattcaaatcttgcattgatgtctttgaaaacatgtaccctgccagataggtatgactattacatgaataaaattcatgaggcaaattcagatgtgaagccatatttggaaacatatcataatctgctttggatgaggagcaaattctcagaagacataaaatgtgacttcatcatcaataatctagcagagtcatggaacaaatggattaaggaaaagaaagatcttccaattgcagagcttgcagatggcatcagatcaaagacaatggatctactggctaggaggaggaagataggtcataaattggatggtgtgatgctccctattgtaattcagcaactgaatgtgatgactagaaatttgggccacttaccaggcagaggtgacagtgatcactcctga

SEQ ID NO: 12422 - DNA, 2652 bp, Oryza sativa
  Clone ID: PAT_MRT4530_18551C.1
atggcggctcccgtggagagtactgtgcaagcagcgaggtcatccgtcgttcccaatgaagtatctactgggatcgatcctgatgcagagtttagggtgtgtgttcaattcagtcagtacattgctaagcttgatgatggtagttttgttcatgtaccccgcaaatatgaggaatgggttgtggactatcgtgaatgcacattagagagattggtaaaggactttgcagccaagataaattggggtaggtgccagcaggtggttgtgtgtggatatgacacgggcactggtgaggaaacaaagtttactgacaatatggatctagtgcatgcattttttgttaggaagagtgagaggaggttggttttatttgtggatgtggtggataaacctgttcagcttgttactagctcttctgtttcagagattaatgggacagtcatggatgaggttgttacagctaggcatgctgatgctacagattgtaacagtcaacatgccattgattgggagagtttggagatagctccaattccaacagagcaggttcaacagcatgtcattgattgggatggagtggagataactccaattgcagagacacagatagggtcatcaatgcctgtgatggacgaagatgaaatgtatgcatttgttggtcttagagctgaggatgagagagcagaacaagctagacttgaagctgaaaaacaattggactcggcacctagtccggctgcaggtcatgcccaagggaacttagacaatgaggctgacataggtgttagtgatgtggttccgggtgaatctgaagttttctatgacaggaatgaccctccaatgattacaggaagttcatatctaagtatggttgagtttagatcagctgtgcggcaacacgctataaagggtcagtttgagcttgggacagagtcgagtgataaagaaaggttcagaggcttttgcaaggctgagggatgtccatgggctattgtagcaagagtaaagaccaagatggcaacatataagtgggtggcagagaaggcaattccttttttgaagaaggattcaaatatgggtctgacgaagttgaaagaggagttagagaccacatacaacgtcacaataggataccatacagtgtgccaaggtaggcagaaggctttagaaaagatttttgggtcatgggatgagagcttcacatatttgttcaacttcaaggctgaggttgagctgaaaatgcctggaagtgttgtggagatagatgtactggagaatgaagatggggtttattttcatcagtttttctgtgcattcaaaccttgcattgatggtttcataaatggatgtcgaccatatttgagcatagactcaatagcacttaatggagcttggaatggtcatttagcttctgctacatccatagatgggcacaactggatgtttccggttgcatttggattctttcaaagtgagaccactgataattggacttggtttatgcagcagcttcataaggcaataggggatcaatcacccctagcaattagctcagatgctttctttggaaacatgtaccatgcagctaggtctttcatgccagataggtatgactattacatgaataaaattcatgaggcaaattcagatgtgaagccatacttggaaatatatcataaactgctttggatgaggagcaaattctcagaaggcataaaatgtgacttcgtcaccaataacctagcagagtcgtggaacaaatggattaaggaaaagaaagatcttccaattgtagagcttgcagatggcatcagatcgaagacaatggatctattggccagtaggaggaggataggtaataaattggatggtgtgatgctccctgttgtaattcagcaactgaatacgatgactagaactttgggccacttgagggtagttcaaggtaatagagaccaggcaaaggtgactgagatcactcctgaacatgacattattaggcatgcagtcaatctcacagaacatacatgcacctttagagagtggcaagtttctgggaaaccatgcccacatgcattagctctcattatatcacatagaaatcctagaatggctgattatttggatcccttctattcagtggaaaagtttaagcttgcatatgcagacgttattcaaccatttctagataagtctcaatggcccaaggttaatattggtttcaagttgttgccacctttgactaaaaaaggagtagggaggcaaaggaagaatagaatagttgtgtgccttgagaaaggacaaagcaagcctaggaccaaaggcaagtggcaggttcagtgtaagaggtgtcttgccatgggacataggccatcatcctcaaaatgtcctttaaatggtaccaagaaaaaaaggaagagtcgtgcgaaacaaggaaggccagtaggctcaactagtggtgcagcaggccctagcacaccaaaacgacaaaaagtcgtaagaagtgattccacttgcactagtcctggtcctatcactagaaggcaaatggcattgatcaatgctggtgaacaaggatcaagtcaaatggcaacccctctaaggcctccaagagctgcaaagaagatcactccaaagaaagggaaaaaataa

SEQ ID NO: 12423 - DNA, 439 bp, Oryza sativa
  Clone ID: PAT_MRT4530_18552C.1
ctccttttgtaatttcccccttcttttttttttttttagcggtctttttttaaaatttatgggcggaatcacccccaaaaagggccacaagccatcaactacaatgatagttcctcttacaaactttaacacaccgttaacaaggcttcactcaaaaataaagaagggggtaaacttcgtccgccccaaggaccaccttgtccacttcactcccaaacacaatccaccccaaactttatatcttacaaacgttaaaacaaccaataagaagccactcagagaaggtctccacaaccatgggcttctctgtcaatcaaattaaccataccaccatcaccgttcttgaggaacttagattacattccccagctcacttaccagatcgcctgacgaccttggccaccagctcaacctctttttttgcaattttgaacgattt

SEQ ID NO: 12424 - DNA, 527 bp, Oryza sativa
  unsure (1)..(527): unsure at all n locations
  Clone ID: PAT_MRT4530_18553C.1
aaaattnnncttttttttttttttttttatttttattttttttttttttttttttttttttttttttttttttttttttttttttttttttttttttttttattcgagtaactcagtgtaaagtttgcattactaaaactgtactctgatcagaatgtacaacatgatttacctgttttctatacagaaagtttgacctaggattacaacaaaaatatgtatgctttactctcagcaacggaaaatgtattttctgtctaccgtgacctccccgccttaccaacaatgaataaaaagaatttccaccttgatggttgtgaaaaagcacatgttaccagagaaaatggagctggaaaaaaatatgaagaattaacaactgggcatgtatttgttaaattttaactgggctcatcgctgccttttgctttgcctggtaacatatctccaaaaccacccagcattatacgaccaaaccttgtgattctttgctgagtttgtggggtaggctgagagggggtcgtggcaac

SEQ ID NO: 12425 - DNA, 1000 bp, Oryza sativa
  Clone ID: PAT_MRT4530_18554C.1
cacgggctgcaggtaccgctacgatgctgtgttcagaggggaccgctgccagtgtcccctcacggtatcggcttccgcttcgccggcatcctcccgcccctcgcctccctcccagagtcgtacctcggcagcaggtctgcataaaaccggtacgaaaaaaacgagaagggagtgcaccggttgcagttcagagttgcccactgctactttactttgcagctattttgcttctgcttcttcttgttcttgttgctgttggtaatactgcgagagaaattaatcagtagagtgttcatctactatcaatttttgatcgaggagagatggcgggaacggcgaactgcatcgacatcctcatcgccatcatcctcccgcccctcggcgtcttcctcaagttcggatgcgggcatgagttctggatctgcctgttgctcaccttcctcggctacatccccggcatcatctacgccatctacgccatcaccaagtaattcatcattagttactacatcatcaaccaaatcctcaagggatgggctccaaaccgcttcatctatcttctcgattgccgtgtgcttgttggaatttggaaatgatatatgcatccaaaattcagtcctgagtgctccaattcttgtcatctagtcattttcaatgtccccccagtctcttcctctaatgtttgatgatatgtagaatctcttgctgttaatctgttgctttcgtgtgaataagctcccctcttatgtatatctatctatgacttgttttactagtaaacttgattattgagagcttgagacttgcttccctgtctgtctgtatatcttgttccaacactggaactgaatcaataattgtgcctgcactgctcaagagtgctctgaatgtagtcataattgcagataattagtacaattatctcactcaaatccctttaataaaaaggagcatcaacttggatcataaagttgcactcatcgctaaaaaaaaaaagctt

SEQ ID NO: 12426 - DNA, 897 bp, Oryza sativa
  unsure (1)..(897): unsure at all n locations
  Clone ID: PAT_MRT4530_18555C.1
atatgcaaagcttaaaactttcccactgaatagaaggggaaccaaaataatcagccattcctaggatttctatgtgatataatgagagctaatgcatgtgggcatggtttcccagaaacttgccactctctaaaggtgcatgtatgttctgtgagattgactgcatgcctaataatgtcatgttcaggagtgatntcagtcacctttgcctggtctctattaccttgaactaccctcaagtggcccaaagttctagtcatcgtattcagttgctgaattacaacagggagcatcacaccatccaatttattacctatcctcctcctactggccaatagatccattgtcttcgatctgatgccatctgcaagctctacaattggaagatctttctggtccttaatccatttgttccacgactctgctaggttattggtgacgaagtcacattttatgccttctgagaatttgctcctcatccaaagcagtttatgatatatttccaagtatggcttcacatctgaatttgcctcatgaattttattcatgtaatagtcatacctatctggcatgaaagacctagctgcatggtacatgtttccaaagactggaccatgaaatttctttatgaaattctgcatcaagtgccaaaatcattccctatgctcagctgcagagaaaacatatttcacggcattctctagccccttacaagcatctgagctaattgctaggggtgattgatcccctattgccttatgaagctgctgcataaaccaagtccaattatcagtggtctcactttgaaagaatccaaatgcaaccggaaacatccagttgtgcccatctatggatgtagcagaagctaaatgcctgcagcccggggatccactagtt

SEQ ID NO: 12427 - DNA, 125 bp, Oryza sativa
  Clone ID: PAT_MRT4530_18556C.1
gctgttacgtgcccacgtccatgttcctgccgtttcaggagggggcatgtgttcagaacgcttctcctgggcagtactccgccgctggattaggctgcgttcggaagcctggcttcccaacctga

SEQ ID NO: 12428 - DNA, 463 bp, Oryza sativa
  unsure (1)..(463): unsure at all n locations
  Clone ID: PAT_MRT4530_18557C.1
cccacgcgtccgcccacgcgtccgcccacgcgtccgcccacgcgtccgccacgcgtccggcgggaacggcgaactgcatcgacatcctcatcgccatcatcctcccgcccctcggcgtcttcctcaagttcggatgcggggtaattatggagtacctaattaaattactctctgttaccttagtttcttccatgccttttgcttaatttggtcgatcgatttgctcttgctaattaacttgcacatatatatgcagcatgagttctggatctgcctgttgctcaccttcctcggctacatccncggcatcatctacgccatctacgccatcaccaagtaattcatcattagttactacatcatcaaccaaatcctcaaggtgaagtagtgaaatcgaattccctaatctacctnnctctagctatatcatcaaaacctcacttaatatttttccacacatatc

SEQ ID NO: 12429 - DNA, 395 bp, Oryza sativa
  unsure (1)..(395): unsure at all n locations
  Clone ID: PAT_MRT4530_18558C.1
agtaaaacaagtcatagatagatatacataagaggngagctaattcacacgaaagcaacagattaacagcaagagattctacatatcttctcgattgccgtgtgcttgttggaatttggaaatgatataagcttgattgccgtgtgcttgttggaatttggaaatgatatatgcatccaaaattcagtcctgagtgctccaattcttgtcatctagtcattttcaatgtccccccagtctcttcctctaatgtttgatgatatgtagaatctcttgctgttaatctgttgctttcgtgtgaataagctcccctccttatgtatatctatctatgacttgttttactagtaaacttgattattgagagcttgagacttgcttcccaaaaaaaaaaa

SEQ ID NO: 12430 - DNA, 555 bp, Oryza sativa
  Clone ID: PAT_MRT4530_18559C.1
atgcaccagttgagaggagccgttcatgtggatctggatgctggggattatatatcaacaactagcaagattactgttgaagtggttttggagatgattgattttcagatgatgaacagggtttgctgttttgtcgggaccgatcagactgggcagtggttgccggtggctcgatgcctcgggagagtatttgcagtgatggaccaggagtcggcttggtggaggtttcctatggggattaggactcttagtatgagtttgagagaagtaataaagttgtcatctactttgagagttcttcgatttgtgtttcatcgggtgtggcggtctaaccggcgactcaacggcggtccgaccggcgacaagcggcggtcagaccggcggcatacgggcggtcagaccggcggcggcgacagcaagcggcagctgatctcggcggtcagaccggagattgaatctcggtcagaccgacggcaaccaggcggtcagaccggtgcatctacttcggtcagaccgcgatccatcgatttcgagggcaacttttatttccgctaa

SEQ ID NO: 12431 - DNA, 2034 bp, Oryza sativa
  Clone ID: PAT_MRT4530_1855C.1
cgcacggtagaagggaatttctagggtttaggcagcgagcgtggtggggagcgatggctgcggcgggcgacgagtcggcggctgccgctgcggctgcggcggcggcgcggcggcgggcggtgccgccgcgggggaggcggcggttgactccaaaggacctgcagcaggcagaagcaaggcgctggacaaggctcaccgaccgcgtcgaggaccgccagctcgattcctcccgcgtccaatccgctatggcagctcttgcttcttccaaagaagctgattggaatgccatgagattgagggaaaaagaattagctgccatcaagatcaaccctgctgatgttgaaattatcgctaacgagcttgagttggacaagaagattgcagagagaacactacgggagcacaaaggcgatgctgtagctgcagtccggtttttgcttcgctgattcttacacattatgcaagatctatacaccatatgaagaaggtgtagtaggtttctagataccgccgtcccggggggtgatggcgatccccagaaggtcggcggccgccgtcgctgccgtggtggcgctcgcgtccgtggccgctgtcgccggcgaggtcttcttccaggagaagttcgacgatggatgggaggatcggtgggtcaaatctgagtggaagaaggatgacaacagggccggcgaatggaaccacacctccggcaagtggtacggcgacgccgacgacaagggtatccagacgtcagaggactacagattctacgccatttcggccaagtaccctgagttcagcagcaaggacaagaccctcgtgctgcagttctcggtgaagcacgagcagaagctcgactgcggcggcggctacgtgaaattgctcggtggcgacgttgaccagaagaagtttggtggcgagacgccgtacagcatcatgtttggaccagatatctgcgggtatgccaccaagaaggttcacgctatccttacaaagaacggcaagaaccatctaatcaagaaggacgtgccatgcaagaccgatcaactgacgcacgtctacaccttgatcatccgtcctgacgccaaatacagcattctgatcgataacactgagaagcaaactggaagcatctatgatgattggaacattattcctccaaagaataagagggatcctgaagccaagaagccagaagactgggacgacaatgaatacattcctgatcctgaggacaagaagcctgagggctatgatgatatccctaaggaaattactgacccagaagcaactaagcctgaggactgggatgatgaggaagatggagaatggacagctccaaccattccaaaccctgagtacaagggaccatggaaccaaaagaaacttaagaaccctaattacaagggcaaatggaaggcaccattgatccccaacccagattacaaggatgatccttacatctacgcttttgatagtttgaaccacattggcattgagctgtggcaggttaagtcgggaactttgtttgacaacattcttatcactgatgaccctgagtatgccaagaaatttgcagaagaaacctgggccaagcataaagatgctgagaaagccgcctttgatgaagctgagaagaagaggcttgaggaggaatctgcaaactctaaaatcgacgacagcgacgacgacgctagtgatgatgaggatgaggcggacgatgacaaggctgatgtcgttgctgagcagaccaaggacaagggtgatgagaaaccgcaggacatcaaggtctctgctgatgagaagccaaagagcagcaaggatgattcttccgctgcgaagaaggacgagctttagttaggtgttgcttggtgatgagaggaatttctgtatccacaatgaaacgatcatatttggcatctatgtagaactttttttccatgatgttgcaaactggtctcttgtggttttttgcaaaacttggttcactgaggagtttattggcggttatccaaaaaaaaaaaaaaaagggcggcc

SEQ ID NO: 12432 - DNA, 1214 bp, Oryza sativa
  Clone ID: PAT_MRT4530_18560C.1
cggtccccggaattcccgggtcgacccacgcgtccgaaaaaaaaaaaggaaaaaaaaacaaaacacaccaagccaaataaaagcgacaatgggatcgctcaccaccaacatcgtcctcgccgtcgccgtggtggcagcgctggtcggcggcgggtcgtgcggcccgcccaaggtgccacccggcccgaacatcacgaccaactacaacgccccgtggctccccgccagggccacctggtacggccagccctacggctccggctccaccgacaatggtggcgcgtgcgggatcaagaacgtcaacctgcctccctacaacggcatgatctcctgcggcaacgtcccaatcttcaaggacggcaggggatgcggctcatgctacgaggtgaagtgtgagcagccggcggcgtgctcgaagcagccggtgacggtgttcatcacggacatgaactacgagcccatctcggcgtaccacttcgacttctccggcaaggcgttcggcgccatggcttgcccggggaaggagaccgagctccgcaaggccggcatcatcgacatgcagttcaggagggtgcgctgcaagtaccccggcggccagaaggtcaccttccacgtcgagaagggctccaaccccaactacctcgccgtgctcgtcaagttcgtcgccgacgacgggtgacgtcatccagatggacctccaggaggccggattgccagcgtggaggcccatgaagctgtcgtggggcgccatctggaggatggacaccggccacgccactcaaggcacccttctccattcgcgtcaccaccgagtccggcaagagcctcatcgccaaagacgtcatcccggtcaactggatgccagacgccatctacgtatcaaacgtccagttctattgagatcggacggaaacgatcctcctaatttatttccctattaatttgttcaaatggtttccttctataacctatatttttcccgttgttagaaatggttccatttcctcctacagcttactttaagatagttgcgcttgtatatctgcgccatcttgtaagttgtaagatgctgaagaacactatgaattctgagcatctgattctccgggaagatttactatgataaacaacagtttgatttaaaaaaaaaaaaaaaaaaaaaaaaaaaaaaaaaaaaaaaacttatgaaataggctgataaaaaaaaaaaaaaa

SEQ ID NO: 12433 - DNA, 396 bp, Oryza sativa
  Clone ID: PAT_MRT4530_18561C.1
gaaccaacgctccattttgggatgatccagcgatcatgttgtcttggggtatataagaaaactcattagtggcgcacataattaacaaacgagcaaccctgaagctatatagccagacgagcgggaagagtaaaaggaagaagggggggaacaaaaaaaggcagacacttgggatattcaaaaaccccgatcctgcacgtagatcaacttacatggcgatacactgaactacatagcatgttcgaccttgtcctcaatatcctgataaatgaaatggtcaagactctattgcgtaaaaaggaaccccctaggtagagcgctccctacgacacgttgaacaaaaatcctgtcagggagactaagggtaaacattccgcttaaattctgcagctactt

SEQ ID NO: 12434 - DNA, 300 bp, Oryza sativa
  Clone ID: PAT_MRT4530_18562C.1
tgcgaggggtggggctggagctcaacaggcaccacggacgccgcctcaaccgctggctcgcgtgggtggcgcgccgccacttcgacaacccgtggctcatattggcctggctcgccgccgccgtcctcctcctctgcacgctcgtgcagacggtgttcgcggtgatgtcctacaggccaagtgcaaaactcaactcctagctagttagctatactctaaccggccctgtcggtccgtcctgtgattcaatttgctgggcaattaattactgcttgcgttttgttaaaaaaaaaaaaaaaa

SEQ ID NO: 12435 - DNA, 187 bp, Oryza sativa
  Clone ID: PAT_MRT4530_18563C.1
tttctagctaccctgttgcactgcaagcagcatgcatgcatgccttctttctcagcagctttctgtttcacttggggaataatgtggtttgtgtgtgtgagtgagtgtgttcttgttcatctcatcttagttattaatttcaatattattgttgcaacttgcaatgaaaaaaaaaaaaaaaaaaaaa

SEQ ID NO: 12436 - DNA, 978 bp, Oryza sativa
  Clone ID: PAT_MRT4530_18564C.1
atgcacatcctcctccaccgccacaacacgtcgtcaggaggccatcgtcgccggcgctgccgcatagtcgatgacggcgccctgcagcagcgcgcggccgtcgtcgtttacgagctgccggcggcggcggcggacgtgacggtgtgcaaggtggagggcggccagctcatgttgccgtcgaccttcccgtacttcatactcgtcgcgctggaggtcgggggactcttccgcggacttctgctgctgctgctgtacagcctctaccccgtgctgctcctgctcggccatggccgggcgaccaagctcatggtcatggtgagctttgccgacgtcaggaaggaggatgggtcgtcgtcgttcagggtgggcagcgcggtgatgcccaagctgttcctggaagacgtcagcgctgaggtcctcgatcgaggcggcggcgcagcggggatagagataagagatggaagatatgacatatgggcccaaggccccctcggatctcgccgccccttccgcctccccctccgctcctctcgccgctcctccgtcccccccctcttcggcaatctcgccggcgtcccaactctagcgggagcggcggtggcagcaaggaggcgcggcggcaacgacctgcggcggtggatttggcggcgccgtcctagggaaggccggatccgccgccctaggaaggagctcggctctcggcggcgggcggcgggcacagtgacagcctgctccggcggatctggtggcgccgtcgcagaggcggaggacagcggcgcgccagagacggagggcccgtcgggcaggccggcagcgaggcggtggcggagccgcggaggcgggccggcgtggatggggtcggtggaggtggcggcgaggctggcggcgtggctcacactgtggcggctcctctcctccggcggcaaggtgctcggcgaggaggaaaaggctgccgagaacatctacatcaaggactag

SEQ ID NO: 12437 - DNA, 593 bp, Oryza sativa
  Clone ID: PAT_MRT4530_18565C.1
actagcgctgcagcagcgtccactacggcgccctgcagcagcgcgacgagcagcggcatccgtgtgtcgtcggcgagcagcggtcctccatgcccatacttctccgtcggcaggccaccaccacacgttgtcaggctgtcgtcatcgccggcgccgcggcggcgttgatgacggcgccctgcagcagcgcgtagttggcgagtagcggcagccacgtgtcgtcggcgagcagcggtcctgcatgcacattcttctccaccgcacaacacgtagtcaggaggccatcgtcgccggcgctgccgcatagtcgatgacggcgccctgcagcagcgcgtagtttcatactcgtcgcgctggaggtcgggggactcttccgcggacttctgctgctgctgctgtacagcctctaccccgtgctgctcctgctcggccatggccgggcgaccaagctcatggtcatggtgagctttgccgacgtcaggaaggaggatgggtcgtcgtcgttcagggtgggcagcgcggtgatgcccaagctgttcctggaagacgtcagcgctgaggtctttgaagtatttaaatcgcgacgaaattgc

SEQ ID NO: 12438 - DNA, 720 bp, Oryza sativa
  Clone ID: PAT_MRT4530_18566C.1
atggcggcggcggggccttctccgtggcggcgctccctctttggcgtgggggaggtggcgtttgccggcgtcggtacgctggtgagaggtggcgacgaggtctcccagctaggcggcggcagatccggcatcgccatagccggatctggcaagccctccgattttcggcggtggaggaggctactgcgacgcgaggcgcgtgggcggtggcgacagcgcgcgcatggcggcgcgtgggcagagtcggcgcgcgcgtggcggaggccggcactggcggcgggcgctggctcccgtggtcggcaaggtcggggccggctggggtctcccaccccgccacttctccctggtggcgcgtggccggtgaaggccggcgctggcggcaaccgccggctccggtggtcggcaagaagatccggccaccagatgaagtcgtcgtcacgccatcggttagtcgccttcgagccgttgcaccatagcccgctgtcacgtctcctccgcaagcctgccgcccctgccgccgcctcccctcccgccagatctggcggagtggagggctcctccccgccggcgagccctccgctgcctcccctcctcaagcccgccgggtgccaccaccttcccttcttgagccaccccgcccgacgccgaagtcggatccgaccaccccgcccgccgccgaccccgctagccccacctaccgccgaccccacccgccggtga

SEQ ID NO: 12439 - DNA, 697 bp, Oryza sativa
  Clone ID: PAT_MRT4530_18567C.1
ctaccacgccgtcgtcatcgtcctcctcccttcgcccaccatccacagccccctcggatctcgccgccccttccgcctccccctccgctcctctcgccgctcctccgtcccccccctcttcggcaatctcgccggcgtcccaactctagcgggagcggcggtggcagcaaggaggcgcggcggcaacgacctgcggcggtggatttggcggcgccgtcctagggaaggccggatccgccgccctaggaaggagctcggctctcggcggcgggcggcgggcacagtgacagcctgctccggcggatctggtggcgccgtcgcagaggcggaggacagcggcgcgccagagacggagggcccgtcgggcaggccggcagcgaggcggtggcggaagccgcggaggcaggccggcgtggatggggtcggtggaggtggcggcgacctggtacgacagcgggagggagtcaatgcgagggggttcaggcaagggagtcaatgcgagggagttcaggcgaggctggcggcgtggctcgcaccgcggcggctcctctcctccggcggcaaggtgctcggcgaggaggagaaggctgccaagaacatgtacatcaaggtatatccaccctactcgcttccctaatcttccttccccctcgtgattgttgctgttcttgctgcgatagatgggaggactagccat

SEQ ID NO: 12440 - DNA, 545 bp, Oryza sativa
  Clone ID: PAT_MRT4530_18568C.1
cccacgcgtccgggagaaagagagaggcgttggtcggtggccgcccgtcgcttctcctcttccgacgccggcgcggccgagagaaatggcggtggctgcgagggctccgctcggggtggtggcggtggtggccgtgctcgtcgtcggcatcttcatgcccgccgcggcgcaggccccggcgcccgcgcccgtcagcgacggcacatcgatcgacctggggatcgcatacatcctgatgctggtggctcttgtgctcacctacctaatccatccactggatgcttcttctccctacaagcttttctaatcccttgttcttccttcatctggcttggttagggtaaattctacttattatttagccatggcgacgattgttaacattttaggtgagatgttaggaggtttggagtgatttgtctgtccatgatgggggtggtatcaatcagatcgttgtttggtggtgcgattggctgtattggattccatgatttgaaaccaagttgtgcgtgctggattcgttcattttcaaaaaaaaaaaaaaa

SEQ ID NO: 12441 - DNA, 135 bp, Oryza sativa
  Clone ID: PAT_MRT4530_18569C.1
gggggggggacccctaagtggaccgcctctgcgttccgggcccgaattccggggtcacacaccttcctcttcttcaaggagagcttctcggggagagggaaagtcaggataatacttgtgagggggtcacatctt

SEQ ID NO: 12442 - DNA, 384 bp, Oryza sativa
  Clone ID: PAT_MRT4530_1856C.1
atgggcctcgagctcgacctgctgtccgctcagctcccgccgatccgcaccacggcggcggcggcggcggcggagatgccggagttcgaggaggtggtgctgtgcagcacgccgacggcggcggcgagcgtgctgcgggcgccgtcggtgtgcccgccggcgccgaggaagccgccgaggccagccgccaagaggaggaagaaggacgctcgctttagccgcagctgctactgctgcgggcggcgccgcggcgggagggcgccggcggcggcggcgttcgtcgccgtgccggacgatctcgccaaggtgttcgtcccacggcggccggtgccgtgccggccgccgctggacggcaagaagatcggcgtgcacgtcgtgggctga

SEQ ID NO: 12443 - DNA, 940 bp, Oryza sativa
  Clone ID: PAT_MRT4530_18570C.1
cggcacgaggtttttttttttttttttttttttttttttttttttaaaaaagataaaccaaagatgcaccaataacggcacgaactgagtacacaacagaatatgaatacagcagacgcgattaacagaaagccaatcgcggactagtcatcagatcagtgaataagcaaaatagtttacacatgctgcggaggttcgcaaaagaaaagcagtcaacagtattcagcattttcttcgctactagttaaacagagacacctccagcatgccacggcccaggagtaccttcattcgcacgttttccttacaacaggacataacaaggataacagtaacatagcaaagctaaagccctaagcagtgaacaccgatttgcatagctgcagctctctaagctatttactactactcgtcctcgccactgccatcattctcatcatcctcaacatcagacttcgacttgtcagaaccttctccctcctgttccgcaccatcagttttagccttcttagagctagtgctctccttcttcttgctagcggccgcgggcttgctctcgccatctggcttcttgcccccatattgcgctttctcctcgtccgacatagcgcgccacttctccccggcagccttggtcaccgctgcgacgcccttggtgtttgggtgcttctccatgtactgcggcctgaactcagccaggaaggcgaagaacggggtgaggccgcgcttgggcttgccggcgcctccggccttcttgcgcttgccggcggccttgaactcggcgtcggcgtcggccttgcccatggtggcggaaggggggtagggctttgcggagggttagggttgcagtggctggctggaagcggagatgagagcgaagaggagaggggaattgggtggtgtgcccctggtgctttgcgaaagccggggggggagacct

SEQ ID NO: 12444 - DNA, 485 bp, Oryza sativa
  Clone ID: PAT_MRT4530_18571C.1
ccggccgggattatctacttcctctacctcccctaatccactccactccaccgcagcttctcccgcggcgaggcggctcatcccatctccacagccgcagttgttgcagcaaggaggcatggcggtggggggtgaagaagagaagcccttcaacttcctccagattctgtgtgagggcgtcatagctggtggcaccgcgggtgtggtggtggaaacagctctgtacccgattgatacgataaaaaccaggcttcaggctgctcggggaggaagtcaaattcaatggaaaggattgtattctggattagctggaaatattgctggtgttctcccggcttctgctgtatttgtgggaatatacgaaccgacaaaaagaaaactactggagacttttcctgaaaatttgagtgctgttgcccattttactgccgggggctattggaggaattgcggcttctctcattcgcgccctcacagaggttgta

SEQ ID NO: 12445 - DNA, 1209 bp, Oryza sativa
  Clone ID: PAT_MRT4530_18572C.1
cccccgggcaccctccctctcgcacgcacggacgtcggcgactccggtgtccccttcccgaccaccgccgccgccgccgcccacctcctcctccggcggacgcgggggatggcggagaggggatcgaggggcttctccgcggcctccaaggggaaggccatcgcgtccaagaaaggttcacttaggcaaaacagctctgccaatatcccgcatgttaatattgattccgattctgattctgaaggtttcgtggaagaactgcctcgtgtcaactctaaaacaaatgggaaggctgcatctgagagcctaaaaactggcgggaaggcctcatctaaaggacaaactggcaaaggagggaatgctggcaaaggtggaaagggttctgcatctgctcgagtttctgcaaagtctgatgcagagctaaagcttgagctcgatatgcctccaaactcttgcattttaatgaattgtgaagtagcagaactattgcaagaaattcatgagcatatggctatcttatcagaggatccaaagatcaaaattccagagtcatttgataaggctttccaatatgtgaaagaaggaaatcagttttccaccgcacagtctgtgaaacaacaagctaattggttcttcagttccttgactagtatacgcagccctcttagaaaatatggtgttagtgatggagagatgtgcttgatagcgaacgttggacctgagaccattgaagaggtttatgcgctagtaccatccctgaaggccactagatcactcaacgaaagtcccatcatggaggctctcactgcgcttgctgacataaaagctgctaagtgaatctccagtgaagctatgccgatatgttgtggatcaagaaatggagattcgcaacttgcgtttgtctttaatgttctgaatgttctgtcaaatcaggttgcgctgtgtatgcaaaaaaaacaaccaagtgccatgtgcactttacttatctaggtctgataggttgaacctgagttcagatactaccgtatctgactgcaaatgttgctagaaatggctgaagtagcctactcagaattgctaattgctacccttggggtaactggcttaaacaatgagatggttcttttgggttttttagcctcaaaaaaaaaaaaaaaaaaactcggactagttctctccctcgtgccgattcctgcagcccggggatcc

SEQ ID NO: 12446 - DNA, 890 bp, Oryza sativa
  Clone ID: PAT_MRT4530_18573C.1
cgtcttcgacgcggcgtggaggagggccggcgtggccggcggctgacggggaaggagcggcgcggacaggagggccgatgggacgagcggcgccgccgatggctgccgtcgcgcggggaggagcgcggcggtcatcgtcggggtgaggcggcagaggaaggggagatcgaagatgacggcgccgccgatgtggctgccgtttggtggggcggagcggcgggagaccgcggcggcagagctggagccacacgcgcgacggctccctggtcaacttgcgcagccgcgaacaagtagagccacgccttcaccgccgcctcgcgatgacgatggcgatgagttcgatctccggccgccgtcccgccgcgtgcatgagctggaggaggtgcccggcgagtttcggcacgttggcgatgccgtcgtgcgagagcggcggccggcgaagcggagtggagcggtggcggcaagcgggcgagagcgcggcggcggcaagcgggcgagcgcgcggcactccggcgaagcctcgagtcacgctcccggcctctgacggcgttgtcgccgcacgagccacgttctcgacgcacacgcatcgatcggagtgggccgccgccgtgaagccgccgccatccgccgtcgccaagctgatcctgaggtcgccgtcgtcgtccaagcttcaccaagtcacgagctatctcgactctcgaccgcgcgccgccattgccgaccgcacgagggggattgggaggccagcgagctcgcgctaccctaagcccgcgcgccgccacccaggagccgccgtcgccggccgcaccaccctctggccgcgcgcgccgccgcctgtgcgagagcagagagcgaaaggaaggagagaaatagagaaagagagagggtgc

SEQ ID NO: 12447 - DNA, 416 bp, Oryza sativa
  Clone ID: PAT_MRT4530_18574C.1
gctctactgcttttttttttttatccagtgaaagacagtctctagagcgagaattataggaggacgccaagaaaaagctactcgcatctggagcaatgctccacacggtctaagacgcaaagcggaaagaccccttactgctggcatgagtgcattaaaggggtcaacaacaccagagcctaacgaattctgttcaaatagcacgagttaggagtggctggcgctatactacaaaactcatacagatcagacagcgctactttaatgcgcgtgacaccgtaattataggcggaggacccattcctagatcttcctcctcttcagtggcagtatcagcatgaacctccggattttggttgttaagggctcgcatgggatcattgaacaattgatgacctctctgactgacagttctg

SEQ ID NO: 12448 - DNA, 841 bp, Oryza sativa
  Clone ID: PAT_MRT4530_18575C.1
atgccctcgcggtcgcggacacgcggcggcgacggcgacggcgacggcgacggtttgccggcgggagatttgaagccgggtgtcatccggaacctgcccaccttttcccgcctgctaatcaacaaatggcctcctgtgttccgccaacgattttcttatccattcagattgacgcattttgcatgttatgaagtgagaataacccgtttggaaaagcaagggactgacccttctccaccaaatatttttagcacacccagaatcattgttccagtcctaaccagaaatggattgtttggatgtgctccaagcctaaaacgtgtgaggggtattctgccgaacctaatgaacatatctgctccagctactgtagcagtgtggcttggatttccctatcacctcagctggctcagcatatttaaacaaggttcgagtctttgctcttgggaacctgaactctacagtcgcatcacagggcgtgtccaccagaaactctcggtcgctgatgtgttagccaacaaccgatggatccgcgaccttcgtggctccttgggcgttcaagcaattttgcaatacctgcaggtttggtcgatggtgaggtcaatgattctctctgagggccagcctgattccttcatctggaggtgggaaaactcggggtcgtattccacccgctcggcctaactcgccctcctctcaggaaggattccatttcagcatctacctatctggcgttctctcacccctcctcgatgtcgctacctcctgtggttgatcgctcatcgccgttgctggacgattgactgcttggagaagcgaggcttaccgcaccctacctgtt

SEQ ID NO: 12449 - DNA, 387 bp, Oryza sativa
  Clone ID: PAT_MRT4530_18576C.1
aaggagcagagggacggcggcgacagtgccgcgggagggtgggtgcggaaggccgtcctgctggtcctactaggtctccggcacaccagccgcttcgcatcgttggcgctggtcctgcctctccccaccggcctcctcacatacacccacctccccgctactgtcgcggcgccagaggacgggtccgcgccagccgtggtgaactgggcagagacggcgaggccggcgacgacaacgatgccgtcgcggcccgcctcgcggagcacgaggcgggcggcggcgcaggaccgcgcgcccaccggccttgcccaacggcctcctcccctcctgtcggctagcctacgccgccctcgccggtggcctccgctccttcccccgctgccctga

SEQ ID NO: 12450 - DNA, 1462 bp, Oryza sativa
  Clone ID: PAT_MRT4530_18577C.1
gcacgaggcgaggggggtgagctggagctggcgcgcctcgtcgaggtcgggacgcctgcggcgaggagggatgcagtttggcgaggaggggagaccgcgacggtcgtggtggctggctggtgccggcgtcaagctagagggctgccggcatacctccttggcgtggcagtggctaggcgccgtggccggcgatgggtgacgccagggtggtgtgggaagcatcggatccggagtcccctatgccggatccggccatcctcgcatagatctggcgtagcagcggtgcgccgcggcttgtggcggctcggcggcgtttgcgcggcagcaaggcgtgcggccggcctggaggtgagtggcggcggcgtgcggccgagccgggcggcggcggaggcggctcggaggttggaagcggcggtgacggcgacggctcgggggcgtggcctgccccggcggtgtggcccaccccatggtgctggcggtggtgctgcccgggggcggtgcgctgctgtgctgcctggccgctcggcggtcggtgcagccctttggcgcggctaggcctcggcagccgggaagccgtcacggtgactgcagaggctgcagttctggtttcatgttccaatggttgtgcttcaaacaatgggtcgtcttcttgtcccatccactcatcatgttccgatgattcgtccaatcctcttgcttctgcatgctctgaaactgaaagttcgtctcttgcaggcgcatgcgcatcatcaggttcttgatgattcttcttcggaggcggctcgtcgacgttgttatcctcctcagaggaaacaccatcggtgcagtactggagatcctccagcgagcagacggccgtcttcatgtggcccggcagcggcgggcagccggcggcgaacttggtgttcttggtggagaagaagttcaccgtcaggttcagattctcccaggaggggaggttgagcatggtgtaggcgagcttgaccttgctgccgacgccgccgagcgacttgaagctcgcggcggccttgcgcacggccagcgattccgtcgggtgctgccacgcccactcgaactggagggcggcgacgttggtggggaagccgtagatgcagaggaccatctcccatgggcggccgcgcttggtctgccacgcgccgcaccggatctcgccgttgtgctgccggatccgccgccgcgggttcaccgtgaacccgatgtaggtggagcccttgcggcgcgggcagagggaccggagcaggtagcagcagaagaacctccctcctcctcctccgccgcggccgccttcctccgccgccgccgccttgcgtggcctcttcttacccttggccgcctccgccgcccctcctcctccgcggcaggcttcctcctgcccgtccacggcctctgccgccgccttgcgtggcctcctctttccattggccgccgccgccgccgccat

SEQ ID NO: 12451 - DNA, 390 bp, Oryza sativa
  Clone ID: PAT_MRT4530_18578C.1
atggtgcaggcaatgagggcaaatactcgtggggcccggggctcgagcgcactcacgctgccatgtggggaccactgcctcggtgcccgtaccctcccccctcgtgacagctgcgcgatcgcgatccaacggcggaggaagagaggcgcggcgtgcggccccggtcgttatgtatgggcgccgcgtgagctggcgcacgcgcgacaccgcgagcggacgggcggcaaatgtggcgtcggcgtcgcggtggcggcacgcggttgggatgtggttgcattgctgggcggcgcaacgttagcggcagcgacccgcggttcttcacttgcggtgaccgcgtcgttggccgtcgccggcgccggttgcctgtgcgtgcatgaggtggttgactga

SEQ ID NO: 12452 - DNA, 1382 bp, Oryza sativa
  Clone ID: PAT_MRT4530_18579C.1
tactcgcccaccttgtcgtcgccgtccaagccatcgccgcgtacgacggcgcctttgccgccgccggaagcgccagtttcatccgccgttccgcctcccgtgagtcttaatccaatgcttccctcgcctccgcagctccccggcgtaaccactgcgccgtcgccgccagtgtccacggtttcgatgcctcccaccagctccgccttgctcccctcgccgccgccgacgcccctcacctgctcccgcgtcgtcgtcgccgccgccaccgccgccacgtcgccggccgccggacctcctctcccgcctcgccccggcgccggcctgcccagagccagagccatttacacccttacccctgcccccgcccccgccgttgtctcctccgcccgaggctctacttttgccaagagcaccctcaccttcccgcaaatcaaaacccacctcctcctcctcctcctccggccaccgctcgccgtcgcccgcgccgccatggccggccgccgcctcgccctgctcctcctcgccgtagcctccgtgtccctcctcgccgcctcccccgccgcggcggctcgcccgtgccacactttcttcgtctccttcgcggccaaccccaaccccatcgtcggcgacggcgaggtgggcgaccaccgcggcgccgccctggcgacggccacggtcatcaccgtcttccgcgtccgccgcctcggcccccacctcgcccacgtccacggccacggccacgcccaccccaacctccaccacctccactccatccccgccaacgtccagatccgccgccccgagctcccggagcacccccgcccggcggcccatgccgcggacagcttccaggagcgcgccaaggacatcctcgtggtcgtcgtcgggatcctcttcggcgtcggctgcggcgcgctcaccgccgcctccatgtacctcgtgtggtccgtcctcgccggcgccggcgccgccgcgccctccccctacgacgagctctacggcgacgaggacgaggaggcgtccgactccgagagccccaagaaggtcggctacgtcatcatccccggcgtcgaggcgcacgacggcggtatgaactagctctagggtttggtcaaatccgtgatgaactgggaaaaatttacactatctatggcctaattcgtgatgtccagtgtcattccgtgatgtgtgtttgtggggggggcggagtattgggtggtgtgcactccatgtgaatacgctagctcttgaatctttgatgcgcccttactctatgaaatgtgcctcttgtttctgataaaactcatcggttgcatgctttggtgctgctcgatgctatgaaaaatgctactgaaattgagatgtgctaaaaaaaaaaaaaa

SEQ ID NO: 12453 - DNA, 1837 bp, Oryza sativa
  unsure (1)..(1837): unsure at all n locations
  Clone ID: PAT_MRT4530_1857C.1
tagtggatccccgggctgcaggaattcggcacgaggaaaccatttcccccatttcctcccctcccctaccctaccatggacttctccggcggcagcggcggcggcggcgtcgcgtcggggagggtgcaggcggagcggtggctggagatcgccgggaagctcctcgcggcgcgggacctcgtcgggtgcaagcggttcgcggagcgcgcggtggaggcggacccgctcctccccggcgccgacgagctcctcgccgtcaccgacgtcctcctcgcctcccagtcggtcctcccctcgggccaggccgacccgctcgccgtcctccagctccccccgtccaccaacccggccgaccacgccgccgtctcccgcgcctaccgccgcctcgccctcctcctcaggcaggacaccaacccgcacccgggcgccgacgtcgccctcagcctcgtccacgacgcctacgccatcctctccgatcccaaccgccgccccccgccgcccgtcgccgtcgccgtcccccacgcccatccaggcgccgcgtcccacccagccgcgcccgccgccgccgaatcccccgagttctggacggcttgcccgttctgctcctacgtccaccagtaccagcgcgagctcgtggggcgcgcgctcaagtgccccaacgagtcttgccgcaaggggttcgtggctattgagatctccaccccgcccaccatcgtgccgggcaccgagatgtaccactgcgcctgggggttcttccccctcggctaccccacctccgccgacctcaatggcaactggaagccattctacaagatgttcccctggaacaatgcgcccgctggtggcgccggctcgggtggtagggggggctatggtggccgtggtggaggcagcgctggtcggcagccgcagaatgggagcgcgcggggcgggtcatccagaggtagggtgaagaagacgaccgctcgcaagaaggtcggtgccgggctcaagaggcgatcattcggcggcgtggagagcggcattgagccgatggatgggcaggatggatggggtgagggtgaggagggtggtgatggacaggcagaggaggtgagggggattaacatcaatgaagaggcacagtctacagatggtgctaccaggggacatgttcacgcaagggggaatgtcagcggtggggttgtggacatgggcaccttccatctggatgtcgatccatcggaagatattttagggaatttgcagaacttgcccttcttgagggttgacaatcttgggcggatgctgtaatgggctatggcatttgttgtgctggagaaatgctgtatgtttagctgggtcaaaacagatgtttcagggaccgacccttaccgctcttgttgtcgttattgttcttgtggcattatctcttgttgtagtagtagtttaccttgtgtttctagttacttagctggcggtggagtcccatagaagtcctatatgtgagtttgtggtatctccaaattagctgggatatgtattctgtcttaagcaaacaaacttgtggagttctctcaggatgaatttagtgattcatggatcggcgatcacttcggtttcttctagggcaatggcgagacaagtcactgagagaaagcaaaaaaataaaaaggaacgatgtgttatcccaaccacttgccggaactgaggtccctcagctttagagggatcagtagcctgtcaacatttttttttaattttaatgaggacattaagaaagtttcctctccccagccagcaagagaaatatggacagcatgtaaagcaccnccattncccaaaaaaaaaaaaaaaa

SEQ ID NO: 12454 - DNA, 2197 bp, Oryza sativa
  Clone ID: PAT_MRT4530_18580C.1
ccgcccaagactcctgcaaaccagcgatcacgcccccgccaacggcgcggcaaaggcgacccgccgtcacaacctcccgccgccacagatgcacaggtcccgctccggccacgctgaaccggccgcgccccaccacatggcacacccagccaccgcacggccccggagcccattctacagaccgcccccccgcacgccccgcaagccgccgcggcgcgcacagcccatcaacccacgaccactcggcgcaccctcccacacacacacctgcccagcacaccatacaccaaaccgcgccgcgcatccccgcggggccagtcccgacatcaccatcaacgccgcaaccgcactcgaagtagacacacggagcccagtcccccgctcccccgcccccgcccgccctcccggcaggtgggctgccgccccacctttccccccctgggggggggagggggggaggtccggcgaggcgaggcgggagaggaggtccggcggccgacgacgtggcggcggcggcggcggcggcggcggcgaggggagcaaggtggattggctggagcgaggggagcaaggcggagctggtgggaggcatcgaaaccgtggacaccggcggcgacggcgccgtggttacgccagggagctgcggaggcgagggaagcattggattaagactcacgggaggcggaacggcggatgaaactggcgcttccggcggtggcgaaggcgccgtcgtacgcggcgatggcttggacggcgacgacaaggtgggcgagtagtcgatccaggcattcaccatcctaccattggtgagctcaaccctggcgccatcaagatcgacaacagcggcggacaccataatcccaagatccaatcccacacgattcccattcacatccccgaactgcacatccatggcaggagagcggcggcggcggcggcgctgggttcgttggcttcttggcgtcgacgtcttcgccgccgctcgggcgtcggccatgagcttggtgcccttgaggaagaggtggaagtcaggggaaaccagcgcgagagtgaaggaggaacggagcgccgtcctgaggtcgctgacggtggcggaggcggcctcctcaccctcgccgccgccgatgccctcccctgctcccgcgttgtcgtcgtcgccgccgccttgctcccctgatcccgcgtcgtctccgagcagagccaattccctgacgttgacagggctgacgaaagtccggttgccggtgaagagcgtctgcgcggcgatggccgacgcagcctgcgtcgggtggttggcatcccagaacaggtggtcgtcgcggttgttgcacagcggcgcagtctcgtcgcacccgagcgctccaaacggccccgacccacagcacccggactccagctccgtgaaactccaggcgttcgtgcgcgggttggcgaagatgaaggagaccatggcgaaggagtcgctgagggagtaggccatgctgggcagctcgtcggcgaggtcccggagcgacgcggcgagcgtcgggtaggaccgcagcgagagggtgttgatcgggccgtagcatccgcgcgtgccatcctccgacagccggcggggcccgctgtacgccgcggcgaaacccagcagaaactcgcggtcgtcgccgttgccgccggacaaggagtactcgaacatgtcgttgctgccggtgctgatgaggaagatggacttggagaggagagtgttggttgttctcgagcctgacagcttctgcatcatcgccaccaccttcgagaagtactgcacttgctggaacatcgggattacatccccggccccttggccggttttgtcaccgaggcctgatccgcctgatgcgaagttgatgcccttgtacatctgcgaaacgatggtcttcgctgtcagcgacaggtacgccggtgggctcattgggaagccgagctgctgagctagctggtctgccaagttgtagccattgctgaaccggccggtcggcgtcgagccggtgaagtccacgccgtgcttggggtaattggctcgggcctgcttggtgatgttcaggtagttgttgttgcccacgtcaaccgtcgagtcgccgaacacgaagaccgcgggggcaagctgtgtcgcctccgccgcgaccccaagcaagcacaaagccaccagcacgtatgagaaactatggctgcccat

SEQ ID NO: 12455 - DNA, 1776 bp, Oryza sativa
  Clone ID: PAT_MRT4530_18581C.1
atggcgtgcaggccggtcgtgtgctccgcctccgccctcacgccgttgcgccaccgccttctccccctcgtctgcgtggctcgctgctccccctcgtctgcgcggctcgccgggaaccccgccgccgcgaccacatcactctgccggcgctgcgaccacatcgtcctgctcctcgcgatgaactccatgtcatacaacaagctgtccataacgaatgacagaatggatttcaatacccgtggaaatgcagtccccaatggcaaattagatcggaatcagtcaggtgtttcagccaatcgatcctcagcctccaaaccaacagcacgctccaagaagaaaccggatcaagctgacaaaacaaccccaaatccagcgcagaattcagcatcatcagcaacaagatccgaagcagcgaccgtcacgacgaccacgaaatcgccggcgatcagcgtggacagaagcagcatcgcgagaagcaacagcctggacagcttcagctacggccaggcgaagcggcacaccggcggcgacagccggtgggacgccgtccggtcggccagctccgtggactgccccctcggcctcgtccacttcaggctcctcaagcggctcggctacggcgacatcggcagcgtctacctcgtggagctcagggacaccgacgccttcttcgcgatgaaggtgatggacaaggagtcgctcatcagcaggaacaagctggtcagggcacagaccgagagggagatcctcggcctccttgatcatccgttcctccctacgttgtacacgcacttcgagaccgacaagttctactgcctcgtcatggagtattgctccggcggcaacctccattcgctccggcagaggcagctcaacaagcatttcaacgagcaagctgcaaggttctacgcatccgaggtgttgcttgcgctggagtacctgcacatgctaggcattgtgtacagggacctcaagcccgagaacgtccttgtccgggacgacggccacatcatgctctccgacttcgacctgtcgctgcggtgctccgtgtgcccgatgctggtgaagtcgtcgtcggtgcacgcgggcgccaacggcgtcgtgaagggcctcgccgccggtggcggcggcgacggcgagggcgtcggcgtcggctgcatgcagccgtcggcgttcttgccgcggatcctcccaaagaggagccgcaagacgtccaagtcggacctcgggctcctccacggctcgccgctggagttcaacgcggagccgacggacgcgcggtccatgtcgttcgtgggcacgcacgagtacctggcgccggagatcatccgcggcgaggggcacggcagcgccgtcgactggtggacgttcggggtgttcctctacgagctcctccacggcatgacgccattcaaggggagcagcaaccgcgccacgctctgcaacgtcgtcgagcagccgctccggttccccgacggcggcgcgttcccggcgccggcggcggcgagcggcgtcgcgcgggacctcatccggggcctcctggtgaaggaccccggcaagaggatcgcgtcgaggaggggcgccaccgagatcaagcagcatcccttcttcgagggcgtcaactgggcgctcgtgcgcagcgcccacccgccatcggtgcctgaccccgtcgacttcagccagttcggcgtgagggagaagccggcggcggcgccgacgaaggtggccaagccggcggcgagcgattcctcctccggcgacttcgagtatttctag

SEQ ID NO: 12456 - DNA, 324 bp, Oryza sativa
  Clone ID: PAT_MRT4530_18582C.1
ggggccaaaaaaaatttttttttgcccggaaccagggaccgggccttaagagttctttcgggaaaaaacaaaaccccaacggggggatcaaacccaaaggccccccatttccaattttttgagcccgcaaaaaaggggcgtggtttaattcaaaacgggaaacaaactaaagcccaatcaaccaaagagagggcaggtttttaattaaaactgcaaacaaactggagccgccctcaccccccaaacataggagggcagtaaggggtgaaaacccccggatttggtcaggggaagggaaaaacaaacttttccggccccttgggc

SEQ ID NO: 12457 - DNA, 611 bp, Oryza sativa
  unsure (1)..(611): unsure at all n locations
  Clone ID: PAT_MRT4530_18583C.1
gctcnatgtnattaaggagcgcaggacgatncggcctgaggcccgcagcaccgccagggctgctgccntcaaggagagcaaggcaaggaaggctgaggctgagaaggccaagaaggccgagaaggcaaaggttgctggccgccaagggcccagcccggttcgtctgacgagcaagcagggcgccaagggtgcgcagcagaaggttgccgccaacacctcgttaagaaacccaggttttgtcaagcagataccccaatatcccttttcggaacgaactttcttcacggcgtcttcttttttgatgaatcctgggaacgacggtctccgaaaggcgaacatagcatgataaagtttacggtctcatgcaacgaaccttctggggccattgggcaggacgggatatgtatgtactgcggctgctgttaagctctttatttacggcggcggcggaacggacggactggagtcgaaacggaactttttgtcttttgccacagggtgctctcaccgggcttctttcttgcccaaccctgcgtggccggtagcatggaatcattttaaaaccagggatttgcatgggttgaaaaaaaaaaaaaaaaaaaaaaaaaaaa

SEQ ID NO: 12458 - DNA, 478 bp, Oryza sativa
  Clone ID: PAT_MRT4530_18584C.1
taagcaacgagaaaacgtgcctccaaatacagatcaaaaggcattaaagaaggggagaagaaaagggggaaaagtatgtgcccggtctaattaaaggacaccgttgcttcctctttagctctctcttctggagcgattggttatctttgatgtacataacaaatcttcttttttcttttgccatttacacaacgctatcataatttacaacatgttcatctcctggggatctctctgtcttcccggtgcctccaagctagtaggagtaagcactgtaatacttacactcgaaatcatgtgttatgtactgtgtaccttctcgtgatcctgcctcactgatccgcaggggcttctgttaatctgttactttcacagctctctcgaaggaacaatcatttcatcatcctgcctagaaaaaaaaaaatctgcagctgaatcgacgagtgtcatggcgagtgcacaggttattttactagct

SEQ ID NO: 12459 - DNA, 1324 bp, Oryza sativa
  Clone ID: PAT_MRT4530_18585C.1
tttttttttttttttgcagaaaaagcaacactactactccagtttttttttttttttttttttttgaaaaaaacgactcctgtcaatctacatatccaataatacacatacacatatgtacaagtacaaataatcacatggaagctcttcttttttttctctcacaacttccccgtgtgtgattccctaccacgttcacaacttcacatgtcgttcgcaataaaccgacttgcagagctgtattcctcagcgaatcccccacatttcgcctgttctgacttcacgcctccaattttgacttcattaatcccccgtgcaatagcaaagctatagattacgctaatcacacaaacttcaaattgcagtaggcttcaagtcaaaggttcgaaacttcaaatcccggagaattcaaactcgaaatctctctttctcacttttttgagttgaagtggtcattcgccctgacggtgacggcttgtgtccggcgatcagaaggggcggtggtgagtccggctgaggccgttcacgttggcgaagatgcccatgagatcctggcggtacggcaggaacgtccgccgcgtcgcgccgccgtgcgccttgtggttgggggagtaggacagccggtggccggcggcgatggtgtcgagctcggtgtggagcttggtggcggcggcggcgccgcccttcgtcgtgggcttcggtttggggtgatccctggccggggacgacggcgcggagaggaagcggaacttctccttgccgtcgctgtggctgcggccgacgacgagctcgctgatgcggcgccaccgcgcgatggaccccgtcgacccgctcttccgcggggggcgcgacggcgaggacgccggcgacgacccgggcacccagacgcagtagctgtcgggcgacacgccgtccagctcggcgatgtccgtggacgacgacgacgacgacgtcgacccgacggacgaggtccgcccctcctcgaggaacagcctcccgagcggcggcctccgctcctccgccgccgccgccgcaggcgtcaccgccacgtcgtcgagcacgcggccaaacaccgggtagaacgccctgatgcggccgtccgcgaagagctcgtcggccacgcccccggcgtccgtctccctgctcacgaacgggaactcgaattccccatcggactcatcgccggagaacgccgcggcctcctcgacggtgcgatcgcgaggtctctcttccatggccaccgcctcctctgtgatgtgacgatgcgtcgcggttggctctcgtctcgtgtggttgtgaggtggattttgggagggaaggaagg

SEQ ID NO: 12460 - DNA, 402 bp, Oryza sativa
  unsure (1)..(402): unsure at all n locations
  Clone ID: PAT_MRT4530_18586C.1
aaggtagcaaccaagcgaggagggttagctgaagtctgaaacttaaggtcgagcttcttctttctaacagcacgtgatagctgtctcatagttttcttgcaagtttcagttcagattaagaatatagctcgctcttttgttgataagaaagcacgtactgctaagagctagctttgttcaggtctggaggaagctacagttatatgtaatcttatgtataattgttccntttctatcttcagtaaccagcagaaaccaaaatcttttaggtatagccattagggtttgttagctcgtaaggtcttgataaccagaagtagggtgagagttagcaccgtttgagctagctagttaccatccaccagtaggtntctgtactgtgttgatatggccgtgatgagg

SEQ ID NO: 12461 - DNA, 162 bp, Oryza sativa
  unsure (1)..(162): unsure at all n locations
  Clone ID: PAT_MRT4530_18587C.1
cnnnntngggggggttttttttctggtgggccccnctgctttntcttctcgcattcatccncattgatctaaaatgttctcaatatttgactaaagttgtctttccattcatcatatgtactaacatgttattgatggcttgttgcatgctctactggtttt

SEQ ID NO: 12462 - DNA, 104 bp, Oryza sativa
  Clone ID: PAT_MRT4530_18588C.1
aactgattaacatggtggctccggcggtgagcttcttccagagagagccgtcctcccgaagcagctactcgtcaagggcgtcgccttcccatctgtgctctttc

SEQ ID NO: 12463 - DNA, 353 bp, Oryza sativa
  unsure (1)..(353): unsure at all n locations
  Clone ID: PAT_MRT4530_18589C.1
gtctactgaaagaccaatgcaactgcactggctgagggaccttcactgcccataggaatgtggaggcatgctatactcaggccactgggaaccctacatatctttctgagcaggagctcgcagaatgtgctcatgcatacagaaacttctgaggcataggaggcctaccactgtcangccgtcgagtacatcaaatacaattgcggacttgacactgaacaggcttacccttacacaggtgtcaatggcatctgtcacaacaagcctgttaactttggagtcaaaggtttggactccgctaacatcaccctgggtgctgaggatgagctgaagaatgctgctggacttgttcg

SEQ ID NO: 12464 - DNA, 444 bp, Oryza sativa
  Clone ID: PAT_MRT4530_1858C.1
atgtctcccctcgcccttcggcttttctttgcgaaacagtttttcaaaattctcctccctgtccctccaattcttatagttgttaaaccgtggagggtaaaccgtcagcttcgtgtctgttcggaagtcaagtcaagcatcaagcttcatgcagcaaagagcgggaagatgttgataccgcaactgcagagtccaaagcagcaaatgcaacgacaatgtcttcaccaacaagtacaagctcagatgcaagccggaatcaggatcagagcgaaagtcagtttgttttccaagagcaagcacctgcaacctcagacagtacgccaccaagtcttcagcagactagcacagctaagtcaccaccaatcccagaggcaacaagtgctacctatagtggttatggtttacaaggtggacgacaccgaagtcgggcctgaagcatgctag

SEQ ID NO: 12465 - DNA, 1184 bp, Oryza sativa
  Clone ID: PAT_MRT4530_18590C.1
cgccgcccgcgccgccgccttcctccgccaccggccggtcgccgccggttgccgccttgcgccgccgctgcgtcgagccacgccgccgcgtgccatgggcgccgggccggcttgagccgagcccgtgcgcgccggccgcgagccgcctcccccgtccgatctaccgggcggtagattggggccgcccgttccgtcgcccgcgtggtcgcccgcgtggctgccatgttggtgccgcgtccgcaccacttgtgcgccacgtggtgcgccgcccccttcccggtccgtggacccggtccatcgcggaccactaccccgagtcactgccatgtggggcaagggtgggcgtgatggagtttggatgggccctacggcggcctatgcggcttccggattcacctaggcatgagaggggactgcccgctgccttgcgaggagtggcggtgaaacctgaggtggcgtcgggcatggccattccaatggacccttcagggacttaccactgcaggccgattccagcaggatactccaaggttgaagttgagttggtggaagccgcatacgaggacctcgagttggactaccctggagaaaacggcaagatccttctcggctacttgtatcaaacactgaacaacgcgtcggccaagattgttgtcggctcaattgtcaatgcaggcgagccatggtggttgttgcaaacttggctaaatctagtagtcatgaaaactgtcaatcggccatccgtgacagaagctgaatttccaagattaaagccgattacagatgatgatgaagaagagcgcacctaccacaggtgcatgtcctatggggaatatgcatccacaccagccgatgcaggagcaaagttatcggctgagctgctcaaggactggttctgcagcttttatgaaggcttccagaaagatgcccgtgtttggttcttctatgaagattcatcacttctggaaaatccatcggacttcagatttgaagacattaaccataaaagataccaaaagtccagtattgagaacatagagctggcaaggttcaggagtaagaactttgacagatggtggggatatcagtcccgaaaacctgggacgttctccgttgatcccacaaaagcggagtgcggcacttccgaccatacagtgcttcgtaaggagccatctgaagactag

SEQ ID NO: 12466 - DNA, 995 bp, Oryza sativa
  Clone ID: PAT_MRT4530_18591C.1
gccggcgctcgcaaaggcgcggccgcggcggtggaggccagcgctcgcggaggcacggctggcagcgggggaggccgcgttcccggaggtgtggccggcgacgaagtcggcgacggggctcgagatggcgacaggcaggggcggcgtcgcggtgggcgggcagcggcggctcgctcgcgcctgtcgcggcgttggcctcggcgtcgtccgcgcggggccacggcgctagcgctgcgcaggcagaggctgtggcggccgcggctggatccgtcccctccgcgtcggatgggcggcgatgtgcggatgtggagttggcgggacgatggcttatgctggctgaagatgctggcgaaagccttgccgtgcctttggccggttcgacgacggcggcgctcgtgggcgtcatttcccttcttggaggcattgtcatggcattctttcatatcccccacaatctccagatgaaaaccttgttccggctttcagacgagcgacggcggcgttacacgtcgtgtcctccttgggggcgtcgcttcggagaagttccaatgcatcgacgaccgttgatggtctttttcggttcaaaagctttcataccttgtgctcggtgaggcctttgtcttcttgggtccacttcgttggatgtcggagctgcttttcgctttggcgactttcgtgtcttcagtgtcgctgcagttgtgaagtcctcggcaacgataacacctcttctgcgatgtgggagctgttatatcgcttttgtgtttagcttggcggtgacatcctgcttttgggctccgccgtcgttgtcagtttaatcgtcgcggggtcgccggtgcctcgccgtgctcctccgatcgccaccgccggcgacataatcatcaacgtagctcgacctctctgcccggtcgcctccgaacgagaaccaccgctgcacagcagaaacaaacggcgagcgggaagagggggggcacactcacgtgagcgctttcgtcagg

SEQ ID NO: 12467 - DNA, 312 bp, Oryza sativa
  Clone ID: PAT_MRT4530_18592C.1
atggagggagtacgtggcttgccgccaagggagactttgtcattaattcatcacggtctaagtgacggatggctacgattggacattgctgtgtgcgctgctcactcattacgagaatccgaaagcagtatcataaaccgtcgtgacatgaacagcgtgtggagttggtggttgacaaggccacggtcccgctcgatctgctcggccacgagggaacacactgttcatctccttcctctgttcgatccaatgaacagaagaggagagcgttttggcaagcagctagttgcagcgatggaacggcgacgaatg

SEQ ID NO: 12468 - DNA, 1892 bp, Oryza sativa
  unsure (1)..(1892): unsure at all n locations
  Clone ID: PAT_MRT4530_18593C.1
tcgttgccgagctagccgccccagctacctagcagcgccaacttcacaaccacaacgacacccatcagcgagcagcttcgacttcatcagcagaaacaaccgaagagcatgtcgcccaccataagaaagaagcggacccaagaaggcgaagcctcgccgaacacaagatatgaaagcttttgaaccgaaaaggaccatcggcggtcatcgatgcattggaacttctcagaagcgacgcccccaaggaggacncgacgcgtgncgccgccgccgctcgtccgnnnntcggaacaaggttttcacctagagattgtgggggatatgaaagaatgccatgacaatgcctccaagaagggaaacgacgcccacgagcgccgccgtcgtcgaaccggccaaaggcacggcaaggctttcgccagcatcttcacatcacccacacaagcacccccacattgacggccacagaatagtccatgacgtctcacaagcacccatacctcaaccgtaaccaacggcaaagacggacccttggccaccaactcctacagcaagccgaagcctccgccctccccctagcgttccccacgaccagaacaaggtccggccaaagaagggagggaaaccgaaatgagggagaagactcggccggcaacgaggaagtcgccaccgcggacgtcaagcccaattcctgcttcacgccagcataagccatcgacagcgcaagccggctcgacgtaagcgccgccgcagcaccgttgtcgttgcgaccaccacgccgccacagcctctgcctgcgcagcgctagcgccgtggccccgcgcggacgacgccgaggccaacgccgcgacaggcgcgagcgagccgccgctgcccgcccaccgcgacgccgcccctgcctgtcgccatctcgagccccgtcgccgacttctccctgccgccagccgccacctcaccagtgttgtcctccgctgctcctcgttgcgctgcaccgctctccgccgtcgccggctgcccctcgcgcgcgagccagcctccgccgtcgccggccacacctccgggaacgcggcctcccccgctgccagccgtgcctccgcgagcgctggcctccaccgccgcggccgcgcctctgcgagcgccggcgtccacagccgccggccgcccctccgcgctccttgcgcgcgccgcatccgctcctctcccctccgactgccgtctccggccggatccggcgggggcagcgccggatccgccgcctccacgccgggatgagtcgccgccgccgcgtcctagccgaagacgacgcgccgccccatcgccaccgtcgccaccacctccctcccgcggccatcctccaccgccgcctatgcatcgccgcgtcccctcgccggatccgcttccaggggcgtcggatccgccgcgcccttgccgtcgccggccgccggagccccccaccgtcgcgcgccgctccgtcctcccgcgctgaggaagagctttgccagttctcttggccccgccgccgccttccccaacctgtttcacgccgatgatgccggccacgaaccctaggcaagggcagacgtacctcttgacgaagcggtataccgcgccgccgcgccgggtcccgagcggccccggcgatcgccggcggtggagcgcggggtggggcctcgcgtacagccgcgacgtcgcgcgcaggagcgggtcgctgatgccggccttcggcggccggcgggagctctcctcgaactcctgcgagccgatcacgtcctcccgcgcctccgcccccgccggcgcggccccggaggaggagaagttgtcgctgccattgctgtcgctggtggcggcggcgctggtggagtggtgggagaggaggggctgcgagtaggatgcgc

SEQ ID NO: 12469 - DNA, 525 bp, Oryza sativa
  Clone ID: PAT_MRT4530_18594C.1
atgcgcgcatcctactcgcagcccctcctctcccaccactccaccagcgccgccgccaccagcgacagcaatggcagcgacaacttctcctcctccggggccgcgccggcgggggcggaggcgcggttgccgcccatctcgcggcggctgcactcctacgacgacctggtgcacgccgccgccgccgccgcgcacgacgcctacttcaagcggtgccacacgacgcccggctacgtgagcttcgaggacgtgatcggctcgcaggagttcgaggagagctcccgccggccgccgaaggccggcatcagcgacccgctcctgcgcgcgacgtcgcggctgtacgcgaggccccaccccgcgctccaccgccggcgatcgccggggccgctcgggacccggcgcggcggcgcggtataccgcttcgtcaagaggtacgtctgcccttgcctagggttcgtggccggcatcatcggcgtgaaacaggttgatcaggtcgaggaggaatatccagcgttaacttattaa

SEQ ID NO: 12470 - DNA, 1238 bp, Oryza sativa
  unsure (1)..(1238): unsure at all n locations
  Clone ID: PAT_MRT4530_18595C.1
atgcttttgactgcggggttctggagacaggggatcagcgacgaggcaggagcttggactgggggtcgtccgtggactggcggcgctagcccgatggagatcttggcggcggcgctggggaccggggagacgctgcgtcggccacgaattcgggcggcggcaacggccggaggacaccgcgaggatgcgcaatggtcgacaaccatccggtggtggggaatcgacgacggcgccattataattttgagcaataagcggctaggttttggaatgggagggggtggagaggggctgaggcaccaatgcgtcggcgacggaggagagatggttgaagagaacggcgtggaaggcgtcagcggcgacgtgaatcctggcggaggacaggcgatggggatcggtggagggcgagccggcggcggtggcagatcggtgaggcagaggacggcgcgacggctgatagggaggggagcgctgatggcggagtgcgcgccgcatccccaatcccgctcccgcacgcgctgacgccggaaactgctccgccatcagcgctcccatccccaacagcctcgccgatctgccccgcaggtgccggctcgccgcagtctacatcgccgcccactccgtcgtcatcgaatccgtcctcgggcaggaatcacgtcgccgccggtgccctccgcgccgatctgttcctcaccgccaccgatccccgctgccggctcgccctccaccgaccccccgccggaagcccttctgtcgccaggtctccgccgatgcattccacgccgagttgctcctcgccgccaccgatccctgctgccaggtcgctgtcgacgccttccgcaccgagctgctcctcgccgcgccgccacggcgacgacgatagactcctcagcaagttgctcctgccgaccacctagctagctagctaacgtctcgacgatgtgtttgtggctagctagagctctgatgcggcagcttgtatggtgtggctggaagacgacgacgcatcgtgtgcgataggatgggagtcacaagctccagccttaagggaggggaaggagcataaaaaaaattgagggatgaaaagagaaataaaaagttaaaaacagagagaagacaaaatagataaaaatttggaagattggaagagagattcagaaaatttaattcagtggctcatgaccgttgntctaaagataggcctgcagttcgctaccgaggtgcaggatagctaggaa

SEQ ID NO: 12471 - DNA, 2145 bp, Oryza sativa
  Clone ID: PAT_MRT4530_18596C.1
atgtcctaccggcggtggcgacaggcgcggcaggcatctcggcggttcgaccgatcgatctacatcggtcagaccgacgttcatcaggcggtcagaccggcgcatacatttcggtcagaccgcaatccgtcgaatttgagggagtacattaaatttcagatgaaacctggagaagctttggatgactatctttctcggtttaataaaattttgagtgatcttagatctgttgattcttcttatgatgctaattatccacaatctgagatttctcatcactttttgaatggttttgacatgtctatttgggagatgaaagttacatatattcaggagtctgttaacatgtctactttgactttggattcgctttacacaaaattgaaaactcatgagatgaatattcttgcacctatgaaaaatgttaggaacaggaaaagaggagaaccgaatcgttgtcctaagcttgggagaggcaagaaggaagatgatgtgagagttaaagaagatgacgtggacaagaagaagaacatgaaggagaaggagaagaagaagcattgtatgcagtggttaattcaagaaatcataaaagctttcgatgaatcggaagatgaagatgagagcaaagatgatgataatgaagaaaagcttagttatgatcaactagaatatgctgcttacaaatttgctaagaaacttcaaacatgttctattgtgcttgatgagaaggatcatactattgagattcttaatgctgaaattgctagattaaaatctttgattcctaatgatgataattgtcaatcttgtgaagttttattttctgaaattaatgctttgcgagatgtcaattctgttaattgcaataaattggaatttgagattgaaaaatctaaaaagttggagtcttcttttgctcttggatttgctttacatgctcgtgttgttgatgagttgattatgacaaagaacgttttgattcttatgctcatcatactagacatcctcctactgttttgggtgttgctaggagagcaatactttgaaggtttatttgtctctatcatagcttatttggagattatcgtcgaagaggttttggagataatcaattttcaggtgatgaagaccggcggcatacgggcggtccaaccggcggtggtgacaggcgccctcccgtacgcgactgacatcaagcactgcaacttcagcgccaaggagcagctgcagaacctctttgggggaatcaagccttctcacgtaaaaaaggagggcctccgcgtcgctctcgcgcggacggctcgggggcaaaaccctagctgcccgcgccgccacccccgcccaccctcgccacctcgccaccgcctgagctcgctgccggaaagccgcgcggtcagccgggaaggcggcggcggggccaagagaaccagcaaaactcttcctcagcgcgggaggacggagcggcgcgcgacggtggggggctccagcggccggcgaaggcaagggcgcggcggatccggcgcccctggaagcggatccggcgaggggacgcggcgatgcgcaggcggtagtggaggatggccgcgggagggaggtggtggcgacggtggcgatggggcggcgcatcgtctttggctaggacgcggcggcggcgactcttcccggcgtggaggcggtggatccggcactgcccccgccggatccggccagagacggcagtcggatgggagaggagcggatgcggcgcgcgaaggagcgcggaggggtggccggaggctgtggacaccggtgctcgcagtggcgcggccacggcggtggaggccggcgctcgcggaggcgaggctggcagcggggcaggccgcgttcccggaggtgtggccggcgacggcggaggctggcccgcgcgcgaggggcatccggcgacggcggagagcggtgcagcgcgacgaggagcagcggaggatagcactggtgaggttgctgtggttggaggatggaggcgacggcgatgcgaccaggcggcctacacgggtagcctggttgaggcggcgacaacgttcaattcaaatgtatatccagattgacctgattcagggttgggcatgcaatgatggtcctgtgattacccgaagattgatcctttga

SEQ ID NO: 12472 - DNA, 501 bp, Oryza sativa
  Clone ID: PAT_MRT4530_18597C.1
gcagtgcagcaagcttggatgcctgtatagctggacggccttcgtttttttttttttttttttttttttttttttttttgttacaaagtttattttttttcattttttacactatgcacaatgctggaatttttctatttaaggaacacatgacaacaatggggagggttggaaacggaaaaattcgaaaaagcaactcgcatatataaaatgggtaaaatactcatgacaggcagtcggtggaggaataattcttaacttacacatggccacctgctgctaatgatgaattaatggctaaaatgcttttctaaaatagggaaaaaggtgatggcttgttcaaaaattaaaaaattaaaaaggtggggaggggcgccttattaaccgccgggaacaagccgaactcctgcaaaagcgggctaagcttcaacggggatggggacacaaggggggatttatgggggataaggttttttttgccggaccccttagccagggacg

SEQ ID NO: 12473 - DNA, 365 bp, Oryza sativa
  Clone ID: PAT_MRT4530_18598C.1
acaaagacaaacatttattgcataattggacaaagattggacacaggtaacttataaggaaagataaacaggactcgtacattgctggtgaatataacgttacgagcacttcaagacgacggattgacctaaagtggatctttcaacagtggatgaactggggaaccactaggccctcaaaggtaggctggggctggggctgcattgtaaacactggccgcaacaaacgtgactctgctatgaaggggaagctggatgatccgacaggcacgagggaggaggtagacctagaaatgcgaagtgcagggctaggggacacacaaagtctaccgttgcacggtacaacgttgaatgtccagaaatag

SEQ ID NO: 12474 - DNA, 348 bp, Oryza sativa
  Clone ID: PAT_MRT4530_18599C.1
atggcgggctctatctccggcggcagcgagtacgacaactgttcaggagtgagcgatgtagaagaagggcggtgcggcgcaaccagctgtgtctccggcggtggagaagatggtcgcgccgccgccaccgcgcacgcgttcgtgctgcaacaggcgcaacacccctacgacgccaaggagatacaatcagcggatgcagcgatggtcgccgagctcaccaagctctccgaccacaactggaggttcgccaaggatcccgtcgacacagccaagagcgtggtggtcgggtccgcggttctcgcggagcacgctgacgagcagcacaactgtcgcccagggaagaaataa

SEQ ID NO: 12475 - DNA, 304 bp, Oryza sativa
  Clone ID: PAT_MRT4530_1859C.1
ggaacccaggaaatggtgcgtgcttgtttgcccttgtgggggtaccgtattaccgtgtgtaacccccaaccactgcgtggataaaagagttccacagggagttatttgaaaggaccccccaagcaaagtttcagcatggttgctgccccacacagttgccaccgacatgtggtgctggctgctcacatcaggctgcacaaggaggaagagaagaaggaagagcccgaggaggtagtcacgatggtgacctgggcatgagccctcgttcgacgtaagccgtcgtgtgccatagtcgcgtgccaaa

SEQ ID NO: 12476 - DNA, 249 bp, Oryza sativa
  Clone ID: PAT_MRT4530_185C.1
atggcgcacgtgctgagcagcgcgcaggggcaggcgtctcggcccgcgcagaaaagcgcattggggagagccacgggggacacggagattggacagcgcgggcgagagcagtggaggcttctgtggcggtttctagaatcttctggagcggccggcgatcttgccctcgactgcgagccgcgtcgagcgatccggcgaaccgcgattgggccgtcctggcatccgtgttatgggccgtcatcttcctaa

SEQ ID NO: 12477 - DNA, 408 bp, Oryza sativa
  Clone ID: PAT_MRT4530_18600C.1
atggcttctcgtaggatcacgctcgagttggcggccgtcgtggtcgtcgtcgccgccgccgtggccggttcactcccggcgacgaccgcgtcggcgacggcgtaccgggtcggcgacgactccggctgggacaacggcgtcgactacgacgcttgggctcacggcaagaggttcaaggtcggcgacacgctagatgtagagttcttgtacgcggagggcgcgcacaacgtggtggtggtggaggacgaggggagcttcgaggcgtgcgtggcgccggcgaacgcgccgacgctgagctccggcgacgacacggtggcgctgaaccaggcagggcggtggctcttcatctgcagcttcgacggacactgccagtccggcatgaagctcgccgtcgccgtcacccactag

SEQ ID NO: 12478 - DNA, 358 bp, Oryza sativa
  Clone ID: PAT_MRT4530_18602C.1
tcgcggacgcgtggggtcatggcacgtgaatgcccatattctggcgtatttcgctcaaagccatgctcgagcacaggtcgacagactcctggcatagacggtttgaaacgccgatccacgtccagtacaacagctgatcattgcacaacactaccgagtcattgaagaaagcctagcatgaacgatgccaatacatttcattcaagagcaccgcactcttcatggttagcctccttgcaggtaagagctcaatatttcgatccgtgccaggggttgtcatcgatattgcttgccgtgtatcgaggtatcgagctctaacctttaagaatgataaccgtgaagagctcgttgccttcac

SEQ ID NO: 12479 - DNA, 248 bp, Oryza sativa
  Clone ID: PAT_MRT4530_18603C.1
ccttattatctcgctacaaaacgccactgtacggtgaacaccccattgatgatgggagcgcacgtacgtgcactaagaaccggtgccccgcaagccatggcaaacaccacgttgacgccgtggtgccgtggccttcgacctaatcgacgcactcagagaccacgtacttgtgctgagtcgacagggctcgcgcaaagttgtgcaactgcagagcggcctccttcgccgtcttgagcgcaaacacatgt

SEQ ID NO: 12480 - DNA, 144 bp, Oryza sativa
  Clone ID: PAT_MRT4530_18604C.1
aagagttctaatttaacccattttcacaagcatattaacaaccgcgatattgttttttacccggccccgtggtaacccccaagaattcggaccagagccgggaaggggttagaaatttgcttattttgacgctaagttaatttt

SEQ ID NO: 12481 - DNA, 2154 bp, Oryza sativa
  Clone ID: PAT_MRT4530_18605C.1
ctatgacctgttggaggttatgtacccaaaaaacaaagcgaaatgcctatacccaatagcaacctcaatgtcaagctcactgaacttgatgtgcactgagccaaccttcacaacaccagttgtagtgatccttgccatctcattaccattgcctttcgcttccttgttcactcgactagatggaaagccctgtgatttggtaacaaattttgtagactttctatcctcgactgtaccagctcctccctctttcataaaatttgaggggttctgaccacagaactcttcaggaagacctttcttgacagaagaataattgggttctgataagtttattccaggttgtgcttcagaatcacgctgactcttcccatttagttttactagttcgctcaagctatcaggttttctttcaccgttttctggtgggttagaacaggaacaatgttcactctgatgatcaactctggcatctaaactaccttggtttgtttttgcatgctcaagttgcccaacaaatgctccaccatccgttttgagtgcttcagtggccagtatgtctttcatttggttcagcttgtcaggttgctcacatgcaccattatcctgttcaacatcccctgaatgtagatctttgctgctaaactggcctttacctacttctgaaggttcacctaccgcaacaacactgcttttagcgataaatgctggaacatacatgcgtacatcaaaatttctacccgaacatctgcatttctcttctagcattgctttctgtctcccttcataaaacgagaagtcatcaagaatagatgttgtcaatgggccatccttaaatagcttcagcatgtttgtcccagacttaaaaggaatctcttgtgtatcccggctgttggtaacaggcttgttctcgttattctctaatataatgtgccgaaaggtggagttgggcacatcctttactaggtgccacttcaccgggaagctcccagaccacttatcctgctgccagaaatccatgtctttgtgaaaatcaacaggaccaaccatttcagcaacaccacagaactgcccgctagcattaacagaaaaaaagagaaatattggacactttcccagagctcttccttgtacatctgagtaggctgcatccaacctcttgttgccattaggtgtgcttgaccatacattatatttaatgctcttatgtacatcatcctcgctgtaagatttgatgacaaaaaacttggcatctggatgatcaacaggaaagtgaaccttattgtattggtcaggatgtatcataattttttccaatgtactgtttgatgttgctttgccttgtccactttcgccagacatgggacctgaagtaacctgaatggattgcacatgttcttttgactgattaccttcatcagattttccatccttgtcagtcgatgaagcatccactggaactgtgacaagggaggttgaggatttgtcacgcctactcatgttagcatcaggcggattagatggcttatttgtgctttcgttttcgtaggcctgctgaggacgtccaacagctggacttccagaaggggcagtctgagaagctggagctgtatttccagacatctgatatttgtttttcatactggtgttagcaagcctactagcaacagcagatgtaccagtgccagtactaagtaaaggaggttctgcagaaacagttgagctgaaatctgtggtgggctgaatagacatcgggaagaaaccagatggcgagccaggaagttgatatggactagcaaaatactgttggcttcctacaaaagagccatcaactcccattaccatgccaggcatataggtgtactgatctggggagtaataagaaaaaccatagccaggtgtgcaatatacatatggaaggttttcatttgaaagttgtaggttttgaccatctacccccacaaaattagtgtgatcactccattcaactggtggctcaaagcctgcatagtaagcatagccgtttgttgctggataataaagaccctgctcatatatgtattgagatgacacattgctacttgtgttatactcgattctagcagggtgagatgcagaacccatggaagaacttgtaccaaaaccaggcatcat

SEQ ID NO: 12482 - DNA, 1098 bp, Oryza sativa
  Clone ID: PAT_MRT4530_18606C.1
ggctagtcaatactagtcatgagcaaatcagtactcgatattttctgtattggtaattcggtataatggggaacacgattacatttcacccaataccaccaaatgcaaaacccagtcgctgtcaacaatgaatggctcctctcctttgatatcattcactcaccaaatatgagcagatgaaactaaaggactgcctgccataacaacaaaatggaaacatttttcccaccacaaaacatctatgacctgttggaggttatgtacccaaaaaacaaagcgaaatgcctatacccaatagcaacctcaatgtcaagctcactgaactgtaatgcccgcaaaaagcaaaacctgaccaacacaattaatcattaaggtaagaccttaccttacctaaccttaccacccaacccttctttccaaccccaaaagagacacacgccccactaaacagttaacaccatccgttccttctgcaccattcgtttaaactttcagggaagcccattttcatcacctataatctttgatgacggctcacctgccacatttaccttgatgtgcactgagccaaccttcacaacaccagttgtagtgatccttgccatctcattaccattgcctttcgcttccttgttcactcgactagatggaaagccctgtgatttggtaacaaattttgtagactttctatcctcgactgtaccagctcctccctctttcataaaatttgaggggttctgaccacagaactcttcaggaagacctttcttgacagaagaataattgggttctgataagtttattccaggttgtgcttcagaatcacgctgactcttcccatttagttttactagttcgctcaagctatcaggttttctttcaccgttttctggtgggttagaacaggaacaatgttcactctgatgatcaactctggcatctaaactaccttggtttgtttttgcatgctcaagttgcccaacaaatgctccaccatccgttttgagtgcttcagtggccagtatgtctttcatttggttcagcttgtcaggttgctcacatcggacgcgtgggcggacgagtgggcgaacgcgtggg

SEQ ID NO: 12483 - DNA, 1233 bp, Oryza sativa
  Clone ID: PAT_MRT4530_18607C.1
atggccagcaccaccgttgccgccaccgtcgtcgcgagcaccgcggtcaccgcgtacctcgccacgcccagccacggcaacttggtgcgcttgccgtcgccacccatggaggaagaacttgttctgctcacatgtcgtttctgtgactcacgggaggcatcgaaccccggccgccccctccccccatcttcctcctccgcctcgccgccgcctgagcggccgccggcaaagccgcgcggccacaaggacggcggcggcggggctcctcgttcctcgtcgagctcgcctcgtttcgggcggcaaggggagcagcccaggacggcggcgacggtgaccgctaaatccgcgccgcctcggccggatctggcggtgtggcagctggcggctggcggcggagacggagacggagacggcggcggggatggcgacggcgacggtagaggagcggctgggtcgacggcggcggggatggcagaggctgggtcgacgccggcggggatggcgacggtggcgacgtcggcagaggcgccggatccaggcgcactggaggcgggtccggccccccagcggcggatctggccacccggctgccggatcgggcgagctcgtggcgggggcagcagagctcgcgacgacgtggtggcggtagcaaggcgagctcgggggcaggagcgcccgtcgcggcggctggctggcggcgtcagccgccggcaggagctcctggaggtggtgctgtcggcggcggtggccgccgacggcggacgcagtatcggcaacgtccacggcagctctcggccggatttgggtgtggccgagtggtggtcggctggcgacgtctgttggcgacagcggcggcggtgtggtcgtggcagttggcggcggcggttgctcgctgcttggtggtggagggcgacggcgcagcggcggtttgcggtggcggtggctcgtgtcggtggcagcggcgacggcggccgtgactgtggaggcggtggtgacgtcggcagcggggaagtagtcgggtgcgaggtgaggatggcgacggcgaggtggctgagcgttcggcagcagcggctgcggggggcgcggtcgatggcagcggaggtcggctcggcgcgagaggcacgggcagcggagatggaggccggcttggcgcgagaggcgcgtccggtggaggaggccggcttggcgcagagaagcacggccggcggtggaggaggcgacctaggtagctag

SEQ ID NO: 12484 - DNA, 177 bp, Oryza sativa
  Clone ID: PAT_MRT4530_18608C.1
gcactcaagctcagctcgacgattaggtatggataccaggccatcttgaacatggctgtttggcgcgtcatgatgcatctgaggtaagtaggaggtagagacttaagtaggatatatatggaaattcattttgtcccatgtggatgtatgctcactgtgtgttttaagacccttttc

SEQ ID NO: 12485 - DNA, 2109 bp, Oryza sativa
  Clone ID: PAT_MRT4530_18609C.1
atgtccactcctgaagctgaagctgaaggtgaaggtggatgcatcctcttctccaagtacatcgacgacggcatcctcacccctctcctctccagcctgcaggtcatcggcgacgccaagagcttccgcggcgctgagagcagctccgacctcgctcagctcgacagcatccgtgacatgatgagagaactccaagctatctttgtcaagatgggcgagaatgagaggcgcatcgtccacctcttcgaccccatcgaggagctcgtcgacgacgtactcaattccctcgccgccggcggcgagatctccacgctccagccgaagctcgccggtgtcggagtacagattggcatcatcagggaggcaatctcaggatcctataagataaagatacaagaggaaccatctccggacagaggaagggatgtggaggattcggcttctgcgccgacgatggcagggataaggagatgtgtccgtgacggcgagcagatggcgcacctgcggcgagccgtgcacggtatggatgagcagttgaggcattgcctcctctgccttgcagccttccccgagggcgccgtcataaaaaagcggctcctcatccactggtggatcggcgaaaagttcgtgtcatccttggaggacggcaatgagttgttccagcagctcgtcgacttgcggttcgtgcgcacagtccgccgccgggggcactgcgacaccgcccacgcgtgcaccgtgcacccgtggatccgcaggatgctcgtggccgttgcaaggagcagcgcgttcttggagattgatccggatggcaatggcgcctccgcctcaaacaacgatttctctaggacgcaccgcgcatgcctgcacgatggcgggctgctccagggctccaggttccacccgcagctctccacgatctacaacgttggccagagctatgtcaagctgagcaccgcgtggttcacctacagatcgcaactcggcacggtgcagctcgggcagtggcgggtggctgacccagtcgaccagattgcctatccaaggaagagccacatcgagctgatcgacgaccaccacctcaaggggatcggggcgtgcaagaacctgaggtacctcagcttgagaggcatatcgagaattatggccatcccggctgccattggagaactggccgagctggtcgtgttggatctcagggcgtgccacgatctgcaggtgctggcaaaggagatcaccaagctgcagaagctccagtatctggatgtctccgagtgctacctgctcgttgatatgcccgagggattcaacaagatgtctcagctccaagtcctcaaagggtttttggtagtaaactctaacaaaagaaacacctgcaatctgggcgagttggtaagcttgagcaaccttcgcaaacttagcatcagtgttagcaagaaactgaagcgtgcagaagatgagctgaaagtgcttgccaattttgccagtctcgcatcactgaagattacatggggaatggtatctccacgagatgctgccgacgaatcagatgctgcaaaatttaaccttgttcttccctctaatctttcaaagctggatctctactgcttcccgtcgagacaatttgggacgattagttctgacagtttaaagaaactgtattttactggtgggaagttgcatagtctggaaattcagaatggggagtgcaaagtagaggtgctgcgcttgagatgcctcaaggatctgcagttttgttgggaggaattgcgtgaactgtatccaatgctggagtttgtcgaagctcagcactgctcaggagtagctaattggccgctagacaacaataaagtatggacgaaggatgctgaaaccagtaatgctgcttctgcacagtctgaagaaccaactgcgcctgatgtttgtcctgaaattgtggaagagggataaaagcaaaaacatagttaagccggtgtgtttttttagagagaactgccggtgtgtaagttaagccatgcaaggtgacttttaaaaaactagctgggtggtccgcgcaattctgcggctagcacccaaacaaagatcatatatttttttagtatgattttactt

SEQ ID NO: 12486 - DNA, 514 bp, Oryza sativa
  unsure (1)..(514): unsure at all n locations
  Clone ID: PAT_MRT4530_1860C.1
tatcactaaaaccatcgcgagggagggagagtaggcatgacgtactccataatatccaaatccagtggnttgccgtcgtgcgtggtactgtgggtgcctggtcggaaaccctagctttccccgcggttggatgatgaggaggaggagaggggggatatgtcacagttgctgcagagtgctggttgccgagcgccgttggtcgtgtttggctctgctggtgctggaagtttgacgtctgcagcgcatgcactggctgacgtggatcgtttgttataagatggttcattggctgaaaatgttgaatcttttctatctttttttggcatgggccctagggatttattggggcgctccatggatgctactgaagggtttggttttgctgacgttgcgaaggctcgtgcctgtgcttccgaggttacctgttgtcgcttctgctctgttggcagcctgctcgctactggtggtcttgatagaaaggttcttttatggtgttcagagtctgctgtaaagc

SEQ ID NO: 12487 - DNA, 405 bp, Oryza sativa
  Clone ID: PAT_MRT4530_18610C.1
aaaccggggttggggatttaattttaaaaaactttttttgggaagggtaagggggggattttaaaacccccccccccctaatttaaaaaaataatttcaagggggactaaattgaatggttttgcaaaaaaaagcctggagccctggattatatttcaaacaaccttttgatgtttgacccattgggggaaggggcaaaagggatatgcctggttaaaaaatatgttccagtttccatacaaatcgatttgcgggatcaaaaacatgttaaatcatccttttggaccccatctccacgagcttatgccaaatttatcctttaaaagatccagcctgcccctttttaccagaaatccctggagggacactggccatttttaaaacgagggaatctcgccctggccc

SEQ ID NO: 12488 - DNA, 2220 bp, Oryza sativa
  Clone ID: PAT_MRT4530_18611C.1
ccctcctcgtcttgggtttctctccctcctcctcgccgtcgcgtcgccgcggaggcggaggcggagagccaaggccgcggcggtgcagccgccctcccctcctcccgccgccatggtgaggccgacgcaggacgcgatcgacaccttcgtcggcatcaccggcgccgatgaggccgtcgccgcccgcaagctcgaggaacatcatggtgacctaaatgaagctgtgaatgcctatttcaatgaaggagataggaccagcaccagagccaatgaaaatcctatacctaccggttatgatgacatggagttggatgaaccatttggtcctgttcctacatttcacatgcctttgggcaaccctttttcacttctggatcaaggttttttagaacgagctgctgctgtgtatggtgagggacctcatattacacaccctagggaggtgaggcggatagatgttgaagttaaggacaacaatactccagcaggtagttctggtcatggtcctgttattgaagatgttactggacatgagttttcacatgggccggaaattcgtgggactgttctgattgatgaagatgatgatgatgataacttgccatctgctcaagatactcgtctcccaagcaatccttcaacttcaaactattctgtaccaagagctcctccaattgctaatgttagtgactacaacaatgacatagaagaggagatggttcgcgctgcaatagaagcatcaaaaagggacgcagatggactgacaaatggtctaagaagtggagaacgtgaaaatgcatcacgtggcagagatgatgatgagattgctcgggcggtttctatgtccttggagacagcagaacaagagagagttctgcgccaagtgggagcgcatgtgtctgatcattctgatttatccgataaggaagacattgaaggagcaactgggacagtggaaaggcaagtaccaacttcagggaaagttggaacatctgatcagttggtagatgaagagaatttccaggatgatgacgttgaggaacattcttttgttagacaacactctaggcgtgtaccatctggaaatgatgagtccacagaagcacttgaaagggccaacagtcatccatccagtctcctccctcataacattgaaaacaatcagcagttcaatggagtttttccatcagaggtgtggggtggcatttcttctgaagaacatgatgaagctgttatgcttgaagctgcaatgtttggtggaattcctggaagagcagcatatccattttctctcccggatcatcaaaactcaagtcgctaccccacggttgctcatcctccgtcaccaacattaactgcacaacggttgttaagggagcagcaggacgatgagtatctagcatctctcgaagctgaccgagaaaaagaattgaaggcagagcaggaggctgagctccgcagattagaagctgctgctgaaagagaagctgctattgcaaagcaaaaacaagaggaggaagaaaagcgaagaaaacaactcgaggaagaggaattggagtccaagcttgcagccaaacaagcatcattgccaaaggagccattaccagatgatgtaggggccgtcactgttgtagttcgcatgcctgatggtcgtcgtcagggaaggcgctttatgaaatccgacaaccttcaggtcctttttgatttcatagatatctccaggactttcaaaccaggaacctataggctggtgaggtcttatcccaggcgtgcattcaccgactctgagtctcagatgtctttaagtgatcttggcctcaatagcaagcaggaagccttgtttctagagcagatttcaggatagggggaaaccgggaaagagttaattgcaattaacacaacagggattcacagaatttttttttctttttacttatgcctggcacatgttcgtgaaaatattagcaaggttcgcatgaaacttggcgttaaggtctcatgaccctcttttgtgttttggaatggtgactctcaagtaccgggtttcatgtgatactcaccctgcatatttgaacagtcagaactcagaatgtacatagactgctgctttcagagctaccgcaattcatcaattcattaatctatgttcgcttgttcaaaaaaaaaaaaaaaaaaaaaaaaaaaaaaaaaaaaaaaaaaaaaaaaaaaaaaaaaaaaaaa

SEQ ID NO: 12489 - DNA, 226 bp, Oryza sativa
  Clone ID: PAT_MRT4530_18612C.1
cattccagttaacaagtagaattcttccacagtatgtgtatatgcatcaaaatctagtacaggtactttggggacatgaaaatttatgcatccgttggtgttgcatgaaaatagatggttggccatgttcagtgacttggaatcctgtgaattgctatatcatgtttgacgtatattgagtagttttggcagtggctacatttggattaaaaaaaaaaaaaaaaaa

SEQ ID NO: 12490 - DNA, 401 bp, Oryza sativa
  Clone ID: PAT_MRT4530_18613C.1
gatatcactcccgtgtggcaatttgggacggcggtggctcggtggcatacgacggagctctgcgtcaacccgcgcatcctcatgacggcggcgaggcgaactcaacgacaacaaccaaattgcatccggccatattgtctcggcggaggttaatctagtagcaggcaacagcaacggcgacatgggtttagggctttctccgagacggtggtttcccacgatggcatcgacacaaggtcgacggcatacccaacagcgacgacgaacgacgatcgatatgtctccaagtccagccaaacagtctgagactatgtcaccgtgttcccggcgtggcgtcattagagaaagagagaaacagagagatgcgagggaggcgggtcggcctgcaggcatgcaagctt

SEQ ID NO: 12491 - DNA, 4691 bp, Oryza sativa
  Clone ID: PAT_MRT4530_18614C.1
atggcctccgcttccgattcggacgacgccgacgccgatttcttcgacaagctcgtcgacgacgatgacgccgataccaaccgtcgcctcgcctccgacctcacgccgccgccttctcgaccggagccggaccaggccgcgcctcctcctccacctcagcctcacaccgccccgccgccccctcctcctaatgcggaacccgaggcccctcctcctcctcagctggaggttaaggcccccgccgccacactgccaccaaacccagaggccgcctcgccgggctccgcaaaggacgtccatatggccgagaagtaggtgcagcggagcgcctccgctaccaacagcggtgtcgttggcgaagatccgtttagagaattcttgggcgtcgaaggattttttgtacgtaataatactcataccatgacgggtgagcagcgaatacaggcgtccgtgctcctgaattagaggaatagaatcagctgtatgcatccctagatcagcggttacgcacctaacagcaccgtggttaaggtccaaatctagcccctgcaaagcttgttggaaaacttttcacatcacttgataaatctttgtcccgcatgatgggtacacaaccttcagcgttgtcaccagtgccaacaggactccttaaccgaaagagatacctattcggctcctgcagctacaaattttgtgaataatcagccagtgatggctatgtcttctttgatgtcttctggttcagagcaatctatgagtgaaatgtcaggaaatactggccctgaccggaaagtcacacataaccagaagtgtctcttgaaccagacttttggcagaacccccaagcagggctgcaggattagatgctgcacgaatacacactaggttccggtagttcgcagttcaggatgcgtgctgtcccaatacaatggggacttctatgcaagatctcctcaacaggccaatgactgggggaacaaaaacaagttctactttgaggagaagctgaagcggtgggtggaagaaggtgctgacatacctgctgaggagcctccccttcccccaggcccaacaaaggccttgttccagaacggtattccagatcagagttcgaatggcccaggcagtgtaagttatacggctaatggattttcagaagcaaggcctttgaatccttctaaccagcacactgagaatcaaactgctcagcaggcaaatgtcgagtcattggaatcttctaagtattatcatgctgatatcaacacatatgcgcattctacaagtcagtacactagtagtgaggatcaccaggcgagttacaagggattcggatcttccactagtcatcagagtgtttacaagggttttgaaccatctgtaggtcatcaaagtacttttaccagccatcatagtgggtacaatggctctgaatcttccacagtccaacaggctgctcaccagggatttaaaccttctacaggcaaccagaattataaggggtttgagccttattcaggtcaccagttgggatataagggatatgattattctacgggccagactggccaccaggaatttggaccttctacagatagtcaagctaaccatgtggcataccaacagttaccaagccattacagcagcttcaatggtgctgctaagccacaagactctgttccaacagcaaacatgccccagatgcaaacacgtgctgattctgatggatgcatgaatttgccaaataactatttgagcactggaagctctgtaaattttgcgcagcagcaattcatcagttccaatgctttacctcaacaatttggttattcctcccatgagcagaggtcatcagctggacgcccaccacatgctttggttacattcggatttggggggaagcttgtagttgtgcgagagaccatttcaatgtccacaaactttgatagtgggaatcagggaaatccatgtggcacagtgtcaattcttaatgtgtcagagattgtttctgatagagttgatcatccaagtatccctagtggtagcgcacttagttacttccatgcattgtgtcgtcaacctattcctggcccccttgttggtggaagtgctgcagcaaaggatgtgaacaagtggcttgatgagatcaccggaggctatgattcctctatcagggagttccagggaggagatgatcagaagttgctcatttcactgcttaaaatattgtgccaacactatggaaagctccgttcaccttttgggtctgatccatcgcaggagggtatagatggtccagagatggcagtgacaaaacttttctcatcttgtaagagtagtggtgctcataagggagagtatggagccattgtccattgcatgaaaaacattccgtcagaaaaccagatccaggctactgctaaggaggttcaaaatctcctagtttctggtagaaggaaagaggctcttcagtatgctcaggaaggtcagctttggggacccgcattaatccttgctttacaacttggtgataagttttatgtggatactgtgaagaaaatggcttaccaccattttgtatctggatcacctttgaggacattgtgccttcttattgcgggacagcctgcagatgttttcaatgctgagaaccctgttgatggcaattatggtaatttgcatataccccaacggccggtggaggctgtgaattctaagagcatgctggatgattggcaagagaatttggctattataactgcaaacaggacgaaaggtgatgatcttgtaattacgcaccttggagattgcctctggaaagagaaaaatgaggtggcagctgctcattcatgctatttagctgcggaactaaatatcgagtcgtattcagaaagttcaagaatgtgtctaattggtgcagaccatttgagatgtcctcgtacatttaccagccctgaagctatccagcgaacagaggtgtatgaatatgcaaaagttcttggtaattctcagtacatcctcttgccatttcaaccatataagctgatatatgcatacatgcttgtggaggttgggaaggtttctgattcattaaggtattgtcaagcatgcttgaaggtgctgaaagcatctggccgtgcacctgaattagaggcatggaagcagttgttttcatccctagaggagcggatacgcacctaccagcagggtggttatggtacaaatctagcccctgcaaagcttgttggaaaacttttcacatcacttgataaatctttgtcccgcatgatgggtacacaaccttcagcgttgtcaccagtgccacagggctccttaaccgaaagagattcctattcggctcctgcagctacaaattttgtgaataatcagccagtgatggctatgtcttctttgatgtcttctgtttcagagcaatctatgagtgaaatgtcaggaaatactggccctgacagaaaagtcacacataacagaagtgtctctgaaccagactttggcagaacccccaaccaggcgaagctgggggaacaaaacaagttctactatgacgagaagctgaagcggtgggtggaagaaggtgctgacatacctgctgaggagcctccccttcccccacctccaacaaaggccttgttccagaacggtattccagatcagagttcgaatggcccaggcagtgtaagttatactgctaatggattttcagaagcaaggcctttgaatccttctgggcctagttcagggatgccaccaatgccacctagccagaaccaattctcagcacgtggacggatgggtgttagatcaagatacgtcgacacatttaacaagggtggtgcaagtgccactggaccgtcatataataaaccagccaccccatccatgaatccactgtctggtgccactttctttgtgccaactccagctactgttgcgtcagagcagatccctgacccaacagtcaatgttcatcaggatcaaccatcttccacgatagctctgcgggaatcctcggcttcgccaccaccatcagtacaatcaataccagttcaatcaaatattcagcggtatccaagtatggacaacatcatgaccccatctggcagtgggaatggcagctcattctcaaggtcacgagcagcatcatggagtggagcatattcagagcagttgagcggcaatgctgtttcgagatcaccagatggacaacggaccatgatgcagtctccgttgattcctggacagaaacaatcccacagccgttccagtagtaactcatcacttcaattcaacaatggcctgggcgaggatcttcacgaggtagagctctgatacctgaacaaaagggtaaaagatgaggtgcgtccatcgtgtaaatcaatcatatggccatgttttgtttttcatgtcattttgtatttaatatctatgatgtctagagaggaaacaaaggagcggcgtcccttttcttttcttttcttttttacatgaaagaagtatgcggatgccgttgtacagatagatcactgccagttgatttgagatgccaaaggaaagaaatgacttggtgtaaagtgattactttgctactttcttttacccctttagagcatttgttcatttatttgaaaacaaggatggtctgaaataacaatgccgtgtggctgataagggcc

SEQ ID NO: 12492 - DNA, 243 bp, Oryza sativa
  Clone ID: PAT_MRT4530_18615C.1
atggtgctcctgaccaacgcgcccaacatcgccaacgtcttgaacatggtgagctacctccgggccaccatgcacatgggtgtcgcggaggcgacgacgacggtgaccaacttgttcgccgcgttgcaggtgttctccatcccggcggccctcctagctgactcatacgtcaaacgattctacaccgtcatcctcttggctcccatcgagatcatatccgtggagatgggaaaaacactatag

SEQ ID NO: 12493 - DNA, 1244 bp, Oryza sativa
  Clone ID: PAT_MRT4530_18616C.1
acaacttattcatctcgttgcacatatagctcagcaacagtacaacatttcagtaagctagatggattcacaggtgaccttccctttttacaacaccagtacacaggctcatatcattcacaaacacacaattgatggaactgggcacgagcagactaatgaggatttttcacattaattgatcgattgattgcatcttacatgccagtacactacagtatttacagactgaccgacacatatttacagactgaccgacaccatggacctggatgttactaccttttgtacacacacaagatgatatagctacagacgggagacctcatttatgtacatccgaaagctctctgcgattgtgcagtttcaaaagccacaatcagaagggcaatgccaactcaactcgacaaaaagaagcccaaaataaactaatttatgccctcctacagcacacggcaaaatttacaagttttggtggacaggatagcgttagggtcaatgcagaatgctcaggcaaaggtgactgcacagtggggctccttgttcccacaagcaaaaccttcaattctaacttttgggctgcttgccccgcaagatggagaacctacttcagctcttccagcagactttttgccgaaagaactccctaaaggagaaaaggaaggtatgtttttaccaaactgtggatcatggacaatggggttgttagcgcgcacaggaggtgagccacagaaaaagcccacctgggtgctcgaatcagtatcaacatcagggtcattcttactgaggatgaggtcgaggacatcagaagcagagtcagctctgtacaccggtaatgtccttcggtcgggcatggggtctactagtctccctcctccattgctgaacttggtcgagtagtgttccatgcctctcgctctcttgagtgtagtgtgtagcagagacctgctgctggctgctgcttcttcgtcttcctcttcctcttccaccgccgccggcacaccaccacccccatcccatctcatctcatcccccacaagccaagcagcctccgttcggagtccgtgtaagacaccgtctctcatctccacttcagtccggttctgtcttgccccaaatccaaccatggccgaggccggcggacggggtagctagggcctaggggatggatggtcttggcgcgggcatacctgctgctggctgctgcttcttcgtcttcctcttcctcttccaccgccgccggc

SEQ ID NO: 12494 - DNA, 539 bp, Oryza sativa
  Clone ID: PAT_MRT4530_18617C.1
tccgcatcgcggtcgcagtggtggtgtgccggcggcggtggaagaggaagaggaagacgaagaagcagcagccagcagcaggtatgcccgcgccaagaccatccatcccctaggccctagctaccccgtccatccccctcgcctgaaacttccttcgccgatctatctccgtccatcctccgctcgccgtcgccgtccttgtgcctccgcatcctcgcccaccggtctctgctacacactacactcaagagagcgagaggcatggaacactactcgaccaagttcagcaatggaggagggagactagtagaccccatgcccgaccgaaggtcaagattttggcagatggattcccaacccaccgagctcatctgtcccatgcctcgccgcccgtcaccccgccctcctttcctatccgactccatcaacaggacattaccggtgtacagagctgactttgcttctgatgtcctcgacctcatcctcagtaagaatgaccctgatgttgatactgattcgagcacccaggtgggcttttt

SEQ ID NO: 12495 - DNA, 717 bp, Oryza sativa
  Clone ID: PAT_MRT4530_18618C.1
atggatgacatcaaaattcatgccattttccaaaccagtcaaccaattgatactactgcctgcagtgtaaggcctctcacagtgcgtagagccgcgcgaaacctcgccaaaacgagggtgcgagaaggagaggaagacacgaggcgcgcacgctgtggggtgtggttcttggccgcgctgtgccctcgcgccgcatcgagtggagaaaaccctgattcgcccatgattcttcccgccaccgaaacacctcaagcaagaacgcagaaaaaagaactcgatccgtcccaagaacacaagaggaatcaccaagaagcatcacatctcacatgcacaaaaacaacaatcaacaatctcgccgccgcgtgcccgcttcctcctcgccgcggcttcccgtcggcgtcgcgacgtccgctcctgccgctgcccccgccgcggccaccacatccgccaccacgacccctaaatccggcggcgaatccggggccccgtgccgacaaccgccaccacaactcggatccggacgagccaagaaccggcggccgcccgcgcaccggcgtccctgcgccgccaagaaccggcggccgctcgcgcaccggcgagccgccgccaagatcgagggagaggaggtgccggcgagcctccggaagaccaccgaagtcgccaccgacgaccgccgcaactctggaagaccacgccgccaactactgcttgggacga

SEQ ID NO: 12496 - DNA, 414 bp, Oryza sativa
  Clone ID: PAT_MRT4530_18619C.1
atgttagctctcctatcttgtatgtggggtccacatgacagtgactagggcgagcggcggtggcctgcagccgagcagcgaggtcgggcagccatggtggacgagatgtggcgtgggcgatgcggccaatgcctgcggtggcgcgacctggcggaggagggtggcccgcacagcgcagcctctggtggtgcgatgtggaggaggagggcggcccttgcggaggccgagcggagcagcagcttggtgcagtgcggcggcgctgccccgcggcctgattggcagagctgcagccggcaagatcggcggcgaggtggccagccagcgccggcatacggtcgccggcgtggtcggcttgcggcaagcggcgacggcgctttcctgccattgccatgtggaccccacatttcctgccat

SEQ ID NO: 12497 - DNA, 3214 bp, Oryza sativa
  Clone ID: PAT_MRT4530_1861C.1
atgaaagtagaaaaaggtcgcgatgcgccgaaagtccccctcccgagcctccccgtggtccctagccatctccccgccgccctcctctctctcccacgccgccggccgcctccagccgcctgtgccgcctcgaccgtgcgccggccggccgcgccgtcgcctcctccagcgtcgccgccacctcctccaccccggcctgccctccgtttcgcgcgccgcctctccctcctcgccggagcaccgtccggccgcgccgtcttctccctcggcctcgcagccacctcctctccctcggtcagccctccgtttcgcggggaaagcaccggagacgcgtcctcgccggcaaaacagtggcgttgccgccactggtccacctccgggcgccactgtcgcgtttcccgtgcgccggccgacgtcgccaccacctccctcggctccgcgacgccgccctccaccccggctggtcctcggtttcgccggaacgccgtcgccgcgccggcctctccatcctcttcgtcgccggcgtcctttcggccacccattcctcctcgtcggctcgtcgccccgctaaaccaccaccttctccaacatcgcagcagcgcgttccacgccgtcccctcctccgctcagccgctgctgcctgccatcatcgtttcctcgtcaccgttcgtcctcgccgatcgacgtcccgtcggtcgcctggctcgtcgtctcgcggcgccgcctccgtcatcatcatcgctgcggcgtgttccacgccgtcctcgtccccgtgcagccgctgccggctgtcctcgtcgcctcctcgccggtcccggtcgtcgtcgtcgtcgtcgtcctctcgtcgttcccggtcgtcgtggcgttcgtccctccgtcgagccgttctcgtccgtcgtccgcattcgtcaagcgagccgctgcagccccgtcctcgtcttcgtcctcggctccgcgtcgtcaagcctcgtgccggccgcgtctcgccttcgtccaaggatcgccgccgaagccgtcccctcgccgttcgtctccgttgtgcccgtctgtctccgccgcgcccgttcgtcgttgtcgttcccgcgcctcgtcgcgtggtggtaaggatccctctccctcgctgccccgtccttgtcctttcggtgtcgcccgtgctcgttgtgcggttgtcggccccggtacccgtgtaccggtgtcgtctggttataaacaaaagtacacggatggagatggacgaagtcgggggtcgatggacatctctaggacaaatgaaggctacacgagctgcggcccggtagtcgagatgtcatggcacagggccggtgtcctgctgctgggggctcagtcctgcctacctgtcccgggggttccggccgtaggtggggttgggtcgccggaggagaggacgacgctgcgacgtcgacggaggagacagcgacgtcggtcggtgctcgggcacggcggaaggggctgccggaggtggtgcagtggcagcaacgccactgtttaccggcgaggacgcgtctccgatggtttccccacgaaacagaggcgacgtcggggaagaggatgcacctgcgaggccgagggtggcgacggcgcaaccggacggtgcacggtcgtggtgggaggtgcggctggaggtcggccggcaccggagagagagaaggagaaggcggggagaggcggggcggccacgggagagcgcgggagggggctaaaacaggagaacggaccgagggggttccattttagagatgaggggagggagccgaccatggcggaggtcggaacggaggtgggaatggcggccggcggccatggaaagcggcagggagttcgtcacaatctgattccgctggcgatgaagaaggggccaaatctcacggagaggatggttgctgtgaaggcagagctcgtcgatctgaatcagcgagttggggagctcgcaagcaacctcaacgacctcctggggtcactgaccaagctggagacgtggattccatcggtggacacggggatccaagctctgaacaaggccgtggaaggaattgccgcaagggtgacggttctggagaactcacctgcagcggcatcggggatgacgaccccaacgcccatcgggcacggcgaaaccgagaatcaccagggagacgaatccaaagccctcgcggctcaggatcgattcctggtcaagggtaagtcccgattccctaactctcccatcacttttgatataggagagtcttcagttcagaatcaatccagcaatagattccatggtcctaggcttccaaagtctgatttcccaaagtttgatggtgacaatcctaagctctggaagaagaactctgaaaagtattttgaaatgtatcaagtgtcttatgaaaattgggcaaaattttctaccctccactttgtaggaaatgctgccttgcggctccaaacaaatgaggccctccatagtgttgaaacttggcctgaactctgtatagcagtgcatagcaaatttggccaggacaaatatcaggaacatttagaagagttagaagggcttaggctaattgttggtgttgaggagtattataccaagcccaggactgttgatacggctttatctcttgccaaaacgcaggaggaacttgtcttggagttgaagaagggtactcaaaagctggggtacaaacagaattacaagcttccaggagagctaaaggagaatgtttcaaatgtggagaaaagtggggacctggccataaatgctaaaaatctgttcagttgcatgtcttggaggaattacttgaagttcttcaaattcaagagaatcaggaagctgggcaagattgtgaatcagaaggcaaaattgtgtttaaggtactttggtccatacaagattttggagcgcattggagaggtggcatacaaattagacttgcccccacaaaatcaagttcatccagtagtccatgtgtctcttctcaagaaggcaattcgtcctgatgtccaagttcaagccgatcttccagcaaattgcatggcagaagatgcagcagttattcctgaagaaattttgcaccgccaactcatcaagcgagtttacttcccactattctcttcatgttttcatcatttagcattcaacgtattcctttacaccttcgaccttgatgagttccttcccattggatcatctcccaagacatggcattacctg

SEQ ID NO: 12498 - DNA, 610 bp, Oryza sativa
  Clone ID: PAT_MRT4530_18620C.1
aattccctccccttccccgtttcatctgctgcggccggactccctccacgaatcctcctccgccgccgtcgccgccgccgccgccgcaagagagctaaaacaagatgccggctaatggcgatggccctgccagagggagcgcagcagctgccgcaagcttgcgcaggcgcagaaccactggcggtgccggtgccggtgctagaggtggcaccagcacaatgcttcagttctacactgaagaggctgctgggtgcaagatgtcccccaatgctgttctgatcatgagcatcgggtttttcgcggtcgttgcccttctccatgttttcggcaagctataccgtacctcctccaactaggttgacaatgctattatccatgactagcagattcagtcaacagaggatttcgtttgtagagttccttcaatgcatagcaaattgctattcgattatgaaaagttttctgttatcatcatagaatgtcacatacccttcaggtggagttgtttatggttgatttcttaaatgcttcattgttggttattaatttgctgttgtggttattctctcgagtgtttgtttctctgcaatgatatgtgttgagtatatgc

SEQ ID NO: 12499 - DNA, 586 bp, Oryza sativa
  Clone ID: PAT_MRT4530_18621C.1
cagagccgcgcgaaaccttgccaaaacgagggcgcgataaggagaggaagacgcgaggcgcgcacgctgtggggtgcggttcttggccgcgccgtgccctcgcgccgcatcgagtggagaaaaccctgattcgcccacgattcttcccgccaccgaaacaccccaagcaagaacgcagaaaaaagaacttgatctatcccaagaacacaagaggaatcaccaagaagcaacacatcccacatgcacaaaaaaaacaatcaataatctcgccgccgcgcgcccgtttcctcctcgccggggcttcccgtcggcgtcgcgccgtccgctcccgcccccctccccgcggccaccacatccgctgccacgacccccaaatccagcggcgaatccgcggccccgcgccgatgaccgccagcacaactcggatccggacgagccaagaaccggcggccgcccgggcaccggcgagccgccgccaagatcaagggagaggaggtgctgatgagcctccgaaagaccactgaagttgccgctgacgaccgccgcaactccgaaagatcacgccgccgactgctgcttgggagaa

SEQ ID NO: 12500 - DNA, 723 bp, Oryza sativa
  Clone ID: PAT_MRT4530_18622C.1
agcagcagtaacaaaatatatgcctttgaactatcagaacaaacattggttacgactcgcaagtcagatcagccaaacaccccaagtagagccgcgcgaaacctcaccaaaacgagggcgcgagaaggagaggaagacatgaggcgcgcgcgctgtggggtgcggttcttggccgcgccgtgccctcgcgccgcatcgagtggagaaaaccccgatttgcccacgattcttcccgtcaacgaaacatcccaagcaagaacgcagaaaaaagaactcgatccgtcccaagaacacaagaggaatcaccaagaagcaacacatctcacatgcacaaaaacaacaatcaataatctcgccgccgcgcgcctgcttcctccacgccgcggcttcccattggcatcgcgccgtccgctcccggcgccgcctccgccgccacgaccaccaaatctagccgcgaatccggggccccacgccgacgaccaccaccacaattcggatccaaacccgggctgcatcggcgcgtcgtctttggtcaaagccgcagccgagccaagaaccggcgtccccgcgccgccaagaaccggcggccgcccgtgcactagcgagccgccgccaagatcgagggagaggaggtgccggttgattcaccgcgatcgtgctcctcgtccccctgtggaatacctgggattaagtgatcaagccctgcccggctgccacgtccaa

SEQ ID NO: 12501 - DNA, 129 bp, Oryza sativa
  Clone ID: PAT_MRT4530_18623C.1
ttttgggtttttttttaagccatggttttggtgacaaagtacatcaaaccagtttagaggggatactgaatgcacctggggggaaagcttaacaaaacctggttatacacttaaaatggatccagaaag

SEQ ID NO: 12502 - DNA, 648 bp, Oryza sativa
  unsure (1)..(648): unsure at all n locations
  Clone ID: PAT_MRT4530_18624C.1
atgtcctccctatctctcttcgtcttcttcctcatggtgctgcctttctcgtgcgtgctagacccgttaaacgatcgtcttcgtcctagcttgtcctccgctggcgggctcagggagggtgggggcgagagagatcgacgggagaacggccgatggcggcaccgtgaggcgcgcaatggcggcggaagggagtacgtggaacggagagaggacggcatccttggcactgctttggggagggaaggggaggtctcgagggaggcggtggtgaggggattcgccgagaacgaggccaacggtcacgcacgaccgggcgcggcgttcggcgaaaaccggagcagcggcgagggaacgtgctcaggagctatccttgagcctccagagggcatagacctagggatatgggaatggggtgctcactggcgacaaggagcggcttcggagcgggtggcccggtggaagaaggncggccaggtttcagggatgaagattccggggcaggctggcgcggtgacgccgggctcccttccgatcagccatgacgggagcgcgcccgggaacggcaagcggcacggccaaaatagaatggcgatgacggcgcggccaaaatcgaatgacgacgaaggcgccttcctccccgaattttga

SEQ ID NO: 12503 - DNA, 436 bp, Oryza sativa
  Clone ID: PAT_MRT4530_18625C.1
gatcaaatcaactagcacgctcacgaacctagaagcaagattttggacctgcactgaagttaagcagatcatgacgactccaggttttgacccggcagccccaccagaggaagaggacgactcaacaacactctcaggagggaaagcgacgcccaaagtggccgtcgttgccggcccgaccaatcccaagctaggtttacacccgttgtccgccccctaccgatcgacagccaaagctccaaagctctaccacctgccaacctctgtcggcacgtgcacactgctgcatcaacgccccccgccggctgtactccgcgtcaatgccgccaacagctctacgcaccacaatggcctcccgctaccgccggctatgccactacgagctttgtcgtcgaccacgcctctaaattgggctcgcctccacgcgccgcgatag

SEQ ID NO: 12504 - DNA, 384 bp, Oryza sativa
  Clone ID: PAT_MRT4530_18626C.1
atgggtaaccgttcacccggccccgttagtcacccgcaaaaaaccataggggacgggtgcaccgctcccagtcggcccgagccgggcaaagcccgccttagggctgcctccccgcggatgccaggtgggcccgggccgtcagccgcccgcgcccgcgggctgggctcggggtgcatggttttgatggtagcacctcggccgtttaaggaccggtcttcgggcctctgttgcaaagcactaccgtacttccacatgtctagtggggcaaatgaaggctacacgagctgcggcccggtagtcgagatgtcaaaaagcacaggtcttgctcaatttttcccaagcccagatgaggagttccttgaagatgaaggctttggtgtctag

SEQ ID NO: 12505 - DNA, 405 bp, Oryza sativa
  Clone ID: PAT_MRT4530_18627C.1
gaggcgcttttttacatactcatacttttactactcttaatattgtgcaatactttcgccgagggagctattaagctaactcaaatactgcatttcccatctctcaattgactcatctcttactcaaattcctcaaaggctctgcaatccttctatgagaagcttaatcaacagttcattcctattagaacaaaagcttttgaattgttacatagacactactatctaaatgtatttttccatctcctcgttaaatattcactaccagtatctcttataatttcattgtaaacagccaatcttctaagggaagatttcttctcttctaaattcatttaccccatatgatcctttcatttcattctacaattctccttttattactcacatcatttaccatttcaa

SEQ ID NO: 12506 - DNA, 195 bp, Oryza sativa
  Clone ID: PAT_MRT4530_18628C.1
atggagaggggcagcaaccaacagtgggagcgaacagcgtgcgacggggagaagtactatcgcctggagagaggagagatggggaacctaagtggcagcctggcagaaagctcaggaggtggtccaccgtggaagcccgccactcgtcaccttccaatccaccaccagccgtccttcccacctgtcgccgcctag

SEQ ID NO: 12507 - DNA, 1738 bp, Oryza sativa
  Clone ID: PAT_MRT4530_18629C.1
cgcacgaggcccacccacccaaaaccctagcgcgagtggggagtgggcgatggcgcgggggttgtagtagcagcagcagtagagctaagctagggttttccctccccccgcgcgcgcagccggcggcatggagagcctggtcctcgcctcctcctgctccgcttctccccgcctgcctcccctctccgcggcccgccgccgccgcccctcctcgcagactctcccggcgacggctgcggcgtccgggcggaggggagctgggaggtccaagctcgtcgtcgtcgccgccgccgccgccgcggcccgcgggtccgggaacggtttcgagggattaaagacaaatggatttgcaagcatgtcgtcttcgaccaacagtgagaatatgtcaactggaacgggttccctacctcccatgccacccccatcatcatacatcggttcgcctgttttctggattggagttggtgtagcattgtccgcagcattttctatggtctcttcgatggtaaagaaatatgcaatgcaacaagcattcaagtcaatgatgacccaggcaccgccaaacacttttggctcaaactcgcctttcccatttgccatgccaccacaggcagctcctgcagctcctagcagttacccatactcacaaccaaggaaagatacctctcctcaatctgcaactgtcgatgtttcagctactaaagtggaagcaactggaactttggaagaggctgatgtggctgaacagccaaagaagaaatttgcctttgttgacgtttctcctgaagagttgcagcaaaaggaacttcaatcttcactggagacagtggatgtaaaaagtgagagtaaacagagtgaaactatggaggatactgagcaaaaagctccaacaaatggaactgcttttaagatgaatgaaggttctgctagcgggacaactgaatctagcaattcagggcctatgttgtccgttgatacaattgagaaaatgatggaagatccagccgtgcagaagatggtttacccaaacaacatgggtggatctcctgatcaatgggataaccgaatgctcgatcacttgaagaattttgaccttagcagtccagaagtcaggcagcagtttgcgcaagttggcatgactccagaggaggtagtatcgaaaataatggcaaacccagaagttgctgttgcattccagaacccaaagattcaaacagcgatcatggattgctcacaaaacccgctcaatattgtaaaataccagaacgacaaagaggtcatggatgtttttatgaagatatcacaaatcttccctcaaattaatggctagtggatcgtcgccgtgagattgcagttttgatttttgttgccctatcatctcttccaagtggctgcggtaacatctgttgatcggctgagtaaaaggaaacgaagttcatctgttcagtcattacggacaagatgtaaaagctttcctgtcagggttttttgagttgccaatgtacatcatcatatcgcctagtgtttggtttggtagtgaccctgcctcaagccagagcaggcaacgaagcgaagttaaggattttttttatttacatccccgcgcccccgtacaactgtgtagcttgtgctttgacgttacgaggtttgtggtaggttgtgaagatgcagagatagttcatatcacctcaattttgataatattatgtattatatctgtgttagcattgcaaaaaaa

SEQ ID NO: 12508 - DNA, 1689 bp, Oryza sativa
  Clone ID: PAT_MRT4530_1862C.1
atggatgggcacggagggggaggaggaggtgggggtgggggtgcgggtggtgtggggaagctgacgcggacgccctcgtcgctgctgcgctcgccgacggtccgcaactgcgcgtcgttccaggcggtggtggtggaggacccggagcccgacgacaagaaggagcaggcgcaggccaagcccccgccgcacctgcacccgcacctcctccgcgccgccgccgtcccggcccacccgctcctcctcctcgcgctccccctcgccgtcctcctgctgctcctcctcctccgcgacgaccaccaccacctcctcctcctcgcgacggccgcggctgccgcgctcgccgcggcggccggagccgcgcggctcctccgcgggcgcctgcggctccgccgctcctcgggatccgggtccgtgcagtggttcatcggtgacgaggacgacaagcctcagaagcgggacaaggggaaaggcggggcgcacggccgcgtcgtgcgcgagggcgtggagttctacagcaatggggactgctacgagggggagttccacaagggccgctgcaacggcagcggcgtctacaccttcttcggcaagggcaagtacgaaggggactgggtcgacggcaagtacgacggctacggcatcgagagctgggcgcgcggcagccgctaccgcggccagtaccgccagggcctccgccacggccacggcgtctaccgcttctacagcggcgactgctacgccggcgagtgggccggtggccagagccacggcatcggcgcgcagacctgctccgacggaagctcctacgtcggagagttcaagtgcggtgtcaaacacggcctcggcagctaccatttcagaaatggtgatcggtatgctggggagtactttggggacaagatccatggatttggtgtctacagctttgccaatggccactgctacgaaggctcctggcatgaaggcaagaagcaaggatttgggatgtacacattccgcaacggcgacaagcgatcgggggactgggattcagggactctgaagaccccccttagtccaactgatccttctgttcagcgtgctgtacaggcagcgcaactagctgcggagaacgcgtttcacctgccgagagtagacgagcaggttcacaaggcggtcatggctgctaatagggcagccacggctgctcgggtagcggcgatcaaggcggtccagaacaggatggatgggaaattctgtgatacctatgtgtgattgagttttgcaaaaggaacctgggacttcccttcgtagaatgtaaatttctggctggtcatgcaaattataaatgtgattaggatgacctaagtttcacagaaggagtctaagctaataaccctcacattcagtgttcagcaaagaacgggatccggcaggacaagactggttcgatccttttgttcacgattgaacgttattcatgtcaagatgatgatgctgcagcttcttcctggtgcatttgttcagcttaattttgcagatcggggattccagatgaactggttgagtagccttaattcctttaagaggtcaaaaaaaaaagcttcaatcataatacaatttcggcagacaagttgccccggtctgcaggatggtcagaaccagtggctcaaggaggattgcctgagcctgacgatttctgaatag

SEQ ID NO: 12509 - DNA, 384 bp, Oryza sativa
  unsure (1)..(384): unsure at all n locations
  Clone ID: PAT_MRT4530_18630C.1
gtaaacagagtgaaactatggaggatactgagctaaatgctccaacaaatggaactgctttganatgaatgaaggttctgctagcggcacaactgaatctagcaattcagggcctatgttgtccgttgatacaattgagaaaatgatggaagatccagccgtgcagaagatggtttacccctatttgcctgaggagatgaggaaccctgattcattcaagtggatgctgcagaatccaatgtaccgccaacaactacaggatatgctaaacaacatgggtggatctcctgatcaatgggataaccgaatgctcgatcacttgaagaattttgaccttagcagtccagaagtcaggcagcagtttgcgcaagttggcatgactcc

SEQ ID NO: 12510 - DNA, 363 bp, Oryza sativa
  Clone ID: PAT_MRT4530_18631C.1
atggccaatttcgtcggagcgggcagcttgaaccacccaccaccccagcgcaaagggaaaggtgctctccagagcaccgaccaggtgttgccgttctccacatcacgcaacaacggcaaggagggaaaagctcgcaagagagtggaggaggctctccccccatatcatatctatcttgaatggataccaccttgtccgaccaacccagaatatccttcgtacgacacaaaagctcctcgaagagagttgaaagcaattaacctgggaaccatccttgcaactgcaggtgtaccattcctttcatcatctagtatccaagcaaaagaagaggaatatgcatgtggcaaccttttctatatatag

SEQ ID NO: 12511 - DNA, 510 bp, Oryza sativa
  Clone ID: PAT_MRT4530_18632C.1
ctactggcgctccttctcaagatgagcggcgggccgagcttgggacgactgttggaagaaagcgattgcggggaggcggcaggaagaaggcgcctcaatcacgctggccagatatgcggtgcagtcgagcttgccgagagggatcttgttggatctatcggcccatggcccaaggtagtagcagtgggaagccgaaggagcaccaggacagggaccacatcgttgaaagcgccattcccttgtggaagtcactctggcgcagagttgcaagaaaaggcagaggtcaatgatggaggtggcaaggtcatgctcgatggggttcgtcggacgctgcctctcttcctctgcgtctgtctctgtctcttcactaagaaccaaggagctcagaggcagaggagagacgaaagcgctatctctgatctcgctggacacggattcgaggaggaaggctaccctgttgtcgactacgagtcagcccttcaggctgccatgtcgacaacagttagatag

SEQ ID NO: 12512 - DNA, 480 bp, Oryza sativa
  Clone ID: PAT_MRT4530_18633C.1
gtggaggcagatctccctcggccaaccccaagcggatcccgacgatgctgcccacgacggcgtccaaagggcgcggcgccgcccgctctgcgccgccgctcttcggcccctacctccgccgcatcgtcaagtggcaacaaatggatatcgagtacacattttggcaaatggtccatctctgtacttcaccaaaagtagtgtatgcatcctgccctcagtcctttcttcattgttcgtattatttattttgttacacaaatgcaatctgcaaattttatcatggtaacaacaaacctcttgtataatgaaattcttaatgccaatgttgcataagtgtgtcactcaacctactaagtttttattatggatgctcttgtgtgggcataactatcatggaatggaacattgatttcggataattcttgaggaatctagttttgaactttaagacttctattaccataactgtcataaacccag

SEQ ID NO: 12513 - DNA, 418 bp, Oryza sativa
  Clone ID: PAT_MRT4530_18634C.1
tcggttgtgcctggctccccgcctccgccggtcgcctccgccgccgcctcctccggtgccgccggggatcaccggacctacagcaaccccgcgttccaagtttccgggagcatcgaggaggcatggtacgactcgtttgccatgagcgagtcggacggggaggacgatttccacagcgtgcaagatgatgctttttcgttgaatgggttcgagaacgatgcggcattgagcacgagagatgccaatggggggagcttcaacggaagctcacattcatcggagcagcactacagaaagccgaggtccagcgagctgtcaagggggaatttggagaatggtgtgcggtcctctgtgagccatgaggatgtggcaagtgtttcagctgaggatagtgccacggcggtggaggaaggatact

SEQ ID NO: 12514 - DNA, 657 bp, Oryza sativa
  Clone ID: PAT_MRT4530_18635C.1
atgagcggcgggccgagcttgggacgactgttggaagaaagcgattgcggggaggcggcaggaagaaggcgcctaggacggtggaatcgagacggtggggagagagaacttggctttggtaggggaagaagaggaccatgcacaccggtgacggagctccactacattgcatgtgacctcaatcacgctggccagatatgcggtgcagtcgagcttgccgagagggatcttgttggatctgtatccccgacagtccagccaaaactgagcttctccacatcacgacacatcatgctgcttcttctcccctcaccgacggtcaccatgtcatgctgctcctcacctatcggcccatggcccaaggtagtagcagtgggaagccgaaggagcaccaggacagggaccacatcgttgaaagcgccattcccttgtggaagtcactctggcgcagagttgcaagaaaaggcagaggtcaatgatggaggtggcaaggtcatgctcgatggggttcgtcggacgctgcctctcttcctctgcgtctgtctctgtctcttcactaagaaccaaggagctcagaggcagaggtcagtgacggagatggtgaggtcgagctcgatgaggttcatcgactgttgcctctcttcctccgttgcgtaa

SEQ ID NO: 12515 - DNA, 1930 bp, Oryza sativa
  Clone ID: PAT_MRT4530_18636C.1
atggagaccatccaggagggtgacgtcgtgcctggctccccgcctccgccggtcgcctccgccgccgcctcctccggtgccgccggggatcaccggacctacagcaaccccgcgttccaaggttgggtggggctgcgtgcttggcttgggattgggattgggattgggattgggatggtttccgggagcatcgaggaggcatggtacgactcgtttgccatgagcgagtcggacggggaggacgatttccacagcgtgcaagatgatgctttttcgttgaatgggttcgagaacgatgcggcattgagcacgagagatgccaatggggggagcttcaacggaagctcacattcatcggagcagcactacagaaagccgaggtccagcgagctgtcaagggggaatttggagaatggtgtgcggtcctctgtgagccatgaggatgtggcaagtgtttcagctgaggatagtgcacacggcggtggaggaaggatactggacgactgtggcctcctgccaaacaattgtttgccttgtattgcctccgctgttggtgtaaatgagaagaagagaccactttccacaagcccaactcattccatgaagatgccctccttaaagctctcattcaagaagaagtctggagaagctcatccttcttccacactattgtctacaaaggatttccttgaaaggcctctagcaggttctcaagttcagttatgcttactggaaaagaaaatactgaacagctggtctcatattgatcctggcactttccgagtccgtgggtcaaactattttagggataaaaagaaagagcttgctccaaattatgcagcgtactacccatttggagttgatgtatacttgtcaccgcaaaaactcaaccatatatcccgatatgttcaacttcccgatgttcaaatctccagtaaactcccaccacttttggtggtcaatgtacaggttccactatatcctgcctcattatttcaaaatgaaatcgatggagaagggatgagctttgttttgtattttaggctctccgatgcttactcaaaagaactacccccatcatttatagagaatatcagaaaattagttgatgatcatgtagaaaaggtgaaagcgtttccgatggaaacaaccataccatttcgagaacggctaaagatacttggccgggtggcaaatctggaggaccttcctttaagtgcggcagaaaggaagctaatgcatgcatacaatgagaagcctgtgctttctagacctcaacacgagttttacctgggtgacaactactttgaggttgacattgacatgcataggtttagctacatctcaaggaaaggtttcgaaacatttttggacaggctaaaaatatgcatgctagatgttggtctaaccattcagggaaataaagctgaagaattgcctgagcagattttatgctgtgttaggttgaatgggatagattacacacaatataagccactgatgacacatggggcctgaacatgaagcttactagaacatgctaaccaaaatttggttattgagaggtagccaaattagcccctgtgtagaagcaccatcatctgagcacgtggaattgcacacaagtaacatggacagaggcaatggcacatgtagatctgtatatcattgcatgagttccagtggcctctgctgttgctaatcatgattctagattttagtaaatatcactaattttcctgtgaaagagtaggtttaggtgtacttcgaacttgtgcaggatttatggtgaatatccgctgcttcatttatacatcagtagggtagaatatgaacctggaagcactgtaccacctcacatgaaaaggtagtggttccaacatcagaaagggaaaagaaatatggtcacacattatcatatgcaaaaaaa

SEQ ID NO: 12516 - DNA, 249 bp, Oryza sativa
  Clone ID: PAT_MRT4530_18637C.1
ctcgagcggaatccccctctctccggctaaacctcgccgacaaggagaagcataagtgcctccctgttcgacggcgccggccatcaacgtcgaccttagcacgacctactcgagcgtgggcgtttggctgcacgaccgcgtggagatcatcgtcaacgaccagggcaaccggaccaccctctgctacgtagagtccacggaatgcgagaggctcatgggagatgccttcaagaaccagtgcgacatgaa

SEQ ID NO: 12517 - DNA, 481 bp, Oryza sativa
  Clone ID: PAT_MRT4530_18638C.1
agcaagtccatcatcgtcatcgaggacatcgactgctccctcgacctcaccggcaagcgcaagaacaagaagaagaaggacgccgccgccgccaagaacgacaccgacggcgacaagaaggagtcgccgccatcggatgaggaggagaaggacaaggagggaagcaaggtgacgctctcctgcgtgctcaacttcatcgacgggctctggtcggcgtgcggcggcgagcgcatcatcgtgttcaccaccaaccacgtcgagaagctcgacccggcgctcatccggcgaggccgcatggacaagcacatcgagatgtcctactgcggcttcgaggccttcaagttcctcgccaaggtctacctcggcatcgacgcccaccacctgttcgacgccgtgcgggcgctcctgcgcgacgtcgacatgacccccgccgacgtcgccgagaacctcacgcccaaagccgccggggacaacgccgaca

SEQ ID NO: 12518 - DNA, 1170 bp, Oryza sativa
  Clone ID: PAT_MRT4530_18639C.1
ctacaaaagaatcccttccttgtctttctccgctcgatcgcagccatgccacgccatcaccatcgcgtcccttgactctgccctgtgctcctcgcagcacttcctctggccaaacaccccggagtcgccgaccccgcgcgtctcagaaaataggtcgaagagccaccttgacggagacgcctcggacgtcgtcctcgacaaggcgacgcggccggagaggctgcccaccggcgaggcgatgccgcccgagcgccacatcctcgacgagctgagcttggcgcccccctggccgagcctctccgccgtcggctccggcgacgccgtcgtcacgaaccgcttctcccggcggcgcttgctctcgccgaacagcccggacaggtcgagccccggcgacatggatatgatgtcgaacgcgttcagtggcggcggcgcctggaacgccagctcccgctccggctggccgccgaggaggctgccgagctgcgagtcgaggctgagcgagcgcttgaaccacgggtgggtggcgagctcggcgacggcgaggggggtggccgggttcgggtcgaggaggcgcgacacgaggcggcgcgccggctgcgacacccaccgcgggagcgcgtactcgcggcggtgcgcctcgggcgccgcgaacgccggggtgccgcacgcggtgtgcaggcgcccgtcgtcgcggagcgagtccgggagcgcggcgaggccgaagtcggagaccttgaggttgccgtgtgcgtcgaggagcacgttctgcggcttgacgtcgcggtgggacacgccccgcgcgtggcagtagatgagcgcggacaccagctggaggaacacccgctgcgcggcgtgctcggggaggcggcgcgacggcagcgaggcgagccttgagcgcgtggcgagcacctcgtggaggcggaggacgttggggtggcggaggcggcgcatggcggcgacctcgcggaggacgcgggtggccatgccggcgccggcggcggcgaggtcgggcttgtcgagcaccttgacggcgacggggtcggcgccgggggcgagggagcgggcgtggtagaccttggcgaaggtgccgcggccgaggaggcggccgagctcgtacttgccgaggagcggagcgcccttcttggccgccttgctcttggtggcggccat

SEQ ID NO: 12519 - DNA, 3918 bp, Oryza sativa
  Clone ID: PAT_MRT4530_1863C.1
atgcagaggtggatcctggcagggatcctcgggtgtttacgagcgaaagttgaagaatatgagggcgagttagctgggcgggacggcggcggctctgaggtacgtctggacaagaagaagcaacaacagttagtggtagaggagccgctggctacgccgtgctccgccgtcgctccagctgtcgctgccgctcgggaagaccgccgtcgtcatcgccaagtcgccgccgtcctcgtccgccctttcgcagccgtcgaaacccgccggagcttcgtcgccgtcgacaacccgaaggtagccgccgcttccttctcgtcgccgtcgtcgtccgttccttttccgccgccgttttggtcaccggtgtgttcgccgcgttgtcctctacgtgctggtgccctccgttggtgccgtggtgccgccgttcgccggcgagtgtccgccgcccgagccgtcttcttcgtcgagccgccgccgtcgtcgatgccgcgttacaagcctgagtacctgtttggtgttgagggttttgtccaggagttgcatacgatgtcctttgtcattggatttgggactgcccctttttatgcccagattcctcatgatcgtcatgaagagaagtgccgagtcaaagtcaccttgaacagcaatagtgaagaggtcccctcagtaatgttcgaagctggaggaagaaactacatccatgcatgtcaggaagtggcaaggatcgccataggagagctccgtgatcgctacagtgatcaattggccgacactgagtatcgctaccatcctcgccaacctcagggaagtgaccgtggcagttaccttgagactgaaggaattgagaatgatgttaccacgaaacatttggttgagatgttgtgggctatggatgaaagtcgtgcggagactgtgttagcagctcaagatcgtgaagatcggaatcgtggtaagatttgcaagctagaagacaaggtggatcgtttggagaaggaattagccgcattgaagggagaagcaccgccgcagaaggccaagattcgtcttaccgcaaggaagagagctctattcgtccctcgctatcaactagcgccaaaggttcgtgtggtggagaaagaagttgctccagctcaagcggatcctccggtcatcatcataagtagtgatgaagaagaagaatctaagcgcaacaattccaagattgagtgggtagcaactcaagatgatgaagacgagccttcaatcgacctccgatgcttggaagaactagataccactaatcctgttgaagctagtgattggctgcatgccatagagaagaagttggatttacttcagtgtactgatcaggagaaggtctcatttgcatcacatcagttgcatggccctgcatctgaatggtgggatcacttccgccttaacaggactactgctgaacctatcacttggcttgaattcaccgctgctttccggaagacgcatataccatcgggagtagtgtctctcaagaagaaggagttcaggtcgctttcccagggatctcgctctgttacggagtatctgcacgagttcaatcgtcttgctcgttatgctccggaagatgtgcgcaatgatgaagagcgccaggagaagtttttgggaggacttaatgatgagctttcttacccactcatggttggagattatcctgatttccagaagttagtggataaggctattcgtcaggaggacaagtacaatcgcatggagcagaagaaacgtcggattgctcaattcaagacacaacagggaaataatcagaagccgcgtcttaatttaggaccccagtccatgccacagggaggttcttcgtctgttgttcgtccgcaacgtcagttcttcaacaacaatgctggcaacaacatccgtaatcaagcttcacgtcctgttgcagctccagcacagcaacaacccgccaagagggagcaaggcagcaagcccgtggtgtgtttcaactgtggagatccaggacattatgctgacaagtgtggggcccacctgtcgggcccgtctccctcctcccgccgatcccggcgcgccgccgcgcccgcaaccgtcgccgcgcccacgtctccgccttccccggccctcgtcgaccacgcccgcgcgtgcgccgcgtcccccgcgcccacttccctctctctcccgctcgcgcccgcgcccgagatggccgggattcgaaaatcgaatcccgcctctctctcctcccccactccccacgtcggccggcgattcccgccgctcccggccacgctcgccgccgtcttgcgccgtcgccgccgttcgattcgcgtggccgagatccaccccgtccacccctcctccgtcgaagtcctcccggagcccgtcgccgtcgtcctcccgtctctcatcgttgctgttcgccgtcgctcctccctcgcgccggccgagcccctcggccgccttcctcctttccccgtgaaccgccgcccggtgggccccgcttgccagccgcgcccctcccgccttgtgccactgcccgagttgaagtccttctcagttgaagatgtctcggagaggttggtttcgtcgctgccgtcaaggtcaagactgaaccagataactttggaagagattcctatagtccgggagtatcctgatgtgttcccagatgatttacctgccaatgagttggcagaagttaagaggcaagtagatgatttgctacagaaaggatacatcagaccgagttcatcaccatggggagctccggttatttttgtggaaaagaaagaccatactcagagaatgtgtgtggactatcgtgcactaaacgatgtgactatcaagaataagtatccactacccaggattgatgatttgtttgatcaacttaaaggtgccactgttttctccaagatagatcttcgatcagggtatcatcagttgagaatcaaagaggaagatatacctaagacagcttttaccactaggtatgggttgttcgaatgtactgttatgtcttttggacttaccaatgcccctgctttcttcatgaacttgatgaataagccctcgccttcgcctctcgtcgtcggaagagctctagcgccgtgtgccctagctttgccgtcgccgccgccgcttcagccgtgctccgccgtcgctccagctgtcgccgccgctcgggaagaccgccgtcgtcatcgccaagtcgccgccgtcctcgtccgccccttcgcagccgtcgaaacccgccggagcttcgtcgccgtcgacaacccgaaggtagccgccgcttccttctcgtcgccgtcgtcgtccgttccttttccgccgccgttttggtcaccggtgtgttcgccgcgttgtcctctacgtgctggtgccctccgttggtgccgtggtgccgccgttcgccggcgagtgtccgccgcccgagccgtcttcttcgtcgagccgccgccgtcgtcggaaggtgcgctgcagtggattgtgttatgcgaggggtatcgtcacaactcctttccgagataccgtggtggtattgaggcacatggtgacatgatgtggggttgtgtcttgtgggtacagtggtacacctctggccagagtaaaactattcgaatagccgtgcccgcggttatgggcggcggcggctcgtctagcgggtccatcagagtgttgatgttggctgtcgaggaccacgccgttggctcacactccgccgccttcgactcgccgaccgccggcgtcatcgcactccacttagcttggattgtctccaccgcgttcttcgctctatccaccattgtgtcgccccgaacgcccaccgagtcctcattgtcgtcggcggcggcggcaccgggcggggacagggatggtgccgctcccggctgcctcccatcgaagtcgcgttga

SEQ ID NO: 12520 - DNA, 1980 bp, Oryza sativa
  Clone ID: PAT_MRT4530_18640C.1
atggtggtggtcactggccaagcaactttacaagttgcagcagggacgctccccaggcagcgctccgactatcccatggccaacctctcgacactgtgggtcaacaatagaaacaggctccctgacagcatcacatatgacgacgggtctatggtacgcagcatactcctcttgtcaccacaaaccttttatggcccctcctttgccgcagggttcttctgcaccccaccctgccgagaattcatcttcgctgtcttcattgtcttcaccagcagcggtgctttgttccctgtagcggtaaacgaggttatctggtgtgccaacaggggaagccccctaggagaggatgctacccttgagctgactggagatggtgacctcgtcctccgtgaaaaagccaatggcagactcgtctggtcgagcggcacttcaggccgatccgtgcaaggcatggagatcactgagaatggcaacctggtgctgtttgatcagaggaatggaacagtgtggcagtcatttgatcatccaacagacgcattggtcccagggcagtcactgctgcagggcatgatcctcaaagcaaatacctcccccacaaattggactgagagtaagatatatataactattctccaagatggtgtatatggctatgttgaatccacaccaccacaactctactataactatgtagtgagcacaaacaagagcaagagagttccaacaacggttaccttcacaaatggctgcttcagcatctttgtgcagtccacacaaccaggaaatccagatggccgtatcgcattgccagaagctaagtccatccagtacataagaggtattctccttgaaaacaatacaacctcaaactgctacttacaactctactgcttacctcaaagtgcaacttactccctcttcttctgcccctacacaaaacaaaagttacaaacaaagacaattttagtttccatactcgcagcaattggtgctcttattttggttgttgttgttgctatttatgtccaaaagaggaggaagtatcgagaaagagatgaagaattagattttgatataatgcctggaatgccaacgagattctcatttcaaaaactgagaaaaagcactgaagacttcagtaaaaagctaggtgaaggtgggtttggatcggtctatgaagggaaaattagcgaagagaaagttgcagttaaacggctggaaagtgctagacaaggaaagaaagaattcttggcagaggtcgagactattggcagcattgagcacatcaatcttgtcagactgatcggagtttgtgtagagaagtcaaataggcttctagtatatgaatatatgtcaagaggatcacttgataggtggatatattatcaccataacaatgcgcctcttgattggagcacgaggtgtaggataattctcgatattgccaagggtttatgttatcttcatgaggaatgcaggcgaaaaattgctcatttggatatcaaaccacagaatattctattagatgataacttcaatgcgaaattggcagattttggactttctaagctaatagatagagatcaaagcaagtttggcgttgttcttatggaaataattagtggaagaaaaaatattgatatctctcagccagaggaagctgttcagctgatcaatttattacgagaaaaggctcagaacagtcagttgattgatatgattgacaagcacagtaatgacatggtctcacaccaggaggaagtgattcaaatgatgaagcttgcaatgtggtgcttgcaaaatgatagtgaccgaaggccttctatgtcaatggttgtcaaggtattggagggtgcaatgagggtggaaaattgcctagattacagctttttcaatgcaaattcagtaatatctgttcaaggcattccatccacatattcagccccacctcgggcatcaatattatctagtccaagatga

SEQ ID NO: 12521 - DNA, 279 bp, Oryza sativa
  Clone ID: PAT_MRT4530_18641C.1
atgccacacgtgaaacggatcctcctcctctcctctcctctgaactgtcctggctggctgctgctttcacgtcaggcgccagttgcgtttgagccgctcgatcggaaagctggaagggcgcttggaatttcgttctcgtcttcgtcttacccgtccatgactcgatcaaatcgcgcctaccgcctagcgactcatgcatggttgggtccagggcaattcagcgtggagagctcatcagcctgcatctgcaagcccggacctatgccatttgatgattag

SEQ ID NO: 12522 - DNA, 435 bp, Oryza sativa
  unsure (1)..(435): unsure at all n locations
  Clone ID: PAT_MRT4530_18642C.1
ctagatggcagggatgttgatggaaagccgcattcttgtggagtttgctaaaggagtaagcagttctttggtggcattcctaagcacatcgtggtgctgntggtggttcacgtgaatatatggggagaggacctcctccaggaacaggtcgcccgcatgatgcagccgcgcgctgtcacccgctgccgctagccctatgcggccgtgcgcgtccaccgctttccactgcctgcagccgccgacgtcgcccctccacttgctccggccgcacgccgccgctcgccctttgtggccgccgactgccgccaccaacgccgcccctctgcctgctctggccgcgcgccgccgcccgcagtcggaatggctccggtcgcacgcccgctgccgcccgccgactgcagccgtcgagccattcctcctcctcccccgtgccat

SEQ ID NO: 12523 - DNA, 297 bp, Oryza sativa
  Clone ID: PAT_MRT4530_18643C.1
atgccactgctccgagcacgaattgggggaatcaagtatataggcgacacgctgctccggtgcctcccgctggcgcctataccaaagagctcaatgtccgaaggaggaggagaaggtgaagatggtggtggtgatgatggaatcttcgtgatccgagctcccgagagaccacctcgacctcgtggtggcagctgcggcagcgttgatggtgctcttggtggcggctgcattccacttacaccctctccacgcgcgcccggtggcgcgcgccgcgacggccggaccgctgccgccggc

SEQ ID NO: 12524 - DNA, 229 bp, Oryza sativa
  unsure (1)..(229): unsure at all n locations
  Clone ID: PAT_MRT4530_18644C.1
tagtcactgctcttgctgctgctgctactgcttgcttgcttgcttccctccgcttgctcagctggaaaagaaaatctgaatattcgcaagaaactgatcttgttcattntaggcattcattcattcattcctgcagctagccgtttcgattctggggctataaatcggcgccttgctgggttgctcttcctactcgtgcttagtttcttttgcgctgtgctttgctagc

SEQ ID NO: 12525 - DNA, 692 bp, Oryza sativa
  unsure (1)..(692): unsure at all n locations
  Clone ID: PAT_MRT4530_18645C.1
tgaattgggcctgaggaggtgtgccaattggccagggagggtttaattattggttggtggcgcccaaaatgtgccccaccgtgcttgcttgatgtatgtgtgctgctggaaattgcactttttgtgtctgaggggtgaaagcctggttgaagtgatatgctggctgacagaatgggatagtgctatggctgcaacaatgganaccaatgcaatgtactgtggtgacctgcaggctgcactgaaaatttggatggctgttgtggctatgctgctaatgattgttgaatgcccttgatggctgcatggcaactgtgaacctgtgtgcaatgatgcagtggctagtgacaatgccaactgtgttggatgtgatgtggatacgtgatgaatgcttggagtgtgttgcaacctggatgcaatgacataggaacctgaatgtgtgaagtgctgcatgctgtgtgtggcanctggactgctggtngtgatgacactctgatgatgatgtggacctgagggaaccatggaaaagtgtgtgcaaaatgtgctggtgcagatgatgatggtgttgcctgaagttttgatgatttgattaatcttgccagctaanaatccccnggatctcagctaanacccctcttatataattgtttacggctattccctcncagaangtccaaaaaaaaaaaaaaaaaaaa

SEQ ID NO: 12526 - DNA, 429 bp, Oryza sativa
  Clone ID: PAT_MRT4530_18646C.1
atgggaaactgcaactgcttggagagggcgagggcgaaggtgacggcgtggggcgcggaagagggcgacggcggcgaggacgagttctggggcgccacggcggcggagttctccggcggcggcggcggcggggcgcgaggtggtgtaccgtcgacgaggaagaaagagatcatcaaggacggcggcggcggcggcgagggttcttcttcgccgacgaggcgcgtgaagatccggatgaccaaggggcagctgcggcggctgctggccggcgccgggaggggggcggccgtcgaggacgtcgtcgcggagatcatgagcatgggcgacgtgcacgtcgagcccgtgaagccgaagaagggcggcggcgccccccggccgccgccgtcgccgtccaagctggagccgatacaggaagacatggacgagtag

SEQ ID NO: 12527 - DNA, 267 bp, Oryza sativa
  Clone ID: PAT_MRT4530_18647C.1
atgtcgacaacaaggcacgtcaaccacgaccccgtttcggaccagcaatttgtctccactagaagaagtctagaacagcaaaatccctcgacgacgacgaggccgaggtggcgccggcggcggagcagtcgagcagatagtgcaaacagtctcgcgcccgccacgccacgccacgcccggccatggctcgcggtcgcctcgagcgctcttgaaaatgagaaggagcgaaaggatactgagattcttagttttaagagcagggagaag

SEQ ID NO: 12528 - DNA, 1746 bp, Oryza sativa
  Clone ID: PAT_MRT4530_18648C.1
atgactctcaacggcttggagcaacctgacctcacctgctggctaatggaccgaacagacccaaaatcgatgaccattgacatatctgagaataagaagatggtcataactccatggaaggttaaaactgtattgggggtcccattgggaggggaaccattgcaattaccagaccaagatataatgtcagatgcactggcagacttggctattgagcttgatctcccccccaaatccgacataacggcctctaggttgattgaagagatcaaaaataggcccaaagacccatctatggttaggtactttataatggtcattgtgaacaagatgctgctgccatccactggtctgtatatcaggcctaaggacgcatggattggatctgacactcaaaaggtagcaaggatcaactggtcgaaggctatttttgatgccctccacgacagccttgtactatggcacaagaacaaaactggcccaaggcagcagacatatatacgctgctgtgttgcattccttgtgctgttgtacatcgataacctcaaggtgccaaaggattcattgacagttgatcgctgccaaactcctcgcatacagctctacaccaagcagcttgtggaggatatttcgcaggaggatcgtgtcactgattcatccggaaactatgtgtttggcaacctccctatgagtggtattcttggttcatgctacagccaccctgactatgacaaggaaaaagaaccacatggggacaactctagcaccccctttgctgatgagttggtatctgcggtagaaatttctttccccagcatgtttgacaccgtaggcccccatttaagtggtctccaagatgagcacaagcagcgcgtactggatgctcttggtgaatatgatcgccagtcgaagggtgaaagccgcaatcagccaccattgggtccacaaccacaaccagcctcacattcacaaccagacagccaacatggcccagttgcatccccaaccagcgaggaagcacaagaccaccacattcacaacaccccggacatttcgcctaccaactccccagcaccacagccctgtaggatcataacactggatgttgcgttcaatacgacaccacagatcacatccactgaaccacaccctcatttaccaggggagctttttccgaccatggacaagactaccattgctgatgaaaatcaagccctcactcctcagccagatgcggattttcaaggtggctgcgatgttggtattccactgcaagatggttttgaagggcaccacgatctaccagatgtggacgatgaacatggcattgagactgacacctccatgcaagttaacgtgaccaccgagggcacaaacacagccaaatcgccctctgcacatcaaaatgatggtcaccaccatcatccagatgcagatgttgaaaacaacagcaattttgacatccccacgccaggttttctgctaatctatccatacagctgggagaccgatacgggggtgggggttaccgagggtggagggggatggggcgggggtggggtgggggctcgcgtgcctgccgtcgggaaccgtggccccggggccgcgaccgcgcggggtggcctcgtcaggctctcctcgcggcgggcccggtccacggccggcgtggcggcgccgtcgcgggaggcggagtcggccgcctcgctgggcgacctcacccgcgtcgacttccctatccttgaccag

SEQ ID NO: 12529 - DNA, 1650 bp, Oryza sativa
  Clone ID: PAT_MRT4530_18649C.1
atgaagcggaagggaaaaatgccagagaaggttaggagtgtcaagttcataggttcgcaatcccagccgagcgagggcccaactacccgctccaagcgagctcgtgcagacggaggaagtcaacaaggcgccgccaaaaaacgtggccgaaagaaccaacaggatagagccgtgaagcacgctgcgcttgttgagccgccagcgacaaagcaatccgtctttacacgctgcagcccgaagtttgcaaatgatgcatgtcgtgcgttgtcgccgatacaccgacaagctttggcagcgcttggtctgggtgagcttgcaaagatgactctcaacggcttggagcagcctgacctcacctgctggctaatggaccgaacagacccaaaattgatgaccattgacatatctgagaataagaagatagtcataactccatggaagatgctgctgccatccactggtctgtatatcaggcctaaggacgcatggattggatctgaccttcaaaaggtagcaaggatcaattggtcgaaggctgtttttgatgccgtccgcgacaggcttgttctatggcacaagaacaaaactggcccaaggcagcagacatatatacgctgctgtgttgcattccttgtgctgttgtacatcgataacctcaaggtgccaaaggattcattgatagttgatcgctgccaaactcctcgcatacagctctacaccaagcagcttgtggaggatatttcgcaggaggatcgtgtcattgattcatctggaaactatgtgtttggaaacctccctatgagtggtattcttggttcatgctacagccaccctgactatgacaaggaaaaagaaccacgtggggacaattctggcactccctttgctgatgagttggtatctgcggtagaaatttctttccccagcatgtttgacaccgtaggtccccatttaagtggtctccaagatgagcacaagcagcgcgtactggatgctcttggtgaatatgatcgccagtcaaagttaagtgcagatgctattgccaaacaaatcaggcttgttcagacatgtcatgcgcgtgtcagtgaccatatcgttagcatcatcaggggtgaaagccgcactcagccaccactgggtccacaaccacaactagcctcacattcacaaccagacagccaacacggcccagttgcatcgccaaccagcgaggaagcacaagaccaccacattcacaacaccccagacatttcacctaccaactccccaccacctcagccttgtaggatcataacaccggatgctgcgttcaatccgacaccacagatcacatccactgaaccacaccctcatttaccgggggagctgtttccgaccatggacaagactgccagtgcagatgaaactcaagccctcactcctcagccagatgcggattttcaaagtggctgcgatgttggtattccactgcaagcaggaattattgatattaccatgactttcgagggcacatacacaacccagtcccatactgtagatggtattgaagggcaccacgatctgccagatgtggacaatgaacatggcattgagaccgtcatctccaagcaaggttgcctgcgtttccagtttttctttcccactgcatag

SEQ ID NO: 12530 - DNA, 684 bp, Oryza sativa
  Clone ID: PAT_MRT4530_1864C.1
atggcgacggagacttacaagataatgcacgtgataccgccactcatcctccttgttttcggacttttgaaccttgagaaatccagaagacaaaatctattggggaatgcaattaacaagcgaaagaaggctaggaaattcaagtatgggagcggagcaactatggaggccatttgcagagaagcaaaattaaatgaacgaaatccggaggggaggggaggggaggggactagaaccctaggttggattggagtggaatgggagataggggcggaccttggcctcgtagaggagggggccgtggcacggcacggcgacggtgagagtacgacgcgatgcagcaatggtgggtacggcacggagacggcgaagacgacagcgacggtcgtcccacctcctctccctcttcccgtaggcctcgacgccaagggggagggtacagcggccataggcgatgacaacagtgatgccgcttcccggctaagggctggatgcaccccgacggctcacatcggtggcttaatgctccatgaatccggacggcgatgtctcatcgtccttgtccttgccaccgccgctgctgttgttggcgttggtgttggagctccccatatgccaaatcacccaatcttctttcttgtagctggcggcagcggacagtggacggcggccggcggtgggtaa

SEQ ID NO: 12531 - DNA, 3817 bp, Oryza sativa
  Clone ID: PAT_MRT4530_18650C.1
atgccgaggaagaacgtcgtcgcgtggacctcggtcatgtccgggtacacgcgcaacgggcgccccgaggcggccctagcgatgttcgcggacatggtggagtccggcgtcgcgccgaacgacttcgcgtgcaacgcggcgctggtggcgtgcgccgaccttggcgcgctccgcgccggggagcaggtgcattcgctcgccgttcgggcggggttcgccggcgacgcgtggattgggagctgcttgatcgagatgtactcgcggtgtggctccttgccggcggccaaggaagtgttcgaccggatggattcacctgacgtggttgggtacacttcgctcatctcggcattctgccggaacggcgagtttgagctagcggcggaggctttgatccagatgttgaagcagggattgaagccaaatgagcacacaatgacaaccattttgacggcatgcccaagggttctcggtcagcagatacatgggtatttgatcaagaaaattggtttgcggtcgcagagcgtctactcgtcgactgcactgatcgatttctattcgagaaacggtgagttcaaactggcaaaggcggtttttgacagtctccactgcaagaacgtggtttcatggtgctccatgatgcagctatacatcagagatggaaggctggaagaggcattgcaagtgttcggtgatatgatttcagagggtgttgatcctaacgagtttgcactatcaattgttcttggagcttgtggatccattggtctggggcgtcaactgcactgctcagcaatcaagcacgatttaatcacagatatccgggtgtcgaatgctctactgtcaatgtatggtagaactggtcttgtcgaagaactggaggccatgctcaacaagattgaaaatcctgatcttgttagctggaccactgctatttctgcaaacttccaaaatggttttggtgagaaggccatagcattgctttgtcagatgcattcagaaggattcacaccaaatggctacgccttctccagtgtgctgagttcttgcgcagacgtggcatctctggatcaaggaatgcagttccattgcctggctctgaaactgggatgtgactccgaaatctgcaccggaaacgcactgatcaacatgtactccaagtgtggtcagatgggctctgcaaggcttgcatttgatgtcatgcatactcatgatgttacatcttggaactcgctgattcatggccacgcacagcacggtgatgcaaacaaggcactggaggtattcagcaagatgcgttccaatggcatcaagccagatgattcgacatttttgggagtcttaatgggttgcaatcactctggtatggtagaggaaggagagctgttcttcagactgatgatcgatcagtacagcttcacgccagcaccttctcactacgcttgcatgatcgacatgctgggccgaaacggcagattcgacgaggcactgcgcatgatcaatgacatgcccttcgagcctgatgccctgatatggaagacgctgctggcatcttgcaagctgcacaggaatctggacatagggaagcttgctgcagacaggctgatggagctttcagacagagactccgcgagctacgtgctgatgtcgaacatctacgccatgcacggagaatgggaggacgccaggaaggtgaggaggaggatggacgagaccggcgtcaagaaggacgccggctgcagctggattgagatcaacaacgaggtgcatacgtttgcttcaagagacatgtctcacccgaactctgattccatatatcagatgctaggagagcttgttgccgtgatgcaagattttgacgaacttgaaccgtttgatgtaaggggagggcgtatgatcaaattgcccttgtgtatatatcaaagcccaaaggtttcctcttttggcaggcggcaccactcctcctcatcttccttcatgaatagcggcggcggcaggaggacgcacgttgccgcggtgccgccttcacttcttccccaacaccaacagatcgagaatcatggcgacttaaattcgggctctaatcaagatgtctgggctattctcagtgttgaagttgcatcaaatttgtctaaaagcgttgtctcactcaccttgtctgatggaaacacactgatatatgcatgctcgggcatagctatcgagtgccaggaggggtctggtacaattttcctgacctcggctagtttggtaacagctttctatgatactgaagaagtctatgataacttaaagattgaagtgcgccatgaaggcaatgaagtgctcaagggttatttggcaaaatatgatttagacaagaactttgctgttgtctacaccatggaatctcttgatgttcatattgtacttaccgaaaattcgagggataggtatatcaacaaaaagttagtagctgtagggcgtgacaaacatggcgtattaatggccaaaagtgtgatggtggctggttgtcgtgattcaaacagatctgaagatagcaaagaaattaggttgatctctgaggactgggaaggtggaccgctttttgattttgatgggaaatttgttggcatgaatcgtttttcggttatggatagaacatctgtcctgtcatgggtctcaattctcattattttgaagcattatttgccatccctgcaaaacaggattcttaaacggttacaaaatgtcaaaagagtcaggtgttggcattgtgttatgcactggtatgacccgttttacctttgggttggtgttcttctgcagggatggagagagacccacaggaaaaaggaggtcttttgcatgcacggtttctttattgaatggaagggatgtacaactattctgacatctgcgagcttggttagagagtctgatgatggaaacaagattgatgaaaacttgaggattgaagtgttgcttccaaacaaacaacttagagaaggaacactacagcattatagtttacactacaatgttgctctagtgagtgttaaggacaaggatttccatgctcgtccagcaaatattcagcttgatcataatcatggacctggagtagcagccgtagggcgttgcttcgaatcaggcaaattaatggctgcacggacggatgttgttgattggtcgggcacacttgattgtgagatgttccttatacgttcctcatgcaaaatcactaaggcagggattggaggacctcttgttgacttagaagggaaagttattggcatgaacttctatgataagaagataggaaccccttgcctgccatggaatgtgattctcatggttctggcatgttttgagaaagaaaatagcggtggtgaagttggcagtggtagtgatccatgtggtgcgcctggctggaaaatccctcgagatgagagtgtcaggctaaacaggtggcctgtgcccctgccatattggcgtcctcatgacgatgtggatgaacaagaacccccagaaggctgtgagcacatctacacatacataaatggtgaaagatagtgttacagatttagacgccagatgtaagttctactcctctctctctctctctctctctctctctctagtagccctgtaatgttactacatgtcccttgccgtgttttgttttggtgtgtatcgcactgggagttgaagaacattcagctatggtgatgctgagatgttaaatacaatgttaagtaaaagtagcgtgtctatcttggatatatcctatttgtttttttaaaaaaatcccaaagtatttggcaggacgggaagtgcc

SEQ ID NO: 12532 - DNA, 915 bp, Oryza sativa
  Clone ID: PAT_MRT4530_18651C.1
ccttttgacaagaagcagtttgtgaccttcatgaagcgctacatcaagaacctctccgccaagctggatgcggaaaagcaagaggaattctttaacagtgaagttcccattttttttttaagtttccaaacaactctgatcacttttagcagtcaacacaattggttgacataaatgttgcaagttttgccagtctatcattttctcccccaccaggcttctcctaaacttcaaagcatcccagccagcatttagaacttttgtctcagttacttgttttgacaaggaaatattgtagagtctggggaacttctctgcgagtggctttcctccaatccaattatctacccaaaacatggtattctttccatcccccaccttctttttacagaatctataaaattgctcccttactcccataatcccctgccagaaggtgttcccctgttctattctttgaattttagataatgtttatcaataactcttgcggttctaaaacatgaagaaaatatttctcacgattttacaaattataaaagcttttattcaataccttttaatttacaaaagtaagatttacagagttaagtcttcagtagaaaagtacatttgacaaaagagtacacttctaatagaacatttggcaaagtctatcatacatgaatacctctccccgttgagaatcgtacgtcatcgtacgagacctgcacctagtgctttgatgacttcacgcaggaagacgaagatgctctaacagagagtaagacggtcgcgcatgtgaccgctaattgtcaactaaagacgtgacacttaattagactgatacaacgggtaccgatgaattccaaccccatccatttgcatcgccagacgaccaatgactttatctagagccaagctcagcgatcgacg

SEQ ID NO: 12533 - DNA, 249 bp, Oryza sativa
  Clone ID: PAT_MRT4530_18652C.1
atggcggcgtcggcggctcacatccagggcggggaccggaggacgtggagctccaggctggcacgacggggcagcggcgagtgggcggcgccgttgtccgagggcggaaggccacacccgtggccgtggctggcgacggcgcatcctccagctgagcggcaacaggacggccttgagctccttcgctgctactgccggtgcgacatggcgtgtcgttcagccgttggcactggccacgccgcggattga

SEQ ID NO: 12534 - DNA, 1803 bp, Oryza sativa
  Clone ID: PAT_MRT4530_18653C.1
gttggttaaagcatgcattattatggcgggttggtgttttcctactccaaggagggagcccccggcccaaccttcctttacttttttcatgggctgaaggaggtcaagtgttgagcggttccttctgctcgacaccgccgagagcgatctaggggccggaaaaaaaaatacaaagaataaacccaggcgccggccgggctctctctccgtccgtccgcgccgctactcccccctcgccgagagagctctagggtttccgctgccgaattttttttttaattcggggggagagatttgaagaggcggcaccatgttggtctaccaggatctgcttaccggtgacgagctcctgtcggattcgttcccctacagagagatcgagaacggcatcctctgggaagtcgatggcaagtgggtcgttcaaggagctattgatgtggacattggtgccaacccatctgctgagggtggtggtgatgatgagggtgttgatgaccaagctgtgaaggtggtcgacattgtggacaccttccgtcttcaggagcaacctccttttgacaagaagcagtttgtgaccttcatgaagcgctacatcaagaacctctccgccaagctggatgcggaaaagcaagaggaattcaagaagaacattgagggtgccaccaagtacttgcttggaaagctcaaggaccttcagttctttgttggtgagagcatgcatgatgatggcggcttggtgtttgcctactacaaggacggagccaccgacccaaccttcctttacttctctcatgggctgaaggaggtcaagtgctgagcggttccttctgctcgacactgatgttttatctatgcagtccgccgtatttttggtctagtctatggttgtcagttgactcgatatggtctaatgttggtgtcggaaacaactatcgtttgcttgttatggatgttgagatgagtccttttaaaaaaacctccggattattggattcatgagctccttaaatgtttggaacgatattaatttgctttgtgatggctggagaaagataatgatgaaattgttgtgctagctaaataaaaaaaaaaaaaaaacaagaagagtttttgactagttgctatagatttacagagttaagtcttcagtagaaaagtacatttgacaaaagagtacacttctaatagaacatttggcaaagtctatcatacattaatacctctccccgttggtaatcgtacgtcatcgtacgagacctgcacctagtgctttgatgacttcacgcaggttgtcgttgatgctctaacagagagtaagatggtcgcgcatgtaaccgctaattttcaactaaagacgtgacacttaattagactgagacaacgggtaccgatgaattccaaccccatccatttctatcgttagatgaccaatgactttatctaggttcaagctcagtgatcgacgaatgaggccccgaaggtaatggaacgtccattgtttccgtgtagctcctgttcctgccaaagatatatgccggcctgtagggtgcttgcagagtgacggtgccactactgagcataaggatgatcgctgacatcggcggccggtccactgggtttcgctggacgcacagaagcccaatgttgatgcatttcaggatatctcctctagggtagtggttgcccagagaaggatccacaatctctgtaactgttccctcattccagtgcctccacacaagactgaagagatctacaaaaaaaaaaaaaaaaaaaaaaaaaaaaaaaaaaaaaaaaaacacc

SEQ ID NO: 12535 - DNA, 478 bp, Oryza sativa
  Clone ID: PAT_MRT4530_18654C.1
ttttggatctcctatggtgttttcttccgcggtttggtttccggtgtgatttcggggccggttttataacaccacgcatgccacacgctcgcacgcgcacgcacgaggacgaacgacgaacgaatgcacggacgacacctccagcttcccgcctccgtatttccttcgtttctcaatccatttcccctctcattacacatccaatccatcgccggaatgctgccggcgctgcctcccggcgtcgccgctctgttcggccgcagccagccgcatggcgcgccgccgctccagggcgccctagctttggccgtcgccaccctgggactcctctcgcctcactaaacctcaccaggccgcctcccgcaccggagtttgccggagtcgccgccaccatggccgcctccgcctcctattactgcccgccgccgccagcctcgccaccggcgcttctctcgctgccgaccacaaaaacggaatc

SEQ ID NO: 12536 - DNA, 107 bp, Oryza sativa
  unsure (1)..(107): unsure at all n locations
  Clone ID: PAT_MRT4530_18655C.1
ctccctccttattcaaccatgggtaagaggaagacgcacatcaacattntggtcattggccacntnnactccgncaagtggaccaccacgggccatctaatctacaa

SEQ ID NO: 12537 - DNA, 443 bp, Oryza sativa
  Clone ID: PAT_MRT4530_18656C.1
ggagtaaaatagacgaagaaagaaataacgctagcacagtagtatattctctccgccgtcgccgacgagatccggttcgccgccgccgtcgctccggacttcctcccgtctcggcgtcacccccttcggcttcgccgtgtcgtcgccgaccccgtccgcaccttcgtttcgctcgccgaccgccggagctccgtcgccctcgtcatcccgaaccgcgccgccgccttcctccgctccggccgccgttctcgtcgtcgtcgttgtcccggggtgagccgtggaccgtccccttcgtttcccccttccctcctctctctcgggtgccgctccgccgcgccgttggtcgccggcggcgaccatcggggcgcgggtgcgccgctcccgtcggccgtgccggcgaggccgcctacaaactgcctcccgcggtctgccaattggtcccg

SEQ ID NO: 12538 - DNA, 369 bp, Oryza sativa
  Clone ID: PAT_MRT4530_18657C.1
attgtggagtccatggagaacaaaattaacaaaaatttgagctaaaaagggagcaagaaacaagacaaaacacaggataaataaaagggagaaagaacagtacacaggaagacgcggcaaaggggggaaaaaaaacgggcaggcaaaagccccacaagagacaccttggggcggacatggcgacaccgaggcggaaacgggggggctaaagggggacttttacacagaaaaaagtacaccggggaaactacggggaaaaaaagcaggcgggggggaaaaaatgggggaaaaattcgcgaaaaggttcgtgaaaggagaaataacgggggaaagggcccgaaacatcagccccattccgaaggggggggg

SEQ ID NO: 12539 - DNA, 445 bp, Oryza sativa
  Clone ID: PAT_MRT4530_18658C.1
gggaggggccgtccttagtttgtttaacggtgccgacaggatgggaagaacttcttgatagaacgagcagctgcctgcgaaacaaaataatagactttagcgctccaacttatgcaaatttacagcatcaatggcttcacatagctgagtgccacgccatgcgaaactgtgggttatggcgacagcagaacctgaaacatcaacagtatcatcaagttaactacaaggaaccgtaaaataggatcataaacatgttcatctatacatagtataaaacatgcacactctacaaatggtctgtatctttgaggtatgatgagctatacgggtgcttgttttgcattgtttttagttgtccatctcatgacaggacagtggaacgtggtgcgccattccattgcttgaggcattggagcacggggtcgatgtgcttgcactggctgat

SEQ ID NO: 12540 - DNA, 776 bp, Oryza sativa
  Clone ID: PAT_MRT4530_18659C.1
agctaatcgagatcaaccacaccaaattaatcaagctcagttcatcgcagatcgatcgatcgatcaacatgtcggacaagtgcggcaactgcgactgcgctgacaagagccagtgcgtgaagaaaggaaccagctatggcgtcgtcatagttgacgccgagaagaggtacatacatactggcttctcctccccttcccatccccaatacctcttaattaactctacaacaactcctatatctaagaaaacccaaattaaatggagatgtgacataatcccaaattcgttgtactatattataccatatatatcttgatctgttcagttttttttagggagtacagcttttgttggaattaatgaatgggccttagcccactcgaagattaattctttggaaaatcacaaaagcccacctcatgggatggcatgcatgtggagtttagtaccaccttgcttattctaggagagggggacctccttaaaagggaggatgccctcctagccacttgaagcatgtgtggtggagagaagaggggaaacacacgcgcgcgcgcgctcgttcgactggcaggcagggcaggcggcgcgcgtgcacgaaggtcgcgtcgaatggaatggtccgaaaattggcctcctgaccttgggcagatgcagactccttttgcagttttggtttggctgcaaattcggattcggttttggttttggaaaaccgttcggaaaaatccggtggcgtgcaacccggagggggagtcccggataaggtaccccc

SEQ ID NO: 12541 - DNA, 3558 bp, Oryza sativa
  Clone ID: PAT_MRT4530_1865C.1
atgacatcaagcttcgtcgacaacagcgtcaacaccggccccatccaaggagtctctacttcaacaatgctggtgtggactcaagtcggcgaaatcgtcttctcggtttacaccacggtactaatctcggctggtccatcaatgaccggaaacgagaacgccgtggctataaccccgggcgactccatgtcgaaggatcctcccgccgtagcggagaacggaacgtcgacgtcatacgagcccgagaaggttcctagtgcggccaaaccttgtccttccgacaagaaccacgagccgacaaggacaacttccgagacgaagaatcacgacttctcaagctgcaaggtccttctccgcgccatgaagacgccgcttcctaaggtccagcaatcagaaatctctcttaaggatgcagataaggaacaaggagcgacgttgatctcgaatcgatttattggagtaatcaacatcgatccccacgagccgtcagtcctacacttgcttgaagactatggctcgtcatcctccagcacaccacgtgacgtgtttgccatcggtgggactagcacgtctatgcacactaacgcagagacggggaaccaggcgaacgaagagcgaggaggccgctcgaacgaagaccgactccatgataatcgtcacaaccgccatgaccgcgacgatcgcgaacagcagacgccggacgatactggtcgaggacgccgacatgacggtgatgataatggggatcggcgccaggaaaacaatggtggacgacgacagaattctcgagaacccgaacgtcgctctcggaatcggacaccggagccgagtgacccatcgtcatcatcatcatcgtcatccggtagacatccacggaggacatatgatcgccaacaccccaccgcccccagcgccgggtgtagagctttcaaccgttctctacgtgatgtccgatggcccgagagattccgacccggggcaatagagaagtacgatggcagtaccgacccagaagaattcctccaggtctactccacggtaccatacgctgccggagcagacgacaatgcgttagcaaactatttgccaacggcgttgaaaggttctgcgcgttcgtggctgatgcacctcccgccctactcgatttcttcatgggcagatttgtggcaacaattcgtcggtaacttccaaggaacttacaagcgccacatgatcgaagatgatttacacgcgttaacacagaatccgggcgaatctttgagggactacgttcggcggtttaatgattgcagaaatacaatccccgaaatcaccgacgcctctgtgattcgcgctttcaaaaccggtgtcagagatcgctatactaccctggagttggcaacaaggcaaatcacaactactcgaagattgttcgaggtcgtcgatcgatgcgctcacgcggacgacgcactgagacgcaagaacgacaagccaaaggcggggggagagaagaagccagccaaggacgcacctgaaccaagcaagaagaaaagcggcaagagtgggaaaaggaaagctcaagcggaagtcttcgcgtctgaatacgagcgccctcccaaacacccagacccacaaggcagtgacacgaagagaatatggtgccccatacacaagtcggacagacattctctggaggattgcctcatcttcaaaaagtcgctggaaaagcaattggtattgaagaagggcaagcaagtacgtgtcgtcgagaaagccgttgaggcaaccactcaggactcagactcggcatacccagattccgatcttcatgtcttgcacatcttcggaggttccacggcgtactcctcaaagcgagaatacaagaaagtggagcgtgaagtttgttcgacatggcagggggctgcacccaagatgaagtgcaccttggacgcaatggggattccacgaagcgagttgacacccaccgatcaacccttccacggaatcactcctcagtcatcgtccaagccattgggaaagattacgcttcctgtgactttcggccaagcgagcaacttccgaacagagcaaatcacatttgatgttgctgagtttgacacagcatacaatgccatcatcgggagaactgcactcgcgaagttcatggccgcatctcactacgcatatcaagtactcaagatgcctgggctgaagggaacaaccactattcaagggaacgcaaagctgacggtccaatgcgacaagcggagcctcgacatggtcgagcacacgcccagcctacccgccacagccgagccacccaagaaaccgtccgacatgccgggggttcccagggaggtgattgagcacaaactcatggtgcgacccgatgccaagccagtaaaacaaaaactgcggagatttgcaccagatcggaaacaggccatacgagaagagctcgacaaacttctcaaagctggtttcatcagagaagtactccacccagagtggctagccaacccagttatggtgcggaaggccaacgggaagtggaggatgtgcgtcgacttcaccgacctcaacaagacgtgccccaaggatcacttccctctccctcgagacatcctgacaaagccatcagtgaaagaggcaaacgacgaagatagcccagtcgcccccgacatcagctcgggggctacagaggcagagcgcgccgttgccgacatcgagaccacggacgactggcggaccccactcattaaattcataagcagtgacgagttgcccgaggacgatgcagaagccgagaaaataacccgtcaagcaaaaatctactgtatgatcggcaacgatctatacaagaaggcgccaaacggggtacttctcaaatgcgtctcgtccgacgatggcaaacacctcctcctcgatatacatgaagggatctgtggatcgcatgccgctagtcgtacattggtcggaaaagcctttcgacaaggatttttctggccaactgccctcaaagatgcttgcgacatggtacaacggctcgatatactcggtccattcccacgaggacagggcggctacaaattcctgttcgtggcgatcgacaaattcaccaaatggaccgaagcaacacccacgggggaaatcagggccgataacgccatcaaattcattaaagggatattttgcagatatggattgcctcaccgcatcttaacggataacggctcccagttcatcagcgccgatttccaggattactgcatcggactaggagtcaagatctgcttcgcctcagtttctcaccctcagagcaacggacaggtcgagagggcaaaaggtatagtactacaagggatcaaaacccgagtctacgacagactcatgtcacatgacaagaagtgggtcgaagaactcccctcggtactttgggccgtgcgcaccacaccgacaacgtccaacaaggagacacccttctttctcgtgtacttctcagaagccatgctccctaccgagttacgacatcagagtacacgagtacagaagtactccgatgaggatcaggaggaatag

SEQ ID NO: 12542 - DNA, 264 bp, Oryza sativa
  Clone ID: PAT_MRT4530_18660C.1
atgtcattgtttcaactaaccatcattagcatgcggagcagaggagcggcatgcggccagtgcggccgacccgagccgggacggctcggcgcgcggtcggtgaacggcggcgcgcacccgcctggggcggccgaccccggctgggacggcgaagcgcggcggcctcccagcacacggcgcaacggcgcgcggtggcagccggttgcatttgaattcgccctctccacggggagctcgacggaggcgcggtggcggccggaggtg

SEQ ID NO: 12543 - DNA, 648 bp, Oryza sativa
  Clone ID: PAT_MRT4530_18661C.1
atgcgaaaagtcagaggggccctttccccctcggcgcagggcagctctccatccatccgtcatccgtggagtgggcgcaggaggacggcgcccctcagtgctaaccccgtacgtggggcgcccaacgaaagcaaaaaccaccagcttccgcttcccgcgacccccgagtcaaagcagagcagtgtggccactgcccagccacgccacgccacgcgccgccggaaccacaccgtcctcctcttcttcggtctcctcttcccggtgttccccgtgccgtgctacactgcatcatctgcatgggcggcgccacggagacccacgccgcccacccgcccacccgccgtttctctcccgccgccacacgggaaaagcatcgtccgcgcgcgccagtgtacgtgcgtgtgcgtgtgcgtgtgcgtgtgcgtggccgcctgcctgcccggccgcgtttcaccgggaaaaaaaagaaaagaaggcgttgcagaagctttgctcgtcgggcgccgcacgacacgtgtgccacacgctgctctctcggtggaggcagagcgagttcgcactcggcagcatcgtgtattcgtgtcgcaccgtggtgacatgactgccatcgctacagcctacagcgcgggtaggcgcaggcagagcccc

SEQ ID NO: 12544 - DNA, 406 bp, Oryza sativa
  Clone ID: PAT_MRT4530_18662C.1
ggacgggtgtttgacccaacaacaaatgggggacctaaagggaacttgttccttgtttaaaacaattggaactgtaacaaaacccttgaacaaaaagtgaaaactgaaaaaaaaaaaaatttttatacccttatacctacaaaaaatttacatccggtttgtttctaaagtcctttttttttttttccagaggcaaagtttttttcacttgaagcatgtccaaactagtaatagctaaatagctaattactagctttttgtacatccatacattacaggggaccgaaaaacagggatcgatcgggtttaccactttaggtgtaaataaaaaaaggcaaaaattcttccagcgaggttgccacggggagggcccaaacaaagggcgccacggggggggggattagcc

SEQ ID NO: 12545 - DNA, 2409 bp, Oryza sativa
  Clone ID: PAT_MRT4530_18663C.1
atgaggcgttcgccgcgcgcggctgccgcggcggtgctgccggttttgctgccgctgctgctgctgctgctgaattgggcagcggcgccggtgggcgcggcgacggcggcggagacgcgggcgctgctggagttcaaggcggcggtgaccgcggatccgggcgcggtgctcgcgaactggacgctgggcggcgacccgtgccgcgacttcggcggggtctcctgctaccccgcgtccggcgccgtgcagcggctgcgcctccacggcgagggcctggagggcgtgctctccccgtcgctcgcgcggctccccgcgctggagtccgtctcgctcttcggcaaccgcctctccggcgtgatcccggcgagcttcgtcggcctcgcggccacgctccacaagctcaacctcagcgggaacgcgctctccggggagataccggcgtttcttggcactttccctatgctgcggctgctcgacctctcctacaacgcgttctccggcgagatcccggcgactctgttcggcgagtgcccccgcctccgctacgtgtcgctcgcgcacaacgcgctcaccggccgcgtcccgccgggcatcggcaactgcgttcgcctcgccggattcgacttctcctacaacaacctcgacggagagctgcccgataaactgtgcgcgccgccggagatgagctacatttctgtccggagcaactcgctctccggcgccattgacggcaagctcgacggctgccgaagcctcgacctgttcgacgtcgggagcaacagcttctccggcgccgcaccgttcggccttctcgccctcgtcaacatcacctacttcaacgtctcctccaacaacttcgccggcgaaatcccgagcatcccgacatgcggcgacaggttcgcctacctcgacgcgtccaggaacaagctcaccggctcggtgccggaaaccatggcgaattgccgcaacctgatgctactcaatttgggggccaatggacagggcctcaccggcggcatccctgcggcgctgtcgcagctgaagaacctgaatttccttgacctctcggagaatgcgctcaccggcgtgatcccgccggagctcggcgacctctccaacctggcacacttcaacgtgtccttcaacaacctcaccggctcaatcccatcttctccattgctgcagcagttcggcccaacggcattcatgggcaatccattcctctgtggtccgccattggaccatgcctgtccaggccggaacgcgaggcgattgggagtgccggtgatagtcgccatcgtcatcgcagccgccatactcgtcgggatctgcatcgtatctgccatgaacatcaaggcatacaagaacaagaggaggagggagcagcagcagcacgacgacgaggaggagatcctcgtctccgacagcgcggcgatcgtgtcgccgggatcaaccgccatcaccggaaagctggtgctcttcaggaagaacagctcggcatcgaggtacgaggattgggaggccgggaccaaggcggtgctcgacaggaactgcctcgtcggcgtcgggtcagtcggcgccgtgtacagggccagcttcgagagcggcgcctccatcgccgtcaagaagctggagacgctggggagaatcacgagccaggaggagttcgagcgtgagatgggcaggctacgtggcctcacccaccccaaccttgtcaccttccatggctactactggtcaccctcgacccagcttcttctctccgagttcgtcgacaatggcagcacattgtacgatcacctccacggcagccgtcgccgtgcgggcccggcgagcaccggcggtgatggcggcggcctgccatgggaacggcggttcaggatcgcggtggcgacggcgcgcgcgctcgcgtaccttcaccatgactgcaaacctcaggtacttcacctcaacatcaaatcaagaaacatcctgctggacaacgagcacgaagcgaagctctcagatttcgggctatccaagcttctgcccgaaccgagcaacctaccaggctacgtggcgccggagctagcgtcgtcgtcgatgagctcgaggcacggcggcgacaagtgcgacgtgttcagcttcggggtggtgttgctggagatggtgacggggcggaagccggtgagcagccgccatggacggcagggcacggtgttggtggtggtcctgcgcgactacgtgagggagatggtggagagcggcacggtctcaggctgcttcgacctgagcatgaggagattcgtcgaggctgagctggtgcaggtgctgaagctgggcctcgtgtgcacctccgagtcgccgtcgcggcggccgagcatggccgaggtggtgcaattcttggaatccattagaggcagttcatga

SEQ ID NO: 12546 - DNA, 612 bp, Oryza sativa
  Clone ID: PAT_MRT4530_18664C.1
aaaccccacagcctacaatatcttatcaggaaaaaagactcagatcttcaccaacaatacttcaaatatatccttcatggccagcaactaaaaatagcatttacatgatcaccaatgaggtgtatacagctcctgccgtgggtccacagaagttcatgtgatctgcagttgaagtggcagccacgaaaggatctaccaatcttaaaatctggagaccaatatctttcatggaattccctcaaggaaagggttccactattagactggaaaaagggaaacatatcaaatcatgaaaaaggcataatctgaaattggaatagcgtatatctttttaagatttaatttaatcctggagtccacacttttttcgtgaagctacaaataaataatatatccacaagggtgatgaaaaggatttaaaacatggatattagcacgggattaaaaacatgaaaagcaccttacaatccaaaagcttgagaagacattagcatcaggcatcttcctaagaaaccaaatgctcttttagccacatcaaaattttcaagcaaactacgtatgtccaaataaaaagaaataacaaaccgtccaagcaagcatatgctgatggat

SEQ ID NO: 12547 - DNA, 733 bp, Oryza sativa
  Clone ID: PAT_MRT4530_18665C.1
ggaacggtggcggagtatagaaagtggtggagaggaggcagaggaggatgatcaagaacagggagtccgcggcgagatcccgcgcgcgcaagcaggcttacacattggaattggaagctgaagttcagaaactcaaggagatgaacaaggaattggagaggaaacaggcagatatcatggaaatgcagaaaaatgaggtagaagaaatgataaaggatccatttggaagaaggaagagactttgcttgcgaagaacactgactggtccctggtgatgacgagtggtcgatggcatgcaaattcccaccttcatcagcgactgtgcataatttaatctgttgtaaaccaatggtggacgaacttgtgcttgattaatcttctagtttcatttttcctgctagctgattctgagaaggcttccaaaactgacatgtagattatgtgtagacgaatgaagctgtcagaacaacttcctgtaatccttgagaaaacttgtatagtgttgtctaggtttgtatcatgctagtctttctatctagtgtcccaccctagagaccagacatcttggatgagttcagaggtcgatttaagcaagtcatggggaccaagaatcatactgcaacctgcctgatgactagctaaactaggtagtatgtaacaatatctgatatctgtacctgcttcctgaaatatgtattgttatctagtgtatctgatatctagcgtgtaaact

SEQ ID NO: 12548 - DNA, 263 bp, Oryza sativa
  Clone ID: PAT_MRT4530_18666C.1
ggcaacgttgtccctttatttaaaagtataatccttgtgcatatatactccgtacaaaccacacattatatgacaataatatattacgaattcttattgcaccgacacgcatatatatcatcagaatatcagaacctttagcccgctggcactgcccggattactgcaatttaatttcgcttgatatttccaaaggggatcgcgtaaaactgggctcagcgtggacgaggtggttacatcgggcttcttttgacaaaccggcg

SEQ ID NO: 12549 - DNA, 238 bp, Oryza sativa
  Clone ID: PAT_MRT4530_18667C.1
ccccttcctgatgaacccaatctccaaggccaggattgatctgccctaccactggcactgcgacgacgaggacgacgccatcctccccgactacggggaggagaaagagggacaacgaaccatgtgcttcggcgagaacgccgtgcggaagatcgccgttgacggggagcttttcgttcacgagttcagcgatagcatcagtgcagatatcgtgatcggcatagctcctcaagcctag

SEQ ID NO: 12550 - DNA, 1964 bp, Oryza sativa
  Clone ID: PAT_MRT4530_18668C.1
atggagttcgggaacggcgggtcctcctcgtcggagcgcagggcggcggcggagggggcgacgctggcgagacagggttcggtgtattcgctgacgttcgacgagttccagagcgcgctcgctggtggcggcggcggcggcggtggtggaagcgggttcgggaaggactccggctccatgaacatggacgagctgctccggagcatctggaccgcggaggagagccaggccatggcctccgcctctggctccgccgcgggggtgggcgtggccgtgggggcgccgccgacgtcgctgcagcgccagggctcgctcaccctgccccgcacgctcagcgccaagacggtggacgaggtatggcgcaaccttgtgcgcgacgagccaccgccggtgggggcggcggatggcggcgatatgccaccccagcggcagtcgaccctcggggagatgaccctggaggagttcttggtcagagccggcgtggtccgagaaaatccacccgctgcgccgccccccgttcccccgccaatgccgccgcggccagtcccggtggtccccaagaccactgccttcttgggaaacttccccggtgccaacgatgccggcgcggcggcgctgggctttgcgccgctcggcatgggggatccagccttgggcaatggcctgatgcccagggcagtgccagtgggcttgcctggcgccgccgtcgctatgcaaacagcggtgaaccagtttgattctggcgataaggggaacagcgacctgtcatcgccgacggagccaatgccttattccttcgaagggttggtgagggggagaaggaacggtggcggagtagagaaagtggtggagaggaggcagaggaggatgatcaagaacagggagtccgcggcgagatcccgcgcgcgcaagcaggcttacacattggaattggaagctgaagttcagaaactcaaggagatgaacaaggaattggagaggaaacaggcagatatcatggaaatgcagaaaaatgaggtagaagaaatgataaaggatccatttggaagaaggaagagactttgcttgcgaagaacactgactggtccctggcctttcacagtgctccaccctggactggtgctatgggacggcacattggatttttgctgccgtggcgctcgaacccgcgtctcaagtaggaacctcgtctccatgttgagcgacgcaggacttcgtcaaaacgatgtcgcgagcagaggagaagactggaggcacgcgcgctgtgggcgtcgtggcttcgcccacgcgtgccctcgcagcgaaatccaagggcgaaatccccgatacgccctccaaatccactcccaccacagcaaaatccagggcggcctcgccatctcatcggacggcaccgcagctgccaccagggtgcccgacgagcagggaggcgcctagatggcatgcaaattcccaccttcatcagcgactgtgcataatttaatctgttgtaaaccaatggtggacgaacttgtgcttgattaatcttctagtttcatttttcctgctagctgattctgagaaggcttccaaaactgacatgtagattatgtgtagacgaatgaagctgtcagaacaacttcctgtaatccttgagaaaacttgtatagtgttgtctaggtttgtatcatgctagtctttctatctagtgtcccaccctagagaccagacatcttggatgagttcagaggtcgatttaagcaagtcatggggaccaagaatcatactgcaacctgcctgatgactagctaagctaggtagtatgtagcaatatctgatatctgtacctgcttcctgaagtatgtattgttatctagtgtatctgatatctagcgtgtaaactgtaaaggagtataagcagacctagttctcaagaaaaaaaagtataagcagacctactaattgcttataagcctgttacttgt

SEQ ID NO: 12551 - DNA, 777 bp, Oryza sativa
  Clone ID: PAT_MRT4530_18669C.1
atgcctgctgcatccgatcttgggcgggacgtcgttgttgtacctccagccggcatcatggacgacgatgatgaaagcacctggtcaccatggccggatctccagccggagctggcaggcatggtgttctgccggctgctgtcccacggcgaccgcctccgcttccgagccgtgtgccgccggtggcgcctcgccgcgtggcagcagcaccctctgccgccggcgctcccctggcttaacttggacggccgcatcacctaccagagtctccccgacggcgaggtgcaccgcatccccgtccccgacgagctccaagctggaggcacggtcgtctgccgcggctcgttcgatggctggctcctctacgaccgcagcgagcagctggagtgcttcctgatgaacccaatctccaaggccaggattgatctgccctaccactggcactgcgacgacgacgacgacgccatcctccccgactacggggaggagaaagagggacaacgaaccatgtgcttcggcgagaacgccgtgcggaagatcgccgtgtgctcgcctgatctcgtcgccgccgtcatcgccggctctggcgttttcttctaccggccgggaatgcactcaacctggctgtttgcctccggcggcccctgcttcgcgcgcgacatagcctactacaatggcaagctctactccattagcagtgacggggagcttttcgttcacgagttcagcgatagcatcagtgcagatatcgtgatcggcatagctcctcaagcctag

SEQ ID NO: 12552 - DNA, 127 bp, Oryza sativa
  Clone ID: PAT_MRT4530_1866C.1
gccgcggatgctgacggtgacgaggacggtgactatggtgaaggctatgaggacggttcagagggcgagggggaggataatccaaatggctgccccaacaacatgaaaagcggcgagcctgaagaaa

SEQ ID NO: 12553 - DNA, 632 bp, Oryza sativa
  Clone ID: PAT_MRT4530_18670C.1
gcgccgctcaagggagaaagcgtaaagccgtttcccgctttagttctcgcatccgcgctaaccctcgcggcttcgtcgatggtcggcggcggcggcggcggcggccacggggtcaggacgccggcgaacttccccccgcggcagaaggctcgcctccctcgcggaccggctcatgagaagtcgttggaacagcaaaagaaggggccaagttcatcctctccttcagttagcagtaacaagtccccactccaattggctgcagcaattgttcaaccacagaaaccgctagagtcaccacagcacatggttacaccggttcgactgcaagaagctccaggcccaagaaccattccatgcagttctggatctgtaggatctggttcaggagctgccccatttgacatatgcataaaaagagatgataagtgctccatcaagttaagtcgttctttactggaaatcaacagagaaaaaagacgagaaagggagcaactttccaaggaggcagctccattgcaatatttgagacctgggatggttctgttgaaaaagttcttaaagcatgatgatcaggttgacattatcagacgctgccagaaacttggtattggctcaggaggattttatactcc

SEQ ID NO: 12554 - DNA, 1510 bp, Oryza sativa
  Clone ID: PAT_MRT4530_18671C.1
ttttttttttttttttttttgtgctaattgttcaagtgatggcaatattatatcattaactctgaatatacagcttgagatatacacagactgattcgtagcaattatatatagtatatcactggtgagtgaggaccagctagcagtactgtttttaattacactggcacgcttggatcttcttctttgattaatatagttaagaaaagtacagtcactgacatcaacatattttccaactccaacatcatcatgcatattactggtgaagaacgcccctcagctcgatcgatcgtcatgccagttcatcagtgactgcagcttcttcgtctttgcgagatgcatcttcttgtccgagcagatgcctcctgatgtcgtctcctcctccctgcaccggctggtcctgcaggttgttgttcttgctcttcttctcctcgcttttgccccacagcacgaagtacagcccgatcacaatcagaactgctccgatgatccctcctgagtatagctgatctccgagaatgatggcggccatgacggcgacggcgacggtctggaccggctggaacacggcggtgaacagcggccctcccctgtcgatgcaccatatctgcagagcaaacgccacgccagatgccacaagaccagcgtagaggattgtgaacagctcgcttccggagttcaccttccatctgctcaggtcttcttcagtgaaggctgcaatgaccaggaactggaggagcccaaagatgcaggtcagtgatagaactgacagcctagctgggtacctcttcagaactggcacctgaagaaccatccatccagaccatgagaggcagtggccaaggatgaagacgcagcccagagtccagttgaggatgaggctcgaggaagacagggacttgatgttcagattgtgattgaacagtggtaggcccttgtagagagttatcactgtggcaccacctatgctcaccaccgtgcccaccaccttggccaccccatgcctcttgcctaggtctacttgctcaagcctgaggacggcagccatggcaaaggtgatggcaggaactgtgttctgtattgcagaagcataagttggtgaaaggtgatacagccctaggaggtagaaaccttggtttgcagttatcccacacagtgctagaagaaaaaactccaccagcaaagagaaggtcagtggtggtctatctttcttctcgaggaagtaggcgaagggcgcgagcaaggcgagggagatgaggttcctatagacgatgaacacaatcttgctgatgcccatgttgagtgctgccctgctcacaatgtggaatcctgcaagcaggaactgcagggccagcactcctatgaacagcttcaccttctcatgcatcactgctgcagctgcctgatccctccccatggtctcactactccttactctctctagtgttgttacttaactagaaatgcagtgatgctagtagtggcctactgttactagctaagctgt

SEQ ID NO: 12555 - DNA, 219 bp, Oryza sativa
  Clone ID: PAT_MRT4530_18672C.1
atggcgaacgggacgctctacaacctgtcggagctcaagatggagtgccacatgggcacccacgtcgacgcgccgggccacatgaaccagggccacttcgccgccggcctcgacgtcgacaagctcgacctcgacctcctcaacgcgctagatcagatcctctaccttaagtcacatgaatttattactaacatagtgacatgtgtgtccaataggtaa

SEQ ID NO: 12556 - DNA, 801 bp, Oryza sativa
  Clone ID: PAT_MRT4530_18673C.1
atgggacacagagcacggaacggaacagcggcgaggtacgaggtgcatgccgtgcgtagcgatgcggtacagtgtacgtatgtacgtgcgccctgcggagaccatacccttcctccaccgactcgatcccataccgtcgagtgctcgcgacgaggtcgatcggctgccgctgactttagttttagacgaacggcaaggtcgatcaatacgttaacggaagtcttctgcatggccaccggatacgtgtatcgtcgatccagatacacagtatggttccctgcttcggtgacactgacgcgcctatatcacgccaaagatctccgttttcaccctcacgcgcggtcccacgttagattcgagctgacgcgagcgcgatacatcccccgcaccgcacgcacgcacgcagctcccccgcaccgcacgcacgcacgcagctcccccgcaccgcacgcacgcacgccctcttcggctacgcgccacgttcccgcgcgagcgacatcaacgttcaccagtgagcaaatcctagagacgggcggatctaccagagtagactacagcatggcatatgtacgggccgaagttttggattgtgtgggctgccgggctgggtcgagaggtcgagaaatccaggcatccaaccaagcttcagcacggcaggttacggcttaccaaccaatcgacctccatctcctgccgtggattttgttgtttctgcctgcaaagacccagcatgatacggttcattccttctctacaccacgagtatcatcggtgcaattggaaatagtatcatcatcagtg

SEQ ID NO: 12557 - DNA, 1353 bp, Oryza sativa
  Clone ID: PAT_MRT4530_18674C.1
atggaggccgagcggaggagcgaccgcgaaggggactacggtggctggatggcggcgggctcgtcgtcgggggcgatggtgcggcgggagacgaggaggtcggaggtggggttggagaagtcatcgtcgttgccgccgcctttgcccaaggaggcagtcaagattgacaagaagaagacgaagaagaggagtgactacagtatcgaggatattctgaagattcttgatatgagcgaggaggagttggctgtagtgaaggaggagtgggctgaaatggaggcgaaggaaaaggaagaggcaccaaaggtgaaggaaaccatggtggagtgggaggcgagggtcaagaagaggattgaggaggagaacaaagcatatcgagagatgatgcggtcgcaggacgacgatgaatcctcctgggacgctatccagtatcgcaaatcctggaacgctagatggtccggcacccgtggttccttcgaggacaccacgagaataccccccatgcgtttcacccacaagcctgcactggattacagtgccgctgccacgcctactctgcaggtcttcttcgtcaaggttgcagtggcaaagggggccttacagtggccacttgatgtgtttggtattgttgccatgcgcgatgttcttgaccgtaatcgcaacattgtcttccaccgcacaagggacaactgccagaccctcactgaagaggaccggaatttggtactggtaggccctacccgtgctgttgcgctgtggatgccggaacctgtgatcatcgatgtggaactaaaagtgaagggcactactgaatctgaggataaaggcttgagcaatctagctgtgccgctcttatgcgatgatacgagttattcgtacactagcaagctaagcacactggagtttagacttggctatattacgtcctctgttgaggccacaatattcatacgagtcattcaggggtcatggcctgatggtttgagtgctcaatttgctgcctttaccactggtttctatggcaagggtatggcctgtcgagacagcaatatgagtattgatgatgagagaattgtcctgcttgattctagaggtgagaaagtagttgttactagtgatggcaatatcaagctttcacggcgtgttgtttctgttgagagtaacacagagctgaaagtttctgtcaaggcatggaaagctgacaacaatgtcgtcgaaaatgagaatgttttcacagcattagaagctggtgtaagctatgctacacttgacattgccttttgtaagctggaaatcagtgttgcctggtcactcatttcgcagtatcctgtttctgccaactcggtactgtag

SEQ ID NO: 12558 - DNA, 569 bp, Oryza sativa
  unsure (1)..(569): unsure at all n locations
  Clone ID: PAT_MRT4530_18675C.1
tttttttttttttttttttttttttttaatatgtatagatttagataattatttatcattaaaatctttatcattacgataatgttaaattgaacaacttacaccactagcttcaattataatatccaacttgacatatgtgggccaaatggagagacgtacgcgccacaattcaccattgatgcagtgaaagagagcaactagctgaccacaacgggcacggccttgagagggatggcacggaagttggcaatggtaaacctgtggcgcatgtccaactcctcggccgacacgccgtcggggagtcgccactcgaacgcgcgcagcagcgacgccagcatgaacggcacgacacgttccgccatcggcaggccggcgcacaccctccggccggacccgaacgggatgaactcgaacgtcttcccccagaaatccacctcgtcatcatctcccccgagatctgccctttcctccggacgctcgaccggcacggatgcgtcctgggacccanangtacngggcataatcacctgctcctggatnacgtgatccaacgccgntttcccccc

SEQ ID NO: 12559 - DNA, 245 bp, Oryza sativa
  Clone ID: PAT_MRT4530_18676C.1
aaatggagaaaatctcacttcctataaccagtgatggtgttcagatatgctccagccacacaactttggagaggcagcatatttgtgatgggtggcagcaaagaggataggcatgaacctgagcttgaacattggagcattgcagtaaaggatgggaaagccctggaaaacgagtggatgagtgagataccaatcccacgtcgcggccctcatagggcttttgttgttgctaatgataagctact

SEQ ID NO: 12560 - DNA, 501 bp, Oryza sativa
  Clone ID: PAT_MRT4530_18677C.1
atggagctcaccgccgccaccgcgggagcgacccgtgccaccggaggattcctcgggaccagccgtcgccggccgcaatcgagtagaggagattcggcgccgggattgcgattttggttcgccattggcggcgtcgttgattctcgtcgtgtcagctctgaaaatagggaaaccctgtatttaatgaatatttacaaatacatgagggctcccgcaggagttcgccttttgccttcgcgagaaatgcttaatgaaaagattagacaaatccaagtttatgcttcaagaaaatggaggcgatttgatttccaaagcgctccaattgatgagaaggaggcgagtcaccgagaagtttctaatctcctcggaacaccaccagcaaatagatcaatgtattctaagcagaggatatatcacagaatcatccacagaaacatcacagaaagagacaagagcgattttttcccgaagttcggatcttgcgatcctactctccgttga

SEQ ID NO: 12561 - DNA, 228 bp, Oryza sativa
  Clone ID: PAT_MRT4530_18678C.1
atggcgagtgtgagtggaagcgaggtctcagggatgcttcatgtgcaaagaatcagacaatggctcactggagaaggcgggatcgaccatggcgacggcggcggattcaaatcggcgccggggaagaaaatatgcgttctccgtgttcttgatgtcttcggctgggcggcggcgctccggtgcgtgctccagagcgtcgtcggcgtgatcgcgttccggtggctgtga

SEQ ID NO: 12562 - DNA, 247 bp, Oryza sativa
  Clone ID: PAT_MRT4530_18679C.1
acgtagacaggaaacccatctaaattcatatagttggatgccgctacaatgcaaaaacacgtatgcaagggacggagatcaagcctaggagtatcctcagcggtcacatgagcatgagcttagtacgagagccatactataaacgccaaagcagtatctcttgataagaagcgtgatgcagacactacaggtcgctgactatctgatgttatcaaatctgccagaactgctccacaagatcaccgac

SEQ ID NO: 12563 - DNA, 2940 bp, Oryza sativa
  Clone ID: PAT_MRT4530_1867C.1
atggaggagacaaccatgaaggaggaagaggaaacttacagggcgaactcaacttgtgaggtagagggtggccgtcctgaagtcgtccccgcagctatctccggcggatgcaagcggattgagggccggcgctcggcggcagtgactccgcgcggagaggtgcggacgcgcggtggacggcgcgggcggaggtgccccggcggttgcgaacgggaggagattgtgaagaggtggagggagtggggaaccggcgggcgcgcacgaggaggcggcaagaagcggcgggcgcgtagtagcggcggcaacgcggcccgcggctccgagcggcgtggagcggcggagacggcggccacacgcggatccgaggtggcggcggggttgggtgagtggcgtggccgcgtggggatggcggagggcggagggcggaggaagcagcgacagccatggctgagctcgatctcaagctcgccggcggcaaacgccggctctaatggggacgagaaggccaacgggaagtggaggatgtgcgtcgacttcaccgacctcaacaaggcgtgtcccaaggatcacttccctcttcctcaaatagaccaactggtggactcaacagctggttgtgagttgttaagttttcttgatgcttactccggctaccaccaaatcagtatggcgaaagaggacgaggagaagacatcattcatcacgccgttcggtgtattctgctacgttaagatgccatttggactgataaccacaggaaacactttccaacgcacggtccaaggggcacttaacgatcagcttgggaacaatgtcgaggcctacatcgatgacattgttgtcaagatcaagacaagcgactcattgattgacgatctgcgggaaacgttcgacaacctccgacgatattgcctcatactcaatccagagaagtgcacgttcggagtaccatcgggcaagctgctcgggttccttgtctctggaagaggaatagaagcaaatcccgagaagatcaaggcaatcaagaacatgaagtcacccacaagactcaaggaagtacagaaactaactggatatatggcggcactaaccatcaagtcccaggttctggccgactttgtagccaattggactatgcctgaaaacaggtcagacagtcaaatcgacaacgaaacatggataatggcgttcgacggcgcactcaacagccaaggagtaggggcagggttcatcttgacatcaccttcgggagatcagttcaagcatgcaattcacctcaacttcagggcgaccaacaacactgcagaatacgaaggactactcgctgggataagagcagcaactgtacttggagtcaagcgactgatcgtaaaaggggattccgaactagtcgcaaaccaggtgcacaaagactacaagtgctctagccccgagttatccaagtacctcgcagaagttaggaagctagaaaaaagatttgatggaatcgaggtccgacacgtataccgcaatgacaacatcgaaccggacgatctagcaaggcgtgcgtccagacgggagccactcgaacctggcaactttttggacgtcctgacaaagccatcagtgaaagaggcaaacaatgaagatagcctagtcgcccccgacatcagctcgggggctatagtgatgaggacatcaacaccatcgatacatccacgtccccccatgtacagcatgatggacgagtgccctcgtggccgggttgatgcgcaccacaagttcgcggcgaccattggagacgagcgcgccgttgccgacatcgagaccatagacgactggcagatcccgctcattaaattcataagtagcgacgagttgcccgaggacgatgcagaagccgagaaaataacccgtcaagccaaaatctactgtatgatcgacaacgacctatacaagaaggcgccaaacggggtacttgtcaaatgcgtctcgttcgacgacggcaaacatctcctcctcgacatacacgaagggatctgtgggtcgcatgtcgccggtcgcacattggtcggaaaagcttttcgacaagggtttttttggccgattgccctcaaagatgcttgcgacatggttcagcggtgtgaagcctatcaatttcgcagtaaacacactaagctaccagtgcaagcgcttcagactatccctcttacttggccgttctcgtgctgggggctcgacatactcagaccattcccacgaggacaaggcggctacaggttcctattcatggcgatcgacaaattcactaagtggattgaagcgacacccacgggggaaatcaaggccaacaacgccatcaaattcatcaaagggatattctgcagatatggattgcctcaccgcatcataacggacaacggctcccagttcatctgtgccgacttccaggattactgcatcaggctaggagtcaagatctgcttcgcctcggtttctcaccctcagtttaatggacaggttgagagggcaaacgacatagtactacaaggaatgaagacccgtgtctacgacaggctcatgtcacacgacaagaagaggagcagcgaaacgacgatgtcaacctactcgaggaacatcgagaaagagtcgccgtcagagcagccagctaccaacaggccctccgccgataccacgagaagcgcatcagagcacgcacactttcgatcggtgactacgtcctccgacgggttcaaagccaagcagggcgaaacaagctctcacccaaatgggaaggaccgatataaagactaccaggaaggccagcgccagtccatcgactggaacactttctccgcaagcggcgccatcgacttcgccaagttatctatctctgcgggagtcctccgagaacgtgaaaaccctccgtggaggaactcgaggtgcagctgcggacggtga

SEQ ID NO: 12564 - DNA, 1346 bp, Oryza sativa
  unsure (1)..(1346): unsure at all n locations
  Clone ID: PAT_MRT4530_18680C.1
ngcccaactcccaaaaccctagaaccgcgccgccacaatgcaggccgccgccgccgccgtccaccgcccgcacctcctcggcgcctaccccggcggtggccgcgcgcgccgcccgtcgtccaccgtgcggatggcgcttcgggaggacgggccgtcggtggcgatcgtgggcgcgacgggcgccgtcggccaggagttcctccgcgtcatctcctcccggggcttcccctaccggagcctccgcctcctcgccagcgagcgctccgcggggaagcgcctcccgttcgagggccaggagtacaccgtccaggacctcgccgcgccgggcgcgttcgacggggtggacatcgcgctcttcagcgccggcggcggggtcagccgcgcccacgctcccgcggccgtcgccagcggcgccgtcgtcgtggacaacagctccgccttccggatggaccccgaggtgccgctcgtcatccccgaggtcaatcccgaggccatggcgcacgtccggctgggaaagggggctattgtggccaacccgaactgttccaccatcatctgcctcatggctgccacacctctgcaccgccacgccaaggtggtaaggatggttgtcagcacttaccaagcagcaagtggtgctggggctgcggccatggaagaactcaaacttcaaactcaagagtatgcttttaatatattttcacataatgcaccaattgttgaaaatgggtacaatgaggaggagatgaagatggtgaaggagaccagaaaaatctggaatgataaagatgtgaaggtaactgcaacctgcatacgagttcctgtgatgcgtgcacatgctgaaagtgtgaatctacagtttgaaaagccacttgatgaggatactgcaagggaaatcttgagggcagctgaaggtgttaccattattgatgaccgtgcttccaatcgcttccccacacctcttgaggtatcggataaagatgatgtagcagtgggtagaattcgtcaggatttgtcgcaagatgataacaaagggctggacatatttgtttgtggagatcaaatacgtaaaggtgctgcactcaatgctgtgcagattgctgaaatgctactcaagtgattttcttttctgtacctttctctccttgcccctctttgctctagtcattgtttgacggatgtactctggttagtatgagatcaattttgatcatcttttgtaatctatattcctagtgaaataaatgtaaaacggttttgctctatcttctgcacaagtgtagaagaaatctgaaattgggaaattggagtgtggcccttgttcaaaaaaaaaaaaaaaaaaaaaa

SEQ ID NO: 12565 - DNA, 318 bp, Oryza sativa
  unsure (1)..(318): unsure at all n locations
  Clone ID: PAT_MRT4530_18681C.1
ttttcttggggctgcgggggtgccgccctgtccgtgctcggtgtcttcttggcgtcgctgcttctggcggcggtggcgccggcgtgggcggccggcggggggtgcgcggcggtgnggttcagctgcttccgcgtgtgcgcggcgtgcagcgacctgcccctcctgggggcgggcgtgctctggtcctactgcgccgcggcgtcggcgtcgctgtccgtggcgttcgtcgccgcgccgccgtcgcccggcgggtgggtggcgtgggggctctatcctcgccggcggctggttggtcgtctcgctggcgctcgtcgcgct

SEQ ID NO: 12566 - DNA, 1062 bp, Oryza sativa
  Clone ID: PAT_MRT4530_18682C.1
atgagcgccgacgaggacgcggcgtcgcggggcggcggcggaggcgggaagaggaaggcggtggcggaggggggctcgccgtcgccgctgtcggtgctggcggacgacgtgctgctgcagatcctggggaggctggagggggacccgcgggactgggcgagggcgtcgtgcgcgtcgccgcggctcgccgcgctgctcagggcggcgtgcctcccgccgcgcctgacgcgggcgctccccgccgagctcctcccgccgccgtcccccgacggcgcgcccagggcgtgggccgcgctccacaagctctccgtctgctgcccgggcctcctccgcgccggcgtcctcctcgagccctccgatgacttcggcctcgagctcgacatcggccccgacctctccgtccccgccccctccccttcctcctcctccctcgaccacgcctccaccgctacctccgcccccgccccaccccccgactcctcctcctcctccgccgccgccgccactacgtggtcgctctacgacgacctctacctcgacaccgcctacgactgctccccctccgaggcggcgcagatctcaaacacggctgcgacccccgcccccgccgcggcgcggcgaggggtggcgtcggggagcaggaggcgggcgcggcggtggctggggacggtgggggcgcacctggcgtccgggtcgtggacgctgagcagggagcaagggaacaagctgctggcgagcaggttccgcggcgaccgcctctacatctgcgactggcccgggtgcgtccacgccgaggagcgccgcaagtacatggtgttccgcggcgtgttccacgacttcccgaggtcccaggtgcgccgcgccctgcgggacacccgccgccccaccgtcgccgtcgactgcgccttctgcggctgcaccgaggcctgggacctctacgccgccttctgcctccgcagcttctacggctaccacgacgacggcgagcccgtcgtccgcgcctacgtctgcgagaacggccacgtcgccggcgcctggaccgagcgccccctctactcctga

SEQ ID NO: 12567 - DNA, 431 bp, Oryza sativa
  unsure (1)..(431): unsure at all n locations
  Clone ID: PAT_MRT4530_18683C.1
ctaatttnntccttcccgaatcttcttgaaaatgcaagaatcaagccctgcatgtnacaccactagatccttgtnattctaagctttccatccatccaaatggcttgcacatgcatagatttgtgagggagatcgagaagaaaagagaaggagcttgctgcttggtgcagtagcagtaacacttcgttttcctccacttgattcggagaatttggaatacgtggagcaagactcagaggttgagtgtgtttccgcacagcagcaaggtgaggatgccggcgttgatgttgtgccctactactatcccaccaagggtggcgagggtagcgagtagttnaagttcgntcttgccccgatttggttccccttgtggggtttttggacaccacaggtttttcttttgcttatgggaattttgaaacttccgtgca

SEQ ID NO: 12568 - DNA, 799 bp, Oryza sativa
  unsure (1)..(799): unsure at all n locations
  Clone ID: PAT_MRT4530_18684C.1
ccggccgggaggcgctgctgctccgcgaaccctagccatggcgcgagtccaccacaagaacggtcgcggcggcggcggtggcggcggcggtggcaagggcaagggcaaaggcaagtggaagatgccggcgtcggtggcgcggaagcagcaggcagcgatggcgaacgtggaccaggtcactggcgacaagatccccaagagcttcgtcttctcccgcggcaaagctgccctccacgctccgccatctccagcaggatctccgcaaggtcatgctcccctacaccgccctgaatctcaaggagaagaaacggaacaacctcaaggatttcgtcaacgtctccggcccgttgggcgtgacgcatttcttcatcctcacgaaccccaagagctcgccgcacttgcgcatggcgaagacgccgcagggtcctacctacacatttcagataaaggagtatgctctcgccgccgacattgcgaactcacagaagcgaccgaggtgtcccccagagatattcaagaattcacctctgactgtactcagtggctttggcggtcttggcgagcctttcaagagtttggtcgaatattttcggcatatgacccctgctattgatccagtcactgttaagctgtcaacctgtcaaaggattctgttgatacatttcgacagagaaaaggaaatgatcaatttcaggcattactccatcaagctccagcctgttggggtcacccgcaagattagaaagctcatgcagaacaaccaagtgccagacctaagggacctgnacgacgttagcga

SEQ ID NO: 12569 - DNA, 1254 bp, Oryza sativa
  Clone ID: PAT_MRT4530_18685C.1
atgatggagcatctgattgtccacatcgtacctcagattatggagattggtcccctatacatacaccagatgtgggcgtacgagaggtacatgtccgtcctgaaagggcttgcaaatggcctagctagccttgtgacctcatggcaagggtacgacatcggcggatataggttttacacgatgttcaaggacaagaaaagcgcagctcagaatagcggagttcgggtgaaggcgtttgacgcatcaggtgagaagaagtcttactacgggatcatacaagacatttgggagctggactatggcctaaacatacagatctcggtgctacgatgccaatgggtcagagacacaacaggagtatccattgataactacggcctgacagttgtggatcatagcaagctaggactcaaggatgatccgtgggttattgctgagcgtgttgctaaggttttctatgtgaatgacccttcagacgataagatggtcattgctgtactgggaaagcaaaacttcattggcattgatagcattaaagacgcgtcaaattacaaccaatacgacgacatccctttgttcatagattttcctaaacggatcaaggaagttgagacaacccttgacgaagatctgatttcgtccgtgcgaaaggatgtcgccgccagacagatccaggccgccgccgcctctcctcttctcctccccccacaccgccgcctgctctcctccaccggcgacgccgccgaccagatccaggccacctctcctcatccccggccgccgccggccagatccgggccacgcgcctcctctcctcttcacactcgctgccgccgcctcctctcgtcctcgcactcgccgccggccaccacctcctcttctcctacaccccaagatctgggccggcgcccatctccccggcatccacctccccctcgtctactgatcagcttcctccatcgcccccgcgcgccgcctcttacaccctgtccgccaccgtccaccgcctccctcccctcgctctcctccatccccctcgccgcctccctcccctctctccccctcgctgtcgccacctcactcaccccggatctactccctcaagccggcaccgaccacctccccctcaccgacgacctcaacgaccccgccttcctcctcaccgagcatgttgcccaagccggcgccaacgaactcccccaagccggcaccgacatcttccccaagcaaggcggcgccgacatctccctgtga

SEQ ID NO: 12570 - DNA, 2865 bp, Oryza sativa
  Clone ID: PAT_MRT4530_18686C.1
atggatcggacatggatgtacaacacgaaaagagctcatccaacgttcttgaaggaagcagccaaatttgttgagctcacaaaggcacatgctgcgagggagaatttgaggagcattttttgcccatgtaaagtttgtaagaacgagatcttgctgcaagatccgaatgaagtattgtcgcacattgtagaacgaggatttaagaagggatacgagatatggacttttcatggggaagccggtatagagaatgaaggtattgattttgaactggaagatatgttgcggcacgttgaaccagaggtcctaactggtacaagacgcgggttggacaattgggaagctttggaaaattcagcgaaggagcttctgtacgacgaagccaaaggatacgacaaggactattcagtcctgcgctcggtgctcgaacttctcatattgaaggccagacatggatggttggacacgagcttcaatgatttgatggatcttttgagagtaatgcttcctaagccgaacctgctaccgacgaacacatatcaagcgaagaaattgatatgtccattgtctctaggtgttcagaagatccatgcatgtgaaaatcattgcatactgtaccgcaaggaattcgcggatttagactcttgcccaacatgtgggacgagtaaatacaagacgggcaacggagcctccgatggagaggtggtcgacaaagatgatgcactggtggatgagaacaaaaagatttctaggatggtgatgtggtacctgccagttaaagatcgcctgaagcggctatattccaaccgagacgacgccgagttgatgagatggcaccaagagggtaggaaaattgacggtccaagacagcctgggattaacatagatgtgtttctggaaccattgatggaggacatgcaagaactatgggaggaagggttacgaatgtgggacgagtaccgtagggaacatttcactctgcatgccatcatattcgttacgatcaacgacttacaggcaaacttttcgctctcgggccagtttaaggggaagttcggatacctcatatgtatcgacaagacgtcgtacaagtacctcacctcgtcaaccaagggtgtttacatgcgtcatcgtcggttcttacctcagaggcataggtggcgtgcgaaggccagattattcgacaatacagtagagaactttctagctcctgaaacacgtacaggtcgttctgtcttcgatttgacaaagaagaagcccgtcaagaggaagaaacgtacggatcaggacacaactgatgcacctttagaggaaaacctggaggttcggcatgccatcgacgtaatgcaccttgagaagaatgtgtttgatagcaccattggcactttactggacatcccgagtaagacgaaagatgggttcaagtcccggaccgactttgtcaatttggacataaggcatgagcttcacccaaaagagctgccaaatgggaagatcgaaattcctccggcatgctactcactaacacctgacgagaaaaaatctttatgtagatgcttgcatagtgtgaaagtcccgactggtttctcagcgaacgtcagaaaacttgtatctttgaaagatttgaccatctctgggtacaatgctcatgattgtcacaagatgttaacagtcttcctacccattgccataagagtggtcaagccagttcacactcagttagtgataacaaagttgtgctaccttttcaatcgagtatcacagaaggtttttgatcctgaagagttaggcccccttcaaacttttgcaatcgagacagcatgccagcttgagatgtttttccccccagcttacttcaacatgatggagcatcttattgtccacatcgtacctcagattatcgagattggtccactatacctacaccagatgtgggcgtatgagaggtacatgtccgtgctgaaagggtatgtccgtaaccgagctcatccggaaggatcaatgatagaggggtacacaactgaggaggtggtcgaatgctgcatagattacatgaaggacgccaaacccatcggtgtgaccccccctttacacgagggccggttagctgggacggggatcgtaggcaagaaaaggttctacgatgaggacttcaaagatgagaaagatctgccgttgggtgattcgctggaggaaaaaactttgcgcaggctagcaaatggcccaactagccttgtgacctcatggcaagggtacgacatcggcggatatagattttacacgatgttcaaggacaggaaaagcgcagctcataacagcggagttcgggtggaggcgtttgacgcatcaggtgagaagaagtcttactacaggatcatacaagacatttgggagctggactatggccttaacatacagatcccggtgctacgatgccaatgggtcagagacacaacatgcgtattcatcgatgactacggcctgacggttgtggatcgtagcaagctaggacacaaggatgatccgtgggttcttgctgagcgggttgctcaggttttctatgtcaatgacccttccgatgataagatggccattgctgtaccaggaaagcaaaacattgttagcattgatagcattgaagacgtgtcagattacaaccaatacgacgacgtccttttgtttacagattttcctaaccggatcaccggatcaaggaagttgagacaagccttgacgaagatttgtttttgtccgcgcggaaggatggtgtttccaaaattgtcaaacattagtgagatgtcgatcctgtgtactacctattttgtaaacgattactggatgaaacttatattgcgaatgagatag

SEQ ID NO: 12571 - DNA, 2670 bp, Oryza sativa
  Clone ID: PAT_MRT4530_18687C.1
atggatcggacatggatgtacaacatgaaaagagctcatccaacgttcttgaaggaagcagccaaatttgttgagctcgcaaaggcacatgctgcgagggagaatttgaggagcattttttgcccatgcaaagtttgtaagaacgagatcttgctgcaagatccgaatgaagtattgtcgcacatcgtagaacgaggatttaagaagggatacgagatatggacttttcatggggaagccggtggtcgtaacgaagagttagatgatttctgttttgatgatgcagaaaattttataatcgaagacatgtctcagggaaacatcccggaatacagtggctcaggtatagagaatgaaggtattgatttcgatctggaagatatgttgcggcacgttgaaccagaggtcctaactggtacaagacgagggttggacaattgggaagcgttggaaaaagcagcgaaggagcttttgtacgacgaagccaaaggatgcgacaaggactattcagtcctgcgctcggtgctcgaacttctcagattgaaggccagacatggatggtcggacacgaggttcaatgatttgatggatcttttgagagtaatgcttcctaagccgaacctgctaccgacgaacacatatcaagcgaagaaattgatatgtccattgtctctaggtgttcagaagatgcatgcatgtgaaaatcattgcatactgtaccgcaaggaattcgcggatttagactcttgcccaacatgtgggacgagtcggtacaagactggcaacggagcctccgatggagaggtggtcgacaaagatgatgcaccggtggatgagaacaaaaagattcctaggatggtgatgtggtacctgccagttaaagatcgcttgaagcggctatattccaaccgagacgacgccgagttgatgagatggcaccaagaaggtaggaaaattgacggtaagatccgacaccccgctgatgctcgacagtggaaaaactttgatgcactacacccggaatttgcaaaggacccgagaaatgtcaggtttgcattgagcacggacggaatgaacctgtttggtgacctaagtggcacacacagcacctggccagttcttctaacgatgtacaacttgcctacatggatttgccagaagcgaaagtacattcttttgtctatccttatacaaggtccaagacagcctgggattaacatagatgtgtttttggaaccattgatggaggacatgcaagaactatgggaggaagggttacgaatgtgggacgagtaccgtagggaacatttcactctgcatgccatcatattcgttacgatcaatgacttaccggcaaacttttcgctctcaggccagtttaaggggaagttcggatgcctcataagtatcgacaagacgtcgtacaagtacctcacctctccaagcaagggtgtttacatgcgtcattgtcggttcttacctcagaggcataggtggcgtgcgaaagccagattattcgacaatacagtagagaactttctagctcctgaaacacgtacaggtcattctatcttcgagttgacaaagaacattaaggttgtattcggcaagccaaagaagaagcccgtcaagaggaagaaacaggaaagtaaccagtccttcaagaagcactcaatttttttcaggtatcttgattactggaaagacctggaggttgggcatgccatcgacgtaatgcaccttgagaagaatgtgtttgatagcaccattggcactttactggacatcccgagtaagacgaaagataggttcaagtcccggaccgacctcgtcaatttggacataaggcatgagcttcacccaaaagaactgccaaatgggaagatcgaaattcctccggcttgctattcactaacacctgacgagaaaaaatctttatgtagatgcttgcatagtgtgaaagtcccgaccgattatcgagattggtccactatacctacactagatgtgggcgtacgagaggtacatgtccgtgctgaaagggagaaagatctgtcgttgggtgattcgctggaggaaaaaactttgtgcaggctagcaaatggcccaactagccttgtgacctcatggcaagggtacgacatcggcggatatagattttacacgatgttcaaggacaggaaaagcgcagctcagaacaacggagttcgggtggaggcgtttgatgcatcaggtgagaagaagtcttactacaggatcatacaagacatttgggagctggactatggccttaacatattgatcccggtgctacgatgccaatgggtcagagacacaacaggcgtattcatcgatgactatggcctaacggttgtgggacgtagcaagctaggacacaaggatgatccgtgggttcttgctgagcgggttgctcaggttttctatgtcattgaccctttcgacgataagatggccattgttgtaccgggaaagcaaaacatcgttggcattgatagcattgaagacgcgtcagattacaaccaatacgacgacgtccctttgttcacagattttcctaaccggatcaaggaagttgatacatgccttgacgaagatctattttcgtccgcgtggaaggatggtgtttccaaaattgtcaaaatttattga

SEQ ID NO: 12572 - DNA, 906 bp, Oryza sativa
  Clone ID: PAT_MRT4530_18688C.1
atgagcggaggcacgcggaacacgcgccagttcttcgaatcgtcgagcagcggcggcggcggcagaactagcattgacgaagggaggggcgtccgggatggtggtggcggtcgcgttgcggcggcgcggggcagcggcgtgaacacggggatcctggacgagcacgtgctgtccctggtgttccggtcgatcaactgggacccgcaggcggtgtgcacggcggcgtgcgtgagccggcggatgcgcgccgtcgcggagcgggtgctgtggcgggagctctgcatctccagggcgccgcggatggtggcgtcgctcgcgggcgccggcgccggcggcgcggcgcccccgccggggcgcattgtcggcggctggcccgcgctggcgaagatgctcttcttctgctgcggcgcggcggggccgggcgtgccggggcacttcacccggatgtcccgcttctccaagacgtccgggcggagcttcctgtcgcggcggtgcaggagcgacctgctgtacgtgtccgacccgtgcgagcacgcggtggccggcgcgggcgacgacctgggcgcctaccggggcgtcttccgcgggttcatgcggtcccggacgcgggcctgcctggtggggcgccaggccgcgctggacccgcgcgtgcgctgcccctactgcggcgcgcgcgtctggagcatggtcgccgcggggatggtgccgcgcaccgcgtggcggaggctgggctgcctcgagggccgcctcgagtactacgtctgcgtcagcggtcacctccacggcaactgctggctcgcccgcctcacctccagcgaaggcgagcacgacgccggctccggctccgactccgacgcgtcgacgcaaggcggcggcagcgacgacgatggccatgtagcgctgtga

SEQ ID NO: 12573 - DNA, 2766 bp, Oryza sativa
  Clone ID: PAT_MRT4530_18689C.1
atggatcagacatggatgtacaacacgaaaagagctcatccaacgttcttgaaggaagcagccaaatttgttgagctcgcaaaggcacatgctggctacgagatatggacctttcatggggaagtcaatggtcgtaatgaagagttagatgatttctgttttgatgatgcagaaaattttattgtcgaagacatgtcacagggaaacatcccggaatacggtggctctggtatagagaatgaaggtattgattttgatctggaagatatgttgcggcacgttgaaccagagatcctaactggtacaagacgagggttggacaattgggaagcgttggaaaaagcagcgaaggagcttctgaacgacgaagccaaaggatgcgacaaggactattcggtcctgcgctcggtgctcgaacttctcagattgaaggccagacatggatggtcggacatgagcttcaatgatttgatggatcttttgagagttatgcttcctaagctgaacctgctaccgacgaacacatatcaagcgaagaaattgatatgtccattgtctctaggtgttcagaagatccatgcatgtgaaaatcattgcatactgtaccgcaaggaattcgcggatttagactcttgcccaacatgtgggacgagtcggtacaagacgggcaacggagcctccgatagagaggtggtcgacaaagatgatgcaccggggaagttcggatgcctcctatgtatcgacaagacgtcgtacaagtacctcacctcatcaaccaagggtgtttacatgcgtcatcgtcggttcttacctcagaggcataggtggcgtgcgaaggccagattattcgacaatacagtagagaacgatctagctcctgaaacacgaacatgtggctctgtcttcgagctgacaaagaacattaaggttgtcttcggcaagccaaaaaagaagcccgtcaagaggaagaaacggacggatcaggaaacaactgatgcacctttagaggaaagtaacctgccctttaagaagcactcaatttttttcaggtatcttgattactggaaagacctggaggttcggcatgccatcgacgtaatgcaccttgagaagaatgtgtttgatagcaccattggcactttactggacatcccgagtaagacgaaagatgggttgaagtcccggaccgacctcgtcaatttggacataaggcatgagctttacccaaaagagctgccaaatggaaagatcgatattcctccggcttgctactcactaacacttgacgagaaaaaatctttatgtagatgcttgcatagtgtgaaagtcccgactggtttctcagcgaacgtcagaaaacttgtatctttgaaagatttgaccatttctgggtacaatgctcatgattgtcacaagatgttaacagtcttcctaccgattgctataagagcggtcaagccagttcacactcgattagtgataacaaagttgtgctactttttcaatcgagtatcacagaaggtttttgatcctgaagagttaggcccccttcaaaaatttgcaatcgagacagcgtgccagcttgagatgtttttccctccagcttacttcaacatgatggagcatctgattgtccacatcgtacctcagattatcgagattggtcccctgtacctacaccagatgtgggcgtacgagaggtacatgtccgtcctgaaagggtatgtccataaccgagctcatccggagggatcaatgatagaggggtacacaactgaggaggtggtagaatgctgcatagattacatgaaggacgccgaacccatcggtgtgaccccccctttacacgaggggcggttagctgggatggggatcgtaggcaagaaaatgttctatgatgaggactacaaagataaacggaaatttcctgaatggttgaaggagaaagatctgccgttgggtgattcgctgaaggaaaaaactttgcgcaggctagcaaatagcccaactagccttgtgacctcatggcaagggtacgacatcagcggatataggttttacacgatgttcaaggacaggaaaagcgcagctcagaacagcggagttcgggtggaggcgtttgacgcatcaggtgagaagaagtcttactacaggatcatacaagacatttgggagctggactatggccttaacatacagatcccagtgctacgatggcaatgggtcagagacacaataggcgtattcgtcgatgactacgacctgacggttgtgaatcgtagcaagctaggacacaaggatgatccgtgggttcttgctgagcgtgttgctcaggccgccacctcctttcctcctcttctcctcccctcatgccgccgcatcttctcctccacccctaggctgccgccgcctcctctcctccccgtgcgtcgccgccgcctctactccccgtcccatccagatctgagccgccgccgccgtcttctccatgttgccgacctccccaaaaccgtcgacgccgacctccgggccaagtcgccgacgccgccgacctcctccccaagttgccgacgccgccgccctcgtccccaagccgccgacaccgacctcctacccaagtcaccgacgccgtcgacctcctccccatgttgccgactccaccgccctcatccccaagccgcctcctcgccgacctccgccgccggcctccccgaccacctccccaagccgccggccgaccatctcctccgggatgatgatttgtga

SEQ ID NO: 12574 - DNA, 2343 bp, Oryza sativa
  Clone ID: PAT_MRT4530_1868C.1
atggatcttggcaaatcatcctccaccagcgcgtcgctgaagaagattcaggaagacggcgcccttcccggtcgtgggaccatggaaagggaagcaggaggtactaatccccagcccgtcttaggtcgcatggttgcgattgaagactacattctctgcggttttctccctccgccttccgaatttcttctcttagtcatgaacttctacggtctttctctgctccacctgaaccccaattccatcgcctttcttagcatcttttctcatctttgtgaggcctacattggggtagagccgtttctcgatctctttcgcttctactatgagctgcgttggatggagcccaacagggtgtctggatgcgtcgggttccgacttcgggatggcctgaagtcgcgttacatccccttccagtgtccctcttctcgcagcaagtggtggacgaggtggttctaccttcagatcaaagattcggaccctgtctttgttgttcctgaggaacaaccggacaagatcccgtcttggaccgcaaagccccctttgaccccttctctccaatccttcatcgacattgtcgacgatctccgagctcttcctctgactgacatcatcgggccactcgcggaccatcaggtgacggcatctctgaaagagaaggtcgccaaggaggcgtctgatgctgctgctgctaccacaagtggtggcaatgttccgacaaaggggaggaagttctcctctgtaagcggacatcgtcgcaaggcatcaaccccctcggtaagctatcctgtcatcagatcgtacaaccagaagaatttcgccttacttcgcatcgaccgtttttcaggcctcggacgcgtctctaccgcctccacgacgacaacgtcttgtgacggttggcgagaactatctcatagggcggcacgggcgaaggcggtgcaagacgagtctggagggacttccggcgtgtctcccactgcagcctcgacggatgtcgtgcttgcgcccgggagacgcgaggcgacaccaagcggcccagtcagcaatcctgcggctggtcgtggtccaccggcggccatcctcacctgggaggagctccaggtcgagatggggcgcctcctcgaggctggtgctcccggcattggccgtgagattgcggaggcgaggtcggcagcggcgtcggcgaacgagtgtgctgaccggcaggtacgcgagtgggcggaggctcgtgaagacctcaagaagatgagggagttggtggccggcaacgagcgacaacggcaggggctcgaggaccgcatgtcgaagctcgggaacaacctgtcggaaatccgtggctcattgcgggtcacacacactggcctgcaccagcttgccggggagtgcggcattaagtctactatcccggcgaatcccgacgagttctcgcttacatcttctcttgcggagctggcggcggcgatgagggagatcccctccaagcatgcggccaggatcggggaggagacgtcgaacgggatctacaccggggcgtgccacgtcctcgcgtgtgtaaagctggcacatcctgaactcgatttgcgcgagatcttggatcagggggcggctagcaacacgcataaggaggtgatggaagaagtcggtgatctgggggaatctgttctccccctttttgaagaagatgttgatgacgaggatgtccagcagcgcgggcagcccgagtcaccagcgattattccggttcttgcgtttgaaccacatgcgtcgcccgacaatgtagaccagacccttgctacggggacggagatggcgacgacatccttagatctcgagagtgctcttgctggccaagatcgtcgtatccaatattggaagacaaaatttgaagtagcggaactcgagagaaccatgcttgcagtgaagaaagagcaggctgtggaaacgctccggggtcatgaggtgtggttcaactcgtacttgaagagttgctgcacatccatggccaaggtctgtagagaacttcgagtgccccatggagatcccgaggagtcggcggccggatacatctcatggctgaacggagcatgtgctcaactcgatggcgtcggcaagcgtatcgacgaggccttgaagcaggagtgtcgtcgatcgagccgatatgccggagggcacgtgttggcttgcctacgagatcatcgcccgcacctggacctcgattttctccgtgagggttttgctcattctcggaggactccggcggagatagaccacctggcgaggtcgatggcgccgttggcggagaagatcttccagtctatggactggcgttggccttcttggtag

SEQ ID NO: 12575 - DNA, 1560 bp, Oryza sativa
  Clone ID: PAT_MRT4530_18690C.1
atggatcggacatggatgtacaacacgaaaagagctcatccaacgttcttgaaggaagcaaccaaatttgttgaggtcgcaaagacacatgctgtgagggagaatttgagaagcattttttgcccatgcaaagtgtgtaagaacgaaattttgttgcaagatccgaatgaagtattgtcgcacatcgtagagcgaggatttaagaagggctacgagatatggacttttcatggggaagtcggcggtcgtaacgaagtgacggatgatttctgctttgatgatgcagaaaattttataatcgaagacatgtcacagggaaacatcccagaatgcggtggctttggtatagagaatgaaggtcttcagaagatccatgcatgtgaaaatcattgcatactgtaccgcaaggaattcacggatttagactcttgcccaacatgtgggacgagtcggtacaagacgggcaatggagcctccgatggagaggtggtcgacaaagatgatgcaccggtggatgagaataaaaagattcctaggatggtgatgtggttcctgccagtgaaagatcgcctgaagcagctatattccaaccgtgacgacgccgagttgatgagatggcaccaggagggtaggaaaaatgacggtaagatccgacaccccgccaatgctcgacagtggaaaaactttaatgcactacacccggaatttgcaaaggacccgagaaataagcgaaagtatattcttttgtctatccttatacaaggtccaagacagcctgggattaatatagatgtgtttctggaatcattgatggaagacatgcaagaattgtgggaggaaggattacgaatgtgggacgagtaccgtagggaacattttactctgcatgccatcatattcgttacgatcaacgacttaccggtaaacttttcgctctcgggccagtttaaggggaagttcggatgtctcatatgtatcgacaagatgtcgtacaagtacctcaccttgtcaaccaagggtgtgtacatgcgttgtcgtcggttcttacctcagaggcataggtggcatgcgaaggctagattattcgacaatacagtagagaacgatctagttccggaaacacgaactggtggctctgttttcgagctgagaaagaacattaagattgtgtttggcaagccaaagaagaagcccgtcaagaggaagaaatggatggatcaggaaaatactgatgcagctgcagaagaaagtaatctgccttttaagaagcactcaatatttttcaggtatctggattactggaaagacctgaaggttcgtcatgccatcgacgtaatgaaccttgagaagaatatgtttgatagcaccattggcactttactggatatcccgagtaagacgaaagatgggttgaagtcccggaccgacctcatcaatttggacctaaggcatgagcttcaaccaaaagagctgccaaatgtgaagatcgatattcctccggcttgctactcactgataccggaagagaaaaaaaattatgtagatgcttgcatagtgtga

SEQ ID NO: 12576 - DNA, 508 bp, Oryza sativa
  unsure (1)..(508): unsure at all n locations
  Clone ID: PAT_MRT4530_18691C.1
gtacgccccaactcttgggctttccccgttccgccttcggacatggacacaggagtcgggatcaacttacgtggaggcgcggcggagctggagcgctcgcacggtgagtgtctgcttagatagggactgtacgctagtcaggaggatggggagatgcgaatggtccgagggccgataggcaggccggaggatctgatggtgtccgtttgccggaatgtgcctgtggaggaggtgcgtggtccgtccgtccaactgcgcgttcccggaggctcacacgacgatatcgtccgaaggggtntccggttccaagtccgttaagtgttgctggttgtcaccacgcagattagtggtgcgcgcgcaactgaggtccatctcttacntcacagtccagtgtcgatgtcntcagtgttgtgaacattgtgatgttcctgtgtggcttgaatccctttggtatggtttcgaataaaataaaggggaaatntattctaaaaaaaaaaaaaaaaaaaaa

SEQ ID NO: 12577 - DNA, 2389 bp, Oryza sativa
  Clone ID: PAT_MRT4530_18692C.1
atggcggtaagatccgacaccccgctgatgctcgacagtggaaaaactttgatgcactacacccggaatttgcaaaggacccgagaaatgtatctggattactggaaagacctggagattcggcatgccatcgatgtaatgcaccttgagaagaatgtgtttgatagcaccattggcactttactacacatcccgagtaagacgaaagatgggttgaagtcctggaccgacctcgtcaatttggacataaggcatgagcttcacccaaaagagctgccaaatgggaatatcgatattcctccagcctgctactcactaatacctgacgagaaaaaatctttatgtagatgcttgcatagtgtgaaagtcccgactggtttctcagcgaacaaggtttttgatcctgaagagttaggacctcttcaaatatttgcaatcgagacagcgtgccagcttgagatgtttttccctccagcttacttcaacatgatggagcatctgattgtccacatcatacctcagattgtcgagattggtcccctatatctacaccagatgtgggcgtacgagaggtacatgtccgtcatgaaagggtatgtccgtaaccgagctcatccggagggatcaatgatagaggggtacataactgaggtggtggtagaatgctgcatagattacatcaaggacaccgaacccatcggtgtgaccccccttttacacgagggccggttagctgggacagggatcgtaggcaagaaaaggttctatgatgaggacttcaaagatgtagcggaagcacatagcagcgttttgcaacagctcgccatcgtcgagccgtacattcaggaacacatgaacgagataagagcccgcaaccctagaagaacggccatttggatatgtaaagaacagaaacggaaatttcctgaatggttgaaggaaaaagatatgccgttgggtgattcgctgaaggaaaaaactttgcgcaggctagcaaattgcccaactagccttgtgacctcatggcaagggtacgatatcggtggatataggttttacacgatgttcaaggtcaagaaaagcgcagctcagaacagcggagttcgggtggaggcgtttgacgcatcagatgagaagaagtcttactacgggatcatacaggacatttgggagctggactatggccttaacatacagatcccggtgctacgatgccaatgggtcagagacacaacaggcgtatccatcgatgactacggcctgatggttgtggatcgtagcaaactaggacacaaggatgatccgtgggttcttgctaagcgtgttgctcaggttttctatgtcaatgatcctttcgacgataagatggccattgctgtaccgggaaagcaaaacatcattggcattgatagcattgaagacgcgtcagattacaaccaatacgacgacgtccctttgttcacagattttcctaaccggatcaaggaagttgagacaagccttgacgaagatctgtttttgtccgcgcggaaggatggcgggctcggccaaaaatttctaagtcccggcgttttctccaccgacgccgccaggctgccaaaatctcccgccgcgctaacaccaccaaaacctctcctcccgcctccgccacctcctctcctcctcttctcctcccccacgccaccgcctcctctccacctccccccaccggcgccgccgacctcctccaccaccgcccaaaaccccacgaaagatccaggccgccgccgcctctccgccgaccccgccatcttccccgagccaccggcctaccacctcctccccaagccgctgacgacgccgaccccgccatcttccccgatcgaggacgccgccgaccacctcctccccaagcaggcgccgccgactgacgacgccggcgaccacctcctccccgagctgccggccgaccacctcctccccgacctcctccgatgtttagcgtccatgttcctcaaggccggtgccggatgtctcagcctcaccttccgtggggcgttcaaccggggacgagcctcggggcgcccggaggtcgggaaaggcgagccccgagggtcgtgccatcgagcccccgccgccgccgacgacgagcagctcaaggggcgtgggcgttccgggccggagcgaccgagttacgtgacctacaaatattcttgttcgttcccggcctttattgctgtttcgtggaaaagaggtgaggctgaggctggcatgcgctggcctgaaggtgtaaagcagtcgctggttttggcgctcactgttacagtatgccccttcctcaccactccgcctggaaatctgccggcgggggcgtttaagcgctggtgccggccagtgctaccacatccta

SEQ ID NO: 12578 - DNA, 1152 bp, Oryza sativa
  Clone ID: PAT_MRT4530_18693C.1
atgacggtaagattcgacaccctgccgatgctcgactgtggaaaaactttgaagcactacacctggaatttgcaaaggacccgagaaatatgtctcatatgtatcgacaagatgtcgtacaagtacctcacctcgtcaaccaagggtgtgtacatgcgtcatcgtcggttcttacctcagaggcataggtgccatgtgaaggccagattattcgacaatacagtagagaacgatctagctccggacacacgaactggtggctctgtcttcgagctgacaaaagatattaaggttgtgttcggcaagccaaagaagaagcccatcaagaggaagaaacggacggatcaggaaaatactgatgcacctgtagaggaaagtaacttaccttttaagaagcactcaatatttttcaggtatctgaattactggaaagacctggaggttcgtcatgccatcgacgtaatgcaccttgagaagaatgtgtttgatagcaccattggcactttactggacatcctgagtaagacgaaagatgggttgatgtcctggaccgacctcgtcaatttggacataaggcatgagcttcacccaaaagagctgccaaatgggaagatcgatattcctccggcttgctactcactaacaccagaagagaaaaaaaaattatgtagatgcttgcatagtgtgaaagtcccgactggtttctcagcgaacgtcagaaaacttgtatctttgaaagatttgaccatctctgggtataatgctcatgattgtcacaagatgttaacagtcttcctgccgattgctataagagcggtcaagccagttcacactcggttagtgataaccaagttgtgctactttttcaatcgagtatcacagaaggtttttgatcctgaagagttaggacccctccaaaaatttgcaatcgagacagcgtgccagcttgagatgtttttccctccagcttactttaacatgatggagcatctgattatccacatcgtacctcaaattttcgagattggtcccctgtacctacaccagatgctagcaaatggcccaactagccttgtgacctcatggcaaggatacgacatcggcggatataggttttacacgatgttcaaggacaagaaaagcacagcttag

SEQ ID NO: 12579 - DNA, 3621 bp, Oryza sativa
  Clone ID: PAT_MRT4530_18694C.1
atggcttcccgtccaccccgtgaacggtcacgacatggcccggcatgtcgatcgggccatgcagctccgactgatctcgggtcatgcctgatcatgcctagatcctcctgcgcctcccgccaccgcttccgcctcgtctgccggcggtggcgggacctgctcgacgagcgcacgccgcggatccacgcccgcgccaagccgctcgccttcttcacgcgcggccgccacgcggcgcagcctgggtcctccgcctacgtctacgacgacgacctgtccggcgagttcgtctgctgccggcaggtctggtgcggtggcgccgccgtggcggcggggctcatcatgttcggctgccgcaacggcatcctcgccatgctggacgaacgcaccggcgacatcacgctcgccaacccggccaccggcgagacgctcgccgtgccgccgccgccacggctgcctcggaactgtgcgttccaccgcaccgccgtcggcttcggctaccacccgacgacggggaggtacaaggtcgtccacctccccgtccgcggcgaggcctcggcgttcggcgtggtggaggtcttcacgctgcggggctcgaacgcgacatggcgggagggggatattgtgggggctttaatggttcattacggggtagtggtggctcaagcccccaccgcccccacgctgtctccgccactgctgacggtgatacaacgaaggctggcagtcgccatcacggcctcggacgtcaccgtcatcgagacggatactcctacagttgaggtgtgggtactccataaaggacgacgcaagcagaggtggatcaaccagtacagggtggttgggatggacacgtaccacaagcagctcacacggccatacttcttcttttcccatggagaacactacatgatcatcacttggcggtttccatacatttccatgcgtgcacaccggctcaaaaaaggcgacggggagccaaaggagatggctttgttggagcaagggacgagcatccaggttttctcctacgtcgagacaacggagacactgaggcgggccataagtggctccgcctggaaccaggtgaatgctggggtcaggctattggccgcacgggataatcgactaccccgtgcgatgcacaacacgaaaagagctcatccaacattcttgaaggaagcagccaaatttgttgagcttgcaaaggcacatactgtgagggagaatttgaggagcattttttgcccatgcaaagtttgtgttcaaaagatccatgcatgtgaaaatcattgcatactgtaccgcaaggaattcgcggatttaaactcttgcccaacatgtgggacgagtcggtacaagacgggcaacagagcctccgatggagaggcggtcgacaaagatgatgcaccggtggatgagaacaaaaagattcctaggatggtgatgtggtacgtgccagttaaagatcgcctgaagcggctatattccaaccgagacgacgccaagttgatgagatggcaccaggagggtaggaaaaatgacggtaagatccgacaccccgccgatgctcgacagtggaaaaactttgatgcactacacccggaatttgcaaaggacccgagaaatgacatgcaagagctgtgggaggaagggttacgaatgtgggacgagtaccgtagggaacattttactctgcatgccatcatattcgttacgatcaacgacgtaccgacaaacttttcactctcgggccagtttaaggggaagttcggatgcctcatatgtatcgacaagacgtcgtacaagtacctcacctcgtcaaccaagggtgtttacatgcgtcatcgtcggttcttacctcagaggcataggtggcgtgcgaaggccagattattccacaatatagtagagaacgatcttgctcctgaaatacgaacaggtcactctgtcttcgagctgacaaagaacattaaggttgtcttcagcaagccaaagaagaagcccgtcaagaggaaaaaacggacggatcaggacacaactgatgcacctttagaggaaagtaacctgcccttcaagaagcactcaatttttttcagcaccattggcactttactggacatcccgagtaaggcgaaagatgggttgaagtcccggaccgacctcgtcaatttggacataaggcgtgagcttcacccaaaagagctgccaaatgggaagatcgatattcctccggcttgctactcactaacacccgacgagaaaaaatctttatgtagatgcttgcatagtgtaaaagtcccgactggtttctcagcgaacgtcagaaaacttgtatctttgaaagatttgaccatctctgggtacaatgctcatgattgtcacaagatgttaacagtcttcctaccgattgccataagagcggtcaagccagttcacactcggttagtgataataaagttgtgctactttttcaatcgagtatcacataaggtttttgattctgaagagttaggcccccttcaaaaatttgcaatcgagacagcgtgccagcttgagatgttttttcctccagcttactttaacatgatggagcatctgattgtccacatcgtacctcagattatcgagattggtccactatacatacaccagatgtgggcgtacgagaggtacatgtccatgctgaaagggtatgtccgtaaccgagctcattcggaaggatcaatgatagaggggtacacaactgaggagatggtagaatgctgcatagattacatgaaggacgccgaacccatcggtgtgaccccccctttacacgagggccggttagctgggacggggatcgtaggcaagaaaaggttctatgatgaggacttcaaagatgtagcggaagcacatagcagtgttttgcaacagctcgccatcgtcgagccgtacattcaggaacacatgagaaagataagagcccgcaaccctagaagaacggccatttggatttgtaaagaacagaaatggaaatttcttgaatggaaaaagctttacgcaggcgagcaaaatggcccaactagccttgtgacctcatggcaagggtacgacatcggcagatataggttttacacgatgttcaaggacaggaaaagcgcagctcagaacagcggagttcgggtggaggcgtttgacgcatcaggtgagaagaagtcttactacgggatcatacaagatatttgggagctggactatggccttaacatacagatcccggtgctacgatgccaatgggttagagacacaacaggcgtattcatcgatgactacggcctgacagttgtggatcgtagcaagctaggacaaaaggatgatccgtgggttcttgctgagcgtgttgctcaagttttctatgtcagtgacccttctgacgataagatggccattgctgtaccgggaaagcaaaacatcattggcattgatagcattgaagacgcgtcagattacaaccaatacgacgacgtccctttgttcacagattttcctaaccggatcaaggaagttgagacaagccttgacgaagatctgttttcgtccgcacggaaggatggtgtttccaaaattgtcaaacattag

SEQ ID NO: 12580 - DNA, 1212 bp, Oryza sativa
  Clone ID: PAT_MRT4530_18695C.1
atgtcacatggaaccatcccggaatacggtgtctctggtatagagaatgaaggtattgattttgatctggaagatatgttgcggcacgttgaactagaggttctaactggcaacggagcctccgatggagaggtggtcgacaaagatgatgcaccgttggatgagaacaaaaagattcctaggatggtgatgtggtacctgcgagttaaagatcgcttgaagcggctatattccaaccgtgacgacgccaagttgatgagatggcaccaggagggtaggaaaaatgatgtagagaatgatctagctcctgaaacacgaactggtggctctgtcttcgagatgacaaagaacattaaggttgtcttcggcaagccaaagaagaagcctaagcactcaatatttttcaggtatctggattactggaaagacctggaggttcgtcatgccatcgatgtaatgcaccttgagaagaatgtgtttgatagcaccattggcactttactggacatcctgagtaagacgaaagatgggttcaagtcccggaccaacctcgtcaatttggacataaggcatgagcatcacccaaaagagctgccaaatgggaagatcgatattcctcctgcttgctactcactaacacctaacgagaataaatctttatgtagatgcttgcatagtgtagaagtctcgactggtttcttagcgaacgtcggaaaacttgtatctttgaaagatttgaccatctctgggtacaatgctcatgattgtcacaagatgttaatagtcttcctaccgattgctataagagcggtcaagccagttcacactcggttagtgataacaaagttgtgctactttttcaatcgagtatcacagaaggttttcgatcctgaagagttaggccccattcaaaaatttgcaatcaagacagcgtgccagcttgagatgtttttccctccagcttacttcaacatgatggagcatctgattgtccacatcgtaccacaaattatcgagattggtcccctatacctacaccaaatgtgggcgtacgagaggtacatgtccatcctgaaagggtatgtccgtaaccgagcttatccagagggatcaatgatagaggggtacacaactaaggaagtgcagattgaagttggtccatacgggcttgacaaagtctacttgaactttagcatgcccggccaactttag

SEQ ID NO: 12581 - DNA, 333 bp, Oryza sativa
  Clone ID: PAT_MRT4530_18696C.1
atggcgaggagaggcgatcgccagaggctcaagacgttaagaacgcgccgtcgccgaggccgcttcgccgacctccaggacacagctaccatggggccctctgctaacggctcacaccacgcgtcttctgaggagctgatctggatgccatcgcctggggtgggaggtcggcggagaagggagggtgacaccgtcgccaccgctgctcacggtgggggaggtagccgccaccccgccttggcccgcaactatgtcaacttggaccatggcatgccacatgggccttgtgcacttaacaggccaaggtgtgagaaatacgacccatccttctaa

SEQ ID NO: 12582 - DNA, 171 bp, Oryza sativa
  Clone ID: PAT_MRT4530_18697C.1
ggatccctggagtgtgaccttgaaccttccttgggtaataaagtgtgctcatgcgatgaaggatgatgaccttggtggatatttgaaattggcgccattctggtaaccatgagatgatgggtcggatgggatgtgctgttgacccaatagttggatgcgaaaaaaaaaaaa

SEQ ID NO: 12583 - DNA, 1071 bp, Oryza sativa
  Clone ID: PAT_MRT4530_18698C.1
ccggccgggcggcctccgactcccctcccgtctcctcgcgccgccgccgccgccgagcagcgccgatccccacccaccccggcgggcaagcggcgccggcgtcgtcctgctccccacacccagccgccggtgggcacacgcacagagagatcctagcaactatggtgatccctccaccggaaagggcggctaggatcacgcgctttctgaagccctaccttctgaggatgcatttctcgaacaagtatgtatccgctcaggtggttcacaccccaacggcgacggtcgcctgttccgcgagctcgcaggagaagctgctgaggccgaacatggagtccactcgcgatgtcgctgccgctgccaagatcggtaagctgctcggcgagcggctgctgcagaagggcatacccgctgtgtgcatccacatgaagagagagcagaagtaccatgggaaggtcagggctgtcattgactctgttagagaagctggagtcaagctgttgtagtctctaaaacagtagaatcttttattaaaatttctgcaagcttgttcctctgaatctcaggcaaaatctgaaagatgtcggatcagacaggaaattttcatttcggtattgagggctagatggcctatgtggagatgttcctggtgaataaaggattttgtactattgactactgggacaaaaaaaagttattttatcatcggtaactttactcataaaaaaaaaaaaaaaaaaaaaaaaaaaaaaaaaaaaaaaaaggggggggggggaaaaaaaaaaaaaaaaaaaaaaaaaaaaaaaaaaaaaaaaaaaaaaaaaaaaaaaaaaaaaaaaaaaaaaaaaaaaaaaggggggggccctttttaggggtccaagttttatttccccgggtttgcaagtttatattttttttttggggcccctaaaataaaatccggggcccgggttttaaaaacgtttttttggaaaaacccttggtttccccaatttaaatgctttggaaaaaattccctttttccccgtttgggtttatgcaaaaaggccccccacttttgccttttccaaa

SEQ ID NO: 12584 - DNA, 158 bp, Oryza sativa
  Clone ID: PAT_MRT4530_18699C.1
tctaatgagggcgtcaacatctccatggtatgaggagggaccttatatacacttgtggagaggttgatcaaccacccgatactcttagccaagggagggattgacaggggacccatgggcctgagaagaaggtggaggagtactttacggggctgggc

SEQ ID NO: 12585 - DNA, 404 bp, Oryza sativa
  Clone ID: PAT_MRT4530_1869C.1
gggtaacaggcattcataaagggtctcccctttaatctatgatacctgaaaaaaacaaacctggggatcattaaacgtcatgccggacttgggagatagtttataccttttcgggaccgcttttgttttccatgggggacaagaacttttccatgctgtcctgggccttggatgggggggccgccccgctgtcaaaggggacaaaatccttccagggcttgaggacctcttcaggaggggggggaacgtccaccggaaagccctggccgccggggccctcccaccttgtttgtcccgcccaacccctgccgaccttgtaaagaccacccggggggttcttgggccccttgcccctgccaagggcaaggaccagaggagcaatgtattcgggcttgaagggctgg

SEQ ID NO: 12586 - DNA, 349 bp, Oryza sativa
  Clone ID: PAT_MRT4530_186C.1
tgatctggagatgctccacttttaagtgttgtatttgcctctttttattatgcttacaggcagctatataaaaacctcccgcgcagaaatacactgtccgatgactatatctaactggattcccctgccactcgacaatgatttaacatatcaaaggtcacgggcacgtacaacacacacaaaagacagaaggcaaaaaaacaaaaaagccactgggccgtgtcggcggatctgcagacgtcggcgccgatctgcgcagaaccttgccacgcagatgtgcacgcacattgattccactctatttcgtgcgatttcgcactgattttctcctgcgcatttcgtcgctgga

SEQ ID NO: 12587 - DNA, 213 bp, Oryza sativa
  Clone ID: PAT_MRT4530_18700C.1
atggcagcctgcaaagcttttgaccaaaggtcacctcttgcactgaggtttgttagctgctatgttgtggttagtaagaagtttgagcagttgaaaccttgtatgataattgacaagataaaagtgactttcccagctggattgtatgattctgcagctatgcataagtacaatgaaatacatctggttagaaaacaaaacaacgatgaatga

SEQ ID NO: 12588 - DNA, 136 bp, Oryza sativa
  Clone ID: PAT_MRT4530_18701C.1
gcacgaggatgaaatatgtgtagctgaccatggattgctgtacccaagtgttcagagattggaatacacaacagcaacatacaaacaactatgtatatgtagagcagcatgaatgaacctgagaaaagggttgcat

SEQ ID NO: 12589 - DNA, 324 bp, Oryza sativa
  unsure (1)..(324): unsure at all n locations
  Clone ID: PAT_MRT4530_18702C.1
ccgacgccgccgccgccgccgccgggatggcctgcgacctgcgcccgccggagcaccaggnggcggaccaccaagaccnccaccgaccacaccangggacgaacaaaaggcngcggggcncccaccccgcgaaccacaggcncgcngnggncaaagaaaccangcaanngcnacggggggggggggacccaaaggangcncnnnggncnccacgaggcaccaccaacaggggccccagaagcacnngangcagcagnacagcnngnngaaccccnaaaagcagcggaagaagaccaaacnggcangcggcnngcaaagaacagg

SEQ ID NO: 12590 - DNA, 281 bp, Oryza sativa
  Clone ID: PAT_MRT4530_18703C.1
gggaaacatttaaccattcatctattcaaaatttattatgaatatgtaaaaatataagccagtgttcaaagtaactataggtatcacacggatatgtggatccccaataccctcacaaccagattgggaggcagagcatcggtccatttctatgaagttatagaatttacaaattataatatgcaccagcttctcataatctctagctctcctagcgggccttaatttcgactgtaactgctctaaattttcatacatacagttaccttcagtaaacatag

SEQ ID NO: 12591 - DNA, 566 bp, Oryza sativa
  Clone ID: PAT_MRT4530_18704C.1
aacgacgaccaccggatctttcttggcaatggtccagtgatccatccatccatccggtgactctctctccttcctacacatgcatacctccatgcgcgtcaatggcttcttcttcttcttcctcctccatctcttgtaccatttgtatctacctacctgtcgcctcctccatggctcgtccatatctcaacaccatcaaaaagctcaaaaacctaaaacctcaagaattctcttcctcctccggcatatttctccattgattcctcatgcaagctagcagctatacatctccatgccaagaaagaaaaattcgcccatttcaagctgcatgcatgcccatcgatcgttcgtcgctggatgttcctagcaagaaaaagctagtagcatcgatccatttcttgattcgttcttgtgttaattacagtggtctctcccatctcgcgtctcctcttagctagtgttaaaagcaaaaaaaaaggaattggtggcgtggtaatttattgatttgttgtggtaaatttaataaggaccctccattcgtgagggttcacggagagggtttaaaa

SEQ ID NO: 12592 - DNA, 612 bp, Oryza sativa
  Clone ID: PAT_MRT4530_18705C.1
ttcgaatcattaaaaactccaacttctaaagagagaccagctgagtttgttgcaagtcgtgcgaactattcaaaggatgtagaattcagcccaataccagaaaatttagggactgtagctgatgaggacctctggatgcagctgaacaaggggtgtgttactgatctcgaaatgcttgagatgacacctggtttcaaatgtgcgccatccctggcagatgataaagcatcagttgcaactccagacgaggaaccaatcgacgcaagatgccaaaggctagagaaggactgcaccgccgataggcagcagctggaggattcaaaggcgtggcgcgcggcgctcgaggaggagcgcgacacgctgaagagagaaaactcgtccttactggatgcgctcgccaaggcgaggcaggacgccgaccatctcgtcgccgacaggctggaggcgctcagggagctggacatggagaagagcaggatggatgagctcaagcaggagatcaagctcttcagccaggccttctcgctgaggcaggggcagctcacctccctgtacaccaagtccaaggccattgtggagaactgcaagacgtcccagttggccttgccctga

SEQ ID NO: 12593 - DNA, 3630 bp, Oryza sativa
  Clone ID: PAT_MRT4530_18706C.1
atggccatttattacctggaaagggagggattaacccacaacatgccaatgcatggccatttttatactcctctgcccctgaaccattggcacgcggataccaccaacgcggctgacatgacacgtgggcccatgcgcatgtgggccccacatgtcagtggcatgaattttatatttttcatctcaaaagaaaaggtattgatgagagtagaaatggtgagctctcctgatgtactgatcattccatcacctccattccccagtggtaacactcgtgggggaggaggaggaggaggaggtagtagcccggcacgcgggccgcagcccgcaccgccgcacccggcaccgggccagcaccccccactactacaaccagctcgacgcgcgcgaccgcaagcggccggcggcccccccggcgtgctcgcaccccagccagctagaagtgcccccccgccggcagccccgctcccccgcttgccgcgccggcgcctccgcggccactgcaaccgcgccgcccagcgggcggcagacaccgaaccggcccgggcgcccggggccgagcataccgcgcgccggcggcagccacacccgcggccgctgcgccgccacggcggccacgaccaagcggccgacgccacggaccgcgcccatgcagcagcagcagggggaggggtgccagttcggcgcggtggcgccggagatgtcgccattctcgccggcgctccatgcgtcggcggaggccgcgtcgcccatcagcagccggccgccgccggcggccagctcgccgtcaccggccgcccagcagcagcagcacaggacaaggaccaacttcgacgagctggcgggcggcgaccccgcggcggcggaggcgggtttcccgacgccgaggcgctggcggcggcggcggtcggcgaggagggagccagcggcggcgcgggggggaaccggtggccgcggcaggagacgctggcgctgctcaagatccggtcggacatggacgccgcgttccgggacgccaccctcaagggcccgctctgggaggaggtctccaggaagctggcggaggagggttaccggaggagcgcgaagaagtgcaaggagaagttcgagaacgtgcacaagtattacaagcgcaccaaggagagccgcgcggggcgcaacgacggcaagacgtaccgcttcttcacgcagctcgaggcgctgcacggcaccgccgccggcgtcgtggcagcgccatcgccggtgacgtcgctggccccgccgccggcgacggctgtgggggtgtccggcggggtgcgcgcccccgccgagccgccgcccgcggtggtgatggggaacgtgatgagcttctcgacgtcgaacacggaggagtattccgacgaggaggactccgacgacgaggggaccgaggacatgggcggcggcggcggtgatgagagggggaagaggaagaggttgtcggagggtggcgccgccgcgggcgtcggtggcggcggcggaggaggaggagggagcgggaagatgatgaggttcttcgaggggttgatgaagcaggtgatggagcggcaggaggcgatgcagcagcggtttctggaggccatcgagaagcgggagcaggaccggatgatccgcgaggaggcgtggcgccggcaggagatggcccgcctcgcccgcgagcaggagatcctcgcccaggagcgcgccatggcggcctcccgcgacgccgccgtcgtgtccttcatacagaagatcaccgggcagaccatcccaatgccgcccatcatcgccgcccccgccatcaccgtcatgcccccaccggcgccatcccagaccctccgccggtcccccagcccaagaggcgtggccagccacagccgccgccgccgccgcctcagccgccgcccatcacgtccgcgccccaccaacagcagcagcagcagccgcagctcaagggacacaaagtcgccattgccggtgacgccgcgcaaagcagcatgcgacatgtgggctcatgacgcgacggcaggccgccgaggggcacgacgacaactgcggggtacgaggcggcggcggggggcagccgtcgtcgtcgcggtggcccaaggcggaggtgcacgcgctgatccagctgcggagcaacctggacaaccggtaccaggaggccgggcctaagggcccgctgtgggaggagatctccgccggcatgcggcggctgggctacagccggagctccaagaggtgcaaggagaagtgggagaacatcaacaagtacttcaagaaggtcaaggagagcaacaagaagcgccccgaggactccaagacctgcccctacttccaccagctcgacgccctctaccgcaacaaggcggctctcaactcctcctcctcctccgccgccgccgccgcaccgggccctcccgccgccggagcacgcggagccggcggtgacagtcgccgcgccgatctcgcagacaccgccgccgccgccgccacagcccgtgacgacgaccaagaacggcaacggcaccagcagtacaaacggcgcgaacggcgaaggaggaggaggcggctccgggggcatgcaaatgcaggcgagcaacggcagcgtcgtcgccggcaacaagttcttcaccggcgcggcggcgaatggcgaaggcggaggacattgtgaaggagatgatggagcagacgccgcagcagttcacaacggacgggaccgacagcgacaacatggacgaggacgacgaggatgactacgacgacgatgacgacgacgtcaagatgcagtacgggatccagttccagaatcagaacccggccgccgccagcaccgcaccaccgccggcggcaaccccggcacccgcggcccccaccacggcgccgacgagcaccccccaacgacgggctccggatctttcttggcaatggtccagtgatccatccatccatccggtgactctctctccttcctacacatgcatatctccatgcgcgtcaatggcttcttcttcttcttcctccccctgcatgcatcagctatcagcaaccactctccttcgagttgggatctctcctgcaatgcatgtgcggtaagtgccacatgacatgtgggcccggaataggtgggacccacatgccagtgacaccagtacagcagtggattttgatccctctccttcaccttgtaattctcccgtgccattccattatttattgatttctctgtgtaataagagcatcgatcgatcttccctgaatcttcctagcaagaaaaagctagtagcatcgatccatttcttgattcgttcttgtgttaattacagtggtctctcccatctcgcgtctcctcttagctagtgttaaaagcaaaaaaaaaggaattggtggcgtggtaatttattgatttgttgtggtaaatttaataaggaccctccattcgtgagggttcacggagagggtttaaaacttggtgcggtgaaaaacggcacagaggagcggtaataacacctcgctctcgcggttaaaaaaaaaacggacgcgtgggttttaacccgttttttttgcagtggtataaaacgttgttactgtgcacattgtgtggttactcttcgtatactttgcatttttgct

SEQ ID NO: 12594 - DNA, 181 bp, Oryza sativa
  Clone ID: PAT_MRT4530_18707C.1
agaacatcaaggctataaacacaaatgatgtgtcatcttatttcttggcacctgatgaaatatccgataatgtcctcctagtgttagctgatgggttgtttgacctatcaactaaccttcgtgtgctacaattgtcacattgtgccttcagctttgcatcaccaccattcattggttgcca

SEQ ID NO: 12595 - DNA, 1662 bp, Oryza sativa
  Clone ID: PAT_MRT4530_18708C.1
atggaggaaggccgccgtggcgaccgcgaggggaagagcgcggccgggtggaccgccctgtcgacgacgaagacgacgctggaggagaagcggcggctgcaggccaacgggagcgtcggcggcgacgccgggacgagtggcttccggaggatcgtgcggctgttcttcgcctgcatggtggccggcggcatccagtacggctgggcgctgcagctgtccctcctctcgccctactctcagactctcgggatttcccactcgtacgtttccctgacatggatctgcggaccaatcgctggatttgtggtgcaacccatcgtcggttactacagtgacagatgcaccatgaagatgggccgcaggaggcctttcatccttgttggctgcctcatcatctgcatctccgtcatgatcatcggtttctcggcggacattggacgtcacctcggtgacaccaaagagcactgcagcacgtacacgggtcctcgctggtcggccgccatggtgtacattgttggcttctggttccttgacttcgctaacaacactgtccaggggccggctcgtgccatgatggctgatctgtcagctggacaccatggccccaacgtcggccagtcgatcttctccctgtggatggctatcggcagcgtcctcggctacttgtccggcgccaacgggaaatggcacgacatttgtgccgtgttggctaactatggtgttcgttcgatcgcgccattcgtcagatggttcccatggctgaaaaccgcggcgtgctgcgacgcctgcgcgaacctcaagggcgccttcttcaccgccgtgctactcatcgtcgtcagcatgacggtgacgatgtacctcgccgacgagatgccgctggacaagcaggacgtcgacacctccggcggcggcgggtgcgccgtgttcgtcgacctcttcaagagcctcaggaacctgccccccgccatgttcaaagtgctcgccgtcacggccgtcacctggctgtcgtggttccccttcatccagtacaacaccgactggatgggacgggagatctaccacggcgagccgcagggcacggcggccaaggccgacgtgtacgacgccggcgtcagggagggcgccatgggcctgctcttctgctccgtcgcgctcggcgtcacctccttcgtgatccccaagctctgccgcaggctgacgtccaaggtggtctggtccatcagcaacttcctcgtgttcgcgctcatggcggtgatggtcgccgtcggcatggtgtccatgagagggtaccggccgtcgctcgccgccggactcaccgggccggacccgacgctcaaggccgtcgcgctcgtcgtcttcgcgctcatcggcatcccccaggccgtgttgttcagtgttccatgggccgtcgcttctgaggttactgctgaggagggtggcggccaaggtcttgccattggtgtcctcaacattgccattgttgtcccacagctggtgatcgcgctcaccgccggcccgatcgacggcgccttcaacaaggggaacacgccggcgttcggcatcggcggcgccttcgccttcatctgtggagtccttgcgctcatctggctaccaaagacaaggggtgtgtccaacgccgccgtcgtcgccggcggtcactag

SEQ ID NO: 12596 - DNA, 889 bp, Oryza sativa
  Clone ID: PAT_MRT4530_18709C.1
ggtttagataaggagtctgccatgtatctcaatacttccaccggaggttcgttcgcacacaaaacgacgttagaaagtagggagctcttggattgtatcctagagaacacctccttcgttcgttgtgaaaccgtcttgaaaataaagaatacacgtgaggaaccatcgacgaccgaactgaaggtagaagaaattcaacctttgaaattcccattccagtttgatgatgatctttttgaacattatggaaacacctcaaattattcctaccaaaagagaccaccggtcccgtgtaattctcccgcaccactcgatgagaatctcttcaaagagacggtgcagaaattaactaccatcatgagtgatgagtggttaatggagatggaggtttcttctgaagtaattcatattagctcccagtccttaactattccatatctgatgagcgggaaaatggtgtttttcattttgatcttgcgattgaaaaattctatgatggaacccattcctgattccgagccaattgaggaagtgatggctatctctccttttgaggcccccgaatccctcctcgaaaatgatgccaatgcattcgtcgaggagctaggacgatcatagagagatgatcgagttacccaaaactgatccacattcatgacctccagatgagctcaaatctcttctttcaggctttccttataccttcttgcatggtgatacggagtcgcccgtcaccatcagcgacaagctgtctactgacgagacctccaacctcaaagatgtgttagaaaagcatcgctctgttctaggctactcacttcaagacctgaaggggattggactggaccaacggtcaacaataaccggagcctctttgttggtcctgctg

SEQ ID NO: 12597 - DNA, 2934 bp, Oryza sativa
  Clone ID: PAT_MRT4530_1870C.1
atggacggcgtcggcctcggcgtgcacaggcggtgggacacgtcggggagcgggtcgcagtacagcttcaggacgtcggtaagcagcgtcgcggagatatccaccgaggtgggggtggaagtgagcccgccgccgccgccgctggcggcggcggcggacaaggtgtttgtcgcagtcgccgcggacgtgaagtacggcaagagcgccttgcagtggacgctgcagaacctggccaaggatggcgccaaggtcgtgattgctcatgtccactgccccgcgcagatgatccccatgatgggggcaaaagttcattataccaagatgaatacaaaacaggtgaacgactataggaacaaggagagagaaaaggcagaggagaaactagatgaatatcttctgatatgcagaaaactgaaggtcagctgtgagaaactaataattgaggaggacgacattgctaaaggccttacagatcttgttgcccttcatggcgtcaccaagcttgtcatgggagcagcagcagacaaacactactcaaggaaaatgaacacacctaagtccaagacagcactcaagatattggaagcagcagatccttcatgtaagatatggtttacctgtaaaggacatctgatatgtacaagggaagcaaatacaaccgttcctgcaataccaccatcacctgcacacacagttgcatcaacattgtcatcaagcagcatttccagccgtatgagatcaatgtcattgcacccgtcagagagtgaagcatcaagctcaagcggaagtccaaggcacaatctgaacagatcaagaacagaagtggcaaagtatccctcacaaggatctggcactgcaccatctcagttatttggacattcagatcaagatgtcaatgaccagccaacaagaacagcaatgggttctatagattcctgggatgaatttgagagatcgcaaaactcctgctacgattcatcaagaaatagtgatacagttagggtctctggatcagcaatgcagcagcccatgtatgaacctgatgatgaccattttgtatctcctcgtaaactggagaattcaggcgatgatgcagacatatatggtagactccaagaggctcttagtgaaactcaagacctgaagagagagacatacgaagaatcaacgaaacgtcggaacgccgaaagaaatctgatttcagctcttcaaaaggcaagtcattttgcttcaaaagtcaaagagttggagaacctgtatcagaaggaagtcatgcatcggaaaataaccgaagaggcactggagaaacagatacaggagacagaagaaacggaaaggcactgcaatgcattatatgacaagctgcatgatgtggaagaacagaagctcatggtggagcagcacataactgaaatggaggcagttttaaaagaacgcgaagataggctgcatgatgtagaagagcagaaattcacggtggagcagcgcataactgaaatgcaggcagttttaaaagaacacaaagataagctgcatgatgtagaagagcagaaactcatggtggagcaccgtataactgaaattcgttcagttttaaaagaacgcgaagagaagctcgcagagagcaagtatctactccaagtgctccaagcagataaagagaagctacaacaagagcgagatgccgcagtaagtgaatctcaagacttgcgcctgaagaacaaacagagaatttccatgccgggtgaagatctaaacaccgagttctcctcttatgagcttgaacaagcgaccagaggcttcgactaggaactcaagatcggcgagggcggttttgggagcgtctacaaaggcacactccgcaacacaactgtggctatcaagctgctgcacccacatagcatgcaaggtcaatcagaattcgaccaggagattgctgttctcagtagagtacgacatccaaacctcgtcactttgatcggctcttgcagggaggcatttggcttggtgtacgaattcctccccaaaggcagcctcgaggaccgcctggcctgcctgaacaacacgccgccattgacatggcaggtgcgcaccaggatcatctacgagatgtgctcggcgctgagcttcctccactcgaacaagccgcacccgattgtccacggcgacctgaagccggcgaacatcctcctcgacgccaacttcgtcagcaagctgggcgacttcggcatctgccggctcctgatacagacgaacaccggcgccgccgccgccgccaccacccggttgtaccggacgaccacaccgaaggggaccttcgcgtacatggacccggagttcctcaccaccggcgagctgacgccgcgctccgacgtgtactccctcggaatcatcatcctgcggctgctgaccgggaagcctccccagaagatcgccgaggttgtggaggacgccatcgagagcggcgggctgcactccatcctcgatccctccgcggggagctggccgttcgtgcaggccaaccagctcgcgcacctcggcctgcggtgcgccgagatgagccggaggcgccggccggatctcgcgaccgacgtgtggaaggtcgtcgagcccctcatgaaggccgcgtcgctgaccgccgggaggccgtcgttcgtggcccggccggacgactccccgccgccgtcctacttcgtctgcccgatctttcaggaggagatgaacgatccccacatcgcggcggacgggttcacgtacgaagccgaggccatcaaggggtggctcgacagcggccacgacacgtcgccgatgacgaacctgacgctcgagcaccgcgagctcatcccgaacagggcgctccgctcggccatcctcgagtggcagcaacagcgtcaacggcatcagccgcaagaggaggacgacgactgtacatga

SEQ ID NO: 12598 - DNA, 481 bp, Oryza sativa
  Clone ID: PAT_MRT4530_18710C.1
acccccccccacaaacaatatacgggttatttttcctggacaagaaaagccccaaacaaatcaatcctcacccctgatttcagaaaaaaaagaaagaaagaaaaggggaaaataacatttttatccccaccaatactgggggatctgcacagcccccccccaaataacaaacctagagggggcataacagcagtaacggccatgggcgaccccctaaaagctaaatcatttttgacgggactccactgggcgcacgttcgcccccgtaatcccttccagcctgtccttttttatatttacaaaggggccaaccatttcatggaattgcttcaacccggagaggggcaaaattattgaaaaacgatcagctccagcaacctaaaaaatcctaaggaaatgacccctgttgttgcttccaagggaaaaaaaaaaccttttttgatctgcccttatgaccttaaacatgcccatgccactaatt

SEQ ID NO: 12599 - DNA, 858 bp, Oryza sativa
  Clone ID: PAT_MRT4530_18711C.1
atgtggggcccacatgtcggggtcatcccctacctccggctgggccgagccgagcccgagcaccgccgcctctcctccgattcctcctcaaccggtcgcccccgatcgcgccgcgccgccgctagcatcgccgtcgtcgctgtccgtcgctgccgccgggttcgcacggtggaggagtacctcggtcgccccttcgccgtcgtcgcaagccgctggaacgccgccgccgtcgtcgagtcgagccgcgccgccgttggtcctcatagccggtcgccgtacgtcgtcgtccggcgtagtttcttgcaccgcgagaagtccgtgggggtcgctggggactccattgcctctggttatgagggggagactatgatcccggaacagtgcactgtgtggtacatctctgatcagtgtaaaactattcgaatagccgtgcccgcggttatggaggcagcaggagagcaacggcgaccgacagcgttcgtggcggcgtattggcttgatcatatgtgggcgtcgttctccagggaccaaggcgacgtcagtggcgcaatggagcgtgccggcctcctccacgtggcggcggtggagggcgtggatccggcggcggtggccgtcaatgcaagaatcctgcggtggcagccgtccccgcacggatccggtagccagcctccttctccccacgtgggatccagctcccctcctctccccttccttccctccctagatccggcggaggggaggggcgacggcggcgttgcggccggaggggagcgcggatccgacggcgggtggcggggaggccggcgggaggcaggcggcactatggccgtcgggcggaagcccaccgccagattctag

SEQ ID NO: 12600 - DNA, 408 bp, Oryza sativa
  unsure (1)..(408): unsure at all n locations
  Clone ID: PAT_MRT4530_18712C.1
gcaccactgccgcgagcgccgcngcctgctcgtctaccggatcgacgtcgaggcggtcaggttaaaagggggccatcaaacaaagcagtgtagtgtctgagtctgacattgtgagaagatacacgtatacagatacacagatttttttttagtgattttcttctaggaaaatttttggtcttagttctgctttgtgatgtacactccaacgcatggcatgctgtaacaagtgaatcatacgtacattgtaaatatgaaacagtctcttcgtagttcggcctcctgaaaatgcatttgcaggacgagccgtgttgatgaactccttgttcagtcttctttcctgtcctactatttgcaatatagaagttgtgattgataatttgatatggtaaaaaaaaaaaaaaaaaa

SEQ ID NO: 12601 - DNA, 308 bp, Oryza sativa
  unsure (1)..(308): unsure at all n locations
  Clone ID: PAT_MRT4530_18713C.1
aaaagggagggtgatgacgtggattaccctgacacgtggggcccaagtgggtcccncntggactcagcagccacgtaggaccaaactgggatcaaaaccgtcgagggaccttttgtgaccggttttgattagttaaaggacgtgggatatctggttttactaaaattttgctaggattttttatgtattgacaaaagttggcaacaaactaaacgtagccattttttttttataattttggtaaaaaatggtatggttgaaaatggtatcgaaatgaatgaacaggcccgttgtcttttaaaaaaaan

SEQ ID NO: 12602 - DNA, 324 bp, Oryza sativa
  Clone ID: PAT_MRT4530_18714C.1
gccactcatacctaatagaggaataactacatctatcactcattagacatggtctgactcatcatcatcgggtctcacggtctcaccgtccccggaggcgctcatggctaccgtggctaccatcacctccgcgcatactagcgagtcgggaatgcggttcacggacacgcagtgccatcgtgccgtacctgccagccgcgttgacgcgcccccgccggtgctcgaccggactctcaccagccggcagagggtccagtccttgatccgtcctcccggcaccctcccgctgcgcctacacagctcccagccgacgcatgacgcgag

SEQ ID NO: 12603 - DNA, 2186 bp, Oryza sativa
  Clone ID: PAT_MRT4530_18715C.1
tcgcgatctagaactagcggacgcgtgggttcctctcgaatcacttcgattcgatttcgcttcgcttcgcctcgcgttcgccttctgcttcgatttcgacttcgattcggccggcggcggcggcggcggcgtcggtttggggggagttagggttagggttagggttagggtttccgggggtgatccctcccatggtgcagctgccgagctccgggaagcggccggccgagccggccatggcggcggcgtcggcggcgggggctacggtgaagctggaggcggacgagatgctgcatggcggcgaagaggacggcggcccgctcagcaagcgcgccaaggcgggggtccagatgcccgcgccgccgcctccgcctccgcccccgcagcagcaggatatgtatcacaatgtacttgacgagcctagcccattgggtctgcggttaagaaaaagtccatctctcttggatttgattcagatgagactttctcaagcaaattcgactgcaggacagtcctctgcagatgattgcagttctgagcctccaaaaaagaaagaccttaaatcaggcacatcaacagctggggagcgcttgaaagcttcaaactttcctgcaaatattttgagaattggcacatgggagtatatatcacggtatgaaggtgatttggtggcaaaatgttacttcgcaaaacataagcttgtatgggaagttctggaaggtggtttgaagagtaagatagaaattcagtggtcggatattactgcattgaaggcatcttgccctgaaaatggacagggaaccttggatgtggtgttggcccgacctcctctcttcttcaaagagacggatcctcaaccaaggaaacacacactgtggcaagctacatctgatttcacaggtggccaagcaagtatgaacaggaggcattttctacagtgcccttcaagcttgttgagcaaaaactttgaaaagcttctccagtgtgatcagcggctaaaccaattgagtcagcaaccagacatcatattggactctcccgtttttgaacccagatgctctatatttgaggacccagttgaatcgaagtgccaaggttttactaatttgaaggacgaacatgaattatctgggttttcaggttctctgtcaccctgtgctggttcatccatgtctgctaagattgaagtcaatgattccattgcaacgcaagcaggatttcttgctcagccaggaaacccaggacctagtgcagtgaacgttcagggagtcagcagaaacgtaaatggtgctccagagttaaatatccccagctggtggagtcaactgaaagtgcctgggcttagaccgtctatgtcagtggatgatttggtaaaccacttgggaaactgcatctcggagcagatcacatcagtcaatcctacattgcccagcaacgaggtgccaacaaaagaaacactggaggagatcgctcagtaccttctcggagatgcacagggcccaccggcatcgacatccgacgagagatcgctgatggcgagggtggactccctctgctgtttgattcagaaagatacgccaccggtggcccagccaaagcctgaaccaaacgacagtgatagcattggaggcgatggcaccgaaggttccgatgaagaatttagctcggctgcatccacagtgaaaactacaggtcccgctcagccaccagccatgtcaaggaaggactccttcggagatctgctgatgaatcttccccgcatcgcctcgttgccccagttccttttcaagatacccgaggattctgagaattgagtctggatatcccaggacttcgatcctcaattcctcattccctaaatgagggaagcttctgtaaaaagagatttgtacctgagcaataagccagcccgaccccccctctcttgtcttctgtggatgagatgagagagctgttcttagtcttcagtatccaccctgtaaatgtgtaatcgattaggttgcttcggatcgtgtcggtatctttcaggatttgctatgggtcgtggataaagtgttcattggttctttttaactcgggcttgcccttgtgcaaaattagaattcaagtcaaattgtttacaactttcttcaatgctgaggtatattgattttgatttggtcacccaaaaaaaaaaaaaaaaaaaa

SEQ ID NO: 12604 - DNA, 3425 bp, Oryza sativa
  Clone ID: PAT_MRT4530_18716C.1
atggagttcgctacaggggtaatgagcacgcttctttccaagctagcggagctgctcaaggaacaatatgatctgcagaagagtgtgaaggagggggtaacatttctcatggctgagctcaagagcatacaagctgcacttgaaaaggtctcaaaggtgccgctagaccaacttgatgagcaaaccaagatctgggcttgggacattagggagttgtcctatgacatggaggacaacattgataccttcatgctacgtgtggatggtcttgagccagccaagaaacataatttcacatgcttagttgacaagtgccaaaagtctttgtccaagataaagatctgcaacaaaatagccaatgaaattaaagatatcaagagccaagtaaaggaggtgatggaacgacgcgataggtacaagattgatgatgtcgctactaacctttcaacatttgtggatcctcgcatcttaacattatatgggaatgtcacgaagcttgttgggattgacaaggcaagggatgatctaatgaagagattgtctgtgggggatgaagcgctcaagaagctcaagatggtctctgttgtcagaattggaggattgggcaagacaactctttccaaagtagtgtttgacatgcttaaattgcaatttgattgtgctgcttttgttcctgtcggtcaaagccctgaaatcaagaaagtcctaaaggacattctagttgaacttaacaagcaaaagtacatgtcatttgatgttaccgcagtaagtgaaaggcatatgattaatgagcttcgagaatacgttgacaataagagtgaagttgctgaagaatttggtggtgtttacattatggaaccactttctgatgacaactcaaaaaagttattctacagtagaatatttggttctacctacaatggttcaactgaagatcatttgattggaatggatactttgatatggaagtgggtagccgaaggctttatccaggaggaacaagataaggagttatttgaggtcggcaagaggctgtcttcacagaggactaatgttcgtaggatagcactgcacgacaattggaaccaactcaaaaacaatgacctggacgttgccctgacacaattgaggtcattcaatgccatcgagtgcctgaaggaactgccgtcaaccatttgtaagctaagcaagctgatgcggctgtgcgtcgctggaggaatgagcgtgccgatgggtgttgggaatctgagttcactgcaatacctaaagttgggctgggattccatcaaaagtaacaaatactttgccatggaggtcggcaagctgatggagctgagaatcctcaacatttgtgtagataacgagattgacgagagcatgaagaaggctttgctagaatcactgtgcggcttgcgtaaactccagaacctggtgatagattttgacttgatattttggaatacgatgagcgtctgggaaggctgggaccattgggagcccccgcgtcagctccgtgatttccatatatccagcatgtacctgcctcggctgccggcatgggtgaaccccatgtgcatcccatacctatccgatctgcaactttatgtgatagccatggaagcacgggacctggacatgcttgcaaggatgccagcactccgcacactcatcctaagaacccggcagagaatttcgtggacagttggtggtaccggactgtttccgaacctgagattctgtgagatgaacatagcactcacatttcttcaaggagccatgccgatgctcacggagcttcaattcgagctgtgggccgctgaagatggtgccgccgctggtgatgttggcttggggcaactccctctgctcaattacattgggcttctcctcatgtgcaccggtgcgacgggcaggcaggtggaggaagcagaggtggcgtggaggcgcatggatgaggagatctatatggatcagcctaatgggtttgtagttgaaggtcaagaaggcaaggtgtgcaaattgttgaagtctttgtatggtctgaagcaagctcctaagcaatggcatgagaaatttgatagaacattgacatcttcaggcttcgcagtcaatgaggcagataaatgtgtgtactatcgccatggtgggggtgagggagttattctgtgcttgtatgttgatgacatactgatatttgggacaaatcttgaggtgataaatgagtctcattatgtggagaagatcttgaatcgctttggctatattgatagtaagccttctccaacaccttatgatcctagcttgttgcttcgcaagaacaagagaattgctaggaatcaactggaatactcccaaatcattggctcacttatgtacctggctagtgcaactaggcctgatatctcctttgctgtgagcaagttgagccgcgaagatgctgtcctacagagcattcttgaaagaactcacctttgtgagcttgactgttggtcacagtctatgaagattttgggtgaatcttctaggaagcttactaaagatctaggagtctccggaacatctgccttcgacgtcctgcaccgggagaaggtggtaataaagtttttgggaagcgttttgcgcgactgcttccagttcgttcgcgacggctcgtcttccccttcgctcgtgtgctgcgcgccttcgtcgacgtccacaaccgcgagtgattcctgccgtgcaaccgcaaccttcatactgaacaccgtgttggctccttctcttggacttccgtcaagccctcaggctgcaaaagaagcagagaaagtactgttccggtccctgggactgattgaatctatgtggctcaaaggcaacgcaaagttcttactgggcaatcctcagctatcaatcgcagatcttagccttgtttgtgaaataatgcaattggaggtcctcggtgatagtgaacgcgaccggattcttggacctcatgagaaaatccgcagttgggttcagaatgtgaagaaagccacaagccctcattttgatgaagtccatgagctcattttcaagatgaaggaacgtatggctgcaaagcgccaatctgagccgagcaaagacttgaagacagcatcaaagctctgagggtacccgtactactctcgtatatagcagcagtgtccatgatgaacaaaaggaaagcaataatcgaaggaaaagaaggaagaacaagaaagttatatatcttgtctttttttaaaaaaaaaaatgatttgtggtaaatttggaggagattatgcttgactattccaatttgtaacattgcataggaacaaaagtggtgtttaaagcattgacaattcaatttactgttctaatttgtaacattgcagagttttttcaataaaacaaactgtggtgtttgaagcaaaaaaaaaaaaaaa

SEQ ID NO: 12605 - DNA, 405 bp, Oryza sativa
  Clone ID: PAT_MRT4530_18717C.1
cagcatcgcctccaccctcctctcctgaaccatcgtccaccctcccactcccactcccactcccgagcacagtgccaccaccgcctcctcttccttctccacctcactctcatgtccccattactgccactgccgccaccctatcgatctctttccttcatcctttgatttgttcggtgcaagctcaggatagccagatccggttcttttgagctcgggacgtccagatccggcgcccttgagctcggggccactggatgcagctcctagcgcaacggacaagcatggtgggagtacaagggagaccgtcccggccagatccaatgctggcggcggcagcatgctcgagtcctcgggcctgagtgtggggttctgaacgcgttcgcacgccacggcagctgccat

SEQ ID NO: 12606 - DNA, 2036 bp, Oryza sativa
  Clone ID: PAT_MRT4530_18718C.1
caacaaccacgccattgccgttctctcctcctttccttccacaacccatctcttcctcatcctcctcctcctcttcctgctgctctctcgctctcgttggattcggtttggtttggtttgggccatgacgaagcacggcgcggtggttgtcccggaggatgccgtggtggcggcggcggccgtcgggcggcatttctcgttcccgccgccgaggacggggggcgtcggcggcgactcgtgcaagaagctggcggcgcagcagatcgacctcggcgccgcggtgatcgggtcgtggctcgactccatgaaggcgtcctcgccgcggcacaggctcgtggcgcccgcggtcgccgccgccgccgccgacgcggagcacgacgagtggatggagaagcacccgtcggcattggggaagttcgaggcgctggcggcggcggcgaaggggaagcggatcgtcgtcttcctcgactacgacggcacgctgtcgccgatcgtcgaggaccccgaccgcgccgtcatgacggacgagatgagggacgccgtgcgcggcgtggcggcgcgattcccaacggacacctgcgcctccttctccctccgcgaccccggcgaggtcaaggacttcctccgcaagctcgtcacctgcgccgccgcatgacgtcaccttcacctgaccacagtgacactaattggcttcctcctcctccacgggaaagagaaagagagagagagaaataattaaggatcttgattagtcaattagcggttactaatccctgtattaattttagccggtcacttcatttcttcttcttctttttttatgtgtttctgttcttgctctgcggctgccatcttgattgatcgatcgatctcacaggccacagtgtgacagctcgatctgaaggtttctctattatccttaaccttcctccagctgatccaaggccttgtaattagtcgtaatttttagcagtttgttgtctgtctgtctgtcactggaacgggacgaattaatccgagtgtcacgtcgattccacctctatcggatgggacggcaccgttgagccccagttggagccgcgttgcccctgccccaaaaaaagagaaactcgaggggggccgggcccacgcgccttaagtggtcgtcccccccccctggcctgtccccacggtggctgggaaccctgcttcccatggctcctcggcaaccctctgtcgccctgctcggtctcccgcctcacctccgcttccgccgaactggcgcccccctccccctccacccggcccgtatgccatgccttcaccacgccgtcatccgccctcccgctggccgcagtcccaggctctcggtctagccctcgatcgtcagcggccgctgcagagacaaggtgttgagcttcgtggggctggaggagctctactacgcgggtagccacgggatggacatccaagggcccaccaacgccgccgcctccaagggaggagaggaggaggaggagtccgtgctgtgccagccggcgagggagttcctgccgatgatcggggaggcgtacgcggcgctggtggagaaggtggagggggtgatcccgggggcgaaggtggagaacaacaagttctgcctctccgtccacttccgccgcgtcgacgagcgccggtggggcgccgtcgccgaccaggtcagggcggtgctccggggctacccgcgcctccgcctcacgcagggccgcaaggtgctcgaggtcaggcccgccatcaagtgggacaagggcgaggccctccgcttcctcctctccgccctcggcttctccgccgccggagacgtagaagacgacggcgacgacgacgacgcgttccccatctacatcggcgacgaccgcaccgacgaggacgcgttccgggtgctccgagcgagggggcacggcgccggcatcctggtgtcgaggttccccaaggacacctgcgcctccttctccctccgcgaccccggcgaggtcaaggacttcctccgcaagctcgtcacctgcgctgccgcatga

SEQ ID NO: 12607 - DNA, 150 bp, Oryza sativa
  Clone ID: PAT_MRT4530_18719C.1
atgccagcacgcgacgcaatctcggcgaagcatgaggatgcggcttcaggccgccgttcaaacacagcgacgcagagcttccgctccgcctctaggaggccgagcgctcgaaggctggcgctcaccgtgtctccacgagcatcggcgtag

SEQ ID NO: 12608 - DNA, 1128 bp, Oryza sativa
  Clone ID: PAT_MRT4530_1871C.1
atggacatctctaggacaaatgaaggctacacgagctgcggcccggtagtcgagatgtcatggcacagggccggtgtcctgctgctaggggctcagtcctgcctgcctgtcccgggagttccggccgtaggtgggattgggtcggccaccgtcgggatcgccaagtcgtcgctgtcctcgtccgccgcttcaccatcgccgaagatcgccggagcaccgtcgccgccgtcgacccgatctccgccgccgtttcaacctcgtcgccgtcgccgtccgttgctcctccgccgctcctttgcgagcgtgtgccgtccgagccgccgagccgccgccgccggtggtgacgtcatcgccgacgtcatcgtcgccctctcccgtgagccgagcaccagactgagaagtggcggagataagcccacgggggtcgctagggagtccatgcctctggtttttgaggggggtgattatgatccaggaatgtggtacacctctggccagagtaaaactattcgaatagccgtgcccgcggttatgggcgggttgagcaatccgggtatggttgttcaggatggttgggcctgtgcagccttcatgctccaggaactcctcttctgggtttgggaaaaattgagcaagactgagtacaaccaccaccgaactggcaacccgaccctgggtcccagctcgtcccaagccaacccaggccaaccattccaccttttagttgttaagcagccgaggggagagggcgcgcggaccgggtccacgggagtggggcccacgcggcagcctcacggcccacggtggaccgggtgcacccggctcacaccggccggcgccgtgggtcccatgcgtcagccgcacccgagggcgcgggcggctgacggccgggccccacatggcagccgcgggacgcgcccgaaggcggccacgccggcacagccgacgggaggcggcgcactcgcgccccgatggtcgccgccggcgaccaccggcgcggcggagcggcgcccgaaagaggggagggaagggggaagcgaatcggcggtccacggctcaccccgggtcgacggcgacgacgggaacggtgacccggagcggaggaaggcgacggcgcggctcgggtag

SEQ ID NO: 12609 - DNA, 341 bp, Oryza sativa
  Clone ID: PAT_MRT4530_18720C.1
tcgatgaaggacagggctatctcgaacgacgaggacgatatcaggaaagaatatatgggcaataagagagaatggctatcaggttactggactggattcaagtcaccagaacagatatcacgaatacgaactcctggaggcaagcctgagactataaaacctgctggagaagcgatgactactttggctgaaagtgacaagcctgacaggtctgtcaaaaagacacttgagctgcgtagagagaagattgagacaggcgaacgcattgattgggctgttggaggagtacttgcttatgcagctctcataattgagggaaaccatggttggttatgtggtca

SEQ ID NO: 12610 - DNA, 201 bp, Oryza sativa
  Clone ID: PAT_MRT4530_18721C.1
gttctcgtccggcggcggcgcgccgggctcgaagaccaagacggcctgagccgccgggccgccggaaaagatccagccgtggacgatccagagcacctgcactgtatactgcacgacgatcaccgtgtcgttgcccttgaactaccactgcaagctcctgacgtgcaccagtacgacgccgtccagcggaccctgatcaac

SEQ ID NO: 12611 - DNA, 279 bp, Oryza sativa
  Clone ID: PAT_MRT4530_18722C.1
atgtccatcccaactggacacaacaaagggaagaagggcaaggacagaacgggcctctcgtcggcatcgatcgcgactcattggaagctcaagctcctcgacaatgctcatgaactttgggagaggctcttgctcgactcgtctggagctcgagccaagctcgaatcgagcctaagacaagtcgagcttgagcagctcgtcggctccggcagcgtgcgacgcgcgtgcagtgcgcgagctgcgaagccacaatctatcaaagctatcaagctgggataa

SEQ ID NO: 12612 - DNA, 1698 bp, Oryza sativa
  Clone ID: PAT_MRT4530_18723C.1
atggcacgagcaaacgacagccacagtgttactatccccgatggcatgttcccaacgccgcatatggaagatgcggctgccggtgctagcagtgacaccaagcctgccgctggcacgaacacaccgacgtcgactccaaaagatgatggctccaaacctgcggcggcgcaggacaatgtgctgtcggcgtcggcgaacctggcgcagctgctgccgacagggtcggtgatggcgtaccaagcgctgtcgtcgtccttcaacaaccacggcgaatgctacacctccaactggtggctcaccgtctcgctcgtcaccttcctcaccgtcttctgcatcttcttcgccttcaccgacagcatcacccacaaaggcaaggtgtactatggcgtggccatgagcgagcgcctgagaatcttcaacattgaggtgggcgatagtattgcagacgaggaagggaagctaattataatgcctgaacaaggcaaagacctaacgcaagaacagagagaggtgttgaaccaactaaagaagcggaagctgcactggctggacggtgttcacgccttcttcacggcggtggtgttcctttccgtggcgttcagcgacgtggggctccagaaatgcctcttcccgcacgccggccacgacaccatggagctgctcaagaacatgcctctgggtatgtccttcctctccagcttcgtcttcatgatcttccccaccacacgccacggcattggattttccgacagtagtaccactgcctcctccaaagatgcctcccgaaaagttgccgatatttacacaatgacgagcgatcagaatcgtcgtgaaagtagtaataatgccgcctccaatgttgccaatcataagaatataaatggtaacgaagagaatgccaactccaaacctgcggcgcaggacaaggtgctgtcggcatcggcgaacctcgcacagctgctgccgacggggtcggtgatggcgtaccaagcgctttcgccgtccttcaacaaccacggcgagtgctacacctccaattggtggctcaccgtctcgctcgtcaccttcctcaccgtcttctgcatcttcttcgccatcacggacactatctactataatggcaaggtctactacggtgtggccatgagggggggcctgaaaatcttcaacaaggaggacaacgatcctaatttttatatcgagccagacaacaagaaggaaaatgaaaacaaaaatggaacggcgacggaactgcaagcggtaggacaacaaaaaagtccgagcagttctaacgagtccgaacacaatggagaaaagaagggaaagctaacctggctaacgagtatcttcgagaagaagggcggcgaaaaggtaaagcaagacaacaaactaacagcagaaaaagaactaaaggacaaactggagaggatgaagctgaactggctggacggtcttcacgccttcttcacggcggtggtgttcctgtccgttgcgttcagcgacgtggggctccagagatgcctcttcccggacgccgggcacgacaccatggagctgctcaagaatatgccgctgggtatgtcgttcttgtcgagttttgtgttcatgatcttccccacaactcgaagcggcatcgggttctccaatcccacgtccaaaggtgatgataaggcaaagccgcacgcgaacgccaaatag

SEQ ID NO: 12613 - DNA, 1803 bp, Oryza sativa
  Clone ID: PAT_MRT4530_18724C.1
atggatgactatttagccagatttgcatatctgacagttctcaaagtaccagctaccttcacgattggtttgattccttataatggaccaagacctgaaaagcataatcatgtacccttgagactacagagaatgccattggcaatcaagttgtatagattaacagagcagacaataggtgtatctaacattgatgatttggtcaaggtgttttaccactggtcccatctgtcagtggcgcgtaaatggcttgaatgggttgtggactatcatcagtgcacattggagagtttggaaaaggatcttgcagtaagggtaaaatggggcagcaaccaacatgctgtgataagtggctacgacatgggcactggtgaggaaacaccgtttaaggataatatggatgtagcccatgcattgtttgttaggaagagtgatagaaagttgattttgtttgttgatgtggaggacaagcctattcagttgatgactaactcggtagtttcagaggtcaatgaggtagcaatgggtgaagttgtgacagacaggcaaggtgatgttcaagaatgcagcagttgtattgattgggatagtctagagatagctccaattccacataaccaagttcctcaacttgctattgattgggatgcattggagatagaaccaattccacaacatcaacttggttcttctatgccttcgatggaggaagatgaaatgcatacatttgttggacttagagctgaggatgggagagccgagcaagctagacttgaggctaagaggcaaaggaattcagtgcctacaccagagatgatcctccgatggaagttggaagctcatatttgccggccatacttgagtatagactccacagcccttaatgggagttggaatggtcagctaggttctgctacatccatagatggacacaactggatgtttccggttgcatttggtttttttcaaagtgagaccactggcaattggacttggtttatgcaacaacttcataaggccattggaaaacagccacacttagcaatcagctcggatgcttgtaagggactggagaatgttgtgaaaagtgtatttagtacagcagagcatagagaatgcttttggcacttgatgcagaatttcatcaagaaatttcatggttcagtgtttgggaacatgtaccctgcagctaggtcttacatgacagatagatatgagtattacatgaataaaattcatgaggcaaaatcagatgtgaagccatatctagaaacttatcacggcctactttggatgaggattcgtcaactgaatgcaatgactagagatttgggtcacttgaaggtagtgcaagaacatacatgcacttgtagagagtggcaagtttctggcaaaccatgcccacatgcattagctctcataatatcagctagaaacccaagaatggctgattacctggatccttgctattcagtggaaaagaaaagtcgtgctaaacaaggaagaccactaggttcaactagtgatgcagcgggttctagcacacctaaaagacaaaaagttgcaatcaatgattccagcaatgcgagtcctgggcctgtcactagaaggtgggaccagggtaaaactgtcccagaaaagaagagaaaaatagaaaacgaaaaagaaaaagaaaaagatggacaagaacaaaagaaaaatgttgctccaagtaaaagaaaatctcagaaggacaagacaatgggaggcaaaagctgcaatgatgaagtacaaaattcaagcaagaagatgaaaaagaactga

SEQ ID NO: 12614 - DNA, 3057 bp, Oryza sativa
  Clone ID: PAT_MRT4530_18726C.1
atgtgggtcccattccgccggcgactgcggatgggatatggtatccagttcgtcggcagccaccagatgtgggccccgacggttcatcccacccctcccatcgccgccaccgaccactccaacgccgccgccgccgccgccgcttcggaagttcggagcagcaagagacgcatggagcatagcccgcacctgttcgacggcgcggcgcccaagttccggcgggacgagaggatggcggcgccgccgcgggaggccacgtgggtgatcctggcctgcgtcccgagcgtgtcctcttccgacggcgacttcgaggccggcgaccacctcgccttcgactggcgcgacccgccgggcgtttccctccttaccttgcgccagagcgactctgtctttgtctcccccgcgcctcgggatttctgccccgaccgcgacgaccacccctacgtcgtcgccgtcgactccgccggcggactcctgctccgcggcgccaggaggagcgcccacgatttcggccccggcgtcgcgctcggattcgaccctgcaccgagctgcgccaacgacggcggctacatcctctgccacgctacgctccgcatggcctacctctacccgccctgctccgacgagtaccggctcctctacgccgggaacgtcggcatgatccgcagaacggcagcggatggcgaccacccgatccgcttgttggccgagctccagatagagtccggcaatggcatccaccgtgccaccctactacgctactcccaggagctcggactcggagggtgggcttcaacgaaggtcaactacccgccaggccgccggtcgtggtgcggcgacggcgtcatcgtccacgccgggatgctctggtgggtggacctctccttcggcctcctcacctgcgacgcgttcgccgcgaagccagacatgcgcttcgtgccgctccctgagggatgcaagctaccgtactccagcgacgcggaccacgccaagcaccggtgcgtgaacgtgagcgacggcgagctggcgttcgtgcagatccacgactacgacaccgccgccggccgcggcgcgccatcgacgatcatgatcagcatgtggacgctgcagcagtctgatgcgggggaggagtcggtttggtcgctccgccaccgggtgcgcgtcgacgagatctgggaccacgtgacataccggaagaccatgatgccgcggcgcgttccggtgctcgcgctcctccaccccaaggagctcggcgtggtgttcttcttccagatcacctcgcggaactcgtggatgttcgccgtcgacctggtcaccagaatcgtgctcgagtgcaagaagtacaagatgccccagctgccgacgatgtaccactcctctcgccacaatctgacggatgagctcgacttgaacttttcgagagacaaagctgatgaactgctgtcaaccactggaaggctcttcatcaatcctaggttccaggaactgaggaatgccactgcttttcctaagtacttgtcatttgtcattgtcaaggctaccgacgcatatgaggcatcgtgtctgatgcgagacttcgtgtcacatgtctccatggacggttcaaacatagttcctagagtttcagttcatcccaccccgcccatcgccgccaccgaccactccaacgccgccgccgccgccgccgcttcggaagttcggagcagcaagagacgcatggagcatagcccgcacctgttcgacggcgcggcgcccaagttccggcgggacgagaggatggcggcgccgccgcgggaggccacgtgggtgatcctggcctgcgtcccgagcgtgtcctcttccgacagcgacttcgaggccggcgaccaccttgccttcgactggcgcgacccgccgggcgtctccctcctcaccttgcgccagagcgactctgtccctgtctcccccgcgcctcgggatttctgccccgaccgcgacgaccacccctacgtcgtcgccgtcgactccgccggcggactcctgctccgcggcgccaggaggagcgcccacgatttcggccccggcgtcgcgctcggattcgaccctgcaccgagctgcaccaacgacggcggctacatcctctgccacgctacgctccgcatggcctacctctacccgccctgctccgacgagtaccggctcctctgcgccgggaacgtcggcatgatccgcagaacggcggatcgcgaccacccgatccgcttgttggccgagctccagatagagtccggcaatggcatccaccgcgccaccctactacgctactcccatgagctcggactcggagggtgggcttcaacaaaggtcaactacccgccaggccgccggtcgtggtgcggcgacggcgtcatcgtccacgccgggatgctctggtgggtggacctctccttcggcctcctcacctgcgacgtgttcgccgcgaagccagacatgcgcttcgtgccgctccctgagggatgcaagctaccgtactccagcgacgcggaccacgccaagcaccggtgcgtgaacgtgagcgacggcgagctggcgttcgtgcagatccacgactacgacaccgccgccggccgcggcgcgccatcgacgatcatgatcagcatgtggacgctgcagcagtctgatgcgggggaggagtcggtttggtcgctccgccaccgggtgcgcgtcgacgagatctgggaccacgtgacataccggaagaccatgatgccgcggcgcgttccggtgctcgcgctcctccaccccaaggagctcggcgtggtgttcttcttccagatcacctcgcggaactcgtggatgttcgccgtcgacctggtcaccagaatcgtgctcgagtgcaagaagtacaagatgccccagctgccgacgatgtaccactcctctcgccacaatctgacggatgagcttgacttgaacttttcgagtgacaaagctgacgaactgctgtcaaccactggaaggctcttcatcaatccaaggttccaggaactgaggaatgccactgcttttcctaagtga

SEQ ID NO: 12615 - DNA, 618 bp, Oryza sativa
  Clone ID: PAT_MRT4530_18727C.1
ccgttgcccgcaagggaagatgtcgaagaagaacaacctcgccaagcggaagaagcagcacgagttcgacctccaaagggaaaaggaggcgaaggagaaactggccaagaagctgcaggccaagaaatccaagatgaagatagatggtgatgtgaaaaggaagggtggcaaatttaaggttggcaagaaaaaggtgaagacaaaactttcagccttaacaaaagccaaagctgcgcaagcattggaggtcgacaagtaactggggagttttacttcctacaatctgtgttccattgctaaactgtgctccagtgttgatatagttttgatggaagagaacaagttctatgctcagatgagtgcatttgctctggtcaagtgaccatattccatctagccttggcagtctactcagttggagcttgttactcttttctatacgttggtttgtagagtacctttgtagtggcagagcctggaattaacatctcgaacacttttaaaatattaaagtgagatcgttgcatttggaagtagattttttgctatttcatgctatttggatgaaacaactacatctgcagcaaacttggcacatgtgtgaaaaaaaaaaaaaaa

SEQ ID NO: 12616 - DNA, 273 bp, Oryza sativa
  Clone ID: PAT_MRT4530_18728C.1
atggtggctagtgacgacggttgtctgtggaggggttcaatggtggtggcggcggtggagcccccgccatacgtgacggggcgtgaggccagctggaacaacgtcggcgtcgagactggcacacgggaggaggtggagcagacgtggtgggccggtgcattagtccaaggtgtggaagatagatgcttggagaccccaaaaagtataaaaacaaagcggaccggaactcgagaagtgcataggatagtttatcttttgaaatcgagtttttag

SEQ ID NO: 12617 - DNA, 996 bp, Oryza sativa
  unsure (1)..(996): unsure at all n locations
  Clone ID: PAT_MRT4530_18729C.1
atcagcatacaactagctaggntccctgcatgccctcccgcccacgcgtccggcaacatcaccgaagccggtcgctgatcggaggaaaacccaaaaaagaaagaaaaaaacgacgaaatggcttcctccccgtatcacgccgccgtcggtgtcgccgtccttgccatcctcctcgccgcgccggctgcggaggccggggcacctaccgccgcgccgttggccaactactccctcgaggacgcgtgcaagaagaccggcccacactacggcctctgcatcgtgacgctctccgccgaccggtccgccaagtcgtcggacacggtggggctcgccagggtggccgtcctggcggcgcagaagaacgcgtcggagacggccacctacctctccagcatctacgacgacgacagcatcgagaagaagacggtgcagctgcagcagtgcctcgaggactgctccgagaggtacgaggcggcggtggagcagctgacggacgcgacggtggcgctggacacgggggggtacgaggaggcgatggcgctggtggcggcggggcaggcggaggtgaagatgtgccagagggggttcaaggccgtgccgcagcaccggaacatcctcaccttgcgcaaccgcgaggtcgaccagctctgcagcatcgccttcaccatcaccaagctgatccgcgtgtcaccgagcgctgaagaatagctttctcttcttccttttatcccctggatattcttttttattttttcgacgacaggggtaatctgggattccatggttggaagattagcatgtttgttgatggctttgaattggattggtaattgctgtttgcatcagcagacaacatcctaggcgctggcggtggtggaactgttgttgggttcatacgatcaatgtatagcacattcttgatcttaaaaagagcattgcttaatttatgcatctccattgaaaaaattacaaattttaatagaggatgtaggtgat

SEQ ID NO: 12618 - DNA, 777 bp, Oryza sativa
  Clone ID: PAT_MRT4530_1872C.1
atggagagggaagtatttggttctaatcctcagcccatcttgggtcgcatggttgcgatcgaagattatgttctctgcggttttctccctccaccttctgaatttcttctcctggttttgaatttctatggtctttctcttctccatttgaaccccaattccatcgccttccttagcatctttgtgcatctttgcgaggcctacatcggggtagagcctttccttgatctttttcgcttttactatgaactgcgttggatggaatccaacagggtatctggttgcgtcgggttccgacttcgggatggcctgaagttgcgttacgttcccttccagtgcccttcttctcgcagcaagtggaggaataggtggttttatcttgagatcaagaactcgaaccctgtcttcgtggttcctgaagatcaaccggacaagattccgtcttggaccgcaaagccccccttgaccccctctcttcaatcgtttatcgacatcatcgacgatctccgagtacggggtttgtcgggatatgaagtcgttgcagacttcgttggtttgagcggcgaaaccgtggagcgccgcgtcggccaagtgatgatcagtggcccgaccacggcgagtgacatccctatgcccctttgtgaaaagggggcggcggaacgtgatgaagccatcaatgtggcgtcatctctgaaagttaaggtcgtcaaggaggtgtctgatgctgccaccactagcggtggcagtgttccgacaaagccgaggaaattctcgtct

SEQ ID NO: 12619 - DNA, 1607 bp, Oryza sativa
  Clone ID: PAT_MRT4530_18730C.1
atggaagccgccggtgccggcggccggcgcggcacggtgaagcagctcaacgtgggcggcaagctcttcgccttggaggcaagctccctcccgatctccctctctctctcgccttccccaaacccaatcttcgtggaccgcgaccccgcccttctctccgcgatcctctccgccatccgcgccccctccgccgcgcccgccttccccgccggcgtcctcctcgacgaggcccactcctacggcctccaagaccagctcctcgccgccctctcccctccgcccctcctcggcttctccgcctcccgcgcctccacgctctccccgccctccgagcccttccccaccgcgctcgccccgcgccacgatggctcgctctgcctcgcccatggcgccggcctgctcacccactactcccctgcgctggagcacctcaccaccttccggacccatctccaccgcatcacctccctccggcagctgcctcctggcctcgctgttgccgggtccagcctctccccggggctccatgtgtacgacctcctcaaaggtcggcacgtcgcctctgtccaatggtcagatcccaccgaccttcgcgttcaaaaggccaaggtgattgccattgccgcccgtcctgctgccgatgcagctgataagaattcacccatcttagctacattcgagtgcccacaccgggagaattgcatcctggtgtttgaccctgtaactctaaagcccattcaagagattggccggcaaactggcagcgcagctaagtcgtcggcgccaggccgagtagtgcacctgcaggagcttgggctggtatttgcggcatctgtgagctcgggggcatttggttactctgggtacatgaggctgtgggacattcgttctggggatgtggtgtgggaaacaagcgagccagggggagttggaagaagcagccggtttggagatccatttgcagatgtggatgttgacgttaagcaacagatactatacaaggtgtgctcaaagtcaggagatattggagccgctgacttgagatgccttggtaaagacccttgggtttatatgtcgtcaggacctagagggagtggagggggccatggcagtgttctgcattgctacaagtctcaggcggccgtcagccggaaggatggattggaggtttggtctcgactggaagaacagagcaatggcacagccaacttggcggagcaaacgagagcaaaggaaaacatcaacaacgaaggaataaacgagaactgttttaggagttgctatgtggatacagaagaggatgctgaccgtggtatgatacacatcatggaagggggtggagaccgcttatttgttaccagagaagaaatgcaaggcgtggaggtgtgggagacctcccagctggctggtgctatctctctatctcttagcagtttgcttgtctgaacatgattgacctgtggcaattcaggtggttctattaaacgtgagtgtgcattttctaccatagcatcgcattattcagtactgaaaattcctctcaagtcatgatgcggtaatgttataattcttgcttctacaaaaaaaaaaaaaaaaaacccgcggcc

SEQ ID NO: 12620 - DNA, 151 bp, Oryza sativa
  unsure (1)..(151): unsure at all n locations
  Clone ID: PAT_MRT4530_18731C.1
gagattccttagtccttgctgnncttgcgctgctggcttattattgaacatcacttattcccttccatgtgcttctnccatcaaactctacttatttncnattctttctntgcataagcaattattgggttctacgcacttcaagagcaag

SEQ ID NO: 12621 - DNA, 2867 bp, Oryza sativa
  Clone ID: PAT_MRT4530_18732C.1
aaattaaaaaaatagacggtggttttaaaacctgttattgacatcctgggctgttggcggtttaccagaagaagaccacgagtggaatttttctgtcccaaactatagtactaatcaagactgaagattaaaaacttgacctattcatatgtctgtttagaaattgaggtggaaggtctgacactggcagtttccaaaggacattttcagcagcgcaatgacaatttatttacaaaggcaaacattcctaaccttaatcagctaaaatccttcagccttctcttcagaacatccatggacctcttgcgagcatcctgcttgttgcggtttgaaaggcttccaaacaacccatctgcaaaatccttgtacttgtcacaaacgatggcaaccttcttgtagtctaatgacccatagttcctcccccttatcactggattcatgaaattctctggctggctgctaaggaggagattgactagctgccttatttcaaccaaacaatcggcgaatgttgtttccttacccaaatccaccaaaccggtcctataaaatttctcttccgcgaatgcctccagtaatttcaagtcaatgtcaaggcccataactgcattgacagtgaaccttttcacgccttcgttaagaagtgttgtcatgatagagtccgagatgtggctcattgcaccagaaaccatcttgtatagagcttctagcggtaaaatctcctgcgctgttgatactagcgtttcaagatagataaggacctcattcatatattcatttggattatctggggcttcctccactatccagttgacatcgtccaagagcaccataaattcatcaatcttgaaattggccaaatttatcaaagagttatatgctgcattctgggaggcttttaagacagcttttgcagtcaaaccggaatgagatctctgcgcaatacgctttggaatgccacacagttgagcagaatacaagaggaacatatcgcaggattgctcaagaacagaaatatttcctgcaagttgcatcatctgtgacatggctaacgagcgagcataaaccatgttcagaagactatcatttaacacctcaatcaatagcctgtctaggtaacccttcacaatttcatagatgtttgtgcgagcactgtaagaaaaatagctgacagaatccccaatgaaggaccggacgatacgacaaatatctggaacaccagaggaaaatggagccacatatggaaactccgggactacatcatcaggttcaaaatggaatgccgtgacattcatgttatactcatattccttctttataatcatctgctcatatgagtcattagcaaggatatcatctatctgctttcgactctcaataagaagcaactggtggtatttgtctttgtatttcgcaatgacttgaatcaattgtgcgatttgatagccatacttactaacagttgtgcctaacaaagtgacataatctttaacgaggaggaggtggctggctatactcatgcgagcaaattgatcctccagtatagatgtgatcttagcaatagcagtctcccatgttgattcaacttggctttcagacaacaaaccatcagcacttcgaagtacacgttgttctacaatgaaaaatccagctacctgagcaagtaagggttgatgggactcaaggaagggttgagaggtggagatttgcatgtccaagttgagctgcattagcctattcttgtagtaataatctcgaaacttctccccaataccaaggcatatgtgcatgtgatgtgcccggtacactggcgtgagatcaaaatttagtgttgattcctcatctgtattctccacatccaaggtgtacacatgctcatcagatctagcatcactatgtgcttcagcctctctcttccgggcacgcatttcctcatctttttgtcgagccatagaggcctgacttattgagacctgtccaatctgcttagccatccttctgatatgaacaagccaatcattaaactcactgcaaactttcttctcaatgtgcatctttatcaatggtatatgttttgcaactaccttcttcagaagtttcaaaggaatatttttcaagtagcccttctcgatcgtgtcgagagtcttaagcgcaggatgaaacttagcttctgcaatataaccattgcatgccatgcataaactgatgactttcacacatatcttcaacgttgttatggcttctcctatgtttttcttaatcgaatataactcaaaaagctcatcaagattcaacaatgtggcactagaaaccttttgcaggtgtatgttctcaccagttagcatgccctttagctcatcagcatcaaccaacacaccacgtagttcatcgacggccaggatgaaatcctcgtaatgaagtctacaaagctcttcgatctcaacttcctttttctttacaatactcctgaggttttgcatgagagcttcaggtttaccagaatcaaatccatgccgaatgatagggcccaaatcttcaccatttgagataaataaagcaaggccaagaccaagacctccatctccactttctattacactcctcttctttggctgagcagtcatgattcaactgcttgtgacacgggaatcgtgcagaggttctcaacgagcaagcgatcaaacccaaacagaaaagaacagagagaaaagagtggtgtggggaatatcaaacgacgatgaaagaaagaatcacagggcaatagaaagagatccttgttatcacccaagcggaagagggaagcaccaccaatgcaagaacagagagctatcctatgaaattggctgtggctctctctctctcacatc

SEQ ID NO: 12622 - DNA, 517 bp, Oryza sativa
  Clone ID: PAT_MRT4530_18733C.1
ccggccgggaaacccctcccggccgtcatccaacatccatcgaggacccggccgtcaccactaacgacaatcaagatggtcaacctgcgaactcagaagcgcctggcctcagcggtcatcggctgtggcgagcgcaagatctggctcgaccccaacgagcagagcgagatctccaacgccaactctcgccagaccatccgaaagctcatctccgatggccttatcatccgaaagcccgtcacccagcactcgcgatcgcgcgcccgcgagctgaacctcgcccgacgagagggccgacaccgtggttacggtaagcgtaagggtaccgccgatgcccgtatgcccagccaggtcctctggatgcgccgcctccgagtcctccgccgtcttttggtcaagtaccgtgccagcggaaagatcgacaagcacctctaccacgagctgtaccacagcagcaagggtaacgccttcaagcaccagcgtgccctagttgaccacattcaccgtgccaaggctg

SEQ ID NO: 12623 - DNA, 381 bp, Oryza sativa
  Clone ID: PAT_MRT4530_18734C.1
ttaaagtggaagtagtcggagagacgctacatcgctggtcgaggaccaggcagtagttgtaactcgaccacttaaagtggaagtagtcggagagacgctacatcgctggtcgaggaccaggcagtagtcgtaactcgaccacttgaagcaaatgtacgagagatcactacgatcaactggttgagaaccggtgagtaggtgtccctcgatcatttggagtcgtggtacgaggaccgctacgctgccgtagtcgtaccttgaccatctccacttccgccggaggcaggcgcgacgtgggaacatggatgtcgggaccaacgtgccatctccaggaggtaacacgccggctccggctagggacgagtgcttggaggcactcat

SEQ ID NO: 12624 - DNA, 364 bp, Oryza sativa
  Clone ID: PAT_MRT4530_18735C.1
agcaagggatccccgcattccacaacaggcgaaggggaataataaggtttaacatccaaggttaaaccgaaccgaaaatagagttttaaatgaccgacatagggcccaaagcgggcaaattttaacgggcaatgcaacaaccgaaatgaccggggccaaaacttaacgaggaccaaaagggccagatttctcaaatgcaaatttggaaagccccccttgaacgagggttatttctttttggggggagccttgggcaccttggccccggggggggccctcttttccacgttcttgatgaccccaacaaccaccggttggcttatggcccccccgggaaaaccacccaaagggggggccccaaaaa

SEQ ID NO: 12625 - DNA, 330 bp, Oryza sativa
  unsure (1)..(330): unsure at all n locations
  Clone ID: PAT_MRT4530_18736C.1
ccnatgatgatagtacatgtaaagcttggtttcccgatgaatacatgtgtttgtgcactcgcaccccatcatttgaaaaacnagncatataacaanttttgattgaaaaaancagagtggcagcacctagttaatgtgcaacatattgcttgatgagcgattgtgtcaatattgcacatgaagccatcagctaaagaggataaatcatctcaacaatctgagcaataatttcatgttccttgttgcaagaaaaacttggtaatgtattgcctgactggatctcttttttagtccaactggattatgttcagttttcacattaattcataa

SEQ ID NO: 12626 - DNA, 848 bp, Oryza sativa
  unsure (1)..(848): unsure at all n locations
  Clone ID: PAT_MRT4530_18737C.1
aaaaaacaaaaaaanccccccnttttcccntttccccnaacccctttccccccaaaaaaggggggcggggggggtttcccccgnttcctttcccncccccnnttcccnaaaaaggnaaaaaacccgcccaaaaggaaaaaccgaaaaaaaaaaccccttcncnnaaacnaaaaatttcncccccggcccccggccccggcccggccccggcccggccccnnccaaacccccaaaaaaccnnccngggggggcccccgccaaacccaacaanttnncaancntttttntttnccccccgggggngccccgccccgcccngccccggggctttattnccccaaaaccaaaaaaaccaaaaattntcacccttcccngncgnaaaaccccttgccnaanccccccattccctccnaaaagaaatttttcaaancccccnaanaaattttnccaaancnttttaacntttccanncncccnaaacccatttttcnaaanctccnccccttgntttggtttnaaaaaaaaattnggttttcncnaatnggaaaagaaaattttttggtttcnnaaaaagtttttccnaanggaanaaanccccttncccccaaaaaaaacctaanttttnccaaattnttttantttttntttccccccctttgccccctttttntaaaaaaaaaaatgtttnttaaaaaaaaaacnccccgtttatgaannanaaaanaattnntttccttngnnnnaaacttttttaaaggggggaanantnntttccnnggtttnntttccccccnttncnnnnataannttttnnntnnnnctttttnanaaaaanaaatttttttttt

SEQ ID NO: 12627 - DNA, 323 bp, Oryza sativa
  Clone ID: PAT_MRT4530_18738C.1
ttggcacagagctcaaccaatgaaacggacgtgaccacaagccgttcagacatgctgctacagcgggtgggctcatactagtgacgttgagcaaatgcacatgccatgtcctccctttgaaccttaatttcttctctagaggatcggcaatttacattacgaagttctccgtctaggcgatatataagtgatctatactgtggcactctaagtaatcctgattagctgttcaatcgtgcacggataggcgaaattcttgatagggctctctggctgtgtggcgttctgtcagaccccctgggtgtggcaacatctcgatggca

SEQ ID NO: 12628 - DNA, 346 bp, Oryza sativa
  Clone ID: PAT_MRT4530_18739C.1
tttggtagaggggagattccgccgccgacgagaggtgggggggagtgggttgtgatcgtgaggaggcctctcatccctagacggtcgagttgaaaggcggaaaagacggatagcgttgaagcggtcgggcgcggccactcatctgcgtcgtccacgcccagtgggggagccataacttctccagcgacagcgatcatcccagacccacacaactagacccggggcgctttcctcgtccggctgcaatccctatgacctactgttcctcgcctgcctctgtcgactgtaagaccggtcgcccccgccatacaccttctctaacatccaatcaacaaaaatcttttcc

SEQ ID NO: 12629 - DNA, 510 bp, Oryza sativa
  Clone ID: PAT_MRT4530_1873C.1
atggcttggcacgcttggtggatggtgggtggcggccttcctggcactgagagatcaccacacacgatccagaattattattccagatggacaacggcttgttggaatgtggtggaggaagagccagcagcaaaggccgcggaatcacttccaacttttgggttgcaactgcaaggaggggattcgttccaatctcaaacagtgaaccagatagagaaagagagagagagcttaccaacaccaggagaggcgccgccgctgcacttccgcctgtaccgagccgacccgagccgcgggacacaggggcgcatggtgctcgactcgatccatcgatccggccgccgccgctcgaacggacgccgcctccagcccccttcaccacctcgccgccggtggcttcgctccgccccccgtggctggactcacgggatcgtctgcgccgccgctgccctgaagccaccacagcccatcaagctttcgagctgggccttcggctcacacgcagcctag

SEQ ID NO: 12630 - DNA, 351 bp, Oryza sativa
  Clone ID: PAT_MRT4530_18740C.1
atggctgcggtgctgggtaaggcgacggcgcagcgcgaggtggaccagagaggcgatgcggcgcggctggaggcggcaatggtggcggagagagatgtggcttggcctcgcggtgggaaggtggttccggcggtggaggaggaaaatgaagtggatgccgaggtgcggcatagcgcggcgaagccggtgggaccaacggcggcgtgcggccgtggctttagcggcggtggcgggcgactggaggagtcccacggccgggtgtgggcgtgcggagtggaggaggtgggcggattcggcggcaatcgtgggcggcaacggcaggcggcagccatggcggttggccagaggtag

SEQ ID NO: 12631 - DNA, 627 bp, Oryza sativa
  Clone ID: PAT_MRT4530_18741C.1
atgtcttcaagaagagaagcgacggaaaaaccgccgccgccgtccgtcgggactcaaaggagccaagattgggctttcgcccggcaaacacccttgaggggtgagacagcacgacaacgccctcaggagggggaattaaccatcgttgtcggtccgggcaaggccggactgggttttcacccgccgctcaccacatgcgaatccacgactaacacaccgatgttccaccaccacacaagctctgtcgacatgtgggacccctgcaccggcgtcccccgccggccagccatcgtgcgccaaagacgcgccacatccaccggcagctcctcctcacacctaggtcgcctcctccactgcaggccgcgcctctcgtgccaagccggcctcctccaccggacacgcctctcgcgtcaatccggcctccctccatcggccgcgtctctcgcgccaagccggcctccctctccgccgctcacgcctctcgcgccgagtcggcctccgctgccattggctgcgcctttctgcgccaagccggcctccgacccctccaccaaacgacgccgtgccggtcagatgctgccgtctcccacgccctcggctagccgtccgagacagtcatgcctttga

SEQ ID NO: 12632 - DNA, 1703 bp, Oryza sativa
  Clone ID: PAT_MRT4530_18742C.1
atgcacttcctcaatgtccacgccagtcaccgtgcctccctcactccctcatcctccaccttgccatggactgctgaccgccgcgctgttggttctcaatccggcattgatgagccttctcatcagtgccgcatccgtgatgccaacggatgtgagcttagaagcactacacttctgaaaaggtggaataatagtaaggctgagtacaaccaccgtactcagcaagccacaccaatgatgcagacatgcaaggggatacaaggacgggtttcacctccactcctcgcaaggcagcgggaagtcccctcgtgcgccgcggtgaatccggcagctggacaaccggacaccccggccgacccaactccatcacacccaccctcgccaccggtgcctaggaaagggacgagctatactttagatcaagcagttacccactcctgcttgtgataagcactaaaaggactgtcgctgacgtcaacaagggaagccggcgcgacatgcgggtcccacacgtcagtgacacaagggggagggcacacagtgaacacggtccacgcggcagggacgacaccgtggacccggaccacggaagtggtccacgggcgcgacctacatcggcaaaaggggaggctggctcgtcggccaacccgacaaggcggcggcggcacacgccggacgaccgccggcgacggcggcgcgacgcgggcaagggggcgggggaggaggggaaaaaggaggggagatggagggagagctcaccgagcgccatggcggcgaggggcaacaggcggcggggacgccttctcgggaagacggcacgggcggccttgggcgacgaccggcggtgcgtaatggacggctgaggcgcgggacaacctagggagggtggtagagaggttaggatggggaaaggtggcccgagacagcgagggagacggagtggatgccgagctgcgcacgatggctgcggtgctgggtaaggcgacggcgcagcgcgaggtggaccagagaggcgatgcggcgcggctggaggcggcaatggtggcggagagagatggtgaacgggccggggtagagatcggcacagcgatgccgatgacggtggtggcgcggcacggcggcccctagggcggcagtagcgggcggctggaggcggtgagtggcggtagtggcttggcctcgcggtgggaaggtggttccggcggtggaggaggaaaatgaagtggatgccgaggtgcggcatagcgcggcgaagccggtgggaccaacggcggcgtgcggccgtggctttagcggcggtggcgggcgactggagggtcgccggcgagcggcggcgcgcgggggcgacgcggggagagcgagggaggcgatgggaagctcgggggaggggggaaaacgaacgaggggagcacggggagggtttatataggctcgggagggtgagatggagccggggtgagttggatttgggcggcaatggccgatggatggaggtggcggcgacgtggggaagtggcggccggattttgcgggagaggtgggggaatgaggaggacatggggcggcagagtcccacggccgggtgtgggcgtgcggagtggaggaggtgggcggattcggcggcaatcgtgggcggcaacggcaggcggcagccatggcggttggccagaggtaggaggaagagctgacaggtggggtcttgg

SEQ ID NO: 12633 - DNA, 468 bp, Oryza sativa
  Clone ID: PAT_MRT4530_18743C.1
atgctggagaagacggcgacgtcggctggcacacgggcacggcggaaggggctgccggagtgggtgccgacgagaccgagggtgaggcggcacgggcgacggcgttccggcgaaattcagtcgacgccgtggcctggccggggaagaggatggcgccgcggtgccggggaaggaggcgacgacgacagccaccgcaccggcgaggcggcacaggcggctggaggcggtggagtggtggcgacaccactagacgtcgacgaggacaccgtttcggcgagcttcgggagaggggacggtgaggccggtgaagggggcggcattgcagagccgagggaggcgaccgagggggttccattttatatgatgggggagggagccgggcacgggagaggtgggaacggtggtggcaaagtcggctggcggccatggaaagcggccgggattggcgcgggcgtttcgggcgactga

SEQ ID NO: 12634 - DNA, 328 bp, Oryza sativa
  Clone ID: PAT_MRT4530_18744C.1
tcctcttcgtcgttcttgtcggtagcttcctcgccgctgccgccctcctcctccttggcggcgctggcgcctcctacggtcggggagcgatggacgcggccaccgggggcgagcacttggcacaacatgagcgacgaggagctgctctaggcggcgtcaatggagccacgggtttggcggtttggagcgaggcacgacgacgagcgacggaatggcacaagctcgatacccagggtaccaggtatcagtcgatacccaggtaccaagacctgatacctaggtaccaaggcctgatacataggtatcagctcgatacccagggtaccag

SEQ ID NO: 12635 - DNA, 3182 bp, Oryza sativa
  unsure (1)..(3182): unsure at all n locations
  Clone ID: PAT_MRT4530_18745C.1
gaattcactagtgatttgaggagaatgggtgagtgatggggagggggtgcctggctgcgctgctcggcggcgcggtggcggtggccgtgctggtcgccgtcgtccactgcgcggtgacgtacgacaagaaggcggtgctcgtcgacggccagaggaggattctcttctccggatccatacattacccgaggagcacacccgaaatgtgggacgggctaattgagaaggctaaagatggaggcttggatgtgatccagacctatgtcttttggaatgggcatgaaccaactcctggaaattacaattttgaagggaggtacgatctggtcaggttcatcaagactgtccagaaggctggcatgtttgttcatctccgcatcggtccctacatttgtggagagtggaattttgggggatttccagtttggttgaagtatgtaccaggcatcagcttcaggacggacaatgaacctttcaagaatgcaatgcaggggttcacagagaaaattgtgggcatgatgaagagtgaaaacctctttgcttcacaaggcggtcctattatcctctctcagattgagaacgagtatgggccagaaggtaaagagtttggggctgccggcaaggcatatatcaactgggcggcaaagatggccgtgggattggacaccggtgtgccgtgggtgatgtgcaaggaggatgacgcacctgacccagtgatcaatgcatgcaatggtttctattgtgacacattttctcctaacaagccttacaagcctacgatgtggactgaagcttggagtggatggtttactgaattcggaggaaccatccgtcaacgaccagttgaagatctcgcatttggtgttgctcgcttcgtacagaagggtggttcttttatcaactactacatgtatcatggaggaacgaattttggtcgcacggctggaggtccctttatcaccacgagctatgattatgatgctccacttgatgaatatggtcttgcaagggaaccaaagtttgggcaccttaaagaactccatagagctgttaagttatgtgagcagcctttggtttctgccgatccaactgtgactacccttggaagtatgcaagaggcccatgtgttccgatcttcctctggctgtgcagctttccttgcaaactacaattctaactcgtatgccaaagttatcttcaacaatgaaaattacagccttccaccttggtcaatcagcatccttcctgattgcaaaaatgttgtttttaacactgcaacagttggtgttcagacaaatcaaatgcaaatgtgggcagacggggcttcttcaatgatgtgggagaagtatgatgaggaggttgattcattggcagctgctccattgctcacgtcaactggtctacttgagcagcttaatgtcacaagagacaccagtgattacctctggtacattacgagggtggaggtagacccatctgagaagtttctacaaggtggcacgcctctgtcactcactgtgcagtctgctggccatgcgctgcatgtcttcatcaatgggcaactccaaggttctgcctatggaaccagggaagatcggaaaatctcatatagtggcaatgctaaccttcgtgctggtacaaacaaagttgcactgttgagtgttgcttgtggactgccgaatgtcggagtgcattatgagacgtggaacactggtgttgttggtcctgttgtgattcacgggttggacgaaggttcaagagatctgacttggcagacttggtcctatcagttccaggttggcctgaaaggtgaacagatgaatctaaactccttagaaggctcaggctcagttgaatggatgcaaggatcattggtagcacaaaaccaacaaccgttggcatggtatagggcatactttgatactcccagtggtgacgagccactggctctggatatgggcagcatgggtaagggtcaaatatggataaatgggcaaagcattggacggtactggacagcatatgcggaaggtgactgcaaaggttgccattacactgggtcatacagggcacccaagtgtcaggcaggttgtggtcagcctacacagcgctggtatcatgtgccaagatcctggttgcaaccaactagaaatctgctagtggtttttgaggaacttggcggtgattcttcaaagattgcccttgcgaagcggacagtctcaggtgtctgtgctgatgtatctgaatatcatccaaatatcaagaactggcagatcgagagctatggggaaccagagttccacacggcaaaggtgcatttaaaatgtgcacctgggcagaccatttctgcaatcaaatttgctagctttgggacacctcttggaacttgcggaacattccagcaaggggagtgccattcaattaactcaaactctgttcttgaaaagaaatgcattggactacaaagatgtgtcgtcgcaatctctcccagcaactttggtggagatccctgcccggaggtgatgaaaagggtggcggttgaggcggtatgctctaccgctgcatagggcaatttctttgccgagacgaatttagagatggcaccaaacaggtgggcttgtgcttgatcaaagcacacagaaagcgatgcagagtagagttcaactgtaaagtatcgacgccacatagctgtggctggaggattagagatcgattctagcattcactcagtcgaatttcagattagaggattctaactctactgcatctccatgaattgttcagagtgaccaactgctaattgaagttggtcctgggatggagtgcagggagagtaaaggcaaaagattggtgcattcttttgctcgcgttagtgtgcgtgttgtgttgtttcatctttcttgaaaggaagaaagatgccgatgaattgtgcatgtatcccatatgaggaatcgttgattgtgcagtgagcatgatatgctgcagaacaattgctcgtgtcattctgaagttcagaaaagaggttgtcaatttatcttctgtcggtggacncgaccccgcggttcgcctcctttcctgtttctgtggggggggcccggatgccaattcgcctattagggagtcttttacgcgctctctctgccgtgcgtttacaactatgngaccggggaaaccttggcttn

SEQ ID NO: 12636 - DNA, 123 bp, Oryza sativa
  Clone ID: PAT_MRT4530_18746C.1
atggcgcggcaaagcaagtgcggccagggtctcaagaatgggctgctcggcaacagtcgcactgacccgcagtcccacacgcagctgcaccgccaattccacccccaatggaacggtgactaa

SEQ ID NO: 12637 - DNA, 241 bp, Oryza sativa
  Clone ID: PAT_MRT4530_18747C.1
cagcgcagaaattttttggaaacaacctgagtacattatacgcctctgtcatatgccttcttagtcactggattgcagaacactcagatttttgctccgggacgcataagaataagagtgacaccacaaggggcgagcgggtaacgctttcaatttcacacggtggaactggcacaagctatgcaggcggttagtggttattaatgctgctcaggcttacggcactggtccgtgcttaatg

SEQ ID NO: 12638 - DNA, 294 bp, Oryza sativa
  unsure (1)..(294): unsure at all n locations
  Clone ID: PAT_MRT4530_18748C.1
agtactgatattgaacagaataaccaccaagtgtcataattggggggttttattttttttttaggggatactaggtntaaattagaggggggggggggtttgttttggggataatttgataatttggggggggggggggggggaaatgtaggagtgaagggagggtgtttttatatattgtagatnttgagggttggggattggtagttgagaagggattatgattattgattaaataaattgttaaggaaaggaataatgagttatgtaatgaaatgtgggtgataaaggggg

SEQ ID NO: 12639 - DNA, 287 bp, Oryza sativa
  Clone ID: PAT_MRT4530_18749C.1
cgagaatcggcggcggcggcggcggcggcgagagcggagagagacaggagggggcaaccgcggcggcggcggcggtggggcgcggagatgaccgtgaaggcgaagccgaaaaagcacacggcgaaggagatcgcggcgaagatcgacgcggcgacaactaacaggggcggcgggaaggccggtcagaatgaccggctggtgcacgacaaagggcggcacgccaagctcgagtgccctctctgcaagagcactcgccacgacatcaagttcatgcagatacaccacga

SEQ ID NO: 12640 - DNA, 3483 bp, Oryza sativa
  Clone ID: PAT_MRT4530_1874C.1
atggccggaaatgagaacgcagtgggtacaacccgggacgactccatgtcgaaggatcctcccgccgaagtggaaatcgaaacttcgacgacatccgagcccgagaaggattctagtgcggccaagccttgtctttccgacaggaatcacgagccgacgaggattacttccgaggtttactctacggtactctacgctgctggagcggacggcaacgtgttggcgaattacttgccaaccgcattgaaaggctctgcacgttcatggctgatgcatctcctcccctactcgatctcttcgtgggcagacctgtggcagcagttcgtagccaacttcgaaggaacttacaagcgccacgcgatcgaagacgacctacatgcattgacacagaacccgagtgaatccttgagggattatgttcggcgctttaacgagtgcagaaacacaatccccggtatcaccgatgcttctgtaattcgcgctttcaagtccggtatcagagatcgctatactactcaggagttggcaacgaggcacgtcacgactactaggagattattagaaattgtcgatcgatgcgctcatgcggacgacgcactgagacacaagaacgacaaaccgaagaccagaggagagaagaaaccagccaaggacgcacctaagtcaagcaagaagaagaatcacaagagtaggaaaaggaaagctcaatcggaagttctcgcaacagaatacgcggaccctcccaagcgcccagacccacaaggcagcgacgcgaagaaaatatggtgccctatacacatgtcagacagacactctctagaagattgcctcgtcttcaaaaagtcgctcgcaaaacacatggcattggtaaaaggcaagcgagtacttgtggttgagaaggacgctgaggcggttactcaggaatcagactcagcatatccagactccgatctccatgtctcgcacatcttcggaggttccacggcgtactcctcaaagcgagaatacaagaagggggctgcgcccaagatgaagtggtccgagcagaagatagaattctcagaagaggaccaccccaggactgctgtcatcccagggcaatatccgatcgtggtcgaacccactattcgtaatatcaaggtcgcacgagttctgatcgacggcggcagctcaatcaaccttctcttcgccagcaccttggacgcgattaggatcccacgaagcgagttgacacctaccaatcaacccttccatgaaatcactcctcagtcatcgtccaaaccattgggcaaaattacgttgcctgtgactttcagccaagcaaacaacttccgaacggaacagatcacctttgatgtcgctgaattcgatacagcatacagtgccatcattgggagaactgcactcgcaaagttcatggccgcatctcactatgcgtatcaaccgtccgacatgctgggggtacccagggaggtgattgagcacaaactcatggtgcgacccgatgccaagccagtaaagcaaaaactgcggagatttgcaccagatcgaaaacaagccatacgagaagaactcgacaagcttctcaaagccggtttcatcagagaggtactccatccagagtggctagccaacccagtcatggtgcggaaggccaacgggaaatggagaatgtgtgtcgatttcaccgatctcatcaaggcgtgtcccaaggatcacttccctcttcctcgaatagatcaattggtggactcaatagccggttgtgagttgttgagctttctcgacgcttgctctggctaccaccaaatcagcatggcgaaagaggacgaggagaagacaacaatcatcacgccgttcggggtattctgctacgttaagatgccattcggactaataaccgcaggaaacactttccagcacatggtccagggcgcacttagcgaccaactcagaaacaatgtcgaggcctacgtcgacaacattgttgtcaagaccaagacaagtgactcattgattgacgatctgcgggaaacgtataacaacctccgacgatatcgcctcatgctcaatccagagaagtgcacgttcggagtaccatcgggcaagctactcggcttcctcgtctctggtagaggaatagaagcaaatcccgagaagatcaaggcaatcaagaacatgaagtcgcctacaagactcaaggaagtacagaagttaaccggatgcatggtggcactacgtagaaagctatgccactactttcaagcccacagggtcacagttgtatcctccttccctctcggtgaagtagtgagaaacaaagacgttgtcggccgcattgcgaaatgggtagtcgagctaagccagtttgatgtccgctttgtgccacgaacagccatcaagtcccaggtgcataaagattacaagtgctctagccccgagttatccaggtatctcgcagaagttaggaagttgaagaaaaggttcgataggatcgaggtccgacatgtataccgcaaagacaacatcgaaccagatgatctagcacagcatgcatccagacgagagccattcgaacctggcacctttctggacgtcctgaccaggccatcagtgaaagaggcaagcggcgaagatagcccggtcgcccccaacatcagctcgggggctacagaggcagagcacgccattgccgatctcgagaccacggacgactggcgcaccccactcattaaattcatagatagcgaagagttgcccgaggacgacgcagaagccgagaaaatatcccgtaaagcaaaagtctactgtatgatcggcaacgatctatacaagaaggcaccaaacagggtactcctaaaatgcgtctcgtccgacgatggcagacacctcctcctcgacatacatgaagggatctgtgggtcacatgccgccggtcggacattagtcagaaaagctttccgacaagggtttttctggccaaccgccctcaaagacgcctgtgacatggttcagcggctcatgtcacacgacaagaagtgggtcgaggatcttccatcagtactatgggccgtgcgtaccacaccgacaacatccaacaaggagacacccttcttcctcgtgtacggctcagaggcgatgctccccaccgagctacaacatcaaagtacacgagtacagaagtattccgatgaggatcaagaggagcagcgatacgatgatgtgaatctactcgaggaacatcgcgaacgagttgccgttcgagcagccagctaccaacaggcccttcgccgttaccatgagaagcgcatccgagcacgcacgctttcgatcggcgactacgtcctccgacgggttcaaagccaagcagggggaaacaagctctcacccaaatgggaaggaccgtacacgatcacacaagttctgcggccgggcgcattcaaaattgcagacggcgatagtcgcgagttggcaaattcctag

SEQ ID NO: 12641 - DNA, 428 bp, Oryza sativa
  Clone ID: PAT_MRT4530_18750C.1
gccatgaaggcaaaaaaactacaccggtaacaccaaccggtgcactagatatgcgccaccacccctacttgatacgcatgctgataatctgatcataccgactaataaactattaattctaagcaccgtaactaaccaggaaatgtgagtattacagaggggattttacatgacctgattgaacctatgaactcttgactattctaacaatgcgtaagataaactcaatatacatcctaacattctgaaaaacatactctacactaaacatctatgcccagggccattagaatagtcgccaccactgtcgctctgaaaagaatttcccgtccatggaggcaatggcttaacaactgcgtgagaaccaagaagctatggtgaatagagcctaaagggtatcaacctccagcacaaaatatactggtgct

SEQ ID NO: 12642 - DNA, 291 bp, Oryza sativa
  Clone ID: PAT_MRT4530_18751C.1
atggccggagccgacgtggtgctcgtggagggtcaaaccggcgccgatttttggggaaaagtgggggagagtgtggaggaggtggaggggaaccgattttatgcggtttgggcacgagggcgtgagcgggaggacccggaatcgacggcgacgtgggcgacaatggcggcacagcggtttcggctctggaggccgaaggtgtcctccaaaaccccggccgaccaccctagcgccggcgaggtcgttgcccgtgccgtggctgccgtcgatgacgtcatcatgacgtcataa

SEQ ID NO: 12643 - DNA, 3325 bp, Oryza sativa
  Clone ID: PAT_MRT4530_18752C.1
caatgaaggcaattcaagcaagaaacaataacctgcactcaacaccataagttatccgaaccacttgggtgatatgaactcactgaatcaccgcattccgatcacgcatttccttttctttctcaacagggagactgctttcgagttgcgcaaggtgattccggggaaatcctcagtgtccctccaagctccatggggactaggggaatcagagagtggagtacatctgtgattagtggcctgtaacttggttctggctgcacacagagcacagccaccgcagcaacttggtacaagtgcttcagatccattgtgttcttgatcatggggtcaattatgttagggagctttgatcggtcagttagctgaggcatggcccatgtaacaattgactggcactgagattgtgctgtcttctcaacaggccgccttcccaacagaagttcaagaagtactactccaaacgcatatacatcactcttctcagtcaacttcccatctaacaagtactcgggagctacatagcccaatgtcccagaaagcttcaaacttcctttgctgtgattcccactggtcactgcaaggccgaaatctgaaatcttagcattgaaatctgaatctaaaagtatgttagatgacttcagatccctatggataactggtggattgcagtgttcatgaagatattctaatccccttgctgtgtcaagagcaatcttcatccgaatgtgccagcttagagccgacccatgtgatggtccatgaagttgtgcttccagtgatccattctccatcagctcataaacaatgaaacggttctcttcatgaatacagaagcccaaaagggacactatattcagatgccgaatactgccaagtaaatctagctcattctcaaattccttctcacagtcctgtcccctgtggccaaatctcttgacggcagcaacaagtcctccttcaaaattggccttgtacacacacccaaacccaccagctccaagcaaattgctctcactgaacttcccggtcgccgtctcaagtgtattatactccatcatcgcgacaagtcctttcttgttagtcttcattgagttgaacttgttcagcatcggcaccaacgcaacccttgcggtatctgagctgcttcggatgttcttggagtcatgggctcggtgagaatgccggcacaggatgcaggcatacaatacggtggcgacgatcgccatgccggcgacggatgcaaggccaatggcaatgataagctccttgtggaaatgatggtgttgcctctgctccattgctgccactgcacccaagggaggagaaggcgccaccgcggcggcggcggcggcgggagtcacggcgaggctgccattcgaggagaagatgcctccacctccacctccacctccggtagccggagccggagcagggggaacaacccgcggtgtcgccggcgccggtgaaggccccggtccaggagaaggcgaggccgccgccgccggcgaccggtgagtcctcccattggccggcaacgagcagctcagcaccagcaccagcaccagcaagaagaagaagcgggaggaggaggaggagagaggcgtcaatggcggcggtggcatcgcattgaccggaaatggaggaggaggagagggaggaagactcccttccgctttgccactgggaggtggggcctgtggaaacgtgggggctaggggtgtcagtgggcggtgactcaggtgggccccgctagtgggggagggtagctatcgtaggtgtgcggggtgtgtgtcgtgtgggtgcgggattgggcctctacggtcgccggggtcgggggattcgtcggcgagcgcgcgatggattgtgcgggggacgacgacgcggtggcggcgggcatcatctgctcgctgcggggggcggacctggcggggtggacgccgccgtggtggtgcagcagcagcagcaagggggcggcgcgggaggagctgatctggccgccggtgacgcgggggaagcggtcgcgccgccggtctccgtcggcggtggcggcggcggcggggaagaaggggaggtgggcccgggctagcccggcctcgccgctggactacagcggcggctccggctccgggtctggctctggctccgggtcggccgcgtccaccagcggcggcgaggacggcgccttctgctcgcctcccggacaccgccccgcgccggcgacgaccaaggttagcgccatgggtcggcagcaacaactgccattctcagcgccgtcgcctctacggccggccggtcagcgtccacggaagaaaatgaggctaccggacgtacagcagctggtgcgatctcttgcagtggagaacgacagcctccgtgaggagatgcgtactttgcagagagcttgcgctgcgctttcaaaagaaaacgacaagcttgagttcttcccaaatttggcatctgggccagtaatgataagattacagatctcgagctcacggaacaaaccgatgattacagaggatctaaaaggaaagcaacagattgatcagcagtcagccacgcagtccatcggaggcggcttcgctcttccagatctcaacattcctgtgcaggacgctgctgatggatcagtccattgagctctccagattagtgcagctttgctgacagaatagcaagtgtacatagaggaattgcaggctagatggggggcacacgtccatgcgtgaagagaatgacacatttgattaagttgttagattacagggtctagtaccactatagtcccaagtgataagccaagttgtaggcttgtagccaaacaaaattgactaatttaacttcaactgatattgtttcacctggtgcttctatatttgatggagctgaagattgttacagctcaaactgattccagttctagtggaattagatgaatttaaaaaaaaaaaaacaaaaaaaaaaaaaaaaaaaaaaaaaaaaaaaaaaaaaaaaaaaaaaaaaaaaaaaccctcctccagctcctgcccaaaacgaagggggctctatcctggaaaaaattggttccacaattgctaaaggaatggtttttggaaccggaaaggccatggcacaaaaggctgttgatgctgaaatgggtccccgaaccattaacaaaaaaactgttggctccaagggtgttgcctttgccaccccaatggccaacgcccctccatttgactcatgcaaaatccattccaaggccttccaaaactggataaacaactatggaaagggccaccagcaagggccaacccccccccaaaatcctaaacaaaacccc

SEQ ID NO: 12644 - DNA, 331 bp, Oryza sativa
  Clone ID: PAT_MRT4530_18753C.1
ttttttgtttttttttttttttttttttttttttttacatttgttagttacattttttttttttttttggtattggactgaccacgtaagaacgagtagcaaaaaggaatccgcaaaaagctttttgaagaaaaaccaacaatcaaaatctgaaaacccccacattaaggaatagggaaaaaagcacatgcccatttccgtgggggtgacaagaaaacgaaaaagaccaaacccccacaaggtagtttggcagctggggggggggaaaaccgggattggccctgagccacccagacggggcggaaagaacgcccccccagaggggggaagc

SEQ ID NO: 12645 - DNA, 897 bp, Oryza sativa
  unsure (1)..(897): unsure at all n locations
  Clone ID: PAT_MRT4530_18754C.1
ggcgcagcagcagcagcagagagagagagagagagagagagagacgagacgacgacgacgacgacgacgacgaccgacgacgacgaccgacgaccgacgacgacgactgacgacgacgaccgaccgaccgaccgatcatcaacaacgccgactatttcgtntgccgcaccntgatcctgggcttccccaccgcggtccgagtactcggtagttagcttctcgccctcagtctccgtgctcgcgagcgtcgagcgaccataggcgagagtacctaccaccaaagnccagggttggtcctacaccccccgaggcaccgcatcattgtacacgccccacgagacattgggggcataccacccgaacttgatacccccaggnatcccccagcagatcaagcccagagggcagataagagaagacacgcaccacatagcagtaaagccagagaagcacccagcctgccagcgctgccagacgcagaaggtcctgagcagacgancatagcagtacacagggcgaaggcaatcnggccnagacccagatcaagaaccagaacagccgccatggngttagcaagagggatagcaagacagaggcagacctcaaacgcacaacaaaattgccgtggagagaacgagcaagttcataccaaggaggaacngccatcagaagcagccacgcccaagaacatagattgagggagccaccccccccaanntagttcccccagaacgnagatagattaccccccgccggtggccttggcgcccagtgaacagaacagggngggatccaaaatagaganngtcacgccagccanaggcaagagcaggaacgccgcattccctctggtggctggatttccattggccaagacccatgttagcagaacnaaat

SEQ ID NO: 12646 - DNA, 940 bp, Oryza sativa
  Clone ID: PAT_MRT4530_18755C.1
atggaggtcttcgagaacgcgaggtcggtgcggctcaggagccacctgggcacgtacctctgcgcggcggacgacggcggcggcggcggcggggaggccgtcacccacggctaccgccgcaactgccggggcaccgtctgggccgtggagacctccggcgacgactacgtcaggctgcagggacaccggggcctctacctctgcgccaccgagctccccgccgcgctcgacggcggctgccgcggctccgcggcgtgctgctgggtcatccaggcgggctcgccgcccagccccaacgacggcgccttcctgtggacgccgcgccgcgagggggaacacctcacgctcacggggctctacggccgcctcctccgcgccaggttcgggctcacgccgcgggagaacgccgtcaccgtcgaccgcgacgccgcccccgaggagagctcctgggtcgtcgaggtcgtcccggaatcggaggcgccgccgccgcgctgccgcgccctgtcctgcgacgcccgcctcgaggccgccacgtcggagcccgacacggcgttcactactgctttcgtcagattctattccgccaaggaattgaaggtggtgaagccgccgccgccgccggaggagggggaggaggaggaggagccgccgagcgaggcggcgccgggcgcgctggtggcgcggacgatcttctacaacacggcgagagacgacggccgcgtggacgacttcgaccaggggacgtggaggtacttcacgttcaaggagcagagcctcgcggcgctgcgccggcggctggaggaggaggcgcgccgggaggacttcgtcgtctgccgccggaggtgcgccgcgccgccgccggggctgttccccgtcgtcctcgacctcccccccggcaacagagacatggagttcgtcctcgtcttgcactcctccagag

SEQ ID NO: 12647 - DNA, 680 bp, Oryza sativa
  unsure (1)..(680): unsure at all n locations
  Clone ID: PAT_MRT4530_18756C.1
gaagaggagaagaggaggtgatcactgaagaggatttgcaaaatatatggctaagctgcgcgatgaacactactattgcctttattgcggttgcaagtatgaatcagcagaagcattggcaaatgaatgtcctgggccaaatgaagatgaccattaattcgctgtgtctggggcaacaaagaatggtccttgttacaacaggatttgcaagtggctgtaaacgatattttgggacctatactgcgaatcacctttcacatttcagtatcacatctcaatgttagaaatgataattctcttgcggcagcttaaagctacaagggtggaactggaaagcttcaggaagagtttacagttctgcatatggtatgctctgctcctccatgtagaaggcttcaaaggagcccttgctacagctcttgaaaagtccaaatcaaggtgcctctcctcacagtgaaaaagagtcgtgtcaatggaacaagtgatctgcgacatatgataatgataagcagatggcgccaaagcaattatacatttctgttttccaatcacggtgataactgttcaagttggtagtactgtgtttaggatggcnctgatatttttgattcattctagcaatacatcatacacctgttgctgggntccaaaaaaaaaaaaaaaaaaaaaaaaaaaaaaaa

SEQ ID NO: 12648 - DNA, 287 bp, Oryza sativa
  Clone ID: PAT_MRT4530_18757C.1
ggtgggagggagtacgattaacttcgacttctcgacagcttggtaataggtgtcggaataatcctccaaaactactttctatgatgcactataggataccgtgacaattactcaagctgctaatgacactggtctatccgatttatacctttttgagttcaaggcactcttgcatgcttctgttgattgccgcaggaagcttcttgataattaggttgcttatactgatctctaagacttcactgtcattgaggctcctaatgcttataaagcatcatgtaatttac

SEQ ID NO: 12649 - DNA, 402 bp, Oryza sativa
  Clone ID: PAT_MRT4530_18758C.1
atggaggactcacctgagtcggtggaggcggcaccgggctcggtggaggcggcaggttcggtggcggcggcggcggcctcggcaaaggaggagttcgcggcggcggcgccgggctcggtggagggcgtcgccggtcgggcaggtcggcgtcgggcgtcggggcagctgttcgtgtcggtgaagaggcaggcggcgacgacgaggaaggccgacgccggttggtgtagaggctcggtggcggcggcggcgggggcaggctcggtggaggcggcggcggcggtctcggtggcagtggcggcaagggaggatgacggtggcgaaggaggagttggcggcggcgctagggttctaaggaggcgggaaactgtagcgggacttagaaaaattttcgatccgatctga

SEQ ID NO: 12650 - DNA, 1662 bp, Oryza sativa
  unsure (1)..(1662): unsure at all n locations
  Clone ID: PAT_MRT4530_18759C.1
atggagagcaagacggccaagatcgtcgccggcgcggccgccgccgtgctgctggtcctcgagctcgctctctacctccgcttccggctgtcgcggccgttcttcctctccaccgccgtcatcgtctccgccgcgctgtcggcggccgccgcggcgctgctgcaccacgcggcgggcgagcggaggcgggcggcgcgcatggcgaggcggctgccgtcgatggaggacgagcggatccgcgtggagtacagctacttccgcaaggtcgccgggctgccgcgcaagctcacgctcgagtcgctggcggcggcgacggacgggttccagtacgccgtcgggcggggctcgtcggggacggtgtacaagggcatcctcgacgacggcacggcggtggcggtgaagcggatcgacggcggcgccgaccacgccgataaggagttcaagtcggaggtgtcggcgatcgccagcgcgcagcacgcccacctcgtccgcctcgtcggcttctgcctcgtcccgcgcgggccgcgcttcctcgtctacgagtacatggagcacggctcccttgacaggtggatcttctccccgcactccggcgatcgccgccgccggaggtacctgccgtgggcggcgcggtaccaggtcgccgtcgacgtggcgagggcgctcgcctacctgcaccatgactgccgcagcaaggtgctccacctcgacgtcaagccggagaacatcctcctcgacgacggcttccgcggcgtcctctccgacttcgggctgtccaagctggtggggaaggagcagagccgcgtcgtcaccacggtgcgcggcacgacggggtacctcgcgccggagtggctgctcggcgtcggcatcaccgagaagtccgacgtgtacagctacggtctcgttctgctcgagatggtcggcggccgccgcaacctgatgcaggcggagaatggcgacgacgggtcgtcggcgtcgccgcggtggacgtacttcccgaagatcgccggagacatggcgagggaagggagggtgatggaggtgctggacaggcgggtggtggagtccggcgaggcggtggaggaggcggcggtgcggaggctggtccacgtggcgctgtggtgcgcgcaggagaaggcgggggcgcgccccaccatggcgcgcgtggtggagatgctcgaggggcgtggcgccgccgcggaggccgtggaggcgccgccgccgtcggacatgatcgtcgtcgacctcctcgcgctcgacccggcggcgcgcggccccggcccgttcggcctgccgccgccggcggcggccagcgacggcgggatgcaggtgacgtcgtcggggatcagcaactcgttcgcgctctcctacctgtcgggacgatgacctcacgctctccgcacggtggctcgccggaggagtgacgtcactccggcgacgaggtttctccgagccccagttgggttcacgtgaaccgttggatgaagcacgtgcggacganatggtggtcgtgtggggttcggagaaaaattctccgaacccgtgttgggttcacgtgaaccgtcggatggagatcgtgcggtcaataatcaaacggacgtgagtccagcaacactatacttgggatttaaaaaaaaaaaaaaaaaaaaaaaaaaaaaaaaa

SEQ ID NO: 12651 - DNA, 2283 bp, Oryza sativa
  Clone ID: PAT_MRT4530_1875C.1
atggatctcggcaaatcatcctccaccagtgtgtcactgaagaagcttcaggaagacggcgcccttcctggtcgcggaaccatggaaagggaagcaggaggtactaatccccagcccgtcttaggtcgcatggttgcgatcgaagactatattctctgcggttttctccttgtgccttccgaatttcttctcttggttttgaacttctacggtctttctcttctccatttgaaccccaactctatcgccttccttagcatcttttctcatctttgtgaggcctacattggggtagagccctttcttgatctctttcgcttctactacgagctgcgttggatggagtccaacagggtgtctggttgcgtcgggttccgacttcgggatggcctgaagtcgcgttatatccccttccagtgcccttcttctcgcaacaaatggcggactaggtggttctaccttcagatcaaagattcggaccctgtcttcgttgttcccaaagaacaaccggacaagatttcgtcttggaccgcaaagccccctttgaccccctctctccagtcgtttatcgacattatcgacgatctccgagtacgaggcttgtcggggtatgaagtcgctgcagacttcgttggtctgaacagcaaagctgtggaacgtcgtgttggccaagtgatgatcagtggtccgacaacggcgagtaccatccccgttcccttttgtgagaaaggtgcggctgaacgtgatgctgccatcaatgtggcggcgtctctgaaagagaaggtcgccaaggaggcgtctgatgctgctgctgctactacaagtggtggcaatgttccgacaaaggggaggaagttctcctctgtgagcggacatcgtcgcaaggcatcaaccccctcggtaagctatcctgtcgtcaaatcgtacagccagaagaatttcgccttacttcgcatcgaccatttttcaggcctcggacacgtctctcccgcctccacgacgacaacgccttgtgacggttggcgagaagttgagatggggcgcctcctcgaggctggtgctcgcggcatcggtcacgagattgtggaggcaaggtcggcggcgtcgtcggcaaacaagcgggctgaccgattggcacacgagttgtcggaggctcgtgaggacctcaagaagatgagggagttggtggccggcaacgagcgacaacggcaggggctcgagcaccgcatgtcagagcttgggaacaatctgtcgaaaatccgtggctcattgcgggtcacctatactggtctgcaccagctcgccggggagtgtggcattaagtctactatcccggcgaatcccgacgagttctcgttgacatcttctcttgcggagctggcggcggcgatggaggagatcccctccaagcatgcggctaggatcggggaggagacatcgaacgggatctacaccggggcgtgccacgtccttgcgtgtgtaaagctggcgcatcctgaactcgatctgcgcgagatcttggatcagggggcggctagcaacacgcgtaaggagatgatggaagaagtcggtgacctgggggaatctgttctccccctttttgaagagtggggcctcttagatgttgatgacgaggatgtccagcagcatgggcaacccgagtcaccggcgattattccggctctcacgtttgaccaacatgcatcgcccgacaatgtagaccaaacccttgcctcggggacggagatggcgaccacttccttagatctcgagagtgctcttgctggccaagatcgtcgtatccaatattggaagacaaaatttgaagtagcggaactcgagagaactatggttgtagtgaagaaaaagcaggctgtggaaacgctccgaggtcgcgaggtgtggttcaactcgtacttgaagagttgctgcacatccatggccaaggtttgtagagagcttcgagtacctcgtggggatcccgaggagtccgcggctgggtacatctcgtggctgaacggagcctgtgctcaacttgatggcgtcggcaagtgtatcgacgaggccttgaagcaggaatgtcgtcgatcgagccgatatgccggagggcacgtgttggcttgtctacgagatcatcgcccgcgcctggacctcgattttctccgtgagggctttgctcgttctcggaggactccggcagagatagaccacctggcgaggtcgatggcgccgttggcggagaagatattccagtctatggattggcgttggccttcttggtag

SEQ ID NO: 12652 - DNA, 237 bp, Oryza sativa
  Clone ID: PAT_MRT4530_18760C.1
atggcgtggaggctgagctccgagtggttacgaggagatccatcggtgaggggtggcgtcgtcatgcatccagcggctggctacgtcgtccatggcgtgcctcctggtcggttcagggagcacacgagtaggcggccagcggcagtggtggccctgaaacaacgttcaagccggaaaggaggggaaggttgctttccaccttgtgcggcggcgacggtcttcaggcccggcgactag

SEQ ID NO: 12653 - DNA, 1540 bp, Oryza sativa
  Clone ID: PAT_MRT4530_18761C.1
ctagaccacttgccagctcaactagcactattataccaaccattatgctaatgctgtctcatatctaatgtgtgttaatagtttattagctctccaagaacaatccaatcttcagtagtacaaatatatgagagagcacaaagcttcaagcctccttcagactacaagccattaaacagagacgaccaacgacttaaccacacttcttctttgtgctgtccaacctccattgttgggtgtgaaagctttggctcatctgccatgtgtggaggatccattctcggcgaccttcacttgccggtgcggcggacagtgaacgccggtgacctgtggggagacgccggcaagggtagagatggtggcgacggcttgaagaagaggaaggggagttcttgggatttcgatgttgattgcgatgatgatgatgatgatgactttgaggctgattttgaggagtttgaggatgactatggcgatgatgatgatgtgggtttcggggacgacgaccaagaatccgacatgaacggtctcaagctcgccggattcagcaccacgaagctcggcctcggcggcagcaggaagaggaagacgcgataccgagggatccggcagcggccatgggggaaatgggcggcggagatcagggacccccgcaagggcgtccgcgtctggctcggcacgttcggcaccgccgaggaggccgccatggcgtacgacgtcgaggcacgccgcatccgcggcaagaaagccaaggtcaacttccccgacgccgccgccgccgccccgaagcggccacggcgttcttcggcgaagcattcgccgcagcagcagaaggccaggtcgtcgtcgtcgtcgccggcgagcctgaacgccagcgacgccgtgtccaagtccaacaacaaccgcgtcagctcggctgggagcagcaccgacgccaccgccgccgccatcgccatcgacgacggcgtcaagctcgagctgctctcggagacggatccttctccgcccatggccgccgccgccgccgcgtggctcgacgcgttcgagctgaacgatcttgacggatcaagatgcaaggacaacgcattcgatcaccagattcacaaggtagaagcggctgtcgctgatgaattcgcgttctacgacgatccgagctacatgcagctgggttaccagctcgatcagggcaactcgtacgagaacatcgacgcgctcttcggcggcgaggccgtcaacattggtggactctggagcttcgacgacatgccaatggagttcagagcttattgagcatttgattctatttaggagggagtgaattatttgggaggaagaatcgatgttgtaacttgtaaaatctctgatgatgatctctgcatcatatgatcaatttgagtgcagttttgtttttgtaaatacgaattctttattatgatgttaggttcttaatttgcccttcttcatcagggatttgttcaggcttgggttgtaacccctgattgcacgagggaaagttcgcgttttttgttgtcacccaaaa

SEQ ID NO: 12654 - DNA, 867 bp, Oryza sativa
  Clone ID: PAT_MRT4530_18762C.1
gcacgagggtttccctcaagtgattgtgcaaggtatggacctaattgatgaagaagatagcacgtcagactgcactggagcatcaaagagtcagactgattacgaagactacaaatctgggaaagatgtctcgttaggggcactcttaaaaaccaaggatggagcccttcctttagcttttgatgactacgtgctaggcgataaatctgaagaatcgggaccagtgcatccccccgctgctgcaaagaacaatgtattaggagctagccccagctctaaaagttctcggtcaccttcaggagagaaaagtcgtggcagcagagtgaaaggaaaagtcaaggacttcatgaaaatatttagtcctgagagttcaccgaagagcaaacgagatcggacatccagtgggaaaaacggaagcaaaagtggtcctgaagatcaatttagcatatccaattcggaggtcgatgaccatgtcagaacagccaatatgaacaagcagaatgtgttccctcctgtaccctctccaatcagcgaagcacaagacaggacggagataccggtttttacagtggataatgaaatggattcaaaggcagattttggaagaaaagaagttacacctccctcttttgatgagtcaagcgatgcccaaacaaaatataaggtagatgagataacagatcttgcggaaggtccagtggaagatcttgaagaatgtgtggttgaggatgtctctgaagattttattcttcgtaataatgaggaaaaagagcaaataaagatttctgaatccaaaatctgggaatggtcacagggaaaagaacgaaatattaggtcattgctttctacactacaatatgttctatg

SEQ ID NO: 12655 - DNA, 894 bp, Oryza sativa
  Clone ID: PAT_MRT4530_18763C.1
ttacactaaatttttgaactccggcatttgcagccaaaaattttccaccctaaaaattgcggagcgaggcgctgaatcggaaatgtgaactaggattggtgtatggtcagaagttgttgcagtcacagcttttgcttcagtaagagggaaggattggctccagagtggattaatgaaaaccctatcaagtttaacaagggtggggtggcgtcttttattagaccaggtgaaggtcctgtttgggatgtcaatgtcaaggaggctctcggagttaatccagtcgttgaatgtttccatctccgaccaattgatattatcgttatttttttcgtgggggtatctataaatgttgaagtcaccgaggatcatgacagaaccagttagattgagagtggtggtggagagctcatcaaagaagaggatcctgtgctggtcgtcacagggggcatagacattgatgatagagaaggaggtgttgtcggaagagctacagaaggaggtggtcagatgagacggtgagctggagaggacagtggcagagaaaaggttgctccaagcagtgagcaagcctccggctgaaccaagggagggttgaaaggagaaattacgaagattgcgtggtaagaaggaagcagcgaggagagggcagatagtatcaagcttggtttcttggaaacaaactatatctggtttattctcagctagggattggaagataagagctttctttttatcgcagccaaggccgcgcacattccaggtggcaatcttcatagaaaaaacagagaagcaacttggtggaggaatcccacccaaaaccaaggcaaaatcgcatgtttaaaagtctgccgcggaaaaaaggaagaacagataagcaagaaagctgaaacggta

SEQ ID NO: 12656 - DNA, 396 bp, Oryza sativa
  Clone ID: PAT_MRT4530_18764C.1
cccacgcgtccgcacttgcatacttgggccaggtggcattggagaccagtttaatcaaaacaatcggtcacagaactgataccaggtttgcgagctatcacaattcacgactgatcaatatgcactctttcactcatttcttcacaactgaccatctttttgtttattgctgatttaatgaagaagagccaaatgagttggaattgttctacaatggatgataacctgattgtcctgatataagcactgacgtaaattcccttaggttggttcgagcaggataatggggcatgggctcatggatgtcatggtctgtatcaagtccgaccggcttataggttgctagttgaaaaaggcaagagagaggtgataagcatcttgccacattggcacgtc

SEQ ID NO: 12657 - DNA, 927 bp, Oryza sativa
  Clone ID: PAT_MRT4530_18765C.1
atggcgactgcagaacgttggaagaaattgaaatcagagctacttgagaagatgtttgaagacatttgcaatactggtgctgaatattggtctttaggacaaggcaccatcccgacaagcaccactcatgcaattcatattgccgataatgaaatcgataaggaaacatataaggatgaaccaactgtcaagagaaagagggatggtggtggatcaaagatggataaggggaaaaagagcaagagtgggtcccaaaagatggtagaggagatgtcgaagagtaatgatctctcagcacagacattatcatccattcaatcatttgcttggtcgagagaagatcctccgggttgttccataaaggatgttatggccttggtggaggaatgtggggcagttgaagggacaaatgagcacttcattgcaactgagatttttatcaaaaacgatcaaagagagatgtttgtcaattcattgcacactcctgtaggacgtttttcatggcttaagaagaagtacgaaatgtcaagtgatagtgaagatggttcatcgcatgaggaatatgaatatgatgagcttaccatgcatttgttcgaaactgtagcatccaatctttcttcgactagaaaagctgtagagagttataactcactcttcttggaacaggctctgccaaggacattacacctcaatggaatgggatgggtgcaagaaacgttggccacacgaggtgaatgctacaagatgcttggtatgaatgggaataccttcattgcattgcatgatctattggttaggaaatattatcttgtcaatgctggatatcccaatcgtccatactacttggcaccatacaatggacaaagatatcatgtccctgaaagaaaaattctacttcttacactcgagtttgcgcactatcattga

SEQ ID NO: 12658 - DNA, 347 bp, Oryza sativa
  Clone ID: PAT_MRT4530_18766C.1
tttttcaactggctgaaataccgaaagcaaaatggctgcgcccgggttatacaactcgactcacattagacgactccttgatatctgagaacagttcttggagtgcagagcgcggactctgatagcagtgttccgagcttcaaattatcctataataaaacactgaatggtcagaaagcagctggtgagcaactaatgcaccacttctgtcaacccactcatggagactcatgatgctgagcgcggacagacacataatcagatgccaatgtctaccttgatactctggaaaggcctccacatggttctattcctagggatattatcgatgtctgtggacaacaaac

SEQ ID NO: 12659 - DNA, 1953 bp, Oryza sativa
  Clone ID: PAT_MRT4530_18767C.1
atggcgatgctccaagattgtattgaaccaattccaagtttgtcgcctgagaatcactattttcttggtccaatcggcaatcttgatcctactgaattcatcatcgtcgaaaccaatagaatccactttagattagccaaccctaatctaagccactggaaaaacaccttcacgtcttggccatctcttgagaaaaccacccctgagaaaagctgggccgtgtggtataagcgtgtatcggctagcaagcaagttcactgcgatgaactcggaattagccaggcgctcgacctcaccatagcaaattcggctaaagatgaacccttgatggcagctgccacctatttctggtccaacaccatcaatgccttcctattcaaccaaaggccgatgacccccaccttgcttgacattaccatgatcaccggtttggatgtgacctcttcagctaaccccatgagtttgaacaccaaaaaccagtttgacttcagaactaagagcataggtggctggtctggttatgtggcagcatatatgggcaaaggacctgtcacttcccgagaacatgtggccttcctgctaatgtggcttgagaaattccttttttgtggatcaagttgtggccctaccaccaactggcagttcttagccaaagcccttgagacaaagaggcaattccctttgggcaaaatccttctcgactatttgtaccaaatgttaaacaacgcatcgactaagattgctgtcggcttagtcgttagcgcaggcaggccatggtggttgctgcaaacttggctaaacttggtagccatgaaagctgtcaatcggccagccgtaacagaagctgaatttccgagattagagccgatcacagatgatgatggagaagagcgcacccatcgcagatacttattcccagatgtcattcctcagagcaacagtggcaaagacatagaatatgctccgggccttttgccaaacggtggcggattaactcctcctatcatcggctaccatgccctcaagacctcaagtctgcttcaagggcagatgagagaaccggccgatgttggcaggaagagaaagaccaaggaactagcactcgatccatcagctctggctcccaagaagaagaccaagaagaataagcctaagccagccgatgacttgcctgccttagatccatccatcgagcaagctttggatgaagaagagactgaagaggatgttgaccaggccgcagccgaagcaagaagccataatatcgaggaagaggaacaaccagccgctcctgccatcccagattactttgataaggaagcagaagaagaaaccacaagcacggccctagcccccctggatgaaactgttaagaaaacacttgaagacatataccttcggctagggtcatcattagacagcttagtggcggattgtggttcaatctgggcacgatttgctgaaatccaagccttaatcccggaagatctagcgaacatcattactccagctatatacctcgagcaacatcaattcaagctagagaaggctcagcaacggatagccgatcggcgggagcggaaagtcattgaagctaccatccaagccaatcggcaactcgtgcatgaagagaaagccaagctcgatcaactctctattgggccgattcagtcgaacatagatcggcttgaagcccgcaaaattgatctcatagctcaactcaaagaatgcaatgccgaattggatcttgaaaagcagaagctacccgatcttccaagtgctattgaagaacaaaagtctaggctgaaatcggccattaggaatgttgccgatatgactaagtccttaaaagtcgcccctggaaccgatgcacaagatgcccaagcaattgaagaaatagaacaaatcagacaacaggctgtatcggctatccagcgatacttatctcagtga

SEQ ID NO: 12660 - DNA, 575 bp, Oryza sativa
  Clone ID: PAT_MRT4530_18768C.1
acatgctctttatattcatggcatatctgggcgctcatacataacacacgtgcatgggtatgctttattataaaaagcacgcctgcgaagatgcttcaggagtattaaaactcatagatagccgcatgggcacatacaccagtgatcaccacacgacaaacacatacatagtgactagagcagtagcacatacacatatctatgcggattcatacgtagcacaaagattacttagttcccggacacaaagatagttattgttgatcgaaagagagggtgggtttggaacatatggctgatggatggcgcttgggatctggataaagatcagggtgtggctcaacgttacgattaggaatgggcttggggtgaggacttgggtcaggttggggttatagctttgggtccatctaacgatctggggtcgtttacagatgaggcttacgctttggatttggtttatggccaaatttggggctaggttgtggattcagttgaggatcttgttacgggtcacgctgaggcgttggctttgggtcaggctgtgggttcggttgaagatcttgctttgggtt

SEQ ID NO: 12661 - DNA, 551 bp, Oryza sativa
  Clone ID: PAT_MRT4530_18769C.1
tggagttgtgcctttcctcaacttgttttgagatgtgaagatttatcagttttgcaaatatttacattggctgcgttatctgaagctggttgtcgaggagatttagtggtgatagcttcagcgtcaaacataatggattcccagacctccgtcgactgtggatggaagccccaaagatcccacgagtgagtatcgaaaacggtggaatgccccatctcacctctctaaagttgatttctgaagatgtggagggtcttccagttgctagcatcaatgagctcacatatcttacagaaattattcttgggaacgtgaacgaccaaacaaggagagcttgggaagatgaagcaaagcgccacataaatagaccaatggttgaatcggctgcacgctaggttgagaacgagtcggtgtcttctcaacaataagatgttttagatgcatgtaataattagtcaaacagtatttgtttattttcatcagagtatctgatcatgtaagctgatttgattgtttttcttcgttgcttactggctaaaaaaaaaaaaaaa

SEQ ID NO: 12662 - DNA, 4341 bp, Oryza sativa
  Clone ID: PAT_MRT4530_1876C.1
atgtccgcatcgttttggtgtcctccgttcgcgtcctcgcgccgtcgttcgccggcgagcatgcgcgcccgagccgccgagccgccgccggtggtgacgtcgtcactgacgtcatcgtcgtcgtccctcgtgattccgacgtttccggagagtccgttttcgcaggagaagaatttgaagagttccaaggccagcaaggcaactcctggtttggaatggtatattcctggtttgaagatagaactgtgcagccgggatggttgttcagaatggttgggcctatgcaacaggattcctcatgatcgtcatgaagagaagtgccgagtcaaagtcactttgaacagtaatagtgaagatatcccctcagtgatgttcgaagctggaggaagaaactacatccatgcatgtcaggaggtagcaaggatcgccataggcgagctccgcgatcgctacagtgatcagttggccgacactgagtatcgctaccattctcgtcaaccccagggaagtgaccgtggcagctaccttgagactgagggaattgagaatgatgctaccacaaggcatttggttgagatgctgtgggctatggatgaaacccgtgcagagactgtgttagcagctcaagatcgtgaagatcggaatcgaggtaagatttgcaagctagaggacaaagtggatcgattggagaaggaactagccgcgttgaagggagaagcaccaccgcagaaggccaggatttgtcttaccgcaaggaagagagctctatttgtccctcgctatcaattggcaccaaagatgcatataccatcgggagtggtgtctctcaagaagaaggaatttaggtcgctcacccagggatcccgctctgttacggagtatctacacgagttcaatcgtctggctcgttatgctccggaagatgtgcgcactgatgaagagcaccaggagaagttcttggaaggacttaatgatgagctttcttacccactcatgactggggattatcatgatttccagaagttagtggataaggctattcgtcaggaggacaagtacaatcgcatggagcagaagaaacgccggattgctcaattcaagacacaacaggggaataatcagaggccgcatcttactttaggaccccagtccatgccacagggaggttattcgtctgttgttcgtccgcagcgtcagttcttcaacaacaatgctggcaacaacatccgcaatcaagttccacgtcctgttgcagcctcgacacagcaacaacctgccaagagggagcaaggcagcaagcccgtggtgtgtttcaactgtggagacccaggacattacgctgacaagtgtccgaagccccgatgcgtgaaggttgtccctgcccagagcaactctaccgtatcagcatcaaaggcccgtgtcaatcatgttgctgctgcagaagctcaaggtgctccagatgtgattttgggtacgtttcttgttaactcagttcctgcaacagtgcttttcgattctggtgctacacattcattcttatctatgagttttgcgggaaatcatgggatggaagtagaagatcttagatgtcctttgatggttagtaccccaagtaatcaagcactctctttgcaacgtagcccctctgtcagaatagaaattcaaggagtaccatttctggccaatcttatcttgttagagtccaaagaccttgatgttatcctagggatggactggttagccaggcataagggtgtgatagactgtgctaacagaaaagtaactctcaccagcaatgatggtcgagttgtaactgttcatgcattgtcttctgagtctttaaggtcaatactgaaccaaataactttggaagagattcctatagtccgggagtatcccgatgtgttctcagatgatttacctggtatgccgcctaaaagggatatagagttcagaatagatttggtaccaggaacaactccgatccataagagaccttatcgaatggcagccaacgagttggcagaagtcaagaggcaagtggacgatttgcttcagaaaggaattgatgatttgtttgatcagcttaaaggtgccactgttttctccaagatagatcttcgatcagggtatcatcagttgagaatcaaagaggaagatatacctaagacagcttttaccactaggtatgggttgttcgaatgtactgttatgtcttttggacttaccaatgcccctgctttcttcatgaacttgatgaataaggtgtttatggaatacctagacaagttcgtggtagtctttattgatgatattcttatctactcccgaaccaaagaagagcatgaagaacaccttcgccttgcattggagaagctacgagagcatcaactgtatgctaagtttagcaagtgtgaattttggttgtctgaagtgaagttccttggtcacgtcatctcagcaggaggagttgccgtcgatcctagtaatgtagaatccgtaaccaactggaaacaaccaaagaccgtttcagagattcgcagtttcctaggcctcgcaggatattatcggaggtttatagagaatttttccaagattgctaagcccatgacacggctgcttcagaaagatgtgaagtacaagtggtcagaagaatgtgagcagagttttcaagagttgaagaatcgcttaatatcagctcctattttgatcttacctgatccaaagaagggattccaagtgtattgcgatgcatccaaacttgggttaggttgtgttctgatgcaagatgggaaggtggttgcctatgcatctcgtcagttacgtccgcatgagaagaactaccctactcatgatcttgaattagctgcagtagttcgtgcgttgaagatttggcgtcattatcttttcggtactcgtacagaggtgtataccgatcacaagagtttaaagtatatctttactcagccggatctgaacatgagacaaaggagatggttggaattaattaaggattatgacatgggaattcattaccacccaggaaaggttaatgttgtagcagacgctcttaggaggaaaggctattgcaatgctacggaaggacgacagttgccattggaattatgcaaggaatttgaaagattaaatttgggaattgtcagtagaggtttcgttgcagccttagaagcgaagcccactctaattgatcaaattagagaagcccaaattaatgatcctgatattcaagaaatcaaaaagaatatgagaagaggaagagctatcggtttcttggaggatgagcaaggaacagtatggttgggcgagagaatctgtgttcctgacaacaaagatttaaaagatgcaattctgaaagaagctcatgatactttatattccattcaccctggtagtaccaaaatgtaccaggatctcaaggaaagattttggtgggcaagtatgaagcgtgaaatcgcagagtacgtagcagtatgtgatgtttgtcagcgagtcaaggcagaacatcagaaacctgccggtttgttgcagcctttgaagattcctgaatggaaatgggaggaaatcggtatggatttcatcactggtctacccagaacgtcatcaggccatgactctatttgggtgatagtcgacagacttaccaaagtggctcatttcatcccagtaaagacaacctattccggaagtcggttggcggaattgtatatggcaaggattgtgtgtttgcatggcgtccctaagaaaatagtgtctaatcgaggcagtcagtttacctcaaatttttggaagaagcttcaggaagagatgggttctaagctgaactttagtactgcttatcatccgcagacagacggacaaaccgaaagggtgaatcagattttggaagacatgttgagagcttgtgctttagacttcggtggaagttgggataagaatctaccttatgcggaattctcgtacaacaacagttatcaagctagtcttcagatggctccgtacgaagcactgtatggtcgaaagtgccgcactccacttttgtgggatcaaacgggagaacgtcaggttttcgggacggatatcctgagggaagcagaagaaaaggtgaaaatcattcaagaaagattgcgtgtggcccagtctcgtcataagagttatgccgacaatcgccgcagagatttgagtttcgacgaaagagattatgtgtatcttcgtgtcacgcctcttcgaggagttcatcgttttcacaccaaaggaaaattggcaccgcgttttgtgggaccttataagattgtcagtagaagaggagaggttgcttattag

SEQ ID NO: 12663 - DNA, 507 bp, Oryza sativa
  unsure (1)..(507): unsure at all n locations
  Clone ID: PAT_MRT4530_18770C.1
cgctcgtatacctcgagaagctcagcctccgctccaactcgctctccggcaccatcccggcgtccctctcccgcatctcctccctccgcgccgtctacctccagtacaactccctctccggccccattcctcagtcattcctcgccaacctcaccaacctccagacgttcgacgtgtccggcaacctcttgtccggccctgtccctgtttccttccctcccagcttgaagtaccttgacctctcctccaatgccttctccggcaccatcccggcgaacgtcagcgcgtcggcgacgagcctccagttcttgaacctgtcattcaaccgcctccggggcacagtcccggcgtcgctggggaccttgcaggacctgcattacctctggctggacgggaacctgcttgagggcaccatnccgtcggcgctgggcaactgctcggcgctgctnncctnagnctggaggggaatgcgctncgcggnatnntggcgnncgcggtggcggcgat

SEQ ID NO: 12664 - DNA, 140 bp, Oryza sativa
  Clone ID: PAT_MRT4530_18771C.1
ccattaactactgcccagaaaaactcggtgtcttcattgacaacacatggtgcattctttgttttgctgcgtggtcaaattttttgtgttacctcatacggtttatcccatcttaggtaacttcatatccctcaagaaca

SEQ ID NO: 12665 - DNA, 2250 bp, Oryza sativa
  unsure (1)..(2250): unsure at all n locations
  Clone ID: PAT_MRT4530_18772C.1
cggacgcgtgggcggacgcgtgggcggacgcgtgggccgcttcgtcccccacccacccaccactccactccccgcagttggtggcccgcggcggcgcaagccctagcgtccacgcgaagcaaaccccccaaaaccctagctccgccgccgtcggcggcgcccgagctgcaacccccgccacgacgccatccgggtggctagcctaagcccctaaccaaaccctagcgaccggcgccgcagtcggngggagagatgccgagggagatcattacgatacaggtggggcaatgcgggaaccagatcgggatggagttctggaagcagctctgcctcgagcacggcatcggcaaggacggcctcctcgaggacttcgccacccagggaggagataggaaggatgttttcttctaccaggctgatgaccagcattacataccgagggctcttcttgtggatctagagccgagagtgatcaacggaatacagaacagtgagtacaggaatctatacaatcatgagaatatatttgtggctgagcatggaggtggtgctgggaacaactgggctagtggatatcaccagggtgagcaagttgttgatgatatcatggatatgatagacagagaagcagatggaagtgatagccttgagggttttgtgttatgccactcaattgctggtggaactggttcaggtatgggttcttacctgttggagactctgaatgaccgatacagcaaaaagcttgtccagacatacagtgttttcccaaatcagatggaaacaagtgatgttgttgtccagccatataattcgcttttaactctgaagcggctgacactgaatgctgactgtgtggttgttcttgacaatacggcccttaataggattgctgtggaacgtcttcatttagcaaatcctacttttgcacaaacaaactctttggtctcaacagttatgtctgcaagcacaactactctgaggtatcctggatatatgaacaatgacctggttggccttcttgcctctttgatccctactccaaggtgtcattttctgatgacaggttacactccattgactgttgaacgacaggttaacatgatacgcaagacaacagtattagatgttatgaggcgacttctgcagaccaaaaatataatggtgtcatcatatgctcgaaataaggaagctagtcaggctaaatacatctccatacttaacatcattcagggagaggtggatcctacacaggtccatgagagcctacaaaggatacgtgaaaggaagcttgttaacttcattgagtggggacctgcaagcattcaggttgccttatcaagaaaatctccatatgtacaaaccacgcatagggttagtggattgatgctggcgaatcatactagtatccgtcacttattcagcaaatgcctgggacagtatgaaaagctaaggaaaaagcaagcttttcttgacaactacagaaagttcccaatgtttgaggacaatgatctctctgaatttgatgaatctcgagaaataatagagagcttagttgatgagtacaaggcttgcgaatcaccagactacatcaaatgggggatggaggatgctggagaggcaaacgttgcggccgcacttgattcgaagttagtggtgtaacactactaaattcgttactcctttgattttcactctgttagctactcccccgtcccaatatagttgtccttttatgttgtttagcatagattaagtttaagaataaaagacagtaatgtcccttattaaatgatgtatgcttgtgagtagaattttgaaacctggaatttaggacgaaggggttataatattgtcttttaaacctcttgtcctgagctatgacttgtacatgccgcgcctacaagaatgcaactctaattgcctgatggtcatcagttcgatggcagctgctcgactcgttcccactctagtgctagatgcgtttcctcagcattcttcaagtttgcttctcgtgttagtgttacagcctgtgcgacatgagcgtatatcttgacccacttcgaactggccgtagtttgtgctgttccgttttgggttgcaatcccttctgggatgctttgtgtgtgtggatgcgtgtgatgtactgatactgatgggttttgtgccagaatagcatgcagagctctacttcgttggtgcaaaaaaaaaaaaaaaaaaaaaaactcgagactagttctctctctctcc

SEQ ID NO: 12666 - DNA, 1800 bp, Oryza sativa
  Clone ID: PAT_MRT4530_18773C.1
atggacctcctgtgcgacaacatggtggaggagatcctcgtccgcctaccggaggagcagcacctccgccgcgccagcgccgcctgccgccgctacggcgacatcatccgccgccccggcttcgccacccgccaccgggagctgcactcgccgctcctctccggcggcgtcgtcctccacggcgtgcggcgccgctgcccccgcgtggacggcaccgcagcccacgtccgcggatcctacgccttcttcctccccgccggcgccggcgacgcctccgcgtcttcctccttggagttggacctcgccggcctcttgcctagccccaccgacagggagctggcctacctgctcagcaccggcgccgccgatccggacgccgcccgcaggagcgtcttcatcgtgcactcgtcgtcgtcggccggcctgctgctgtgctgccgaggctatgtcaacccggtgcattactacgtctgcgacccggtggctcgccggtgcgtggccctcccggagctgccatggccgcccgccttcgacaagtccggcatgctctcggtggctgccggcggcggcggcggcttccaagtggtcctctttgaaaagaggggcttcgcgcatggtggagggcacctagacctcgaggttttctcctcggactccggcgagtggccggcgatgcgcatccctcgcccgcaggacctcgccgggttccggtgcttcgcgccgccgcacctccggcacgacggcgccgcggcgtactggctcgggttcgagcccagggaccgggccgtggtgtacggcgccgcggaccactccatccgcctcatcccggtgccacgccgcgtccacgaccccagcgcgctcaaccggttcgtcggggagcggcgcggcggcgcgctcctccggtacgcgcacttcgacgcggcagagttcgaggtgtgggacacggacgacgccacgccgacgcggtgggcgctggtgcaccgggcggcgctcaaggacgtggtggcccgcagcccccgggcggtggccgccaaattcgtgcacggtcgcatcgtccggcacatccaccaccacgacgcgaactggaactggtgctcctccttcaagctcatcggcttcgacccggtccacgacgacgacgtcttcttgttcggggcgaccaatggtagtggatgcgtcgccgcctactccctcacgctcggcaagctgagcctccgctgcaagattgacactgccgacggctcgtcctccttgtgcggctgtgacatgttcccgtacgtacgcgcttatatatacatatatatatatacatatatatatatatatatacatatatacatatatacatatatacatatacatatacatatatacacacacatatacataacatatacatatatatacatatatatgtatatatacatatatatatacatatatacatatatatgtatatatacatatatatacatatatatacgtatatatacatatatatacgtatatatacatatatatacatacgtatatacgtatacatacgtatatatacatatatatacatacgtatatatacatatatatacatacgtatatatacatatatatacatatatatatatatatacatatatatacatatatacattttcgtatatatatatatatatatatatatatatatatgtatatatatatatgtatatatatatatatatatatatatatatatgtatatatatatatatgtatatatatatatgtatatatatatatgtatatatatatatatatgta

SEQ ID NO: 12667 - DNA, 366 bp, Oryza sativa
  unsure (1)..(366): unsure at all n locations
  Clone ID: PAT_MRT4530_18774C.1
gtaatgtnaggtctggtttaggttcttccctctagttgcagatgcaagcatatatttaattctaaatttcaattgancttttttnacaataaaacaatagttagtcaccaaatattccgggtaagaaatggntcacttcccgctattgagttctatgacttctatcatctatgcacgatcaacattataaggaaatatatgccattgctagctaaaattgaaaagaatttccaatagctaaaattgaaaagaatttccaacttattgggatttatggacgattaaaccgattaanttaatattcaattatgagccattgctagctaaactttgtaagtattataattttgagggctaacacggtga

SEQ ID NO: 12668 - DNA, 297 bp, Oryza sativa
  unsure (1)..(297): unsure at all n locations
  Clone ID: PAT_MRT4530_18775C.1
ntttttattatttttttttttttttttttntttattatttttttttttttntatttgggctggggaaaccatatgtatttcacgattgattaatttcactggaaanagcccggnntcattacattacacaaatttatacgttgatacacgcatatgcgtcgaaccgaccagctgnttaataaatttataacacacgggtttaattcagcaattatgtgcccacacacaaaccacactcatatgggttgtttttattggggactaattaaggggggggactctccggcggcgagtgtt

SEQ ID NO: 12669 - DNA, 378 bp, Oryza sativa
  Clone ID: PAT_MRT4530_18776C.1
atgtcggccactgtctaccttcctagagacctcagcggcagtggaggtcgatgggtccagcacggggagctatgtggacaccatccaccgccgatcgacctatccaagaaccgccttgccggccgcatcctcgacaagatccgaatcacaaattctcaaaaaaaaaaagaaacgctcgctgccgctgctgcgctgcccgccgcgaggccgcccgccggagcatcgaccaccgccacgctgccgcgaggccgaccggccctctgcccgctggcgcgccgccgcaaagccgccggctgcccggccctccgtgctgcccgggcctccgcgctgcagatcaagaagtggggaggatgggagggaaaggaggagaggcgctga

SEQ ID NO: 12670 - DNA, 167 bp, Oryza sativa
  unsure (1)..(167): unsure at all n locations
  Clone ID: PAT_MRT4530_18777C.1
ccgtgctggagganatttttcgggggagtntagcaagtggtgtaaactgtnaaaagtgtatgcaaccnaatttgttgggaaatatgccggaaatatgttggtgtgtncctataaagtattaaagtggtgtagtataaaaaaaaaaaaaaaaaaaaaaaaaaaaaaaa

SEQ ID NO: 12671 - DNA, 966 bp, Oryza sativa
  Clone ID: PAT_MRT4530_18778C.1
cttgccgattatcacactagctagctatctgcttcccctgtcgatctgggatatatatctagacgaaccctagctcgatcttgagtgattaagttggggatcaagctagagatcgagacgatgtcgtcgtggaacagcccgtactacgacacctcttcctacggcgccggatcaggaggcggcggcggcggcggcaggcggtcgtcgtcgccgccgcgcggcgccggcgacaagaaggagaccaagacgaaggattaccagagctacacaagcaacaacaacaacaatggcagcgacgacgacaaagacaagaacaagcacaagatcaccagcagccacaagcacaaggacgacgagaaagaccggaacaaccacagcaaggacagccatggcggcggcaacagcagcaattacaacaaggacagctatggcggtaacagcggcaaccccaacaattactacggcagcagcacgggagtcgttgcaggttcaggctcctactacggcggcggcggcggctatggcggcggcaacacttcctacggcggatcattgtcctacggtaaagacggcggctacggcggcagcaactctccctacggcggcggcagcagcatcatcataagcggagccgcacctattccccacaacaacttcggcggcggcggaaccggctggccggttccgccgccgccgcaggacggcgggtccggggcggcgccggtgttcatccgcgcggaggaggtgaaggtcatctaccaccacacgccgcccggccacggctcatcgtcgtcgtcgtactcgccgtcgccgaagtacgagagcgagggcgacaggaggaggagcggcggcgctggatccggatcaggaagcaacagcggcggcggcggcggcgggttcttcggcccagcgttccacgccgtcggcggctacatcgaccgtaagttcgggctggacaaagactga

SEQ ID NO: 12672 - DNA, 500 bp, Oryza sativa
  Clone ID: PAT_MRT4530_18779C.1
aaaagaaaaaaaaaatggttcttctgtcttcactcgaataaattggaccaagaagcattgccatccatggggcatcccattatggattcattcccaaatccccaagaaccatatcaataatacctaagataagaccaaaccccccctaccaaatccaaatcgccctcaacccatcaattatggagaaaaagcctaaaccacttttaataatggcctaatctttgaccatgtagctagctagggctttgctcccccgagcccatgggcccgacgacaaacctgcggatgaggcggccgagcccgtcggcgccctccgaccacggtatccacctcgaaaaaagccgggctgctcgccggcgaacccgacgaacgccacctccttcccccactcctccctaatccgccgcgcgtagggctcgttccggcccctggggatgtcgggctccgccgccacgacgagcgacggcgccatcgccaccgcctccagccccggcgcctcc

SEQ ID NO: 12673 - DNA, 1803 bp, Oryza sativa
  Clone ID: PAT_MRT4530_1877C.1
atggcttgtgatcacgatggcgaccttcccgagtggcgacgacgactggagcgacggcgacgcacggctagaccagcggcgatgacggcggcgcacggctgcacggtgctagggctctaccggcaacgagaggcgaaggcgagggtggcggcgggtagcggagggcttgggggtccttttataggggctagggggcggcggcgaagtcccacggcggccggcgacgagaaggaaagttttagggttcgggaggaaaggggaatccgaatcgagctcaaatccgatgatttccaaagcgatatagacgatgcttccaaaaggaaaaagtcgtttatcgacattattgacgatctccgagtacgaggcttgtcggggtatgaagtcgctgcagacttcgttggtctgaacagcgaagccgtggaacgtcgtgtcggccaggtgatgatcagtggtccgacaacggcgagtaacatccccgtgcccctttgtgaaaagggggcggccgaacatgatgacgccatcaacgctcttcctctgactgacatcatcgggccgctcgcggaccatcaggtggcggcgtctctgaaagagaaggtcgccaaggaggcgtctgatgctgctgctactaccactagtggtggcaatgttccgacaaaggggaggaagttctcctctgtaagcggacatcatcgcaaggcgtcaacccccttggcctcggacgcgtctcccccgcctccacgacgacaacgtcttgtgacgattggcgagaaggcagcgcgggtgaaggctgtgcaagacaagtccggagggacctccggcgcatcgcccgctgcggcctcgacggatgtcgtgctcgcacccgggagccgcgaggtgacaccaagcggcccagtcagcgatcccgcggctggtcgtggtccaccagctgccgtcctcacctgggaggagctccaggtcgagatggggcgcctcctcgaggctggtgctcgcggcatcggccgcgagattgcagaggcgaggtcggaagcagcgttggcgaacgagcgtgctgactggctggtacacgagttagcggaagctcgtgaagacctcaagaagatgagggagttggtggccggcaacgagcgacaatggcaggggctcgaggaccgcctgtcggagctcgggaacaacctgtcggaaatccgtggctcgttgcgggtcacatacactggcctacaccagctcgccggggagtgcggcattaagtctaccatcctggcgaatcccgacgagttctcgctgacatcttctcttgcggaactggcgacggcgatgggggagatcccctccaagcatgcggccaggatcggggaggaaacgtcgaacgggatctacaccggggcgtgccacgtccccgcgtgtgtaaagctatcgcatcctgaagtcgatctgcgcgagatcttggatcaggcggcggctagcaacacgcatctcgagaatgcccttgctggccaagatcgtcgtatccaatattggaagacgaaatttgaagtagcggaactcgagagaaccatgctggcagtgaagaaaaagcaggctgtggaaacgctccgaggtcgtgaggtgtggttcaactcatacttgaagagttgctgcacatccatggccagggtctgtagagaacttcgagtgccccgtggagatccggaggagtcggcggccagatacatctcacggctgaacggagcctgtgctcaactcgatggcatcggcaagcgtattgacgaggccttgaagcaggagtgtcgtcgatcgagctga

SEQ ID NO: 12674 - DNA, 276 bp, Oryza sativa
  Clone ID: PAT_MRT4530_18780C.1
atggcgtctcctcctgtggtttggctgttgttttcctctctgcccctaccacactttcgcgtgttaggaacccgttggttgcagcggggcatgctaacgtgctgtgagagatcaggggtgctggatggtgatggtgtaggagtcggtacatgggaggacggtgttaggaacctaagcacttcatggggtgctgcctggaacttccattgtgacgatgaaagcggaggcagggtagtatggagacaccgtgccattgccactgtgttggatgaatga

SEQ ID NO: 12675 - DNA, 741 bp, Oryza sativa
  Clone ID: PAT_MRT4530_18781C.1
tctgagaaaaaaaaagatttagctcccctctgtttctctttagcaaaaagaaagaatagaagaaagaatagaagggttcaattcgagttgatgaacaacaattggttatcatctttcagacaaattacctcagttgaggagatacatgagctagtgcaattgggaggtttgctcaactcactcagaatgttgatgacatagtttggaactggactgaatctggaacatatacaaccaagagtgcttatatatatatatcagtttgctggttcatacactgcaattgattttaccacgctctgtaaagcccaggctgagccaaaaatgaaatgttttggttggcttgtcctccaccaaagaactttaatggctcaaaatttgctcagaagatattggtcttgtaattggatttactgtttgtgtacctccgccttcgaagacaccaatcatctgttcgcggattgtccgtttgttaaacaagtatggactacagtatgtatgtggcaaaatttgcccctagctctcaattcccttccgtcccgcatctcaacctggtgggatgagcttaaaggtgcagaaagagaaggtcaaaaaacgctcgctcgcggtgctctcctgacaacttggtgaaacatttagctagagagaaatagtagaattttccaaaatttagctagctcagaattgtcagtagcatatcgggtaaaacaagatatagatttgcgcaaagtggctttcagg

SEQ ID NO: 12676 - DNA, 2630 bp, Oryza sativa
  Clone ID: PAT_MRT4530_18782C.1
cccccagcttttcccgccgccccagcccccatttccccctggggtccccccgtgctttccgggggcaagccgcgcattggttgggcctttcccgcctgggccgtccctcccgacgaattcccccttcagcccgtccccggtgctgcctttccttttagcaggtaccatggcgtgaccgggtccctcggccttctcgacctcgaggccgtgtcctctgccgggaagggaacccttacggtcgaatcggaggcccccggcggccgtcgacatgccgccgcccatgcgacatctgccttctcctcccccgttacccattatgggaggcccctgactcgccacatcggccccttagttctccgacacccagcgcaatccatgagtaagagttccctccctcctgtcgcagctcaggattttccctttaccccccaggctgctaacagcctcatcatcatcagcgcatatgaaatccacaacggccacgcttccaccctgacgcacgccaccctctagtacggagctctatttcgaaagcttctgagcgaagaaaagcagaatatcatggtagaatttatttctagttgccaggttcacatactggagatgagtacatgtacatccgacaacagcacatccgaaactgttacagcacctgaaatttattaacttgctgggttggctacaatccagtgccgttctaactgtttattattgtaaatcagttgagtagtgaggcagtctctcccgcgatctctctgtccataatgactaacttcttcgcaatcaccatcttattctctcgaggattgtatttactgatttgtcttctgtagctcgtagtaaccgtttccagctacaggacggactgtgggagaaccttgtaggggttcaggattgaatttgggtcgagcaacttcttgatggaagccatcagttgcactgcctcagatgacttgctgtagtgaatcttctcggctttcattagacccaatccatgctctgcactaatgctccctctctgtttggaggtccactcgtagacaaatggttcaatttgtgccagcatcttgtcgctgtactttgttgataagatgttcagatgcaggttcccatcaccaaggtgcccatagcccaatacttgtcccatatcaccaacacggctgcgcatttcttcaacaatatcatatagcttctctacgggtatggacaagtcatacttgtagacagccccaactttgacggatgcttctgatataccctcacgaattctccaaaaattagaggcttggctaatatcttgtgctataactccatcagctaccaggccatcttccattgaacgcaacaaaaaagcttcaagtttggctttatcatatgactcatcacttcctgtcgtctcgattagaacataaaaattgaacggtgatacaggtagaggattgtgaactccttccaaatatttcatagccagattaatacaatgacgatccatgaactcaaatgcagagagaatctcacccaggctcctcctggctgccagtaataatttctgacagcttatgtagtcattgcaggaaagaaatgcaacattagttgatggtagctttgcaggagtaagtattgcaattttagtgacaattcctagtgagccttcacttccaataaataagtgcttcagatcatatccagtgttgtctttccttaaagtagtaagcatatcgagaacagttccatcggccaagacaacttcaagaccaagtacacttccatgaagtgaaccgtaacgtatgaaacgtaggccaccggcgttagttgaaatgttgccacctatgtgacaactaccttttgctcccaggtcaagcggcataataaaccccttattttccacataggagcttaaattctccaacacacaaccagcttcacaagtaagaataccatttacctcatcataaacaggcacactgccacctacaagacctgtgttcccaccctgagggaccacagccaatcgtctggagttgcaataagaaaggatcttagaaacctccgcagtactttttggtaaaagcaataactgacttgaacccttgtatttacccatccaatccatatttgcaactgatactctgtcttcatcctgaaccacaccactatcacccaagatactcttaaagtaggagacatcatcagaattcagcactgaatatgcaggattcctctgaacgtgtgctgctgcagaactgaatgaacgcttctggacttcaaaattcatgcgtgcgctttgttgtgtgtcatctgtttccacattagtcctgaatccatacaaagagcgttgctgaccttgaatcgaatagaatctgctaaaagcatggtttgcggctccatattgtttaggatacatgcctcgcgcctgcagtgtctcgccggcggcgaggggccccaggtggcggcggaggagccccgccgccgcgcgcctcgccatccgcgcgccctcggaaggaggagggagaggtggtggtggggggagcgagctcgagcgtcgagggcagcgcgcgcggcgtctctgcccctctctctctcgaagaagaaaacaaggccccgtgccctgcgcccgcggatccactagt

SEQ ID NO: 12677 - DNA, 837 bp, Oryza sativa
  Clone ID: PAT_MRT4530_18783C.1
atggcgatcgacgctgcagatcagaggaatcaccacacatcaatcgatcgctcctccgtactcggagaaaggagggcgagaggggaaaacagaatcgagcaaacgacgaggatgtgcgggttgctcgtgtcgtgccgtgccatacctgtggcgcttgcccccattctctcgatatccaccgacgacgagccagcgtcccaccctccggcgcctcctcgccggaatgggagacggcaccaccgcaaccgcgcggcggcggcggcgcaactgctcgccgagggcgcggaagctgttcgaggaaatgcgaccgcggaacgggaggtgggccccgggcttcttcttcttcctcgccgcctcatgggtcgccgtagaaacgcctccttgctcggcctcgtcttgcagctggctctcctcctcgccgccgccgccgccgccggcggccgtgcccaacgacaagctgcaccaccaccagccaccaccattactcatcaggagatgaacgacaatggtgcggcggtggcggcgacggcgatgtcggtgcagggggaggcgcagcagcagcaggtgatggttgggtcgaggccaccggactgcacggggagttgcgggccgtcgtgcgtaggccgctgcgaggcggtgctggtgcggcccgtccacccaccgaagccgccgccggcgccgacagatgcaggtgcaggtgcagcggcgccgccggtgaaggaggtcggtgacgtcggcggcggcggcggcgacgactacaagccgctacgctgggagtgcaagtgccgcgcactgccgccatccaccgccacatcgtcaaaatcaacccttaattaa

SEQ ID NO: 12678 - DNA, 273 bp, Oryza sativa
  Clone ID: PAT_MRT4530_18784C.1
atgcagctcggtgagagagagagagaggagagagttgcagctggtgcagctgaaaaaggagggagagagatcgaagaggtggtcctgtggttgggtgcgcaatggcctcgcatatatcagcagttcgatcagcagcaggtggcagtacgccgtccgccgatcgatcgattgatcgcgatcgatgcagatgcagatcagtgtgatcgatcgagctgcagatatgcgtggttctctgtgtctgttcgtcgccggcccagtagtaattgtcataat

SEQ ID NO: 12679 - DNA, 609 bp, Oryza sativa
  Clone ID: PAT_MRT4530_18785C.1
atgtcgtcgactaacagttcaggcgatccggcggcggtgcgcgtggtgggcggctgggcgagccccttcatgaaccgcgtggtggtggcgctgaagctgaagggcgtggagcacgagatgttgcaggagacggtggggaagaagagcgagctgctgctccggtccaacccggtgcacaagaagatccccgtgctgctccaccacggcaagcccatcgccgagtctctcatcatcattcctccagggattcgggtgttgagaggatccgtggaagaagacaaggacaaagccgcgggcgaaatgtccaccgctctgcagcatctggaggaggcatttgtcaagtgcagccaagggaagcaatacttcggcggcgacaacatcggctacctggacatcgctctggggtcattcctcggatggatcagggcggtggagaagatcgccggcgtcgagctcctcaacgagaccaaggttccgaatctggctgcttgggcagatcgcttctgcgcacacccggccgtggtggacgtcgtgcctgacgccgataggttggtcgagttcacggttcagcatgctgcgttgctgagggctgtgaatgttcccaagtga

SEQ ID NO: 12680 - DNA, 1951 bp, Oryza sativa
  Clone ID: PAT_MRT4530_18786C.1
tttttttttttttttcgagtgccatattctgtcggatcacatgatgcggtatctcgaccattattatctccaaaaggctagaactacaatcttgtttaagaataaactcagaattacatttcttacaacaaattgcagaacaccggtggatgacaaaggtgggccatttaacgcagtcacataatggctgagcagcaaaaaaactaagaatcccctaccgaatgtttcttgaaggtttttgtccacaatcattaacccagtgtcaaaaacagccattcatctaactgcggtcggcctctatgcttcatcaccaaaccatccacaacttgcaagccggctgtgttcactagtgcaaaaaggttcgtttaacttgattatatttcgttagctggcttgcaccttgctatgttataatgatcagctgccgcggatagcgatggtatggttacaggaaatccaggacccatgtgtgctactcagtgtgaacttcttcacgtatccaacatactttgaagttttctttaatcccactggcttggcaagtagaagtgcatgtacaaaagcaccaatattttcacgcaaattctcatcagaaaaatttatcttcccaagaccaacatgcactatagctgttttatctattttgaaatcaacccggcctgattttgctgctttgacagcaccagaaacatcgtttgtcacagaccctagcttaggatttggcatcagtccgcgtggacccaatattctagcaaccttcgaaagacgaggcatgtacataggggtagcaatgcacttgtcaaaactcagtttaccgcctcctgtgcggatctcctcaatcagctcgtcaccaccaacgacatcagctccagcagctctagcttcatctgctgcaggaccttctgcaaataccgctaccctaacagtcttgccagtgccatgtggcaaagttaacgcgccacgcaccatctggtcaccacgacgtggatcaacacctaacattacatgagcttcaactgtttcggtaaaattccgcttcttttcatttgcactggtcgtcggtaaccgcgcggttaccgagcttaccgcgggggtacggtaatataaataccgcggtaacctccgcgcggtaaccgtgcttactgccggggcgcggtaaccccggccccggcagtctgggaaaccctgggtgggattgcatgatcatgtttattttcagtagctattccgtgtatagcagagaagacagtcattagactgagctcaaccaacttcccaggcttccacatcaaaatcggtatgagatttgcatatgtttgaacttccttgatttcgcggatggcgtcgacgagatcaatggcgaccttctgcggccgcttctcgacgggtatgagcgtcgggtatggcgcctgctcctcctccgcctgcatcccgaagaagctcctcctggcccgcgtggcgtccatctcgatccgctccccctctccccgcagcccctcgtccgccggcccctccgggggtgcctcctccgccggacggtcctccggcagcggcgcgaccctggccgggtacgacaccggcgtgatcgagggccccgcgtccttcacgaaccgcatctcctcccgcgtccactgctgccgctgtggcggcccctgcgatctccttggcggcggcgggggccgagacccggggtcatcgctcggggcagcctcctccgcggcggcgggagcctcctcgggcgctggctgcggcttcggggcgtaggacacgggcttgatgggcggcggcgttgggccggagccggagccggagccggtgttagaggagaagcggaggagcgagatgagacggtgcggctgggggtggtggcggctggagtgggagaggaggaggcggaggtgagccatggcgatggcggggagtggcggcggccggcggcggctggcgaggc

SEQ ID NO: 12681 - DNA, 456 bp, Oryza sativa
  unsure (1)..(456): unsure at all n locations
  Clone ID: PAT_MRT4530_18787C.1
caccacgtgtgaggaacaccccctcgccaattcaaccgagagatcgtcatccagcctctgtgagcgggatatgngcacaaccggccgcctcctggttaaaggaaatttgttcagatggaatggattgggaagccacacaaaancacacaaaaaatacatgggctggatgctggaccancccactctgatttggtaaagtggctgaccaaaatgatatgggtgccaggttgtgcccctgctgtgctnangaggaggtgtttaacagtgtgctgagtgggagtgncacagtaacagtgacagtggttgggagtgacgacgacagtggtgtggtggatgcagtgtttttggtctttttttactctgttntccccctaactagcggtctttcttgcggaatccaagagnggagaaataatggatgaaaaattttcgccccaaaaaaaaaaaaaaaaaaaa

SEQ ID NO: 12682 - DNA, 1560 bp, Oryza sativa
  Clone ID: PAT_MRT4530_18788C.1
atgccttcgcctctcccgtgcaacctcctcactcgccgccgcgcgctcaccgcctgcgctgccgtcgccgcactcacggccgcggcggcgctctttttgctggccacccctcccaccgaggaccccacccacccgtatctcctcgcctccctcctccacaacaacacaagcaaccagcccgactccgcggccgcctcccaaccgccgcttccttccacttccatcctccagctccagactaatttgccatctgggtttacaacagtcccctccatgtttttggtcccttcaccttctccagcagaaaacttagatgatggttctatggaggaaactgaccctccagatttaaaggaaaatccaccggcggaatcagctccttttctccaagaggtgcctatacctctttggtcaacagcagctgatgaagagctaatctatgcaaagaaagagatcactattgcaccgctggtgtccaatgaccctgatctgcatgcaccactgttccgcaatgtgtctgtctttaggaggagctatgaactgatggaaagacttcttaaagtttttgtataccatgatggagcaaaacctattttccattcaccagagttgaaaggcatttatgcatctgaggggtggtttatgaaactgatggaagggaaccaacattttgttgtgagagatccaaacagagctcacctattctatctaccgtatagctctcgtcagctagagcacaatctttatgtgcctgggtcaaatacaattgagccattgtctatctttgtaaagaaatacatagattttatctccaccaagttcccctattggaataggacaaaaggagctgatcatttttttgtcgcttgtcatgactggggaccatacactaccaaattgcatgatgaattgagaaaaaacaccattaaagctctatgtaatgcagatctctcagaaggagttttcattcatggaagagatgtgtcccttcctgaaacatttcttagatcaccaagaagacccttaagaggcattggtggaaaacctgctgcagagagatctatcctagccttctttgcaggacagatgcatggacgagttcgacctgtcctcctccagtattggggaggaaaggatgcagacatgagaatatatgaccgtttgccacacagaatcactaggaggatgaattatattcagcatatgaaatcaagtaaatactgtatttgtcccatgggatacgaggtaaacagcccaagaatagttgaggcaatctattatgagtgtgttccggtgataattgcggacaattttgtgcttccatttgatgatgcacttaattggagtgcgttctctgtggtcataccggaaaaggatgtacccaaactgaagcagatcttattggcaattcctgatgatcaatacatggctatgcagtcgaatgttcaacgggtgcagaagcactttatttggcatccaaatcccatcaagtatgacatcttccacatgatattacattcaatttggtatagcagggtaaatcagatccaaatagagtag

SEQ ID NO: 12683 - DNA, 1866 bp, Oryza sativa
  Clone ID: PAT_MRT4530_18789C.1
atggccacggcggtgctcacctacctgcagagcctgtggccgctctccgctctcctgagggaggacgacctgcgggcgtccgcgcggctgctgcggggcgtccccgtgccggaggagacgaagcagttcgtgctcgcgctccgcgaccgcgagcccggctccggctcgcgcgggggcgtgatctacatcctcgcggcgcagaacctgtccgagcggtcggcctccgacgccgactccctgatcaggcgggtgatcaagaggtgcgtcacggagaagaggagcaaggatcagtacgtcaaggcggcggcgtgccaggtcttgcaggagattttcggggtcgggttctacggccatgtcttggccgcgaagagagccgcggaggagacgggctcgtgttttcttttgctcgagtctccgtatgagaggaattgcaatggcggcgcatcgggtggccaatctaccatggaagaaggctcaggtcagcaattggcgagtcgctgctcgctcgctcaaagttcaacggatgatggcacgggtggacagtcacagggtagctgcttgctcactcagagcaccagttcaatcgtaagctcgcatgtcaggaagatatgccttgtggatgacattgggggacaactcgtgaagtcgctagcgccgaccgttaatttgttgatgtcccaggctatctcttctgatggtgtttcagagtgcaaactggctgaatgcaagccatcggacagatacgaggctccaccttttgcacagactgtttatccgttgcttgctgatctttatgatatatttgtggacattccgtcaattggaaaagctatggcttctgctcaggaattgctcagacaagttcatgatgggaagccaatttccactgaaatgctgtctgatgtgtatgtatttaggatcgcaatagaagccctcaggataggtttaaacaacgcaggaagaagccacattgacaccagagataatcatggttcaaaaaaattggatttttcagaactcaactctgaggagaaatgccatattcttcttgtgcaagccctcagaagccaggttagggagtttggttctgtggtggctgtagtcgatgccagttgcttagctggaataaggagacactgggatacccctgttccttcagagattgcacaattagccagcagttgcttcaagcaatacggcaataaaaatgacagtgaggacaatgagctgccatcatcagttgacagcacagataaaaagagttgggtagctgagaaacctgtggtcgtagttggtgcaggaggaacagcgattctgggcttttcatctttatcaaaaactgtacaggcatctgcctttcttaagctggctccctataaaacaccggtggtcctgaagtatggcttaatacagctgcaaaggcatgcttccatcgtgttaagcaaggtcctatcgaatggggtttttagtgctagttcaaacgcatccgttttacaattcacagcttcatcggagaagattcgagcagttactcacactgtaatttcatcagcaaagagaactagcttgatggctatgcgaacttcgttctacgaaataatgcagaagaggcaaaaacaacctttcaggatcactccttgggcaacatttggttgcagcatggctgcatgcgctggtctcctgatgcatggagacgggattgagtgtgctgctgaggtcgcaccttctgttcccatgattgccactctgggacgtggtcttgagatcctgcgcctcacatcgcaggaagtgaggcaaacaaggggccaacatataaaggaagctttgggcgcgctgatgagcaacttaaagaaaacagcaaaataa

SEQ ID NO: 12684 - DNA, 279 bp, Oryza sativa
  Clone ID: PAT_MRT4530_1878C.1
atgaacgacgtcgagatacaggatgtcctcgcttcgccggtcgatggcctctcagacagtgcccctcctcctcctcatcctcatgctcgaggcggcggcgacaggggtgcgtcagcggcggtgcagtgcgggcaggtgacgcagctgatggcgccgtgcatgccatacctcgccagcacccccgggatgacgccctacggcatctgccgcaacagcctcggatctcgcatatctgattttgtggttggaggacgattttgtatcccgatgacaagttga

SEQ ID NO: 12685 - DNA, 2461 bp, Oryza sativa
  unsure (1)..(2461): unsure at all n locations
  Clone ID: PAT_MRT4530_18790C.1
gtctcgtcttcctcggcgccgccccatctcagccggacaccgcggcggcggcggcggcggacaggctgttcgcgcagaaccggccgggacgcattgttccgtcggtcgcgcgatccaggccggaggagaggggaggaaggagggnggtgggtgagtcaacccctctctctctctgatcggaggtggtagccctcctcctcgtcgccgggaggcggctgatgcggcgcccatggccacggcggtgctcacctacctgcagagcctgtggccgctctccgctctcctgagggaggacgacctgcgggcgtccgcgcggctgctgcggggcgtccccgtgccggaggagacgaagcagttcgtgctcgcgctccgcgaccgcgagcccggctccggctcgcgcgggggcgtgatctacatcctcgcggcgcagaacctgtccgagcggtcggcctccgacgccgactccctgatcaggcgggtgcgccccgccgccgtggtcacgcagctcgcgcacacggcggccgacgacgtccgggccgaggaggagtgcctcgagggcggcggggccggcggcgtcccggcgtccccgttccaggtgatcaagaggtgcgtcacggagaagaggagcaaggatcagtacgtcaaggcggcggcgtgccaggtcttgcaggagattttcggggtcgggttctacggccatgtcttggccgcgaagagagccgcggaggagacgggctcgtgttttcttttgctcgagtctccgtatgagaggaattgcaatggcggcgcatcgggtggccaatctaccatggaagaaggctcaggtcagcaattggcgagtcgctgctcgctcgctcaaagttcaacggatgatggcacgggtggacagtcacagggtagctgcttgctcactcagagcaccagttcaatcgtaagctcgcatgtcaggaagatatgccttgtggatgacattgggggacaactcgtgaagtcgctagcgccgaccgttaatttgttgatgtcccaggctatctcttctgatggtgtttcagagtgcaaactggctgaatgcaagccatcggacagatacgaggctccaccttttgcacagactgtttatccgttgcttgctgatctttatgatatatttgtggacattccgtcaattggaaaagctatggcttctgctcaggaattgctcagacaagttcatgatgggaagccaatttccactgaaatgctgtctgatgtgtatgtatttaggatcgcaatagaagccctcaggataggtttaaacaacgcaggaagaagccacattgacaccagagataatcatggttcaaaaaaattggatttttcagaactcaactctgaggagaaatgccatattcttcttgtgcaagccctcagaagccaggttagggagtttggttctgtggtggctgtagtcgatgccagttgcttagctggaataaggagacactgggatacccctgttccttcagagattgcacaattagccagcagttgcttcaagcaatacggcaataaaaatgacagtgaggacaatgagctgccatcatcagttgacagcacagataaaaagagttgggtagctgagaaacctgtggtcgtagttggtgcaggaggaacagcgattctgggcttttcatctttatcaaaaactgtacaggcatctgcctttcttaagctggctccctataaaacaccggtggtcctgaagtatggcttaatacagctgcaaaggcatgcttccatcgtgttaagcaaggtcctatcgaatggggtttttagtgctagttcaaacgcatccgttttacaattcacagcttcatcggagaagattcgagcagttactcacactgtaatttcatcagcaaagagaactagcttgatggctatgcgaacttcgttctacgaaataatgcagaagaggcaaaaacaacctttcaggatcactccttgggcaacatttggttgcagcatggctgcatgcgctggtctcctgatgcatggagacgggattgagtgtgctgctgaggtcgcaccttctgttcccatgattgccactctgggacgtggtcttgagatcctgcgcctcacatcgcaggaagtgaggcaaacaaggggccaacatataaaggaagctttgggcgcgctgatgagcaacttaaagaaaacagcaaaataaagacataacaaaaaaataactgagactgtatagatttccatcatgcaattttgttgttagatagatttttttttgttacctctgtacagtgcattcttcttgcttttactgaggtaatcgaattcctacaatgtgttttggggcggttctactaaaggagcatttcatccatatcagcccaccaaccttctgtacatacatgtatacaacatatgcctaattgacatctctaatgctttcttcgggatc

SEQ ID NO: 12686 - DNA, 217 bp, Oryza sativa
  Clone ID: PAT_MRT4530_18791C.1
gcgtgtttctcagagtgcctggcatgtttggtggacacaaatgggggtgagaggagaggtagtcagtttgccagtgaactaatgctgcgaaggcagtttgccttgcagcttggttcttcaagatggttcaggatgtttcagaccttttgatgagtaccactgctttatcatttatcaacccatgtgtctagttcagatcaaaaaaaaaaaaaaaaaa

SEQ ID NO: 12687 - DNA, 424 bp, Oryza sativa
  Clone ID: PAT_MRT4530_18792C.1
gggaggaaggggtatcaaattaaagaaaaagcgggcattggaatgaccccctggaagaatacattaacagccgtttgttttacgagcgggagttttatttttaagccgaaaagggagaacgtggctaattagctattttagggggccatttaaaactctatggttggcccgtggccatgaccagaattactttggagaggttttaaggaggtttaaaaatgaataatcgcatccggtaagaaacagaggtataccgtcatgccaaatggcaaaacgctttgggctaagggccttatgtatcaagaaagtctctaattggccttttcccaagcaaaaacaaattttgggtcaggggaccataaatacagccccttggtttcccatttctgacctgaagaggcttgaatttttccttccaagggaa

SEQ ID NO: 12688 - DNA, 264 bp, Oryza sativa
  unsure (1)..(264): unsure at all n locations
  Clone ID: PAT_MRT4530_18793C.1
ccaacccaaccgncgccgcatcgccctcgttagaacgatggccgcgtcggcgctgcaccagaccaccagcttcctcggcaccgcccctcgtcgngatgagctcgtccgccgcgtcggcgactccggtggccgcatcaccatgcgncgtancgtcaagagcgcggcccagagcatntggtatggacctgaccgtcccaagtacctgggcccgttctcggagnagacgtcatcgtaccttgaccgtagagttcccgtgagantacg

SEQ ID NO: 12689 - DNA, 1697 bp, Oryza sativa
  Clone ID: PAT_MRT4530_18795C.1
cctagggctaaccaccagcttcctcccaatccccaaatccaccgcgcagacacgcacgccggccggccggcggacgcgatccgctccgttgtcatcgctcgcgatacacgcagcgactaggcccagcaggtctgcacggcggtctcctccggctgctcctttcattccaggcacgccgggcacccccggttcgttcatcgcatctcaaagaaggtagggaagcatcgcatctcgccgggtattgccagttcgccgccatgccccaaccgaagtgcccaacggagcggaagaaggctgaccacctccaattgattccttgcggggccccggccgggtcttgcggggggtcttgctggataacaatggactatgaatttgagacatacaagaagaggcagaggggacaacagcaaatggactttgaattgaagacataccacaggaagaggcagaggcgaagggggcaccagcaaactgtagagttacccgatgagattgtgagggaagtcttgatctggctccctgtaaaatccctggcaaggttcaagtccgtctgcaaggcctggctttccattatctccgaatcttgttttatccgtgagcatctccagtgctccaagctgaaaagatactggaacccgtcttcctttctcatcacgccccatattcctctgaaaccaggtgactctatctttgctgctttctccaccgacatccgcttctatcagtggtcattacaagaagacacgagggctgctgcaacactcctttataggaggcacttccctgccggtgagtttgaaccggtgctcccaatggcacattgcgatggcttggtgctgctccccactaagaccaaggcctacgtcttcaatccggccacaagggatgtccttgcactgccagagagcaatcgcaacatgaggcaacgtgacaacttgggctttgatgcttcgactggcaaatataaggttgcacgatctttttatcgttcccgtgaatataatcccatggggatcgctgcaatgggtttcgaggtcttcactattaatggagaagaaagctgttggagagaaactttggtggatccaccctaccctgtgctgtattcaaagattgttacacactgcaaggggtgtctattctattacattgataagaagaatcagcaaaatcccccacaggctctgctccgtttcagccttcaagacgaaacatttggtgtcactccgttgcttactgacacgtaccctcaagttgaagatgatgaagttacaattactgagcttggcggtcaactatgtgctactttcttttgcaatactctgcaacaagtatgtatctacatgtcaggagatgtcatggatccagattggaattgttggcatataataaactttatgaattgctatccaatagcctcgcttggcagcggtcggattttattgaggagaggtagtcttgtcttctgtactaatctgaaatcgtacagcatagaagataaattggatattgatgatataagaaataatctatcggcgttaaaaattacaaaaatagaccctgccgcctcagtggtgggcggcaagctgacgtggcagacggcggctcgaccacgccgtctgccgttgtcggccaaaattacatttagccccttgccgccctttggggctaaatgtaattttggcagcccataa

SEQ ID NO: 12690 - DNA, 356 bp, Oryza sativa
  Clone ID: PAT_MRT4530_18796C.1
tataataaaaaaaaaaaaaaaaaaagaaagaaggaaaaatgataaaaaaaaaaaaaaaaaaaaaaaaaaaaaaagaggttcgcttttttagatatctcactgccattcttccgcacactttgctccataacttattattggggggggctctttttggggtcccctgtttcctcccgtccctctcccgccctacttctctttttttgggtcccccccttttttattcttggggcggtttttccccctttcggcggggggaaaccccttgggctccccccctttggccgttttgcactaacatccccttttcccctggggggtagtacgcaaggcgcctcctgccttttctctttttc

SEQ ID NO: 12691 - DNA, 657 bp, Oryza sativa
  Clone ID: PAT_MRT4530_18797C.1
atgggggccggcggcgccccaccgcgcgacgggagagccttggacgccggtgcacgcgatgggaggccggtggccggcggcgcgctcaacgggagggcggtggccggcggcgtgcgcgacaggagggcggtggctggcggcggcgctcgcgattggagaccggcggcgcggcctgcgcgtggagaggataggggagaagagaaggttacgttacaaatcaaacggaaacctaacgggaggggtatagaagggatcaaagcgaaaatttgggggtacagaggggatcgagtaaaattgggagctccttatggcgatcatagttggtataacaacccacgagctgtttgcaccaatgaaataagcccagaagtagaacgggctagtccagaagttgaagccatccaagtaggctgtaataaagtacaccaggcatccatagagctgaccaagacagacagtgaactggaggatatggctgtaggacttgcccgatgcgatggcatagctgcaagcagcaaactttttgtcaggtcaggtggaaactataaaccacaaaaggctatattatactcatatcaactgtctagggggcaaaagaaactcctatcaactagtacatggaatgcaggatgtacaatagtgaatagtctggcttaa

SEQ ID NO: 12692 - DNA, 1137 bp, Oryza sativa
  Clone ID: PAT_MRT4530_18798C.1
atggttcgccccaccgactccgtcctcctcgccttctccggcggccccgcctccagggtagcgctgcaattcatacatgagatgcggtgcaaggcgattgagagctgggacgtgagcaattcacaagccttaccggtattcggtgtcggggtggcattcgtggatgaaagtgttctctgttcgaagccgagagacgagattgagatggcaattgaagatatcaggtcgatcgtgtcgagtttgtcaacaggcgttaaagcgatgcacattgcgcgtcttgaggatgtgttctccaccgaatcggaggatggggaacgcaggttgagggaggcggtggatatgattggtgatgacactgggagggaggatttccttcggtgcttacgcatgctttcgttgcaaaagattgctatggaaaacgggtacgctaagatcatgctaggatcatgtgcttctgcaatagcatgccatgttctgtccgcgactgtgaaggggcaaggttactctttacctgctgatgtccagtatgttgatacacggtgggaaatacctgttgttctcccactccgtgattgcctagcccaagagcttactctcctctgtgaactagatagtttaaaaacacagcaacatctcgataggccttcgaacggcatcaacagtttagttgcatcctttattaaacgactacgggaagagaacccttctcgagagcataccattgtaagaactgcgcaaaagctcaagcccttctcttttaacaaattctcggcagatggctatcatgatttcctaccatcgcgactacgtccaaaattccagaagtttgatagcgatgagtccactttttctgagattctctgtctgatgtgtggaagtccgttcagtgaatcagaactccagaatttggaaagcacaaaacacaaggctcagaagaaaattgatctttatactgctcattgttgtcaaagctgttatttccagattctaccagccggtgaaaacttgaatgaacatttcttttcactactaccaaaattatggactggaaaaatggataccatatctgacagccatagcttgctaagagatcaaatagaagagtacctgcttgaagaaaatgatgatggaaactga

SEQ ID NO: 12693 - DNA, 186 bp, Oryza sativa
  Clone ID: PAT_MRT4530_18799C.1
atgagctatgtcatcatgcgcatctccgatatcctcctccgttatcatgcggcctcaaccacaccaaggaggagaaccatggttggggagcggaccattgacctcaggccaccgtgcgccatcgccgccgtcgtcatcaccttgacatcgctgtcctttgtgcatatgggcaccctgctcgggtag

SEQ ID NO: 12694 - DNA, 2058 bp, Oryza sativa
  Clone ID: PAT_MRT4530_1879C.1
atggccgagcaagcaaaggcgcacgacctctctccgagtgtgagcggcgacgacggggagccaaacccacgccgtcgagctcgtacgcccccacctcctccacaacaaaatcctaagcagggggaggcgctcgagagggtcgaaaaatccgcagcatcgccagtcgcgggtggtgcagaagaacggcgagatgggaagcgtcgcctcctcgtctacggcgacggcagcacgcctcaaggcgcgcttcaggctgttggcgcgctcctacgtcacccgcccatcgtccctgacccggagtctccggcccagcgatggctggacgacgtggccaacttggtcatgacggcacagcagcgcctgagtgctggtggacggtccgccaccaccaggacctccggcgccgccaccaccggctctgtgtcatcaaggcggagggcgcggcgagcggcggctgctgcacgccattcggctaccactccctcgtcggcgcctccgactcgggaggatcagcatgaagagccggatgcccgcctcgacatcgagcgccgacgtagtgatcggcgtgctccccgcgcaacggagggtgcctcttcgtccagggtgtcacctcgacatggacgtgaggaccagccctccgtgcccccggttggtggtgttggctgtagagcctttgtggcgagtcttcggaatgtccgttggcccccaaggttccggcccaccatcaccgagaagtatgatgggagcgtcaaccccaccgagtttctccaggtctatacgaccgggatcgaggccgctgggggagacgacagggtcatggcgaatttctttcccatggccctgaagggacaggcgcggggttggctaatgaacctgccacccgcgtcggtccactcctgggaggatctgtgccagcagttcaccatgaactttcaaggcacctatccacgcccagggcggcgtgacaggaggaggaagaaaaggtcggtccattccggcgacgagggtcacgtcctcgccgtcgagggcgctccgcgggccacccgaaaggggaggcctgcgagcgacaaaaagaaagaggctggtactcccagcagggagcgcccagccagcaagtggtgctccgtccacaacacctccctccacgatctcgcggactgtcgcgcagtcaaaaacttggctgagcgaacgaggaagtgggaggaggacaggaggcaggaacgccgtgagggcaagtccgcggcagttccctccggtaaacggcgaagtgaggccaaacagaaggcccccgccgttgacatcgatgacggtgatgatgacctaggtttccaagaacctggggccaccattgccactgtcgacgggggagcgtgtgctcacgtttctcgccggagtttcaaggccatgaggcgagagcttctcgccgcggcccctactcatgaggcgacgcgtcgggcgcggtggtcggaggtggccctcacctttgaccagaccgaccacccaccgtgcgttgcccggggagggcagattgcgatggtggtttcccccaccatctgcaatgtgaagttggggcgtgtcctcatagatggaggagcggctctcaacatcctttcccccgcggcctttgatgctatcaaggccccggggatggtgctccagccgtctcaaccgatcatcggtgtgacgccggggcacacatggccgttaggtcacatcgacctaccggtcacctttggtggatcagccaacttctgcacggagcgggtgaacttcgatgtggcggacctcagtctgccctacaacgcggtcctggggaggcccgcgttggtgaagtttatggcggcggtccactacgcctacctccagatgaagatgccgggccccggtggccccatctctgtccgtggcgaccttaaagtcgcgctcgcttgcatggagcagcgcgcggaccacctcgctgctgcgaccaagcccgagggtggtgacgagaggcttggcacctccgcccccaccgccccgaggcagcggattgccacatgcgacgaggtcccggtcaaggag

SEQ ID NO: 12695 - DNA, 2115 bp, Oryza sativa
  Clone ID: PAT_MRT4530_187C.1
tctcttgtttcttcttctttttttttttttttcttcttaaaagaaacttgttttcctataaaagatttaaagggataatgttgtttttgccaataatacacattaaaggcaaaaacaaaattttcccggcaaacaatgtacggtttacattgccagtgccttggtgaggtatatagcaaatcagctttgctaagtaccgcattctcctatgcccggaacgagttctttatgccgggttgacaaaacaacaggtaaaaaaaaaagatcacctttcggtgaaagcacacctcaggaattcgccgaggtttgcacggtattttgtaactctaaattctaacaatcgatctgccaaagaatgcagatgcatcagattttgtcatggaggttaaccaccaagtcatgtgcatcatctagaagcctccagacgtcgagctgcccagccatgctgttgcactccctgagtatctcatccatgctgctatacctctcaattatgagcttcctcttctgtaggacacaggcagcaatggcatagagcaacaaatcatcagttggaggggcatgcagccttatctttgaccatgtggatcttccaatcccagctcgaatggctgcttgatcagcccacatcacctcccacagacacagggtctgctcaaaagtgagctcccttctgaagagaaccaccaccattctgtatacaaagaagcagtcctcagcctgcagtttctgaaggtgtcggtagaggtgcgagtccttgcgcttgatgatctgggagacgatcttcagctgccttcttattccaacctcatcgagcctgaagttgtgcctcgctttcctcatgaagcccacaaaacaccaaaatgcttcatgatcttcctccatcacgacaattataggtgacaagaggtcactcataccttggcagtagccaatctctggatcaaacagcgcatatgcctcaagcactgcaactaaccgagcagcatgataaatcatgtaaggctctaaatggtcataatctttcaatccaacagatcttgcgtactgcagtgctttctccttggacacttcagctcggttatgtgataataaagcccattcagggtctgtccggatagcatccaagcgtataatgcgttgccatgtcgcgaaatcctctggagttttgttattcctaaaaaagcctgacttggatgaggcactcctgacaaatttaggaccttgatcacggttcacttccgtattggcagagacggacatcctatcaaggtcctcttcatcagaagtcccagaatcagaagattccgattctgccaaatatggatctacataagttaactcacttgtatcttcatctatgccttcagtggcattctcttgtcggcttatcccacatcttaaagatttcaatcccttgggtgacggagaagacctcgtactgacactttccaaattaagcggctctgattcttcattgcaactatgatactcacaggcggctgcttcatttataacattcagcccacttcccttgtaggaatgcaaaacgtgatggcacttacgcctcagcttttcataatcattccttttatttgtttgtatgacattcctttctgcttcagtactattcaaatcatatactccaagtagaaagggccaatcttttccctggatttggggcagtaactttactccaagtagaaagggccaaactttagccctgatttctggttcaactcctccaccgcggactttctttagaaacttccttcctccatcacgaagcttcccatctgacgaaaatagatggttccaatgccgacaagaaagtggccgttttcttttccttcgagaccacggagatttagttccacctctatcagagtgcggcgagtacgacgccggcgagaacgaggcggaggccgccgccgccgccgcggcgggggatgccgaattccccgacgccgccaaggacgacgacgaggaggaggacgaggaggaggcgacgaggagggaccggagctggacccacggcggcggcgaggacggcgccctgggcgaagacgacgccgacgacgacgacgaggtgctggatcgccgcagcgccttcat

SEQ ID NO: 12696 - DNA, 3702 bp, Oryza sativa
  Clone ID: PAT_MRT4530_18800C.1
atgtacaaccccatcggctccgcggaggcgcgggagccggccgagctcccggcggcggtggccgcggagctggagcggctggaggggaggctgcggcagctcgccggcgcggaggcgcggcgccacctcgcggtgctcggcgaggccggggcggcgcgggtgctgcgcgcggtcgcggagtcgcggcgggtgcggacgctccccggcttcatcaagtacctggcgaagcgggaggccgcgatcacgaggcgcgacgcgcggggcgtccccaccgccctcagcgcccccgcgttcatctccggcccttcccgggaagaggaatcagtatacacgcaactgttcgacaacgaggttcagatgtacgatcaaagccccagcaatgaaatggctactagtctctcaaaccatgggatggtagaggttgggagtcccaaccaacagatgccgttccatttacatggcaatggtggttctgtcagacaaattgctcgtttggttccacagcttgctcagctgacagttgagagtccatgtggccatacatcttctgtgtcgcagaatcaaggctgcattgaagttgggactcctacccaggcaatgattgacagtcctgcccgagcaatggctcctgcggtgcctaatgatgttatgatgcaagttggtagtccatgccgttgcatgccatctggcctgcagaactatatagagattgacagccccatccagccgatgatttctactccaagaagagtttccaccccgagctctgttcaggatatttcaagactcattgagaatatggctggcccctcagtaagtccgccgagccccattacggcgatgccgcaaaaccctacaacgacttgccatacaacagacaatgcattgagggaggcagcgagtcctcagatgctagcgctggaagagttagggttcagaaaaatatttatggtttttgcttaccttgccagtgaaaagatagagaatgttctgtctgtggactatattagatccttgaagtttctgtccatggcgcaatttgagtcacaaatctggagaacatttggccacaagtatattgcagcttcggatagagcaaagaaccttgattcagatccaggcatgacaaaagtctatcattgtaatgttgcgataagaggggatactgtagtcaaaattttcaagggaccatatatcgagaatacaaggactcatctacagaaagttgttggtgatgataatgtccttgtagtaaagtttatggggaaactgtcagacaccaagactgacttctctacatattgtgaacattaccataaggttgctgaagatggtattgttttgggtttgcgccgatatcgatttttcgtttacaaggatggagggaaagaggagaaattgaaacaagagaagatagaagacaaaaacaaatgcacttcacctgtcatgtgctactttgttcgcactgagtctgggtggaacatggatgaaccttatatactctctgggagaacagttggtcaggcccgtgaactattcatgcacataagttctgcccccaccttggcaaaatatatggccaggtttgctttgatactctccaaaactatcacatgggatgctgatctatcagcagtttatgtcagacggattaaagatgaaccttgcatggacagacatggcaatgttgttcacaaagatcaggagccgttgatccatactgatgggactggccttgtatctgtggatttggctctcaattgccccacgagtatcttcaagggaaaatttttgaaaccacagggcattgcaacttgtgatgaaagtgaaacagtgatgaggcctaacagtttgaagaggcatcgatctctcaccgctgaacatcctcttcttatgcagttccgtctgttctataatggatctgctgtaaagggaacagtcctagttgacaggcggcttcctcctgcaactatactcatccgaccatcaatggtaaaaatagaaactcatccagaattatctggtgtccggtctgtcaactcatcggaaatagtctctgcacgaaatgccaagaaaagtttatctggtgttcagtccgtgaattcctttgaaatagtctctacaagcaatcgacccagaaggacattaacatcaaggttcttgataacattactttgctatggaggagttccagaagagtactttttggagcttctgcaaagtgcaattgaaggggctgagaatgcatgttacgattatgaagatgcactgagaattgcattcagctatgctgacatggaagattcaatgtcagcacgtatgattctttctggaattcctctagaagagtcatatttgcaacataggctggatttcatggctcaacaggaaagaaaaggaatcaagcaaggaaagataccaattgatgagtgctattatctaatggatactacagaccctaccggaacactcagacctaatgaagtctgcgtgatacttgaaaatggccagttttctggagatgttcttgtttataaacatcctgggttacattttggtgatatacatgtcttgaaagcaacatatattagggatctagaaaaggagtatgtgggatatgctaaatatgctatactcttccctatttctgggccgcggtctttggctgatgagatggccaacagtgattttgacggtgacatttattgggtctcaaaaaacccaaagttattagaacacttcaaaccttctgaaccgtgggtacaagctattaaaccaaaaaagaccaagcaaaagaaacctcaggattgtaatgaatccaaacttgaaaggctgctatttcatgagttcttgaaaacaagatttactcccagttttgcacttggtacggcagctgatagctggttagcatatatggaccgactattgacagattcacttgacgaaattgaaaagaaactaatagaggaaaagatgctaaagttagttgacctgtattatttggctttggatgctccgaagactgggaacaaggtcaatattccaagtgatctgatggtaaaacaatacccccacttcatgggccgcagtttttcgtaccattcatcatccatacttggacaaatctatgataaagcagaagatgtagaatctctgcgatcttgtaatgttcaaccaatcggggtatcattgctcccatgtttcatggaaagagaagcacctccagcagccaggcacctctggcaacaccgctacgaggagtacttgactgacagtacaatgctctatcgcgcaatggtagataaagaagaaaggaacatgaagttccaagaactctacgagaagtacaagcatatgctctacgatgcatctgaattcgagcagacacagagggaccccgacgacgtgttctcggaagcctgcgtgatctaccagattgtgtatgagaaagcacggtggagcaacgacgccagcaggtgtggcttcgcctggaaggtcgccggccgcgcgctgtgccacttctacgcgctcaagaacgagggtgacaccgcgctctgctcgcttccacttcttcgcaagatcatcaagaaggatcatcgcagtgtccagtgtgacaatgggcacaagtatgcatcactgttggtgtgcaaaatggacagcatggattctgtatggtacgaggttatctctgttgggaactag

SEQ ID NO: 12697 - DNA, 350 bp, Oryza sativa
  Clone ID: PAT_MRT4530_18801C.1
gggccaaagtttaattctcatttccattccattacaaaaaaggattattgggtcaaacttaagactttttgtccaaagccctttgaaaaaacggacgatgcaaaaattcaggggcaacccaggatgcttaaagtttaaaaacaaaaacacaaatcgttgccaaacaacccaaagggaccaaaggtgggaaaatcaagcttgatttttcatggggggaagcaattcccaggaccctaaaaggactgaaacaccctaatacaaaggtgggagaaacttacccggatcaaattctggcaaaaagggaaaaaaaaaaaaaaaaggggaaaaggccgaaaagccttgacttctaa

SEQ ID NO: 12698 - DNA, 350 bp, Oryza sativa
  unsure (1)..(350): unsure at all n locations
  Clone ID: PAT_MRT4530_18802C.1
acaataaaatcttattgatctggagtaatacataacatttcccactntaaatntacatcacaaaacttanggaatttccatatgaacttcaatacantttcnccattgcagatttgcaatttcaatttccctcaaaaaaaaatataaaaaaataaaaatttcaaggccagtttaaacattaacaccaccatgatccatcactctatgacaattaatttacacccacagagtcatcagcagataatcacatccagttaagctcttcactgaaagtctgaaaccatccatggcctaaactacacagcactactcattcagcagcacagtgatctctctctctctaggattca

SEQ ID NO: 12699 - DNA, 591 bp, Oryza sativa
  Clone ID: PAT_MRT4530_18803C.1
ccgggctgcaggaattcggcacgagggcggctcggcggggggcaagggggcgtggagggacggcgccgtgacgtacctccacctcctcttctacatcgccatctccggcggccagatcttcttcaacaagtgggttttatcctcaaaagagatcaacttcccatatcctgtggcattaactctgctacacatggttttctcatctgtagtgtgcttcgcaattacaaagatcttcaagattgtaaagattgaggagggaatgactaccgatatatatattagttcagtcattccaatcggagcaatgtttgcaatgacactctggctagggaacagtgcttacctctatatatctgttgcatttgcacagatgctgaaagcaataatgcccgtagctgtgtttctccttggagctgcctttggcctcgaagaaatgagttgtaaaatgcttgctatcatgtctgtcatcagtgttggggttattgtggcctctgttggtgaaattacaatcagctgggttggtgtggtttaccagatgggtggagtcgtcgcagaagcccttagactgatcttcattgagatttttctgaa

SEQ ID NO: 12700 - DNA, 1375 bp, Oryza sativa
  Clone ID: PAT_MRT4530_18804C.1
aagtttggcctgtttcacagtcgtgccagaatgttcctcatcctactttaccaaaagtgctgaaattactcatcattaaaataggactaggtgtttttagaaagaaccttcatgcttgtccagtccttcattggattgaaattgaaaattgttagttgatcatccctttgtagtgatactccaggcccctcctctccccttcccggcccgtctcctctctccacttctactctcacctctcgctaccaaacacgcgcacacgcagccgagatcgagagcgagctacttgccctagcagcagcagcagcgaggagcgcgagggggcggcggcggcggcgtgcatggcgggggctccgtcgaggtcgcgcggcgacttcgaccacctcatcaagctcctcctcatcggcgacagcggagtaggaaagagttgcttgcttctgaggttctcagatgacactttcactacaagttttatcaccaccattggcattgatttcaaggttcggacagttgagcttgatggaaagcgtgtaaaattgcagatttgggatactgctggtcaagaacgtttccggacaattacaactgcctactatagaggtgctatgggcattctgcttgtttatgatgttacagacgagtcatccttcaacaacattagaaattggatccgcaacatagaacaacatgcatctgataatgtcaacaagattttggtgggcaacaaggttgatatggatacaaagcgggtggtgtccacagctcaaggacaaaagctcgcagatgagtatggaatgaaattttttgagacgagtgcaaaaacaaatcagaacgtggagcaggtattctttaccattgcaagggacataaagcaaagattgaccgaaactgttgctgcagcagctgagcccccaactattcaaatcagtaggcaagaaccagatcaggcagctgcctcgtcaagatggtcagcctgctgtaacacctgatcaacgctgcggcgcactgcacggcttgtcctgttcgcagcttgcctatgacagcaaatttaccactcccatcttccgtgtattcaatgccaagatgtatatttcgcccagttgatatctaggtcaaaagatcttttacctgaccattctggtgttgtgattcctcaatgaggtgtaagggtgtttgcctgtgttctagctctgttgttagttctgaattatgcttcaaaactcttcttttttagctctgtgttcgtcagataagctgatggatttgctcctgtcatgtaaacaaaccttctaagagacagcagtatctgattgtctgaattcatgattgtgcattactgaagatttgtcctatttcaaaaaaaaaaaaaattaaa

SEQ ID NO: 12701 - DNA, 2106 bp, Oryza sativa
  Clone ID: PAT_MRT4530_18805C.1
atggcggacggggccaacgaagacggtgggggttcggctgcgggggagcggcccatggttgcaatcaagcgcaagcgggagaaggtgcctgggcttgccgaagatggagattcttccccttctagcgctaatcgatccgtcgacatggaggtggaggagaaattagattactcttgtgctggtgccgaagaagatgttagtagtggatgcagcattgagatggaggatgtgggtgagcagcggcaagtggagcccacatgggaggataaggtgctgagggttcttcacattgttcgtcgcaatcagtttgctgaatatgaccccaaggaaggtgggatcgtatacacccgcttctgcatccacaacatagccttattcgatcttgacaaagagtcaacgattgggcctgggccaccaattaactcgctcgatccctctgaatattggtggctggatgactcactgaatatcatagcgatcaaggttgccgagtccgacgtgggttaccctgtcagaatatatggcaccgttcttgcgagggatcagcaagactacagatgcgtctatttgttcaggcgaagcagggacaatccccaactcatcacctcaccggaggatagtctaaccttgacaggcccatatcgagcacttgcttcaaaagatattataattttcgagttcaatttgaagattttgggcgatggggatgttgacagagatttcggcaaagcggcggcgacggcggcaaatatggcggaggcggaggcgggcgagcggcggcgcgctacggtgatcggcggcggagatgcagatgctgcgacggagcagagtcttcgggagctcgcatcggaggaggaggaggaggagaaggctcgcgcgtacaactctttgtttggtggagaaaatgggaagaagaaaagggatacaagttctagaaggggttctagaagtaagaggatggaggtaggaggaatggtggagaagaaatcgacaaggagcccaccggcctccagtgggctagtagcttcagctcaaggtagcagtggtggcggcggtggcaatggagagatggggaaggtgaattgtaatgagaagcacacatatggtgaggagaaggagaaggagaaggtggtggagactaggtcggagctgaagcctaaaccgaggaggaggaagaattgggaggaggagaagctcacatgggaggagaaggtgttgaaggttcttcacatagttcgtagtatatgggaagtcactgaattcgaccccaagatggagtggtttgagcctacccgcctttgcctcttcaacgctgccttcttcgacctccacaaggagtccgaggctgggcttgggccaccgatcgactcgctcacttactctgtttatcccgatttgcagacctccgtcaatatcatctcaatcaaggttatcaaatctgatgtgggttaccctatcagcgtcttcggtacagtgctagcaagggatcagtatgactatagatgtgtctatttgttcaggcgtggtagggacgatccccagatcatcaactcgccggcagtcctccattggcaggacctcctagcaaagatagcagctgacagcaacaccacggaccaatccctcacaactcccgtaacacgagctgtcagtgcactagttctggaaatgacaaggaaaactgacatattgaggatgaaagtgcacaggcagtttaagaacaatgtgaatggtgggaagttccatgaggcactttcatccatcttgggcttctctaagaacaaccagggaataaagagacacaaagcactgcaggaaaatgatcagtctaagggcttctgcgacaactccacccatctggtaaaccacaccaacccagctgattgtaatttcaccaacagaggccacaataaccccaacactgatgacagacatgatagcaagcattttacaactcatttcttcaaggccaaaggcagctccaaggagaaacacagctactggcactacaattttccaacaaagagcaaatacatgatactagttaacaaggttacatttatcaaggaaaaagaatttgcggacatctccgggaacaacgatgga

SEQ ID NO: 12702 - DNA, 1621 bp, Oryza sativa
  Clone ID: PAT_MRT4530_18806C.1
agctgaccaactcaaaggaaaagcgagagctcatttctccttcttcaaaaatctgttcaaaacctcacagctttcagtgctatgaagcttctttagtcgagatcgatgtctcaacatcttgcgggcttcctgggttggctttgctgtcagcactctgctgctcattcccttggggtttcggtttgagcttacgattgttatatgcaaccacacctgctattgctatggcatagccaattatatttataaaggtaagctgtgtatcagcaaagatagcagctgacagcaacaccacggaccaatccctcacaactcccgtaacacgagctgtcagtgcactagttctggaaatgacaaggaaaactgacatattgaggatgaaagtgcacaggcagtttaagaacaatgtgaatggtgggaagttccatgaggcactttcatccatcttgggcttctctaagaacaaccagggaataaagagacacaaagcactgcaagggctaacatagtacatcatggaaatcaaattaagcctaacaccttttttcttcagaaaaatctcaatgaagatcagtctaagggcttctgcgacaactccacccatctggtaaaccacaccaacccagctgattgtaatttcaccaacagaggccacaataaccccaacactgatgacagacatgatagcaagcattttacaactcatttcttcaaggccaaaggcagctccaaggagaaacacagctactggcattatcgccttcagcatctgtgcaaatgcaacagatatatagaggtaagcactgttccctagccagagtgtcattgcaaacattgctccgattggaatgactgaactaatatatatatcggtagtcattccctcctcaatctttacaatcttgaagatctttgtaattgcgaagcacactacagatgagaaaaccatgtgcagcagagttaatgccacaggataggggaagttgatctcttttgaggataaaacccacgtacagcaccagaaacaaaaacgagccgccacagaaaaccccccgcccgccgcgccgtacagccgggcacgccggcggcggatcacgcgcacgcgcaggcagaatccgccggagaagcgcgggggtagagaagaggggaggggatggtgtcggctgatagaggggttgctttggtggcttgccttgttgaagaagatctggccgccggagatggcgatgtagaagaggaggtggaggtacgtcacggcgccgtccctccacgcccccttccccccagccgctgcctccgccgcggtcctctccatggccgccgcgtcgctgctccgccgctgctcgccgtggctcgcggccgcgtcggcggtagaaataggagggagggaaggagggagtgcgtgcgtcgtgattcgcgtgctcccatcgccaaggaaaaggtcggcgagggcaagccgcggctactcctgggcccacaagtcagtgacactggaacagcgatcgtagatgttgttgtgctatatgatgcctttgctgaaattattgtcaccgagctgatcatcagttcatcaccacacctgatcgtcgggtcgatcaccaagatcagtttaagagtgtaa

SEQ ID NO: 12703 - DNA, 186 bp, Oryza sativa
  Clone ID: PAT_MRT4530_18807C.1
atggaggacctcgatgacgtcttctccgacatgtgtctccacgttgaccttcgtactcatcggcatcaaagccgtgcagctgaaagcttcattaatgcctttggttgcctcaacctccacctcatggaggccccatttgggggcctcaatataaaacttgctgacctttcacgtagtattatctga

SEQ ID NO: 12704 - DNA, 533 bp, Oryza sativa
  Clone ID: PAT_MRT4530_18808C.1
aaaaaaaaaaaaaaaaaaaaaaaaaaaaaaaaaaaaaaaaaaaaaaaaaagaaaaaaaaaaaaaaaaaaaggaagaagacatacacaaacatgcaaaagggccggctcttttatagggtcccctctttcttaatgcgcgtgtgcgacgttttacatttttttttactggcacaaaatttaagttacctggccttcttttttcaccgtccatactggttaacccctgtggtttcctaactaaaaggcctggaccgatatccctttttaacaggtgggcatactaaataggaagcgggacccgctctgctttgcgacattatgctcagcgtgattggtgattgccccccgccttgtcgctacactttacagcgcccgagtgcggggttttctcgctttgttccctttctttttggccacgccctacggctctcccctttaagtttttacccttcctttctcttcagggttgcggtttttccctttacggctctaagaccggggttccctttaggagtgcgatatatcacttaacg

SEQ ID NO: 12705 - DNA, 252 bp, Oryza sativa
  Clone ID: PAT_MRT4530_18809C.1
atggaggacggaggcgtcgccaacgcggtggagggcggaggcggcagcggcgcggtggaggacggtggcggcggcggcggcgcggtggaggcagtcaggcggaggccaagcgcgatgggagtgcggcaatgccacatcaacatcatgcaggtgaaatccgccttggtttggcctaagcagggtaaggtaaatggtattaaaaagctaaggaggtgtcgatacacgattttaaagttgaaaggtgaactttaa

SEQ ID NO: 12706 - DNA, 2297 bp, Oryza sativa
  Clone ID: PAT_MRT4530_1880C.1
cgcaaaataacatccactaacccccctaaaccctccgcctccccctcgcgccgtccccgtcgcctccgccaccgcctccgccgccgccgccgccgtgtaccgccgccgttcaaattattcccctcttccgctccactctcccgtctctctctctctctctctctctccacacagagcacgcacccgccacccccacacgggagcggagagctcgccgccggcgatcgccgcaggaatccgagggtttcttcctgcgtccgcggtagatggttctgctcgaacgcacgccgttggtggtgcccgaggcagcagcagcagccgccgccgcctccagcccgctccggaggccgtcgcctagggttctgagggaggtgcccccgccccccctcgatcccatcctcccctacctcaggtctatcaacaaggctatggatgagctcaggacaggcccaaaatttgaagcagcagcgcttgatcggctcaagatttgtgtaatggaatgcattgataagtatggtgacgattaccagtactccacagacccccgactcctcaagatctggatcctctatgcggatgcaataggtgattttgataaggcatataagcagttggaggagaaaagaatgtttttagagcatgcactgctctatgatgcatatgcactgtttctcttcagtaaggggaaagtgctggaggctggtaaggtgtatgaagttggtatttccagaaaagccgagccacttgatcatttgaagaagatgcatacgatatttttaaaacacttggagaagattgtagaagaagcagatgccgatgcccagctatggtcagttggtcacaaggctgacaaacttgcagcagtaagaactaagaactgctttgatattgtttcttacatgatatttctctgtggtggaacatttgtttttccaaaaaagccgaaaccatcgaaaatacaaaagaaagaacctattttgctggatccatggtctgagtctactatgaataatttattggagaacattaatgttgatctgaagaagttcgctggctatcataagagcaataaggtctatcatggaaaggtgccattaacttcgcctcagaatgttttaagaaacaaagtcattgaattaggtggtagaaagtaccagatcaaaggttctcctggtactggtgcttttgcaaaagtttacaaagccagtgtcgatggtaatacagaagacctggttgctttaaagattcagaaaccaccatttccttgggaattttacatgtatcgccagcttgatacgcgcgtatctgatattgagagaccaagctttggctacactcatgaagtgcatgtatacgctgatgtcagtgtgcttgtttgtgattacctgccatacggaactcttctggatgttataaattctcatctagtacttgaacgccatatggatgaagttctatgcatatattacactatagagatgctgcgcatgttggaaacactgcacagcgttggcataattcatggtgatttcaagcctgacaatatgcttgtttgctacccaagcatgttgtggagaaatcacagacgaaaccttcaaaggcgagacaagatccgagcggaatcaggattcccattccaggggctctgccttgttgactggggccgtggcatcgacctgaacctcttcccatccggtgcggagttctacggcgactgccgaacctccgggttcagctgcgtcgagatgcaggaacagagagcctggacgtttcaggctgacacttacggcctctgcgtcatcgcgcacatgatgctacatgggacgcagatgagcatccagaagacgcccaggcccgatggaagctacatgtaccagcccacatcgccgttcaaaaggtactggaacgtggagctgtggaaaaacctcttctccacgctgctcaacgcgacctccaacggcagcgacgcggccgtgctccggagcctccggatgtccttccaggagtacctgtgcagcaaccggcagctcgtcggcaagctgaaccagcaactggccaagcagaagacctccctgtgcctatcctgaccgagacatatacgcatctcgcgtttcatcctcatcatttttcccgattccctcgtgttgcctgtgtgtaaagtggtggagtataagataccttccgtaacttcgtagcacttcctctgtgcgtgcgtgtgcagcagtaattaacgtgccacatctccactttgaaagctgaaacatctactattgggccagatggaaatttcgtacagt

SEQ ID NO: 12707 - DNA, 276 bp, Oryza sativa
  Clone ID: PAT_MRT4530_18810C.1
atggtgacagcagcgttcggtgatgggaaggagctagcaacaacgacgtgcggcagcgggatggaggtggccgcagcggcggacgacggcagcaggcagcttcgccctaccctgcgggagggaagctggcgggagcgacttgctatggtgggcggctcccctccaccaaatccggcgagagaggaagcagtggcgccctccgcgatgtcgggcggctcgagccacacctaccccattatattggatccccatggagaggagagaggggatgggtaa

SEQ ID NO: 12708 - DNA, 1990 bp, Oryza sativa
  Clone ID: PAT_MRT4530_18811C.1
ctctcttccccattcgccttcctccaaaaccccattcgcttcgctcctcctcgtcgtcgtcgccgccgccgctgccgctcgccgtagttagtatccgcgcggtgaggatggcggaggaggaggaggagaagaggaggttgggggagggggaggggggtggggtgatgagggacgcgaggaaggacggggtggtgagggaggtgatacggatggagagggaggcggtcatccccgtgctcaagcccaagctcgtcatgaagctcgcctacctcatcgagcatgatttggaccgttctgagttcttgaagctatgtaagaagatcgagtacaccatccgagcttggtatcttctccaattcgaggatttaatgcaattgtatgctatgtttgatcctctttcatgcagcttgattctctgtttgatcctgtttctggcgagaagaggctggagcagcagaacctgacacctgaagagattgaaactctggagttcaatttcatgacatatcttttccaggttatggaaaagagcaacttcaagttgttatctgatgaagagtatgatgttgcacaatctggaaaatatcttctaaaccttcccataaaagttgatgagcctaagctagacagtaagctgttgtcaacatactttaaagagcatccacatgataatctgccttcatttgctaataagtatattatctttcgtcggggcattggaattgaccgtacaaccgattactttatcatggagaaactggatgtgatcatatcccgagcttggagctcattgctcagagttacaaggattgatagattgttctcaaaaaaaccacaggtgaagtccaagaaagacacaaagaagaccgatgaaattaatgaagacttagaagaaccagaactatttgtcgagcgtattaggctagaaaaaatcgagctaagcgtgagaaatctgatgagcaagatgacaattcaagaacccacatttgataggatgattgtggtgtacaggagggcaggtactaagactaagcctgatcgaggaatatttgtaaagcatttcaagaatatcccaatggctgacatggaaattgttcttccagagaagaagaaccctactttaacaccaatggattgggtcaagtttcttatttctgctgttattggtctggtcactttatttggttcccttgaaatgccaaaggctgatatatgggttgtcatagcaatcttgtcgggtgtgattggatattgtgctaagatctacttcacgtttcagcaaaatatgacaatatatcaaaatttgatcacaaaatcaatgtatgacaaacagcttgatagtgggaaaggaacactgcttcacctgtgtgatgatgtgatacagcaagaagttaaagaagtcataatttcttactatatcttaatggaacaggggaaggcaactgaacaagatctggatttgcgctgtgaagagctaattaaggaagagtttggtgcagagtgcaattttgatgttcgtgatgctgtaaagaaattggagaggcttggtatcgttcatcgggactcgattggaaggattgtctgtgtctcattgaagcgtgcaaatgagatattaggcaacactactgaagaattggtgatgcgagcgcaacagagcccaactgcttcttaagtttcacgatggacagctggactggaatgcactcctcatctttctgtaaattacgctgccatgacggacttgttcatcctgaaaacagtccttcatgttttgttggcaaatgtgccatacgtgctctgcactatagttaggcttccttttattttcggcgagttttaatgtgtaactatgttatgcttcagtttaaaatgggtacgggtgatttgtacataacacgtgtaataaaaacaactgtacaaaaaccctcatacctgccttggttctttttactggcaggtttacgagtccactgttgcttgcttcctttaa

SEQ ID NO: 12709 - DNA, 546 bp, Oryza sativa
  Clone ID: PAT_MRT4530_18812C.1
tcccccgggctgcaggattttctcagggaacttttgacctcttggttagtcatgctggaaatcacaaggtatgctgtagtatcgagcaatttttttccacttaacatcacgagacttgactgaatgccaccctcttcatttcctatcagattaatgaaattctagagtacagtagtttgaaatatgaaaaattgttcatacattctaaggtatgggctgacaggttctggttgattggttgtcagtaactacgtaatatgaagtttactgttgtgcactttccacttggttgatcttagctatgtaatatgaagatctatatggttctttggcactcctagacctagaatggggttatcagaggagttctgtcaggcagtttatcttgtgcctatcaaattgcacaacaaatgagcaactccgatgctaaaatagtgggcatatcgtttgtaagtttaatttagtttgaaagcatcttgcaacattacagcttgaaattagttatccattgattcccatgtactccattttcttagtccatactta

SEQ ID NO: 12710 - DNA, 408 bp, Oryza sativa
  Clone ID: PAT_MRT4530_18813C.1
atggcttcggcagtggtgagaacggcttcggcagtggtgggaacggaggcaacggcagccggtgacgtcctctcctccgccagaccggcagtaggggagatggtgacagcagcgttcggtgatgggaaggagctagcaacaacgacgtgcggcagcgggatggaggtggccgcagcggcggacgacggcagcaggcagcttcgccctaccctgtgccagatctggcaggaggataggcggcgggagcgggagggaagctggcgggagcgacttgctatggtgggcggctcccctccaccaaatccggcgagagaggaagcagtggcgccctccgcgatgtcgggcggctcgagccacacctaccccattatattggatccccatggagaggagagaggggatgggtaa

SEQ ID NO: 12711 - DNA, 448 bp, Oryza sativa
  Clone ID: PAT_MRT4530_18814C.1
ggcaggagcagcagtgagggctgtgaggactgaggcgccgcccaccccgacgccgccggcgaagcagcgacgccgccggccagatccgcggccgagctactgcactgcacccgcatccctctccccacgtgcggcggcgcgagcgtctgcgcggctacttgattgtaccagcacctggtcagtggtcagtcggctcttcgcttctcgcgcgcacagtgtccccttcgcccgccacctgttcgacggaatgcctcctaagcggaaggggttgacaagcaagaaaatggctgaggccagggaggagggtggaatcgacgtcctcccggacgctctcctccagcacatcctgtccttcttgtcggctgatgaggccgtgaagaccagcgcgtcctatcccgccgctggcgccacgccacctctggaaatccacgcccaccctgcgtattgt

SEQ ID NO: 12712 - DNA, 708 bp, Oryza sativa
  Clone ID: PAT_MRT4530_18815C.1
cctctcgcgcgccgccgccggcgagcacgtcaccggaggcacggcgcagacgagctcctctcctctcctctcctctcctctcctccccgattcctccctgctcccgccccccgccctccgtctcggttctattcgaatcgaatcgaaggttgtaaggatgaagaagggactgcatcctcagatgcagtggatttcatatgtgacacaaagcggcaggttgatcaatatcatgatgaccaaggtcaaccatactggcaaagtgtatcatatgagagcaaagcgtcaaatggctcaaagcctgggccagattgcaaagttcaaccgccgataccagcaggaatctgaggaaaacaaagaaaagtaggctgctgtcagcaaggagctacatatgctctaaggcagattagtgtggtgctatgtttatcgtccaggaacattgctcatggatctttgttttggatgtcatcctcttccatgtagccatctgatcattgtggtttatccctgtagtttcagttctaccattcacgaatttttctggagctatttttgttgctcaattctgcccgatatctctagagaatacagcatgctactttatgttttgttgattttagattgaagctccctgaattcctgtaagatggcatcgtttggcttgtcatgctacgtctcttttagcttatataaattatgtttattgttagt

SEQ ID NO: 12713 - DNA, 533 bp, Oryza sativa
  unsure (1)..(533): unsure at all n locations
  Clone ID: PAT_MRT4530_18816C.1
ataaaaattaccctaaaattaggcggaacaacaatatccattataaaacttcctcctccgggggccgccactggctggagggggggatgcattggggcttcttccattgggcaagggggggggggcactggttgggggattggtgatcgccatgggcggctttttcctcgacgacgtcgtttttttggggggggggggacccgcaatcttgggtgcactggtggtttttccactgggcatgggggggctggcactggttgggggagcgatcgccgccgggggtggcgtcttcctcggcgacgtcgacgggggggttttggtggcgctggggggatctgcactcctccatgcattgggggtttttccactgggcgggggggggggggcactgcttggagcaggggtctctgccatggggggtggcgncgtcggggtcaacctcctgtcgccgggggggggagtccatgagggagcgcttgttttcccaccaatcctggtggggctcgcactggtcacgggagtccggcctggat

SEQ ID NO: 12714 - DNA, 1380 bp, Oryza sativa
  Clone ID: PAT_MRT4530_18817C.1
cgcctccccccacctcctaagctccaaaccgagagaaccctgctgctccgccgcccgccgcccaatccgacccgccggagcgcgaagggagaaacagggcatccagaagaagaagaagactaagaagaagaagaagaacaccaagaagaagggaggatgccgccgaagaaggcagcgccatcgaaggcggacctggccaagaagcagaaggtcgtggaggacaagacgttcgggctcaagaacaagaacaagagcaagaacgtccagaagtacaagaagaaggaggaggagaaggcgcgcgagaaggaactcaatgatctattcaaggtcgccgtcagccagcccaaggtcccagttggtgtcgatcccaagtccatagtgtgtgaattctcagaaggtcgtggaggacaagacgttcgtgctcaagaacaagaacaagagctagaacgtccagaagtacgtccagtccctgcatcaggccgtccagcccaagcccgacccgaccaagaccactgggaccaggagactcttgagaaggttgttgcgtcaaaaggagcagagtaccagcagaataaacctactgatattcagttattagggtgtcctcttggtcatatcgttagcaagccacctgtgttgattttagttctgaatgcacctggaacaactagaggaaaatctgacatatgtcatgttgcaacagtggttaacatgatatggtgtgatgaattggcatggtgggactctttcttagttgcagctcatgatatggtttgcaagtactttcttgatgccgtggagaagaaacagtacggttggttttgggtttgcccaaatgggggcaaagattgccactacaggcatgcacttccacctggctatgtactgaagtcccaaatgaaggccttattggaggaagagagtgaaaagattgctatcgaagatgagattgaagatcagcgtaaaaaggtaaaaacaacaactcctatgaccacagatttattcatggaatggaaaaggaagaaggcagaagaaagagaagctggtctggctgccttgagggcagagagggctaagaatgatcgcatgagtggccgtgagctgttcatggctgattcaagtgtgttcgttgatgatgctgaagcatatgatgtatatgaaagacaggaagaatcagaggctaatgaagaaccgagcaataaaaaccaggatgaggggccaagttcatcaacttctaatggcaaggaggtggaagagtccgatgatgaagatataaatattgatgatgacctggacattgatgagttaaacgagcttgaagcaagcctgtcaagaacttccattcagattcgagaacctggcgagggaacatcatcttga

SEQ ID NO: 12715 - DNA, 612 bp, Oryza sativa
  Clone ID: PAT_MRT4530_18818C.1
accacatcacggtgattcccattatcagcctcctcctgccagaggctaaactctcacgccgcatgtcccacgcgtgagtgcgtcactctaactgaagaagtacgatctgcctgactggacgtactgcttaaagctattcctcccatatgtgatggctgccatatccttatgtgccacgacgtagggcaccatgtgcctgctttatgtggaccagaccctcgcatggatgacccttcagcttggcaacctaactacatgaccactatatgctacaatactggatacaaaccatacaggggaggcgcgttccccgaaccaatggactcggagcatttacatcttaacgagcataggctgcaatgacacaatcctggacgctacatccggagacgtgagaaggaagagagatgtacagcactctcagtacagatacaatgctgaccaaggactggtgagaaaggtgcaccacgagggctgtcttgaggatcatcgagccaatggatcacatgatcaacatggggggcacgaaggggttgttgctgaagaatgtgctgagagcacgatactctactgaccgagagcgcgcgaaacgtctatctgtacatgcagctt

SEQ ID NO: 12716 - DNA, 455 bp, Oryza sativa
  Clone ID: PAT_MRT4530_18819C.1
ttttggttttttttttttttttttttttttttttttttttttttttttttttttttttttttttttttttttttttttttttttttttttttttttgggggggagaaaacggcgcccctgggggggaccccccaggggggaccccaaaaaaaagccaaaaggtaaccctttaaacccccaaaaaaaaagggggtggggggaacccaattttaagggttcccgaacccgacaaaaaacggcccgaccccgggccccggccgaaaacgggaaacccggggaaaaaacccgaggaaaatggatttcaagggccccccccaaggggggaaaacaacgggtttaacccgggtggccccccagggtccccccctgaaaatgggggggacgggccccaacccgggaaaaacccgggccaacccgagggggggggcggacaaccacggggccttggggacggg

SEQ ID NO: 12717 - DNA, 2413 bp, Oryza sativa
  Clone ID: PAT_MRT4530_1881C.1
atggacctcggcaaatcatcttccaccagtgcgtcgctgaagaagcttcaggaagacggcgcccttcctggtcgtggaagcatggagagggaagcaagaggtattaatccccagcccgtcttaggtcgcatggttgcgatcgaagtctatattctctgcggttttctccccccgccttccgaatttcttctcctggttttgaacttctatggtctttctcttcttcatttgaatctcaattctatcgcctttcttaacatctttgctcatctttgtgaggcctacattggggtagagccttttcttgatctttttcgcttctactacgagttgcgttggatggagtccaacagggtatctggttgcgttgggttccgacttcgggatggcctgaagtcgcgttatatccccttccagtgcccttcttctcgcagcaaatggtggaatatgtggttctatcttgagatcaaagattcagaccttgtcttcgttgttcccgatgaacaaccggacaagatttcgtcttggactgcaaagccccctttgaccccctatcttcagtcgtttatcgacatcatcgacgatctccgattacggggcttgtcggggtatgaagtcgttgcagacttcgttggtctgaacagcgaaaccgtggagcgccgcgtcggccaggtgatgatcagtggtccgacaacggcgagtaacatcctcgtgcccctttgtgaaaagggggcggctgaacgtgatgacgctatcaacgctcttcctctgactgacatcatcgggccgctcgcggaccatcaggtggcagcgtctctaaaagagaaggtcgccaaggaggcgtctgatgctgttgcggccactactagtggtgacaatgttccgacaaaggggaggaagttctcctctgtaagcggacatcgtcgcaagacatcgaccccctcggcctcggacgcgtctcccccgcctccacgacgacaatgtcttgtgacggttggcgagaaggaggcgcgggcaaaggctgcgcaaaacaagtctggagggacttccagcgcgtcgcctgccgcgccctcaacggatgtcgtactcgtagccgagagtcgggaggcaacgcctagcggcccagtcagcgatcccgcggcaggtcgtggtccacccgctgccgtcctcacctgggaggagctccaagtcgaaatggggcgcctcctcgaagctggtgctcgcggcattggccgcgagattgcagaggcgaggtcggaagtagtgttggcgaatgcgcgtgctgaccggctggtgcgcgagttggcggaagctcgtgaagacctcacgaagatgagggaattggtggccggcaacgagcgacaacgacaggggctcgaggactgtatgtcggaactcgggaacaacctgtcggaaatccgaggctcgttgcgggtcacctacactggcctgcaccagcttgccggggagtgtggcatcaagtctaccatcccggtgaatcctgacgaattctcgctgacatcctcccttgcggaactggcgacggcgatgggggagatcccctccaagcatgcggccaggatcgcggaggagacgtcgaacgggatctacaccggggcgtgtcatgtcctcgcgtgtgtaaagctgtcgcgtcctgaactcgatctgcgtgagatcttggatcagggggcggctagcaacacgcgtaagaaggtgatggaagaagtcggtgatctgggggagtctgttctccccctatttgaagaagatgtcgatgtcgaggatgtccagcagcgtgggcagcctaaattgtcagcgatccctccggatcttgcgtctgtgggacacgcgttgctggacaacgtgggtgaaattttgcccgcgaggacagggacaacgacgacttccttagacctcgaggacgcacttgctggccaagatcgtcgtatccaatattggaagacgaaatttgaagtggcggaactcgagagagccatgttggaagtaaaaaaggagcaggccgtggaaacgctccgaggtcgtgaggtgtggtttaactcgtatttgaagagctgctgcacatccatggccagagtttgcagagaacttcgagtggtctgcggagaacctgaggagtcggcggctggatacatctcgtggctgaacgggtgaaggcgtcggcaagcggattgacgaagctctgaaacaggagtgccgtcggtcgagccgatatgccggagggcatgtgttggcttgcatacgagatcattgtccgcaaatgcacctcgagtttcttcatgaagggttcactcgttctcggaggactcctgcggagatagaccacctggcgaagtcgatggcaccgttagcggagaaggttttcaagtctatggactggcgttggccttcttgg

SEQ ID NO: 12718 - DNA, 378 bp, Oryza sativa
  Clone ID: PAT_MRT4530_18820C.1
tcgattttaatggagagacatatgtacacaggtgtattggtcgataccactcatgacaagtcggttgtgatggctaagactggtaggacatatacggattaatataacatagacttctgcctgttcgaaggatatgttttgctcattttgcaaggcaaagccatcacccattgctgtattatgaacaacgagcatggacccttaaactaggtattaaaaagtaaaatgaccgacatggacaacatttggatagtctgaattaacatcatcatggataggaaggcgtgcgggaagtcataccctgagaataagcatgtgaaatcccttgccgatggtttgggaacatacaccaaggcacttggccttgagcttgacctt

SEQ ID NO: 12719 - DNA, 670 bp, Oryza sativa
  Clone ID: PAT_MRT4530_18821C.1
ctcgctcgtggacgatggaccggcggcgagcttgtccggtgaggggcggcaagcttccgcctgaccactcgagcttgactccaccacaaggactggctcgagactccttggtccaccccgcgccggatcttgaagctatggcgcgcgtcggcgtcgagaaggagtgagaggagtgggagtaggaaggtgagcagcgacatggtgcgtgggtcagcgcgggaagggtccacggccaccaaatccggcagccctccgcctcctaggcgatagatcggacggccctgttcctcctagcgctggataattcgtgtggatgtccatggcgatgtgatgtcgccagcgcagcgtagctgctagtctcgatccatgtctcagcgaggtagggaggaggcactgggttgacgaggaccgaggacagcgcagcccggcggtggctgcttccgctgcccccaagtagtgagttttctttggatttttgggaatcgggtgttcttggtcgatttggttttttccttaattttatttccattatttgatttgtttttttatgatgtgtgcgaagagcgctgaagctgatgatctgggcatccggcagataaagctgttgcggaaccagcggtgcgcacataatttcggaatcgcatcccccatgagagtaggccgacatgga

SEQ ID NO: 12720 - DNA, 870 bp, Oryza sativa
  Clone ID: PAT_MRT4530_18822C.1
ccccccgtcgccgctccgcaacgccgcccttgcccgctccgtcgtcacggccatcgccgtgtccgtgctctccgtcgccgccgctggcctgaagttgatctagttggggggggggggggttaggatggcgcgcgccctggcagtggcgagctacggggtgggcagcagtaccgggtggaccttcttgggcactcctaactacacagtctgggccacaccagaaaggttctatctaggtgatacagtcgtattcacgtacaacaagcagctccacaacgtgatggcggtgagcaaggcggactacaagaactgcgacgcgagaaagccgatcgccacctggtcgacgggcaacgactcggtggtcctcaacgccacgggccaccactacttcctctgcggcttcccgaaccactgcggcatcggccagaaggtggacatccgcgtcgccgcctccggccactcctctgctgccccttccatggcgcccgccccggcctccggctccgaggcacccgtcgccccccggtggtgcgcggctcgtccggccacgcagccgccgccccgtcgccgcacggcaacgccgccgttggccgctccgtcttcacggccatcgccgtgtccgtgctctccgtcgccgccgctggcctgaagttgatctagttggggggtgtgcgtacgtgtgtccggagatggtgtcggttaggatggcgcgcgccctgtgtattgtgagcttttgcgtttggagccgtgttcattttctcttttgccccctcctttcgtgtcgtaattaattaaactagtatgatcctgtggatcttgctgcaatttgaggatctctgccggttgtcaacctcaaaaaaaaaaaaaaaa

SEQ ID NO: 12721 - DNA, 195 bp, Oryza sativa
  Clone ID: PAT_MRT4530_18823C.1
attatcccgtgcggcccacagcctggcgccgagatcgcctggttccaggcggagccacttacggcccgcttggaacctaaaggggtcggcgtccaagaaaatcacatgtctagtagtgttgatggcctccggtggagcaaggccaacttacttgctgctttctggcacggcaagcacgatgcggtgatccgttga

SEQ ID NO: 12722 - DNA, 612 bp, Oryza sativa
  Clone ID: PAT_MRT4530_18824C.1
ctcaacttgagaccatagcattctcagcttagcaccagctagctagctagctacctgaatactacactgaagaagaatcgatcgatatctgaaggaagtgaagtaagtgatgggttcagagacgttcttggagatcttgctggccatcctgctgccgccgctcggcgtcttcctccgctacggcatcggcatggagttctggatcgccctgctgctcaccatcctgggatacttacccggcatcatctacgctgtttatgtgcttgttgcttaattagttagttactaccagtgatctgttctgatcgatcgattatgttagtatcatggtttagtttagttggtttctattatgtaagtcgtactagctgctacttacggcatgttcttcggttcctgcttgcctggatcagtggagctagtcgcctagactagacatcgatctctgtagtttctgtcagcattcagaaaagtgtgatctgaattctgactttctgatggatcgatgagtatggatgattcatgtgtgatctgaatggatgatgatcttcatgtatgtctccggtttgtatattcagacattcagtttctttaaaaaaaaaaaaaaaaaaa

SEQ ID NO: 12723 - DNA, 320 bp, Oryza sativa
  Clone ID: PAT_MRT4530_18825C.1
ctttggttataataagggtttcatcggggtttcagccgatgaggtatctggacgttacatcggcttataaggattgcacccaattggtttctattggatttatattgttattatattatattatattatcatcagccgattgtctttatatcattatctacattagacatatagccgattgctcaaaaccctatcgctatcgactggttcaaactaactagcacggccgcatctcattaacttttggacctgcactagagctaagcagatctcccaggccagtgtgtgtttttcgcatcaacacaatcaaattaaaaaag

SEQ ID NO: 12724 - DNA, 186 bp, Oryza sativa
  Clone ID: PAT_MRT4530_18826C.1
atgcccacctggagtaatcatcttccttggctaattaacaaggatcttattgctacatcgcagtccgattccactataattgggaacaagcggctggatgttgctgtatctatcagcattaaggagttcatagagctcatcaagaagttcttcgacgcctctttcactggcagggacttaccatga

SEQ ID NO: 12725 - DNA, 893 bp, Oryza sativa
  Clone ID: PAT_MRT4530_18827C.1
tactttccatgcgctctgccagtgtcttcatgcatatgatcggtggaatgcaatgagggaggtctggatgcttcctgcacatgaggatgtgaagtatacctggaaggattgtctccttttaattcttgcgaacctatctgagctagagcaggcttgtactttaatattgttgtggcacatatggcatgtacaaaatgatatcactcatggtaagtccctgccagtgaaagaggcgtcgaagaacttcttgatgagctctatgaactccttaatgctgatagatacagcaacatccagccgctgacttgaagaatgggaagcacacggatcgtagctgggtcaatcgacccactgcttaatgggtagatccgtccttggaagcaagtaattggaaccaacctatgaatgggtgggtaaagctgaacgtggatagctccttcagtccttggaatcgtcgtccgtgactgtagcggcaatgttatcttcatctcgcgcaaagccatcacccactgttttgatgcccttgaggtggaattgatggcatgttgggatgggttgtcgttaacgctacagtggaccttgttcccaattatagtggaatcggactgcgatgtagcaataagatccttgttaattagccaaggaagatgattactccaggtgggcattcttgatctgggatacaacatatttagtctctgaaaagagggccattaaattccagaagattagccgcaattagaatagaattagtcatgaattagcacagctctagggagattaggggtgcaatcaggcctaattgttaggccatgaaagcacttgtgtctcccagctcatccatgaggattgtactaattcctatcctgattaatgatatcctcttttccccg

SEQ ID NO: 12726 - DNA, 244 bp, Oryza sativa
  Clone ID: PAT_MRT4530_18828C.1
cacgacgatcccaaataactaaccatagggaaaagaaacataagatccttaagcatagattccacatatttccccactgatgaaaaggttacacataagagggcgcgaataagcaatcaggggggagaccaagcaatacattttttgcatttaggaacttactggaggaccagattaaattatcaagcccatagagctacaaggcttttaaacacacaaatgctaattaaatacccaggcagtt

SEQ ID NO: 12727 - DNA, 264 bp, Oryza sativa
  Clone ID: PAT_MRT4530_18829C.1
gacacagacgaccacctcaatcaacaaccaccacaatatacggaacaacagaagccacaacatacaagccaacacatgctaagacaagccgccggatatcgacttcagggatagcatggctattcccctacggtgtctccggataccgtcaggagagacgaaagcgctatctctgatctcgccggacacagattcgaggaggaaggctaccctgttgtcgactacgagtcagaccttcagaccgacatgtcgacaacagttaga

SEQ ID NO: 12728 - DNA, 2064 bp, Oryza sativa
  Clone ID: PAT_MRT4530_1882C.1
atggcgcggctagagcggctggaggtagaagacggccctgacaggtgggtcagcgggagagagagggagagaggggcgtgcgcggcggactgggccgactgggccaagcagcaggacgagggaagagagaaagaggagaaccctgtggacgttgtgtggctcgacgtgcacgtccagcacgaggtgacaggtcgtcctccagagatgcatttctcgcgtgcaaaggtccgcgagaccatgccgtgcagtgtagggagtccaccgaacatggtcaggcgtaagctgatcaaagtcagctacgaactccgcctctcccgcctcgccggagcgtcgtccggccgcgccgtcgcctcctctagcatcgcagccacctcctccaccccggcctgccctccgtttcccgcggagacccccggagctgccttcccaccgtcgcccttctcttttctccgcgccggccacctccagccgcacctcccgcctcacccgtgcaccctccggctgcgccgccacctctcccggcgtcgcagctgccccctctccctcggtcagccctccgtttcgcggggaaatcaccggagacgcgtcctcgccggcgtccagtggcgtcgccaccacttctccgcctccggccgcctctgccgcgtccccggtgcaccggccgacgtcgccaccacctctcccggcactggagtgccgtcctctctcccggccaagccacggcgtcgcccgaatttcgccggaacgccgtcatctccgcgccggcccctccttcctcctcgtcggctcgtcgtcccgctgcaccaccaccttcaccaacatcgcagcggcgtgttccacgccgtcccctcctccgctcagccgctgctgcctgccatcatcgtttcatcgtcgtctccgatcgttctcgtcgtcgacgtcccatcggtcgcccggctcgtcgtctcgcggcgccgcctccgtcgtcggcatcgcagcggcgtggtcctcgtcgtcctcgtccccgtgcagcagctgccggctgtcctcgtcgcctcctcgccggtcccggtcgtcgtcgtcgtcgtcgtcctctcgtcgttcccggtcgacgtggcgttcgtccctccgtcgagccgttctcgtccgtcgtccgcgtttcgtcaagtgtgccgctgcagccccgtcctcgtcttcgtcctcggctccgcgtcgtcaagcctcgcgccggccgcgtctcgccttcgtccaagggtcgccgctgaagccgtcccctcgccgttcgtctccgttgtgcccagggttggtgccctgctgctaggggctcagttctgcctgcctgtcccgggtatcccggccgtaggccgtcgcccacactttcctcccggccaacgccttttcggcctcctcttcggcctgctcctcggccccctcactccctccggcaccgacggcgacgaactggcgctcccctcactccctctcggcggcggctggcaaggggtggtggagggacctatcgaatgccctcagttcgataggccgcgtggcgccgggtggtgggccctgtcgaacttcctccgttcgatagggtcacctgtcgaacagcagcggttcgacaggtcccagtcgaacgcccacggccccttatctgacagcaccggcgggctcggtaccggcgacggcctcccttccctgacctcccatgggcagtggcgacctcccttccccgacggcggtgggcacggtgacgacgacggccgcggttggccggcacggcggctaatccggcggtactatcctcgggagggccggattctccaccctacggaggagctcggcgtgtggcgggcacagcgacggccgccggtggcagatctggacgacgggcgcgcagcgggcacgacgacggccggcggcggcgatcctcccccctcccctcaacgccgcggcggcaggggcggctcggccgcatcgggcagcgctgccccgcgccgattcggtgccatcgacgacggcgggcggcaggggcgacagatccggcgacggcgtgcggtggggacacagcttccggcggcgggctag

SEQ ID NO: 12729 - DNA, 1062 bp, Oryza sativa
  Clone ID: PAT_MRT4530_18830C.1
tcacgcccagatggcgatcatggacatgagccctgcgccgagcagcaacgcgacgttcatggcgagctgcaggcgtccccttctctgcaccttggtcttcatgaagtcctcggcgaggatgtcgacgagcgccatgtagacgagtatccccgctgccgacgcctcgaggagcccctgcaccaccagcgccgttgggctgttcgcgtcgtagacggaggagatcccgatcccgacgacgatgccggccggcgtcgtcagggagaagaagagcgccatcgtcaccactgacctgacacggaactttgcctgaacgatgcatccgccgagcccgatgccctcgaagaactgatgaaacgtcagcgccggcacgagcggccgcaccgtgctcgggaagtcggaggcgcccagcgacatcccgatgatgagcgagtgcaccaccactcccagctccagcacctgagagatgacgcggtggcggacgaggtcttcctcgccggcgggagcgacggacatgacggacatgccgtgggcgtggccgtggctgtgctcgtcggaggcctccaggtcgtcggctggctcgtcggcgacggccgcggccttcctcttggcgtccgtgcggtgaaagtaccccgtggcgacggtgtcgacgatgagcgtgccgatggcggagaccatggcgaccatgccggcgatcgggaagcgcttccacgggccgccgacgaggcacggcgagctgagcgcctcgaaggccgcgggaaggatgtgcaccaggcccgtggcgaggatgacgccgccggcgaaggccttgacggagagtaacacgtccgtctccggctggatcgccgggaacctgccgcccagggacggcagcgccgccccgacggtgctcccggcgaggatgcagaagatggcgatgaccttgagccgcagcgcctgcgccttgtcccgccccgccgtgtccgtcgcgcagtcgcactccgctgccgccgcgtgcgccggcaggtagcacgccgccaccagaaagagcaggacgaacaccttggtcatcgccgccgtcgccat

SEQ ID NO: 12730 - DNA, 547 bp, Oryza sativa
  Clone ID: PAT_MRT4530_18831C.1
gggatgaaaggagacggatgattatttaaaaaagcactggcacgcatgacagagatggagcaggattacatgatcgagatcaccatgatgatagacgatccattcaagctagctaggggtccatccaacattgatcgacacacgcacacactgacaacgacgtcgacagttgaatttatgcgtgaaaccaaaaggcaaggcctgcctacatttaaacagggtacctatgctagcaaattaacgtctagctcaaagctctgatcggcaggatctgcctgcatacgatatatcccaatgcaggcgggctgacgtccacgattgattcaaccgctcgagcagcaggagcagccgccgatgctggtggcacacttgccggtgttgcacacgtagacgccgctctcgccgttctgcaccgacatttgcatttctccagagctggccccgacgggtggatcagctaggactattgacctggtggtggctggggcctacacatttaggagcaccttgcatccgccgcaatcgtcgacgcactggctgacgctgt

SEQ ID NO: 12731 - DNA, 723 bp, Oryza sativa
  Clone ID: PAT_MRT4530_18832C.1
atattcatgataggaaccaaatgtaaaatatctaaaatagcattcaaatttcaactatccactatcattaggagtatcttccccaataaatttccaactctcaaattatttatggtaaaaatgaaagaatttcttgaaatcacctctaaagtactcctttggccccaaattctgaagaactatgattctaacattaactattgaaatgtcattatgtggctcaatatcccattaaacaggagcatcttgtactccagaacttatcagtgcccttcagaaactgaattattttgaaactttgtttcctctgtttaagtatggcatcttctcacattttaagctttctttgaattttttttcaagtgagagacttcaagtcaataggtatccagactgtactgatttcggtagaggggtattttgttagaaggttgttactcacagtcattgccatgctgtgtgtaggacttttgagcaaatgctgacttaagaaaatacttttcaaataagaaacatcaagaggtgcaaaaaactagactcaagggaattcctgttgtggtgcagtggaaatgaatctatgactagtatccatgaggatgtgggtttgatgcctggccttgcttagccgttaaggatacggtgttgccatgaactgtggtgtaagtcgcagacttggctcagatcctgagttgctgtggctgtggtgtagttcagcagctatag

SEQ ID NO: 12732 - DNA, 260 bp, Oryza sativa
  Clone ID: PAT_MRT4530_18833C.1
gggtgaagtacctgtggccattctcggcgcatactcggttgcaccagaagtgctagttcacggacgactaccggtgggacgcggttgggggctaagaggtgccacaagcctccgtacggaaaaaggcgcagtacgtagtaggacagttgatgtagtgagcttggaggtcttcgagctttacagctctattgacctcttcatgaactgttcctaaattgatgttattcaggctggtgaggagaatgctgtgagtgcatcat

SEQ ID NO: 12733 - DNA, 1803 bp, Oryza sativa
  Clone ID: PAT_MRT4530_18834C.1
atggatcccaggctgctcagtgccgcgcgccgcggtgaccgcgagtggctggaggccgttcttggcggcgccgcaccggcgccggaccaaggcgccgttgacgtcgcggggccgccggacccgggacaacaagcgcccgctcagccgccaccgccatcaccctccgcggcggcgctgctcctggacgtggcgacgacgccgcggggggactccgcactgcacgtcgtggcgggctccggcgacagcgacgacttcctgcgctgcgcgcgcatgatctaccacggcgccgagggtctcctgggtcacaccaacgcgacaggcggtcgcgcggatgaggaggaggcgcggcgattgcggaagagaaggaggtgcgggagaggatgcgttgcggcagagagaataatagaggcatggaatatgggacaattatgctcaaaggagagggataataacttgccttgctccaacccggtgtcaacagacagcatgacggttagaggaataggaagtttagcggtgtggaagtgttactccgacaacctgagccgagagaagagagaggagaggccgagtggggcggcggtgctccagtggctgggaggctgcgacgtcggcggaggcgacgaagggcggtggtcaatggcggtttgcagaggggaagagggagttggccttggtggcggcgacgtgagaaggaaggcgacggcgccggctgtggcctgtgattggtcggcgacggcggcgcatacacgcggcggtcgcgggagggttggctggcggcagtggagtgcacggcacagcgacggcttgccgtggttggcaaggcagcggcggcggcaagcaaatacaaaaacgtatcacccacttcctacaatccggcccgaacctttgggtgagctccgcagaatcaacaaccatagctacacggagtacggtagaattcctcggtacggtcattcgggaagttcccccgaggacgactcccatacaattcctgcgagagctggagaagcgtctacgggtaaagcaccgtatctagagccctgtggtctcgccccaaaccctagcgctgtcatggcggcggggtcgagcccccttgtgccaggtgccgagaaggcgctggggtgttggggcggcagtgagaggaaggtccagcttggaggagctgaggagggagacgcggtcacggaccggtggcggtggccttggatccaagcaacagtggcgcacatcgcaagcagaggagatgttggagccagggtcgagagggacggcaggggcattgcggaggtcggcgcgatggatttcggccacggcacggcgacaacgacgttcccagatgtatatgttgctgacaaagggatagcagcatgcgggttttcctcattatttatggattgcttcaagatcatggaaaatgtactggagaaacaagagaatttgttggcatttgaattcgaggttagacagtggggttgtgacaaaaggtatgacattaggggtgagggagcttgcttgaagagatacacagactcgtccttcaatactggttttgcatgttctaggatgctagagccaataactcaaagacttagtgttatgagttttacatgtggaattttcagcagatgctgtagggcaaggtcttcctttagaagatttactgctcttagttcgttgtcaattagtagggaaaaatgtggttatgatgttggaactactcacaaaaagaaaaaaattgtgacagtaacaatttcccctcaatggcagtgcctccgtggtgagatggatatgaatttttaa

SEQ ID NO: 12734 - DNA, 312 bp, Oryza sativa
  Clone ID: PAT_MRT4530_18835C.1
aaaaaaaaaaaaataaaaaaaaaaaaatataataaaaaaaaggggggccgctgttataagagcaacgatgcttacggcctgcgggctgcgacgtaactcttcttttgtagcgcctaataaatacaatttactggccgttgtataacaacgattagactgattacacctgtggtaaaaaccaaattaatcgggtagcagaacatccttttttcagcatgctgtcttactagcaaggacactttcactgagtcgtttaaacaatagttgagcatgattgatgaatagtgccaccccccttgcagcgcatcatta

SEQ ID NO: 12735 - DNA, 2341 bp, Oryza sativa
  Clone ID: PAT_MRT4530_18836C.1
ttgtttttttttttttttgggtttttttttttttttttttttttttggaaggaatcacaaattcttcgaaagaatcggggtaatttcagttctacacgacaacattctcctcgaacccttctggctccggagcaatctccctggaagccctcttgaaggagaaggaagtctctcctccgcttccatgtgatctagttgaatgtttcctgtcaagcatttgccctgacgacgacgcggtttcaaggctctggtaccggtttccttgaaggaaagcagactgccaggagctccgggatgatgagctcctgagtcttgctgaattggagcgggacgccattcgcagaatctttagcgggttctccagggctctcagaacgtaccgagcagaaggccgccttgatggctttgaattcaggcatgtcttcgcgacgattgccatggcccacacctcttcgagatgatcctcgtcgacaataagcaaaggatcgatgatcctagaaatgctctccttgtcgttcatgtcgatgcggtttagtgtgtttgtcatccactcttcggaggcagcatcgtttgatccacttacaccaaagttgcctgttactagttcaagcatcacctttccaaagcagtaaacatcataagaacaagttgctggtgggcctgatatgttcttatcaagcgaccttgatgatctcaacaaccgagagaagacactctggcttcccccactttgctgggcacatacatcactcatactcccaagtcgcacttcaaatttatcatcaagaagaacgctagttgcttggatatctctgtggactaatggcgggcggcactcatcgtgaaggaagcacatggcctcagccacacctgttgcaatcttcagtcttgttatccaatccaatgatggcaagccatcttctgtgtccacaggtttcttgtgcaatgcattggtcaagtcccccttaggcatatacttgtaagccataaattcctcttcatcctttgccaaatgtccgagcaacggaacaatcctctcatgggaatacattttatagaagtccaattcacctgcatgcttgttgacgctctgtgcgttgaccttcttgacaacaacctgggatccactctcaaagacaccatggtaaatatccccagagtgcccatgcttgaggaggttgtcatctccaaacccgcctgtggcatggaccaactgctcaaaggtaaattcaccggaaacaacaaccggatccttatgtccagaattggcacttggggacactgctactggtggtgatgtcaccgggtttacactactatccctcctgcgcacgccacgtgtgctttcctcatttgtatccacccctctcccgcgtgcgcctcttcttcccgccttctgccttgccaagcagaataccaatgcaccaaaaaacacaaccatcagcgttgccgcggcagcaataactccaatcagtacacccttggatatcctactgttattattcttcgtcgtcgtccccggtgatgtctccggcgaaggtgcgggagctagagcatcaccaagcctcacccctgccctcctatagaactcttcacaatcaacacggttgcgctgacctggcgcaccggagaagcaattcatcctaacatctacatttccatcagacacattccaaaccccatcgaagtagttgcttgacaggtccaccacctggaacctccccttgagggccccaatggcatcgctgaccacaccatacagcgaattcccagaaacgttgaacagcgaggcggctccaccaccggcgacgggggtgacattcggcagcccgccggtgaaattgttgccggagaggtcaagaaaccgaagcccggcgacagacagcagcgaccccggcacggcgccggagaggctgtttcccgagaggagcaagctcgtgaggttccctgacacgccgagatcgggcgggagcgtgccattgaccgcggcggagcggaggtcgagcacggcgagcggcggcgggaggccgcgcccgaaccacgccggcatctcccccgggagcgggaacccggaggcattgaacacctccagcgccgtgaggttcctcaccccgtcgacggcgaacctcggcgcccgtgcgcccacccgcgtgcggcggaacccggcgacggtgaccccgacgacgcgccccccgcggcaggtgaccccggcccacccgccaccgacgggtccaccctcgccggccactccctcgcccgtatccccagcgacgcccgcaggctccaccacgacgaggatcaccaccaccagcaaccgcctcaaccgcgcccgcagcgccat

SEQ ID NO: 12736 - DNA, 759 bp, Oryza sativa
  Clone ID: PAT_MRT4530_18837C.1
ctctacgtgaacaccttggccgtcatcaaatccgtggccctcaaggccgccatggacctcggcatcgccgacgccatccaccaccacggcggcgccgccaccctgtcccagatagtcaccagggtcacgtcgctgcacccgtccaagatcccgtgcctgcgccgcctgatgcgcgtgctcaccctcaccggcgtcttcgcagtcgagacgacggagccggtagacggcgcggcggccgacgagctgccggccgccgtctacgcgctcacgccggcgtcccgcctcctcctcgtcggctccgggaaccaccaccagcaggcgtcgctcatgtcaatgctgctccacccgagcttcatcgcctccttcctccggatcagcgactggctccagcgcgagctgccgggcccgtgcatcttcgagcacacccatggccggagcatgtgggagatggccgacgacgacgcggccttcaacaaggtcgtcaacaataggatggtctccgacagccgcttggtgatggacgtcgtcgtcagggagcacggcgaggtgtcccgcgggatcagctcactggtggacgtcgccgggggccacggcacggcggcgcgggccatcgccgaggcgttcccggaggtgagatgcaccgtgctggacctcccccacgtcgtcgccggggctcccgttggcgccggccccggcgtggagtacgtcgccggcgacatgttcgagagcgtcccaccggcaaacgctgtcttcctcaag

SEQ ID NO: 12737 - DNA, 1590 bp, Oryza sativa
  Clone ID: PAT_MRT4530_18838C.1
atggccgtctcgctcgtcgtcgtcgtcgtcgtcgtcatcgccatcgtcgtgccgctcctgtacctcgtgctgcttcctgcctggaagccggcgcggcgggacgacggtgacggtggaatgaggaggaggcttccgccgtcgccgccgtgggggctcccgctgctcggacacctccacctgctcggcgccctgccgcaccgggctctccggtccctcgccgcggcgcacggcccggtgctgctgctccgtctcgggcgcgtccccgtggtggtcgtgtcgtcggcggccgccgccgaggaggtgatgcggacgcgcgacctggagttcgcgagccggcccagggtcgccatggccgagcggctgctctacggcggccgcgacgtcgcgttcgcgccctacggcgagtactggcgccagacgcgccgcatctgcgtggtccacctcctcagcgcgcgccgcgtgctgtccttccgccgcgtcagggaggaggaggccgccgcgctcgtcgcccgcgtccgcgccgcgggcggcgccgtcgatttggtcgagcacctcaccgcctactccaacaccgtcgtctcccgcgccgtgttcggcgacgagagcgcgcgtggcttgtacggcgacgtcgacagggggcgcgtgctgaggaagctgttcgacgacttcgtggagctactcgggcaagagccgatgggggagctcctgccatggctcgggtgggtggacgctttgaacggaatggaggtgaaggtgcagcgcacatttgaggcgctggacggcatcctcgagaaggtgatcgacgaccaccgtcgccgccgccgtgaggtcggtaggcagatggacgacggcggcggcggcgatcaccgggatttcgtggacgtgttgctcgacgtcaacgagacggacatggacgctggtgttcagctcggcacgatcgaaatcaaggccattatactggacatgttcgcggcgggcacggacaccacgacgacagtgatagaatgggccatggcggagttgatcacccatccggatgcaatgcgcaacgcgcaggacgagatcaaggcggtcgtcggcatcaccagccacatcaccgaggaccacttggacaggctaccttacctcaaggctgtacttaaggaaacgctccggctgcacccgccgctcccactacttgtgccacatgaaccgtcgtcagataccaagatcctgggctatagcatcccggcatgcactcgaatagtgatcaacgcgtggactatcggccgtgaccaggcgacatggggagagcatgcggaggagttcatacctgagagattcctggagagtggcttggactacatagggcaagactttgtgctagtgccatttggtgccggtaggagggggtgtcctggggtcgggttcgctgtgcaagccatggagatggcattggcgagcttgctgtacaattttgactgggagacgagagtggtggataggaggagcgagtttgggacttcatcactagacatgagtgagatgaatgggctttcagtccgtctcaagtacggactacccctcattgctatatcgcgctttccttaa

SEQ ID NO: 12738 - DNA, 765 bp, Oryza sativa
  Clone ID: PAT_MRT4530_18839C.1
ttttttttttttttttttttttttttttttttttttttttgagtatttctgaacaatcatagacatctcgctgtaccagtaatcaaatcaatatccatgagaaaacacaatcattttccatgcacatggcaattatttgggcagcacactgcacacatcaggtttggtaattctatcagctgcctgcctagccttgcctctctctcttattttaaaagaaaaaagaaaaaaaaaggcagctgcctgaagctagcttcatcgagtacactggagatatagatcggatcgaatcactgtcgatcaggagcttgaagcatttgaatcatcatcatcgacggaggaaatccgcgaaccagtagctggacttcttgcgaaacctcgcgagcgtggcgcggtcgacatagatgaggccgaaccggtccttgaacccatcgccgaactcgaagcagtccacgaacgtccttctcatgcgcccctccacctcctcgcccgcctccatggccgcgtgctcgtcctcccgctcctcgttgcccacgcccacccgcgccgccgccttgcgcgcctcggatatggggatcgtgctgttattcgcctcgtcagtgccgttctcggtgatgtagatggtgggattgttgtatctcctcttgacgtacagcagcagctcgcgtagccccggcggatagttaaagaagatcggcgtgtaagccggtggaccaatcgggatgccattgcggtaacgtcgcgttgaccccattctgatgttgg

SEQ ID NO: 12739 - DNA, 620 bp, Oryza sativa
  Clone ID: PAT_MRT4530_1883C.1
aaaatttgaagcagcagcccttgattggctcaagatttgtgtaatggaatgcattgataagtatggtgacgattaccagtactccacagacccccgactcctcaagatctggatcctctatgcggatgcattatgtttttgttgaagtgaactttttgggcagcaataacctgatgtcaaatttgccatgttgatgtgatcgcaaaccatttctgtggtaccagaaaagccgagccacttgatcatttgaagaagacacatacaatatttttaaaacacttggagaagattgtagaagaagctgatgccgatgcccagccgaaaccatccaaaatgcaaaagaaagaacctattttgctggatccatggtctgagtctactatgaataatttattggagaacattaatgttgacctgaagaagttcgctggctatcatcagagcaacaaggtctatcatggaaaggtgccattaacttcgcctcagaatgttttaagaaacaaagtcactgaattaggtactggaacgtggagctgtggaaaaacctcttctgcacactgttcaacgcgacctccaacagcagcgaagcggctgtgctccggagcctccggatgtctttc

SEQ ID NO: 12740 - DNA, 407 bp, Oryza sativa
  Clone ID: PAT_MRT4530_18840C.1
cccacgcgtgcgttgacgcgtaagcacacgcgttcagatattcgtactcaatagctctatcgtaaaaacaggtcttaatcattatacagacgaactgctgtaactgagactagcaatattaatgatgatcacctttctttgacgacgctcattgttgtactattgcccgtcaacgaacgtggcggattgctgtacgctgctacctgcagaactgctaaacattacctatatcacgaagagaccacttttattaagggcggtgacaccctttacagttataatcgatgcgacgatgtatacatgttttgccattttgagactctaattcacaagctgcgttaatgttctaacctatttgacaacattgctcatcctttattatatggtgcaacctatggatgctttct

SEQ ID NO: 12741 - DNA, 1371 bp, Oryza sativa
  Clone ID: PAT_MRT4530_18841C.1
atggagcgggacaaaggaggtcgtcgaatccagccgctgcaagcccgtgttcaccctgcttatgactactctgggccggacgatgtgacccggatctcgcagcggggtcttgacagcgccaccgtagcccagagggtgtgccaagtgatgattagcctgccttcgaaggcggccgagatcctggccccgctctgtgagcaaggtggcacagaacgagctaccgccatcaacgctctacctctaacggacaccattggcccactcgtggatcaccaagcttccgccttacttaaggagaaagtctccaaggaggcttccgacgtcgctgctgctgggggcagcaggacgtcgaaacagaagaggtgggcgaccacagtcaccggcactgggtctcgtcgcaaggtgagcggttccgaggagcgagcagattcttattttaccatctcacttaggacgcgggcaacctccctccaaccccgagaagaagactgggcctcctcgacgtcattggcccacagcaggggtgaagtcgcaaccagcacgactaccgcagcggctgtgcttactgccactgctgtaatcggggatgcccctgtcgcggccgagcctgctcctgacgtcgtcatagccttacttgctcctcttccgccagctgctatcgagccactgactttgacgcagatgatggccgagatgaagcgcctcctcgacgttggtgctcgggggtggctcggcttcacaagccttcaccagaaggcgggggcgtgcggagttgaggccaagatcctggagcaccctgacgagacctcggtgacatcttcgctgttcaccctggcccaagcgatggagctaggtcgacgttgccacaagcctcctcaccttcgccaaccttatagtgtgggggacgacgatggcaacggcgggcggagggcggcggttgggattggagaggatggcgtaggcgtcgtggacgaggctgagggcgacatcggcgcccgggtgggggttggtctcctgcctgaggaggagggcgaggcagcggtaggcgtgggagacggcagcgtggtcggccgggttggtggccgagggaagctggatgacagcgagcgggtcggcgtggaccaaggggaggaccgactgggaagcgaggaggacgtcggtgacggtgaggagctcgtcggcaccagggaggggcgggtccacctccaccgcgcgctctgcgaaccgcttgcacctgacgaactccctcgccgcgaggagcttccccacgatctccaatcaccgctccgcctgcaccctcccggacgcgacgctacctccgccgctgccgctggccgcctccacctccgccgccggagaagtccatggtag

SEQ ID NO: 12742 - DNA, 101 bp, Oryza sativa
  Clone ID: PAT_MRT4530_18842C.1
atggcatgggcaacaccctgcgttatcaccatgttgcgcggcaacaccgagcgggacaagaaggacgcactagaactcgaaccttatcgttattctgtgtg

SEQ ID NO: 12743 - DNA, 162 bp, Oryza sativa
  Clone ID: PAT_MRT4530_18843C.1
tgggtttaagctgccttatggatttgtgatgacaaattcagtatccttcatcacacaaagcttacggacattttgcactaaccaacaccacctcgccacaaacccattgagcactttgaaaagcagagttcaactaatgcgaaaaagaaaaccacgccccaa

SEQ ID NO: 12744 - DNA, 505 bp, Oryza sativa
  Clone ID: PAT_MRT4530_18844C.1
ctatttgtacagtgaaagagagggataagtgatgtgaccatgactactatggatacaaacgttactcacatcatggatcaacaagcagccatcacgatcaagtcctccaagtgcttgaatccgattcggccacctgctactttgctgatttcaaatggccaccaaatttatatacgagctccgttttcagcctgtgagtacccgatggaaagatctcggagtcatctttccaacagatctagcctcatctgcaactttcatctgaattggccacaatcacataagcaaggtgttgcatcacctataatgggcctatgggcttgtaactttatctgagaccccggcccagttcaaggcccatgtgggaagcgccccaaccaggtagagcacgaccctgaggacccctttgtcatccacccatatccttaaatagctaggtaccctttcagggtttcttgggttttgtttagattaaagtttagcttcactattgttgatggctatt

SEQ ID NO: 12745 - DNA, 248 bp, Oryza sativa
  Clone ID: PAT_MRT4530_18845C.1
tttgtcttggcgtgggtgagagagatcggaggagatcccgtggcctcctggatgaggccgccgacacctgccatgctggccctggcccttgtggctcgcgctcgccgcggcggcactgctaggtgccgcggaggaagacgcggccactgaggatgcctacctgacgctgctagaccgagaccaacacgtcctccgtgtacgcgtgctggccaagtccatccagaacacgggtacgcaccgggacctgg

SEQ ID NO: 12746 - DNA, 228 bp, Oryza sativa
  Clone ID: PAT_MRT4530_18846C.1
atggcgggggagaggggtgacgcggcggggcggctgcaaaggctgacgaccatagaggcgagggcagcgcggtcggtggcgaggctaaggcaactcggggtcacgggtgaggcagctcagggtcgcggggcagtcttcctcctcgaatatgaacccgttgagatcagagatgatgctagatccctcttaccggcctccgtaggcaccggatggggtatgtctggctaa

SEQ ID NO: 12747 - DNA, 1851 bp, Oryza sativa
  Clone ID: PAT_MRT4530_18847C.1
atggtggcaccgatggccatggtatttgcaatggccatcgtgggggagattggatcatataccctcacttcagattggaaattaaggatttaccttcccatgccaatgacgtggggtaaccatggtcaattacatgggggtcaggaggattcagtagccatgaaaactgtgaagttcagcattgctggatcagtcatggctccagtgaggtcgcatcagaggttgctccaatgcatacattctctttggagaggacaaatctctggcagtcttcctgatcaacttgaaagtgctaaaagcaagatgagtgatgaagatgtccaacaaaacaagacaagaaaattgttggaggaaatccgactgagtgggtacaacatcattggtctatctttatctattcaaggggcattttctgatctattggatatttcatctttcaatgatgctatctttgaagatttagggtcaatggagtttaggcatttaagcaaacttatcaatcttgttttcgttcctttggacctgatggggggagagaaaggcaatgcttatgttgaaaataactttacatgttggttggcaaagcaaaaggaagatctccgtgcaaaggcattctgttctgctccaatggagtttaatggggagtggaactgggagtttgaagatgaattccaaaggtatcttccagtttattttaacatgttgcaagaagttgatgccatggacgacagtgcagagggtgattgttcgggcatgaatgctctccttcagaaattgaatcctcaattccgatccaagtatgccatttacagcagtgagcacccttatttgagggagatctcacgtatgcagaagggttctgaccgttcttatagtgtaattgaacgtcttgaagaaaacttggagatacaatccacttttgatgcttatgaagtggatcagtcggttggtgaacacaaggacttgcttttgcagatagttggtcaattaaccaatgcaaaagaaaacaagcagtttcagccactgacaccagaccctggagactttgcgccacatttgaagccttatgcacgtttctacattcagactaagctgaagatgtccatgtcagtttggggcttagcactgcctagagccctccacacaattaattgtatcaactttggcatacgtataagtgttatttacctaccaacatggctaactattcttagtggaagtgagaatgatacttatgctagggctgcaatgcaaatccatttgcacgaggattatgacaactatctagcttctggtcaactggatagccatatctactcacatgtctcagaggatttttctgatgaagatgttgaaaataatgcagtgccacagaaattctcagttttggaccatgatcttatccatttatctctcaagcgaagagctcagattgtggatatgcataatcaagtatgcacatactcgaagtgtctaagagacctccttgaaaatgagtcgcttaaagatcgtctgatgagtttgatgagtgagctcaatgctgaaggtttttttgacatcgacagtaactctgtcaattgggacaatgagtgtttctcaaagcttgtagaaaaattcaaaaatgaagttttcacaggacattcccttcccaggcgttacactattcaaggaattattgattattgggcaatcttacaagagaaggataacacttggcaaacctttgaaaaggttgttactggaacttccactaaattgattgcatatcttccacagttttggagggatacacgatattataaacatgagtactatgacatcgtcagggaacccttaaaaaagaatttttga

SEQ ID NO: 12748 - DNA, 888 bp, Oryza sativa
  Clone ID: PAT_MRT4530_18848C.1
atgtgcggggtatcaactagttcctactatgttcgtggactggacctggccatctggccatgccttgaaaagacctgtctagccctttcacagtgcaagttcgtggcgcgttacctggtctacgtggaggaaaaagcgagtgggccgcatagctatgattggttttcgcatctctctagaggaacgagagcctggcgccttgctctgcaaaaaggccggtgcagccttggtggtgagcgtggccgtggtcctccaaagccggtgaagcgggggagctcgtggagctggtggagtcaccaccggggcccgccattcgaccgtgtgccattgccgctcgaaacgagggcgctccagaccgccgtcgccgcctcgtcgatctcgagtggcggtggcgtcgtcctaagtccccatgctctactccacttcgccgacctcggtgtcgccggggagctcgtcgccgtgctgctgggtagctccccaaccaccacccttctccgcctcgaaacggaggccccgatccgcgctgccgctccagatccgtggcgccatcatcacccctccgccgctcgaagctgggacgagcccgaggatgtcgcctcctctccgctgggcgccgccgagggaaccccggccttgtccgaggatgtacaccgcagtaggactggagtatcgtacgtcctctcaaaaggaaagtgtcaaagccggccggcgacgatgccttccggctccgactccggctcctacgacccgctgctcgcactggacgacggcatggcggacggggatgtggccgccgccgccgccgcccccgtggaccaccgcggccgccccgccctccgcggcgccaccggcggctggaggtcggcgctcttcatcataggcaagtag

SEQ ID NO: 12749 - DNA, 518 bp, Oryza sativa
  Clone ID: PAT_MRT4530_18849C.1
atgaacccggctatcaccatgagaaaattgttcatgtctcattcacaagacacatgctgacgagtgcgcaagaacttgatgacttgcgtgccaattgcatacccaatgttacgtaacagctcatccggcaatgcgacgcgaggaactttatatggtgacccatttagcatgcctgtaaaagtggaccatgcgatctggacaaccatgccatgatcatgaacaaagcatgcagtcgtcacgaagtggtactcaagccactcgaacaatacccagacagccttacgtaactgcaataacacttgaagatatcttcttgttcctgcacaacaacacttcggcggattttccaccacccaagacatgatgtacagacttctgaccacagaagagtctcttagattgatcagagatagagccatgttaaaatctgactgacttctgcttgcgaagatcgtcagctatggcgtgcactatgctagccacaatgctcgcagacgcattctcagagtgctccggca

SEQ ID NO: 12750 - DNA, 1620 bp, Oryza sativa
  Clone ID: PAT_MRT4530_1884C.1
atgtctgatgatatcaagttcgtccttagtctgctgctgctaagcagcttaatgttgttcgtagcttctgatgacaccgaatgcctaaggactctgcagaaatcactggttgatccccgtggtgaactcgaatccacttggaatttttctggcaatggattcaacggtttcatatgcagctttactggagtaaactgctggaatcccagtgatagcacggttcgttctttacatctcgtcagtctgggacttcaaggccaatttcctgaaggtcttcagggctgcagtatgatagaagacttgaatttgtcaggacccatcccttctaatatctcattgttggttccacaattaagttccctggatctctcgtacaacagcttttcaggtccaattccagcctacattggtgtagagccttttcttgatctctttcgcttctactacgagctgcgttggatggagtccaacagggtatctggttgcgtcgggttccgacttcgggatggcctgaagtcgcgttatatccccttccagtgcccttcttctcgcagcaaatggcggaataggtggttctatcttgagatcaaagattcggaccccgtcttcgttgttcccaaagaacaacctgacaagatttcgtcttggaccgcaaagccccccttgaccccctctcttcggtcgtttatcgacatcatcgacgatctccgagtacagggcttgttggggtatgaagtcgttgcagacttcgtcggtctaaatagcgaagccgtggagcgccgcgtcggccaggctcttcctctgactgacatcatcgggccgctcgcggaccatcaggtggcggcgtctctaaaagagaaggtcgccaatgaggcgtctgatgctgctgctgccacaactagcggtggcaatgttccgacgaaggggaggaaattctcctctgtaagcggacatcgtcgcaaggcgtcgaccccctcgggaggcacgggcaaaggctgcgcaagccaagtccggagggacttccagcgcgtcgcccaccgcggcctcgacggatgtcgcgctcgcagccgggagccgggaggcgacgccttgcggcccagtcagcgatcccgtggcaggtcgtggtccactagctgcctcctcgaagctggtgctcgcggcatcggccgcgagattgcagaggcgaggtcgaaagcagcaccggcgaacgcgcgtgctgaacagctggtgcgcgagttggctgaagcccgtgaagacctcatgaagataagggaattggtggccggcaacgagcgacaacggaaggggctcgaggaccgcatgtcggaactcgggaacaacctgtcggaaatccagggttcgttgcgggtcacctacactggcctgcaccagctcgccggggagtgcggcatcaagtctaccatcccggtgaatcccgacgagttctcgctgacctcctccctcgtggaactggcgacggcgatgggggagatcccctccaagcatgcagctaggatcgcggaggagacgtcgaacgggatctacaccgaggcgtgtcatgtcctcgcgtgtgtaaagctgtcgcgtcctgaactcgatctgcgcgagatcttggattag

SEQ ID NO: 12751 - DNA, 478 bp, Oryza sativa
  Clone ID: PAT_MRT4530_18850C.1
aaagggccaactggggggggccccaaaccccaaggccacttggttcaaggtaaggggccagaaaaagggaggggccccccaaaaaaagaggctttaaaaaaacaacaaatccggggccccccaaaataggaccccacaaacgggggagggcccaacccaacccggggggaggccccctaaaaaaaaaaacaaccccccgttaagggcttgggttaaatgaaaaaagctggggggcccccgaagggaaaagggaacccgccaaaaagggggggggcgggggaaaccaggccgttcccccttttggggggtcaaaagtttggccagccgcgggggccggggaaaacctggggggccctagagggggacccggggggcccccctgggggggccctaagaaacccccggggggggggggacccaccgcggggggggggggccaacctttttctaaacccctttcagccggcgggggggcccc

SEQ ID NO: 12752 - DNA, 392 bp, Oryza sativa
  Clone ID: PAT_MRT4530_18851C.1
ttggggtatttgcgagttgggtgctatgcacatggggggaaccacattaacataccaagggatacatacatgtagcaaggttttgatgggctggcacatgaaggcttaatcagaggttattgttactgagatcgactgatgaaggaaatgtctgtgagaccaataatacaatcattggttctattaatgaaggccaaattacttctaatgttggaactactgttaccttcactgggaatgctaccgttcggatttaccaaactcatactgatcattacactgactatgctgggtctcttactcctttctatactgaagctaggtctacttcgtactggtttgggggcgctggttttattcaagatggtcaaggtacctgggccggtgctttt

SEQ ID NO: 12753 - DNA, 551 bp, Oryza sativa
  Clone ID: PAT_MRT4530_18852C.1
gccgaggggcgcgaaatgtacggtcgaactgccttaaaagtcaagtttttaacgtgtcgacaactaggcaacgtagagtgcccgaaaattttctgatttgggaatgagacagatcgaagtcgattttttttattgaattttgatcaagtggatctttttttaattgaatttttgcaagatagtactcgttggggttttgattggacatgtcaggagcgacatagaaatcatcgtttcttttttctctcaccgtgcatacgaatcctccaatggccaattgacggtggaaatgctacggtacagactacatagctcactctacgacggaaagcctactttctgactctcaccgtgcatacacagtcctctgcacaatgagcttgccgcaagcctgcgttctggtttagtcccaattttttcctccaacttttaactttttcattacgtaaaaacttttctacgcacagaaacttttaactttttggacatatcttttcaattttaattaaagtgtgaactaaacacaccctgcgtaacacggtcaacactgt

SEQ ID NO: 12754 - DNA, 2358 bp, Oryza sativa
  Clone ID: PAT_MRT4530_18853C.1
atggcggagcggctgacgcgtatcgcgatcgtcagcgaggacaagtgcaagcccaagaagtgccgccaggagtgcaagaagagctgccccgtcgtcaagaccgggaagctttgcatcgaagtaactccggcgtcgaagcttgcgttcatttctgaagagctgtgtattggttgtggtatttgcgttaagaaatgcccgtttgatgccattgagattatcaaccttcctaaggatttggaaaaagatactactcatcgctatggtccaaacaccttcaaattgcacaggttgcccgttccaagacctggtcaagttttaggccttgttgggacaaatggaattggaaagtcgacagcactcaaagtgttagctggcaagctcaagcctaatttgggacgatttaaaaatccaccagactggcaggaaattctgacatacttccgtgggtctgaactccaaaactattttacacgcatattggaggataaccttaaggcaatcatcaagcctcagtatgtggatcacattccaaaagctgtccagggaaatgttgggcaagtacttgaccagaaagacgagagaggcgtgaaagctgagctttgtgtcgaccttgaattgaaccaagttattgatcgaaatgtaggagatctttctggtggtgagctccagagatttgcgatagcagttgttgctgtgcagaatgcggaaattttcatgtttgatgagccatcaagttaccttgatgttaagcagaggcttaaggctgcacaagtcgttcggtctttgcttagacccaacagctatgtgattgttgtggagcatgatttgagtgtcctggattacttgtccgactttatttgctgcttgtatgggaagccaggtgcttatggtgtagttactttgccgttttcgattgcggagactcaggaaagtgctgaggagattgagacataccagcgatataagtaccctactatgagtaaaacacagggcaatttcaagctcactgttgttgagggtgagttcactgattcacagattgttgtgatgcttggtgagaatgggacagggaaaactacattcatcagaatgctggctgggttgttgaagccagacactgtggaaggaactgagattgaaattcctgaatttaatgtgtcctacaagcctcagaagattagcccgaaattccagcattctccactgcaaatagagcaactcatggaccaggaagttatcaatttatcaggtggtgagctacaaagggtggcaatatgcctttgccttggaaagcctgcagatatctatctgattgatgaaccaagtgcctatcttgattcggagcagcgcattgttgcttcgaaggttatcaaaagattcatccttcatgcaaagaaaactgcatttattgtggagcatgatttcatcatggctacctacttagctgacaaggtcattgtttatgaggggcggccttctatcgactgtactgccaatgcaccacagtctttggtatctgggatgaataagttcttatcgaatcttcttgtggagcttcccgcccataatttgcccaggccttcgatgtcctacgcattacttgttcagaagattcatgttgtttgtttctccacaacttacagtcgtggaaaatttaaggttgcaattgcgccgtcgctagccgctagggccgccgccgccatcgccggacttcccctcctcggctcctcctctaccagctacaaacctgcgtttacgatggaggaagaacgagaggtgcaagagcaagtgcctcaggttgcaagcgtggaatcccagagcaaacacatgagcgtgtcttattttaaccaccggctgcctgcaagtagtaccggtgtgtccgtgtctgctcgactgctctccctctcctccccgtcttcctccctctcccggtctccccttcggttgccgcgtcaccaccaccaccaccgggtcactgccacgtgggccccacacccccacctccgcgacctcgcggccggtgagccgcactgcgcctcccctccgctgggtacaaaccgagtgaccgatctaccacctccacccaccgccatcccccccaatcccccccacacgccgcgagatctcccgcctcctcctccacccgccatggatctcctccgcgaccgccgcctcggcgcgctgctggtggtggtgctggtgctggtgagcggcgcggcggtggaggcgtcgatccacacctacgacagggagccgttccgggaggtggggaacgcgttcctcctctccgggggcagcgagggcgtcgtcgccgacggggccgacctcgccgcccccgcctcctccttcatcaagtaa

SEQ ID NO: 12755 - DNA, 2517 bp, Oryza sativa
  Clone ID: PAT_MRT4530_18854C.1
gtgagaggagataccccctccctcccttctcttcctctcctcctcaccgcagctatcggggagcgccgccgccgccgccaccgccgccaccgctaggctttccttccccttcccccaccagaagcttctcgccggagaaggaaaggaggaggagagatggcggagcggctgacgcgtatcgcgatcgtcagcgaggacaagtgcaagcccaagaagtgccgccaggagtgcaagaagagctgccccgtcgtcaagaccgggaagctttgcatcgaagtaactccggcgtcgaagcttgcgttcatttctgaagagctgtgtattggttgtggtatttgcgttaagaaatgcccgtttgatgccattgagattatcaaccttcctaaggatttggaaaaagatactactcatcgctatggtccaaacaccttcaaattgcacaggttgcccgttccaagacctggtcaagttttaggccttgttgggacaaatggaattggaaagtcgacagcactcaaagtgttagctggcaagctcaagcctaatttgggacgatttaaaaatccaccagactggcaggaaattctgacatacttccgtgggtctgaactccaaaactattttacacgcatattggaggataaccttaaggcaatcatcaagcctcagtatgtggatcacattccaaaagctgtccagggaaatgttgggcaagtacttgaccagaaagacgagagaggcgtgaaagctgagctttgtgtcgaccttgaattgaaccaagttattgatcgaaatgtaggagatctttctggtggtgagctccagagatttgcgatagcagttgttgctgtgcagaatgcggaaattttcatgtttgatgagccatcaagttaccttgatgttaagcagaggcttaaggctgcacaagtcgttcggtctttgcttagacccaacagctatgtgattgttgtggagcatgatttgagtgtcctggattacttgtccgactttatttgctgcttgtatggaaagccaggtgcttatggtgtagttactttgccgttttcggtccgagaaggtatcaatattttcttggccggatttgttccaacagaaaatctacggtttcgagatgaatctcttacttttaagattgcggagactcaggaaagtgctgaggagattgagacataccagcgatataagtaccctactatgagtaaaacacagggcaatttcaagctcactgttgttgagggtgagttcactgattcacagattgttgtgatgcttggtgagaatgggacagggaaaactacattcatcagaatgctggctgggttgttgaagccagacactgtggaaggaactgagattgaaattcctgaatttaatgtgtcctacaagcctcagaagattagcccgaaattccagcattctgtgaggcacttgcttcatcagaaaatacgggattcatatactcatcctcagtttgtgtctgatgtcatgaagccactgcaaatagagcaactcatggaccaggaagttatcaatttatcaggtggtgagctacaaagggtggcaatatgcctttgccttggaaagcctgcagatatctatctgattgatgaaccaagtgcctatcttgattcggagcagcgcattgttgcttcgaaggttatcaaaagattcatccttcatgcaaagaaaactgcatttattgtggagcatgatttcatcatggctacctacttagctgacaaggtcattgtttatgaggggcggccttctatcgactgtactgccaatgcaccacagtctttggtatctgggatgaataagttcttatcgcatcttgacattacttttagaagagacccaaccaactataggccaagaataaacaaactggactccacaaaagacagggaacaaaagtctgcaggatcctactactaccttgatgactaatttgaaggcgtacagaatcttcttgtggagcttcccgcccataatttgcccaggccttcgatgtcctacgcattacttgttcagaaggttactttgaagctaccacagcttgaagcatgctaaataacttggctgcaggagtgaagtggtatcatcatcagttataaggctgagcatgtgatgctgacacttgagttcttttgctggtttgatatatatgatgatgggaaagagagatgttactgttaaactgagcaactttgtcaggatcggaagattgtgaatttttgtgtatttttgcattattgtatcgtggatttaccaactggcacccttaaatcgttggttttataggcataaagtttttgagctgttactcaaaataaaaaaaaaaaaaaaaaaaaatgagttattactgttaattcactttatcgagataataacgtagtttgtcttttttttattcagatttttaaaaatctgtattagacaaaaccgaggtttttctttgttttgatcggatgccagattcatttgcttgtgttt

SEQ ID NO: 12756 - DNA, 162 bp, Oryza sativa
  Clone ID: PAT_MRT4530_18855C.1
atgccggtgggtggaggtggtagatcggtcactcggtttgtacccagcggaggggaggcgcagtgcggctcaccggccgcgaggtcgcggaggtttgtagctggtagaggaggagccgaggaggggaagtccggcgatggcggcggcggccctagcggctag

SEQ ID NO: 12757 - DNA, 1272 bp, Oryza sativa
  unsure (1)..(1272): unsure at all n locations
  Clone ID: PAT_MRT4530_18856C.1
atgtggatcacattccaaaagcttgtccaggnaaatgttgggcaagtacttgaccagaaagacgagagaggcgtgaaagctgagctttgtgtcgaccttgaattgaaccaagttattgatcgaaatgtaggagatctttctggtggtgagctccagagatttgcgatagcagttgttgctgtgcagaatgcggaaattttcatgtttgatgagccatcaagttaccttgatgttaagcagaggcttaaggctgcacaagtcgttcggtctttgcttagacccaacagctatgtgattgttgtggagcatgatttgagtgtcctggattacttgtccgactttatttgctgcttgtatgggaagccaggtgcttatggtgtagttactttgccgttttcggtccgagaaggtatcaatattttcttggccggatttgttccaacagaaaatctacggtttcgagatgaatctcttacttttaagattgcggagactcaggaaagtgctgaggagattgagacataccagcgatataagtaccctactatgagtaaaacacagggcaatttcaagctcactgttgttgagggtgagttcactgattcacagattgttgtgatgcttggtgagaatgggacagggaaaactacattcatcagaatgctggctgggttgttgaagccagacactgtggaaggaactgagattgaaattcctgaatttaatgtgtcctacaagcctcagaagattagcccgaaattccagcattctgtgaggcacttgcttcatcagaaaatacgggattcatatactcatcctcagtttgtgtctgatgtcatgaagccactgcaaatagagcaactcatggaccaggaagttatcaatttatcaggtggtgagctacaaagggtggcaatatgcctttgccttggaaagcctgcagatatctatctgattgatgaaccaagtgcctatcttgattcggagcagcgcattgttgcttcgaaggttatcaaaagattcatccttcatgcaaagaaaactgcatttattgtggagcatgatttcatcatggctacctacttagctgacaaggtcattgtttatgaggggcggccttctatcgactgtactgccaatgcaccacagtctttggtatctgggatgaataagttcttatcgaatcttcttgtggagcttcccgcccataatttgcccaggccttcgatgtcctacgcattacttgttcagaagatttttaaaaatctgtag

SEQ ID NO: 12758 - DNA, 309 bp, Oryza sativa
  unsure (1)..(309): unsure at all n locations
  Clone ID: PAT_MRT4530_18857C.1
cgttcttcccgtgccgccgccgccgccgccgcttcatcccgacgccgaaagcccgaaacctaaacacctcctcttcctcgcacgcccatctccggattccaaccaaatctccgggatggcctcgacctgcttccgcgccgccgnccgcatggcctcctccgcctgccgctcggcggcctcccgctcaatcccctccgccgcgcggcgcggcgcccctcgcatnctccaggctgccggtggagcccgggtgaagngcgtnggttgtcgttgttgccgttgnacaggcggtggcgtgcgtcgaggttgacg

SEQ ID NO: 12759 - DNA, 1194 bp, Oryza sativa
  Clone ID: PAT_MRT4530_18858C.1
aacagctcttaaactttatgcctataaaaccaacgatttaagggtgccagttggtaaatccacgatacaataatgcaaaaatacacaaaaattcacaatcttccgatcctgacaaagttgctcagtttaacagtaacatctctctttcccatcatcatatatatcaaaccagcaaaagaactcaagtgtcagcatcacatgctcagccttataactgatgatgataccacttcactcctgcagccaagttatttagcatgcttcaagctgtggtagcttcaaagtaaccttctgaacaagtaatgcgtaggacatcgaaggcctgggcaaattatgggcgggaagctccacaagaagattctgcacagcaaggcaaaagaaaaacgaaattacttaataagtgaaaataagaattaaaaaatgatatgaaactactccagcataaatgagagctgtaggaacctgtacgccttcaaattagtcatcaaggtagtagtaggatcctgcagacttttgttccctgtcttttgtggagtccagtttggtttattcttggcctatagttggttgggtctcttctaaaagtaatgtcaagatgctatcatgcacaaaaggaaaaacaatagaaagcattagcctggggaaaacataaatgaaatactctgaaaaataaacagaagtgggacatctttcgacaactaaaaacagatatagaatgtcaaactctactgaaaaattaatcttttgaggaagttgcctacaactgaaccaaagacaaggatgcgagatggtattacaacaaacttgtggatctcttctcaatatttaatattcagaacttaccgataagaacttattcatcccagataccaaagactgtggtgcattggcagtacagtcgatagaaggccgcccctcataaacaatgaccttgtcagctaagtaggtagccatgatgaaatcatgctccacaataaatgcagttttctttgcatgaaggatgaatcttttgataaccttcgaagcaacaatgcgctgctccgaatcaagataggcacttggttcatcaatcagatagatatctgcaggctgaacatataccacattgcaagtatcaataagctgacaatcaagtcaatatttatataggcaatacagcatttaggtgcttagccacaaaaaagtactacggat

SEQ ID NO: 12760 - DNA, 183 bp, Oryza sativa
  Clone ID: PAT_MRT4530_18859C.1
ctccatgtgttcgtccacgcgtccgcccacgcgtccgttgaggtgcttgtgtcatgagggtcaaaagactacgtgacgaaaaaccaacgagtgctgtgccatctcaagattggcctttgacatgatggtagctctggcatgtcagaccaccgcattaaagatgttctttttgtgacctggggg

SEQ ID NO: 12761 - DNA, 372 bp, Oryza sativa
  Clone ID: PAT_MRT4530_1885C.1
atggttctgctcgaacgatcgccgttggtggtgccggaggcagccgccgctgccgcctccagcccgctccggaggccgtcgcctagggttcggagggaggtgccaccccctcccctcgatcccatcctcccctaccttcagggccagtcctggtgtatgcatttgcttatgccagtttctgacttggtattcaggtctatcaacaaggctatggatgagctcaggagaggcccaaaatttgaagcagcagcccttgattggctcaagatttgtgtaatggaatgcattgataagtatggtgacgattaccagtactccacagacccccgactcctcaagatctggatcctctatgtaattgattggctttga

SEQ ID NO: 12762 - DNA, 225 bp, Oryza sativa
  Clone ID: PAT_MRT4530_18860C.1
atggggaaggacccaatgtggaatttatcaagaaagagggtgagcgtgtccggccagagtcgaacgcgggtcgcggggagcacaacggctgcaccatgccatctgcgctacacgcagtctccaaaggccggcgtcaccgccgtagatggggttcggaatcacaaccctgcaccggcggaagtcgcggcacaaggagaagaggctggtgacgtcgtggcccagtga

SEQ ID NO: 12763 - DNA, 1410 bp, Oryza sativa
  Clone ID: PAT_MRT4530_18861C.1
atggagagggaagcaggaggtactgaacccgaacccatcttgggccgcatgattgcggttgaggattacatttcttgcggttttattcctccgccctccgaatttcttcttctcgtcttgaacttttatggcatttccttggtccacctgaaccccaattccatcgcgttcctcagtatcttctcttatctttgtggggcctacattggggtagagccgttccttgacctcttctgtttttactacgagttgcgctggatggaatccaatagggaacaaccagacaagattccagagtggaccacgaaacccgccctaactcactcgctccagtcgttcattgacattgtcgatgacctccaagtacgagggttgtcggggtacgaagtcactgccgacttcattggtttaaacagcgacaccgtggcccgccacgtcggccaggtcatgatcagcggcccggtgacggcgagcgacatccccgtccctctttgcgagaaggggccggttgaacgtgaagccgcaatcaattcggaatattttgacctcacaccatgcttatcttgctcaggcctcgaatgcgtctcccccgcctcagcgaaggcaaaggctagtgacgcttggcgaaaaggggagctccaagccgagatggagcgcatcctccaggccggtgctcgcggcttaggccgcgaaatcgaggaggccaggtcggcggcgtcgtcagcgaaccaacgcgccgacaaactagcgcgcgacctggcggaggcctgcgaggacctcatgaagatgagggagctggtggccggcaatgaaagacagcggcaaggactcaagcaccggatgtcggagctcgagaacaacttgtcggagatccgtggctcgttgcgggcagacctcgagagcgcgttggccgaccgagatcgtcgaatccagtactggaggacgaagttcgaggtggccgagctcgagagaactatggtggaagtggagaaagaccaagccgaggaagaccttcaaggtcgcgaggtgtggttcaactcgtacgtcgggagctgttgtacggcaatggttggagtctatagggagctccgagtatctcgcgggaatcctgaggagtcggcggccggatatatctcgtggttgaatggggcctacacccagctcgaaggaatcggcaagcgtatcgacgaggccctgaagcaggagtgccgtcgatcgagccgctatgccgaagggcatgtgctggcctgcatccgagatcactgcccacagctgcacctcgagttcctccacgaagcgttctcatgttctcggaggactcccgctgagattgacgatctggcgaagtcgatggcgccgctcaccgagaaggtctttcagtccatggattggcgttggccatcctggtag

SEQ ID NO: 12764 - DNA, 364 bp, Oryza sativa
  Clone ID: PAT_MRT4530_18862C.1
gcggaacgaggccgacgacgcggccgacctgaccggcagcagcctcgagtgcggcgactgcgacgactgcgccgggagcgtggggtgcgacggcctcatgtccttacggcgacgacaacccgagctcgtgtcctggctaatgcggcaacacactgcgaatactagaccaccaccaccaccaccaccgtgtgatggtttgattaccccgcatacctacggccacattacacagttgaggcaattaggtacgccgattgcaacagctggcaacgcttgtcgactgccagctaagtctccatggcggctgcgacaccagaaacctcccatgtgtaatgcactttgtgctcgcatgtatcaacttcac

SEQ ID NO: 12765 - DNA, 192 bp, Oryza sativa
  Clone ID: PAT_MRT4530_18863C.1
ggagaaatcattaataatataaatatatcgaaaacaggtggttaaacagagttgccaagagtcgatcgatcgctgtacaccgtgacaaattcaaagacgtctgtcataacttggataaattaatactagggatatattaaaggacccttgggcaagcgattgaaatagattcagcaatatgatggtattggt

SEQ ID NO: 12766 - DNA, 348 bp, Oryza sativa
  Clone ID: PAT_MRT4530_18864C.1
atgggccaccgcctcgtcgttgtgcttctgctggccttattagtagctggagccgcgcgcgcggcggagcaagctgcgggcgaagacggcattcgcggcggcgccggcgccgatcatcaggaggcggccgggatcacgggcgggctgagccggcggagcttcccggcggggttcgtgttcgggacggcggcgtcggcgtaccaggtggagggcatggcgctcaaggatggccgcggccctagcatttgggacgccttcgtcaagactcccggtgaaatagcaaataatgctacggcagatgttactgttgatgagtaccatcgctacaagatgatgaaacatgaatag

SEQ ID NO: 12767 - DNA, 2304 bp, Oryza sativa
  Clone ID: PAT_MRT4530_18865C.1
cccgcgtccgctctgccaatggtgatgtcaggcagagagtgtgagagagaaagaagaagcagtcaataaggaggaggagaaagaggagtgggggaagaagagaagagctagggatagattccggccatgtcgtcggcgttcggcgacttcggcccgctcaccgagcggcgccgcgccgagaaggcgcggcagcagcgcaggcgcatcatgatcgccctcggcacggtgtccatcatcattatcctcatcgtcatgggcgccgccgccatcacgtacagcgggaagaaatccgaggaggacgaaggcggctccaagggctcgtcgaaggggaaatcgaaaggcggcggaggtggagacgacgaagacggcggcggcggcggcggcaaagcggacctgcgcgccgtgtcgaagagcatcaagatgatgtgcgcgcagacggacttcgcggactcgtgcgccacgagcatcggcaaggcggcgaacgccagcgtgtcgtcgcccaaggacatcatccgcaccgccgtggacgtgatcggcggcgcggtcgaccaggcgttcgaccgcgccgacctgatcatgagcaacgacccgcgcgtgaaggccgccgtcgccgactgcaaggagctcttcgacgacgccaaggacgacctcaactgcacgctcaagggcatcgacggcaaggacggcctcaaacagggcttccagctccgcgtctggctgagcgcggtgatcgccaacatggagacctgcatcgacggcttccccgacggcgagttcagggacaaggtcaaggagtcgttcaacaacggcagggagttcaccagcaacgccctggcgctcatcgagaaggcctcctcgttcctctccgccctcaagggctcccaacgccggctgctcgccggggaagaagacaacggaggaggagcagcggacccccacctggccctcgccgaggacggcatcccggagtgggtgcccgacggcgaccggagggtgctcaagggcggcgggttcaagaacaacctcacgccgaacgtcatcgtcgccaaggacggcagcggcaagttcaagaccatcaacgaagctctcgccgccatgcccaagacctacagtggaaggtacgtgatctacgtgaaggagggcgtgtacgccgagtacgtgaccatcaccaagaagatggcgagtgtcaccatgtacggcgacggctccaggaagtccatcgtcaccggcagcaagaacttcgccgacggcctcaccaccttcaagacagcaaccttcgcggcgcaaggggacgggttcatggcgatcgggatggggttccagaacacggcgggggcggcgaagcaccaggcggtggcgctgctggtgcagtcggacaagtcggtgttcctcaactgctggatggacgggttccaggacacgctgtacgcgcactccaaggcgcagttctaccgcaactgcgtcatcacgggcaccatcgacttcgtcttcggcgacgccgccgccgtgttccagaactgcgtcctcacgctccgccgccccatggacaaccagcagaacatcgccacggcgcagggccgcgccgacggccgcgaggccacggggttcgtgctccagaagtgcgagttcaacgccgagccggcgctcaccgacgccaagcttccccccatccgcaactacctcggccggccgtggcgcgagttctcccgcaccgtcatcatggagtccgacatcccggcgatcatcgacaaggccgggtacatgccgtggaacggcgagttcgcgctcaagacgctctactacgccgagtacgccaacaaggggcccggcgccgacacggcggggcgcgtcgcgtggccggggtacaagaaggtgatcagcaaggcggacgcgaccaagttcaccgtcgacaacttcctgcacgcaaagccatggatcgatcccaccggcacgccggtcaagtacgacttcttcacttgaatccgaacgaccctagctacccgtagcggatcggaggaagtcgagaggacaggtaggggggtttcgttggatatatcttggatggcgaaagagtttcggctgtcactatacacgagtggaaatgttgcgaggtgtacgcatgaactcgcttgttgatcagatattgatcagagttgaacgcgtgctgtgtgccttagttttcatttgcgtttgtatactggctgtacgtatgtgtttatgtaactgtacatgatttttttttctcgatcatgattatatttgagtatagcagatcatttttttttcaaaaaaaaaaaacaaaaa

SEQ ID NO: 12768 - DNA, 1043 bp, Oryza sativa
  Clone ID: PAT_MRT4530_18866C.1
gggctgcaggaattcggcacgaggccgccgtggagaggattccatcctcctccctctccccgccgccgccgtcaatcccgaatcccgagggctcgggtggtcgtcgtcggtccgggatggcggggaggaagcggaaggcggaggcggcgcgggcggcggaggaggaggccgaccgggcgctctacggcgccttccgcggcgccgccaactcgctctcgcagctctacgcgctcgccggtgcccaccagcgcctctccttccacgccggcgagcgccacgccttggaaaaactctaccagtggatggtgcgacagcatgaaattggcttgaggctcacagtatctgacatagcatcccacatccagcacgagattgagtatggaggtgacaatgcattaacttcaccgagatcgcaacacgcattccagaatctccaagctccaatgcacatccccaacacaagcacgcagcagccgccatcttgttcaatcacaccatcaaacccttccaaggactctatgatattttcgaaagcgctatccagccctgtccggcaaaacctgcaactgtaccatgtacagcaaggcggtgacacaggatgctttgcagatggcattttttgccctggaaaccgtgactcggatcctgcagcatcaaatgattcgtcggtggatatgcattcagatagcccaggtcatgactcatgagccctgattcctgaatgagcaattaccattttccagtttgattccatgaactgcaatcaacaaacttgcagtaaagaagtggaattgccctcacgcaatctgggatctcaatttaatccctcacccaagttaacttgtaatttgtaactagctattgcccagttacctcagatataacgtgcacatatatatcatccatgtatgtactttcagattaaataatagctgacgtatcagtttcttttggtactaaacagtgaacactgatcagtaatttcagattgcaaaactttaagctagcttaaaaaaaaaaaaaaaaaaaaaaaaaaaaaaaaa

SEQ ID NO: 12769 - DNA, 207 bp, Oryza sativa
  Clone ID: PAT_MRT4530_18867C.1
atgacggcggcagatccattgggacggtgtgtccgatatgttgaacatgtaattgtcgtccatggtagaacatgtaacggtgaattgtttgttctggtttgtgatgtatttgttcttgtcttcttggtttgtgatggagaaattgcagatggggctaggaatcagggggctgagaatcggatccggcctacaaagatttttgattga

SEQ ID NO: 12770 - DNA, 744 bp, Oryza sativa
  Clone ID: PAT_MRT4530_18868C.1
aaatgtaaattgcacaaatataaatgcgacaatcaaatgagactaggagacaagagatttttcaccgaggttcggaaactcgccggtttcctacttcctgttgaggcgagcccaactccaccactcaaccacgaagctaccgcacgcccccttcgtcaaggggtgggcaaggcgggagccggcccacggagaggactacccaagcctcgatcactagggtagttcttccttcactccgaagaccgtgctactctacaacggctagcgctgtcagagggccccatcggcctggccggttagactggcgttgagtgggcggtcagaccgagccgaggccggtctgaccgccatcggctcggtctgaccgaatacggctccgtcggctttgtatcggccactccgagcagcaccatcccggcctccagggggccggtctgaccgcgcatgtgccgccggtcagatcggccttatgcgccggtcagaccgccgttgtggcgccggtcagaccgccacaatgtggccggtctgaccgcccttggtcaggccgagcccagtgaaagggcaaatgattgtgtgtgtgtgatgaaaaagatagcaaagtgaaaatgcaatgaatgcttcacctttgccgctaccgctacaagagagcagatcgaagatagcgtgttcgaacttagaggctgttacaacgtttcaccactgcaatagcatctcgctatagcgcttcagtataaattataaatt

SEQ ID NO: 12771 - DNA, 916 bp, Oryza sativa
  Clone ID: PAT_MRT4530_18869C.1
gaatgtaaattgcacaaatgtaaatgcgacaatcaaatgagacaaggagacaagagatttttcaccgaggttcggaaactcgccggtttcctattccccgttgaggcgagcccaactccaccgctcaaccacgaagccaccgcacgcctccttcgtcaaggggtgggcaaggcgggagccgacccacggagaggactacccaagcctcgatcactcggggtagttcttccttcactccgaagcccgtgctactctgcaacggctagaaaactagccgttgtagccctgtcagagggcccaatcggcctggccggtcagaccgacatggggtggccagtcagaccgccctcaacttggtctgaccgaatacggctccgtcggctctatatcggccaccccgagcaacaccatcccggccttcagggggccggtctgaccgcacaagtgccgtcggtcagaccgaccttgtgcgccggtcagactgcccgcttggggccggtcagaccggccagggaccgccggtcagaccgccacaaggtggccggtctgaccgcccttggtcaggccatctggctgcttagcctggcgtcgtcgccgtcgccgctcgggccaccgctccgcccggcttcaagaggaagacgaggtcgcgtggctcggtcgacagcgacctccgcgaggacgaccgtgccgccgcttgtcgtccgcgaggaagacgaggtcgcgcagcgacctccgcgaggaagaccccgccgagagtccgtcgttgcagagggggtagggggagggaggcgccggtgcggcgtctgtggcatccagcctcgatgatgagaggcaccggcgtcttcgcatccttgcccgccatccttgccccttgccgcttgccgtcccgcactgtgaccggccttatattagacat

SEQ ID NO: 12772 - DNA, 238 bp, Oryza sativa
  Clone ID: PAT_MRT4530_1886C.1
tcgccggggagtgcggcgtcaagtccacgatcccggggaatcccgatgagttttcgctgacctcctctctcgcggaactggtgacggcgatgggggaaatcccctccaacatgcggccaggattgcggaggagacgtcgaacaggatctacaccggggcgtgtcatgtcctcgcgtgtagatgctgatgacgaggatgtccagcagcgcgggcagcctgagtcactggcaatattccg

SEQ ID NO: 12773 - DNA, 366 bp, Oryza sativa
  Clone ID: PAT_MRT4530_18870C.1
tcaacagcgacgagctccatctcgacggcgcgacgagttccagctcgtccttgacggcggcgacgagctccatctcatcctcgacggcgcgaagtgctccatcccgaatacgcgacgagctctatcttggttcctcgaggacatggccctcgacatagtcacatagatgctgaagaagaggttcctgccctggcgagccttgaccacctcgccgaggtggtcgccgttccaagcatgcggaggcgacgcgatagcgatggcaatggcgacggcgctagacatggccaccgtcgaggacccgcggtatataagggacccctgggcaggacctaagacatcgaatatcaccgctaacacatccaccat

SEQ ID NO: 12774 - DNA, 708 bp, Oryza sativa
  Clone ID: PAT_MRT4530_18871C.1
atgtttagatggggcctcacgctcgtggccgccgagaagctcgacggcgtggacgaagcgggcgtggagggagctcgtccaccgcatccgcggggcgcgcatgctgcggcgggacgccgggaggaggcgcggcatgaagcgggaggaggcgaacccgccgccggcgccggcgccgccgtagccgtgtcaccggcacggacgccgccgccgccgtcggctgccgcagccgccacggcagcacatcggccgccgatgtactgccctcctgctgctgctgcggcgtcgacagaaatgtaaatttcacaaatataaatgcgacaatcaaatgagacaaggagacgagagatttttcaccgaggttcggaaactcgccggtttcctactccccgttgaggcgagccaaactctaccgctcaaccacgaagccaccgcacgcccccttcgtcaaggggtgggcaaaatggatgaacacaaagctcaagtggggggccggtctgaccgcgcatgtgccgccagtcagaccggccttatgcgccggtcagaccgccgttgtggcgccggtgcgaccggccagggcacgccggtcagactgccagtgtggccggtctggctgcccctgttcaggccgaacccaatggttgcatcgatgacataccaagccaccccctaatatcatcattgttaccaaggcgagggaggatagtagct

SEQ ID NO: 12775 - DNA, 752 bp, Oryza sativa
  Clone ID: PAT_MRT4530_18873C.1
gtaaattgcacaaatgtaaatgcgacaatcaaatgagacaatgagacaagagatttttcaccgaggttcggaaactcgccggtttcttactccccgttgaggcaagcccaactccaccgctcaaccacgaagccaccgcacgcccccttcgtcaaggggtgggcaaggcgggagccggcccacggagaggactacccaagcctcgatcactcggggtagttcttccttcactccgaagaccgtgctactcaactagccgttgtagccctgtcagagggccccattggcctggccagtcagaccggcatggggtggccggtcagaccggcctcggctcggtcagaccgccatcggctcggtctgaccgaatacggctccgtcggctctgtatcggccatcctgagcagcaccatctcggcctccagggggccggtctgaccgcgcaaatgccaccggtcagaccggccttatgctccggtcagaccgccttcttgcggccggtcagaccggccagggcacgccggtcagaccgccactatgtggccggtctgaccgcccctggtcaggccatgatatcgcccatcagaagtgacggagatgttggtggtggagacgaagttgcccatcaatgatgatgatgaaatccaccaaccgtggagacggagaaaccagtcagcgatggtatacgcaaccaacagtaatgacgactggtggcaacagagatggttagctgtgaagacgaagttgcccat

SEQ ID NO: 12776 - DNA, 2259 bp, Oryza sativa
  Clone ID: PAT_MRT4530_18874C.1
atggcgacagcgtggcagcggccgcgaggcgcgaggcagcggcacggggctcgaggcggcggcacggggcgcgagcgcgacggcgacgatggcgacggcggcgcggcgggcgagcggcgcaaggcggcgacgcgcgggctcggggcggctagggcagagatcaaatccagtgggagttattttgcgggactacaaacctgggatgatcccactggaccatctgatgaatatactttcaaggaactgcaggatgaatttattgctgcctgcaaaaattgtaacttgccctgggcatacaagatgccaatgcccgaacatttggaaagactcagagaacagaatgagtgcaagatgttagaaataccactgcacttgtatgtgaagcaaaaaaatattctgcctgctgagttagaaatcatggaactgaaagaaaggagtctttttacggaacgtcgcaaagtatatggacacttcaacttcttggtgaaagattcagatggcactcatactttgttttttgctgaggtggatctaaactgcaaagaggagaaggacgtttatctgtgctgtcctttggaagagaatgataatggatcactcacaagtaggaaggttgtgacgctgaacgttcatatcgatgtttggaagattggtgctagacaagtgtttgtctttcgacaacaattggcgccgtccgtggggagcctagccaaagtcaatgccgctgaagagaagattgacaagaaggagggtggttctgcagagcctgctgagttagagattatggagctgaaagaatatactcgttttcgtgaacatgggaaagtttatggacactacaactttgtggtgaaagattcagatggcactcttacattgttctttgctgaggtggatatcaactgcaaagaggagaaggatgtttttctgtgctgtcctttggaagcgaatgacaatggcggaagctatgtattcccccaaattccaagcgacggcaaccccgacgacgacgccgagggagccctagctacacgccctcaccgccggccatcaaccgcctcctccgctgctacttccctcgccgtgttcgccgtcgccaagttgatcgaccgcgtcacctccaccgctcttgtcgatccccgactcgccctcgccctcgccctcgcgatctgccagcggattcaggaacgatcagtcacggtgtatgtgaccctcgattcatcatgccgtcgcaagcactgtgatttcagtgaaggtgattttgcgggactacagatagaggatgatcccactcctagactacttagtcgatatatatctgacacgggactgtatgttactttaatggctacttacaagagcggtgtgttcccctcgtcatacgagattttatttcctgaacaagaagaggaggcatgcaagatggtggaaatagcactgcacgcatatgccaagcaaaaagatatgccgcctgccaagttagaaattatgaaagtgaaagaaaggagtctttttgaagaatgtgggaaagtatatgcacactttaactttctggtgatcaatgattcagatggcactcgtactttgttctttgctgaggtggattttctcaactgcaaagaggagaaggacgtctacctgtgctgtcctttggaagagaatgacaatggttctactctggaacggtgctacaatattgtgatgtacactgtggggagtctttcccccgtgagcgttcaaaaaaggaaggaacgagcaatctcgatcgatctcgatgtatatcaggttaaagattgcattgcacgcttccgggattgtgaggacgaattcaacaaactacgtgatgcttttgttgctgcatccaaacgccatatgaggccactcacgttgcctaaagagatggaagtactcaaagggaagcgtgatgtcaagatcgcgaaaatagcactgcacgcttatgctaagcaaaacaatattccggctgctgagttagaatttgtggaattgaaaggaagcagtttttttcatgaagatggcacaactactttgttctttgctgagacatgtccctgctgcaaagaggacagtggcatttacctgtgctgccctttggaagagaatgacaatggtaaatgctttggttgccaaaagtgtggcgtggaacttaggcatcccacttttgctgactatttcggtggccatagggatatctgtattatattctcagatatagatgatgaagttgcatgttatatttaa

SEQ ID NO: 12777 - DNA, 881 bp, Oryza sativa
  Clone ID: PAT_MRT4530_18875C.1
aagagatggatttaggtatcacacagaacaagtttataagctgccctaggtgttgtgaaatacttagaagaacatcactcaagaatctggtataggtgtgggttcaaagaaacatgcaagtgtgactacttgaccaataatgaaatgtaaattgcacaaatgtaaatacgacaatcaaatgagataaggagacaacagatttttcaccgaggttcggaaactcgctggtttcctattccccgttgaggcgagcccaactccaccgctcaaccacgaagccaccgcacgcccccttcatcaaggggtgggcaaggcaggagctggctcacggagaggactacccaagcctcgatcactcggggtagttcttccttcactccgaagaccgtgctactctacaacgcctagttttctagccgttgtagggctatcattgggccccaccgccctggccggtcagaccgacatggggtggccggtcagaccggcctcggcttggtcagaccaccaccagctcggtctgatcgaatacggctccggcggctcgggatcggcacaccgagacaacaccatcccggccatatggccggccggtcagaccagcccacacctgccggtcagaccggcctcgaggcggcggtcagaccggccgtgaccctgcggtcagaccggcacttaggccgcggtcagactggcccttcacccgtcgacagtgggggatagcccatcccacaaaaactagccgttggggtcaaaatccccaactctgtgccttgccggtcagaccaccattgggtggctggtcagaccggcctacattgtaaaggctagaaaactagcagttatagtgcattaaatgcactgacagcgggggggggggg

SEQ ID NO: 12778 - DNA, 365 bp, Oryza sativa
  Clone ID: PAT_MRT4530_18876C.1
ccgaatgtgggccgagacagcgcagctgatcggccattccattcgtcccgctgcctcgattctattctttgccgtcgccgtcgcacgctcatcctattcccccacaccgactccccgtcagctgcccagagctactcgcctgaaatgttcctcatgtactccactctgtgggtaaattatttccgtcacaagatgctgccatggaatgctgacaaggacctcagtcctctcctcactcagccatggtccatggaccaggggcatccgcgttgccagaaatcagatcctgcacctgcacagaaccctttcccgtaccagaaattttgcgtgctatgttcgcccattggcatggaccatgagttaag

SEQ ID NO: 12779 - DNA, 1311 bp, Oryza sativa
  Clone ID: PAT_MRT4530_18877C.1
atggcggcagtcttctgcggggacatgatcccggtaaagttgtggtgggagatcctgctcagggcaccaaccaaagacgtcgcccggtcaagctgcgtgtcaacgcagtggcgcggcatcgtcagcgacccctcctttcggaagctccaccatgacaggcatgccgtgcccaacctcaacgacggcatctccgacactttgctcgtcgccacgtctgacgtcgacggtgaaagcgtctccagcgtcttcccggctgcactggtctctccggcggtgacgggccaggcgcccatctgccgggtcaacaacccatacggctacagcctcaccaacgtctgcaatggattcctctgcttcgcctcctggagcagagccaaggtcatcgtgtgcaaccccgtcaccggcgagaagctggcgctccccagggctcctcaccttggactcgagaagcgtcgacgttactcgcggccggtcacgttcgccttggggttcagcccgaccaccggtgcgtacaagctgttccgctttgccgaccgcaggatggacgtgtacacgcttgccgctgctggcggttggcgccaacacccgtttcctcacccgtaccgcgtggtacaaaatacgccaactattgttgtaggtggtaagatatgcatgctgacagccaacccggcgtcgcatcagcacccaaacgatgttggcaaacccggtccggtgatggttgtcgatgtcgcaagcgaggagtaccgcacgtacaacccagcggactatgggtgcctgtgggccgacatggcagtgagcggctttgagctgcacggacggctatgcctggccatcaggtctgatacggaaatccatttctggaaaatgcctgttgaagaaatatccatgcgtgcttggctcgatggtgatacccacacgttgtgctacggagtggacaataagttgtactccagcttgcccctcccctatttgcaacgtcagcttgccgcccgtctgccattaccgcctgtccctcccccgtttgccacgtcagcttacctctcccgtcaccgcccgtctgccgtcaccgcccgtccctcccctatttgcaacgtcagcttgccgcccatctgccgttaccgcccgtccctcacccgtttgccacgtcagcttgccgccctaatggagggcacgctgatacctggccgtctccgggggatcggtgaccactacggcgtcctggcgctgtggaacccgctccacgcgccgttacgcgacgtgcaccgtacagcggtgtggcccttgagatccaaaaggcatcaagacaggtaa

SEQ ID NO: 12780 - DNA, 530 bp, Oryza sativa
  Clone ID: PAT_MRT4530_18878C.1
aatgtctctagaaatgtaaattgcataaatgtaaatgcgacaatctaatgagacaacgagacaagagatttttcaccgaggttcggaaactcgccggtttcctactccccgttgaggcgagcccaactccgccgctcaaccacgaagtcaccgcacgcctccttcgtcaaggggtgggcaaggcgcgagccggcccacggagaggactaccccaagcctcgatcactagggtagttcttccttcactccgaagaccgtgctactctacaatggctagttttctagccgttgtagggatgtcattgggccccacagccgtagccggtcagaccgacatggggtggccggtcaaaccggcctcggctcggtcagaccgccatcagctcggtctgaccgaatacggctccggcggctcgggatcggcacaccgggatggcaccatcctggccatatggccggccggttagaccggcattgaggcggcgatcagaccggccagcagcagccctcacaagtgaggggagtgggct

SEQ ID NO: 12781 - DNA, 392 bp, Oryza sativa
  Clone ID: PAT_MRT4530_18879C.1
aaatgtaaattgctcaaatgtaaatgcgacaatcaaatgagacaaggagacgagagatttttcaccgaggttcggaaactcgccggtttcctactctccgttgaggcgagcccaactccaccgctcaaccacgaagccaccgcacgcccccttcgtcaagggttgggcaagatggatgaacacaaaactcaagtggggggccggtctgaccgcgcatgtgccgccggtcagaccagccttatgcaccggtcagaccgccgttgtggcgccggtcagaccggctggccggtctgaccgcccctggtcattacaagaccacgaagggtccaaatgacatagagtttaacaaaacaacaaataacacacaatatagatcaatagcccatacccat

SEQ ID NO: 12782 - DNA, 759 bp, Oryza sativa
  Clone ID: PAT_MRT4530_1887C.1
ttatgggcgctcccgcgtgatggttacgtgagcgtcgcggacgaatggcacgacgacctcggtggcgatcttcttgagtggcttggcgatgagtgtgaggaaggtggcagcaccgtcgaagatgattgagtagatgtcgatggtgaactcggcggacattgtcaccagcagcttgacagggacggcgagcgtctgggcgttgccgataaggtggacgagatggcctcccggttgacgacggcttcgcggacacgggcggttcagcggcgtctgtgtcgttctcaacaagaacttctggatcagcctgacttggcggcgtccgcggctgctctgacaatctcctggatcagggatggcttggcgacgcgcgcccgtggctgctccgactattcccaacgctccatcaacgcgacatggggacggccatcttcggcagatggtgatcagttggtgaggatgaggaccactcggccggcagcgccggcgacgtccatggcagctctcgcgatctccgggggatggcgtgatgacgatctcagtgggagctggctggctgcactccacctgacacctttgtgatgaatagtgcccgaaatagcatctccggcgaggcagcagcctagctgtggacacgggtggctcgacggcgtccgcgactactccgatgatctcccggccagtgctctcttcatcttgacggcgcatgatcccgttggcgagacatggacgaagatgagcttggagaggcatccacgatag

SEQ ID NO: 12783 - DNA, 341 bp, Oryza sativa
  Clone ID: PAT_MRT4530_18880C.1
gggctcaacatgcacagccatttgaaattatactgacattgggttttacattcttcctcatatcatgattacaaaccattgtaaggtaatattgaacgataataacagctcaggaaaatatacgagttttttccaaacaaaacacaatcctttgcttatatagataaaagacttttaatttctccagcgagtgcagtaaaacctgatctcataatcatggcccggtgaaaagcaaagagtagaactgctgcaggtgttattgatcatgcagaagcagagatatatgggaaacaggaaatccagctgaacaactgtaacaaaccaacggggctggatttccc

SEQ ID NO: 12784 - DNA, 396 bp, Oryza sativa
  Clone ID: PAT_MRT4530_18881C.1
atgtggcctgtcagaccgttctactctgtaacggctagaaaactagccgttgtagcgctgtcagagggccccatcagactagccggtcagatcggcgttgagtgggcggtcggaccggcctcggctcggtcagaccgccatcggctcggtctgaccgaatacggctccgtcggctctgtatcggccaccccgagtagcaccatcccggcctccaggggccggtctgatcgcacatgtgccgccggtcagaccggccttatgcgccggtcacaccgccttcttgtggggccagccagacctgccagggcacgccggtcataccgccactatgtggccggtctgaccgcccctggtcaggccgagcctagtgaaagcaaatgtcattaccccccttga

SEQ ID NO: 12785 - DNA, 573 bp, Oryza sativa
  Clone ID: PAT_MRT4530_18882C.1
aaatgtaaattgcacaaatgtaaatgtgacaatcaaatgagacagggagacaagagatttttcaccaaggttcggaaactcgccggtttcctactccccattgaggcgagcccaactccaccgctcaaccacgaagccaccgcacacccccttcgtcaaggggtggacaaggcgggagctggcccacggagaggactacccaagcctcgatcactagggtagttcttccttcactccgaagaccgtgctactctgcaacggctagaaaactagccattgaagtgctgtcagagggccccatcggcctggtcggtcagaccgacatggggtggccggtcaaaccgccatcggctcggtctgaccgaatacggctccgtcggctctgtatcggccatcccgagcagcaccatcccggcctccagggggccggtctgaccgcgcatgtgccgccggtcagactgtccttatgcgccggtcagaccaccttcttgcggccggtcggaccggccagggcacgccggtcagaccgccactatgtggccggtctgaccgcccctggtcaggccgaaccta

SEQ ID NO: 12786 - DNA, 789 bp, Oryza sativa
  Clone ID: PAT_MRT4530_18883C.1
tccatccacccaagtccatcgttccgcccacagctccacaccatcaaccatggtccaaccccccgccgccgttgtccaagcccagccggtttcggaggtcgaggcgggagatcccgtcctggtccgggatttcttcaggcttctttctctggggtcggaggcatccgttccgcgagacggtgtcgtctgctgttacatggacgtatccgctctgttcctgtactacaggaacatgagcggcgttctggtgctggtgccgcatgtccgtccgatgtgcgacgccccgctgatggtgcagcagctccagaagatggagatgcggtcggattgggaaatcccaaatctggccgccctcaaggacgtcgcgaccgcctcagatgctcttgggcgcatgggcaagatgatgctgcaggcgcgccgcgtcctcaagactctgaagaattacccggatggcgaggagggattggagatactcttctacaacactcttctgggggaggcgctcaccagggcgcgcgaggccataccagccgtgataacctccgctgacctgctcgtgttcgacaacggggaggtgcggctgatggcgctctccctcgctcaccaagcgatgagcaccgtcgaggcttgcctcggtgctgtccacgagggaaagggcttgactgggcgtgagatgcaccgcctcgttaagaaggtccttcgcccgctgagctacctcaggaaggtgaaggtcatcgacctcccaaggttcaacccctttgacgtctgagttctgtcttggatttatct

SEQ ID NO: 12787 - DNA, 669 bp, Oryza sativa
  Clone ID: PAT_MRT4530_18884C.1
agatgttaccttaaaggagccctttgccatgagacaaagtggagcgaagagtgatggagcctccttgatggcaacaacggccatcttcttctgtaaattgcacaaatgtaaatgcgacaatcaaattagacaatgagacaagttatttttcaccgaggttcggaaactcgccggtttcctactccccgttgaggcgagcccaactccaccgctcaaccacgaagccaccgcacgcccccttcgtcaaggggtgggcaaggcgggagccagcccacggagaggtctacccaagcctcgatcactcggggtagttcttccttcactccgaaggtggtgaactccaaaccactcacaaaccggcgccgggcctcctccataatcttctcggagaggtcaccgggcaactcctccacaagccgtctaggaggcggcaacctccaagagtaacaagcaatgaccgaatacggctccgtcggctctgtatcggccatcccgagcagcaccatcccggcctccagggggccggtctgaccgcgcatgtggcggcggtcagaccggccttatgcgccggtcagaccgcccgcttggggccggtcagaccggctagggcacgccagtcagaccgccactatgtggccggtctgaccgcccctggtcaggccgaaccca

SEQ ID NO: 12788 - DNA, 800 bp, Oryza sativa
  Clone ID: PAT_MRT4530_18885C.1
ggccgccccttttttttttttttttttcatttcaattctggagtactgaattactggtaccaagacagaaggcacagtaatgcaactctgccaaatttctcccgtccatataagggaacaatcatgtctgctgcattggacaaaatatacagctatgcacacatcgaaggcttcgaagctactatagtgcatcttatttatgctacgagctttacatcttaagaagaaaggaaaggccaattagatgctccattcattttctacatctagacagagccaaaacacttcagtgaccatcttcctttggcttctcctttggaatatccccattcagtttcttgggaggtgcgtcttttgctgacctggacgcggcggaggcggattcctcctcgagccaggcacgaatctggcgggcgttgcggcggaacatcgcgccggacttgcggatgtcggtggtgaagaggagcgccgccgcgcccaccgccgccaccgtcagcacgaagttggtcagcgccatctctctctctctgtctctctcgctcgctcgctcgctggcggcggctgcgggttgtgccggcggcggcggctggaccggcgaatctatcccgtcgatgccggaattgtcccccacgcaatgtatctgggccgggccaatgggcctgtatatcgcgggcctaaacgggccgctggctaaggttatatccagtatattatgtattccctggaatcatgaataatcacgagggctgctacaaaacggggtcccgttgcgatgggatatacatattaactattttctt

SEQ ID NO: 12789 - DNA, 1470 bp, Oryza sativa
  unsure (1)..(1470): unsure at all n locations
  Clone ID: PAT_MRT4530_18886C.1
gcacgagggctggatcaaccatctgcccccgccacgcctcgtctcgcgctagccgtctcgcgtgcgtgcgcgcgcgtcgcgccgcgccnctcgttttggagccttgcgccccgctactttccccttgtcccgaacccggaatccgcctcggcgagcgtccttgctttgcttctttggtatctgtgctcccgtttgctttgccttgccacgcggccttcctcctcctcattgtctcctcccgtggttcggctcattctgttcttgggttgacgcgggctgcgtgcgtgcgtgcgtgcgtgcggaggcgatgtcgtcggcggtggatgccatctcctgttccaagggcatcgcggccccgccgacggaggaggcgacgaaggagcgggtggcggtggtgggcaagaacggcggcgtggagcacggcggcgacgccgcgacgatgaacgggaagcagtgcggcgaggcgccgcattgccgcaaggagagcaacgaggaggaggaggatgacgaggagaaggcccccaaggccatcgacctcggcccgcgtgtcagcatcaaggaccagctcgagaaagacaaggacgacgagagcctgaggcggtggaaggagcagctgctcggcagcgtggatttgaactccgtaggagagacgttggagcctgacgtgaagatcatgagcctggccatcctctcgcccggccggccggacatcttcctgccgctgccggtggagcccaacgccaagggcgtctggttcaccctcaaggagggctccctctacaagctcaagttcaccttctccgtcagcaacaacatcgtctccggcctccgctacaccaatgccgtctggaagaccggcatcaaagttgacagccacaaggagatgctcggcacgttcagcccccagccggagccgtacacgtacgtgacgccggaggagaccacgccgtccggcatgtttgcgaggggatcctactcggccaggacgaagttcctcgacgacgaccggaaatgttacctggagatcaactacaccttcgacatacgccgagagtggccggcgttgagctaatgatcagctgagccgtttttccggtggtggtcgccgagtagaagggtgaggcgccggccggccggcattcatgctgtgtgttactgtcgtcaccgttgggagcagaagtggacatttttttttttcgtctcgtttgcgtcttatccactcatttttttttttggtttgattcaccctagggttcttttgtatattgttgccctgtctgtcccggttgtttgctgtgttaacgccgtgttagacgtacgctttgtcagttcaagttgatgttatgctatgtgttatgtcagtgtgcgtgtttgagcttctgtcactctgtcagggtcctgtttcgatcgaactgcctgtttgagttcagagcaacgcagctgcatttcttgtaaaaaaaaaaaaaaaaa

SEQ ID NO: 12790 - DNA, 818 bp, Oryza sativa
  Clone ID: PAT_MRT4530_18887C.1
tttttttttttttttttttttttaataacaatcttcctactttatttcccactttctcatcctttggatgagagaattttggtttataacaaggaaattacatccttctgagatgatagaacagacccataacttatgggagaacaagatctaagacatcagattcaaggacagacttggaggagggcatttttgcatgtgccacttctcatccaaggaacaaaagaagttaacttaagaagaaggggaaaaaagatctatacctactatacaaaaatgactagtataccagggactgatcaatcaaagctcgacgatcggtccatcttcctcgtaaatactcttccaggggaagtgttcgcagcgatgaaatcgttgctgctgacagaggcagaatcgtcatcgacatcgaatgcaagattgatgtaggactggatgttgcggttattctctggcagtgtaaccacaggttcatcaccatcgctctcgtatgacaatcctacttctgatctagcccacttcagaataccattgtcgccgttaagtaacttcagaacaactgcaatgtgaggacggcgttgaggtgttggtctgatgcagagggaagcagcaagggtcatcctctccactttgttgcgcatggtcctctgtaggcaagttaggatccacaagttgtgtgagttttcctccctgtatgatggagtttgcccacatcactaggctctcctgacctttcggacaaccagtgcaaagcggtttcttgcctgaaatgagttcaagaagccccacaccaaaagcgtatacatcaattttgtcat

SEQ ID NO: 12791 - DNA, 331 bp, Oryza sativa
  Clone ID: PAT_MRT4530_18888C.1
caacagctccggagagtattctcgcgtgtgagcatactctcggtcactcagcatgtagtaggcttgtctttcccgatcatcgacaagggtgttaacgaccaaatttggtaatatcagcatcggaaaagagaattagatcgaagtggagtcgaaggcggagatcgattcgagaacagagcaagaatcgactggaatccaaatcggctacgattaggatcggctgggtccgagtaggactggagataaatatgggcaaaagtctgccgcaaagacttatgatatcttagagtttattagagataatagtcgtgtccggtatggacatatcttg

SEQ ID NO: 12792 - DNA, 375 bp, Oryza sativa
  Clone ID: PAT_MRT4530_18889C.1
atgaaaaacctcgagctgtcagatgatgctggagaggcatatgctattctcctgaaagctcaactgcctgaaaagagcgttccaccaccgcgtccgaccgccgacgcgaccggcggtgaccctccctcttcagccgttcgccggacttgcggccagactgatccccttcgccgccgggagcaagatcaggcggtgtccgcggcggggctcgtcgggatctgcccccatccatggtcgcacggcgccgcttctgactgctccgcccccgcgttgatgcgctgcccgcggcatcgagccgcaagcaaggttgaagtgaacttgatcaggctgcttgaggcagctcctcgacagcagaaccagactaagcttgtccat

SEQ ID NO: 12793 - DNA, 2049 bp, Oryza sativa
  Clone ID: PAT_MRT4530_1888C.1
atggcactcttcctggctgtggaaccatggagagggaagcatgagggtatctggttgcgtcgggttccgacttcgggatggcctgaagtcgcgttacattcccttccagtgccttcttctcgcagcaagtggaggaataggtggttttatcttgagatcaagaactcgaaccctgtctttgtggttcccgaagatcaaccggataagattccgtcttggaccgcaaagccccccttgaccccctctcttcagtcgtttatcgacatcatcgacgatctccgagtacggggtttgtcgggatatgaagtcgttgcagacttcgttggtctgagcggcaaaaccgtggagcgccgcgtcggccaagtgatgatcagtggcccgaccacggtgagtgacatccctgtgcccctttgtgaaaagggggcggcggaacgtgataaagccatcaacgctcttcctttgactgatgtcatcggaccgctcgcggaccatcaggtggcgtcatctctaaaagtgaaggtcgtcaaggaggtgtctgatgctgccaccactagcggtggcaatgttccgacaaagccgaggaaattctcgtctgcctcggacgcgtctcccccacctccacgacgacaacgcattgtgacgatcggcgagaaggaggcgcggacaaaggctgcacgagccaagtctagaggagcttccagtgcgtcgcccgtcgtggcctcaacggatgtcgtgcccgtagccgagagccgggaggcgatgcctagtggcccagtcagcgaccccgcggtaggtcgtgatctgccagctgcagtcctcacctgggaggagctccaagtcgagatggggcgcctcctcgaagccggtgctcgcggcatcgaccgcgagattgcggaggcgaggtcggaagcggcgacggcgaacgcgcgtgctgacagactggtgtgcgagttggttgaagcccgtgaagacctcacgaagatgagggagttggcagccggcaacgagcgacaacggaaggggctcgaggaccgaatgtcggaactcgggaacaacctatctgagatccggggctcgttgagggtcacctacactagccttcaccagctcgtcggggaatgcggcgtcacgtccacgatcccggtgaatcccgatgagttttcgctgacctcctctctcgcagaattggtgacggcgatgggggaaatcccctccaagcatgcggctaggattgcggaggagacgtcaaacggaatctacaccggggcgtgtcatgtcctcgcgtgtgtaaggctgtcgcgtcttgaactcgatctgcgtgagatcttggaccagggggcggccagcgacacgcgtaaggaggtgatggaagaagtcggtgatctgggggagtctgttctccccctttttgaagaagatactgatcacgaggatgtccagcagcgcgggcagctcgagtcactggcagtaattccggtactcgagtttgaaccacacgtctcgcctgaccatgtggatcaaccccttgatatagagggaaggacggcgacgacttcctcagatctcgagggtgtccttgctagccaagatcgttgtatccaatactggaagacgaagtttgaagtggcagagctcgagagaaccatgctggccatgaagaaagagcagactgtggaaacgctccgaggtcgtgaggtgtggtttaactcgtacttgaagagttgctgcacatccatggccagagtatgcagggagcttcgagtagtccgcggagatcccgaggagtcggcggccgggtacatctcgtggcttaatggggcctgtgcccaactcgatggaatcggaaagcgtatcgacgaggccttgaagcaggagtgtcatcgatcgagccgatatgctggggggcacgtgttggcttgcctacgagatcatcgcccgcgcctggacctcgaatatcttcgtgagggttttgctcgttctcgaaggactccggcggagatagaccatctggcaaggtcaatgtcgtcgttggccgagaagatcttctag

SEQ ID NO: 12794 - DNA, 222 bp, Oryza sativa
  Clone ID: PAT_MRT4530_18890C.1
ttttctcttgggccacgactcccgcggtaaggcgcgggcacggttgcaacttccagggctcgcccatcggcgtgttcatggacaacacccgcctcgccatcgctgtcatcggcaagctcatgctcgcccactttctctcatctcattaactacttttacaacaactgcctgccattcaacctgtggggcggtcgcaacccgagctaggactacgggttcaag

SEQ ID NO: 12795 - DNA, 783 bp, Oryza sativa
  Clone ID: PAT_MRT4530_18891C.1
atggccgcgagcgtgttctccgtggggagaaaaagcccagcccgagagcgccacggcccaggcaatgtcgccgagacctcagggtgggctgaatggaaaattgtcacaggaatcaagcaaaagatgtcaaacagagccacgcactggtgctacgtgtgccggcggccggttcgcatccgcggcggcagccaagacgtcacctgcccaagctgcgacgacggcttcgtccaggagatgagcgagatgggacggaggacggcgagcagcacgctcggtttcgtcgggccagacgccggcgacgagttcctgctccggcgatccccggtgatggaggcgatgtccaccctcatgcggcacgcggcaacggtgggcggcgacgagcgcgaggtcgacgtccacgacgagcatggcggcggcgatggcgtgcctgcgcacgcgagactcggcgtcctcttcaggggagggccccgtgtcggcgtcgagcgccgcggcggatactaccgtgccggtctggaggcgctcttcgagcagctgcagaaccagctggggagcagcaggcagggccctccaccggcgccgccgtcggcgatcgacgcgatgcccgtggtgacgatcagccgccggcacctccgcgccgagccgcggtgcccggtttgccaggacgagttccagctcggcgccgaggcgcgggagatgccgtgcgcccacctgtaccacgccgactgcatcgtgccgtggctggcgaggctcgcgctcgttcctctggccgtttgggccgactag

SEQ ID NO: 12796 - DNA, 2803 bp, Oryza sativa
  Clone ID: PAT_MRT4530_18892C.1
ttttttttttttttttccttccagaaaggggaggatcatttttataatgaccagttacataaattagctagttttcaagcagcttcagggagcaactgaagtgatcttgcaaagtacagtaaaaaagattaaagatacatttcatttttatacaccacatcagtggacacaataagcctcagcatattaccttacattttgcattactatgtaccagtttcctcgtcaaaaagcataatgcaccctccctcttttgctccatccatctcttgcaaacaaaatgcgaagatcaaaagaaaatgtgctcattgcacagaaaaaaaaaggtcctgttgatcattgtttacaaagtaccaaactaaggtactttacagtcagaaatttcagaagcaaaactggtgcaccagatagaagttaataggccagatcatgcaggtgggttagatctgcacaccttataatgcaggtgaattagattgtgaccagaagtctgagaaagagctaacccagtaaccctgcaatgatataatagctagcatggaccataaggagacatgttatcccccttcatatgcctgctaaagaacgccatcagttgtcgcaggcaccaagaagacagatacttcattccagtggatatctcaccttggaagacatgtacttccattgattccacgctgaaaattagcatccacagcagacctatagtgatggttcaagattagccaaaaaggccacgatctccattgttcccttgttctttcatccgttgttcttccagaggatcagggctcttcatatgtttcttgaagcgcctgtcttgctcatttagagcaggaaatgttggcatgaaatcctttgatctaggcagaggtagttcgcgaaaccattcatgattcaaggcatcttctgctgatatacgcttctcagggtcatatgtcagtaatctatttagcagatcaaatccagcttctgacaacatcggcccaccagtgaatgatacagctcggaacttgtcccttaatctattgtgcgtttgtttgccaaatttgacggtggcaccaggcaacttagaataaccaggccatatattctcatcaggcgtgccaagtgttctaaatatcttatcaagttgatctatctcgcttttcccattgaacagtggcccttttgataagagttctcccataatgcaacccaatgaccacatatcaatagcagtagaataatcctttgcacctaaaagtaattctggagccctgtaccacaaagtcacaaccaactgggtgtaaggctttaacgggctgccatattgacgagagagtccaaaatcacatattttcaactcaccgcggttgttcaagagaagattagatgtcttgagatccctatgaagtacccaattgtcatgaagatacttcacaccttctaatagctgaagcatcaagcatttgacctcactttgactatacggttgtttcattgtctccataacacccttaagatcatgttccatgtactccatcaccatgaaaatatctctgtcattactaccaacaactacttccttgacttccacaatcgaagggtggtggaaggataacaagatattcatttccctaagagaagtcagtgggaaaccttccctttccttctccatcttgaccttcttcagcgcaacaatctcaccagttctcttatccctcaccctaaatacaactccatatgtaccctcattgattgtgttgagtctttcaaactcatcaacgctcctacaaccttgaagcatgttaatgcacctacgtggggaccgtgtacactcaggggtttcagacctacagtcctcaccttcaaaatcagaatccagcaaatgaccagcaggataatcatcatcagccgcctcctcaacatctatgttgtcacccttctccacttcaaggtcccggtttgcactaccctgtaatacccccgagtcagatgaccttgaggagcttctcactgagttatacaccagcacctctccagactcagggcttgtaaccttttttgtggaccctcgttcaatcgagtcgacaggtgacacgctcttctttttcttgggcacaaacacattttcctcctcgtcgccagcatctgcccatcttgaggtcagaatgtttctcattgttgggtatccctcttcctcctcatccacaatcctgttcttctcatactcctgtaccttatcaactgacacatccaaaatcattggcgagtgtccatcgcctatgctagacagtgagctcatgacaggcaaggaatgcgactgatgcataataatctcagcaactacagcatctacctctctaatgcccctcacagggtctcgagcctgccgctttgaaccattcctgtcccaaattactggagattgcttcctcttcttactcggggacatcttcgcctcctccttgctgactcgcgtgacaccattctccctcggctccccggtcttcattgggcgctcaccggacctctctgagccactcccacctgagacctcgccgggctccctgtcctccgtcctcccttccgatggacgcctcctcggtggtggacgcggcgaatcccggcggtggctgtacccattcgacagctcccggccaccgctgcgcccgccgtcacggcggcgttccgagtcgcggtggcggctcgggtggcggtggtggtagtgctccttgctcctcctagagacccccacgtcgtgctcccgctccctcgccacctcgtagcccctgtaccccccgtggctccccgcagccat

SEQ ID NO: 12797 - DNA, 1661 bp, Oryza sativa
  Clone ID: PAT_MRT4530_18893C.1
taaattaattaggggcaactaaaaaaaagttaagacgttgcaaggcacgggaagtaaagcttggacctttaaaacggcccccccaaaattatttttatttaaaatatataattttaaaatatacaacaagccttgcaaactaatcagtcatcttctcaatcatcatcatggggtagtacatatacaaaaaaaaaaaattacagctcaaattattaccaaatgcatcgatcgatcgatcaccaccaatattatgatacaggaaaagaatgcgataattaaccccaaaccaaaataacaaaaaaaaaaaggcaatgcatgcagccctttgtgtcactgcagcgtgggccccacctccctcttgatcctccccttttgacagcgccactccacctaattatttcggtcccttggattctcgatcgcttccttcccacgccaaaaaaagccacacgtctcactgatccctgggccccacctcctccatcccctagtcctagctggcagttgactagccatccatccagaccgtccgatcgatcgatctccgcacgaatctcaaagatcgatcgatcgatcgaccgggcacgaatctaaaagatcgccggagcttagttgggcttccggcagttggagcggacctcgccgctggagccggtgagcgggctgatgttgcccatcttgacgacggcggtgacgaagtcgcgggagaaggcggcgccattggcggcgtactgctgcgcgatggagtcgacgggcccgccattgaagagctcctggtcagagtggaggaggccgaagcggcccatgaggttgcggaagtagccgttgtcgaagcggacggagctgagcgcgtcgagcggcgccaggttgccgtcgccgccgctcgccgggcacacctgccgccggcggacggcgaacccggggctgatgttggtgtcgttgtagacgcgggcgcggaaggtggcgcaccgggcggcgccgatggtgtgggcgcccgacagcgccaccatgtcgcgggagtcgagccccttggacgcgaacgccgacaccagcgccgccgcgctcgacgacggcgacggcaggttgctgttcgccgccgactggctcgccgtccgcgtgtcgcgccgccccagctgcaccgcccacgtcggcccacccaacaggttgacgccgtcgcgggcggcgacggcgaggatgtcggcgcaggagacggtgccggggcaggcggcctcgacctgcgacttgatggagtcgatgacctcgaatccgcgcagcgagttggcgttcggcccggcgttcttctcgccggtgatcgtcgacgagtcgtccagcagcaccgacgcgtcgcacccattgacgaagcagtcgtggaagaagaggcggaggatggaggcgcccatgcggggctcttgctgcacggcggccgccatggccgacctcacgatggactgcaggctcgggcagctgccgtcgtagtacgtcggcgtcagctgcgccgccacctcgccgggcgccaccaaggcggcaatggcaaccaccaccaccattctcctcaccagcacggctccagccattgctatgactatgagcttagctaattaagctagccactcactggcccttttggccttgttgacctgggagtacttgagtggtgccga

SEQ ID NO: 12798 - DNA, 243 bp, Oryza sativa
  Clone ID: PAT_MRT4530_18894C.1
atgtcaggcggggaggagaggaggagcagtggtgaggtgagtgaggaggaagccgtagaggggcatcgcctaggagaggagaggaggggtagcgtctacaaagctgcacttctgttaatatctcaatggaaggatgacagccaggatgacggccatgtcaaacatgaggatggcaagacccgcaaagttgacaacaaacgctttgctcatatagccattgatatggaagatgaaccttgttag

SEQ ID NO: 12799 - DNA, 744 bp, Oryza sativa
  Clone ID: PAT_MRT4530_18895C.1
atgatgtcgtcgccgactccagcgccgctgctccccgtggccccgcttgacggcggcggcgggtacctccggtggaaggagtccgtgctgctccgcctccgcaccctcgacttggcctacgtgctgtccgagcaccagccagaggacgggaggagtgattctgccaagaagaagcgggcgcgcgacgacgagctctgccgcggccacatcctcgccacgctctccgaccgcctcctgccggactacgcgcaccacgccaccgccgcggccgcgtggcgcgccctggcgcgcacctacgacatggacggcaagttgcccaacttgccgctggaccgcttcttcgcatacaggttcgtggacggcgagcccgtcctggagcagctcgcgcacctggaggccatgggcgtcgccggcaagctcgatgaccgtacaatgtacggcctggtgcaccagaagctcccgccggctctggtgaaggccatcgctctcgcgtcgccgccgtacccggaccctccatccatggaccacatctgggacacggctcgacttgaagagaggatgcgtttgtgcggcgaaattcgccgtggcgagcacactcaggacaaggaagacgacgacgaccaaggaggaggagactacccagatgaagatcaccggagcccgaaacggaagaggcgatacgatcgcgggccgtgctacaactgcggcgagccggggcacatcgccagggattgcagaggatga

SEQ ID NO: 12800 - DNA, 462 bp, Oryza sativa
  Clone ID: PAT_MRT4530_18896C.1
acagcaacattaactatacacatctgtcccaagttcattagacatcagtagtagcatattgacatggatcagtttagttcgagtcatgcggcaaaagaaaatcaaaatcattcgtcagatgcaacaggaaaacaaaattattcgtcaggtgcagcagcgctgatcacaattcacaaatgccgcatcaggtgcatccagcgaagcagcctgcatcaatgggagtaggtaatttaaggaggttattacataagtacatggatagttcaaatcttacaggaaaagggagatttcgaacaagtccaaattataagaatgacgtggttttacggaatatggaaggtggacaaatgcgatgaaagcgtgtctgaaattcaagtaacttggatccaatctgcaaattaagggatgctgaaactccatgagctagatatttgatttgttgctatggattctcagtgaact

SEQ ID NO: 12801 - DNA, 175 bp, Oryza sativa
  Clone ID: PAT_MRT4530_18897C.1
aagggaaaacctgcgtggcattttttttcaaatttgtattaccccgatgttttaacttggcacacacgaaggggggggggtttattttttcctctcggactaatatactggtacaaattaaaacccgataccccccgcggggggaattctaaagggggcagggttgtaacttggg

SEQ ID NO: 12802 - DNA, 405 bp, Oryza sativa
  Clone ID: PAT_MRT4530_18898C.1
ggttttgtttaagactggagcaccctgtgcctcagagcgccttgccaaatacaaccagtttattaggattgaggaggagcttggctcggctgctgcattcgatggggccaagttacgagcactcggggagcgcttctaaacttgatggtgaatatcatgcggtttatgcccactgttatgtgcatgggtttggtgaagacaggatgctcatttttatccggattttacttaccagtctaactgtagataaagagctcgttgagcctagaaagacattcttcagtgagtgagcagacatgtacccgcaatcttgctccaatcttggtgatgagtaagactgagcttgggtgttttatgaccctgttggagcgtggatacacagagtctggcttttgataatattgc

SEQ ID NO: 12803 - DNA, 1107 bp, Oryza sativa
  Clone ID: PAT_MRT4530_18899C.1
atggcgtccaagtacgtcgtgttggccatctactctgccatcctcatcctgcacggcctcatcaacagccttcccatacgatggctctcctggtttggccaacttggagctttctggaacgttgcaggtgccttttcgctgacgatcttgattccagcggttgccaaggagagggtgagccctgagttcatctttacccatttcaacgcagaaaacggcgcgggcatccacgacaaggcatacattctcgcagcggggttgctgatgagccagtactcccttatcggctacgatacatctgcacacatcatagaagagaccaagaacgcggattggagtgggccaattgggatcatcacgtccgttgcactgtcaaccatgttcggatggatctacctgattgccctgacatcgatcatgaccgacataccttacctcctgaaccccagcaacgacgccggcgggtacgccatcgcgcaggccctgtacaccagcttccaccggaggtacggcaccggcgccggagcgctcgcctgcctgggtgtcatcgccgtcgccatcttcctctgcggatccgcgtgcatcaccagcaactcgaggatggggtacgcgttctcgagggacggcgcgatgccgctgtcgcgcgtgtggcaccgcgtggacagccgcgaggtgcccctcaacgtcgtctggctctccgtcgccgtggccttcgtcatggctctcacgtcgctggggagtcaggtggctttccaggcgatggtgtcgatcgcgacgctgggtttgttgatcgcgtgcgcgctgccggtgtttttccgcgtgacgacggcgcggagatcgttcgtgcgcgggccgttccacctcggcaagtacggggtcatcgtcggctgggtgggtgtggtgtgggtggccaccgtcacggtgctcttctcgctgccggtggcgtacccggtggccaaggagacgttcaactacacgccggtggccgtcggtggcgtgctgctgctcagctcgtcgcgtgggtgcttcacgctcgcttctggttccaagggcctgtcaccaacgttgacacgtacaacgtaccctgaatttgtatccctggattag

SEQ ID NO: 12804 - DNA, 284 bp, Oryza sativa
  Clone ID: PAT_MRT4530_1889C.1
gaggggacagagggacaagacacgggaaccggccggacccaacggaaaaaggggggacggaaaaacgaaccgcagaccgcgaggcgcggcataccagccaaaaggcagtggcacgcgacccgaagaaacggggggcaaacggcagggtcacacggccccccgcgggggaaagactgcggggcaccacctccaatgaggcaatggcgaaaacggctagtcgcgctagggcggcaaacgacggaaagaaggcctcggggagggaattttgtggcgggcacgtgtag

SEQ ID NO: 12805 - DNA, 459 bp, Oryza sativa
  Clone ID: PAT_MRT4530_188C.1
atgaaaaagatcagaagctacatcaccgtacccgtggttggagatcaaagcgcctctacagctacttcgtttaagccagtgaaaggcgtgacgcctcctcggtggctcgctcgtgaactcgtgaggcgcgaagtgccggccgccggcacggtaaggcccgagacgcgcgcgctcagctcgtgggatgccttgaggccagaaccctcgcagttttacggcaggaagagcgttcgcgcggctgagcccacgttgatgaaacagctagctagtagcctagtagtacgtgcttgtatacaggcccataataccagcgatcatattgtctgctgcttgtgtaaatgtgtcttcttaatcaataatattgtttgcgtcatgttcatgttcatgctcatcctcatgaataacaacacaacttccctaagtcgtggaagcacagaaaagataaaaaacgatggcact

SEQ ID NO: 12806 - DNA, 911 bp, Oryza sativa
  Clone ID: PAT_MRT4530_18900C.1
gaccctaaaagaagtggacatcgaggttttggttttgtcacctttgctgatgagggtgtggcagatcgggtagctcgcagaagtcatgaaattctaggacatgaggttgcaatagacactgctgcaccacttgagggtgactctggtggtggttacatggaacccatggatctttatggggcttatggttcaatgcgaacttatggcaggttctgcagtggtatcgactatgattacggttatggtcacagcggaatttacctccaagggaactgtggaaacggagaaaagaacaactccataaagaatgccagttctctatctttgtgtttcccacttctacttcctctgatggccaccgtcgccgtgttcttcccgctgccggtggcgaaggaagccttctacaacacgccggtcggccggtggccgtacgtcggcttcttgcgaaaaacttaccagcagactgcggtgaattgcaagaccaatgggatgactgcggtgaattgcaagaccaatgggatggcttcgataaatagatcgacagcgatgtctcgctccgtcggagtgacaatggacgccgccggcgccgatgcagaccaagcccggctgcaccagctgggctaccggcaggagctcaagcgtggcctctccctggtttccaacttcgccttctccttctccatcatctccgtgctgaccggcgtcacgacgacgtacggcacggggctgcgctacggcgggccggtgtccatgacgttgggatggctggtggtggcggcgttcaacggctgcgtcgccctgtccatggccgagatctgctcggcgtacccgacttccggcgggctatactactggagcgccaagcttgccggaaaggaatgggctcccctagcttcctgggtcactggctg

SEQ ID NO: 12807 - DNA, 191 bp, Oryza sativa
  unsure (1)..(191): unsure at all n locations
  Clone ID: PAT_MRT4530_18901C.1
tggcaaacccaaatccttaacactaaagancctttctcggggtttggaatcttggaaccccaaaaaaaaaactttccccgcaggaaccaaacacaaaattttctctaaacgccatatttcccaggtgtttggtggttattttaggaaaacccccatttcttaaaacagcacacaaagggcgccacccgtct

SEQ ID NO: 12808 - DNA, 2697 bp, Oryza sativa
  Clone ID: PAT_MRT4530_18902C.1
atgtctcgctccggcgtggtggccatggacgccgccggcgccgatgcagaccaagcccggctgcaccagctgggctacaggcaagagctcaagcgtggcctctcccttgtttccaacttcgccttctccttctccatcatctccgtgctgacgggcgtcacgacgacgtacggcacggggctgcgctacggcgggccagtgtccatgacgctgggttggctggtggtgtccgccttcaacggctgcgtcgccctgtccatggccgagatctgctccgcctacccgacctccggtggcctctactactggagcgccaagctggccggcaaggaatgggctcccttggcttcttgggtcactggctggttcaatattgtcggacagcttctccaggtgatcatcttgcttgccacaggaggcgccaacggcggcggctacatggcgtccaagtacgtcgtgttggccatctactctgtcatcctcatcctgcacggtctcatcaacagccttcccatacactggctctcctggtttggtcaacttggagctttctggaatgttgcaggtgtgtttgcgctgacgatcttgatcccatcggttgccaaggaaagggcgagcccagagttcatctttacccatttcaacacagaaaacggcatgggcatccaccagaaggcctacattctagctgtggggttgctgatgagccagtactctgtaatcggctacgatacatctgcacacatgatagaggagacgaagaacgcggattggagtgggccgatggggatcatcacgtccgtaggcctatcaaccatgttcgggtggatctacctgattgccctgacatcgatcatgaccgacataccttacctcctgaaccccagcaacgacgccggcgggtacgccatcgcgcaggccctgtacaccagcttccaccggaggtacggcaccggcgccggagcgctcgcctgcctgggtgtcatcgccgtcgccatcttcctctgcggatccgcgtgcatcaccagcaactcgaggatggggtacgcgttctcgagggacggcgcgatgccgctgtcgcgcgtgtggcaccgcgtggacagccgcgaggtgcccctcaacgtcgtctggctctccgtcgccgtggccttcgtcatggctctcacggtgaattctaagtccattgctgctgctgctgctgtaaatttctcgagctgctctgatttggttgttttctcatggcagtcgctggggagccaggtggcgttccaggcgatggtgtcggtcaccacgctggggctgtacatcgcgtacgcgctgccggtgtttttccgcgtgacgacggctcggaagtcgtttgttccggggcagtttcacctcgggcgatatgggctcatggtcggctggatggccgtggtctgggtggccaccgtcacggtgctcttctcgctgccggtggcgtacccggtggccaaggagacgttcaactacacgccggtggccgtcggtggcgtgctgctgctcagcctcgtcgcgtgggtgttccatgcccgcttctggttccaagggcctgtcaccaacgttgacgcggtggccgacgggtggggactggggaggaggcccccgcgggggcggggaggcagagccgtcgatgatcctcgcgccgttgaggagcatggcgaccaggagccggcggcgaacggagtcgaccaggctgcggcggcgaacggaggcaaccaggctgtggcggcaaacggccagccgccgaggtcgcccgctgcagcgctggccgccgaggtggcctgctgcagcggcgtctgcacgacctcatcgccacggacgccttccaccgcgaccaccaggcaccagcgccattgctcccgccaccccatgccgctcttcttctaccgtctcgaccactgggcctaccccgaccgcgtcgcgtccacctccgcggcgtcgacatcgccgcccgcgagtcccacccggtcattcgcttcgcccacgccgacgccaacctccgccgtctgccgcacgcccggtcatctgctgcacgcccgcgccccgtctgctccgccggccggccgctccccgcaccgtcgcctgggggagaccggtggcacacggccggccgagggtcgcctgccgctgtcatcgccgcggccgttggacgccgacgccgacgtggaagcggtccctgagctcactgtcgtggaccccgacggtgaggcaacagagacggcgggcggcggtcgacgtcgaccatctggaggcggaggcgcgccggtgccgctcttggatctcggccactacgcgggagtagatgaggttgggagcggaggaggcccgcgggcaccgagcggtgtgtcgtcggcgcgtcgccgccctcaccgacgacgtggagagcgccattccagagagagacagatgtgggtgatggccaacgacgcggcgctccaaaaagttgctcgcgagggcaacttggacgtggcgctcctcctgcagtgcgtgaagccagcgctgcggagggaaggcgggaacacgcagctggccacctggaccgcctccaccccgctctgcctgtggcgcggcctccgttggtccaccgccgccacgctatctccaccgaatcctaggaggccgctgcacaacccttgtcgccgtccttgctgccgcatcctaggcgcctcggcttga

SEQ ID NO: 12809 - DNA, 159 bp, Oryza sativa
  Clone ID: PAT_MRT4530_18903C.1
atggagcggggcgggccctgcgacggcctctgtctcttccggattcacctaagcatgagaggggactgcccactgccttgcaaggagtggggtcttgctctattttccccaaccccagagtacgagtatgtgtcagatggtggtttctccgaggagtag

SEQ ID NO: 12810 - DNA, 1500 bp, Oryza sativa
  Clone ID: PAT_MRT4530_18904C.1
atggtgatcaaggtgccgtacgtgacggcggcgacgacgctgttcagcttcggcctcatcttcggcttcggccacctccgcgactccttccgcgcccttctccgcctcctcttctcctccgccgccgccgccgactcgccggccggctgcaactccaaaggttacgcgccgatttgcgttgggaaggaggatttctacatccgccgcttcttccgccgcgtccaggactgtttcgggcgaccgatagccagcaagcctgatgcgtggttcgatgtggttgagcgctactcgactgacagcaacaagacactgcactgcaccacgaaaacatccaagtgcctgaacctggcatccttcaactacctaggtttcgctgctgctgatgagtactgcacacctcgtgtcatcgagtctctgaagaaatactctgctagtacctgcagttcccgagtcgatggaggcaacactcagctgcacatagaactcgaagagctggttgcaagattcgtcaggaagccttcggctattctgcttgccatgggttatgccaccaactctgccatcattcctgccttgattgggaagggtggactgataatcagtgattcactgaaccataactctatagtcagtggagctagagcttcaggagctacgattcgggtgttcgaacacaacaatcctgctcacctggaaaaactactgagagagcagatttcaggtggacagcctagaacacacagggcatggaagaagatcctggtgattgttgaggggatatatagcatggaaggggagctatgcaaactccctgagatcatatctgtctgcaagaagtacaaggtttacacatacatggacgaggcacacagtattggagctgttgggaaaacaggaagaggtgtgtgtgagctactaggagtggatccggctgatgttgacatcatgatgggcacactctcaaagtcatttggatcgagtggaggttacattgcagcatcaaaagagattattcagcatctcaagcttacatgtccttcacatatctatggcacatccatgtcacctcctgcagtccagcaggtcatctctgcaatgaaggttattcttggggaggatggaactgacagaggggccaagaagattgctcagattagagataacagcaatttcttccgttcagagcttcagaaaatgggctttgaggttcttggagataatgactcacctgtcatgcctttcatggtctacaatcctgctaaaatgcctgcattctcaagagagtgcctgaagcaaaatgttgctgttgttccggttggatttcctgctacaccactacttcttggcagaattaggatatgcatttctgcttctcactcaagggaagatcttatcaaaggattggaggttatcagcaacgttggtgatcttgttggaatcaagtacttaccagttgagcaagaggagactacatctgttgagaaaccaaagaagctttag

SEQ ID NO: 12811 - DNA, 175 bp, Oryza sativa
  Clone ID: PAT_MRT4530_18905C.1
gcgtccccggcgaatccgccttgacggaggcaccccggcgagctcaccttcccggaggaatcccagctcagcctcatcgtcttcggttcttggaatcccatgggatgtggacactgaaggattaagagagtacatgggcaagtttggacccctagatgattgcgtcgtcatgaag

SEQ ID NO: 12812 - DNA, 367 bp, Oryza sativa
  Clone ID: PAT_MRT4530_18906C.1
cccacgcgtccgaaaaaaaaaaaaaaaaaaaaaaaaaaaaaaaaaaaaaaaaaaaaaaaaaaaaaggacaaaacatggggagaaaccaaaaaaaggggcgcccgctttcgaggacccagctttactacgcgtccctgcaaacttcaatacattggccatggggtcaacaaaaatccaatctggtaaccccctgtttacacccaacttactggcaaaaccctgcattcccctatcttaagctgctggaataacaaacacgtttgcaccgatggccttttacaaaagaggcccaccctgaatgccttttggaacactccctgaacctgaatattaaatgcgacgcgccttgtagttacccataaagcgc

SEQ ID NO: 12813 - DNA, 2252 bp, Oryza sativa
  unsure (1)..(2252): unsure at all n locations
  Clone ID: PAT_MRT4530_18907C.1
gacccacgcgnccgctttcccccgctccccttccccgaggagccacgccgccgccgccgccgccgccatgccgaagcactaccggcctgcgggcaagaagaaggaggggaacgcggcgaagtacatcaccaggaccaaggcggtgaagtacctgcagattagcctcgcaaccttcaggaagctatgcattctcaagggcgtctttccccgggatccaaagaagaaggtggaagggaaccacaagacctactaccacatgaaggatattgccttcctggcccatgatcccttgattgagaagtttagagaaatcaaggtccacaggaagaaggtcaaaaaggcgtttgctaagaaaaataaagatcttgcagacagattattgaaccgaccaccaacttacaaacttgacaggcttattcttgaaagatatccaacttttgttgatgctcttcgtgacttggatgattgcctaacaatggtgcatctttttgctgcgttgcctgctgttgaaggtgaacgtgtgcaagttcagcggattcataattgccgcaggttgagccatgaatggcaagcatatatatctcgaactcattccctgcgaaagacatttatatccgtcaagggcatatattatcaagctgaagttcaaggtcaaaagatcacctggctaactccacatgctcttcagcaagttttaactgatgacgttgacttcaatgtgatgcttacctttttggaattctatgagacacttctgggatttataaacttcaagctttaccattcgataaatgtaaattatcctcctgttctggatcctcgtttggaagctttagcttctgagctctatgcgttgtgccggtacatgtcttctggaagagtacctggaaattcagaacctgctggactaattgaagacaaagagggtgaagacaataaagagagctcaaaaacagatgagtctgaactcagattggcacaacttcaacaccagctcccaactaatgaacctggagcgctgatgcatcttgtacaagaatctactgctgctgatgcagacgacgctgatgccaaagaatgcaggagtttattcaaaaacctgaagttctacctaagtcgtgaggtgcctagggaatctctcttatttatcattccagcatttggtggtaccgtttcatgggaaggagaaggagctccttttgatgagacagatgaagacatcactcatcagattgttgatagaccgacccaaagccacgttttcctctctagggagtatgttcaaccacagtggatatatgattgcgtgaatgctcgcatcatattgccgacagaaggttatattgtcgggagggtgcctccaccacatttatctccctttgtggacaatgatgcagagggttacattcctgagtatgcagagaccattaagaggctgcaagctgctgctcaaagccaggtgttgcctctgccaagtttaggggacgaagatatggaaaattcactggtagaggcaattattgatcgatcagagtctaatgaaattgctgacaagaagaggaagttggagatgctagagaagcagtaccacgatgagctgaggatggaatacgaaggaaagaccttctcaaataggacggcagataaccaaccagatgttgtggacaaaagtgatactaaagaagctgacgatcatatggaggactctcataaacaagccgagaaggatgctgctgacatttccaagacccttatgtctcgcaagcagagaggccttcttcaagcaattgagattaaccaggaaaggaaaaaggacaaggtgaacttgctgaagaaaaggaaaaagaatgctgattccagtgcttcggccaaaggtcgctgaggctcgaacttcatttgctccatgctgtatctgttttgacaaattgttcatcggtcgctgcttctgtggagttgctgccatgatctgcacacctacgtattcttatgcatgataagcagctccattttgatgtttaggtgttttacatgggctttaagaatatgcccagatacctcagtagaaaattttgagctatttacctagtgtccaaagtgtgttccctgatgattagtagctattactcttccaaattttgacgcggttgctgctcaagtgctcatctagctacataattctcaatcaggagtttagggcctgatatctgttggccggttggtgatgctgcaaaatgcaacatgatgagttgatg

SEQ ID NO: 12814 - DNA, 1828 bp, Oryza sativa
  Clone ID: PAT_MRT4530_18908C.1
ctagcgtaggcccaccagagaattttcagccgggccggaagcctggaattcccctgaatttgggcccagagttgaaacagacaattcacaggggtccgcccaccaaatcctctcctccttccccaacggcgagcgtccccggcgaatccgccttgacggaggcaccccggcgagctcaccttcccggaggaatcccagctcagcctcatcgtcttcggtgagggaaatatcttggtgattcttgggaaccttcagaaagaccacttaatagttttccttggcccagaaaggcttgaggcttgagagctgaaaagttctgctggagctagtgctataatggccacaaaacttgtggttcttggaatcccatgggatgtggacactgaaggattaagagagtacatgggcaagtttggacccctagatgattgcgtcgtcatgaaggagcgttcgtctggtcgatctcgtgggtttggttatgtaacgttctcatcagctgatgatgccaagaatgttcttgagtgtgagcatgttctcggaaaccgaactctagaagtgaagatagccactcctaaggaagaaatgaaatcacagggatcaaaaaaggctactagaatatttgttgctcgaattccgcagtccgtggatgagtccatgtttcgtaggcattttgaagcctatggagaaatcactgatctttacatgccaaatgaacatggttcaaagggtcatcgtggaattgggttcatcacttttcagagtgcagaatctgtggacagtatcatgcaagattcacatgaactggatggcacaacagtagttgttgaccgcgccactcctaaggatgaagaagtcagatatcctccaagcaggggggcatctcagggtggctatggtgcatataatgcatacatttcagcagctaccagatatgcagctttgggtgcacctactctgtatgaccatccagggtcagcttatggaagtaagtcttctgctacgaagatcacaggaggaggatactatggatcctcccaaggaatgggcaacaaaaagatatttgttggcaggcttccacaagaggcaaacacggaggacctaaggcattactttggcaaatttggccgaattgtggatgcatatatcccaaaggaccctaaaagaagtggacatcgaggttttggttttgtcacctttgctgatgagggtgtggcagatcgggtagctcgcagaagtcatgaaattctaggacatgaggttgcaatagacactgctgcaccacttgagggtgactctggtggtggttacatggaacccatggatctttatggggcttatggttcaatgcgaacttatggcaggttctgcagtggtatcgactatgattacggttatggtcacagcggaagtagcagtagcagatcaagggctgattggcgataccgaccttactgagcctgctgtcttgttactgttaatgatgttttagtttacctccaagggaactgtggaaacggagaaaagaacaactccataaagaatgccaggttgtactatgttaatcttaagcgggacgggacatacgtggaatctgtatttcagttcatcctgtaaatttttctttgccattagaacgcattaatgcggtttctgtgccaggatgccatgagatcgaggcagcagtgtagttatcattattgtggaagtaccatatgtaataacaatctttcttctacacatgtaaacggtggttctggtttttgagcctctaaaaaaaaaaaaaaaaaaaaaaaaaaaaaaaaaaaaaaaaaaaaaaaaaaaaacaaaa

SEQ ID NO: 12815 - DNA, 568 bp, Oryza sativa
  Clone ID: PAT_MRT4530_18909C.1
ggtgcctccaccacatttatctccctttgtggacaatgatgcagagggttacattcctgagtatgcagagaccattaagaggctgcaagctgctgctcaaagccaggtgttgcctctgccaagtttaagggacgaagatatggaaaattcactggtaggggcaattattgatcgatcagagtctaatgaaattgctgacaagaagaggaagcattctctgttgtctcattttgcctttttctcttctaaagttggagatgctagagaagcagtccacgatgagctgaggatggaatacgaaggaaagaccttctcaaataggacggcagataaccaaccagatgttgtggacaaaagtgatactaaagaagctgacgatcatatggaggactctcataaacaagccgagaaggatgctgctgacatttccaagacccttatgtctcgcaagcagagaggccttcttcaagcaattgagattaaccaggaaaggaaaaaggacaaggtgaacttgctgaagaaaaggaaaaagaatgctgattccagtgcttcggccaaaggtcgctga

SEQ ID NO: 12816 - DNA, 900 bp, Oryza sativa
  Clone ID: PAT_MRT4530_1890C.1
ttaaaaaaaattaaattttaggcttgggaggagaacttcggggtgtgacaccgtggaaccatggagagggaagcaggaggtactaatcctcagcccatattgggtcgcatggttgcgatcgaagattatgttctctgcggttttctccctccaccttccaaatttcttctcctggttttgaatttctatggcctctctcttctccatttgaaccccaattccatcgccttccttagcatctttgtgcatctttgtgaggcctacatcggggtagagcctttccttgatctttttcgcttttactatgaactgcgttggatggaatccaacagggtatctggttgcgtcgggttccgacttcgggatggcctgaagtcgcgttacattcccttccagtgcccttcttctcacagcaagtggaggaataggtggttttatcttgagatcaaggactcgaaccctgacttcgtggttcccgaagatcaaccgaacaagattccgtcttggaccgcaaagccccccttgaccccctctcttcagtcgtttatcgacatcatcgacaatctctgaatacggggtttgtcgggatatgaagtcgttgcagacttcgttggtaggcggatccaaccgcttcaggctcgggcccatccagcttataactattccgggccagaggacgtgacccgggtttctcctcggggtatctttctcgcatttatcttgacatacttgtgttcgcattcctcttgacttatcgaaggttggttctcgattaacaggtctgagcggggaaaccgtggagcgccgcgtcggccaagtgatgatcagtggcccgaccacggcgagtgacatccctatgtccctttgtgaaaagggggcggcggaacgtgatgaagccat

SEQ ID NO: 12817 - DNA, 2865 bp, Oryza sativa
  Clone ID: PAT_MRT4530_18910C.1
atgtctcgctccggcgtggtggccatggacgccgccggcgccgatgcagaccaagcccggctgcaccagctgggctacaggcaagagctcaagcgtggcctctcccttgtttccaacttcgccttctccttctccatcatctccgtgctgacgggcgtcacgacgacgtacggcacggggctgcgctacggcgggccagtgtccatgacgctgggttggctggtggtgtccgccttcaacggctgcgtcgccctgtccatggccgagatctgctccgcctacccgacctccggtggcctctactactggagcgccaagctggccggcaaggaatgggctcccttggcttcttgggtcactggctggttcaatattgtcggacagcttctccaggtgatcatcttgcttgccacaggaggcgccaacggcggcggctacatggcgtccaagtacgtcgtgttggccatctactctgtcatcctcatcctgcacggtctcatcaacagccttcccatacactggctctcctggtttggtcaacttggagctttctggaatgttgcaggtgtgtttgcgctgacgatcttgatcccatcggttgccaaggaaagggcgagcccagagttcatctttacccatttcaacacagaaaacggcatgggcatccaccagaaggcctacattctagctgtggggttgctgatgagccagtactctgtaatcggctacgatacatctgcacacatgatagaggagacgaagaacgcggattggagtgggccgatggggatcatcacgtccgtaggcctatcaaccatgttcgggtggatctacctgattgccctgacatcgatcatgaccgacataccttacctcctgaaccccagcaacgacgccggcgggtacgccatcgcgcaggccctgtacaccagcttccaccggaggtacggcaccggcgccggagcgctcgcctgcctgggtgtcatcgccgtcgccatcttcctctgcggatccgcgtgcatcaccagcaactcgaggatggggtacgcgttctcgagggacggcgcgatgccgctgtcgcgcgtgtggcaccgcgtggacagccgcgaggtgcccctcaacgtcgtctggctctccgtcgccgtggccttcgtcatggctctcacggtgaattctaagtccattgctgctgctgctgctgtaaatttctcgagctgctctgatttggttgttttctcatggcagtcgctggggagccaggtggcgttccaggcgatggtgtcggtcaccacgctggggctgtacatcgcgtacgcgctgccggtgtttttccgcgtgacgacggctcggaagtcgtttgttccggggcagtttcacctcgggcgatatgggctcatggtcggctggatggccgtggtctgggtggccaccgtcacggtgctcttctcgctgccggtggcgtacccggtggccaaggagacgttcaactacacgccggtggccgtcggtggcgtgctgctgctcagcctcgtcgcgtgggtgttccatgcccgcttctggttccaagggcctgcggagtcgccagcggcggctttctccaccgcgcgcagccgggagggagccgtcgatgatcctcgcgccgttgaggagcatggcgaccaggagccggcggcgaacggagtcgaccaggctgcggcggcgaacggaggcaaccaggctgtggcggcaaacggccagccgccgaggtcgcccgctgcagcgctgcggcgtctgcacgacctcatcgccacggacgccttccaccgcgaccaccaggcaccagcgccattgctcccgccaccccatgccgctcttcttctaccgtctcgaccactgggcctaccccgaccgcgtcgcgtccacctccgcggcgtcgacatcgccgcccgcgagtcccacccggtcattcgcttcgcccacgccgacgccaacctccgccgtctgccgcacgcccggtcatctgctgcacgcccgcgccccgtctgctccgccggccggccgctccccgcaccgtcgcctggtcctccggcaggcccgtgctgcgggtgcatctgccgcagccgctccgcccgccgcccgcccactccgcccgccgcgcgctgctcctccccccgccgcccgcccgcagctcctcccgtcgcccgccgccgcccgctccgcccgcagctcctcccgtcgcccgccgccgccatcactgcagccgcgtcgcccgcgtcgccatcaaattggagagaaggggagaccggtggcacacggccggccgagggtcgcctgccgctgtcatcgccgcggccgttggacgccgacgccgacgtggaagcggtccctgagctcactgtcgtggaccccgacggtgaggcaacagagacggcgggcggcggtcgacgtcgaccatctggaggcggaggcgcgccggtgccgctcttggatctcggccactacgcgggagtagatgaggttgggagcggaggaggcccgcgggcaccgagcggtgtgtcgtcggcgcgtcgccgccctcaccgacgacgtggagagcgccattccagagagagacagatgtgggtgatggccaacgacgcggcgctccaaaaagttgctcgcgagggcaacttggacgtggcgctcctcctgcagtgcgtgaagccagcgctgcggagggaaggcgggaacacgcagctggccacctggaccgcctccaccccgctctgcctgtggcgcggcctccgttggtccaccgccgccacgctatctccaccgaatcctaggaggccgctgcacaacccttgtcgccgtccttgctgccgcatcctaggcgcctcggcttga

SEQ ID NO: 12818 - DNA, 1239 bp, Oryza sativa
  Clone ID: PAT_MRT4530_18911C.1
atgggctccgcccactcctcccactcctcggtgtccacggccgccgacatggacgaggacgacgacgacgagccatcggccgcgtccgccgcggctccggcccctccggcgcccgcgccggctcccccggcgtccgcgtccaaggtgctcgagcaggagcccgaggagctcccctgccgcgccgccgactcgccgctctcgccgcagccctccgccgcggggacgccgcgcctgctcgccgcgggccccaccatcaaggtgtgggacccgtgccacgtcctcctccccccgccgtcgccgcaccagtcccagtcggcgcgggccggggccggggccgaggccgccgccgcgctggaggtggtggtggtcagccacggggagtgcgccgcggcgatgcgccccgacctcgtcggcgggcggtggcccgccgcggcgctcacggcgcgcggggagaggcaggcccgcgcgctcgccgtgttcctgcgatcccgcggcgcgcgcctcgccgccgcgtacgcgtccccgcttgaccgcgcccgcgccacggccgcactggtctgtcgggaacttgattttccagaggagcagattcaagtatcagatgctctgactgagatgagtcaaggtcagtgggaaggctgcccgaaatcagaagtatatactccagaaatggtcaacctgatggatagcactcagccagatttctcagcgcctgctggtgagtctctcaggcaggtacagtttcggatgatggaattccttaatcagacagtcgtacggttaccagaaaaggtggcaatgggggactcactatcacaacaaaatgaggcgaagggtctgtctcggcaaagttccaccaattctgtccaagatggtcccccttgggatttgctttacaggctcaatcggcatagcctccaaaggaaaaaatctgggaaaagccggcttcagtttgtcacttcaggcgacaatgagactgaggatgacttctcaccaaaagaaataaatcaaaggcatatccttcatgaagcaaatctagcaccctcggtcacctccattgcaattttcagtcacgcaactcccatccgatgcctcgttgctggcgtgctggattgcaatcctatgatatcccagagaatttgcattgaagattcctccattacagttcttgagcattcactaaaaacaggatggcaaataaagaggctgaatgatactgctcatctcagacttctctaa

SEQ ID NO: 12819 - DNA, 339 bp, Oryza sativa
  Clone ID: PAT_MRT4530_18912C.1
atgcggccggtcagaccgtgcaactctgcaacggctagaaaactagccgttgtagccctgtcagagggccccatcggcctggtcggtcagaccgacatggggtggccggtcagaccggcctcggctcggtctgaccgactacggctccgtcagctctgtatcggccatcctgagcagcatcatctcggcctccaggaggccggtctgaccgggaaagtgccgccggtgagaccgccactatctagccggtctgaccggacagggcacgccggtcagaccgctactatgtggccggtcattacccctcttaatagtacggcgaaactaaaattaaactag

SEQ ID NO: 12820 - DNA, 390 bp, Oryza sativa
  Clone ID: PAT_MRT4530_18913C.1
atgagcagtcctgatgccataagaggtggtgtgaaacctcgtgttgggctttcaattgtgcaattattgggctgcggctgtgatatacagtggaccatccatattgcatccagaccatttagatttgatccgactactgttgttcttttggataccagaccattcagctttgatcgaatggatgctattcttttggatgacatggatcaacaacaaagcagaaaattggtaataactacattaagtggggatcacttgtatagaccattcagctttgatcgaatggatgctattcttttggatgacgtggatcaaccacaatgcagaaaattgtacaccactcttgtctcaaatttcgaacttaaattaaaatccaggctgaaaccataa

SEQ ID NO: 12821 - DNA, 363 bp, Oryza sativa
  Clone ID: PAT_MRT4530_18914C.1
cattgcttgttactcttggaggttgccgcctcctagacggcttgtggagaagttgcctggtgacctctccgagaagattatggaggaggcccggtgccggtttgtgagtggtttggagttcaccaccttcggagtgaaggaagaactaccccgagtgatcgaggcttgggtagtcctctccgtgggccggctcccgccttgcccaccccttgacgaagggagcgtgcggtggcttcgtggttgagcggtggagttgggctcgcctcaacggggagtaggaaaccggcgagtttccgaacctcggtgaaaaatctcttgtctccttctctcatttgattgtcgcatttacatttgtgcaattta

SEQ ID NO: 12822 - DNA, 510 bp, Oryza sativa
  Clone ID: PAT_MRT4530_18915C.1
ctggcaagtataggcggcaatggcagctatatgacatatcgacaggtcgagcattcagacactcctaggaacacgatgaaatgagaaatactacagtactagttttgaagagaatttgggagaggctatcgcgttgcaagaagggcatgcgtgtcctgtgattgccgtgtacatgaactagtagcttcgaagccttcgatcagcatcttttccgagctcgctcgttcgcgctggcagcgtgccgctgcagcattgcctcttggctctttgagcggtcgaagcgatgggcatgcgggatgtaggatgggccgcttcgtggttctgacagggacgcgcaacggcgggcaaatccggcgtgcgaatggcagggatacgcgcggaccgacgttcgccacctttacccgcgaccaaacgttagttcaagccttttattttatttatcctctcgatttcaaaaggccagttcatttttctaagggaaatttaaaaaagcagcccataaatcacttg

SEQ ID NO: 12823 - DNA, 813 bp, Oryza sativa
  Clone ID: PAT_MRT4530_18916C.1
tcaggaatatgaggccgcgccgtctgccaaggcctccttctatgtccacgtcagtgcaatttgtttctatcgttaaatgtaaattgcacaaatgtaaatgcgacaatcaaataagacaaggagacaagagatttttcaccgaggttcggaaactcgccggtttcctactccccgttgagacgagcccaactccaccgctcaaccacgaagccaccgcacgcccccttcgtcaaggggtgggcaaggcgggagccggcccacggagaggactacccaagcctcgatcactcggggtagttcttccttcactccgaagaccgtgctactctgcaacggctagaaaactagccgttgtagccctgtcaaagggccccatcggcctggccggtcagaccgacatggggtagccggtcagaccggcctcggctcggtcagaccgccatcggctcggtctgaccgaatacggctccgtcggctctgtatcggccatcccgagcagcaccatcccggcctccagggggccggtctgaccgcgcatgtgccgccggtcagaccagccttacgcgtcggtcagaccgccttcttgcggccggtcagaccggccagggcacgccggtcagaccgccactaccctgtgaatctctctggccggtaatctggtggagctctcgctgtcggcgccatcaatcgtacgtgtggacagccgcgtgcagggggacaccggacacggtcacacggggttcgcggcttcgcgcacgaacactgaactagcttctcacatcagccttcgcactgttcacaaagctaagttcg

SEQ ID NO: 12824 - DNA, 726 bp, Oryza sativa
  Clone ID: PAT_MRT4530_18917C.1
atgcgtcacgccgctaggacgctgggcaggcccgcaccacttacctcttacccacttaggccaacctacttaggtttaaacaggttgatgcggcaagcccactactcccggcggtgccaccacagctcacatattatttccgcattagctgagaacaggaggagcgaggagacgaggaggggaacgagtttggcgctgtttttgatgggcggcggcggcggcggcctcttcttcggcagcggcggtcacttcgtcggcaatggcggccacttcctcggcagcggcgacatcttcctcggcggcggcggcggcggctgcggcggcctcttcctctgcagcaatggattggtatccgaggccatggaggagcagacatctagcgagccattggatcccctctcacacgaagaattcctccacatgagcaattttggactttatggaattttggaaaaagaaaggaaatacttgtggaatattggaaaagatattctcaagaataactttgactcattgacgagtggggccaacaagaaggccgaggaggaagactggccaatgggccaagcccacgagccagaggagagaggggtggctgactgggcgctgtggactgggtcaaacgccacgtggctgccatcgagccagagggaggggacggtgccggaggcaagaggaggaggattggatcccttccaccggtgcggattagggcgccggggttag

SEQ ID NO: 12825 - DNA, 2180 bp, Oryza sativa
  Clone ID: PAT_MRT4530_18918C.1
aagtgaggcaaggggttaatcgagacccagctctttggagctcctcaacggagagtaggatcgcaagatccgaacttcgggaaaaaatcgctaaatgtaaattgcacaaatgtaaatgcgacaatcaaatgagacaatgagacaagagattttttaccgaggttcggaaactcgccggtttcctactccccgttgaggcgagctcaactccaccgctcaaccacgaagccaccgcacgcccccttcgtcaaggggtgggcaaggcgggagccggcccacggagaggactacccaagcctcgatcactcggggtagttcttccttcactccgaagaccgtgctactctgcaacggctagaaaactagccgttgtagccctgtcagagggccccatcggcctggccggtcagaccgacatggggtggccggtcagaccggcctcggctcggtcagaccgccatcggctcggtctgaccgactacggctccgtcggctctgtatcggccatcccgagcagcatcatctcggcctccagggggccggaccgggggcctagatgcttcacaccttcgacagcgcactgatccaggccgcctccgtcacgccgcccctcggcttccccgtcgaatctgacccaagggagtctggacaaggaacaacattgcctcggcaacctgagttttccttgtggaagtctattttgcctccctcgggttcgatgggccgaattcctctcagcccatctctccctccctccccatctctctctctctctctccctctccccttctcccccgctctgcccgtgcgccgcgcgcgcgtgcgcgtgagccgcgccgagccgagcgccctccgccctcgctaccgcttcccgccgacgacgcccaaatcgccgcgccgcccgttgcttcccgcgcgcgcacgccgtggtggccgaccggccagtcaccgccgccgtcagcatctgccgcgcctgtccgcgcctgccgcccgtgtcgccgctccgctccacaccgcccccgccgtcatcgccgtcgtcacaacccggcctcgccactccgcgcgctagcctccaagggatggaggcaaagctcctcctccctctgccgcgtcgccctctctccctcctccttttccccaaagtggcaaggggcaagccccctttctcccctcctttttcccttttctctcccgccggcgtcattccccccccccctgtcaccgttttggccgcgaccgccgagcgctagccctctcctttgaccgccctaggtcggttcccaaaccgacattgccatcctataaagcccaggcgccctccctcccttctcctctcgtttgtcccatcgcctccactccattgtcgccgcctcccgtgctctgttcgccgccgcctttcgttgccacgcatgccggaggagccggcgcgtttgtggacgcggaaggggactccgggagcttgtcttcttcctcttcccccgctcgccgtgtgctcgccgccgtcgccgcccgagctcggaagcacctctcgtcgccggcctccctcagtgcatttccctctaatccggcgcaagggacggattcccggagtcgcatagatgctctagctcgcccgaatcgatctcctgtcgcgccgtcgctgtttcccccttccctcgccgccggttgccgccgccgcaatccgccgccgtcgagccccctccgacgaatccgagccgttggctcgtctcccctcatctcgtgcaaccacccggtgtgctcactttcgcctgtatcatcgtggttcgccccgccgttcgcagccaccgtccgccgtccgttccggccggcgccttcttcaacctcccgccggcccgcgtggcagccacgtaggcgccacgtcggagccacctcggcatgaccggatcggctgacccggtcagccgctccctccgttccaccctccccgtgcgcatggtccacggtgagccgcgaggctacgcgtgggcccgccgcacccgcgtcccccgcgagccgcgcgcgtgcgccgcgccccgcccaaaccctagcgccgcgtcgcgtgctcctcgctcacggtgaaccgagccgccgacaagcgggtcccacccgggaccacgcaaggtggacccggcccaccggctccctctctccccccccaccccgccctccaaccgatgtgg

SEQ ID NO: 12826 - DNA, 224 bp, Oryza sativa
  Clone ID: PAT_MRT4530_18919C.1
ttctcaacctgggtagcggacttggccaaagccctgtaaattgatccttttgggctagttctccggaaccctgtaactttgtaaatctgtacatcacccccccccccccctcctctatagatctagtgaatgtacatggcgtgatgtattgtgacacataaattatttcagaaaaataaaaagcagatgcctctaagttttcataaaaaaaaaaaaaaaaaaaa

SEQ ID NO: 12827 - DNA, 982 bp, Oryza sativa
  Clone ID: PAT_MRT4530_1891C.1
atggacctcggcaaatcagcttccaccaatgcaacgttgaagaaactccaggaggatggcgctcttcctggccgtggaaccatggagagggaagcaggaggtactaatcctcagcccatcttgggtcgcatggttgcgatcgaagattatgttctctgcggttttctccctccaccttccgaatttcttctcctggttttgaatttctatggcctctctcttctccatttgaaccccaattccatcgccttccttagcatctttgtgcatctttgtgaggcctacattggggtagagcatttccttgatctttttcgcttttactacgaactgcgttggatggaatccaatagggtatctggttgcgtcgggttccgacttcgggatggcctgaagtcgcattacattcccttccagtgcccttcttctcgcagcaagtggaggaataggtggttttatcttgagatcaaggactcgaaccctgtcttcgtggttcccgaagatcaaccggacaagattccgtcttggaccgcaaagccccccttgaccccctctcttcagtcgtttatcgacatcatcgacgatctccgagtacggggtttgtcgggatatgaagtcgttgcagacttcgttggtaggcggatccatctgcttcaggctcgggcccatccagcttataactattctgagccagaggacgtgacccgggtttctcctcggggtctgagcggcgaaaccgtggagcgccgcgtcggccaagtgatgaccaatggcccgaccacggcgagtgacatccctgtgcccctttgtgaaaagggggcagcggaacatgatgaagccatcaatgtggcgtcatctctgaaagttaaggtcgtcaaggaggtgtctgatgctgccaccactagcggtggcagtgttccgacaaagccgaggaaattctcgtctgtactcggtgtgggagagcgcgtatcatgtgctttag

SEQ ID NO: 12828 - DNA, 580 bp, Oryza sativa
  unsure (1)..(580): unsure at all n locations
  Clone ID: PAT_MRT4530_18920C.1
gcttcactaaccattaaagccttgttatcccaatcaaactcataatacaagaatctacaaggtgttacatgacaaaacaccacacaaagctcagtaaataattttttgtttacctcgttcttttttatctcacacctgggccccacctggcaacggcagtgttgctctgctgcccatacgacgtacacatgtttgctagtgctagtactacttcgatcggacggtcaccgatcgatctcacattctctctacccgctgaacggccggtacaccttgagcgcgtcgaccacgtcggcgatgagcnncggcggcggcggcgacggagacgacgaggcaggcggcgctgaggaccttgaggcagagccaccgcgcgctccctcgccgcacgccgcgctgcgcgatgtacatctcgacggggaagtagacggtgagcggccagaacgagacggcgccgaggagccccaccacgtcgccgaagaacgggaggagcatggacacgacggtggtggcgcagacgaacgccgtgcgccatgtcaggcggaacacgctgagcgagaaggggcccacgcggagctcccgg

SEQ ID NO: 12829 - DNA, 496 bp, Oryza sativa
  Clone ID: PAT_MRT4530_18921C.1
gcacgaggccggatcaaccacgagggagagggcatgggcgaagcatggcgacggtggcggcgtcctctagcggcgctcgcgggcagccgcgccatggagatccaccgccgccctctgcgccgcaccatgcaggagtcgccgccacccccgccacctcgttgcgacggcgggagggaggaccacggtccacggtgagggcctcggccgcgtgttggtctggcagcggaacaaggccacggcggccgccaaggagaggggccacgctcgccagccgcttgagtccgtcatcgaggtcagccacatcgacgccgtgctccagcgtgctgccgaggaagacctcctcagtggtggcgacggtgccgacgacgacgtcctctccgccgcgctctggttcccggctcatcgatctgtaacctctcaaaacgaagcacatccgcttttggcgtccaggatctagccattgaaggacggctggtggcgggggccttgatggctg

SEQ ID NO: 12830 - DNA, 288 bp, Oryza sativa
  Clone ID: PAT_MRT4530_18922C.1
atggcagtggaagaggagggctccccggcgaacgggcaccgcagttcagcgaaagggacctacgcagtgggcgacaggctggacgacggcgctcgctccaatgacggctgcatgcggcgaaggggattcaacgacggtggccattgtgggatcagtggcggcgcggaggagatcgacgaggcgggcgtcgttagcgactctttgcgggaaagatcagaggagatcaatgaggtgggcaacactgcgacctttgcaggaaatatcggcgacctgaaattcccaaactga

SEQ ID NO: 12831 - DNA, 382 bp, Oryza sativa
  Clone ID: PAT_MRT4530_18923C.1
acccaacccacccgtgcgttcaccttcacccaacgggcggtaaactatagggagaggtcggatactagacgatggacgacgactccaacatgcaccaagcggagagaaaagagaatggcgtcacgaaggcgtgctcctggggatgagcaaccccctgactcaacatctaccccgtctttaactacacctacctcaccaagtctgacatcaagctgaacaatgcaattatcgctgaggaaaagcactagactatgtatgatgagatggccaacaagggcaatgctgaatatattgccggaggagccacccaaaactctatcagggttgctcaatggatgccttaaactcctggtgcaacaagttacatgggttgcattggaaa

SEQ ID NO: 12832 - DNA, 1285 bp, Oryza sativa
  Clone ID: PAT_MRT4530_18924C.1
ccggccgggagacctcctgactctaataaatctcctccattcccccaaatccatccatcatggagttccctcatcgccaccaccaccacggccaccgcggcgacgacgacgacgacgatcgccgccgccatcccgctcccgctcccgcctacggccacgactcagcccctccgccgggtccctacggccaagcgcctcctccggctgatccctacgctcgccacccgccttcccacgactacgctcatcctcctccggcgtatgggggagggggctacggcaacgtcgtccacgtttcccacgaggtctccgaccaccagaggcccacgccgcactacggtggatccgagtacatcagccccgtccaagagacccgcccttaccacggtggcggaggagccccaccggtgacccacaggatctactgcaaggccggggaggacaactacagcctcgccgtcagagatggcaaggtctgcctcgtccgctccgatcgcgacgaccacacgcagcactgggtgaaggacatgaagtacagcacgagagtgaaagacgaggaagggtaccctgccatggcgctcgtcaacaaggccaccggcgacgccctcaagcactccatcggccaatcccaccctgtccgtttggtgcgctacaatccagagtacatggacgagtctgtgctgtggacggagagcagggacgttgggagtgggtttcggtgcatcaggatggtgaacaacatctacctcaacttcgacgcgctccatggagacaaggaccacggcggcgtgcgcgacggaaccaccctggtgctctgggagtggtgcgagggtgacaaccagcgctggaagattgttccctggtgatcaaatcaaatctatctgtctatctctacatatgagtgagggaggtttatggaataataagaggcgcctctgatcgatggaggggccggcaggtgtggtcgctcgactggccctagctaagtgttttgttttgtttggtccagctctgtaataatccagccatctcatttgtttggaatgtttgttgttgatccataaaatttggtcccggtacgaatatgaacatgtcacgtctgtgtgtgtgtgatactgttacttgtgatgcatctacgtacattgcatacaagctgctgttggttaattgtgttgcggacgtactacgtactgtatttgtgtgcaaagatatatttgcatcgcaagacttttctgcctgtcggattacaacatcacacaaaactcaaaaaaaaaaaaaaaaaaaa

SEQ ID NO: 12833 - DNA, 233 bp, Oryza sativa
  Clone ID: PAT_MRT4530_18925C.1
ccggccgggaaagaggtgtttttgtgcgtgtatgtgtttgtagcaattaatcccgtcctagtacatggataattcaggcgatttgagccattgtcagggtagtacaatactagctgcccgccatgtttgcgtgcaagtaattaaacatgtatcaatcagcggatcagatctgcttaactgaattttcaaagtacatatgtaagcatccgaaaaaaaaaaaaaaaaaagcggcc

SEQ ID NO: 12834 - DNA, 231 bp, Oryza sativa
  Clone ID: PAT_MRT4530_18926C.1
atggagctctacgccgtggtgaagccgtgcaggctgtacaagaagaggagcagcagcggcggcggcggcaaggtggcgatgtgcgtgcgcagcggcggcgacggcggcgccggcaagagcaggccgtccttcacctgccggtgcgtgcggctcgtcaaggagcagcgcgcgaggttctacatcatgcgccgctgcgtcacgatgctcgtctgctggcacgagtaccaatga

SEQ ID NO: 12835 - DNA, 465 bp, Oryza sativa
  Clone ID: PAT_MRT4530_18927C.1
atggctgagtcagcttgggatccaccgaaaacggtggcgccgccacgccaccggagagggtggtgctgcggggggcacgcgacagaggtgggcggcgccagtgctgaggaggaggaggaggtcgtggcgctgtcgtcgtcgtcgtcctcggcgctggggaagaaggtgggcgcggcggcggagggtgctagggggttgccgcgcctggtgcggtacgaggtgctggtgctcgtgctgcagtttctgtacagcgggctgtacaggcgtcggtggcgacgcctaagagcgggccgctcccggggttgctggcacacgcggtgcggcgctgccgtcgacctcgccctcgacacgctcgccgccgcgcgctccttcggcgtcgagcagctcgccctgctggttctggagtcagcagaagcaatgttcaagtctgagctgatcctgctgcatgcttgcctagatccctag

SEQ ID NO: 12836 - DNA, 1478 bp, Oryza sativa
  Clone ID: PAT_MRT4530_18928C.1
ggcaaacctaacccacactcctcctccctctgcgccttggcaccaggaccctccacgatcgccttcccttctcctctcccgccgccgccgccgattcgatctccatcccgcgccgccgccgctgcttccgccgcatcctccctccctgatttgtggatatggctgataacgacaaggaggcggcgggagagggagcaactccccgtggagcggactgggaggtggtgactcttactgcgtccgcctatgcggcggcgccggggccgggtggagcaggagacaggccggcggctgagaccaaaggccttgatgcaagtcaggaaggagaccagaccaaaggccttgatggaagtcaggaagggcggggctcggagagcgcgctgttcatgtctggccactttgtgttccctccaagcgagcatgagaatctgccgatcgatgccggctttgatgacatccagcataagaaggatgcgcaggaagcgagcacgagcgtggaagacgagggtttcaagaatgtcggtgggaactatggtgctgggttggagaggattcagttctatgatgaaggaaggaacctctcggccaatgatgtagagatgatgatgggtgatgctgctgagcatggctcgtttcatgctcaggacgaggagcaaggtttagatgatgataatgattttgatgactctcatgacaaatcagatctgccctcagaatctgcggacagcaaaagccgtgattctggcgccccttgcaaatgctggctgaagaaacatatgtcatgcctgtatcaccaagccaaggaaacaaatgctctctggtctgtggtggttgcagctgctcttgtcgggctcgtaatcttgggacgctggcacaaagacaaactgcaccttaagaatcttaaatggcgatctggctcaacagtgagagggtgaccaacagggctggtgggtgtttttatggtcttcttcgatgcaacctctgatgagtcatcacatgtcatctgaagttgtaactgagacggttggcaatatgattgtgacaatgacgaaaggagtatacctaatgtaataatatgaagtttgacagtggtgcttgtagccttcgtttggttgccttgccagctctgagatgccgaagtttccaccgctacacacaccaccgtaccattgtacacttgctatgctacattttcttttatgttctgaggaatggctgtcaacacgcaattgcatactgcgaaatccatgtaacctcgttgttcttccagaacaaattcagatgcatttgtgctgttcttttaagaaggaaaacctgggagtctcgtttactgttccttacaggaggtggtttcacttcagtttttatcccttcacaactgggatgttgcttgtcattatcatggtttttttgtattgcaagcattatgattgctactcatatgaatcagtgtttagacctccatggtcgtattttct

SEQ ID NO: 12837 - DNA, 672 bp, Oryza sativa
  Clone ID: PAT_MRT4530_18929C.1
acggcgcgccccgcgcagctcgccgacgcggagatccgcaagctctgcgccgccgccaaggacgtcttcctctcccagcccaacctcctcgagctcgaggcccccatcaaaatctgcggagatatccatggccagtattctgatcttcttcggttatttgagtatgggggcttcccaccagaggcaaactacttgtttctaggtgattatgttgaccgtgggaaacagagtatagaaactatatgtcttctccttgcgtataagattaagtacccagagaacttcttcctccttaggggaaaccatgagtgcgcatctatcaaccgaatctacggattctttgatgaatgcaaaaggaggtttaatgttcgtatttggaaggtttttactgattgtttcaactgcctccctgtggctgcacttattgatgacaagatcctatgcatgcatgggggtttatctcctgacctaaagaacatggaccagattcgcaacattgcccgcccagttgatgttccagaccatggtctcctgtgtgatctgttgtggtcagacccagataaagaaatcgaaggttggggtgagaatgacaggggtgtatcatacacttttggagctgataaggtcgctgagtttctccagacacatgatctagaactgatctgcagggct

SEQ ID NO: 12838 - DNA, 296 bp, Oryza sativa
  Clone ID: PAT_MRT4530_1892C.1
atggggaaaatgggggaagggagcgtgggagtcggatataaaggcggagcggggtcatcgccctactgttgccctcccctcacaagccggtacaccgtctccttctccggcattggtagcaccaggcgcatccatgtccacaacttgctgccctccacgacaacgacgtaaccccacgctcgcagaagcccaatcccttcttcaattgattcaacaatcgagttcgcgaagggcgtccttcgctctgctccacgctgccgctttgcctccccgtcgccaccctcgctcaatcccat

SEQ ID NO: 12839 - DNA, 1484 bp, Oryza sativa
  unsure (1)..(1484): unsure at all n locations
  Clone ID: PAT_MRT4530_18930C.1
atggatgcggcggcgctcgacgacttgatccggcggctcctggacgcccgcggcggccgcacggcgcgccccgcgcagctcgccgacgcggagatccgcaagctctgcgccgccgccaaggacgtcttcctctcccagcccaacctcctcgagctcgaggcccccatcaaaatctgcgaatgtgattgcatcatgcttaccatcattctgcctacttactcattgacaggagatatccatggccagtattctgatcttcttcggttatttgagtatgggggcttcccaccagaggcaaactacttgtttctaggtgattatgttgaccgtgggaaacagagtatagaaactatatgtcttctccttgcgtataagattaagtacccagagaacttcttcctccttaggggaaaccatgagtgcgcatctatcaaccgaatctacggattctttgatgaatgcaaaaggaggtttaatgttcgtatttggaaggtttttactgattgtttcaactgcctccctgtggctgcacttattgatgacaagatcctatgcatgcatgggggtttatctcctgacctaaagaacatggaccagattcgcaacattgcccgcccagttgatgttccagaccatggtctcctgtgtgatctgttgtggtcagacccagataaagaaatcgaaggttggggtgagaatgacaggggtgtatcatacacttttggagctgataaggtcgctgagtttctccagacacatgatctagatctgatctgcagggctcaccaggttgtggaggatggctatgaattctttgctaagcgccagcttgtaaccatattctctgcacccaactattgtggcgagtttgacaatgcgggggcgatgatgagcattgatgattctcttacatgctcattccagatccttaagccttctgataagaaaggaaaagcaggaaccggaaatatgtcaaaacctggaactccaccaaggaagataaaaattaatattatttaggcagattcccactaatgtgaactgagaaattgtgatggagtactcctccaaacttgttattggaagatttttggtgcgcatgacactgttgaaaaatgtcgacctgcgtacctttgtgttttcactgtctgatgcaaatctgtcctgccgttattcctgctgaaaagaagatcatacttcggctgttcggcaaaaaccatacttggaagccttctttaacatggattacttatttcttcttgatctgctacataagtcagaaaccagaatatctgtcaatgggtaggcatagggaaactactagtctcatgtagattttgttcaatgctgtatgccattcacctgtaaagtgtgcctttgaaagggactgactgattagctgaagtcttttactgatgctgattgcatagaatggtaactttttacccagcaaaaaaaaaaaaaaaaaaaaaaaaaaaaaagan

SEQ ID NO: 12840 - DNA, 380 bp, Oryza sativa
  unsure (1)..(380): unsure at all n locations
  Clone ID: PAT_MRT4530_18931C.1
cccacgcgttcgcaaatattcagaactagctagttcaatcttgcacttatctctgacttccttctcatttttgtttcattccatagctgaagcaaaatggtatgtgctgntcttgaatatttgttgctgcactcggttggctttctggttcaaatcaacatttttttgtgatgtatatatacttggtagggtgacaagaaacaagtgaagctaaaggttcggggtgcaagcgagactgaggtcaagaatgtacttcgccaagaattcaaaggtttaattaccatcttgttttttctgttgccaaaaaggaacgagcaaaactcaaaggtgtagagagggatagctaaaatttaagcggcatacaaggaaatttctttact

SEQ ID NO: 12841 - DNA, 640 bp, Oryza sativa
  unsure (1)..(640): unsure at all n locations
  Clone ID: PAT_MRT4530_18932C.1
aatcaaatatcttttatcatatatgcaatttacatgtaaagtttcctttacaataactctaattcaacttatatattaagctcaaaagtaaagagagatcagaggttacaccccagcaaaccaaatttcatgagtgcataataatagacgagtgcacctaaatacatgattgtcgttactacatatgcaagcctagaaatctactgacttccgtgctggcacatttctttgatggacaccaaacaattgagtaaggtatggacacgttatgcatagaagccttcctcagtttcctcttctacaaacaatcgtgtacgtcacctgtaacttctagcagtacagaagacagacttaacaatttcctttgtattaattctttacttggtgcttagcaatcacccgtagagtctacctgaatctcttgcgatctccgtaataggatgttgtccaataatccagcttggtcnttagatccacaacagcttgaactgatgtttnggaataaatcnaaccacagcttgaatatttgacctntaattacatacncgcatganatggntctgnantccccttcactccataaancancgctccattccggtnncccacnnctttcnttnctgnccnncccccntaaaat

SEQ ID NO: 12842 - DNA, 300 bp, Oryza sativa
  Clone ID: PAT_MRT4530_18933C.1
atgtgatatcttcattcttcactgtatgattggaaaatagtaagtgcatcatagggtaggaaagaggggacatgaggcatatgatgcattgctgatttgatgttctgatgctgacactgacacatgttggcctttcattggagtatttgggttggtgattagctgctaacggtggtgaatgacacgtgtcgggctttcgttggatgttttgggttggtgattagatgctaattgatgttgaaggcagtagtggggaaagggaggtcagacatgatgccgaaatgaatgagaaatgtttct

SEQ ID NO: 12843 - DNA, 630 bp, Oryza sativa
  Clone ID: PAT_MRT4530_18934C.1
gcacgaggccaacaccgccgctccgcttgaataaaaaaaaaaaaacaactctaaaaccaagcgaggaggagtaggaggcatcggatttgaggaataactatggcgagttcgccggacaaaggtaaagagccagccgtggatccgccatcggctgatccgtcctcgggctccgtgtcagcggagaataagaagggcaacagcagcaggggaaaagggaagaaggctgcagcggcggcgccggtggccgctgattcctcatcgacggcggctgcggctgccggtgccggagacgaggtgaataggacggcgacggtgaggatgtcgcagccgcagatcgacctgttcatgtcgttcgaccctcccccgctggagcccgtgacgggcgtctccaaggaggaggaggatcgcttcgcgaagatcgacgcgcagctggccaagtgggagaaggagatccgcgcggacgcggagatggtgaagagccagtacgagcagaaaggctacgtcgaatacgagatcgatgccgatctgtttcctgctagggctccacctcgccctggccgcaggagggctcgccatggcgttatggcgaagaagaagccgcagggaggaggaggagcaacagcaaaatga

SEQ ID NO: 12844 - DNA, 349 bp, Oryza sativa
  Clone ID: PAT_MRT4530_18935C.1
gtgcccttctacttatagctacatggagactcgcgccaaatggcactggcagtgggttcgctgcgctatccagcagcccatcacatcttgtatgggagtctaaggtcgcactatccgcgaagcgggagcatgggacacacatccttagcgcgattcctgagtcacatgaccaccgaacagctgtgttactcgatcaacacccttagcgtgatcaaccttagcaccatcgtcgaactcggagccaaccttctggtagatcttctccagcgcggtgaggtcctcgcgggcctcggataactccccctccttcatgccctcgccgacgtaccagtggacgaaggcgcgcttg

SEQ ID NO: 12845 - DNA, 244 bp, Oryza sativa
  Clone ID: PAT_MRT4530_18936C.1
ccgttcttccctcgctgcggtttcaatttcgcggctcgtgtcttctcttctcggtgcccctgccttggctctcctccgatcaaatgcggcgagatctgcgcgcgtgaaggcgtcggcgcgggggcccaaagatcgatcctttgctggatcgggagtttgggtggggggaagcgagttcttggatcttcgcggtggtttcttgggggcgtctctcgtaggacaaaagggatggatcagtatgagg

SEQ ID NO: 12846 - DNA, 565 bp, Oryza sativa
  Clone ID: PAT_MRT4530_18937C.1
gtttcatgcatgcaaggtcacgcgcctcggtcatgtgagaaagcgcggttcctacaaggaaaggaaaggcgtttgttctgtgtaaaaagaccagaaaagagcacgtacatcgtgtggtgtagcagagcagatcgtagttcattggtaaagatggaatttggcagccaatgacgcttaaggtgaagagaatcctagtgcagtttgcgatacagttacatacacatgttctttatccatgggtaattgagtagtaggagcagaaatagctttttcataggtttataagatatggattttaggagatgaaatatgccacgcgcggcaaggcgccatgatcgcccaaagcatgcgttcatcatcaaaaaacaacgtgactgatgccaagactattcccccgaggtaggcgatcgatcgatcgagcactaacccagccgcccattgttggaccatcaagctcatcgaatcttcgtttccggcacatgtatagctcctcatattgtacgatttctattgcgtttcgccacatatatagctccatgttgtctcaaaaaaaaaaaaaaaaaaa

SEQ ID NO: 12847 - DNA, 206 bp, Oryza sativa
  Clone ID: PAT_MRT4530_18938C.1
aaaaataatgggatagagggctggtaggtttgggccggggacaagagctaccacgactgcacgagcagctggttggtttgggctgcggcccatttccagcaagcggtagcagtagtttgtcgacaaaaactccttgtatacctcaaaattttctctaatccttttaatatcttcaagttttaatcatctaaaaaaaaaaaaaaaaa

SEQ ID NO: 12848 - DNA, 584 bp, Oryza sativa
  unsure (1)..(584): unsure at all n locations
  Clone ID: PAT_MRT4530_18939C.1
ggtagtgcatcaatagggctgcagcagggtgacacaccagcaccncggttattggattcaggagtttgccaaggagcagcaattaaatgattagcttccccctttaattttgctggcaggtagtctgtcgagggcttcttttttccagttatggcaatgtagagcccttttcagagtttaatatgacccaaaggcttcagggaacatatatagtcaactgcttggaccaaagctgccattcatactgctgtgcttttgttgtggattgaactagcaggagagaagaatgcacatgaacttataaatggaccatttccggtagccccgagttctcactagaaaaaggcagctactttatttgtcctgtatattagtgtgttgtttattaatcaatgtaaatgatcactgacggagtacatgtatatgtattaatcacctaatcgttctgtaatattttctgtttaattttttttgctgcgcggcgtagcgcacaaaccctttctagtactagagcctggggcgcgcctattgcgcgcctcttgtaagcagttcggtttaattaattgtctacaacagaattttac

SEQ ID NO: 12849 - DNA, 265 bp, Oryza sativa
  Clone ID: PAT_MRT4530_1893C.1
attagagtgcatggattgcattggggggggcgtgatgagaagaacttgcagggaaactgatgtgtgtgtgtgtgcccccctgaatgaaatgttgtggtgtggaatgtggtggagcatggtgtgcaatgagggcaacgggctgtggaaaaagtggacatttgcccggatggggaatgtgtggtgaggaggaactgtgcagaatgactgcatgcctggtgactgtgatgtgatggtgtgcagctgcatggatgaaagtggtgggcat

SEQ ID NO: 12850 - DNA, 1251 bp, Oryza sativa
  Clone ID: PAT_MRT4530_18940C.1
gcacgaggcctcggccgattcggcaccagggttatccaaaacagttgcctttttactctgattttgatcagggtcatggttaccaggtatcaattgaaggggtcaaagtttatggtgctccatgggacaatatttcttgccaaagtttccagcctatgctgaaatatgctggagatcgaggtctgcaaactgttatcaatttcgaggatgaaccatacagtggagggaattgtgttacagtgaagggaagtctccagcagaatgaaattttctcagaacagctttttaatgggggcctttccatggagggggaatctgtatatgtgttttattcagtaaaagccgatgaacgctctggtttagggttgtcactggatttgtcatccggaaacaatgagagcagttccattcttattgctgatgacacagcagcattcacaagaaagaaacaacaccgaaaatatggctcatatgttaaagctgataaggcagaaccacacactccagttcaccaaaattgggttgtctacaaagcaactatcctgcccagtgctggctttacattaactgggatcaacatagtctgcacaatgaaaaccactagcggaactgatccagaaacagatggagatggaagctcagaagcaggtgcaaacagatcattgcattaccatgcatcgcttggccatgttagcattcgaaacactgaagaaacagagttccctccagcaagatcatgggtgacggaaggcgattacatctcctggtcgaatggttcagatgaatctaaacttgcaagcctgaaaatcagttgggaacttgaaaataaacagcaggcaccattcatgaagtacaatgtctatgttgagaagttaactgcagactcaaatgcaaaggctcccagaattttccttggagttgccagcgtacaagtcttctatgtatctgacctagaggtccccagcgaagtcactgctctgaaatttttcattcaaccgtgtgggcgtgatgggagttgccaaggactgcacgaatgcccaaagttccatttggttcctgttgattctgccatgtaacatttatctgcctaccttgctgttttcagtactctatgttttcacatcatttatcacgttatatgtttataaacagaatcgttcaatgtgatctttcaataaagagtaaatcatgttgttacctactttcaaaaaaaaaaaaaaaaactcgagactagttctctctctctctctc

SEQ ID NO: 12851 - DNA, 273 bp, Oryza sativa
  Clone ID: PAT_MRT4530_18941C.1
gaaagaaaaaaataaatcccagttttaaaaaaactttttttaaagtttaaaggtgacctttggggccccgggggtccccccggaaattccggcccggaccctgggggggaaccagttttccttatgggggggtttttaaaggttggggtaaaaatgggaaaaggtggttcccgggggaaaatgtttttcctataaaaattcccaaaaatttacgtggccggaaaattaaaggttaaaccctgggggcccaaaggggggggctaaccaaaatta

SEQ ID NO: 12852 - DNA, 866 bp, Oryza sativa
  unsure (1)..(866): unsure at all n locations
  Clone ID: PAT_MRT4530_18942C.1
ttttttttttttttttttttttttttnttttttcaccatcagaaatggcatgtcttagataataaaagggatcaaacccacatacaagaaaaacatgtccctacaacatttccttatcttacaaagagaaaacaaggagaggagctaatcttacacggcaggtttcctacctaggcccatactagaaaaagcacactcctgaaaagagttccaacatggcttttggatacaacaattgtaacgtgtccgaaaacttgattttgagtcagattcagcctccaacctggcaccaacgtggcatgatacatataaaggccagtaaggccttgcattacaggaaaaactggcccccaaattatgaagcgcaaaagagaatcaataaaaccatggatggggagctgaaggtatcactgtgttgcagtcttcaagctgaagggcctccattttgagtatcctctaacttggtttttggttcatcagaaacatggttagaatgtgcctcttcgaacagagggctttccgctttcctttttcgtgttagctccagttcttctgcttcaggtggctcatcagcatgagaagctcgttcgccagcttcaccctcctgatgtaccgatggtgctgcccaggctatggggctcacttcttccggcttaacggacttggtcgttactacacttgcttcatcatttggattcactatcttagggcgctttttgacatagtcctgtcgcagaggcctaggaatctggaatgaaaattgagttaatgttacaccctgtgcaacataatccggattctccaagaggtacctatcaatttcaaccagtgacctcagtttccttccagtaggagaagtgtaatac

SEQ ID NO: 12853 - DNA, 165 bp, Oryza sativa
  Clone ID: PAT_MRT4530_18943C.1
atggaaatcgtagcgcctgtggaggtatcaatgctgctggccgccggcgctgtggacaccggcagcctgaactcgccaccggcatctgttggcaatttttttgacaagttgacaagggttggtcttgccctctacaggtccttctccacgtccaactcgagatag

SEQ ID NO: 12854 - DNA, 927 bp, Oryza sativa
  Clone ID: PAT_MRT4530_18944C.1
atggccacaatcacagccaaatctggggtcatcgccgtatcgatggtcttggtcatgtgcgctgcctctgcagctgctggcgacaacgacatgctgccggcggcgttcgacatcctgcagcagccggcgaaggaagccgccaacctcggccacggctgctacactcggtgcttcgccggctgctttgcagctgggttcgatggagattactgctcggacttctgctccaaggaatgtggcgatgatgtccggaagttcctcagccggctgtcgccggagaactccgctatcgtcggtgacatttgcaacatcccaaggtgcatcagttcctgcgtcgaagcgaagattgatccaccgtactgcaagatttggtgtgaggatatgtgcggtgatgatgtccggaagaaccaaatcgggctctcgcccctcctcgccatcgggagcggaacatccatcttttcacttggcggtggcgcctacgtcgtcctcgccgagctcctcatgaccaacgtccacaaatggcgccatcaggatttgaagctggccatctggatcctgtcgctggactccggcggcgagtggaggaaaggcccggagtgtcgtgtcggagacatttgggcaagcgaaaagtacgttgtcatgggagtgccgcggattagtccgcctccggtgtgccctgtcttgcgcacggtcaacgataatgtcgtctgcgttatcgtgaacgatgccgacgagactgtgtacgggagtgtggatgtcatagcccagcattttcttgccatcgacgtggaacgtaaggatcgaggtgggtgctctgctgtccgtcgttaccaagcttcacgccttcaccctgatggtggggtagaacctgtacggctgtaccctaaccacatggcttgcgaattcagtgagtacatggaacactga

SEQ ID NO: 12855 - DNA, 213 bp, Oryza sativa
  Clone ID: PAT_MRT4530_18945C.1
atgtatacccatacaccggcccgcgtcggtacgactaccgccaccactactcacttcgccaaccgcatccacacccccagccatacgtcctcccgtcccctctccgctgtctcctcgtattgcggtgaagagatcaacacaacggagcgaaaacccatggaacgagggaaaaagcagagcagagtagaataccttatggggccttactattga

SEQ ID NO: 12856 - DNA, 2126 bp, Oryza sativa
  Clone ID: PAT_MRT4530_18946C.1
tccccgggctgcaggaattcggcacgagcgggctcccccgtacgtctcgcctcgcctgcgccgatccccatctcgcgagcagagcagggaagagggaagaggcgccgtcgtcgcgctgcatcctgtttgcaggataggtgatgataaagcataatagttgaccaaactcgctgtacttctccttaatcaattatgttacaaagaaatatggtgtggacacatcaagttgccagtcctgaaaaccaagttcaacctgaaaatttctatcatggaggtgctgggagcaacttatctaacctgagtgtgcaagttgctgttggagttccaggaaatactgatttccggagtcactatgagagcattaatcttcagcaccagcatgttcagaatccatacccacatgtgggtgttgcttcaagttctgtgttcccatctactatgtacaacccctgcatatcaacaacagcagtggacagatatgttcctcctattcaaagttttggattgggcaatccactactactgcctttatatcatcaacttgctcaaggatccatggatgagaacggcagcagtggcaatttttgtgacagcgtcagggaatttatcaagaggaaaaatgcattacttgtgggtggccatcattttgttaatagttttgcaagctcaagctcatctgcttatgtgcctccaaatcctttacataggtcatggaacgcttcatttgaagcaaatatcctacccagcactggagtttccaatccaccagagtactcttctgcagattcactgaacaattccaattcgatggcttcacatccagaattggtgcatcatggcaattatgtatttccagctggtcacatgagccaatacaatgcatggattgcacaggcaagcagaactggtggagtaccacagtgggaacatggcaatgcagcggctaatcctccaggtggatttgttcattctggaaccatagacatgccaaatggaggtcttcagggataccaagctggcccttttgccaattattatgggcctctgccccatttccaccaaaatcctctgaatagcatgcagcatcctgctctatttaatcatatccaaatgcaagtacctcatcaacattgcctcagtaacaatttattgcatcacccttctggcaatggcctccccttggatccaagaattctggcaatttcatccaattctgggcatacctttgggcctacagctcagccatctttagcaaaccaagttaatgctgggagttcgagaattcagccatatgagttcctgtttttcaaactggacaatactaaatttaaaggatatcagaatttagttgaaaaatatcacctgatattgttcctgaatgctccgttcgtggatctttcgagattgtatgaagcaggagttattgatgaacatagagatatgcggcttgatgtagacagcatgacttatgaggagcttgtagcgttggaggagcggattggaaatgttaatagtggttttacagaaagctacattgaggaaaatttgaagtcaagttcttatgtcccggacgctgattgcatgcctgatcagtcttctgtggagaaggatgcttgcataatctgccaggaggaatatgaggctaaagaactcgttggaacccttggttgtggtcacaagtaccatgcgatgtgcataaaagggtggctgatggtgaagaacctgtgccccatctgcaaaacaacagctttgccagctgatagaagaaacggatgatggatgccaataacatttattggtcatttgcagcaacaaacattcagctcagttttgtacataagacatgctggataatggttgtgcctgtatttccgttgttgtgatacctaaagctgtacagtgagaatcgctcatcttgtagattgttttagaccctaaatgttccatgatgcgcgaacagctatcatcatggcatagctattagatcgctcaatttttccctttttattgtacatgatatttatctttattcttttcccaaaaagaaaaaagagaacttgtagttcttctgtactttgtgaaacttccaagaactaaaggagtttctcaaaaaaaaaaaaaaaaaa

SEQ ID NO: 12857 - DNA, 110 bp, Oryza sativa
  Clone ID: PAT_MRT4530_18947C.1
ttttggccgcgttttcgcgagcgaccgaaggggacgttcgggccagattcgagcgcatgcctgccccaccgtcgacgaccgcggcagtgccccgcccggagggtttctac

SEQ ID NO: 12858 - DNA, 2649 bp, Oryza sativa
  Clone ID: PAT_MRT4530_18948C.1
atggctttcgtgagcgtggtgcacatgatctgtgtcaatggcaggcgggccctcgccacagttctttgtgggccaccatcgtgcgctcttcctgccgtaatggtagtggagatacgggatcctagggtaaaacttgtgtatgggatgtgtccatggaccagtgtgcttgctacgggcactgggatgtggggcttggccaatgtgtctgtggtgcgccgggagttttctcgagctgcgtgtgctcctgctatgtacgacggaacgtggcacgctaatgttgagcttgatagaggtagttcttcatgctctcacaaggatcatgttgaggctttaaagggtagcctgctaccagcgcaagggagaaggcctcaatttgcacagctctacatctacgatccagaaaatgagatacaaaatcgaataaatatatttgaaaatgatggcagcaatagtgacaaggctgatcctgctatagttgatgctctgtgcactatgttagattcgcataacatccttgtgcagaaatttcgttatgctagagaacgcttgaacgagaatgggaatcagcgtttgacgttacggcttatgggctgcaatgcaaaatctgatgtgcagtataatttaccaactagcggtgaactagcagcgattatagtgggcgattactcagcagctgagtatagttatgatatacttgtccaggaaaaagatgatggtttgcaacatgtgtcctctttgcacccatggtatatggctttacagtatctgttactttttccttatggcgaacgagtatttcaccttggtattgcatacaatgattatgatggaattggaagaaaggcaacttctcgatcaggcttacgaatattgattgaaaatgatgatggctcatgcggattagaaacaaaaaacgtagtttaccatgaaatcctggatgctacgttagcagcgttgccattgtggtattcttttgttcttatagtgattaccatgggtgatacttcaattgataagctttttgaaggggatgacaactcccgtcttcttgcccgggtatctaggctctgggaattcactgattgcaaggatgctaccaaaatttatcacatcgatcttgtacttgttgatgagaagggtggcagcattcatgcacagatattccccctacttctccaggtgttcaagcctttgctgacagaaggaaaggtttattatttggattcatatcgtgtgaaaacatccaacaaaagctataggccagtggccaatccactaatgatgactttcactaagtggacatctgttgagcaatgccttgatgtgcctttcaatttccctactgttgtatactctctgactcctttgaacgaggtatcaaactttgtggacaagaatgagtcctttgttgatgtcatcggtgtcattactgaaatatctacacctacgatgctacgtcctaagtcaagggatgctagcagcttgaaaaggacagttcagatatgttatgcaaacaattctaccttgaatgtatctctgtgggctgaacaagcattggcatttgatgctgagagtatacacaaagctggacaaagtgagcctcaaattgttctgtttgttgggacccttgcaaagaactatcctggcatagggttagctctgtctagaggctctgtatgcaagtggtacattaacataaatgtacctaagatggttgatctaaagaataggattggagcaaacttccagccaatcaaactgcttcaggcaccaaccacaaacattgctgatgaaaatgctgatgacaaaactgtgagagaacgcttggacatgaatcctcataaaaacaggaggactcgatttcaagcaaacgtgactattcggaaaatatgcaatgatagctcttggtgcgagatcataatgtataggtacaagttatcggtcttagctggggatgatactgcggatgctgtgtttattctctttgggaaaatagctcagcgcattgtgcgaaagccagttgagcttcttgtcgagcagacaaccagggagagcaaatttatccctgatgcaataatagctctgcttgagagatcatttacatggaatgtcagcttcacagagaatacacttaggactggggatgtatcattccaggttaagagtgtgatctccatgagtgttcttggggaacctcttatgctaatgtccccaggaccagcagattctcctggttcttcagctatcatgtcacctggaccaagcacttccatcatgtcacccacaagaacatctgagattgccatttcctcacctccatcagctacaatagcttctctagtaaccaagcgtgcagcacctcaaacaccaactagcagactttctttggctaccacagagcaagcaagtcatgttgatccactgtctccacccatgactcaagtagtggcctctgagagtacagaaatgaaacagaaggctattattatttctgatgacatcacgctgccactggctgcatctattccaaacagctcaaccaagaaaagaacccgcccacttcaggcttcaccaacagctaaaaaactgttcactgatgatggtgctcatgaaaaggaggctactgacagcctgtcagataccgcttga

SEQ ID NO: 12859 - DNA, 5910 bp, Oryza sativa
  Clone ID: PAT_MRT4530_18949C.1
atggcttttgtgagcatggtgcacatgatctgtgtcaatggcaggcgggccctcaccacagttctttgtgggccgccatcgtgcgctcttcctgccgtaatggtagtggagatacgggatcctagggtaaaacttgtgtatgggatgtgtccatggaccagtgtgcttgctacgggcactgggatgtggggcttggccaatgtgtctgtggtgcgccgggagttttctcgagccgcgtgtgctcctgctatgtacgacggaacgtggcacggtcatggtgtagccgcgatgttcgccgtgggagtatctcatgtctcgctgctgaatgccgctgctcagcattgcatgatacctagcattgcgtacctgtgggagtttagctccgatgctaatgttgagcttgatagaggtagttcttcacgctctcacaaggatcatgttgaggctttaaagggtagcctgctaccagcgcaagggagaaggcctcaatttgcacagctctacatctacgatccagaaaatgagatacaaaatcgaataaatatatttgaaaatgatggcagcaatagtgacaaggctgatcctgctatagttgatgctctgtgcactatgttagattcgcataacactcttgtgcagaaatttcgttatgctagagaatgcttgaacgagcatgggaatcagcatttgacgttacggctgatggggtgcaatgcaaaatctgatgtgcaatataatttaccaactagcggtgaactagcagcgattatagtgggcgattactcagtagctgagtatagttatgatatacttgtccaggaaaaagatgatggtttgcgacgtgtgtcctctttgcacccatggtatatggctttacagtatccgttactttttccttatggcgaacgaggatttcaccttggtattgcatacaatgattatgatggaattggaagaaagtatgttaccatgcttgagttttttcgatgtatgatccactataggctgaatgaacctaacccatttacttgctatggtcgtcttagtgatcaggctgttgttgatgcatactcaagtattgagagcagtagattaaaatttatagctgataatcaggctgatataagatctgaatgtgtgcaaggtatagttgatgctattgatcgaggcataacaagcggtgattctgtaggcaaacgagttatccttcctgctagctttactggtggtaggaggtatatggttatgaattatcaagatgcaatggcaatatgtcgtgtttatggatcacctgatttatttgtcacgtttacatgcaattcaaagtgccaagaaatagctgaatcaatacgatttgaggatggccagcaaccatctgatagagttgacatgattgttagggtctttaatatgaaggtgcatgattttattactgacatcagggaaggtagaacatttgggtctgtgcttgcagttctctacactgttgagttccaaaaacgtggcttaccacacatacactgtttggtatggcttgctgctagcagtgctcaggtatcagcatctatcatagatggatttatctcagctgagatacctgactttgaaaccgatgaattatgttatgagttggcacatataaatgttgagtggtgcaataaatctaacatgattaagtatctttttaaatatgtaatgaaaggtcatgatcgatcaaaaatttattttgagaccactgctcaaacaggaaatatttcacctaaccatgacttggcccctccagatgagattctagagtacatggatgctagatttctttccacttgtgaggcactgcacagaatatatgagtttgacatacattacagagttccacctgtagaaaggttagctgtccatttgcctggtatgaattatgttcgatatgagaaaggatcagatctgagagcgttgattaatagccctgctgctaaacgtacaatgttaacagaatggtttgaagcaaatgcaaagtatgaggaagcacgcaccttgacatattgtgattttccaaaacaatggacatgggattcgtcgtctagatgttggcgcccgagaacaccggctcctaagataggaaggatgtattatgtacatccgacggttggtgaactatactacttgcgaatgttattgatgattgtcaaaggtgcccagagctatcctgatatacgaacatacaatggtgttatatatgaaacatatagagaagcctgtgaggcgcgaggcatccttgagggggataacgagtggcaccttctttttgatgaggcaatccaaagtgcatcttcgtatcagcttaggcaattgtttgttactgttgtgctttattgctctgttggtgatgtgcgtgctttatttgataaatattggttgtatatgatagacgacatacaccgtaggctaaaaaaggctcttgataatccgcactgtattgtttcgcatgaacatttgcttactttattgttacatgagcttactaatgtttttggaaaaagtggtggcaacataaaagactacaacctaccccagccaactttttctctacaagttgcttttggtaataggttgattgaagaagaacttgcaactgatccattaatgatgtctatgcatgcagattctttgattgcgcaacttaatgctgaccaaaaaacaatctttgacagaattgtagggtctgttgtagctaaccagccaggatttttctttgtgtgtggtcatggtggtattgggaaaacatttatgtggaatgctataattgcaaaaataagatcttcaaacaaaattgttcttgctgtggcctcctcaggtgttgcttctctgcttttacctaaaggaagaactgctcactcgcgttttaaaatacccatagatataaatgagacaagcctttgcaatgtaaaaagaggaacaatgcttgctgagttgcttgaaaatacttcacttattatttgggatgaagctccgatgacacatagacgttgctttgaggcattagatcgcacgttgcgtgatatcctgtctgaaataaccccttcaaatgctattattccttttggtggtaaaactgttgtgctaggcggtgactttagacaaattctacctgctgtgcccgagggttcacggtctgcgattgttgatgctttgataacaaactcaaagctttggaaacatgttgttatgcttaggctgaatgtaaatatgcggttgcttaacccatcacttccaagtatgcaaagagaagagcttagtgattttagtaaatgggtcttggctgttggtgacggctctttaccagcgacgaaaagagatgatggcgataaaatagctactgttgttagcgaagtgtaccatgatttcttggcgtgttacaaaaatcccgaatatttggcctcgcgtgcaattgtatgtcctagcaattcagttgtcgatgaaattaacaattatgttgtgagtttaattccaggagatgaaaaggagtatcttagctgtgatacaatctcaaaatgttctgagcaaatcccagattttgaccttttatatccaactgaacttctaaactcaattgatacaaataatttccccacgcatagacttgtgcttaaggagggtgtcacagtaatgcttcttcagaatcttaatcagtcaatgtgtctatgtaacgggacaaggttattagtcgttgggcttgggcagcgtatcttgcactgtgtcatattaactggctctaacattggtgaaactgtgtgcattcctaaaatttctcttagcactgcaaaattgaaatggccatttacattgcaaaggcgacaatttcctattcgagtttgctattcaatgactatcaataaaagtcaaggtcagacattacagagagttggtgtgtatcttaagaaacctgtttttactcatggtcagttatatgttgccttctcaagggcaacttctcgatcaggcttacgaatattgattgaaaatgatgatggctcatgcggatcagaaacaaaaaacgtagtttaccatgaaattctggatgctacgttagaagcgttgccattgtggtattcttttgctcttatagtgattaccatgggtgatacttcaattgataagctttttgaaggggatgacaactcccgtcttcttgcccgggtatctaggctctgggaattcactgattgcaaggatgctaccaaaatttatcacatcgatcttgtacttgttgatgagaagggtggcagcattcatgcacagatattccctccacttctccaggtgttcaagcctttgctgacagaaggaaaggtttattatttggattcatatcgtgtgaaaacatccaacaaaagctataggccagtggccaatccactaatgatgactttcactaagtggacatctgttgagcaatgccttgatgtgcctttcaatttccctactgttgtatacactctgactcctttgaacgaggtgtcaaactttgtggacaagaatgagtcctttgttgatgtcatcgggttcattactgaaatatctacacctacgatgctacgtcctaagtcaagggatgctagcagcttgaaaaggataattcagatatgtgatgcaaacaattctaccttgaatgtatctctgtgggctgaacaagcactggcatttgatgctgagagtatacacaaagctggacaaagtgagcctcaaattgttctgtttgttgggacccttgcaaagaactatcctggcatagggttagctctgtcgagaggctctgcatgcaagtggtacattaacataaatgtacctgagatggttgatctaaagaataggattggagcaaacttccagccaatcaaactgcttcaggcaccaaccacaaacattgctgatgaaaatgctgatgacaaaactgcaccagccacaaacattgctgatgaaaatgctgatgacaaaactgtgagagaactcttggacatgaatcctcataaaaacaggaggactcgatttcaagcaaatgtgactattcggaaaatatgcaatgatagctcttggtggtacaattcatgcgaaaagtgtcttagggttgtcaaaccatttggttacacctacaagtgcactggttgctacaatattgcaatggcagtaccaaggtacaagttatcggtcttagctggggacgatactgcggatgctgtgtttattctctttgggaaaatagctcagcgcattgtgcgaaagccagttgagcttcttgtcgagcagacacccagggagagcaaatttatccttgatgcaataacagctctgcttgagatatcatttacatggaatgtcagcttcacagagaatacacttaggactggggatgtatcattccaggttaacagtgtgatttccatgagtgttcttggggaacctcttatgctaatgtccccaggaccagcagattctcctggttcttcagctatcatgtcacctggaccaagcacttccatcatgtcacccacaagaacatctgagattgccatttcctcacctccattagctacaatagcttctccagtgaccaggcgtgcagcacctcaaacaccaactagcatactttctttggctaccacagagcaagcaagtcatgttgatccactgtctccacccatgactcaagcagtggcctctgagagtacagaaatgaaacagaaggctattattatttctgatgacatcacgctgccactggctgcatctattccaaacagctcaaccaagaaaagaacccgcccacttcaggcttcaccaacagctaaaaaactgttcactgatgatggtgctcaggaaaaggaggttactgacagcctgtcagataccgcttga

SEQ ID NO: 12860 - DNA, 272 bp, Oryza sativa
  Clone ID: PAT_MRT4530_1894C.1
cgagctcggtacccggggatcgcaatggtgctcaaactgcggaagaaggaattgtccaagtcttgcactaacagtttcattaatagtccaaagaaaacaatgggaatggtgcccaaaccaatacccagacctaatttaaattcgagggaatcgtattggcgagtttgcacagctttgataatgcccttagcaatgccggttaaatcttcccagaagtaccaaaatacggctccaatgctacccaattgaataacggcggtgaacgccacccc

SEQ ID NO: 12861 - DNA, 300 bp, Oryza sativa
  Clone ID: PAT_MRT4530_18950C.1
atgacggttgtggaaggggaattgtgcgaagtgccctccaaccgtcattgggatgcaatcctggacgtccacgccaaaacatggatccaacggcgccaggattggttcagccgaaccaccagtttcggccgaacctggggctggtccaatccagcccaatttcgactggtggcctcctctattgctccactccacagacttgtgaattttggcccaattcatcgtgtcagttctgagttcttggcccatttattcataagtcttattctcgacatcgtctgattgatttatcatttaagt

SEQ ID NO: 12862 - DNA, 636 bp, Oryza sativa
  Clone ID: PAT_MRT4530_18951C.1
atggagaaagttttttctggatatgcactgttctttgtgttgtttcttactggttcaacaataggaggatgcttccctactgttgaggaagtcgatcctgaatcatacaacgattcacagacgcacttcactacaagttggtttgttgaagaatccaagaaaggttgtttagatatgcgctgtcctggattccaaaggacaggtggctcgcacccattcgttcctggacaggtgattaaccctgtttccagcacctctagaaggaaacaatacattactgtcagagtatccaaggatcaaaactctggtgactgggaaatctactttggttttgatgggaaggccaagattataggatactatccgagatctctctttacatccttgtcaaataagccggtgaacattgtgtttgggggctttgccttctggaaagaacataaaccgagccctccgatgggcagtgggattgctccacccaaaaatgctgcctcatttagtaatctcaaattctttgatgcagctggcaacgcccatccaattgaccatgatctagcacacgtatcagattgttaccctgtcactgatgttagagatggcgtgttctcttatgggggacctggcaatgtttgctag

SEQ ID NO: 12863 - DNA, 447 bp, Oryza sativa
  Clone ID: PAT_MRT4530_18952C.1
ccattatcctttcgggagcaatgttttatattctcaattcctttttaaaaacaaaaaataatgttttccaaacctcccacatttcatcctcaaagctaaagcccatgtttcttcatccgggttgccactcaccaaaaactaaaatacagtatatctttctaaggaagcctgttgagtttaaatacaacaaattttttacaataacatgaaaatgctgggaggaccagccaggaaacccttgtcagcccagatacttttggctgtacatgaaaaacctttattttttaagaccaaccccaaccttaattgtcgtcatcctctttaaacagctttaaataactcgcgggctggtcctctcttttttttttccgccctttttttaaaaaggaaaaatgacaactgggacactgtcccatttccctggaggccattcttaactgtcccccc

SEQ ID NO: 12864 - DNA, 813 bp, Oryza sativa
  Clone ID: PAT_MRT4530_18953C.1
atggagaaagttttttctggatatgcactgttctttgtgttgtttcttactggttcaacaataggaggatgcttccctactgttgaggaacttgcagtacatggatggattcctccagacgacggtgctactgagtattatggattagaggccactatggatgtttatggctttaatctagagcacgggcaacagaccggaggtttcatatggatttataattcagatgaaacaccagctgcaaatgtaattcatgctggatggaatgtcgatcctgaatcatacaacgattcacagacgcacttcactacaagttggtttgttgaagaatccaagaaaggttgtttagatatgcgctgtcctggattccaaaggacaggtggctcgcacccattcgttcctggacaggtgattaaccctgtttccagcaactctagcaggaaacaatacattactgtcagagtatccaaggatcaaaactctggtgactgggaaatctactttggttttgatgggaaggccaaggttataggatactatccgagatctctctttacatccttgtcaaataagccagtgaacattgtgtttgggggctttgccttatggaaagaacataaaccgagtcctccgatgggcagtgggattgctccacccaaaaatgctgcatcatttagtaatctcaaattctttgatgcagctggcaacgcccatccaattgaccatgatctagcacacgtatcagattgttaccctgtcactgatgttagagatggcatgttctcttatgggggacctggcaatgtttgctag

SEQ ID NO: 12865 - DNA, 540 bp, Oryza sativa
  Clone ID: PAT_MRT4530_18954C.1
ttgcttgttatgagttgcagcacggttgactggaatgctgaagacattagacaaatgctgaccaggttttactaactttttcttttcttcttttggacacattatttttaagaccgtgtcctttctactgtacctttaaagccaaaacaagcagagaacttgccatatgaaccaaacaagcttgtattgtattcaacattcaaaactgtccatgccttgaacttaacaacttcaatctgatagccgcactcttctgccatatctgttattgcatctaaatgaaacaagtctgatagtgttcatgattcttacatgaattgaatcttatgactcgacatgtattcttatggtaatttggtgctcaatgcagttttaaattttccacttccactgggtcaaaccattctccctactccggaatccatgctgctaaatttatctgcaaacttcatgcaaggctttgattttcatgcgggacacatgcctgttggacctggggcagtcacctatccccagaggcctggagcaactgtttgtgat

SEQ ID NO: 12866 - DNA, 292 bp, Oryza sativa
  Clone ID: PAT_MRT4530_18955C.1
cctagctaggtagctagctatgttggttcgcttgcatggcgtcgccttccacctcgagctgggttgccgaggcagagatggtggccggggtgctcctcctactgggtgccaccgtcacgtccacccaggtggcgcgcctcctggacgaagaactgcccaccggcgacatgccggcgatcccgggggtccccggagtgccggcggtcgggcccgggatcccggtgatccccggcgtgcccggagtgccggtggttggccctgggatcccgatcgtgtcggtgatccccagagt

SEQ ID NO: 12867 - DNA, 299 bp, Oryza sativa
  Clone ID: PAT_MRT4530_18956C.1
atttttatttactttcgctttttttggacacgatatctaaccacgaatcatatttgcctacgaaagttagctttaacatattgaattatttctttgcaatattacacaaaaaaaatggtacacgggtaataagatgataacatgtgaatagcaaacttcatgtgattcatacatacaattagttatacaaagcttgattgatctctaaaacatcaaacatcaattcattctgagcgatcactggagacagaccttgaaaaagaactgtggcagcgagcattatttaatcctagaatgcc

SEQ ID NO: 12868 - DNA, 230 bp, Oryza sativa
  Clone ID: PAT_MRT4530_18957C.1
gcacgagatgcaataatagtagtattccataaaaaaattagaaaaataaagccactgcctgagaaggcagccgacctgctggctgcagtgcaatgttgcacggcaccccacccaacgacggaacaacccgtccctttcaattcctctggctttaacttgagagaggatttttgccgcaatatttgcctcccacccgccacgcctccaggccggggatgccttattgccgc

SEQ ID NO: 12869 - DNA, 372 bp, Oryza sativa
  Clone ID: PAT_MRT4530_18958C.1
atggctgcatttagtaataatgttactgggcatactggagatcaagaccctgagatggtgggccccgactcccgagtcatcatcaccatgccctgcgttcaggatggagcaagggacggtggacggccgcgacacaacggctatgcaaggctcggccgtttgcccagattgtcactgcatactgcggcatgtctgagcagatcagcagagaaccttgcacttgcagcgcagagagatgtgcaagaaaggcaggccacaatcgctgcacagtcctatcttttccgtgttgttattactggtgtgttattgggcatcgaagagatcaagaccctgaccttgttggttcttggcattgtgatagccacaagctga

SEQ ID NO: 12870 - DNA, 132 bp, Oryza sativa
  Clone ID: PAT_MRT4530_18959C.1
atgcaagcttcaggaccgaagcacatcccaagcctgacacacataccagaagggactgcagcaacgatcacttcccttgtcgttgctagagaacggaagggagttgtacaggactggaatgcgatcagctaa

SEQ ID NO: 12871 - DNA, 303 bp, Oryza sativa
  Clone ID: PAT_MRT4530_1895C.1
tcactgctccagatgctctcttttgctcttgctctcgttgtgtatggggaattgcctcctcgagttcgtgtctaatcggatctcgatttgtggcgcaggtgctgatgccctcgagcagtctgggtgggaagatctctgggaaaggatcgtcgacttggtgatgtggaagaatgtggcgaaatcggcactctggtttgggttgggatccatgttcttcttctcctgctccttttcaagggagatcaccttcaggtttgcgcaatctgatccccttctacctggatttcctgctttgcagttcat

SEQ ID NO: 12872 - DNA, 451 bp, Oryza sativa
  Clone ID: PAT_MRT4530_18960C.1
ggccgcttccacaaccacggaggaggaggaggaggccgctggtgctgaggagatgaccccggccgacaaccacatgctttctagcattatcaccagcttgcttggctgctggaggacaaccttattgaatcacatcttgtctggtcaccatggaaagcagatggccgaaagtgacattgagtgcgtcaatttaggtattgctgggcaagaatgagactgacctactgatgaagcgtgagacataacgttgctaaataaagggcgaccttgctgcactgccagtggtgacatagtccgggtgatcgaccagatgattgacgaggactacgacaagtaccaccacatgattattgaaaccgctgatagagcagatgcagctgacatcactcagactgtatatgcagctgacacagatattgatgttgttgacctggatgctgctgagacttta

SEQ ID NO: 12873 - DNA, 324 bp, Oryza sativa
  Clone ID: PAT_MRT4530_18961C.1
tccgcgccgagcaactcactctgcctgaagccacggagaaaaagcttgggtgttttcttggaagccaagagtgaggcgcgcagaagaagaagaagaagaagaagaggggggaggaggaggagcccctcggctgaccccaccgagcgccacgccccccacggccaccctctccccgaagctgcccggccactcctccagggcctccaccgcctcccacgacgccccgaacggctcccgctcttctcccccgcccgcacccaccaccgccaagacctcccgccttccccgccccgacaggccccgcccactccttccctcgcccgc

SEQ ID NO: 12874 - DNA, 1770 bp, Oryza sativa
  Clone ID: PAT_MRT4530_18962C.1
atggggcaactccataatttgatgcttctgctgccgtgcctgatcttctccacgctactgcacatagaggcgatgagtgtagctcctgtgaaagtgagcaccacgcccatcttccccacaatcccaagagctcagacgaacaaggacttccaggtgttactgcgtgttgaggcgccaccggcggccgatctcaacggccatgtccccatagacgtcgtcgcagtgctcgatgtcagcggcagcatgaatgatccggtggcggcgtcgccggagagcaatctgcaggcgacgaggttggatgtgctcaaggcgtctatgaagtttatcatcaggaagcttgacgacggagaccgcctctccattgtggcttttaacgatggacccgtcaaggaatatagctccggcttgttggatgtttctggcgatggccggagcatcgccggaaaaaagatcgaccgacttcaggcccgtggtggcagtggctctgcgcttatgcccgagttgcaggaggccgtcaagatcctggatgagcggcaaggcaacagccggaaccgcgtagggttcatcctcctcctgaccgacggcgacgacacgaccggattccggtggagccgcgacgtcatccatggcgccgtcggcaagtaccccgtccacaccttcgccctgggcgcggcgcacgacccggaggcgctgctccacatcgcgcaagaatcgcgcggcacctactccttcgtcgacgacggcaacctggacaagatcgccggcgccctcgccgtgtgcctcggcgggctcaagaccgtcgccgccgtcgacacgcgcgtcagcctcaagactgccgagctaggcggcgcgcggatagtgcgcgtcgactctggcggctacgagagcagcgttgcttgcggcggggcctccggtgagtgcggttactgcgacgccgccgccacggtctgcgaccatcaccaccaccaccattgccatcaccgtcatcaccagcagcagctgctcgccatcggctactcgtacagccacgctccgggcgtccaagcggtgtccatcgaagggcacggcgtgttcgttcagaggcccgaggtggccatcttctccgtcgacggcggccgacaacggcaaaccctcctcccatcccccgtcgtgatgcagcacatggtccggttcgagctgctggagctcgtcgccggcttcgcggaaaccgagatgctgtcgaagaaggggacgatgcagctgcgcggcggcggcgcgcgcgccggcgacgtgctgcagggcaagtgggaggagttccggcgagcccggcagttctggggcggggtcgagctggacggcctcgaggaggatgtggacgccatggtggccagcctcaggagcgggctagcctacgtcagctcgtgggtgtcgagccaccagatgcagcgcgccaccgccatgggctcgccggagaaggtgatcgccgagttcatgacgccggcgatggtgatcatgctggaggaggcacgtaagctaccgtcgccgctgccagctgcggctgaggcggcgagagagaggcggcccggctgcaagggcggcggcgatctccattacgtgatccggcagcggctggagctgtggtcgaaggtgagacgcgaggtgccgctcatgtaccagccgtcgtcggagcaggaagacgtccagctgaccgccttgtttcgggaggcgtcgctggaggccatcgaccgagcaatgcaccacgacatctatctgattcatgctgagaagtaa

SEQ ID NO: 12875 - DNA, 2151 bp, Oryza sativa
  Clone ID: PAT_MRT4530_18963C.1
atggacagagacagcttcgatgacctcagcacgtgggctacgcagtcgtcggcgagcggccccgccaccgctccctctgccggcgctagcttcgacctcaactcgcaagcgccggtggcggaggggttcccggggcttgggatgtacggagcctttctccaaggcgacgacgacgagctcctcactggccatggcaggggctccagcctccctccctatcgcccaccacgtgccggagccggagacggaagagcgactccaaatctatctcggcgactgaacttggacggctcctccccgacaggagctggtcgcggaggaggaaatggtggcaccttcccagacgggttgtcttcggggagaggcgggcgcgttcggcagcgctcgagttcagccaccgcggcacctggccgccggagccagcgcagcaacacggcgatgagtggtgaagggtaccaagccatcgtcgacggcttacttgatagaagggggttggtgtatacccgttgccaggtgaagaaccaaatactcgtactgaaaaccacccactctttctggcgatacttgcaagcgcacatagggttggggaggttaccagatggaaccattgatgctgagtcttcgttctggagaacacatacagaggaccaggggcaagatgaagaggaagaggacgaggaggagtttcaaccaacacctattagtacaagcagccagaggagccaaaagggcaagagaccattaagtagcaattcaagcactttgtccagtccagtcaagaagagcaagagcctaatgattaagattgtgaaggacatagccagtaccttcaaagaggctgtcacagtcaacactaagcaaatgcagaatcgggcaagtgacaaggctgcattttcagtcaagaggtgtcaggagctggcatttgagtgtggcatagagcaaaccattgaatctgtctatgctatgtcaaagatgttcgaaacagaatatcaaagggagttcttctgtggccaattaactcctgagcttaggttgtgttacttcaacaaatgtgttgacaatttgttacatgtgttgaagcaagaagaagatcatggccctatggttgaggaagcagaagatgatggaggcagcacaagtgaggatgagattatatcgatgtgccgcaacaatctggtgcatgcagagaatttgatcgtgcaattggttcctatcttgggtatgtactctgataactactttgtgaaactacctaagaggatcaatggagattctggtatggattgggtcatggatacactagcacgagatacccaatgctacaacatgtttagggtagagagagctttatttaacaggctacataatacttttgtccagtcttatgggttgaagtccactacaaaaatgacatctatagaggctcttgctatgtttttatggattgttggttcaccacagtcagttagacaggctgataaccatttaaggaggtctttggagatagtaagcaggacatttaacagagttttgacatgcctccttaggttagctcatgacataattgtacccaaggacccaactttttcagaggtgcacccaaacttggaaaatctagcattttggtcacacttcaatgactgtataggagctatagatgggacacatgtgaatgttgtggtgcctaagattaagagggttccgtacttgaacaggcacaatgaaaccagtcagaatgtgcttgctgtttgtgatttcgacatgagatttacctttgtgttgtcgggatggcctggttcggcacatgacatgagagttttcaaagatgctgtgagtacttatcatcacaaatttctgcatccaccatcagggaagtattatgtggttgatgcggggtacccaaaccggccgggctacctttcaccatacacacgtacaaggtaccatgtcgcgcaatggaacgatggaccgccgccacaagagagcagaattgcagatagggaatttgatgcctgtgatgaggatgaaaattataacccaatgcctagttttgttgcatccgaatggccagcagatgaacctcttgttgaagatgcccacatgaatgccttccgtgatgaattagctcaagctttattttatggagtgtaa

SEQ ID NO: 12876 - DNA, 701 bp, Oryza sativa
  unsure (1)..(701): unsure at all n locations
  Clone ID: PAT_MRT4530_18964C.1
tttcttattgattgattgatgtatgggtatgccacgcgtccgggtgatggtagtggtgacggcgacagcgatggcgatggcggtgcaggggagccgtcactcggatttcttcgtggagggcgaggtgtactgcgacacgtgccgtgccgggttcgtgacgaacgtgacgacggcgatccaggccgcgcgggtgcggctggagtgccggcactacatgagcgcgagcgggtcggtggagagatcggcggaggggacaacggacgcgacggggcactaccgcatggagctggtggaggtggacaaccgcggtgccgagttggtgtgcgcggtggcgctgctcagcagcccggtgaccgaatgccacgagatggaggtgggtcgcgaccgcgcgccggtcaccctcgttcaggacgtcggcctcgccaccatggtccgccgcgccaatcctctcggcttcctccagactatgttagctagatacgctgatacggatacgcgatacgtggatacgaagatgtggcatttgtgaaaaactaaggatacggngatacgtctatatatatattaacaatataaaaatttaatatataaatttatgaactcttgcatggaaataagctcgtataatgtcatggaaatattntctaataattgtaattgactaaggttggtgaagcgatttaaccccgagaatgatgatg

SEQ ID NO: 12877 - DNA, 2058 bp, Oryza sativa
  Clone ID: PAT_MRT4530_18965C.1
atggacagagatggcttcgacaacctcagcgcgtgggcttcgcagccgtcggcgagcggccctaccactgcttcctctgtcggcgccggcttcgacctcaactcgcaagcgccggcggcggaggggttcccggggcttgggatgtacggagccttcctccagggcgacgacgacgagctcctcactggccgcggtaggggctccagcctccctccctatcgcccaccgcgtgccggagtcggagacggaagggcgactccaaatctgactcggcaactgaactttggcaactcctcctcggcaggagctggtcgcggaggaggaaatggtggagctttcccagcgggttgtcttcggggagaggcgtttgcagcactcgagttcggccgccacggcacttggccgccggagccagcacagcaacacggcgatgaagaattggaggatgacgtggaggagtttgcgagctccggcggacccccgcgtagagtaggaacgtataatggtgcacaaatgagtggtgaaggataccaagccatcgtcgacggcttacttgatagaagggggtatagaagggggttggtgtatacccgttgccaggtgaagaaccaaatactcgtactgaaaaccacccactctttctggcgatacttgcaagcgcacacagggttggggaggttaccagatggaaccattgatgctgagtctttgttctggaaaacacatacagagaggctgcaatggggtcctccagaaaacgaggagttgcttgatcaactattcagagggtacactgtggatggaagcacaacccttgtgcctggagatgattatggtcaggaccaggggcaagaggaagaggaagaggacgaggagtttcaaccaacacctagtagtacaagcagccagaggagcaagagccaaaagggcaagaggccattaagtagcactacaagcactttgtccagtccaatgaagaagagcaagagcccaatggtgaagattgtgaaagacatagccagtaccttcaaagaagctgtcatagtcaacactaagcaaatgcagaaacgtgcaagtgacaaggctgcattttcagtcaagaggtgtcaggagctggcatttgagtgtggcgtagagcaaaccattgaatctgtctatgctatgtccaagatgttcgaaacagagtatcaaagagagttcttctgtggccaattaactcctgagcttaggttgggttacttcaagaaatgtgttgacaattttttacatgtgttgaagcaggaagaagatcatggccctatggttgaggaagcaaaagatgatggaggcagcacaagtgaggatgagattatatcgatgtgccgcaacaatctggtgcatgcagagaattcgatcgtgcaattggttcctatcttgggtatgtactctgataactattttgtgaaactacctaagagggtcaatggagattttggtatggattgggtcatggatacactagcccgagatacccaatgctacaacatgtttagggtagagagacctttatttaacaggctacataatactttggtccagtcatatgggttgaagtccactacaaaaatgacatctatagaggctcttgctatgtttttatggattgttggttcaccacagtcagttagacaggctgagaaccgtttaaggaggtctttggagacaataagcaggacatttaatagagttttgacatgcctccttaggttagctcatgacataattgtacccaaggacccaactttttcagaggtgcacccaaacttggaaaatccagcattttggccacacttcaacgactgcataggagctatagatgggacacatgtgaatgttgtggtgcctaagagtaagagggttccgtacttgaacaggcataatgaaaccagtcagaatgtgcttgttgtttgtgatttcgacatgagatttacctttgtattgttgggatggcctggttcggcacatgacatgagagttttcaaaggtttgctacttgaactatcttgcaacaatctttaa

SEQ ID NO: 12878 - DNA, 2052 bp, Oryza sativa
  Clone ID: PAT_MRT4530_18966C.1
ttgcattgacttactagttaagtcgtggtctatttgagcctagatagtggcattcaatcaaaagcttgtcttggagattcatttgcatcagccgaaggcaagaatcacacaagactcgatcggttagacggtttacattcaagtagtagcatggggcaactccataatttgatgcttctgctgccgtgcctggtcttctctacgctactgcgcacagaggcgatgagtgtagctccagtgaaagtgagcaccacacccatcttccccacaatcccaagaggtcagacgaacaaggacttccaggtgctactgcgcgtcgaggcgccgccggcggccgatctcaacagccatgtccccttagacgtagtcgcggtgcttgatgtcagcggcagcatgaatgatccggtggcggcggcgtcgccgaagagcaatctgcaggggtcgaggttggatgtgctcaaggcgtccatgaagtttgtcatcaggaagcttgctgatggtgatcgcctctccatcgtggcgtttaacgatggacccgtcaaggaatatagctccggcttgttggatgtttccggcgatggccggagcatcgccggaaaaaagattgaccggcttcaggcccgtggtggcactgcgcttatgccagccctggaggaggccgtcaagatccttgatgagcggcaaggcagcagccggaaccacgtagggttcatcctcctcctcaccgacggcgacgacacgaccggattccggtggacccgcgacgccatccatggcgccgtcttcaagtaccccgtccacaccttcggcctgggcgcgtcccacgacccggaggcgctgctccacatcgcgcaaggatcgcgcggcacctactccttcgtcgacgacgacaacctcgccaacatcgccggcgccctcgccgtgtgccttggcgggctcaagaccgtcgccgccgtcgacacgcgcgtcagcctcaaggccgccgagctaagcggcggcggcgcgcggatagtgcgcgtagactccggcggctacgagagcagcgttgcttgcggcggggcctccggtgaggtcgtcgtcggcgtgctctacaccggcgaggtgaagaacttcgtcgtccacctccacgtgccggctgcttcgtcgacgaccttgaccttctcgtcggtggagtgcggcggctactacgacgccgccacggtctgcgaccactgccatcaccgtcaccagcagcagctgctcgccgtcggctactcgtacagccacgctccgggcgccgcctctgcagcggtgtccgtcgaagggcacggcgtgttcgtcgagaggcccgaggtggcggccgtcttcgtctccgtcgacggcgtcggcgtcggcggcggccgacagcgacaaatccccctcccctcccccgtcgtgatgcagcacatggtccggttcgagctgctggagctcgtcgccggcttcgcggaagccgagatggcgtcgaagccggcggcgacgacgacgcagccgcgcgccgccgacgtgctgcagggcaagtgggaggagttccggcgagcccggcagttctggggcggcgtcgagctggacggcgtggagaaggaggtggacgccatggtggccagcctcaggagcgggctagcctacgtcagctcgtgggtgtcgagccaccagatgcagcgcgccaccgccatgggctcgccggagaaggtggtggccgagttcatgactccggcgatggtgatcattgtggaggaggcgcggaagctaccgccaccaccgccgccgccgccggcagctgctgaggcggcgagagagaggcccagcggctgcgatggcggcgacgatatccatcacgtgatccggcagcggcttgagctgtggtcaaaggtgagacgcgaggtgccgctcatgtaccagccgtcgccggagcaggaagacgtccagctgaccgccgtgttccgggaggcgtcgctggaggccatcgaccgagcaatgcaccacgacatctacctggccgttgtgcacgtgagcaaccagaggcgatgctag

SEQ ID NO: 12879 - DNA, 955 bp, Oryza sativa
  unsure (1)..(955): unsure at all n locations
  Clone ID: PAT_MRT4530_18967C.1
gccgcccttttttttttttttttttttttgggcaacgaacaccctgttaacatattacatttttcagatttccaacgtaccaagttagtaatcagcaccaaatttttaatttgtgcccctgattcgagcgcagtaaccttatccaagaccaagaagaagcctggattagagcgcaagggcaaagtggttaccgatatcaaagatgccgtcgagcactacgctaatgcctatgtcttcacctacgataacatgaggaatcagaagctcaaggacctcagagagcagctcaagtcctccagcaggatattccttgctggaaagaaggtcatgcagatagcgctggggcgttcatctgctgatgaagctaaaacaggccttcataaactttccaagttcctacaaggtgatactggactgttctttactaatcttccaagagatgatgtagagagattatttcgagaattcgaagagcatgatttcgccaggacaggaagtattgtgacagaaacggtggagcttaaggaaggccccttggaacagtttacacatgaaatggaaccctttctacgcaagcaaggactgccagttcgtctgaacaaaggggcggtggaattagttgcagatcacatagtatgtgaagaagggaagcccatttcaccagaagcagcacaaactctgcggttgcttgggatgcagatggcaacattccgactgtaccttgtctgccggtggtcctctgatgactttgaagtttacaaggaaggcttggcgcaactgcgagctgaagctgatgattcttcttaagcttgtttggcttgcacacccagtttgcagtgacgcacttgctgtcttgttgtgctgaggcagtttttggtattgtgcgtgcgcatggcgtttgtgctcttggcccgttggnaatctgaaaatgttttatgtttacagggttgtcgtt

SEQ ID NO: 12880 - DNA, 2163 bp, Oryza sativa
  Clone ID: PAT_MRT4530_18968C.1
atggacagagatggcttcgacaacctcagcgcgtgggcttcgcagccgtcggcgagcggccctaccactgcttcctctgtcggcgccggcttcgacctcaactcgcaagcgccggcggcggaggggttcccggggcttgggatgtacggagccttcctccagggcgacgacgacgagctcctcactggccgcggtaggggctccagcctccctccctatcgcccaccgcgtgccggagtcggagacggaagggcgactccaaatctgactcggcaactgaactttggcaactcctcctcggcaggagctggtcgcggaggaggaaatggtggagctttcccaggcgggttgtcttcggggagaggcgtttggcagcactcgagttcggccgccacggcacttggccgccggagccagcacagcaacacggcggtacgtgccggtggcagcggccagcgcctaccgcgtccccgggcaccgaggagtgccgtccgtgggcaagcatccagctccgacgctcccttcaacaatgaagatgaagaattggaggatgacgtggaggagtttgcgagctccggcggacccccgcgtagagtaggaacgtataatggtgcacaaatgagtggtgaaggataccaagccatcgtcgacggcttacttgatagaagggggtatagaagggggttggtgtatacccgttgccaggtgaagaaccaaatactcgtactgaaaaccacccactctttctggcgatacttgcaagcgcacacagggttggggaggttaccagatggaaccattgatgctgagtctttgttctggaaaacacatacagagaggctgcaatggggtcctccagaaaacgaggagttgcttgatcaactattcagagggtacactgtggatggaagcacaacccttgtgcctggagatgattatggtcaggaccaggggcaagaggaagaggaagaggacgaggagtttcaaccaacacctagtagtacaagcagccagaggagcaagagccaaaagggcaagaggccattaagtagcactacaagcactttgtccagtccaatgaagaagagcaagagcccaatggtgaagattgtgaaagacatagccagtaccttcaaagaagctgtcatagtcaacactaagcaaatgcagaaacgtgcaagtgacaaggctgcattttcagtcaagaggtgtcaggagctggcatttgagtgtggcgtagagcaaaccattgaatctgtctatgctatgtccaagatgttcgaaacagagtatcaaagagagttcttctgtggccaattaactcctgagcttaggttgggttacttcaagaaatgtgttgacaattttttacatgtgttgaagcaggaagaagatcatggccctatggttgaggaagcaaaagatgatggaggcagcacaagtgaggatgagattatatcgatgtgccgcaacaatctggtgcatgcagagaattcgatcgtgcaattggttcctatcttgggtatgtactctgataactattttgtgaaactacctaagagggtcaatggagattttggtatggattgggtcatggatacactagcccgagatacccaatgctacaacatgtttagggtagagagacctttatttaacaggctacataatactttggtccagtcatatgggttgaagtccactacaaaaatgacatctatagaggctcttgctatgtttttatggattgttggttcaccacagtcagttagacaggctgagaaccgtttaaggaggtctttggagacaataagcaggacatttaatagagttttgacatgcctccttaggttagctcatgacataattgtacccaaggacccaactttttcagaggtgcacccaaacttggaaaatccagcattttggccacacttcaacgactgcataggagctatagatgggacacatgtgaatgttgtggtgcctaagagtaagagggttccgtacttgaacaggcataatgaaaccagtcagaatgtgcttgttgtttgtgatttcgacatgagatttacctttgtattgttgggatggcctggttcggcacatgacatgagagttttcaaaggtttgctacttgaactatcttgcaacaatctttaa

SEQ ID NO: 12881 - DNA, 1465 bp, Oryza sativa
  Clone ID: PAT_MRT4530_18969C.1
atggagaatggggagcaagggagtttagggctaacctgtggaggggaagagtggggttgcggatcagcggcggcaagtcccaccagcagcttgtgccgagaccaggcgcacattcaaggcagtttggatagccgcgccggaaccgggttcgacatcgaaggaaagcgcggcgatgggagtggaatcgaggtcggtggcggcgtcagaggtgaccgtgagcgggccggtcgagcctatatttaagactacgatatgttgaaccctcgaaccatcaagcaccagagagacaacgtcgccgccaccgccagcctcatccgtgctgacgacgaggacgtgctgagaatacgaggcggttccgatgatgttgcgcaaacgccacgcaatcaccaagttatcagcaccaaagctctaatttgtgcccctgattcgagcgcagtaaccttatccaagaccaagaagaagcctggattagagcgcaagggcaaagttgttaccgatatcaaagatgccgtcgagcactacgctaatgcctatgtcttcacctacgataacatgaggaatcagaagctcaaggacctcagagagcagctcaagtcctccagcaggatattccttgctggaaagaaggtcatgcagatagcgttggggcgttcacctgctgatgaagctaaaacaggccttcataaactttccaagttcctacaaggtgatactggactgttctttactaatcttccaagagatgatgtagagagattatttcgagaattcgaagagcatgatttcgccaggacaggaagtattgcgacagaaacggtggagcttaaggaaggccccttagaacagtttacacatgaaatggaaccctttctacgcaagcaaggaatgccagttcgtctgaacaaaggtgcggtagaattagttgcagatcacatagtatgtgaagaagggaagcccatttcaccagaagcagcacaaactctgattggcatttttgatgatgttaatattgtgaccaagccaatgcggttgcttgggatgcagatggcaacattccgactgtaccttgtctgccggtggtcctctgatgacttcgaagtttacaaggaaggcttggcgcaactgagtgctgaagctgaggattcttcttaagcgagctgaagctgatgattcttcttaagcttgtttggcttgcacacccagtttgcagtgacgcacttgctgtcttgttgtgctgaggcagtttttggtattgtgcgtgcgcatggcgtttgtgctcttggtacgttggaaatctgaaaaatgtaatatgttaacagggtgttcgttgtcctagtattttctataaagctattcgtgtcttattaacagggtggcacatctacgcagctaacatgcttcatttgttggtatttaaactcttccgaacaattgttactccctgaatgaattcgttggtagctat

SEQ ID NO: 12882 - DNA, 407 bp, Oryza sativa
  Clone ID: PAT_MRT4530_1896C.1
ttaccacaagtaggactgttggcggtattgaaaaacacgcttcgaaaatctgtatcaaccattttctcgtccactgtcgatgatatgggcccgagggtatcaaaactagagggaggaggctacccccagtacccacgtggtactcccccgaggggtcggacgccacgtgtgcgaggttaggtgggtggtcccaacgcccacctgaccacatttaaggcggcctgagcgggtgcgccacgccgcatttaatgcgacgtgctgtgcgcccgaccggtctgtgactggtcgaatgactgatgggaccgaggtagtgcgtcctgcacaccgatcatgcacgtttcatggatgtattccacagctgacaaggcatatacttgtatttttttgcactagcgaaaggctttgct

SEQ ID NO: 12883 - DNA, 2652 bp, Oryza sativa
  Clone ID: PAT_MRT4530_18970C.1
atggccagtgaggagctcgtcgtcgtcgccttggagaaaggctccgtacatcccaagccccgggaacccctccgccaccggcgcttgcgagttgaggtcgaagctagcgccggcagagggagcggtggcggggccgctcgccgacgactgcgtagcccacgtgctgaggtcatcgaagctgtctctgtccatgcgtggccgatggcgcagatcggtggaggcggcgacgcggatggtcggaggaggcgcggctcgggggtggcggcggcgctgaggttgcccggcgccgcggaacggtgcaggcggcgacggggatggtcggaggaggcacggctcatgggtggcggcgtcgccgcgccgcggaacagtggaggcggcggcgcggttggacgggcgcctcgcggatcggcggcggaggcgcggatcgaggacggcggcacggtatcagcggaggtggcggcgtggatctgggaggcggcgacgaccagcaagaggaaaaaattggtttggacccctagaaaaacttatcccaaaaatggtcctttttggggcgccagagtgcctggcgccgtcgttcaacaggacggcgccagcctctttggcgccgtccccctgccgacgtggcggggcgatgctgaggtggctagggggacggaagaccaccttttggaggctgagcaggtggaggtgatcgatcattgctgggcgcctgggccggccggcgtagaacttgaactcgagatgcttgagcttgggcatggctccttccacaaggaatctctccagcatctggaagcctgtgcggcgatgagtgtagctcctgtgaaagtgagcaccacgcccatcttccccacaatcccaagagctcagacgaacaaggacttccaggtgttactgcgtgttgaggcgccaccggcggccgatctcaacggccatgtccccatagacgtcgtcgcagtgctcgatgtcagcggcagcatgaatgatccggtggcggcgtcgccggagagcaatctgcaggcgacgaggttggatgtgctcaaggcgtctatgaagtttatcatcaggaagcttgacgacggagaccgcctctccattgtggcttttaacgatggacccgtcaaggaatatagctccggcttgttggatgtttctggcgatggccggagcatcgccggaaaaaagatcgaccgacttcaggcccgtggtggcagtggctctgcgcttatgcccgagttgcaggaggccgtcaagatcctggatgagcggcaaggcaacagccggaaccgcgtagggttcatcctcctcctgaccgacggcgacgacacgaccggattccggtggagccgcgacgtcatccatggcgccgtcggcaagtaccccgtccacaccttcgccctgggcgcggcgcacgacccggaggcgctgctccacatcgcgcaagaatcgcgcggcacctactccttcgtcgacgacggcaacctggacaagatcgccggcgccctcgccgtgtgcctcggcgggctcaagaccgtcgccgccgtcgacacgcgcgtcagcctcaagactgccgagctaggcggcgcgcggatagtgcgcgtcgactctggcggctacgagagcagcgttgcttgcggcggggcctccggtgaggtcgtcgtcggtgttctctacgccggcgaggtgaagagcttcgtcgtccacctccatgtgcctgctgcttcgtcgacgacgaccttctcgtcggtggagtgcggttactgcgacgccgccgccacggtctgcgaccatcaccaccaccaccattgccatcaccgtcatcaccagcagcagctgctcgccatcggctactcgtacagccacgctccgggcggcgaagcggtgtccatcgaagggcacggcgtgttcgtcgagaggcccgaggtggccgtcttctccgtcgacggcggccgacaacggcaaaccctcctcccatcccccgtcgtgatgcagcacatggtccggttcgagctgctggagctcgtcgccggcttcgcggaaaccgagatgctgtcgaagaaggggacgatgcagctgcgcggcggcggcgcgcgcgccggcgacgtgctgcagggcaagtgggaggagttccggcgagcccggcagttctggggcggggtcgagctggacggcctcgaggaggatgtggacgccatggtggccagcctcaggagcgggctagcctacgtcagctcgtgggtgtcgagccaccagatgcagcgcgccaccgccatgggctcgccggagaaggtgatcgccgagttcatgacgccggcgatggtgatcatgctggaggaggcacgtaagctaccgtcgccgctgccagctgcggctgaggcggcgagagagaggcggcccggctgcaagggcggcggcgatctccattacgtgatccggcagcggctggagctgtggtcgaaggtgagacgcgaggtgccgctcatgtaccagccgtcgtcggagcaggaagacgtccagctgaccgccttgtttcgggaggcgtcgctggaggccatcgaccgagcaatgcaccacgacatctatctgggcagcaccaaagacataagccaccgaaagtctaccattcagaactattccgcccactcctgctga

SEQ ID NO: 12884 - DNA, 362 bp, Oryza sativa
  Clone ID: PAT_MRT4530_18971C.1
agcagggaaatttatgtcgccaaggattattgttcaaaaaaatctgttttgaggacaatacgccgttgcaaaatcaggcgtgtagtaccaaaactgcatgcaattccattcgcagcctatttcctggaagacctcagaacctcgtttgtggctgtaacttcaaacttatttggcacctgatggattatgcctatgtatatgtagcaaccagtattgactaacttcaaactggtgtggcaaacctgatggattgtgattatgtactgcatctgtatatatcagtatatgtagcaagtggcaaccagtattacatgtattcaaaagatgtaatcaactaaccaacatgtttaaattagcccccc

SEQ ID NO: 12885 - DNA, 1743 bp, Oryza sativa
  Clone ID: PAT_MRT4530_18972C.1
atggacgcaaggggggcgcggcttaccgacggcggcgacggcgacggtggcgacgtcggcgcaaggtgcggcgcggagcggcggcttcgtggcggcggcgcggcggctctatgcgacggcgcggcggcgtggaggcggcggcgcggcgtcgtggaggcggcggcgtggtggagtggcggggtggcgcggcgcggggctcgacgtggcgatgtgacgacgacacggcgcggcggggcgcgaggcggcgacgcgacggcgtgcggcgcggcggggcgcggggcgcgagacggcgacacgacgggcgtacggcgcggcggggcgcggggcgcgagagggcgacgtgacgggcgagcggcgacggcgacggccgacggcgacggcggtagcggcggcgcgcggggcagcgtgatggcgacggccggcagcggcggcacggggctcggggcggtgtcggcgcggcaatggggcagggtgcgaggcactggagacttggtagttgaggcggggtggaggaaactaaccggacttgaggaagatgagacatcaagatattggtgcgcaccacctgttcgacgaaacgcctatgcgtcatcatcgaccgccatgaatggcggtttcccgcgcggcaagcgcgggcggaacgccaccgcaaccgctggcccagactttctcagcgccctccccgagggtatcctccaccacatcatgtccttcctgaacgtgcgccaggtcattcagacgtgcgtgctgtcgtggcggtggcgcgacctctggcgctccgtgccccgcatcaacgccaactactgcgagctcagcatgtccccgatcgccgccttcacaccagacaacgaggcggcgttcaagaggttcgtcaaccggctgctcgagcgccgcgaccccgccgccgtcatccacaccttcaacctcagatacaccatttccaacccaaacaaccgcgataacgactcggcggacgccaacaggtggatcagccacgcgttgcagaatcaagctagtttcctcaagatcatcgtggatgcgcacgaattgcacctcgatcacacggtgttcacatcatgctacttgggtagaatcactctcaagaatgtgttcttggaccaaggcttcttcgagcagctggagattggctgcccactgctgcaggatctcctcttgtacgactgcatcattggagatgatgagatctcatctgagaccctgaatgttctcaccatgtatggatgtcagttcccaactctgcaggagagctgcatttctgcgccgaatctgacatctctgatcatgcatcagcctgagaacttcgtgcccgtactggacgacgtcgcgtcgctggtgacggcaacagttgacctgtttcctctcatcgaattttgtgcttatgacatgcgccagttgctctggagcctttctggtgttagaaatttggacctcgattactatgcgtacttctacgtgttgattattttccttcagagctcaccaaaactggaaaagcttactctgaaactcgaaaagtattatccgcatccatatgaacatatcattggtgatgagcttacagaaagatcgtttacatgtgagcatcttaagattgttgagatcatatgcatggaggatgatgaacccctggccaagatcgtggaaggcttgtttgttgacaatggcatgaactctgttcggtttgatatcaaatattggagtgacttttggaaggacatgtag

SEQ ID NO: 12886 - DNA, 315 bp, Oryza sativa
  Clone ID: PAT_MRT4530_18973C.1
gaaaacattacactgttgtaataaccttataaatctaaaatggaacagagctggaaatggaacatgtttgtatactacaagcacaacgtcttagtttggaaaagaacagagctgggccccatgatggctggaaaagaacagggctctgtcagccttgaagaaaagagtaccttgaggagagaatattttcttttggagaaggccacaggagaattaagggttacccttgcacccatattccgaaaatgggggccattggtttttattttggagggcctggctgaagggaccgggaatcggggatcttcccaaccc

SEQ ID NO: 12887 - DNA, 600 bp, Oryza sativa
  unsure (1)..(600): unsure at all n locations
  Clone ID: PAT_MRT4530_18974C.1
gattcggcacgagtggactcctcaaggnnnatggggacatctacntcnccatgatcgaanggaaggtgatcaccancctcgggccgaggtacnacccctgcgggatcntcccccccgacttccntntcntggcgcncgggaactacnactgcctcngggaaaaagaangnctcacggttcctgccggtataaanacnattagctttanctatntcnancnactntcntnntgcttnncaaccntncataatntatntacctncnttgctctngctattaatcatccnattttgctgngatatntgttctaacgaactncaatcnatntacgcntcnttatnactngngttcttcgnaagtcaatntgcggaatgtnaccnnttantccngcaaatatgttcgataaatggaattnaataactctgttcgttcgatcctcggacctctcctgnaagaatnactcgaaggggggccggtgacccntncacctatagnaaatcctctnaaaatncnctggacgtctttttacnncntngttantgggaaaacctgggntaacacaaatatcnccatgngtcnccctccactggtctacatatg

SEQ ID NO: 12888 - DNA, 2139 bp, Oryza sativa
  Clone ID: PAT_MRT4530_18975C.1
attgcgccgctgtctcgccctgcactcggccgtgagtttgcgggattcacgcggccaccacctccgccgccgacggccaccttgtctccctcgtgctcgaccccggagcgtggcctgcggcgaccccgaagcaggtgtggacgcgcgcagcgggtcgcgtcccgccgcaacgcgcggctgcgggtgaagccccgcgccggcatcccccccccgcccaacgccgggaagtccacaccctgcaataccctagcgacggaccttcccgcggcgacttgtgcaccaagccgagctgttttgtggtcgattggaggtggaagccactcgaggggaaagaatgcaaggtaaagtattggggatgttgtggagttcttcgcgatgcatggattgcttttggccgagcatgaagtagaaattgggaaggcacaagctgcaaactttcccttctgcaccataaacgccaacgttggtgttgtggctatccctgatgcttgctagtttaagctctcaagattaagcatgtctaaggtgacaatcttaacatccatagagcttgtggatattgcaggtctcgtcaaaggagcaagcaaaggagagggactaggaaaccaatttctttcgaacatccgtgaggttgattccatccttcaggttgtgcgatgttttgaagatgatgatattgttcatgtgagtgggaaagttgatcccaaatcagatattgatgtaattaatctggagcttatattttctgatcttgaccagatagagaaaagactggataagcttaaaaagagcaaaactaaagaccagcaagtaaaggtcaagactgagataaggaaacaaaagcttggactattcttgcaggcatgactgcacctcaagcagcaggagttattcacagtgactttcagaaaggcttcattagagctgaaactgtatcatatgatgattttgtcgcggcgggttctcttggagttgcaagggagaagggattgttgaggttggaagggaaggattacatcgtgcaggaaggcgatgtcatgcttttccggttcaacgtttgacaacaactcaacaataatagcagcagcgagaagtttcaatatatactcgaattttgcacaagagagaaacagatcatgggatttttttttgtctgagacattaactgtacttgcgtcattggaactttgcggcatcattgctttagcccctggctttgtaaatcattcaagataagctctctacgaaacattagagtataattcgacatacctacttataaactgtcatttgaacattgtaatcttcaatcgaaaatttgatgcgacatcttttttaagcggcgacgaaaagcgggaggagtggtactccaaggcaatcgcctactggcaaggcgtggaggcgtcgaccgagggtgtccttggagggtacggatgcgtgaacgacgtggacgtcaagggcagcgacgcgttcctccgtcctctcctcgccgagcgattcggcgccgcgaggcgccatctcgtcgccctcgattgtggctcgggcatcgggagggttacaaagaattttcttcttaggcatttcaacgagattgggctcaaacccaatggattttttgtactgaaggagaatattgcaagaaacgccgttgagaaatccgtctccgacaacaattcgttgtcagtccctcgctttgtcccggcggatttcgagacccgcttggagctcatcccctttgtcagaggggcaaaggccgcagccgaaaccacggcgaaagagtctgcccgctccgttgctgagattacagattcggccaagtcggccagctatactctccggcttgcccttcatgagttgggcgcccaggccaaaggcgttccaggcaaaaatgcttccgcgctggacttctcggaatggacacaacaagccggaggtgccgtggctgagaccggcagcaattatggtgattgttgtgctcgggtttcggcggctttcgtgcttggggtgctccaggaaaatgggtgcgaacatgtcgcccaattcccggagttcgtcaagggagattggccggagaagtcgtaccccatctctactactcttcgcgcttggcgaaaagagtactggcagaaggaggggtga

SEQ ID NO: 12889 - DNA, 456 bp, Oryza sativa
  Clone ID: PAT_MRT4530_18976C.1
atggcgagcggtatcaacgaggggaggttgctcgcctttctcatcgtcctgtacgcttccacgatcgccgcatccatcgggcgcaggatattgggggcgcgcctcgccgcgtggcgctccgacggcctgggcgccacctgcatgtccttcgcggcgctcacgctcgcgatgcaggccatgctcgcgtgcgtccttgaggagaagcccgccgcggccgcggcggcggtggcgaggcgcccggccagcggcggccggctcccgtggctggtcgccgccgtgagctggatgtgcgtcaccaactacttcgtcgcctacatcgccctcggcggcaacgtggcgcccacctcgctggagtggacggccgccggcgtcgcctccgccgccaacctcgccatcgccacgcgtaccgtccggcgtcacttgggtgtgagcaacccggccaagaacgagtcgtag

SEQ ID NO: 12890 - DNA, 1242 bp, Oryza sativa
  Clone ID: PAT_MRT4530_18977C.1
atgccgtcagagtttgtcgccgccaggaagaagccgccgccggagttgttgttcgccgcctgtcggaagaagcagcagccgccgccgcctggcatggcgttcgtgccgtcggagttcgccgccgccggcgttggcaggaagaggcagcctgcgccgccggtggagatacgccgggtgtgggcgcacaacgtggaggaggaattccggatcatccgcaacgcgatcgatcacttcccgtacgtgtccatggacacggagttccccggcgtgatccaccgcccgaccaagcaccccgccctgctcaccgccggcgaccggtacgacctcctccgccgcaacgtggacgcgctccacctcatccaggtgggcatcaccctcgccgcgtcccccaccgcggcgcccgcgctcgccttcgagatcaacctctccgacttcgaccagcgcgtccaccgccacgccgccgagtccgtccagctgctggcggagcacggcgtggacctcgccgcgcaccgcaggcacggcgtcagggcgagcgcgctggcgccgctgctcatgtcgtcgggcctcgtctgctcccacggcgccgtcaagtgggtcaccttccactccgcctacgacttcgcctacctggtcaagctcctcatggggcggaagctgccgaggtccatggccgagttcctgaacctggtgcgcgtcttcttcggcgacgaggtgtacgacgtgaagcacatgatgcggcactgcggcggcgagctgtacggcgggctggagcgcgtggcggcggcgctgcaggtgaagcgcgcggcggggcggtgccaccaggccgcctccgacagcttgctcacctgggacgtcttccggcggatgcgggagctctacttcctcaagcatggcgtcgaggcctaccaaggcgtgctcttcggcctggagctcgacatggacatgcccagcaacaaaacaccctcgctgccgctggacagcggatccatcccgctagaggctagatctggcctccccgcagccagatcaagagaggacggccctgacggcggtggtccggtagaggtgatggctgcacgacacggccggcaacaaggaggggacaacgtaggcgacaacatggcggccaccgtgacctacgatcatgaggccggcgtttcagcgacggcggaggccgtcgcggcatgtgtccaccagagtccagggctagcatggctggcagtggggcgctggagcggttga

SEQ ID NO: 12891 - DNA, 2662 bp, Oryza sativa
  Clone ID: PAT_MRT4530_18978C.1
accaccaccaccactctcgctcgctccccccactcccactcgcctgaaaccctagcaaggagctcccggcggatggacgagggaggcggcgctggtgctgcggctgccgccgccgggaacgcggcgggggcggcggtgcaccacaacgcgcggtccgcggaggacgtcttccgcgacttccgcgcgcgccgcgcgggcatcgtcaaggcgctcaccaccgatgtggagaagttctaccggcagtgcgaccccgagaaagagaacctgtgcctttatggattgcccaatgagacctgggacgtgacccttccagctgaggaagtacctcctgaacttccagaaccagcactgggcataaactttgctcgtgatggaatgatcgaaaaagattggttgtcgctggttgcagttcatagcgatgcatggctactgtctgtagcattttactttggggctcgctttggatttgataaggaagccaggagacggctcttcaccatgattaatggtcttcccactgtatatgaagttgtgacgggaattgccaagaagcaaacaaaagtctccaacggcagcagcaaaagcaacaagtccaaccctaaaccatcgaagcaatccaattctaacagcaagcctgcaaagccacctcagccaaaagatgaggaagacagcggcccggaaggcacagaggatgaggaccaggcttacatgtgtggcgcttgcggagagacttacgcgaacggtgagttctggatctgctgcgacgtctgcgagaagtggttccatggcaagtgcgttcggatcacccctgcgaaggcagagcacatcaagcagtacaagtgccctggctgcagcagcaagaggagccgagaatgaccacgggaggctcccggttgacatgttttagaatcgttaggaattggtgaagaggcggagaaccgcttcacccgcaacctgctgccgtgcagcagcagacccggcgtgcaggccggttgttgtattagtttcagtcattgtgttgtacccgacatggtaagtagctattgtatttagcaggcaggcaggctaactgctgtggtcgtagtgtgatgtgaacctctctcgctccccccactcccactcgcctgaaaccctagcaaggagctcccggcggatggacgagggaggcggcgctggtgctgcggctgccgccgccgggaacgcggcgggggcggcggtgcaccacaacgcgcggtccgcggaggacgtcttccgcgacttccgcgcgcgccgcgcgggcatcgtcaaggcgctcaccaccgatgtggagaagttttaaaccatctttttttccctcttattattactgtacatctgccgaaagaaatcctttcttgcagacgacgaatcaacaaattttacagcggaggagaggagatcgtatcatctcgctgccaccagcggcagcgagggtgttttgttgctgggcatgtccatgtcgagctccaggccgaagagcacgccttggtaggcctcgacgccatgcttgaggaagtagagctcccgcatccgccggaagacgtcccaggtgagcaagctgtcggaggcggcctggtggcaccgccccgccgcgcgcttcacctgcagcgccgccgccacgcgctccagcccgccgtacagctcgccgccgcagtgccgcatcatgtgcttcacgtcgtacacctcgtcgccgaagaagacgcgcaccaggttcaggaactcggccatggacctcggcagcttccgccccatgaggagcttgaccaggtaggcgaagtcgtaggcggagtggaaggtgacccacttgacggcgccgtgggagcagacgaggcccgacgacatgagcagcggcgccagcgcgctcgccctgacgccgtgcctgcggtgcgcggcgaggtccacgccgtgctccgccagcagctggacggactcggcggcgtggcggtggacgcgctggtcgaagtcggagaggttgatctcgaaggcgagcgcgggcgccgcggtgggggacgcggcgagggtgatgcccacctggatgaggtggagcgcgtccacgttgcggcggaggaggtcgtaccggtcgccggcggtgagcagggcggggtgcttggtcgggcggtggatcacgccggggaactccgtgtccatggacacgtacgggaagtgatcgatcgcgttgcggatgatccggaattcctcctccacgttgtgcgcccacacccggcgtatctccaccggcggcgcaggctgcctcttcctgccaacgccggcggcggcgaactccgacggcacgaacgccatgccaggcggcggcggctgctgcttcttccgacaggcggcgaacaacaactccggcggcggcttcttcctggcggcgacaaactctgacggcatgtcttaactcaaagattggatggatctcggcaacgaattcgaagcgcgatgagcaattggaatttggaaaaattcggaccgaattggagatgcgagttcgccccgtatgagaaagttggatactctcggtgttcagtagtgattaagttatgggttagtgtgtatgattctatgataactgcctcccctttcatgaggtttctaccccaaactccccttaatataatatataaaaaaaaaaaaacaaaaa

SEQ ID NO: 12892 - DNA, 581 bp, Oryza sativa
  Clone ID: PAT_MRT4530_18979C.1
gaattcctgcagcccattaaaaaaaaatcactttgtaccatttatatatatatatatgtgtatatatgtatatatgtatatgtatatatgtatatgtatatgtatatatatacatatatgtacatgtatctctacatatatacatatgtatatatgtatatgtatatatacatatgtatatatacatatatatatacatatacatatatatacatatacatatatacatatacatatatatacatatacatatatacatatacatatatatacatatatatatatatatatatatatatatatggaaactcagatgtgaaccgaagttcatatgcaccataaatctcagctgctcgttggttccaagatgcgtgccaagtgcatatgcttatagcacgattgagtagtactagttttgttgattgctgtagcagcttggctgtgacttgtcatgtcacatggacacaactttttttttatggacagaccgtgcccgggagttttgcctcttcatgcatgagtgacttcattgttttacttatatcagtttctttatgtttcgtagcttattaacaataact

SEQ ID NO: 12893 - DNA, 2369 bp, Oryza sativa
  unsure (1)..(2369): unsure at all n locations
  Clone ID: PAT_MRT4530_1897C.1
ctcccgggctcacatgtcagttttgaccccgcggctggatgaagctaagactaatctgaactaaagaagaaagaattagcggaaaatggatggaacaacactagtggantggatcgggtgatgccgccggccgaggggaagccggcgatcacgccggggatggctgggaggttggntcggccgacgacgggatgtccgggccgacgcggcagccctcgagcatgaacaccacgtcgcccatggccgggcggtccagcgggtcgggcgccgtgcagaggaggccgaccttgatcccgagcaggaactcctcccactccgacgactccgggtccagctccagcaggcccggctcgagcagctcggccaccgccccgcgcgccgctgacgcttcacccacttcacgatgtcttcgtcctccccggcgaacatgccggggcgccggccggtgagcagctcgagcagcacgatgccgaagctgtagacgtcgccttcccgcgtggcctgacccccggccgcggcgtccggggcgacgtagccgagcgaaccgactgttgttgtagctgacgtcgatgcagccgccgcagcagcggcagcaccagccgtcaccaccattggctccagcccgaagtcggacaggtgcggctcgaagtcggcatcgaagaggatgttctgcggcttgacgtcgccgtgcacgacaccggactggtggagaaaagcaaggccgcgggagacgccgagggcgatcaggtgcctcattggccaattgagaatgtgtccgtcttggtgcgacgcttcctgcagcaacgtggcgaggttgccgttgggcatgtagtcatagaccagcagccgaacatctggcggcggcccggcgtaatagccacggagcacagtgaggttcctgtgcttcaccttgccgagggactcggcctccttcctgaacgagccctcctcaatcaccacggcgccatcagatgaggtggaaggaagccgtaggatcgccagcacggtgccgtcattgtagcaagccttgaacacgagaccatggcggcctcggctaagcacattctcctcatcgaactgcctcgtcgcctccaccgtgtcagcataggtgatccgggaattgaacatgatcagcttcggctggctgacactgtctgtgcttgtgccgctcgacccgctgccccgtcccgggctgcgccgcctcttcttgacccccgcgcgcttctcaatgaaccggcgcctccaccgcagcaagctgtacacacagcagcagcagaacagcacaagcagcagcacggtagcagccaccacaccaatcagcagagcgaggcgctgcagcctctgccgcctccgatgctgccggtacgcactgcattcgttctccaatggcggaccgcacaggttcgggttggaagcaaacactgacggggtgccaaagcgggagccaagcatgccgggtatctctccgctgagctcattttgtgacacattgagtgatagcatgcctggaatttgagccaatgaagcagggatgctgccggtaagattgttggacgacaggtcaagtgtctgcagcttcgacaggttggagagagaggccggtatctcgccaccaagatgattgtcatcaagcttgagagtgacaagcgatgagcagtttgaaatctctggaggtatcttgcgggacagctggttgtggctcaggtcaagctcctccaattcgccgaggcgcgcaaaatcaccggggattgggccagtcaactggttgctcctgagatcaagcacggtgaggttggaacagttggcgagctccacaggcagctcaccgcagatgcggttgtgggaggccgagagcacctggagtgatggcaagtatccataggtagccggcattgagcctgtgaatgagttcaccgagaggttgaggtggcgcagactccacaggctgctgaacccctccggaacatcaccggagaaagagtttccggcgagcgacacatactgcagctgtggcaaaccgaagagctctgccgggagattgcccgagaggttcttctgaccagagaggtcaagaactctcaggttcagcaggttgccaatgttggacggaatgcggccggagaaggagttgccgctcaaatttaaactctgcagagcggccagattgccgatggaaggagggatctccccggcgagcttgttgtcggagaggtccaagaatgtcagattccccagcacgaagagctcactgggcaaatcgccggtgagccgattccccggtgtggacaatgcttccagccacgagaggttgcccaaactggccggatctggccggagaaggagcctcgtgccggaattcctgcagcccg

SEQ ID NO: 12894 - DNA, 141 bp, Oryza sativa
  Clone ID: PAT_MRT4530_18980C.1
agaatagcggccctccagcgtgttgacctagggagcccaccaccttcaagccgaaccggttggaacgcgccgcttggcggtccacgaaaaaggtcggggcgggtcgtcgcagcttcaacgttgccctgaggaggagggggc

SEQ ID NO: 12895 - DNA, 410 bp, Oryza sativa
  Clone ID: PAT_MRT4530_18981C.1
aattcttccattttatatttcttacactcttattgttcgttcaacgcatgatacatgttccacccttgctgagcgcccgaagctcaaccttcaaaacatggtgttttcgatgtgccaattattgcctcccacaccaaggtggacgcgtggattatttccaacagtatgggctggtccactttatacacgggccggaaatcctcttttttcaatttgccgatattgcgaaggggccagtcgacgctaactgaagctcttttgtagtcaccttctggactattgtgtaataatgaccggggacttttgcatgataaagctcctgcccgggttgccattgattgaagtggggatgcgaatcttgcgcctattcttcaacttcaaaatgttggattttttgaaggcgttttgtt

SEQ ID NO: 12896 - DNA, 1432 bp, Oryza sativa
  Clone ID: PAT_MRT4530_18982C.1
ccggccgggaagagaagagacctggccttcaacctctcccctcttctttctcttctcgtcgcattcgacggcatcactcgccaaaagctcagcccaggatcccccgccgccgatgtcggacggcagcgtcgagtcgccgtcgctccaccgcacgccgcctccgccctccccgtcgccgtcactctcgctctcgcgctcccagcagcagaccccgcggggccgccagccgcccccgcccggcgccgaccccgtcgccttcgccgtcgtcgccttcgtcgccatctgcttcgtgctgatttcattttcggcaccgtcaagcattctacatcaagtccctgaaggacatgttggggtgtactggagaggaggtgctcttttggaaacaatcactccaccaggttttcatgtgaagctgccttggataacccaatttgagccaatacaggttactcttcaaacagaccaggtcagaaatattccttgtggaacaaaaggtggagtcatgatcagctttgataagatcgaggttgtcaaccgcctccataaagagtttgtgcacgaaaccttactcaattatggtgtgcattatgacaagacatggatctatgacaaaattcatcatgagataaaccagttctgtagtgcccacagtttgcagcaagtttacatcgacttgtttgatcagattgatgaaacgatgaaagaagctattcaaagagactgtacacgctatgctcctggtattgagataatcagtgttcgtgttacaaagccgaacatacctgatagcattaggagaaattttgaacttatggaggaggagcgtacaaaggcattgattgccattgagaagcaaaaggtagcagagaaggaagcagaaacgcagaagaaaattgcactatctgaagcagagaagaatgcacaggtgagcaagatcctcatggagcagaagcttatggaaaaggacagctccaagaggcagcaacagattgataatgaaatgttccttgcccgagagaaagctcttacagatgcgaactattacaggataacgaaggaagcagaggccaacaggcttaaacttacaccggagtaccttgagctgaggttcattgaatcaatcgccaataactcgaagatattctttggtgaaaagattccaaacatgatcatggatcaaaggatgcttaggaattacctcgacaatggttccaccaaggaccatttggacctatagcagttgtctctgtgaattgcaaagaacattggctgtttttctgatcccacggggaaattaggattctcacggatctgctcactacttggtaaagcccaaaggactagacattagggccttttaaagatggaaattagtcgtccaaaaaaaaaaaaaaaaaaaaaaaaactcgagactagttctctctctctctcc

SEQ ID NO: 12897 - DNA, 463 bp, Oryza sativa
  unsure (1)..(463): unsure at all n locations
  Clone ID: PAT_MRT4530_18983C.1
ggcttgaggaaaaagaagaagcttgacagaagacaccggatctggacgaaggaggggctccatcgtcatcatcgccatgatcttccttctctcctcatcgaagccaccatcatcttcccgacagctgtcaactctcctcgtttctctctctccagatcgaccggattgagtggccttgagctcgtggccgccggatcttcgacggtggggcgagtggcaaggtccgggtgggtggtgggatcctgtggggatcaagggggcagcgggatctggtagggaggccggcgatggatctggtggggaggtacgcggcggaagtcgtggtgagggtcgagcggttgtttncggcgaggagtccggcggcgataggaacaagttttgcgagacaaaataattttttcttttttcctttgttctgttttctctaaccgtcaatcaatttgtaaacctgtcaaagttgtaa

SEQ ID NO: 12898 - DNA, 233 bp, Oryza sativa
  unsure (1)..(233): unsure at all n locations
  Clone ID: PAT_MRT4530_18984C.1
caaaacctccccacgccgngtgatctcgcagcnaatggcggcgccgcgncaccaccacctcgccctcgncgtcgncctcgncctcctcgtcgtcaccgacgnggcgtcgtacgnggggggaccncgggggaggcgagtgctggtgctcgtggacgacctggnggtgnggtcgtcgnactcgnccttnttcgcgtcgatccaggggcgagggttcgatctcgacttccgtctcg

SEQ ID NO: 12899 - DNA, 320 bp, Oryza sativa
  unsure (1)..(320): unsure at all n locations
  Clone ID: PAT_MRT4530_18985C.1
tttcgatttacgtgaccgtattcatagcggccgccctcnngnanagcgactgcaaagagtttgagggnnatgaggaggccagaactcccccangacangannggagcagacccagngaagaagcaaancgccgacacaagggcccagacaaagcaagngcgcaaaccanagcccancaccaagcagggggaagaccngcnnnnggcnngnacagangannanganaangggaaaanagcancnngcaggcgcagnggacaaacngcanaccccgcaaangacccacnccnnnncagacacaacagannggngcacaccaa

SEQ ID NO: 12900 - DNA, 312 bp, Oryza sativa
  Clone ID: PAT_MRT4530_18986C.1
atggagaggatagtggaaagtaaactgaacataaagaaagtgaatccgagttgcttgttcgtgagagctattcccagttatgaatcaagtgatatgttcgaagataacctacagaggtcagttgataacttgtgtgaggttgacgccgaagatatgaatcgtgagaagttccggaacggaagcatcattaaactaccgcaacctagtctgcgtcagctgaaaggtgcaccctggttcgagtcaggtgaaaagaagattccacctgcaacaggagatcgagccaagcagtccagagtggagaagttttgttag

SEQ ID NO: 12901 - DNA, 642 bp, Oryza sativa
  Clone ID: PAT_MRT4530_18987C.1
atggcgtgcttcgtggaggagctgaaggtggagcaggcgaagatgcagggcctcctggaccacgtcgacgccttcccggccggcggcgcatcgccgacgagggaggactactatacggcggaagagatcatctcgcacggcatcagcgacatgcagatctgtcgcgtccacaaagccatcgtgatgggctccgcgccgctctacgacgccaaaaccatgggcgccatcttgccgccgccgtcctgccctctcaccaccgacctcgccgagcgcctcgccctgcttccgccgcttgaacaaacgatctcctaccccgactgcgacgacgtcggcctggaaggcttcgccatgcgcgtccagcacgcggtgaccgcgctcggcttcgccgaggaagctctggaaagctccttctacaccttcaatgacgcgatttctctcatcttcaccaagccgattccgccgctggcccactccaccaagaggaaagctcgcagcagcatcgctctagcgctccgctgcgccgcctacgcccatgctcaggccaccatcgccctcaccaggatagcaccaccacttactactactactcccgccaataatattgcccattctaatattgctagcaaccaacaacatatataa

SEQ ID NO: 12902 - DNA, 394 bp, Oryza sativa
  Clone ID: PAT_MRT4530_18988C.1
ctttttcgcgtgcccttaaggcgtttcacttggacacaaacgattggggttgcaacgttcagccgtactctggaagcgtggctaacatagctgctcttatttccgttctagaaccaactgataaaatccttggattagcattgccctctgggggacacttgtctcacggacaccaactggaaagtggaaaaaagatatctgcgacttccattttctacaactgctcttcttacggcattgatcagaccactgggttgttggattatgacaaacttgatcaacaaattcaggattttaaaccaaaattggtaattgctggcgcgtctgcatacccgagagactgggactaccaacgcatgagagaatcgtgcgacaagggtggagccttcttgat

SEQ ID NO: 12903 - DNA, 269 bp, Oryza sativa
  Clone ID: PAT_MRT4530_18989C.1
gtgtttttttttttgtgttctttttttttttttttttttggagaaagagtcttgggatgaatgcaccaagggtgaaaggatttccaaaaatttaaacttacaaacagcttaaaactaactggatagtccggtaccactgcaaacaatctgactatagagcagcctggatatgtccgagctggtatcaataacaatcccaatcataagccatccgcacagggaaaacactatatagtgaccctggaaaacacgaaactagaaatgaaaaa

SEQ ID NO: 12904 - DNA, 816 bp, Oryza sativa
  Clone ID: PAT_MRT4530_1898C.1
atggagtcgtcgtgcggcggcatcgcggggagggcgtgtgttaacagcaattgtattgtctacgtcggcgtcgttcaaggctgcatcagtacattcgacctcttggattgctctggtggcggactggcgggcggcgccgaggagggcggccgacgacgggggacgaggtggtgtggcgacgcagcaacggcgggccgggcgcaggcgggccaagcggtggcgagcgcggagctggaagtagatggcgccgctggcatcgccgtcctcctccttctcctcgtccaggctacgctgccgtcgtgcgtttcgtctggcatcgtgcttcaaggtcgcctcattgtcttcgcccacagcctcccgtacacgtccccgacgaacgcagcggtgtcgggggaaggagagaacccgccgaggtcgacgagcggcgccgtgaggtcacccatggtcgatccctccctcgagatcaagctcggccacgtcggcatcaaggcgttcatgcaggacctcctccgcctcctcgtctcgcgtcgccgccctccgaccgccccctcgcgccgccgtcccccgcccgcccttgcgccgccgctcttgcctcctccgtcaccgcgctcgccttcttcgctagcatgctcgcctcgcctcgccactgcctccgccgtcatcctcgaagaaagagattgggaaagagaaattgggaagcgagctccgcctccttctgtcggccgcccgctccgcctccgtctcaaccgcccgccgccctccgccgccggcagcgccgcctgctcccgccctcgtgcggccaccgcgtgctggtga

SEQ ID NO: 12905 - DNA, 529 bp, Oryza sativa
  Clone ID: PAT_MRT4530_18990C.1
cgcccacccccccccccccccaccccccccccccccccccccccccccccccccccccccccccctttagctaaagtattttacttcaataattcaagacaactcaaacttagttggcccacatgtactcccccccctatcactaaaggtgtttttttttttggacaaaaacatcctaacattcccccaagggcctaaaaaaaccgcagaaccttcccgggaaaatttcactgaaacaggggccttccgggcccctacaataattatcaccctttttggttcatcccacctaccggaaaaccccaattcaagggactcttggccaaacctggagggggcccgggatttgctcccattgggttccactacccgacttaaaaaaacttgaccccgggttgatgctaataagcttaacctgatccactggtgggcccaccgttataaccaataggaaacggggggaactatttgtggcaacccgatgaaccctataatatttggggtgatttcccgccccctcctggcaaaa

SEQ ID NO: 12906 - DNA, 1066 bp, Oryza sativa
  unsure (1)..(1066): unsure at all n locations
  Clone ID: PAT_MRT4530_18991C.1
cccacgcgtccgcacacatctcctctaaagcagctcacagctcaagagaaggagagggcaacaatggcgacggcgaggttgctcctcctcctcacggtggtggcagcggcggcgggctcctgcttctgcagcggccaggaggcgaagccaccgacgccgccgccgccgccgccgtactgcggcagcgtgaggacggcggtggaggcgcacaggcggtggaggacatcatcggctggaagacggttccggcggactgcgccgaatacgtctccgactacatgaccggcgagcgatacggccgcgactccgacgtggtgatcaacgaggccatcgcctacgccgagagcctcaagctctccggccatggcaaggagatctgggtgttcgacgtcgatgagaccgccctctccaccctgccctaccaggctaagcatggctatggaactaagccatacgaccacgcgagcttcgtccaatacgtggctggagggagcgcaccggcgctacagggaacactgcgactctaccgacggttgctgcagctcggcatcaagccggtgttcctgaccgaccgcaccgaggaccagagggccgtcaccacccacaacctnctctcgcaaggctactacagctgggagaagctattactccagcctgttgggctcagaccacgactcangcgttcaagaccggcgagcggcagaaattgggtgagcgccggctaatgtcatcgtcggtaacatcggtgaccaatggagcgatatcctcgggatcaccggagggctaccgcaccttcaaataccccaaccccatatactacgtcgcgtagtttggtgtcggcgccatcgctagctagcttagctatagctagctatatcgatggatcatagttcgcgtgcgtttcatctacttattttcttctcatgaactgtcgtttgtagttaatgtttgacgcgtttgctttgatttttcctcgttagttgttgatgagatgaaatttaaatttgtaataatgtttgtttggcatggcagttggccattcattgatcaatgcattgtgttgagc

SEQ ID NO: 12907 - DNA, 1218 bp, Oryza sativa
  Clone ID: PAT_MRT4530_18992C.1
atggattggtcgtcgctcccggcggatctcctgctcgccgtgttcgcgcgcctcccccgcgacgccgaccgcgcccgcttccgcgccgtgtgcgcggggtggggcgccgcggccgcgtcgtggcgcccgcgcccctggttcgtcgggtcacgcaccgaccgcttcggccggggcgccgccatgtcgtcgttctggctctcccgccgcagccgcggcggcggcggccttgtcccgttcgccgccgccgtgcccgcggggctggagttcctgtcgtcgtcgtcgcatgggtacctcgcgctgtccgaccctatggcgactcccaaggcggtcgccctcgtcaaccccgtcaccggccggcgcatccggctgccgccgatcgggttcttcaagaggtggcatgacgtggcgaccgtcgtgctgtcggctgacccggacaccgccgacgagtgggccgccgtggccgtcgggttcccgaccaactgcctcgcgtactacagctccgccgccggagcgtggacgccgctcggcttcagcgcggccggttacgccggcgtcgagcatttcagggggcggttctacgtcgccttcaagtcgcagctctgtgtctgcgacgtcgaggcgaccgtccccgcggtcatcccgctcgagcaattaatcgacgacgacgacggcggcggcgagaacgtcgacaccggcaggagagtcgtcgagacccacctcgtggagtgcgacggcgagctgctgctcgtgtcggtgcacgacaacctggagcgcaacccagaggacaccacaatcttcggcgacgacgacgaccacgacggtagcagcagcagcagcagcgacagcggcgacgggcgcgtggtcgaggtgctcagggtggagtgggtggccggcggcgcggtgcggctggtgcggcaggaggacctccgttcccgcgccctcttcctcggccggaaccacgcgttcgcgctctcgccggaggagttcccgtcgtgccgagccaactgcgtctacctcgtcgaccagcagggccaccccgacggacgcgtcagggtgttcgacatgaacgcggacgaacggtgggagcccgaggaggcggccgtcgtagcgaggaactatgctcgccgtgatgagaccattttcccccccgacgacggccgccgagacgcacagtcggcaggttgggctcgccgtggttggttcttccccaaatactag

SEQ ID NO: 12908 - DNA, 573 bp, Oryza sativa
  Clone ID: PAT_MRT4530_18993C.1
gtgtgccgtcgcgacgacacgaaaattccacccggccggggtgaccgctctgccttcgacaacgagatggaaatggcggcggcggccgtcggcgtgctgctgccgttcccgttctactgggcgctctggaaccacccgcagcggtgggtcgacctgtgcggcggaggcggcggcggcgtggacccgtgccgccggatggcgcaggtgtcccacgtcctcaaggcgctgcagctcctcgccctcgcctccgtcgcctccttctcctggccgccgccgctctactccgtcgccctcctcgccgtcggccagtacctcaatttcaaggtgtaccagctgctcggtgagccaggcacctactacggtgttcgatttggaaagaaaatcccatgggtgacagaatttccatttggttatatcaaagaccctcaatatgttggcagcatgctcagccttgtggcactgctttgttgggttccattccaatatgttcttctctggtgcctcggctacgttttcatgatgtgggtggaaagcaaggaagatcctgccactcgtgccaagctgctctcctga

SEQ ID NO: 12909 - DNA, 712 bp, Oryza sativa
  unsure (1)..(712): unsure at all n locations
  Clone ID: PAT_MRT4530_18994C.1
ttttttttttttttttctctagaatcaattctattagttgttctgttctttttaaaagaaaaaacgaggctccagccacccgcatctttagcgaccagctagctagcatcaagaattaaattacaatgatctagggatggcatcagtccagatactgatatcagtgctgaaacagctcccaagttagaaagtttcaagtaaatggattctacacaaacagcaacggcgtttcacataagctcaggaaagttcctccgttcaaaagcatcggataagcacagtacaaatctcccatcaattcagtaaaaaccgtactagttttcagtttatcagcatctcctttatcaattctgtaaccttgggagagtacgtctcctccaaaactcatctatttgcaatatctgcagttcccatttacagaaggaacccaacagatcattctctttttattattttcgcgccttatttagagaggatcttctcaggcagatttagctccaatattatagggagctttccagaagcttaaaagtgccaccctcattgttagnaaagcggttcaagccaagcattagcaaganttcccaccacgctttnatgaattcctccaaagagaaccctttcggtcaaatcagagcgtgtaactctttcatgccactgtgntacacagaaatcggatgatatctaactcatccaagggatttccntggta

SEQ ID NO: 12910 - DNA, 1335 bp, Oryza sativa
  Clone ID: PAT_MRT4530_18995C.1
atggatctcgacaagtctacttctaccagtgcgtcgttgaagaagctgcaggaagacggcgcccttctcggtcacgggaccatagagagaagcaggagtatcttttcgcatctttgtgaggcctacattggggtagagccgtttcttgacctctttcgtttctactacgaattgcgttggatggaatccaacaggatagaaaacttggatccggtcttcgttgttcctgaggaacagccagacaagatttcgtcttggaccgccaaatccgccttaaccccttcccttcagtccttcatcgatatcatcaatgacctccgaatacgagggttgtcagggtatgaagtcactgccgacttcattggtaggcggatccagctgctccaggctcgagcccacccagcctttgactattctgggccggaggacgcgacccaggtttctcctcggggtttgaaccgcgaaaccgtggagcgccgtgtcagccaagtgatgatcagcggcccgacaacgacgagcaacgtccctgtccccctttgcgagaaggggacagccgagcgtgaagccgcaatcaacgctctccctctgactgacgtcatcgggccactcgtggaccaccaggcgacgacttcgttgaaagagggcgtcgcccaggaggcgtccaacgttgctgctgctgctacgaccagtggcggcaatgttccgaagagggggagcctcggatgcgtctcctccacttccgtgacggcagaggctggtgacacttggcgagaagccggtgctcgtggcatagggcacaagatcgaagaggcgaaggcggcggcggcgtcgtcggctaatgaacgcaccgacaagttggcgcatgacctggcggaggtccgcgaggacctccagaagatgaaggagctggtggctggcaacgagcggcagcggcaggggctcgagcaccgcatgttggagctcgagaacaatttgtcagagatccgtggctcgctacgggttacctacaccagcttgcatcagctagccggggagtgcggcgtcacgaccaccatcccggcgaatcccgatgagttctcgctgacgacttcactcgcggaaatggccacggtgatggaggagatcccctccaagcatgcggccaggatcagagaggaaacgtccaacgggatctacactggggcatgccacgtccttgcgtgcgtaaggttggcgcaccctgaactcgacctccagaggatcttggatcaggggacggctaacgatgcgcgtaagggcgtgatggaagaagtcggtgatttgggggagtctgttctccccctttttgaagagtag

SEQ ID NO: 12911 - DNA, 1191 bp, Oryza sativa
  Clone ID: PAT_MRT4530_18996C.1
atgcctccgaagccggctgcggaggacgtcgccgacgagcagccggagccgccggacgaggaccccgacgtcgccgaggccgaccccaccggccgctaccttcggtacagggagatcatcggatcaggatcctccaagacagtctacaaggcatttgatgcggtggatggcatcgaggtggcatggggcaaggtggagataaacgagagaatcatgggttcatccaaggaattgcagcggcttcgcacggagatccagctgctgaaatcgctgcagcacaagcacatcctcaagctctacgcatcctgggtcgacactaacagaaggacggttaacattgtcactgagctgttcacatctggtaatttgagagagtaccgtacaaagcacaaaaaggttgacatgaaagcaatgagacgatgggcaaagcaaatactgacagggttggaatatctacacagtcagaagccaccaatcatacatagggacttgaagtgtgacaacattttcattaacgggaaccatgggaaagtgaagattggagactttggtttagcaatggtgatgcagcaaaggaaaacacggagtatacaaggcaccatagaattcatggcaccagagctttttggtgaaaattacaatgagctggtcgatatatattcttttggaatgtgcatgctggagatggtgacttgtgaatgcccatacagtgaatgcaagggctttattcagatatacaagaagattactgaaagtgatgatgccaatcacagaagctccaattcagttcaagaaccagtaaaattccctgaaaacaattttactaaagatgaaccaatttttgtctctctggcgccgaataatgggacagtcaatgggaaggagcaatctttcatcttggtgcttcagaagagtgattttttgttggaagggaacatgagcaccaccaaccctgtcatgctgtttctgcgattccctggtcctgatggtaagttcaagaatgttcagttcccctttgacatggagaaagataccagcctgtcggtgtccactgaaatggttgagcagcttgagctgcctgaatggaacaaccctgtcttggccgagttgatagacgccttcttactacacattttgcccagttggaaaccctgtgttaaagttggaaagatgttgccaagttcttcctag

SEQ ID NO: 12912 - DNA, 340 bp, Oryza sativa
  Clone ID: PAT_MRT4530_18997C.1
agctgttgctgctgacgtcgtcatgacgaactgatatgcgtactgtgacgtccactgggacactcatcgttgtgcatcatgctgtgtgtgaataaataatgtatctatgaacttaattaattatctgagtgctgtaaatttgcaatgcgtagtgttgatgtgtttaattactttttcttttctgtgcaatggatggaaacctggtgtatttgtatgatgatcaaatactgactttatgcagtgggttgtcttgatcataatgtctgttgaggatttgggctaattttgtaacttcgactgaattttgttgtgaaatatggcgactgtagtccttggtaac

SEQ ID NO: 12913 - DNA, 2967 bp, Oryza sativa
  Clone ID: PAT_MRT4530_18998C.1
atggcggcggcaggttcttgctccaggttcttcaggcaggtccacgcgctcctcctcaagaacctctctttccagaggaggaacgccaaggcgaacgcggcgatcgcggcgttcccggcgctgctgtgcgtgctgctcgtcacgatccaggccgtcatcgacggcgagctggaccggccgccgttccggtgcggctgcgcctgcgtgcgccgcgacggcggccgcgcgggcgcgggcgcgtgcgcggcgacggagtgcggcgtgcagcactccacggccacgcaggcgctcagctgcgccgtgccggcgccaccgaggtggccggcggtgacgcaggtgccggacgagccgtaccgcgcgctgacgcccgtgcacccggcgaggtgtcgcggcgacggtggcagcggcgcgtcggaggcgccgtgcccggtcgccgtgctcaccaccggccagaaccgccggctgactgaaggccttggaaggggatttttcccagatgtccctccttcatactatcttggtgtgcccaattccaacaattcatcttatattgatgagttatcaaaaatagtccctggtacaagcacattaccagcgcatgtattgttcatagaaccaggatttgtgcccaatagtaccctatatgtgattcaaagaaaatgtatatgggattcgcacaatacttctagaagttctgatgcgatgccaattcaactcgatgtgaagtgcgttcaaggtttatcactgtggtgccggaattcagcggtgatgaatgaccatttgtataagggttataagggtgggaataagaggaggacatcgaacgaatatcttgctggctatgattttcttgatacaagcaagaggaggtttcatgtgtatgtctcatacaactctaccttcagcagggacaatggacaccatcccatgacagttttgcgtgttgcacggttggttaatatggcatccaccgcatatctgaagtttcttcgaggacctaatgtagaaatgcgcctggaatatttgaaagaaatgccaaaagctgcaatgaaaatcaggctagaccttaccacactccttgatgcactattctttacatggacagttcaactcctccttccagtaatgttgacatatcttgtttatgagaagcagcacaatttaagactgatgatgaagatgcatgggctaaaggatggaccttattggatgatatcttacgcctattttttgtccctttcagcagcttatatgatgttcttcgtgatgtttgggtcccttatagggctagatatcttcagattaaatagctacagcatacaatttgtattctattttctatatatcaaccttcagatcgtgctcgcctttctgcttgcgtctttcttctcgtctgtcaagtctgctagtgtaattagttacatttatgtctttggatcaagccttcttggagaagcacttctgcaattgttcattgaagatattacattcccaagaattattctgaatatttattggatactcattaaaaactaccattctacctgtttattagaacaatggcttgtgacaatggagcttgttcccgggttcgccctctaccgaggattttacgagctcgcagagtatgcatttgcaggaaggcaaatgggaaagcctgggatgcaatggagggacttgaatgaccccatcaatgggatgaaagatgttttgcttctaatgtctatagaatggatacttctgcttcctgtggcatttttactggatcatagacctacatggcatccactgttcctctttgggtttatgtcaacaaagcactcttcaccaacaatcataccagacaaagtgaaacagaggtccagaaaggatcaggatcacctaccttcaaagtcatgtgactttgtcactgacatgtgggacaaaggcatggtgatttcgaagcgcaaggtggtgaaaaaattgctgaaggaaatggacatgaggaatatgatcatatgccataacctgaagaaggtgtaccctggaaagaatggaaaccctgataagcttgctgttaaaggattgtcgcttgctttgcgcaaaggacagtgttttggaatgcttggtcccaatggggcagggaaaacatccttcatcaacatgatgattggacttgtggcgccaacttatggaactgcctacatacatgggatggatttgaggagagatatgaatgaaatatatgcaaacattggtgtatgtccacagcacgatttgctttgggaaactctgacaggaagagagcatctaatgttctatggccgactgaagaatctcacaggtgctgctctactgaaggcagtgaatgaatccctgaagagtgtaaatctgttccacagcggtttcggcgacaaatcggtgaacaagtacagtggtggcatgaaaagaaggcttagtgtcgccatcgcactgattggcaacccaaaggttgtttacatggacgaaccgagcaccggattggacacgacatcgaggagcaatctctggaatgtcattaagagagcaaagaagaactgcaccatcattctcaccacacattccatggaggaggctgaggagctctgcgaccgcgtcggcatcttcgtcgacggcaatttccagtgcctcggaactccaaaggagctgaaggcgaggtacggcggcgtgcgggcgctgacgataacgacggcggcggggcacgaggaggcggtggaacgcgcggtggcgcggcggtgccccggcgcggcgaaggtgtacggcgtgggcgggacgcagcggttcgaggtgccccggcgaggggcgcggctggacggcgtgctgggcgcggtggaggcggcgcggcgggcggcgccggtggtggcgtggggggtggcggacgcgacgctggaggacgtgttcgtccgggtcgccatggacgcgcgcgccgccgcccacgtcctctcgtga

SEQ ID NO: 12914 - DNA, 391 bp, Oryza sativa
  unsure (1)..(391): unsure at all n locations
  Clone ID: PAT_MRT4530_18999C.1
aaaaaaaaaaaaaaaataaaaataaaataaaaaaaacaaacaaaaaaaaaaaacaaaataaataattaatnaaaaaaaaaaaaaaaaaaaaggaaaaaaacgggcccctggggttgccttcctaccccaattttgtatttgttaaaaaaaaaacaccacttcaaattgttggggaatttttaaagttaacccgttaaaactttggtaaattggtttcgaacttccaataaggaaaaggggcacaagttttaagaaaatatccattttttgttgaaaatgtttggaaatgcttttttttggaacgtggcctgctttttaaaaagccaattaagttgttttggcccattgaggggcaacaacggtggaagcttcaatttcaaaaaggttattt

SEQ ID NO: 12915 - DNA, 296 bp, Oryza sativa
  Clone ID: PAT_MRT4530_1899C.1
gtcttatattatgaaccttcgattctaaaattcaaattcttctacattgaatgtatagctgcagcaataaatttggatcagcctttctactccctgcatctacgttgagcaggtatctttaggtaaccgcacatacctaacctaatttattgataagagtgcttattataaatcattcttgcattttttttcaaaattgatttttgcatttttaggtgtcaaataaacaaacccatcctagtggatttgtgtggtaaggaaaaacgggtaatctattccttaaaaaaaaaaaaaaa

SEQ ID NO: 12916 - DNA, 348 bp, Oryza sativa
  Clone ID: PAT_MRT4530_189C.1
atgaacactggcgccgtcgtctatcgaggtcttgaggagtaccaagatagagttttcacccagcagccccacctgagggagaaggacagctcgacagcgccaagagggaaaacgacgcccgaaacaacgtcgctgctagcccggcaaggccaagctagcctcaccggcctccttgccattgtccttaccaaccacccggtgccacccacgccggccagctgctaccgccgggtggcccgcatcgatgcgccgaatctggctttagatctggcggtgtccaccgcaaatgcggcctccgtggcaccgccgcttgctgcccccttcttccctatctccacctccgcctag

SEQ ID NO: 12917 - DNA, 342 bp, Oryza sativa
  Clone ID: PAT_MRT4530_18C.1
atggcggtgatgggcgactgcgggcgggaggcgaggaggcggcacgccggcacatctggccaccgctcctcgccccaggcgtgcggatccggttgcggtggggcatatatggcgcggatacgggccgcgcgacggcggatccagcgcggatcctgcaccggtgatggcgggcacggctgtgacgggcgactacgagcggtaggcaaggcggcagcggatccggccgccgctccgcgcccacgtgcacggcacgacctccgcgacggccacctccacaacgcgctgccgtcgatgcctggagcaagcgcgaacaaaaatttaacttatacttatagattgtga

SEQ ID NO: 12918 - DNA, 195 bp, Oryza sativa
  Clone ID: PAT_MRT4530_19000C.1
atgggggaaagagaggatgcgctaaccaggatggatgcggcggaagcagcaggacgaacgacggcgcccctggcccccctgctcgctcgcgggagggatggatggggatcggcgcaggcggcggtggcggagggaggatgtgctaaccagaatgcggcggaagcagtttctacgacctacggatcgcctttctaa

SEQ ID NO: 12919 - DNA, 401 bp, Oryza sativa
  Clone ID: PAT_MRT4530_19001C.1
aaaaaaaaaaatgggggcttcccttttttttttggttttacaaaagggaaaccctccctttttttttcatttggtttagcccccccctttttacagggttttgggggggggaaatttttaccctgttgtttcaacttaggaaagcttttcccactcccaaaaaaggcccaatttccttaactgggtccagggttttaaaggggggaaatgataaataaaaattggccttttttccctacttccttgggcaattaaattcccaattagaaaatcggcgggtctttattgggaactgtttttttccctccaaatgcaaaatggaattggggcctggcctaaattttttccccccagatcccaagcccccatttttcaggacccccctttttttaggggctttt

SEQ ID NO: 12920 - DNA, 315 bp, Oryza sativa
  Clone ID: PAT_MRT4530_19002C.1
gcttctagtcctggataccatgactgaccgtccacactagatggaggccaacaactccctgtggcccttcaagaggaaggcaccactctgatggctcaagagaacgaggaaccactctgcctagggtggtgatgccggcacccgcatggactacatcccctgactcatgcggcggatgatctagtctttacttacgatcctggagagaatgtgttcctatctcttgttgcaacagggttcttggtatctttaggctgcctagagctggtactggatatgcagtcctggcgtcccaacacgaggcagacttgacct

SEQ ID NO: 12921 - DNA, 1848 bp, Oryza sativa
  Clone ID: PAT_MRT4530_19003C.1
atgcccccgtccgcgccggcgcacctcgccgtcctccgcctccttgactccggggacctcgcggccgcggcgcgcctggcggcggcaggagcggggccctcctcctcctcctccccgtccccggtctccctcgccgccgtgctcctccgccacccgccaccgcgcctcggctgctgcctccacggccgcgcggcccgggcgggcctcctcgcggaccggtacctcgccaacgccctcctcgccttctacgtccgcctcccgcgccacctcccgcacgcgctcagggcgttcgacgacctgccccgccgcgacgtcgtcgcgcactcgtcgatcctcgccgcgttcctccgcgcggggatgccccgccgcgcgctcgcctccctcagggacatgctcgccggcgccgacgacgacgtctcgcccaacgcccacgcgctctccgccgccgtcaaggcctgcgccgtgctccgggaccgcaatgccggcgcgtgcctccacgggagcgtcctcgttcggggattcggcgacgatggcgtcgtgctaagctctctggtcgacatgtacggtcatgtggccgcgcccggtgacgcgcggaaggtgttcgaggaaatgcgtgcaccggacgggatatgctacacgtcgttgatatccgcatttgtgcggaatgattggtttgaggaggccgtgaggtggttccgatctatgctaatgatgaatggggttaggccagatggctgcacttttggttcgatgatgacagcactggggaactcgaagagggggagtcaggggaggcaggcacatgctcaggtggtgacccgtggtctgtgtgggaatgtgatcgtggaaagcagtacgctggacatgtacgccaagtgtgggttgatggtggaggctcgcaaggtgtttgacaggatgcaagttaggaatgaagtttcacggtgcgcgctgctcggagggtattgccagaatggggagtacgagaaggtcattgcattgttcagggagatggataaggaggacggtgactggtatagcttggggactgttctgcgggcatgtgctggcctatcttcagtaaagccaggtaaagagatccattgtcggtttctgaggatggcagggtggagagatgtggttgttgaatctgcacttgtggacctatatgcaaaatgtggcgcagtggactatgcatatagtgtttttgaagcaagcactgtccgtaacacaattacttggaatgccatgataggtggtttcgcgcagaatggccatggtgaacgagctatcaatttgttcaatcggatggtcagggaagggcccaggcctgactatatcagttttattggtgttctttttgcctgtagtcatactggaatggttgagcaaggaagaaactactttaactctatgtgcaaggactatggcattgcccctggaattgaacactacaattgtatggttgaccttttcagcagagtagagcttcttgaagaggctgaagatttgataaacaagtcaccttttaggaatgattcttctttgtgggccgatatccttggtgcttctgcaacacattctaacccagatgtagcagaaagggtttcaaagaaaatgatggaattggaaccgcagtatcatttgagctacattcttcttgaaaatgtgtacagaacagtaggacgatgggaagatgctttagagattagaaggctgatggaatcgagaaaggtgaaaaaggaacctggaatgagttgggttgatgctaacagaagcaaactgcatgtatgcaatagtaatgaggaagtttcggaacttgtaacttctattgagatggatatttcttag

SEQ ID NO: 12922 - DNA, 1495 bp, Oryza sativa
  Clone ID: PAT_MRT4530_19004C.1
gagaaacttcacaggttatataaagctaaccttcaatatattgttcattccatctgtgataagattcaacttctgggaactagcaactgtaggccgatgccacgattcaattagtgatagacacgcatgccaatcattaaaaatgaagagcccttgtgatgtaaatgacaatatggctaaaaacaacaaaattaatgtctgcatccatttaaactgttggtactaggcttagctcattcttcaaaacatgaatgcaagcagcaagaaatagtaaagcagcgcagtcatttattgtacaggtgggagtttctacatttcaagcagcataattatgccctctcgtccgtgactggaacacatgttaaagcccttattgccttccccgccagctctcttgttgtccttcgctttggctaggatactgattaaaacccccttgccagttatctcctccatatgcaggtccaggcccctgcctgttgtttccaccataaccaggatttacaccaggagctccttggttgcttccaggataagttggtggatgtggttgcgcataatttccaggtgctggtggttgaccataagttccaggcgctgaagggccgccaggcctgaaatcgcctccctgcccctggttgaagttcctgcgctcttgtgagttgtagtaaccttgaccttgtccagctggatttgcatgcccttggtattgtgttgtttgactttggtagccaccagacgttccactgtaacctggacgatctgcataattctgccgtggggcatagcctcttccatcttgctgtgagccatatggtggaggactgttctggtaatttccctgtggaggaccgttctggtaatttccacgatagttacggttcctgtcagtccttgaaggtttgctataatgaacaggaggtggtcttggggtgatcacaccattttcatatttgtctcctccatactcctttgtctctggataaagatatgaatcaggtaatatgaatacaactccaggcaatccacggaacttttctgacatctcctcagtcattacagcttgaaaaccaacatatgttgttgtactaaaagcgtacatcctcttcttagcctcttcataacttccgacgaccttggcgagggtctggaggtaggtctcgatcatctcctcgcgggtgggcttggggtcggggaactccatggtgatgagccagtggttgtagtcgcagccctcgaagaggatctcgtcgggggatatcttctcgtccacgtcgcgcctcccgtagtcatccccgcgcgccgccgccgacgccgccgccgacgaccggaacccggcggcggggagccacggccgcgagacctggtgcggcggcggcagcggcgccgccgcgaggggggcagaccgggaggcggacgcggccgggcggaggaagggggaggcggaggtggaggcggcggcgagggctcgccggagtcgcagcgcgagggccat

SEQ ID NO: 12923 - DNA, 2115 bp, Oryza sativa
  unsure (1)..(2115): unsure at all n locations
  Clone ID: PAT_MRT4530_19005C.1
gcacgactctcgcgcacgcggtcgaacaccttggcagcaaacagcagcagcagcagatgatgccgcactccggcgtggtggacgcggcggcgaagggggtgaagctggggggcggtggtggcggggcgctgatggtgcgccgggtggcgagcggcaagctcctgtcggcgtcgtcgcacctgctgttccgggcaaccatcctggcgacgctctgcctcgtctgcctcttcaccgtgcactacccgtcgctgctgtcccactccttccacctctcctccgccgccgccgccgcgaacgggaagcacagggcggcgtcgcggtcgtcgcaccggagcttgcttgggtcgtcggcggcggtggcgtatgggggcgcggcgtgggagaaggaggtgaggaggagcgcggcgccgaggagggacgggggcttgtcggtgctggtgacgggcgccgccgggttcgtcggcgcgcactgctcgctggcgctccgggcgcgcggggacggcgtggtggggctcgacaacttcaactcctactacgacccgtccctgaagcgggcgcggcagcgactgctggcgtcgcgcggcgtcgccgtgctcgacgccgacatcaacgacgccgcgctgctggagcggctgttcgacgcggcgcgcttcacgcacgtgctccacctcgccgcgcaggccggggtgcgctacgcgatgcgcgcgccgcagacgtacgtcgcgtccaacgtcgccggcctcgtcagcgtcttcgaggtcgccgccaagcacgccgacccgcagccggcgatcgtgtgggcgtcctcgtcgtcggtgtacgggctcaacaccgacgcgcccttctccgaggagcaccgcaccgaccggccggcgttgctgtaccgcggcgaccaacaaggcgggcgaggccatcgccgacgcgtacaaccacatcgacggggtctccaccaccgccgtccacttcttccacggcgtacgggccgtcgggcagcgcgaccgtaccctacttgtccttcgcccgcagcatcgtcgctggcgagcccatcacgctgttccgcaccgccgacggcgccgacgcgcgccgcgacttcacctacatcgacgacgtcgtcaagggctgcctcggcgcgctcgacacggccggcgagagcaccggcaccaagtccggcaagaagcgcggcccggcgccgcttccgcgtctacaacctcggcaacacctcgccggtgccggtcacccgcatggtcgccatcctcgagaagctcctcggcaggaaggcgaacaagcgcgtcgtcaccatgcccagcaatggcgacgtgccgttcacccacgccaacgtcagccacgccgcgcgcgacttcggctaccgcccggcgacccccctcgacgccggcctccgccgcttcgtcgactggttcgtccactactacaagctcgacacggccaagatcgccaagggcaagaggaaatccatggccatgtccgccgcgtcgtgacgtgtccacccaattgtccttggaggctagcacgcgtcctgcaacttttttcagtgctaatttgtttataaggttgatcacctggtggaccataagaacttcagactacaatccgcaattatgcttatgctaattattttctatctctttcttcttgagagaaattgaaacttattctcgtgtaaaccagtggtcaattccaataaaggataaaaacattaacattctgaagacgactttttttttggggatcctattttaggatgttcttttgaatactggggggactttttttcttgggggaggggagggaggaagaagaaagcaatggagagcagcatttttctcttccttttccctttatcttctccatgctcttctgtaaatttcgttctccataacgtttcacaccctcgaaaaaaaaaaaaaaaaaaaaaaaactcgagactagttctctctctcctggaggtgccccccgacgcggggggggggggccgcctcgtcgccggcacgggcggggtcttcggcgccgagctcccccccgagggctgggtccccgtgccggcccgctgcgngagtcgggttttgaccgtgggcgggggcgtctgcggggcgtggc

SEQ ID NO: 12924 - DNA, 186 bp, Oryza sativa
  Clone ID: PAT_MRT4530_19006C.1
atggacgacgacttggtggtgcctgatctggaggaatcagcggcgtggctccgtatcggtggcgaggagaccgacgcggtggagaggcgaggggcggcggcgcggtgtggagaccggatcggcagcggcggcggtggcgcagggcgagcgcaaggcgcgcgtctggaaggggcgagcgcgatctga

SEQ ID NO: 12925 - DNA, 1602 bp, Oryza sativa
  Clone ID: PAT_MRT4530_19007C.1
ccggccgggccagcctcgcaattgccggccgagtcgatcaccacacaaccaaaaaaactccggcccacttggagttggagcccgtggcaaatccatccatccatcgcctctgcctcgcctccaccaccgagatgccggggctcaccgcgccggcgagctactccgacgagccgcctcgccaccccgccctcaagatcaactccaaggaaccatttaatgctgagcctcatcgatcagcattagtttcatcttatattaccccggtggatttcttctacaagagaaaccatggaccgataccaattgtggatgacctctcaagatacagtgtttccattactggtattgtcaacaagaatgtgcagctgtccatggctgacattaggagtctcccaaagtatgatgtaactgcaacgttacagtgtgcaggcaacaggaggactgcaatgagtaaggtacggaaagtgagaggcgttgggtgggacatatctgctcttggaaatgcaacatggggaggagcaaagctatctgatgtccttgaactagttggaatacctaaactcagctcagtcacatctttaggaggcaagcatgttgagtttgtcagtgttgacaggtgcaaagaagaaaaaggtggtccctataaggcatcaattccactaaagcaggcaacagatcctgaagctgatgtgttacttgcatacgaaatgaacggagagaccctaaaccgtgatcatggatacccacttcgtgttgttgtacctggagtaattggcgcacgctctgtaaaatggcttgacagtatcaacataattgaagaagaatgccagggtttttttgtgcaaaaagattacaagatgtttccaccctccgtagactgggacaatattaattggtcaactaggaggccacaaatggatttccctgtgcagtctgctatttgtaccctggaggatgtggatgttatcaaggaagggaaggctaggattgctggatatgcagtctcaggtggtggccgtggcattgagagagttgatatatctgtcgatggggggaaaacatgggtcgaggctcatagatatcagaaaagcaacgtgccatacatatctgatggacctcggagtgataagtgggcatgggttctattcgaggctacattagacgttccagcaaacgctgagatagtagctaaggcggtggactcagcagcaaatgttcaacctgaaaaggtggaagacgtatggaacctgagaggaatcctcaacacatcttggcatcggatcaaaatacagaattcttcgtgcgtgggaagatccaaaatgtgaaataagtaaactgcttggaatcagaagtcaagagtttatagtgcccggaataataagttattgcagcattcgatgattctcgcagactgtgctcctgtactatagtactatgttggaatcgtgttgctggcctgggcttatatgagacgaaacacaatttttgggagtgatgttaagaagatgattaatacgtactccagtatttatgttgtcttctaatggaaaatttgcagttcttgtgctccaaaaaaaaaaaaaaaaaaaaaaaaaaaaaaaa

SEQ ID NO: 12926 - DNA, 359 bp, Oryza sativa
  Clone ID: PAT_MRT4530_19008C.1
acccccaactttttaaggggggaattggagaacaattctttccccccaaaatccagtttagcgacaattttttaaaaaaaccctttggtttgcccccctgggtgggaagccgagcaaaggcgtttacacaaaaaacccgagaccactttaaaccaaacgggaacgaacaaaaaaaaaacaggggcttttttggctgaaaatacccaaagggggggggtttcttttattttaaggcccccctccccccaaaagaagggggtatggcaacggaaaaggggaggggaacttgggttaaatgaggggaaagggcttcccgatccactccttgagggagtcatgcagggggtcgaagagcttgc

SEQ ID NO: 12927 - DNA, 697 bp, Oryza sativa
  Clone ID: PAT_MRT4530_19009C.1
ttaaacactgcctccgccctccaggagagagctctttccgtccgactggtcgtcgatggccacaatctctgggatcgggagcttctcgccgtacaccatcaccgccacctgcagccggttggagcggcggcgatcgacggcggcagcaacaaccaccatcgcgctggtctgcgtagggttcctgacgctcgtcgcgtcggcgtggcggagcggcaggccgagcgatgtcggcggcggagcgacggggaggagtggccgcggccggagtggggcgggaaggagcgggccgggcaccccgacgaggaggccgaagaacaggaggtgcgcggccacggcgacggaggcggccgccgcggcgccgcacgcccgggagaccttcctgatggccctcaccaccttcagcttcctcgccgccttcccgtggctcgacttgatggcatggagaatggacgagtacctgtcgtggatctgccggaagctactccgcgtcgccacgtcgctgaacgggttgctccgcatggcagcgagcggcgctgccgctgtcatcgccgcggcgccatcggtagcggcgacgctgtcggagatggtggcgaggaagctgtccatggacagatgtggctttgggaggcagtcggcgcggatgggcggctccggctgcgtcggcgggagcagcgacgacgccggcggcggcagctag

SEQ ID NO: 12928 - DNA, 524 bp, Oryza sativa
  Clone ID: PAT_MRT4530_1900C.1
atggccactgccgtccaagtggagggcggcaaggcctacttctgtaaatattttcgccgcggcggagattggcctcgtcctcgcacgccggagtcgccgagttcatcctgccgcggcccgcgggccctcgctcgggtgctcgggtcgggggaatcctctaaaccgtacggcgtcgtgtccgcgagggccgccgtaccagatgctgctcaagtagcccggcgtgcatctcgttagagatctatacgaaggggaggacatgaacagcttccagcagaggctcgcggggaggttcagagatccgaccacaccacattggtcatccctaagaaagcgtggaggcgtcgagctactagattttctgataatggcaattttattaggttcttaatttctccgtgtttcgagttcatacatggaaatgcaaaccatttttttgatgcattgatagggaacaagaagtcgatataatgtcgtcatgctaactcctggaatcaaaaccaaatggtgaaatggagaatcatagt

SEQ ID NO: 12929 - DNA, 366 bp, Oryza sativa
  Clone ID: PAT_MRT4530_19010C.1
atgtgctgcaaggcgattaagttgggtaacgccaggggcgaattcgagctcggtacccggggatcctctagagtcgacctgcaggcatgcaagcttacggccattgaggaagctattcgataccaaggtgatgatcggcagcacctgaagatgttcgaggagaacgcacgcgagaagagtatcaccatcggcatgagtgcggacatccaggtgctcctcactctgccactctggcccagtgggaggtgtgcttcaagaacagcatccacttactatcaacctgaaagaaaaaagctcctacagaaagtgggatccgtgaccaaggcagtcgagggcgtggcatggtccatgcaaagggtggtgtag

SEQ ID NO: 12930 - DNA, 363 bp, Oryza sativa
  Clone ID: PAT_MRT4530_19011C.1
atggatggctctatttcttcttcgatcgttcctcgctgcaccactgagttgctcttgggcaaatgtccattgtgcgggacccagttggaggcgcgaacgtcgaggaccccgatgaatccaaacaataagtttgtaaagtgccctaatcttgagcatacaccatatgcttacagattttttgtgggaagatcagtatgcgcaatttttggccaatggccgtgtaggtctggaacatcagacaggacatggacatttaatgttgaagcaatgtcatcgatggggattgagggcttagaattgaagggatttgcagcagtgggacgaatgttagtgtaccttacagttgtgcaagcttgctgttga

SEQ ID NO: 12931 - DNA, 2319 bp, Oryza sativa
  Clone ID: PAT_MRT4530_19012C.1
atggcggccgccggcgttccgcgagcgggaaccggcggacggcggccggaaggacctggggaggacaagggaaaggttaggaatgggataggggctcccagcggcgggaatcgccagccggaggggaggggaggtcggaccgagcccgggagaggcggagtcggggcggcaaccgccggcggcgtgggcggcatcgtggggtgtgggtggcggttttggaagggagaggtgggggatgaggaggacgtggggcggcggggtcccacggccggcggactcgtgcgcggggtggagaaggagggcggaaacggcagcgtcgtggggaggctcaggcggccatggcggcgagaaggctacattcgctgcatactacctgcaaggagcatcagctgcttggtgggagacatacaagactctcattcctctgatgagcctaacaattggactgttttctgggaaggattcatatctgctcacatccctcctggtctcatggagatcaaaaagaaagagtttcttaacttgaagcaaggaaacatgaccttcatggagttcatggaacgcttcaactatctgggtagatatgtcgctgctgacatgaacactgaagcaaagaaggttgagctatgcagagatcgtcttgcacctgaactcaaccatgctattactgctcatgaaatcactagcatgaagtcactggttgaaaaagcccttcgtgtcgaatcaagtgagaaggaagtcgttgaagatcgtaagcgcaagtgggctgcaaagaaatttgcaagtggcagcagctccactcggcctcgtcttgctccatctcctgtggttcgtcccatggcgcctcagccaccacggcagatgtatgtgcctccacgtccacaaactcagatagtccgtcaagttcctcgcacagttcaagctgcgggagatgcatctcgtaatgataatgtcgcatgttataattgcggcaagaaggggcattattctcctaactgtccttacccgaagactggaaaatctggaccgcatacacagggagcaccacaaaggagaaatgtggcggatgagttcgctgaacatctgccaacttggaagtggtggcagtacgtcgactacccccggcacggtctgcagagtgagctccagagcgagtatttgtcatcctgcactcaagacctggatagtaattggcagttgcttgatttgtacgagttggaaaatagtgaaagaacccatccatccctggcctgtggtgtcggtaatacacaatcgcttgaaatgcggcctcatgcattgctgagggtgcatcccaaccataagcttgaaagtaaaggggtgattcatgggtccaaaatccttgtatacacagctcagccatataagctcggagagatgaactccgttcaagagaaaagaaatgatactccggaaaaatgtgagggtttcttaattaagttgggtagctactggagcaagagggtgaaatcttctccaccccaccttgacacactcaaaaaagctgctggaaagggaaaagcaataggaaaggtgcaagggactcttctggctccgaagaagctagatcttggcaagacgccatcagctcatcctaagcctccgacagaattcacattagacatgccattggtcagagatgacgtgttagtgaagatgggccctgcatgcaaggagttgcacggctactgcatggagaggtccaacgcaaggaggaagaatagagagacctccatgacgggctactatgatagacagccattcctcgggcctgaagccttcatcgccatagacttcaaagatctatgggacctctacagggtgcggttaacttggaagcatgtctgtcgtcatgcaccccatgttgccttactcgatctagctgtcatcaacgagacaattataaacagcgatcgagccaacatggtagaatatatcaaggactgcttatggtaccatcaagacaaggaattcattatgtgcgcctacaatcaacagcgtcattggattcttttggtcatagtgcggaagtggaatttggtatactaccttaactccaatatcaaaaaagacatatgcgattggtcggcgattgaagctgctttgaacaacgcctgggaccaatatgtggcaaaaggcgggtggcataaggaagggcatcccacactcggtcacaaaaaagacttcccaatgcatcaacaagttggcgaccagtgtgggttccatgtctggcataacatgaggagcttcgcaaaaaaggtgacattgctcgaccttgaggcatggctagcaaaggcctga

SEQ ID NO: 12932 - DNA, 543 bp, Oryza sativa
  Clone ID: PAT_MRT4530_19013C.1
gaacaacaataattataaaatattttttacccgttgaacacacgggtttttttttttagttcaatatatatataaaaaacatcaacaaatattttaaaaatttgggcaaaacataagggcaaaacgtttctaacggaagaattttaaaatttattcatagctaaagtttttaatgcttgaaatcacccatatttaggggggggttagttcctaaaaaaagtggaaagtttaaaaaaaagggagtttggaaaaaaagttgaaagtttatgagtgtaggaaagcttttgatgggatggaaaggggggaatatgagggaaacaaaacacggccttaaaacgaggaaggacaagggagggggaccagcaatccaatcgcacgattggggatgcttggcaaaactagctgagttgttgggggggcacaaccaacgtaccgaggcgcaaaaagagcacgggccaatccccattggtgaaggccgtggggtacaccgacgccgggttccacctctcctggaaatcttcggggggcactcgtcgacggcag

SEQ ID NO: 12933 - DNA, 2565 bp, Oryza sativa
  Clone ID: PAT_MRT4530_19014C.1
ctacgttaagctcttagcatgtcctaattttagtgcggatttttcatgcttgcatcatattttaaaaattgcaaaaaccctatgctgcgcagattctcacaccacacctcaggcttcacccccgcccccagcaggtagcggacagtcccctctcgtggctaggtgaatccggaagcgacagaggccgtcgcagggcccgccctgctccatcacgcccacccttgcctggatgcgtcaaccagagaaaagctacacttcaaggcaggcagttacccattcccgcttgtggcaagcgttgtatgtcttctagtgcatcccgcgaaccggtccttaattgccatgggtgcgaccagcaaaaccatgcacccacaacccgctattcagtcgtattttagttggataattatgaccatgaaacatggccagatgtctcgagcacgtagctcatcataatactaacatgtctaatactgcaattatcccatctactgagctagtggtaattaagcatcgctaagcatatagttctagctaggtcatcaaagtaacataagcgggaggccggcgccgacacgcgggccccgcacgtcagcggcacaaaggggcggcgcacggtggaccaagtccgcacatggcctcgggtgcgcgtccaccacgtggacggcccaaatcggcccgagccgatcgagcggccgaggggagcggcggccaggggcacgggtgcggcacaaagccggcccggcagagccaaggcacggcggcgacggccagcaacagcgtggcgagcggcggcgacggcacgacttgaggtggctaggagcggcgggaggcggcggctggagcacgccgatgagtggtggggagagggagcgccgtggggaggtggtttcggcgacacaatggggaagcggaggggatgccggggtatggcacgacgcggcgaagccgctgatggcggtcgcgcggagcggcggcggcaggagcagcggtggcggccggctggaggatcaccggcgagaggtgcagcggtggcggcgtggttttcgtgcacaggagggctcgggagagaggggaaaatggagagggaggtgcggggaatgtttttataggggaggggaggtcggaccgagcccgggagaggcggagtcggggcggcaaccgccggcggcgtgggcggcatcgtggggtgtgggtggcggttttggaagggagaggtgggggatgaggaggacgtggggcggcggggtcccacggccggcggactcgtgcgcggggtggagaaggagggcggaaacggcagcgtcgtggggaggctcaggcggccatggcggcggttggagccggaggaaggggccggccccacctgtcagcgaagggagagaggaagggacgcaaaaaagactttttgcgagggaggataggagggaggccgagggaggggaaagggaggccggcctagccgggaaagactccttccaagttggcagatgttcagcgaactcatccgccacatttctcctctgcagctgatccactcgcagcagatgattggcttcgtgatattaaaatcaagctaaatctttgccagtgtgatcctgtagagaaggctacattcgctgcatactacctgcaaggagcatcagctgcttggtgggagacatacaagactctcattcctcctgatgagcctaacaattggactgttttctgggaaggattcatatctgctcacatccctcctggtctcatggagatcaaaaagaaagagtttcttaacttgaagcaaggaaacatgaccttcatggagttcatggaacgcttcaactatctgggtagatatgtcgctgctgacatgaacactgaagcaaagaaggttgagctatgcagagatcgtcttgcacctgaactcaaccatgctattactgctcatgaaatcactagcatgaagtcactggttgaaaaagcccttcgtgtcgaatcaagtgagaaggaagtcgttgaagatcgtaagcgcaagtgggctgcaaagaaatttgcaagtggcagcagctccactcggcctcgtcttgctccatctcctgtggttcgtcccatggcgcctcagccaccacggcttcctcgcacagttcaagctgcgggagatgcatctcgtaatgataatgtcgcatgttataattgcggcaagaaggggcattattctcctaactgtccttacccgaagactggaaaatctggaccgcatacacagggagcggacgccgcactcgctggctgccggccaacccatcgctaatcgtccagtccaggggcacagccagcatccggccaaactttcacaatatcagccacgaataagtccatcaaggtaacaaataatgcttcatctatttatttttcaatcaacttcactggttatagacaaaaccaattggatgatgctgacagtgcagcaatgtccagcacgatcctcaacagagctgtatcatctgacaaaagccccactaacgtcacgtggaggcacagactaccacctttctctctctagccctcctcctacggcgactc

SEQ ID NO: 12934 - DNA, 1024 bp, Oryza sativa
  unsure (1)..(1024): unsure at all n locations
  Clone ID: PAT_MRT4530_19015C.1
atggccttctccatcacctccgctgcgtcggcgaaggcgttccagccggcgctcaggctcgccgcgcaggtcgccggccaccctcagcccgaacgcctcgtccatgtctggatgtcgctgtcgtcacgtctccatcaggaggtcaccgtgctctcggcggagccgaccaacctccaaggcgttcaaacattgctcgccgccgacgaggagccgccacccgcgccggacctggagcagagttggagccttgcggcgtcgcgacaagcttaccacaacatcaccgcagcgccatgccaccacacgtccggaaatgcatcccggaccctcccacgctcggctcctaagttcttcaagaattacttcgacatcgtgcgacggaacaacgaacacctccacgacttcctctgctccgtgcagggcctccacgccgtcctcatcaacacaacgtgcggccatgcccttgaagccctttggaactcggtgctcatggaggtcatgggcgtcggcgtggagatggagggatggctggaagagcttgtcatggccaacgaggtggaggcgaaggtgaggttggccatggagtccgagcaaggaaagaagctcagagaccacgtcgaggcgcgcagggaagccacggccatgacctggaaggacgcagcgcgctgccccgacgagctccggacttaccgcggcctgctcgagcgttgcggcaagttgctgagcagcatccaggcgttcacagctggcgacgaccagcagccgtgccagatgtccgtgcttgacgcggcggcattcctcgccgacgaggactcgctgtcgtcgtcgaggtcaaagcgcaccatcttcacgcccgccctgacgagctccggactgaccgcggcctgctcgagcgctgaggcaagctgttgagaagcatccaggcattcacgcccagcgacgaccagtagccggtgttcgtgctcnacgcggcggcgtttcctcgncgacgaggactttnggtcgtggtcggattcaaagcgcgcat

SEQ ID NO: 12935 - DNA, 543 bp, Oryza sativa
  Clone ID: PAT_MRT4530_19016C.1
atggggaaacggaggggttgccggggtatggcacgacgcggcaaagccgctggtggcggtcgcgcggagcggcagcggcaggagcagcggtggcgaccggctggaggatcgccggcgagcggcggcaagaggtgcgacggtggcggggtggttttcgtgcacgggaaggggaggggaggtcggaccgagctcgggagaggcggagtcggggtggcaaccgccggcggcgtgggcggcatcgtggggtgtgggtggcagttttggaggggagaggtgggggatgaggaggacgtggggcggcggggtcccacggccggcggactcgcgcgcggggtggagaaggagtgcggaaacggcggcgtcgtggggaggctcgggcggccatggcagcggttggagccggaggaaggggatgacaggtggggccgccggtcccacctgtcggcgaagggagagaggaagggacgcaaaacagactttttgcgagggaggataggagggaggccgagcgggccgagggaggggaaagggaggccggcctag

SEQ ID NO: 12936 - DNA, 498 bp, Oryza sativa
  unsure (1)..(498): unsure at all n locations
  Clone ID: PAT_MRT4530_19017C.1
cccccacccacccacccaccgcccgcgcgcgcgcgcgcgtcggtgctccacctgcatcctctaatccccgcgtgggcggcgccttgtctgatctggttgccagccacagctcgcgggatctcgcgtgtttcggtggaggggattgcggcgccgtgtgattcggcgattgggatgagagaggggaggcggcggctgcggcggtggcgatgagtggctcggcggcgacgctggggatgcggtgcgggagctacggctccctcgcgtcggccggcggcgggaggaagggcgggggcagggggtgggggtagcgaggctgntnctttnctgcttcctaattttatttttcaaaataggttcactggccgttggagggggcttccaaccggatgcattaatttgcgctagtagctccctgtgggatccctgaataacgaaatggctctttcccagagcaggaacatttcaggcatccagacaactttagccctttttttgtcc

SEQ ID NO: 12937 - DNA, 183 bp, Oryza sativa
  Clone ID: PAT_MRT4530_19018C.1
atggggttttctcatgcgattgcgatcttgttcatcttcctcgtggcctcaccaccatcaccttcacatgctaggatggtgccaaacgatgatacccagcatgtgcctccaacgccggcgaagggcggcgctgggcgcagtagagcgctgtggtcagcaccaagcgatggcgttggtcattag

SEQ ID NO: 12938 - DNA, 378 bp, Oryza sativa
  Clone ID: PAT_MRT4530_19019C.1
atggcgggtggtggccgcgcggagaatggggggcggcggtggcggagattgacgggtaggcggcttggcgcgatcgcattcctgcggcagtggcgggcggtggcagcggcttggcgcggtcgcgttatcgcggcggcggagccaatggcgatgagggttggcggcggcggcggcggtggggagcggcgccgatgggcgatggcgatggggattggcggcggtggcggcttggcgcggtcgcgttcccgcagcggcagcgatgcgggttggtggcggcggcggggagcggcgctgatgggcgatggcgatgggagcggcgccgatgcggcggttagatgcagtatcgaaggtccaagagctggtactaaacttatatag

SEQ ID NO: 12939 - DNA, 165 bp, Oryza sativa
  Clone ID: PAT_MRT4530_1901C.1
atggcgatgaagacatgggcggcgcggcccgggtacagcacggagtggaacacccactgcgatgcgtcaaccgacatggtaaggaggaagacggtgaggttccaggcgacggactttgccagcaacccactactgggtgcaaccatgtcgctggagaccccctga

SEQ ID NO: 12940 - DNA, 567 bp, Oryza sativa
  Clone ID: PAT_MRT4530_19020C.1
ggtgatttcatcggggaaagaggaggcgatctcgccgcgccgtcgagctggggatttctccgcgccgtcgcgcggcgccgaagcgacgagtaggcggttcactggtgaggaggtcttcatccgacggagatgttgcatttgctagatttgtggttttgtttttgtgtttgaagcgccgatctggtgatttcttctaaggttgatgtgatggaaaaagttggaaatttggaggaaaagtttggaactaaacgcagcccgagccaggagttcaatctggttactgcagttagaatccaaattgaagcaatccagtggaccaaagaggagctagctccatgtccaggaggaccttggcttgtttgaaacatccgggggttccaagggggggtctcataaggtcgagttgtttcaaatctgttgacaaaaaaatgccgcacaaaatcgttaggtgaaattgatgttctgattaattttcaagttcccatatcagttagttttgaattggagaaattcagaaatttaaagttacttcatgtttgatatctgaattaaaaaaaaaaaaaaaaa

SEQ ID NO: 12941 - DNA, 1675 bp, Oryza sativa
  Clone ID: PAT_MRT4530_19021C.1
aggccccgtggctcccggcttgtctcttgttttttttttttttttttcattaaacaatatatattatgggatctgtgtatttgtttacatttggtacaaagatgatactttcatacagattgtacatgatttttttctctgatacaggttatacaggacttttctctgagtaactttagtccatcagttatgtaggcacaggagacgatgaatttgcaaaaggaatgagtcgctcccagatttttcaccacctacggcgtttcctgccgtaccaataaccaaatgcagcaatggacgcagctgcaatgacaccagccgttgcatgccatacatatgtaggcttttcaccaagagcaagcccaccatcaggcaagtccttctggctttcttgaatggcaaacatcagaccttgcttttcaagttcagcaatgtttataaccttagctttacgccgaacaacattcgatatcgcctcgtattcttctcgacttccaccttcaagaaatgcacccctaatccggcttttatcaacccaataggcaccaaaccttgggctgctgtttgtgaagtctccaaagtgaaccacttctccggtattgttcccatagaattgccaggataatgtgaagaccctggagtagaagaatggcaggtaatcgatgtccttagtttttgaaggctccaggatggctgcaacagcatgtctcgctgttctgcgagctgagtcaacatgctcaagccgtcgtataacaccatcaaagagcttgatagggaaggcagcaacatcgccaacggcatatacagaaccatcgcttgttaacatttgtccgtttacctttatcccaccttgctccatcaacagctgaccttcaaaaagaccagtgcttgcacggatgccaataccaaccacaaccatatcggcaggaaggtgtttaccatctttcaggattactgaagtcaccttccctgtcgaatctttttcaaaggatgtaagcacagttcctttgacaaaggtaacaccttttgaagtgtaatagttctcataatattctgcaatttttggtgtaaatagacgggccatgcagtggctttcagggaagaccatggttacttttatcctattagtaaccaatgctgctgcgcactccattcctatatagccaccaccaatgacgacagcatttccaccaggacatgatttcatcacattcactaacttatccgcatcatcaagattgcgcaaataacatatgttcgaagcatctgatccactgattccaaactcttccagcttcaaagcccgagcaccggtcgcaatgataagattcttatagctgatagtttctccagtggctgtaagcaatgtcttcatccttacatcagcggttatcacttttgttccaagaacaagttcaataccattttctttgtaccattttgccgtcagtaattcatcattggcaccaacgcaggtatgaaatcctggaagacgagcggcaccttctgggagtaaatagcctttgcttagtgccggacgttcataaggagcaaccgtctcttcggagatgatgcagagctcgccgcgggagtagccgccgcggcgggcgaactcgagcgccgcgtagccggcggccacgccgccgccgaggatcacgtgcacgaacgcccgccccat

SEQ ID NO: 12942 - DNA, 168 bp, Oryza sativa
  Clone ID: PAT_MRT4530_19022C.1
atcggtttctgggtgaaatacctcgccgccggccaccactacagcggtggccctgaccgcaccctgagagccctagccatggacggctactacgaggatatgctcgacttctcgtccacgtcgtcctcctcctgcggcggatgggaggtcgcggggtacgaggagggg

SEQ ID NO: 12943 - DNA, 567 bp, Oryza sativa
  Clone ID: PAT_MRT4530_19023C.1
cccacgcgtccgcccacgcgtccgcccacgcgtccgcccacgcgtccgacaactcggtctctagttgaaaagctatagccatggcggaggagaaggagctggtgctgctcgatttctgggtgagcccgttcgggcagcggtgccggatcgccatggcggagaaggggctggagttcgagtaccgcgaggaggacctcggcaacaagagcgacctcctcctccgctccaaccccgtccacaggaagatccccgtcctcctccacgccggccgccccgtctccgagtccctcgtcatcctccagtacctcgacgacgcgttccccggcaccccccacctcctccctccggcgaactccggcgacgccgacgccgtgtacgcgcgcgccacggcgaggttctgggcggactacgtctacaggaagctctacgactgcgggtccaggctgtggaggctcaagggtgagccgcaggcggcggcggggcgcgagatggcggagatcctccgcacgctggaggcggagctcggcgaccgggagttcttcggcggcggcggcggcggcagggctc

SEQ ID NO: 12944 - DNA, 283 bp, Oryza sativa
  unsure (1)..(283): unsure at all n locations
  Clone ID: PAT_MRT4530_19024C.1
gaccgatngaaaaaagggataaacttggggaagatttgaccgggaatttcttgnngaagttgaaaaccaantgggaggtttcataagcccaattcaagaatgccaaaagttttcccattgttttttgaggttaattgntttttttgggtcccgccaaaagncaccaaaactataatgaagttgtcggccctttaatttcccttctttcaaattgtaccgggtttgaaatgtacttaaatcttagctaatgcagcatccttttttttttttaaaaaaaaaaaaa

SEQ ID NO: 12945 - DNA, 193 bp, Oryza sativa
  Clone ID: PAT_MRT4530_19025C.1
aaaaaagatcttttcctcccaaaaggggggtttcagaattcaaaaggttggaaattgggacatttttttatactactaccatgtcccacctatagatcatatcctaatcctccgtaggggatatacccatcccagggggggcttcagaaggggaaaaaaaaggggaaagaaaaagagaaacccacccgtccgg

SEQ ID NO: 12946 - DNA, 160 bp, Oryza sativa
  Clone ID: PAT_MRT4530_19026C.1
gaccatgccagggagaagtatggccaaaagctggcagctgtgcgtgctgatgctgagacccatctggctgagatgcagcgggaagcgcacaacgcttgccgggagctggaggtgatgactgccaagtacgagggtgccaaggtcaatgtcctggaggaga

SEQ ID NO: 12947 - DNA, 429 bp, Oryza sativa
  Clone ID: PAT_MRT4530_19027C.1
atgaccccacccctgacccccaactctccacctggccccggctccgagtggacatgcggggccaaatcaggccctgccactggcccctacggggccccgcaacctgacatgggccccgcattgagtagcaattccatcgaattgccgtgcgtctcagcgtttgtccatgcacgccgctcgctccctgtgcttgcgctgtgcctgtgcactgccgccgcgtctctgtggcaccgctgcaactctgtaccgcgctgctaccggaagagactaagagaggggcgtgcgacgggagtccggaggggagaggaggggagggaactggggagagcggcgagcccacgagatctggcgaccggagagagccgggagagaacgggaggggactgcggagagggcgaccggagggttggggactccggggtcgcatga

SEQ ID NO: 12948 - DNA, 267 bp, Oryza sativa
  Clone ID: PAT_MRT4530_19028C.1
atgccaagattcgtacatcgcttcttctcctccaactctggcgagctccccttcttctccggcgctggcgacacccccaacaccagcagggagcatacagtgggtggtggacccgggcaggtggcgaggcgttggcagcggtgtcgaagacatgaggttggcagcaggtcgagggccagccttggcggcaggggaaaatacccagactggttaggagacggaggctgggtggtggcaaatctggtggctgggagccataggagatag

SEQ ID NO: 12949 - DNA, 2453 bp, Oryza sativa
  Clone ID: PAT_MRT4530_19029C.1
atgctgcgctcctaccgctgtttgggccgaccgttgggttggaggctggaggcccacgttctgatggcccattttgaggggaaaaaagtgagggagagggatgtctgctgggagtactgtgacaagatggaagggaacaaggtcaggtgcaggttctgctacaaggtcctaaatggtggtataagcagactcaagttccatctgtctcaaatctcaagcaaaggcgtcaatccttgcaccaaggtgaagccggatgtcatagaaaaggtgaaggctgtcatagcagcgaaagaagagcacagagagacacaggttctcaagaggcaacgtgacactgaattgtcggtgcgtccaagaagaatacgggaccttccctctcagcctacatctccagagcgagctacttctcctgctattacttcaacctctgaccagacacagttccttgcgttggaagtatctactccagtactgaagctatcatctgtgacaaacaaggctcgctcagcaccacaatcggaagccgaacgatgcatagctgaattcttttttgagaataagttggactacaatattgcagactctgtttcataccggcacatgatggaggcacttggtggacagggattccgagggccgtcagccgaggttttgaagacaaagtggttgcacaagctcaagtcagaggttttgcagaaaaccaaagagattgaaaaggattgggcgacaacaggctgcactatattagctgattcatggactgataacaaatcaaaagctctcatcaacttttctgtatcatccccattagggacattcttcctgaaaacagtggatgcttctccacacatcaaaagtcaccagttgtacgaactctttgatgatgtgattcgggaagttggtccagacaatgtggtgcaaataatcactgatcggaatataaactacggcagtgtagacaagctgatcatgcagaattataacaccattttttggtctccatgtgcgtcttcttgtgtaaactcaatgttggatgacttctccaagattgattgggtgaaccgatgcatctgtcaagcccaaaccataacacgatttgtctacaacaacaagtgggttcttgatcttatgagaaagtgcatagctgggcaggagcttgtttgttcaggaattacaaagtgtgtgtcggattttctcacactgcaatcattgttgaggcacagaccaaagctaaagcaaatgtttcacagctctgactatgcatcttcttcgtatgcaaacaggtctttaagcagttcatgtgttgagatccttgatgacgatgagttttggagagcagtcgaagagatagctgctgtttctgaacctctattgagggtcatgagggatgtcttaggaggcaaggctgctattggttatatatatgagtctatgacaaaagtgatggactctattagaacatactacataatggatgaaggaaaatgcaagtcatttctggatatcgtcgagcaaaagtggcaggtggaattgcattcacctcttcattcagcagctgcttttctgaacccaagcattcagtataatccagaagtcaaatttttcactagtattaaggaggagttctaccatgttctggataaagtgcttacagtccctgaccaaaggcaaggtatcacagtggagctgcatgcttttcgaaaggcacaagggatgtttggctctaacattgcaaaagaggcccgtaacaacacctccccagggatgtggtgggaacaatatggtgattcagctccatcacttcaacatgctgctgtcagaatagtcagccaggtctgcagcaccctgaccttccaaagagattggagcataatcgttcggaatcattcagagaagcgcaacaagttggacaaggaggctttggccgaccaagcctatgtgcattacaatttcatgctccattccgactccaagatgaagaagggtgatggggatcccatcgcgctggatgctatcgacatgacctcgccatgggttgaggactctgacagtccaaacctcgcccagtggctcgacaggttcccgtctgccttggatggtgacttgaacaccaggcagtttggtggttcgatctttggcaccaatgatactctgttcggcttgtgacagctttcattgatcagctcctcgtccggcaatgtgttgcttctgatgtacaagttatctctgtatgtatcattccatctccatatatctttgctagactagattctatatttgtttataccaaggtgaaaacctgttacttgttttggatcggacatgagaagctgataacctggagtatatggattatcgagattggagaacatgaaactgaacttttgatggccctttcttgtccctgaatgatcatagaaagatgtttttaccaaaaaaaaaaaaaaaaaaaa

SEQ ID NO: 12950 - DNA, 294 bp, Oryza sativa
  Clone ID: PAT_MRT4530_1902C.1
acttgtctcttcatatcttattgattttttatttcaaaagaaaagaggtcaacaccataccaacactctcaaactataaaaaaacaccacatatacatttgcatttccccatcatagctgatagaaacaccaactctaactatcccccaccactacgctttcccaccagcttgtttagcaacttatccatacgatttatgatcacaacaaaaagccttaccccaccatattctaacatgccacaacattttaatccacgattctgcaactctatcatgaatcaatccatgccaa

SEQ ID NO: 12951 - DNA, 465 bp, Oryza sativa
  Clone ID: PAT_MRT4530_19030C.1
gcctaggatgagatgcatacgggtgatgcctgtgcatagccatggatgcagatgtgctgcatggaagtgcaccatggtttgtgctggtgcctgctggcttgtgcaatgtggctgctggatgcaacaatgtgccacctggatgatgagcactggtggggccaatggacggaatacgaatgggatggatgcccctgtgctgctgtgctgtgcaagtttgctgtgcctgtgtgtgtgtgcaccttggaggcatgccaggtgtgaacgtgatgggaatgctgcttgctgcttgccagactggctaaatggctagtgattggacaccgatgcaccatgaaggtgactgtgccgcctgcccgattggactgcggaaagtttggaactgcttgctggcaactgggggaaccattggagcaaggattcttgtagagatcttgcagctgagagttctgtctctaagcttgctat

SEQ ID NO: 12952 - DNA, 183 bp, Oryza sativa
  Clone ID: PAT_MRT4530_19031C.1
cttcgagagcccgagcttggagaagaagagaagaaaaggcggcacggaatcgtcggccgccggcaccatccggggggcggcgcatagatccgccggtatcggtcaggtggttcttctcctctctcggaatcgaaggcgagcgcgcgctttaatttcttcatctcccgccatcttcttcattgg

SEQ ID NO: 12953 - DNA, 315 bp, Oryza sativa
  Clone ID: PAT_MRT4530_19032C.1
agggggtgggggaaccgccccattccattatattagacacactggatatataactaataaacttgaccggatatgatgagaggcacaggaactgcactgctccatacggggtttgtgtgcaccatataaccataacggtgcacgaacgggcttttatacaacatacttaccaatggaacgcgtaagaatacagtaaaggagggcgcataacatgacaaaaagttgcagcacgctagcacgacaaacacggaattgctaaccacactgttgggggagaagagcaatctaatggagggacttgatctgtgccataca

SEQ ID NO: 12954 - DNA, 751 bp, Oryza sativa
  Clone ID: PAT_MRT4530_19033C.1
tgctgaaaaacagccggtcgtgttaatttataaccaactaaaataagtaccgcagctaaggttgctaatggaatttgattaagcatagttggaatggtcagtacacaaactaacaataacagcccgtgcaatatacttgatattttatgggtttcgcccgcatttgcatttgcagaagagcgaacaatcacagcagtaatcggtaagccccccattaatgctgaaactagattacctataccttgcgcttttaattcttggttggtatctgtaatgcgacgcttgctatctatgcgatcggcggcttcaatcgacagtaatgtttcaattgaagcgactattgccatcgttatgcctgtgctccaaactatcgaataatgaaaacccgcccaatcaggaaaatagagcaagtcgcctatttccgcccaactgtgtgcgataggcagttgcaccagttgactttcgggtatggctaaaggtgtaccggcaaacaacttattcaaaccaatactcatgattacggcgatcaaggcggacggcaacatttttatgctttttaatgttgcagagcgctcccaaccaagcatcatgagtaacgacaataaagaaataattaatgaacctaaatggatattgataaaacttaacgataattcattaaataaatgtttattaccaaaagcataaggcaattgagaagtaataattaaaataccaataccggctaacattccttcaatcacagcaatcg

SEQ ID NO: 12955 - DNA, 1369 bp, Oryza sativa
  unsure (1)..(1369): unsure at all n locations
  Clone ID: PAT_MRT4530_19034C.1
ttagccgatcattgggagcgcaaagatatcgaagctacaatccagcacaatcggcagcttgtgcacatagagaagtctaagcttgatcagctgtctgagggcccgatcaaatccaatattgatcggcttgaagctcgcaaaattgaactcttggcacaacttcaagaatgcaacgccgagcctcaccttaccatttttcttgataacatgaactatactagaaacccattcagcatatcggcaaggacaaataaagccagcatcatacaaacgtttgatttcagccttgacaggttcaagcatatcggctttgcatctcctcaggggctgcttgtgcggtctaatccctggacctatatctatttcttctaaatcatcaaccgacatgaaaccttgaccttgcttgtcatcaagatcatctaccgtatccttggtgtagacatttgaaccctccacgatgccctcaaagtaatagcttgggttctccatctctctcccctcccctccctctcccagatctagccggagggagggggcgccggccgccgcggcggcgaccggcaagtggacctggtggccggcggcgttcgggcgtgggcggggaggccggatctgccgccgtcgtacgacgacgacgggccgggccgcgacaacgatgaccaccacggcggctggtgacgacgaccacggcgaccacgacgacgggccgtggctgcggtgcccgagcgccgctgcccgccgcgacgacgaccacgaccccgacaacgggctggggcgacgggccggggcggtgacgactacttaggtcgcggtcacgctcaagacgtggcatgcgcagctcgctggcgccacggccgtgctggtggcggacggtgtcgacgagccgctgctcacgatggacagccccgaggaggagacccccgacatggcgttccttctcgtcggcgctcatcaccaagcagttcggcgacgccctccgcgccgccgccgacgagttggtggtgcggctggactggagcgagtcgatgacgcacccgaatgagctctggacgaacagcaacgatgagtgcgggccgcggtgcgacgagcaggcggcgttcgtcggtgcgttctgcggccacgcgcagctgctggaggccgcactacatcacctggttntgccccgacgcattcctggagacgaggcagtgcaaggcgcagtgcatcaaccgcggcggctatggtaggcgggcgacgacgattttgatgtattgctccattttaatgtttgtttgtattgatgttttcatacatgcatgtattgatgtttatttgttgagaatgaagtaagaaattgatgtagtgttctcttgaaaaaaaaaaaaaaaaa

SEQ ID NO: 12956 - DNA, 496 bp, Oryza sativa
  unsure (1)..(496): unsure at all n locations
  Clone ID: PAT_MRT4530_19035C.1
tctgatcggtgcctcctgcccggtctgacaggcacccaatgctgaccgcattgtttaccatccgaaaatactatccaccgtattttcaacaacacttaccgttgacaattgttcatcaccaaaattaatcatcatatgattctacaacagtcagatacagtcagatataggcatgttcggagagatgccatactagaattgaaatgtcaaattttggaagagaaaaaaagcaatagagttaataaaaaagaaaaagaaagggctactctctgcattcatcctttcatggcnaaattaattttacacgatcgcccaaagtaaatttgatcactaattaatgtgaaattactttgacacgatggcatgtatcgaatcttattttaccattgtgtgcatccctaacaaaaaaaaaaacgtacttactctttccactatcgataaatcagtccttttaaccggnaaattcatccttccaaacaaaaaaaaaaaaaaaaaa

SEQ ID NO: 12957 - DNA, 225 bp, Oryza sativa
  unsure (1)..(225): unsure at all n locations
  Clone ID: PAT_MRT4530_19036C.1
cgctctctctctcttccgtcgcaccctctctctctctcgnccccaaaaaaatccccatccgcttgctccgnctcctccgccgatctcccccgcggctccgnctctttctcccttgctccgnctccnncttcgccgatctnccccgncgcagctncacggccgctccgcctcagccgtcgntcacgctcgcttccgactcccttgctccgncgttgatttcggccg

SEQ ID NO: 12958 - DNA, 561 bp, Oryza sativa
  Clone ID: PAT_MRT4530_19037C.1
gaaaggcgtgttagcactctcctctcttcgcgccctcctccgtcggcgctcgtcgccgtttgtctccgtcgccaccgtcgccgccatgagggagggcatctcgatccacatgaggcaggtcggactgcacgcctgcaacgcgtgctgggagctctattgcctcgagcatggcatacaacctgagggacagatgcccggtgacaaaaccgttgggggaggagatgatgcttataacagacttcttcacaagagactggcgctgggaagcatgtcccccgtgctgtcttggacgatcgtgaacctaccgagatgtgatgaggagacggactggtgactaccgccagctctatcaccctgagcagctcatcaacggcatggaggatgctgactgaactttgcccgtggacactacaccgattggcaaggagatagctgatctgcgccgtgaccgactacggaagctcgtcaacaactgcactggcctgcaggggtcgcttgtgctctgcggtgatggaggaggaacgggctccgcgctcggaatactgctacgtgagcgtgtct

SEQ ID NO: 12959 - DNA, 347 bp, Oryza sativa
  Clone ID: PAT_MRT4530_19038C.1
ctcgaaaacatgtagaaatggcactagatcttcttgataacaagtagtgattccgtttttcagctatgcgtgttatgcttgggcctcttcacaatcatcacggtgcattgcgcgtaatggctgcagtagtcgctcacgctcccaagaacagccctgcaaatcaaaccgatttgatcaaatttcaggcaaattcaaaatccagaagagaataaatcgagtgacggatgaacgtaacagctgatcctacaaaatttctgcagattcttacaacaaattccatttcaatgatcacactaattatcaactttggtttttcccgtaactgcttattgcaaattaatattttt

SEQ ID NO: 12960 - DNA, 687 bp, Oryza sativa
  Clone ID: PAT_MRT4530_19039C.1
cctcgaggggccggcccgggaaaaaaaaaaaaaaaaaaaaaaaaaaaaaaaaaaaaaaaaaaaaaaaaaaaaaaaaaaaaaaaaaaaaaaaaaaaaaaaaaaaaaaaaaaaaaaaaaaaaaaaaaaaaaaaaaaaaaatttttttttggggggagcccgggatttttgggggccccgtttggaaggggttgttgggggcccccccaaaccggggggttttggagggggggttttttaacggtttacccaacccccccctttacgggtttttgattggccggggggggaacggggcccccaaaaaaattgggggggtttaagggggaataaccaatttgggcccgggcaaaaatggtttttttaaaagggggaaaggttgggggtcccccacccccggaaattttgcaattgggggggaaaccccgggggggtatttaaaaaccgccctcccggaaaaaaaattttcccgggcttgaaaaaaaaggggaaaatcggcccccccccaagaaaaaaccaaaagtttccttttttgaaaaaaaaacagggtttaaaaaggttttaaaaaaggggaattttgcgggggggtccttttttggggctaggggggcccttgtttttgtttcccccccgggggggggggggatttaaggtttaaccggggccttccaaacttggaaaagggtttgg

SEQ ID NO: 12961 - DNA, 813 bp, Oryza sativa
  Clone ID: PAT_MRT4530_1903C.1
atggaaaataagagttcaaagttgaagcctgagaccaacctcatgtgtagagaccactgtgctggtggagacgaaaactcgacgcggattgaggctgccggcgccagcgatggtgtttggcggtggggatggccaattcggcttggaccactgctgctttggaggagacagcggcagccgcgtcggtcaacatggacacggaggggagaacatcttctggagcgggccttgtctactccaagtctatttctccgatatgcattccctcttctgatgaattacatggaagccgaagcgatgagaaagcctgtcggctacctaaactcgtgcaggataagtcagccgaaccacacatacacgctagatgagaggaagctaccggaacacatcaaggcgatgactcccgaagagaggacaacttacatagggcaaaggcatcaggaaaaactgctcgatgtcactacttacgtagctatagcgcttcaatctacgcaggacaaggagtgcgtttatgccccatatgcctttgatgcatttaaaaggtattaccagcaaggcggacaacgcaaaaaatcaagagaacgcatattcgtccgcaataagtggccgtgtcacaagcaaccggtgggaaccgtactatgcggatattacaccagcgagttcctaaggggtaatgggaaatattgcgcgaattacaacgagcttccaaaattccccaagtctgaaagagtatctaacaaagccttatcagctctgggcgttcctagccgaaatccccttaggtttttcggaggctttgttagaatagtgtaa

SEQ ID NO: 12962 - DNA, 427 bp, Oryza sativa
  Clone ID: PAT_MRT4530_19040C.1
gctttcaatccttgttttctcgtcttctctcatacaccatgggtgtggcttgtgctttcgagtttccaccattgatttgcactgagaaagaaccgatggatgaggccagctctgcatgcacgatagaggcagcggaggtggcggagatcgaacgacagctggttaaaaggaggagccagagtccccgccgtcgctaggcatgccaccaccatctgtcatcgcctccgcctctgatctccggcgacgagcgggctgacgatgaggtgagccacggtgaggtagcggtggttgcgaaagtggacgaggaggcggtgcgagcggccgaagcggtgaggcggttgtggcggaagcggcaaggaggctatcgaggagacgatccgagctgttgatttggcgcaaaggtggtgaagaagccccatgacagtat

SEQ ID NO: 12963 - DNA, 3393 bp, Oryza sativa
  Clone ID: PAT_MRT4530_19041C.1
atggccgacctcccgccgccgccacgcctcatgacccgccgccaaagcgacagcgactgggactgggacggatccagccgcgagggctcccccgaccccgcctccgcctccgccgtccgccgcgccgcccgccgctggcccgacgaccccggccccgcccagatctcgctccacatgtacatggcctcccgcgaccgcgaccgcgacgacgacccgccccccgaccacgcccgcctccggatccgcggccgccaggctcgcctcgagctcgtcatgcgcatggccgccgaccgacacgccgagctccaccgcctctcccaccaccgcgccgtctccgacttcccccaccgcaaccgaatccacgcactactccgggggaggtttctgcgcaatggtgacgacgacagaaggccaccatccaccgccgccaccgagctcggccagctacgacagcgtcattctgtctctggtttgagagaagagttccgcttcagattggagaacgtcgtcaggggtcatgcagttagccaatccgatgattcttcagctcaaaatgttgagctctctataaatggccatactgaatcaagcccttcttcttctgaatataatctcgagagacatcaacggacaaggctgaatattggtcttcagcaaattgaaggtacagcgacagtatctgaatctggaagcaatactcctagtattgctgaaggcctgtatgaacctcatagtcaagcagagagttggcaggatgatttggaacaagagagaagagattgggaacaattttcccatgctattactggagaggaatctgaaataaattggcatgaaaatacgtacaatggttcatctcatgagggtaccgaagttgaaggtggtcaagatgcacatattccagaatcacatgatgagttagctagtgacaatcttcctcctcaatctcatggagaacagcaggacaatagccatcttcccgaggagaatgaagagctgcatgacagtgatcttcaacaatctcgtggagagtggaatgagggcagtaatccatttattcctacagaagtacacaacgagtggcacagcgatgatcatttccaaggagtaaatgaagagtggcatgatgatgatgagtccaatgatactgcagataattggcatgatgacaactctgatcaaccaattgatcatgattctgctcttattagaagagctaatacgtttgtcccagctgatgatgataatgtgtacagtacagaactaagggaactcctaagcagaaggagtgtttctaatcttcttcatagtgcttttcgtgaaaatttggaccgacttatccggtcatatgttgaaaggcaaggtcgtgctcctctctcttgggatttggaaggagcacctcctgcgcctgactcacccgagcaaagccaggagcagcatagagatgaagaggaacaggagcttcatgataatgttgttaggcctcccttagtgattccacctccgcctatacctcctcgccagccactttggcattcggagttgcatcgtaataactggatcagacaaaacatacatcgctctgatattgaatgggaggctattaatgacttaagggctgatatggctaggcttcagcagggcatgagtcatatgcaaagaatgttggaagcttgtatggacatgcagctcgagttacagcgatctgtaaggcaggaagtttctgcagccttgaatcgcttcatcggggagcaaggtgaaagtaaagaaactatagacgatggatcaaaatggatccatattggggccctgcttgtctgccttggtgtaatatatggttttggggtggcagaaagtgttttgtttgggaactgggattaccggaggcagctactaattcatttcacaactgatcatttgaacaaactgattgatgggatacagtccagtgacagtgaggtgtatactatgctgcgcccaaaaccacttgattacgagcaacggactaccttggttcatgtcttcaacaacatagcaaaccaaatcttcggtaacaataatgggtttccagtcgtggaggcatttggatcatttacaatggatttatttacccctagaagtgacctggacctctctgtcaattttactgctaatactgacgatcagtatgctcgcaagaaaaaaatttctgctattaggaagttcaccaaagttctatattctcatcaaaggaatggaattttctgtggggttctgcctgttgtaactgctagggtgcctattgtgaatgttattgatcggggaactgggattgagtgtgatattacggttgaaaataaagatggcatgacaagatcaatgatctttaagttcatttcttcacttgatccaaggtttcagatactaagttacctggtgaagttctgggctaagatacatgatgtgaatagcccgagagagcgaacgctgagctccatgtcaatagtttcattagttgctttccatttgcagcaactgagtcactctgagctgatgatgagattccttgcagatggttcagattttgaaagtgttgagaggaatacgttggcatttaaggggtttgggagaacaaataaagaaactgtagctgaactgtttgtatcgttgatcagtaaactattatcagcggagagcttatgggagcatgggctatgcgctagcaactttgaagcatcatggatctctaagacctggaagaaaggaattggcaatttaaatgttgaagatttcttggaccggtcacaaaattttgctaggtcagttgggaaaaaggagatgcagaagatttgcagatgtcttcgagattgtgctttgaacttgttagatttcatgaggggtaaactagatacatcaaagctaaagacccttctgtttggatgccttaaaccagatgagctagtcagtaaacctcgtttgaagcgtggcaagagaaaacgcaagccacaaacgagcccagatagcagatatgggctcggaaagggaaagcatgctgtgcacctagtaggatcagaccagcatgctaattctacaactgctgaagctcctcaggttgtacatcgacatcccacccaggctaaggctagtactcagtgtgcgcacaagccaacgccaccttttgttattatcccttctggttttggctacagtttatcgcttcagttgccagtggctcctcagcttagtcgaggattgctgggccgacccccaccagttaatttagttcacttgaataatggagctcagctaccacagcaaggtctgcttctttccctgccgtcccaacaagcagctggcagtaacagtggagttacttatgctggagctcagcagcttcagcgcaacgaaaactag

SEQ ID NO: 12964 - DNA, 4220 bp, Oryza sativa
  Clone ID: PAT_MRT4530_19042C.1
atggccgacctcccgccgccgccacgcctcatgacccgccgccaaagcgacagcgactgggactgggacggatccagccgcgagggctcccccgaccccgcctccgcctccgccgtccgccgcgccgcccgccgctggcccgacgaccccggccccgcccagatctcgctccacatgtacatggcctcccgcgaccgcgaccgcgacgacgacccgccccccgaccacgcccgcctccggatccgcggccgccaggctcgcctcgagctcgtcatgcgcatggccgccgaccgacacgccgagctccaccgcctctcccaccaccgcgccgtctccgacttcccccaccgcaaccgaatccacgcactactccgggggaggtttctgcgcaatggtgacgacgacagaaggccaccatccaccgccgccaccgagctcggccagctacgacagcgtcattctgtctctggtttgagagaagagttccgcttcagattggagaacgtcgtcaggggtcatgcagttagccaatccgatgattcttcagctcaaaatgttgagctctctataaatggccatactgaatcaagcccttcttcttctgaatataatctcgagagacatcaacggacaaggctgaatattggtcttcagcaaattgaaggtacagcgacagtatctgaatctggaagcaatactcctagtattgctgaaggcctgtatgaacctcatagtcaagcagagagttggcaggatgatttggaacaagagagaagagattgggaacaattttcccatgctattactggagaggaatctgaaataaattggcatgaaaatacgtacaatggttcatctcatgagggtaccgaagttgaaggtggtcaagatgcacatattccagaatcacatgatgagttagctagtgacaatcttcctcctcaatctcatggagaacagcaggacaatagccatcttcccgaggagaatgaagagctgcatgacagtgatcttcaacaatctcgtggagagtggaatgagggcagtaatccatttattcctacagaagtacacaacgagtggcacagcgatgatcatttccaaggagtaaatgaagagtggcatgatgatgatgagtccaatgatactgcagataattggcatgatgacaactctgatcaaccaattgatcatgattctgctcttattagaagagctaatacgtttgtcccagctgatgatgataatgtgtacagtacagaactaagggaactcctaagcagaaggagtgtttctaatcttcttcatagtgcttttcgtgaaaatttggaccgacttatccggtcatatgttgaaaggcaaggtcgtgctcctctctcttgggatttggaaggagcacctcctgcgcctgactcacccgagcaaagccaggagcagcatagagatgaagaggaacaggagcttcatgataatgttgttaggcctcccttagtgattccacctccgcctatacctcctcgccagccactttggcattcggagttgcatcgtaataactggatcagacaaaacatacatcgctctgatattgaatgggaggctattaatgacttaagggctgatatggctaggcttcagcagggcatgagtcatatgcaaagaatgttggaagcttgtatggacatgcagctcgagttacagcgatctgtaaggcaggaagtttctgcagccttgaatcgcttcatcggggagcaaggtgaaagtaaagaaactatagacgatggatcaaaatggatccatattggggccctgcttgtctgccttggtgtaatatatggttttggggtggcagaaagtgttttgtttgggaactgggattaccggaggcagctactaattcatttcacaactgatcatttgaacaaactgattgatgggatacagtccagtgacagtgaggtaagcgcatgggatccccaagtgttacgcgcgcatgccgaatgtctcgagtcggaggagttggcagccctgtcagtcaatcgcactcttcttcctattctcgataatttgcttcttcaggtgtatactatgctgcgcccaaaaccacttgattacgagcaacggactaccttggttcatgtcttcaacaacatagcaaaccaaatcttcggtaacaataatgggtttccagtcgtggaggcatttggatcatttacaatggatttatttacccctagaagtgacctggacctctctgtcaattttactgctaatactgacgatcagtatgctcgcaagaaaaaaatttctgctattaggaagttcaccaaagttctatattctcatcaaaggaatggaattttctgtggggttctgcctgttgtaactgctagggtgcctattgtgaatgttattgatcggggaactgggattgagtgtgatattacggttgaaaataaagatggcatgacaagatcaatgatctttaagttcatttcttcacttgatccaaggtttcagatactaagttacctggtgaagttctgggctaagatacatgatgtgaatagcccgagagagcgaacgctgagctccatgtcaatagtttcattagttgctttccatttgcagcaactgagtcactctgagctgatgatgagattccttgcagatggttcagattttgaaagtgttgagaggaatacgttggcatttaaggggtttgggagaacaaataaagaaactgtagctgaactgtttgtatcgttgatcagtaaactattatcagcggagagcttatgggagcatgggctatgcgctagcaactttgaagcatcatggatctctaagacctggaagaaaggaattggcaatttaaatgttgaagatttcttggaccggtcacaaaattttgctaggtcagttgggaaaaaggagatgcagaagatttgcagatgtcttcgagattgtgctttgaacttgttagatttcatgaggggtaaactagatacatcaaagctaaagacccttctgtttggatgccttaaaccagatgagctagtcagtaaacctcgtttgaagcgtggcaagagaaaacgcaagccacaaacgagcccagatagcagatatgggctcggaaagggaaagcatgctgtgcacctagtaggatcagaccagcatgctaattctacaactgctgaagctcctcaggttgtacatcgacatcccacccaggctaaggctagtactcagtgtgcgcacaagccaacgccaccttttgttattatcccttctggttttggctacagtttatcgcttcagttgccagtggctcctcagcttagtcgaggattgctgggccgacccccaccagttaatttagttcacttgaataatggagctcagctaccacagcaaggtctgcttctttccctgccgtcccaacaagcagctggcagtaacagtggagttacttatgctggagctcagcagcttcagcgcaacgaaaactaggatgattagatcttgctactatttggccaagttatatgggtaagaaagagtatgtaccctttgcattggcaaacggaaacttagctgttcatgttggtgtgctgcagaagggattacatcagatctttttgctactgattgaagttgccaaactttcttttggaaggcaaaggcatgtgcttcggttgtaaaagtacgtactgtatcacatagtaggtggttttctgggtgctgaaccagaagaactacatttgtatatatgggctcctgggttgtgtcagctcagccttccttcaaaccatatgacacccaacccaaatgcagcctgcactgcaggtaggtaaaatgtctacctgtagtttgttctgtatttcttttttgtactatatcactgttaggacaaatgtttggataaggtgactgttgattttgctgtgttttcgagtacggggagatgattttgatgccccaacaagcaaggtcttcgagattgcaggacagggcaggacaatgcttggatcgatgacgaaggtgcatgcatgaatgcatgattggtgaaattaagtaagcaaatctttgggacacttgacatagccaaaacgggctgctttccatatctatcaaacatgcatcactttggttgaaatgggtccgaccgacagcataaacacaacttgctcaacttgttgcccatcaataataatatt

SEQ ID NO: 12965 - DNA, 398 bp, Oryza sativa
  Clone ID: PAT_MRT4530_19043C.1
aaaaagggtaaagggttccaaattttaaggttaaaaagaaaaggcttttaaaatttttgcttaaaccggggaaaaaaaccatattttttaacaccaaccgggggaactggtttggatcccttttgaaaaaaaaccgaaaacccttaattcgggaaatttagaaccatttgctttggtaaaaaaaaaaaaaaaaaaaggccgcccccccttaattgtagtagaaattacaaaattatcttaaaaaataatctttatttttttttcccaaaaaagaagcaaattttaattaaggggttttatttacaaggtttttccaccaaatatttccaaccctttttttcaagggtcaattacccaacttttggaaaaaaacaacccctgagaaaaagtgggaagtt

SEQ ID NO: 12966 - DNA, 316 bp, Oryza sativa
  Clone ID: PAT_MRT4530_19044C.1
aggtcttctctatctgcgcgggagcagcctcgtcaactaaaatgtctaaggaaatgaacaagatcaccgactaccatgcggaagcaaagacacaagaccaaagacttgctcctgacagcaaggacgaaggacccgaggagtgcacggagcactaggaccaaggacgctacacagtttaaggtgcgctggtccacgtggctatacagcttatgcagtttctacgcccacatgggcctgaagatgaagcagaagcttccaacgcagacgactgtgcaggaagcataaggatcgcatgctgaccatgctattagtagct

SEQ ID NO: 12967 - DNA, 507 bp, Oryza sativa
  Clone ID: PAT_MRT4530_19045C.1
atggcggcgccgtggtggtggtggtggccgctgccggcgtggctgatgccggggtcgacggcggcgtggttcgtcgtcctcaacgtggtgcggccggagacggaggaggaggaggaggaggacgcgaactacatgagcatggatgaggcgtacgcgctggtgatggcggcgcggcagcggccgccgccgacggaggaggaggtgaggaggtcggaggtggacgccaaggcggaggagctcgtcgccgagttccaggacgacgagcagaggcggcagcgtctcgactccatcttcaactacacgcagatgctcaagcggccatcgccgacggaggagggggcgaggaggtcggaggtggacgcggaggcggaggagctcgtcgccgagctcccggacgagcagaggcggcgccgcctcgactccatcttcaactacacgcagatgctcaagcagcgcgcggcggccggccgccggccgcaaccagcaccggcggcggctcagctttga

SEQ ID NO: 12968 - DNA, 898 bp, Oryza sativa
  unsure (1)..(898): unsure at all n locations
  Clone ID: PAT_MRT4530_19046C.1
gcaaaaagattcccctctttttgtgcaagcgagaccaacaaagtgatcgaaggcgcaaacgcaaggcaaagcagagagaggcgcgcgatggcggcgccgtggtggtggtggtggccgctgccggcgtggctgatgccggggtcgacggcggcgtggttcgtcgtcctcaacgtggtggtgtgcgccgtcgccgtgctgtcgtcgcgcgcgcgggagtcgctctcgccgcgccgcggcgacggcggaactcgcgcgcagggcgtcgtcggcgctggtagcgcgtccgctcgtcgttctccatcttctccttcccgtcggcgagcttctacgcgttccaccccgacgccgccgagccacggacngccgacgccgcgcaaagttttcgcccggttggccgcggcggcccgccgcctcggagccgcagacgccgactccgccgccgcgtccgtccgtggccgcgcccgacacgccacccgcgcagcggccggagacggaggaggaggaggaggaggacgcgaactacatgagcatggatgaggcgtacgcgctggtgatggcggcgcggcagcggccgccgccgacggaggaggaggtgaggaggtcggaggtggacgccaaggcggaggagctcgtcgccgagttccaggacgacgagcagaggcggcagcgtctcgactccatcttcaactacacgcagatgctcaagcggccatcgccgacggaggagggggcgaggaggtcggaggtggacgcggaggcggaggagctcgtcgccgagctcccggacgagcagaggcggcgccgcctcgactccatcttcaactacacgcagatgctcaagcagcgcgcggcggccggccgccggccgcaaccagcaccggcggcggctcagctttga

SEQ ID NO: 12969 - DNA, 199 bp, Oryza sativa
  Clone ID: PAT_MRT4530_19047C.1
cgaccgctcgtcgacttcccactgctctcgtcatatccagccggacgccctcgagcacgccacatgtacctcacctgcggtaccgtcgggcgctcgcgcgacggtgtggttcctccacggcggccagccactgggagggggcgctccggtggtcgcgagcgtcgtagtcatgcacccggtgggcacgggtcgtggacgt

SEQ ID NO: 12970 - DNA, 837 bp, Oryza sativa
  Clone ID: PAT_MRT4530_19049C.1
atgctgctcacaacgacaattgatcgtgttaatcgcgtccattgtcgatttatcgatttgcttggtttcccccatcttgctacaatgcaacacggacagcaagtcagcatccggaaaattcgtgtggattatgtcgctgaacgaagaccggcgatttgttggttggatttttttgaacgatttgttggttggattttggattggatgcgggagcgggcggcggctggctcggtgacctcgggcggcactaccgccacagccaacgaggagcgacctcgtccctgcccggctctgccaccgccgatgacgatgaggaggcggccaggagtggctccatccccgtccacgcctggtgctgccaccaacgacgacgaggaggaggaggaggcggccaggagcggcgccacctctgctgacaataaggcagcccgatccgtcgccgccgccatcgtagttatatgcttccgttgcgagctcatgtgttcactgtggaaggcatcggtgtacatcctgggcgcggcgggtagcaatatcgtgttcatggcggtgctaagcgatagcgtcgtgctggcggtgcacaggatcaacagtgacggcaccggcgcgagtcggtttagcgagttcaacgcccagatgagcgccatcgccaggctccatcaccatgcagctccatgttgcctccgcccgaaccaagcacgtgagacgccggctgatcgacacaagagttctttttttttcatcttgagctacactggccagggccggcctttgggtattgaagatgggaagaacaaaggatggcatgatcgattggtgtgtgtactggtttttacaaat

SEQ ID NO: 12971 - DNA, 351 bp, Oryza sativa
  Clone ID: PAT_MRT4530_1904C.1
acagatgggcagaccgagcgtctaaatcagatcctagaagatatgcttcgcgcatgtgtcctggatttcgggaagacctgggataagagtctcccctatgccgagttctcctacaacaacagctatcaagccagcatacaaatggcaccttatgaagcgttgtatgggcgcaaatgccggacaccgctaatgtgggatcaagttggggaaagccaagtgttcgggactgatatcctgagagaagctgaagcgaaggccgactcagagcaaattgaaggtcgcgaagacttgacctacgtggagaggccagtgaagattctggacaccatggagcgcaggaccaggaaccgg

SEQ ID NO: 12972 - DNA, 559 bp, Oryza sativa
  unsure (1)..(559): unsure at all n locations
  Clone ID: PAT_MRT4530_19050C.1
gatttaaatcttgagagcaaagagcagctacaattcatatatctccactccagcaacaataacccatgtttcctttgagttcctctgttttgattcagatgtttcggagtacgtggagcaagaacctgagattgagtctgatgatctgcaacaacaaggttgtgccatgatgatgtggactttggtagttccatggtggatgttgtgagcgccgttcaggctaatttacttgtaactttcagattaatttgtttgctgtcccggaattttataatggttgctaatcagtttattgtgctatcgcttccacttatatctgctcaataaaattggccttgggcgcatgttgaacttaggtttctctaggttaaggtaaggactctggcgtagaattgttcttcctgtgtggttactgttatgccgggggcgcggagggcagtntatgatcttctgctatctttagcttggctcttgcccggttnggtttgcccttgtgggggttgtggcaccaccggcttttggttttggaacttaatggcttttggtttgaaatcttccg

SEQ ID NO: 12973 - DNA, 498 bp, Oryza sativa
  Clone ID: PAT_MRT4530_19051C.1
atggcggcggcgacggatcgggctgccttattgtcagcagaggtggcgccgctcctggccgcctcctcctcctcctcgtcgtcgttggtggcagcaccaggcgtggacggggatggagccactcctggccgcctcctcatcgtcatcggcggtggcagagccgggcagggacgaggtcgctcctcgttggctgtggcggtagtgccgcccgaggtcaccgagccagccgccgcccgctcccgcttggaggggaggaagagagaaatgagagaagaaattaatatgaggagaggggaggaagaggagataaggatgataaaatttgaagagccgtatgggaaaatggaggttgatttttacagacgcgatcagttacgatctgcctacaatctaaagaggttctcgtacagaaaaatcgtttctgtagaagtgatatatgtctgcaatcatatttacgtgcacatgacatatgccacaatcagattgaatatgctctag

SEQ ID NO: 12974 - DNA, 153 bp, Oryza sativa
  Clone ID: PAT_MRT4530_19052C.1
atgtcaaaattaggatttgaacccgggtgggccggttcctccacaaggaacttaaccaggacacgacccgctcgtgcaggggttgccactgacaatgccgagctatggaagccattggcagccaaagccacgtccatatcccgaggtggatga

SEQ ID NO: 12975 - DNA, 768 bp, Oryza sativa
  Clone ID: PAT_MRT4530_19053C.1
atgtcatcttccctctctttcccttcttcctccccctctctctcccttatctctctctctggagcggcggcggtggcggtggggacgacgccaggcgacctcgtccaccggccgccgcacggcaacctcaagtcgtcgaacgtgctcgtcgtcttcccggcgcccggcagcggcggcgacgtggtgccggtggccaagttgaccgaccacgggttctacccgctgcttctgcaccacggtcatcgtctcgcggcggccaagtgctcagagttcacgtgcgggaggcggctgtcctcccatgccgacgtgttctgcctcgggctcgtgctgctcgaggtggtcaccgggaaggtccccgtcgacgaggacgacgacctggcggagtgggcgcaactggcgctgagccatgagtggtcgacagacatcctcgatgtggagatcgtcaccgaccgggaccgccacggcgacatgctgaggctcaccgaggtcgccctactctgcaccgccgtcaagcccgagcactggcccacgtccgccccttcccaccgccttgtccccactgctaccgccgctgctcccaaccacctcgtccccatcgccacagccgccgctcccgaccgccatcgtcgccgctccccaccaccaccgcagctgctcccgaccgccgccaccgccgcttcgatcagaaaggctgggagagagataagggagagagaaagacgggaggaagaagggaaggagaggaaggatgacatgtgggtcccataa

SEQ ID NO: 12976 - DNA, 390 bp, Oryza sativa
  Clone ID: PAT_MRT4530_19054C.1
atgcatgaaaggccggcgccgtcgcatcaactgtggatgagggaaatgctggggccgacgcgcgccgggcgcggcatacgattccggcgagcgcgatgtgtgtccggccggccagcgcccggacttaaaagcgcaagcgcgcgtcgtggtgggcgcgcgcccgccgcccggttacgtcggtacgtcgatcgatcggtcgtgaaagaagaagagatgtacagattcggcgtgcacccaccaccaccgcggcgatctagcgagagaaggacggaagtgagagcgagcgagcgagagagggagaggggatcggaataccagcggctaggtagcaccggccaagcgactcactcgcttcaagtgccggggaatcggtggaaagggataaattaa

SEQ ID NO: 12977 - DNA, 237 bp, Oryza sativa
  Clone ID: PAT_MRT4530_19055C.1
atggaaaggactaaacatggtacaaacacagaaaggggaaggcaagtgatgttggagaacagaaaaggagtgtgcccgtattaccggcatggaagcacaagcagtttgctagttgagttatgggtgaaagactccacggaccactgtataaatcctaacgcccacaaacatcacacacacatgggcatcattcgtgtaaggattgaaagacgtttaagccagtataacatgggttag

SEQ ID NO: 12978 - DNA, 335 bp, Oryza sativa
  Clone ID: PAT_MRT4530_19056C.1
tgaacgcgtgaactactgccagtcagactttattctcattgttgtatatacttacaatcaaccccaaccatcacatcgcgaaaaggctatttttttccattgattacaatccactccacctctcacaatttcaaacattatacatctctacattcatcacaatatatctatacttatacaaatactccaacaattacataatcacattctaatttttttcttttatactcccctattttacttatcttcctaatattacattatcacatccactcacttacttcacattacatattatcttacatcccctcttactcataatacattcattaaat

SEQ ID NO: 12979 - DNA, 503 bp, Oryza sativa
  Clone ID: PAT_MRT4530_19057C.1
ttgacgcgtgggcggacgcgtgggcggacgcgtggggctgtaagcccttcaatccacttcttggggagacctatgaagcagattatccagacaaaggcctccgttttttctcagaaaaggttttgtctgtggacctttgaaagctacttatattttgtaatatgaagaagattttcttactatcggttcagcatagccaacctttataacttaacacagactttttaaagtagtactactgcttttgtacaggcatgataatccagttagtaaaggtttggcagaaaaaatgtattacaaagttgtcacttgactgttccctgacaccaaagccatgttacattatgttggtacctgtgtcttcttggtaaatgttacattatgttttaaatttttaattcgtagttctatttcttccgattgtccgtatttctctttatgttcacagatcactggaaactctgttctctgactatttgatcatcagatggtctatcctgtat

SEQ ID NO: 12980 - DNA, 111 bp, Oryza sativa
  Clone ID: PAT_MRT4530_19058C.1
atgtcggtgtcaagcgcgtcaactaaccgcgccgttaagggtccacaacgggttttcaacgaggtggttagtatagggatggcacataggacgttaaggtggatagcttag

SEQ ID NO: 12981 - DNA, 354 bp, Oryza sativa
  Clone ID: PAT_MRT4530_19059C.1
gaaacctcggaagatgaaccttaattatcggagcatggggaaaaacattgtgcttttaggatcaaataacaaagtggagtctgcaaacagaaacaagaactggttttacatgataaccctgtttggacttaggggggcatggatttggcccgcaaatcctattttattgggggctgaatacatggaacaaagggggtcatgaccactgggtataggatggggcccaaatttatagggatatccttattggacccttatcctataaggattagaaacaccttgacaaggattccgggcaacttccaatgcatcccttcgggaaaccctgaccaccaagaggaaccgtcttgctgg

SEQ ID NO: 12982 - DNA, 138 bp, Oryza sativa
  Clone ID: PAT_MRT4530_1905C.1
cgcggaccatacctgctcatgcacaccaagagaacggtggctagctagtcgacaccatgagggcagaccggttggtggttctctggcacaatgcgggcgggctggttggtgatcctcgtggcggcggcggtggtggtg

SEQ ID NO: 12983 - DNA, 564 bp, Oryza sativa
  Clone ID: PAT_MRT4530_19060C.1
ggaaaaccggggggcacaattgggggaaaaaaaccaggaaagccaaaaaaaccctttggcccaaacctgggtattttccgggaggggggcccccccagggagcaaagggaactaaggaaaggccccggggttaaaaagggccacgtttccacccccacaaatctaccaggggtacaacaacaacaaaaaaaaaaaaaaggctttagcgggaacaggctttaacttaaaggggcctttagggagttacttaaagggcccccaaagttgggcaacctaagggcaaaccctttaaaagctggacaggtataaaaacttcggttaaaacccaaagcaaggggacaaaaaaaaccatgggttcaggctctggaatttcgggggaaagcatatgcaggggcaagacccgggggccatggaagtttccaccacctgggtcagtggaacagctgggagggaattttttccaaggttttttaacagggcaggggccgggggaacccgcccctgtcgttgttggcggggagggcttaaaatttgctccaaacctgcagaaaaaaaagccctaaa

SEQ ID NO: 12984 - DNA, 5976 bp, Oryza sativa
  Clone ID: PAT_MRT4530_19061C.1
atgatgggatcaccggaggggcggttagtggagctgtttggcgcggtgaagtcgtggatgccgcggcggggagatcactctccgcctccgccgctgccgccgccgccggcgtcgcaggtgggtgctgggggtggtggtggcgcggcatcgccgcagccgcatgatttgtcgagggacttctggatgccggaccagagctgccgcgtgtgctacgactgcgacgcgcagttcaccatcctgaaccggcgccaccactgccgccactgcggccgcgtgttctgtgcccggtgcacggccaactccgtgccgcgcgcgccgggggacgccgcgcgtgaggacggcgagcggatcagggtctgcaattactgcttcaggcgctggctggaggaggaggcggcggctcggagggacgtggcgcagccatcgagcccggtgctgagcccgtcggcgtctgccgtgagcatcgggagcgacaagtccagttcgactgcgcgtagcagcgccgggacgaacggccagatgtcgtcttacacgaatgttagctacactgacttcccatctatggcagtcgagggccagggtgagtgctgcgagagggaaggttgtgcagagaagcagctgcctgcaatggagccggctgggggcgtggagcctgcgacttatgtggacaacacatcggatccatacaattttggcataaataggagtgatgatgaggatgatgattatgcagttttccactcagattcaaaaacacaacacttgcaaaattctgatgagtacttcaaaactgtgtgttttgatgctcatcaagttgattgtagtcatgtaaaagaatctgtttctccgatgcaagatacggaaaattttattggttctgtgggagtagataagactggagatcacatcatggataatactgaggaatgcaatactcgatcttcttccttgtatagcatggaaatgctagaaaatgagcctgtagattttgaaaacaatagctcactctggctgcctcctgaacctgaggatgaagaggacgaccatgatggtgctttatgtgatgaggatgatggggaggatgccacaggagagtggggatatctacgctcaaacagttttggcagcggacattgtcgaagtagagataagtcagctgaggaacacaagagagccatgaaagacattgttgatgggcattttcgggcattggttgctcaacttcttcaggcggaaaaggtacagttggttgataaatctggcaaacagagttggctagatatagttacttctctgtcttgggaagctgcatctattctaaaaccagataccagcaaagggggacggatggaccctggtggctatgtgaaggtgaaatgcttggcttgtggtcgtccaagtgatagttttgttgtaaaaggagttgtttgtaagaagaatgttgctcatcggcgcatggcgtcacggaaagaaaagccacgcatcctgatccttggtggtgcacttgaatatcagcgcatatcgaatttgctttcaagttttgatactttactgcagcaggaaacagattatttgaaaatggcagttgcaaagatcaaagcccaccaaccaagtgtagtgttggtagagaaatctgtgtctcgatatgctcaggatttattcttggagaaaaacatttcacttgttctgaatatcaaaaggccacttctggaaaggatatcacgttgcactggtgctcatatagttccgtcaattgattacgtgtcatcccaaaagcttgggcattgtgatctattccatgtggagaaatatgttgaagagcatgggactgctggagaaggtggaaagaaaatgctgaagacccttatgttttttgaaggctgcccaaagcccttgggttgtacaatattgctcaaaggagctaatggcgatgagctgaaaaaagtgaagcatgttgtgcaatatggagtctttgcagcctatcacttggctctggaaacatcttttcttgtggatgaaggtgcaacacttccagaactccctcttaagtcaccaattattgttgctttgccagataagccttctagtgccgatagatccatttcaactatacctattttacaaatgcctactgcttcatcaccaaacgatagcttgcaagcatttgatgtgcaaacggatggttcaacatttaatggttttcaaacaatggaccaaacaatggtaatgtgctctcctgagtataaaagctgcaaaaaactgggagctggttctgcccaaaccgaatctgcccatttcaatggccaggataaaaatattgcctgtttgcatggtatggttccttggtcatctactgatcccttggttcagcaatcggccagttcactttgtcattgtccttcttgttctagagatgtagttaataaaaagcattttgaagaacgtcaacctgaaacatctggacataccctggataatgatttcaatgcgttgtctgcacatcgaacaaatttggagtctgttgagagcggtcacttatttgcctataattctgagaatggtgacaagataagagctaaactgtctgttcctctcaatgtgcaaatttctcttgatgatgacagttcaaaggatgattcagtaataaaaaaagatgaaattccggcatctcctgctgacaaccagagtatattggtttctctgtcttcccgttgtgtttggaaagaaactgtttgtcagcggccacaccttctccgcataaagtattatggcaactttgacaagcctttaggaagatttctgcgtgaccagctctttgatcagaacaataattgtatctcttgtgagttgccaccggaggcccatgtttattgctatgtccacccgcaaggcagcttaacaatttcagtgaggaaacttgcagtgaagttgcctggtgaacatgatggtaaaatatggatgtggcatagatgcttacgatgtcctcgtgttattgggctccctccagcgactaaaagagtagtgatgtctgatgctgcctggggcttgtcctttggaaaatttctggaacttagcttctcaaatcatgcggcagctagtagggtagccagttgtggccattctcttcacagggattgccttcgtttttacggctttggtgaaatggttgcttgcttccgatatgcatcgatcaaggttcattcagtgtatttgccaccaccgaaacttgatttcacttctcagcaccaggaatgggtagagcaagaagcaaatgaggtggttgactcagctgaacttctgttcactgaagtactgaatgcactccaccaaatttcagagggaaggccaattacaggttcttttgatggcaacatgaaaatcctcgagttaagaaggaacatcatggagctggaagagatcctgcaaatagagaaagcagattttacggaatcattgaagaatctactgaacaaggagatcagaaaggggaagccattcattgatattcttgaggttaacaaactaaggaggcagctactgtttctgtgttacctgtgggatcagcggctaatctttatagcaaattcaggtggcaagtactgtgacacactaggaggtttacgggttgggagtaggagttctgactctaacgataaatcagttgataccaatgcaactacaaaactagagaagagctcaaagggctccgaagttctttcaaatgctaaggaaggatccttgaagcagagccaaagtccacttcatgctaatgacaaggagcccaaccaacctgatcaatctaatggaaatagttcaaggattggtgcagggttgaatggcatggaagatgcgattgccaaaatcaatcattctaacagcgcagatgttaaggataacctggatcatcaagaatccagtattggtgttcgtagggttctttctgatggtcagtttccagtaaatgctgatatttcagacacattggatgcaaaatggagaggtgaaaatggaacagttcctgatacaagtatcctgaaaccattagctctgctagaaggttcagctgatcttaaaaaccaagctaaggcagtgccaaccaatgcttctttatctgtcaggtctggagatacagtagaagacttatcaagctggctcaaaatgccatacatgacattctatgactccttaaacacaaattctgggacagcaccgagatttggggccctggctgactacaatcctgtgtacattacattgttccgtgagttatcacagcaaggtggagcaagactttttctgccaactggagctaatgatgttgttattccagtatttgatgatgaaccgaccagtataatttcttatgcacttgtttcacccatgtactgtcaccaaatgttggatgagaacagcaagaacaaagatggtccagattcttcacttccattgcctgtatatgattctggaaattttaatccttttcatttatttgaggatttcggatccgctgatgatcttgcttcgtcaatatctggaaccagagggtcatttgttcccgatctagttcacctaagagttccctttgaggatggtggcccactcgggaaggtgaaatacacagtgacgtgctactatgcgaaaagctttgaagctcttagaaggtcttgctgtccatctgaacttgactttttaagatctatcagtcgatgcaagaaatggggagcacaaggtggcaaaagcaatgtgttttttgcaaaatctctggatgatagatttataataaagcaggtcacaaaaacagaacttgaatcattccttaagtttggactagattattttaaatatttatcagagtctataagcaccggaagccctacatcccttgcaaagattctgggaatctatcaggttacaattaagcatgtgaagggtggcaaggagtcaaaaatggatttacttgtgatggaaaatcttttatttggacggaatattacaaggctctatgatctcaagggatcttcgaggtcaaggtataatgctgattccagcagcaacaaggttcttcttgaccagaacttgattgaggcaatgccaacgtcaccaattttcgttgggaacaaggcaaagaggcttctggaaagagctgtttggaatgatacttcctttctggcaggaattgatgtgatggattactcattgcttgtgggagttgacgaggagaaacatgaattggttctgggaataattgattttatgaggcagtatacatgggacaagcacctcgagacatgggtcaaatcgtccggtattctcggcgggccgaagaatgcccctccaactgtgatttcacccatgcagtataagaagcggtttagaaaagctatgtctgcttattttattgtaattccggagcaatggatgcctgcaataatcaatccgagcaaatcatcatcaaatctttgccaagaagatcctcaaaatgcttcacaagagtagtacaatattcagttcattatgccaggcagagagcacctggttttttgtcttgatccaatcaaaagcgccaaacgatcagtctggatgctgcggcatcaatgtggtattacgactgcaattatcaaaatgcttggactctcatttgcacagatccgattgcagtggagtcgtcttggctcaagaatcatcgggtgtatatatccttgaaactgtaattatgcattagtttttttattttctttttgatttattatgtaataatataatgtcgtcgcttctctctagttcccattccattttggttggatgtaaacaatagaagtggggcatttttttttttgtaagtgctcgttgtatattattatatatatatgccatgttatttatttgggggggctattgccgtctgtaataacaaaaataagagtagttcatgcaaaaaaaaaaaaaaaaaaaaaaaaaaaataaaaaaaggggagc

SEQ ID NO: 12985 - DNA, 645 bp, Oryza sativa
  Clone ID: PAT_MRT4530_19062C.1
atggctgccgactacgacaaagcttgcgctgttgcttcactgatcaagtcattgtatgtggatttcgttgtgccgaacacagccggagtgcttgtggacaaggtttgcgccgctggccgattaaaaggtgttgcacagtttcgcatcaggcatcaagttgaaaggataaatagctgcatgatggtgggtcggtcagcgcaaaacatagtaccaattctcttctccttcatcaagtactgtgtaattacggttgcctctgccctccatgacattcctcggtcgcagacattagagatggcctatccatacaagcccttggggagtatctggtgctttcagatatggtcgcaagaatctccctcgattctacgagcagggacgtggttgtatggaaggcggcgtcaaatggcgagttctctgtgcgaacagctagcctactcgctactgtcgatcggaaggacggcgtgcccgcttggcaggatcatctggaagtctcttgtgccggtgagacgcaagttctttatgttccttgaagcacgcagcgcttgcctaactgcagacaacctgcagcgccgtgggtggcacctcgcgctagtataccacctctactcgaacgacggcgagacttgccaacttatcctttag

SEQ ID NO: 12986 - DNA, 498 bp, Oryza sativa
  Clone ID: PAT_MRT4530_19063C.1
gcacgagggtttttacaaaatgtcagcactaattttttacacaatcatattcttggttcccttaactaactgaactattgtttacccaagttttatgcatctccactattgtttgctgtattaaattaatctccagagtttctaccgattattacatgtccatcatgcagaagatatcctcttggagcatatttcagtaattcaatacctaatattattttgctgcaaaggaaaaacatggaggattcatatttcggaataatgtttaacataattgtacccaattgatcgagtttttgatgtacggtcattttgtttcatttttcagttctgtgacaggctatgttgggttttgttttgaaactctatatacagtcactcgctttaactaaacagagatagatgcctaaatcgattcagagtttctggagttgttaaggggtacatccggcagaagaaatttgaggtcaagattgccttaggatgtagggcaatcaa

SEQ ID NO: 12987 - DNA, 2550 bp, Oryza sativa
  Clone ID: PAT_MRT4530_19064C.1
atgaagatggagtctttcgcttggttgctgttgattcttgttctattctcgattttggaggatgtgcgaggatcaaaatccaagccgatcttgatcaactgcggctcagattccaccaccgatgttgatggcaggagatggattggggattcttctcccaagaacttcacactcagcttaccaggaacagttgccacagctccagattctgatgggaaagagacatatggagatttgtacaagaatgcccggatcttcaatgcatcctcaagctacaagttcatcgtcgccgctgccgggagctactttctccggctccatttcagtcagctacccactaatttcagcaccaaagaatcactctttgatgtttcagcaaatggcctgaagctggtctccaagttcaatgtccctgcagagatctacctgaggaactccaagatcaactccaccagccgcgccatcgtgaaggagtatcttctcaatgtcacctccagtaacttggagattgagttctcccccgatgccgaatcgttcgccttcatcaatgccatggagattgtgcctgtgtctggcaactcggtttttgattcggttaacaaggttggtggttatggcttgaagggtcctttcagtcttggggatagcgcggtcgagacgatgtataggatttgtgtggggtgtggcaagatagagagtaaggaggatcctggcttgtggaggaagtgggattcagatgaaaatttcatattctctatgagtgctgcgcgcgccatctccaattcttccaatataagctatgtgtcaagtgatgattctacctcggcgcctttgaggctctatgaaactgccagggtgacgacggagagttcagtcatggacaagaaattcaatgtgtcttggagctttaatgttgaccctgattttgattacttggtccggttgcatttctgtgagctggagtatgacaaggcggagcagcgcaagttcaagatttacataaacaacaagactgctgctgagaactatgacgtgtttgcgaaagccggggggaagaacaaggcttttcatgaggacttccttgatgccgcctcaccgcagatggacactctttgggttcagttgggatctgaatcctcagcaggtcctgcagctactgatgcacttctgaatggcatggagatctttaaggtcagtcggaatgggaatcttgctcatccaactgtgaggattggaggtttcaacagtgccatggggaaaccgaaacgtagccccaagtgggtactaattggtgcagctgctggtttggtgatttttgtgtcaattgttggtgttattttcgtatgtttctatctgcgatggaagaagaagacttcagctaacaaaaccaaggataatccaccaggttggaggccacttgtgctccatggtgctacaacacctgcagcaaattcccgctccccaactcttcgtgcagcaggtacgtttgggagcaacaggatgggaaggcagttcactgttgcagaaatcagagaagccaccatgaactttgatgattccttggtgatcggtgttggtggtttcggcaaggtctacaagggagagatggaagatggcaagctggtggcaatcaagagggggcatccagagtctcagcagggtgtgaaggagtttgaaactgagatcgagatcctctcaagactgcgacaccgacaccttgtgtccttgattggctactgtgatgagcaaaatgagatgatcttagtttatgagcacatggcaaatggtaccttgaggagccacctttatggaactgatcttcctgctcttacatggaagcagaggcttgaaatatgtatcggcgcagcccgggggcttcactaccttcacactggacttgacaggggtataatccacagggatgtcaagactactaatatcttgttggatgacaactttgttgcaaagatggcagattttggtatctcgaaagatggtccacctttagatcatactcatgttagtactgctgttaaggggagttttggttaccttgatccagaatattatcggaggcagcagttaacccaaagttcagatgtgtactcttttggcgttgtgctgtttgaagttctatgtgctcggccagtcataaacccggccttgccaagagatcagataaaccttgctgagtgggctctcaagtggcaaaagcagaagttacttgagaccataatcgaccctcggttagagggaaattacacactggagtccatcaggaaattcagtgagatagctgaaaaatgccttgcagatgaagggagaagccggccttcgattggtgaagtcctgtggcacctagagagtgctttgcagttgcatcaaggtcttctgcaaagtgcgaatactgatgatttatcacagcctgaactgaagctctctgatgcatcctgcaatttagggtgcatcgaagaagttgaggaatcctgccgtgcagggtcccaggatgtgaatgaggaatatgtggatgtcaaaattgaagttccatga

SEQ ID NO: 12988 - DNA, 308 bp, Oryza sativa
  Clone ID: PAT_MRT4530_19065C.1
cggacgcgtgggttttcttaccaacgatttcaatggatctcaaggggataatacagggtttgatcagttcatgggaaataccacctctgtttcatcacaaagttattttgatgcatcgtgtttcactgattctggcttgacgtatgtgtggattcattgtgcagtactacaatgcaagaagcacagaaatagttgaggcaggggaagctttgggaatgcactgatatgccactaattgcttacacaccgaggagctcctcagcatttgccaaatttggcttgccaagacagatgctcgtagctaacta

SEQ ID NO: 12989 - DNA, 279 bp, Oryza sativa
  Clone ID: PAT_MRT4530_19066C.1
atgtcgaagaagatcatgccagagaaatccagcgactggcaccgctcctccatcagtatctccttcctccacacaccgtcctccatgcggaagctcagctccggcctggccttcctcctcctcgacaacgacgagatagccttcttgccgttgccgcctccgccgcctaggaaaggcacgatggcgcgcgacgagaaggacaccgcgatccccacccgtggccgcaggtgctaccgtcgcgccgcccgcccaggaacccggcggccgcgcccctcctag

SEQ ID NO: 12990 - DNA, 231 bp, Oryza sativa
  Clone ID: PAT_MRT4530_19067C.1
actttcagagacgagaagacaggggagatggaacatgcactggtaacaaagaggaaggaggaggcttcagtgctgcaatgcagtgcacacacaagggagacagttgcatgctgcacaccaaagggaggaccaatgccaccaaactgctggacacaaccaaccaacacacctgcccttggctggcactgagcactgctgacacactccggcatcaaccatcctcattgggct

SEQ ID NO: 12991 - DNA, 369 bp, Oryza sativa
  unsure (1)..(369): unsure at all n locations
  Clone ID: PAT_MRT4530_19068C.1
gtaccggatcgcatttcctttgaacttccacgctttctcttataacaaagcctagaacggggggtcgtcggaatacatggcggaaggtgcgccgatcatctaccttgaccccgccacggtggcggaagcgcgccgccgcggtgacgacccgcgcaagctggaggagtgcaccaagtacttgatgaccgcacatctacgggttgctccctggcccacccgtacccatcgncgtcgnccgcacccacgccgtctgcgccgccggagcctccgacggcgttgaccgcatcagcgcccttcccgacgcgatcctccgcaacatcgtcttccgccttcccggtaaggacgccgcgcgcaccgccgtgcttttcc

SEQ ID NO: 12992 - DNA, 158 bp, Oryza sativa
  Clone ID: PAT_MRT4530_19069C.1
agaccgtcggcactctccttctcccagtccaccccgccgacgagacccctcccctaccccgtgagctcgccgatgagacccgttccctcctgtcgtccccgcgtattggattacaatacttaatattacaagggatgtccgagtggatccccaaatag

SEQ ID NO: 12993 - DNA, 308 bp, Oryza sativa
  Clone ID: PAT_MRT4530_1906C.1
atggtacggaaggccaacgggaagtggagaatgtgtgtcgatttcaccgacctcaacaaggcgtgtcccaaggatcactttcctcttcctcgaatagaccaactggtggactcaatagccggttgcgagttgttgagtttcctcgacgcttactccggttaccaccaaataagcatggcaaaagaggatgaggagaagacagcattcatcacgccgttcgggctcagaaacaatgtcgaggcctacgtcgatgacattgttgtcaagaccaaggcaagcgactccttgattgacgatctgcgggaaac

SEQ ID NO: 12994 - DNA, 219 bp, Oryza sativa
  Clone ID: PAT_MRT4530_19070C.1
atgaagcacgctattatcaccgaggagtacatctcctcaagcatcctgcacgcctctgcagcaggtcggagctgccgtcgtgccggtgaggtgcccttcaagatgggctcctcgcaccaatcccagaatctacgctttccttaccgcgtgattggtcttggagagtttctccaagatcgtgcttccaccgagcggattgctggccgtcgccttggatga

SEQ ID NO: 12995 - DNA, 5204 bp, Oryza sativa
  Clone ID: PAT_MRT4530_19071C.1
cccccccctttttttttttgcctgactgtaacatactgtatctcataatctcagctcatattcgacatatactacgtgcctgactttgtacgacgaaaaacctttatctgtggaaataaaaccgaagctacaggatgtaactatatgtatatgatccaccaagtatggaggcaatctcatcagccatacaaaatattctatatgaatttacttgaaaattaatcttgtggtccttatatctaagcaaagtatgacgatgaggacgatgtatcacggaggacctccaattcgtcttccgtgaaggcctccttctggatgctccatgtgtcagcatgcgtccgcttgaattcggcgacggcttttgtgaccgttgattttatgggagagggctcacgaataaagcgtgccagcagagttacatgactaggaagccagcttggcatgtcgtatggaacagaaagcactgaagccgtcaaagcaagaactgcaccatggatagtagcaacagagtggcctgactttgcacctctttgccgtgtatgaaggatacgctgagcttgtgcatatgaccgatctcgaaagtccttagagaggtctttatctatgcccttcattaagcttgcaaggacaccagcagcatgttccctaacctgtaatgagagaacagggtagatgagtccgataataacatccagtagaacagatgatctcccagacttcagcgatgcaattatgaagtgaaaaatatccccagaaacatctagagaatcaccatgcccaaataacctagataatcgcatatttgagcatgcaatacatatggtcacaccaattgcttctcttatctgggccgacggatggctcatgttggcaagcagttcatcgagaattttaacatggtactgctcctcagctggagacatttttggtgcagatatttcgattaaagcaacagacagaaaagaatatctcttggcaagtacactggtggccacggactgaggaactggcgtgcataagcaatctaataatttctctctgagaacaggagcacgacttccagatctttctttcccagtaacagcatatcgaatgcaagctgcccattcaggaaccgattccacagatggtgaaagcataattttctgcaactgaagtatcaaccagttgttcccagactccaaattcccagtcacatcagagtgaagcatcccagccatcgcttcagctgccacacattgccttgatctttcttttgaactaagaaactcttccaatgcattctgaagcgatgatattacaggcattccacattgctgtattagccttttaaatatcctagcaaagctggaataaaatgtgtcaccacccactaaagaaatccaacttggcgtgcgtggccatgacgcagagaaatcaaaatagaagtaagtgattgctttatcagaaccgctttgaaaagatgaagcaccataacttgctttcgatgaaccatcattatcagaaataatatggacatgagatagactgtttagagtctcactcataaatccatcctcccgaattatattattcaaaatttctcctgtggacaaaatgcttccttcttcagggcgatctaatgattgttgtgaatcttgaagagatgccttatcaggtgatccttgtaatagtgtattcagagcagaaattgcaagcatcctcgagtggggtagttgactcttcaagttccttaagaaatgaccagctgtttctgacaagatttgtgaatgtatgtcagattcacttcttgatgccagaattagcaacagaagcactctgttggccatcaaattgtatcgccaatgcagactattactctcaaaactcaaggcatttattttaggaactaaactgataaatcctggcttgtctgcttcacattctgtattcttgaaaaatctccttgatatcccagagaaacgtatgttatacttcacaaagagctcagtaatagctttctgacacttgagcgatttatgatgagagctctccaagatgcccatgataaatgaagagagtgataccgagtcagttgtcaagtgtctcaaaacagtctgagttccaagaatattgcaagaaccaagcaccgtatgttcaggtgcttttgaatctcgcaaattatcagtcaatgtgaggacacaattagaaattagagaaggccagcgcttaagtaattttgtaagggatcttccagaatacgagcgaacagtttcatagttgtgtagtgagagatctaggagatcattcatcaaattaaccatgaggctagatggagatacatcagcatttgtacggtatctatggtatgatgattgtgaacttctccatgtattatgcaagtgtgctttatcaacaagtgcccatctaggcctctttttgccttgagaatgaaatgggataataaagttgcatggaggctcaattatggaagcagactctaacttccaagcttgaaaatggctcgaccattcttcatattccaagctaccatagtttactaaagcatcaatgacacgtacaacaagtgctaggagtatactatcatcagttctttctttcaacaagtacctgcaagctacatgtacaagttcagcagccttttcacgcatttctgagttgccaacagtgctaccagcagatcctgcaataaaaattatgggctccactaccttggatttcccatctttatatgatggccgcatttcaggtaagcaagacattacaccctgcaatgcagaatgaatgcgtaatagggttacttttaggtgctccttctcttgtcctgtctcggaatgattttttctttgacagatactcacaagatcttccaatgctgattggaaatgaaattctaacaattcatttgcaaaagatagttcatcttgactgggatcatgccactttggagtgaaatttaacatttcaacttccctgtcctgatgagctttcgaacagccccatggttcaataatattagcaatgggctgacaagaaaagggcttatactgatctattggataatatgaaaccaggcttcctagcagagagcgaaggaggtgatcaccagctccattgaccttccacgaaggggcctggaatgatgatgttattatatttttaaattcttgtctatagttgagcaagacagggccagcataactgatagcaatagccaaaacccgcaggtagtagtctaatgctgtttccagagcaggagaaagtgtagccttagtagctattttgctaggaacttctcttccaacataaccagttgttggtgtaccctcaaaggaggacatgatagtcattaagatgggttttacaaggtagagtgcagtctcctcaggatatgaatgaacgcaggcacaacaaagaagtccaacctctgaagtagcaccaggaaggatatttgcattaacaaacttggcaattttcttcagggactgattaaataaaggttttgataacttccccagaacaatttctagcatgcaaaaatagtatgggctgtcctcaacaagaaaagttcctgacatgattgagctttggtaaccctcattaataggactacttgattccaaattctgaaggacagaaaacaaccgacaaaagaattcatcaagccactctgacagataggaggtttggaggaaagcaggcacatcatcactgaaaccagctgtggctaggtttgaaaatatggaaccaattagctgcatcgtagctatagttttaggaggatcattggcatccataccaagtaacgcatttgaaagagaagtaacgataagatcatttaatgtatcagcagtgctactatcatcagattgagacgaacatagagaacttagaataagtgcacgtccagaaaatgcaacagatgtgacagcattctttaactggtgggtagctgtagttgtctctaaggctagctggaaattagttgcaacaaatggaagcacaagggatggttcaacataagataggattgaagttgcaatagacacagtgtcagcaagagaatcatccttgctgtactgaccacgatccagaaatttcaggactactttgacaaaaccacatctttcttcttttcccaaacaaaattgattgtgtttgtcatccagtgcttcaaattgttcatgctgaaggcgtctttcaaagtaaagaacaagatatcgtaagaaacgctccaatgagtaggtccaccgacccccatttgatggatgatagaacctgaactttatattcttcaaaacgaatatatgtgttttgcagatggactttgcaattgccttggaaggagttctagtcttactggaaaataaaaatcttgtgttcctaggcacgttcaatggaaaggggtatgacccactcccacttgatataggaacctcaaacatgttcaagtatcttgtaaacaataagggtataaatttttcccagtcaacagatatggaaccttttatacagcgtgctacaatggcagcccattgaatatcccagaagttacaatttgtgacagaaccccatatgtcaagacattctgcaatccaatcagtcgtgaaatgatcctgattccttgagtttgcaggaagaaacagcctaagaaatccaatgccttcaaatgctgagttatgccatggatttttcagcaaggggctgaattctgaccaaatctctgcagctgcaccttcaggaaacaaactcctagatgcacgcaccaatgaggtaacagtctcaaagtgctgctgccttactttccagccctcaggtcccatatttctcttgaaatgagtccttatcaacgtatcatacagtggcctccattgcacaccaagtgaaatcctcttggcatgctttttcaaaaacctgacgagcaggcctccccacttaatctgaacaacgaacttgttctgtgatgcatgaaatatctccaacccgagctctacaagagcgtgtacatcctcaggagaaatatcactctttgcgttgataaaaaggtcgaagacggagatccacttgagcgtggcgtaggcggagtccgggtcgtcgggtcgccacgccgcccgcgcctcccccaccgcgccggagaacgccgcgggctcccgtgccgccgcatccgccaccgccggcggcagccactcgttgtagaggtgcat

SEQ ID NO: 12996 - DNA, 177 bp, Oryza sativa
  Clone ID: PAT_MRT4530_19072C.1
atgaatgcgagggaacatgaccttcgaggcggtgcctccatggaggctatccaccttggactaggttttcacccgaaaagtcatatcgggtggagagagctgacaactcagcaacattctcaagagcaagtacaacaccgaggcgtcatcgttgtcaacccgaaaacatcgagctag

SEQ ID NO: 12997 - DNA, 1115 bp, Oryza sativa
  Clone ID: PAT_MRT4530_19073C.1
cccttataagagaagcaattggtgtgaccatatgtattgcatgctcaaatatgcgattatctaggttatttgggcatggtgattctctagatgtttctggggatgtaagcatgactgaacaaacagggagtgagaactggtcaaaacagttgacagatggagctactgaattatctatcagtatacaaaataatatttctaagcaactggagtcaacaccagattcagtaactgaaaatggcttggacaagaaagaggaggctgatgtgaaaagaatggaaacgatttttcacttcataattgcatcgctgaagtctgggagatcatctgttctactggatgttattatcggactcatctaccctgttctctcattacaggaccggccgggcaaagatttgtcattgcttgcgaagtcagcttttgagttgctgaagtggcgtattttacaacggccttttcttgaaactgctattatgactattctttcttcagccaatgatccaaactggcggaccagatctgcattgttatcatatctcaggacatttacgtacaggcatacattcattctttccagctcagagaaatcacaaatttggcaaacaattgagaagttacttgtggatagtcaagttgaggttagggaacatgctgctggtgtccttgcaagcttaatgaagggcatagataaagacctctctaaggactttcgagatcggtcatatgcacaagctcagcgtatccttcatacacggcaaagaggtgcaaagtcaggccactctgttgctactatccatggtgcagttcttgctttgacggcttcagtgctttctgttccatacgacatgccaagctggcttcctagtcatgtaactctgctggcacgctttattcgtgagccctctcccataaaatcaacggtcacaaaagccgtcgccgaattcaagcggacgcatgctgacacatggagcatccagaaggaggccttcacggaagacgaattggaagtcctccgtgatacatcgtcctcatcgtcatactttgcttagatataaggaccacaagattaatttttcaagtaaattcatatagaatattttgtatggctgatg

SEQ ID NO: 12998 - DNA, 437 bp, Oryza sativa
  Clone ID: PAT_MRT4530_19074C.1
gacttcttgagaattggataaatgaatgctcacaagaagaatgtagttgtgcaatacaatcataaagaaggtcacatgcaagaaacaatatgctaaaagtacatgtggaaaaccatcaagattgaaatcaatgactgaataggttatcgaatcggttgaaaaacgactgaaaacacttaataacagtaccagttagcacttttcgcccacaaattcttcttcagtttcgattttgtcggtcaacttcagttcctaacaaggcaaacaacaaaccaattaagataaccgaggtagcctaggtaagtaaaacaagtattagattcatttcaactttctgaggcaattgcaaggattaaatagaaagcatatgaattaggtacgggaagggtaaaaggactgcatttgcctccattgccgaatcaaatcttcattgtcat

SEQ ID NO: 12999 - DNA, 983 bp, Oryza sativa
  unsure (1)..(983): unsure at all n locations
  Clone ID: PAT_MRT4530_19075C.1
gtgaagggaggttctccgagacaagcttgtcaaaaccaatgttggcatccttgaggaatcgcacatggaccataaactgaagatattcaaggcttggcataatagtaggtgcatctatgcctacgttgctggactgcagttcgagattacagagttctggcaacctcccaagagtttccatgtcctgttcttgccagaattgcacattcacaactaaacagctgaggttcgggagaagcaacgagtttatccatggtggcagcctagttaactgcatgcaagctaaagacaggtatcggaggtgctgagaggagacaaatcctgtttcccatgttacacccttccccaaatatgattcaccgtcaagttccaaaagctggatcttgtcaaaattatgtagggatcccacgagagatatttcaatactctcattccacccatgaatccttgtcttgagcacccttagttccttcagtttacccaaatcattaacaaactgcctggcagtggcaaaccccatgctatagtccttcatagcagggtatatccacagttcctgcaatgatgttagattaccaattaaacctgaaggcacccttgtacctgcatcaacacgtaggcacaaaaagtgtgtcattaggcccacactgaatggcacctcttctaaagtcagtccatacaagtncagggttggagaanacttagatcctgtcctatttcttctgggagctgatgaaantccgcgtgtctgtgtatgcccaaggtttctgggtgcagcaacatcccaatatgcttccagctgtttcttgtgttccctctgtgaaattgcaatcctctagaactagnatacgtagaactcgaaagcttgagatagcgcatgaatgctgcatgaatggcaacaaagaaccttattgttcatgcccatataaccaccttgggggggggcttttcacaattttggattggatggcttatctattggg

SEQ ID NO: 13000 - DNA, 924 bp, Oryza sativa
  Clone ID: PAT_MRT4530_19076C.1
ctagccgttagacgtcgctgcaggtgggcctagacaccgtgtctccgtacccatcgtccacctcacaccattctccccaatcgtcgcgtgagtatgcctccattgagaaagaacgaagtcgttccggccaaacctccgcgccccgaccaaatctcttcctccattactctttctggacaggaagcaaagctcctgacacgcccagccgtcccgttccatcgccgcggagcaccgcgtccaaactccacctttaagcctacccttgcgccaacactctctcctagctcgcctcttcacgttccatgcaaacacagggaagggagtcccttgggatagccggaacgcaagcgcccgcgtcggcgccggcgagcccacgacgctaccgacttccctctgacgaaacaccgacgggcaacgccgcctcttcgacgtccttcgcgtcggccagaacaccgccgccgctgtcctcaccatcgatccgctgccttggttccatcgttggagaagccccgccgctgacgccactcgccgtcggagcagaacaccgtccccggagctcccctcaccgcttccacccaaaccgtgcccgggacaacgaagttgcagccatagaggagtgtgagcaggaacctaagacttgtgaggagttcactgagcaagacattgatgcaggaaatgagatgcccagtgatgagtactttgcaccgggtaccggaggtttcgaggatggttctttctagggtgattcctagtcagttgcttgtggtggtttggtagatgggcatacagaagaacatatatattttgctactcttattccgctgcgtttaaactcttccatttggccggtccgccctatctatgttgtatgacttgagcactcgctaagttatgtgaaccatgttatctaaaaaaaaaaaaaaa

SEQ ID NO: 13001 - DNA, 1190 bp, Oryza sativa
  Clone ID: PAT_MRT4530_19077C.1
ccatccggcggcacacacaccaagctagcttctagtagttgagcaatggcggcgtcgtgccacgaggtggaggtgccggggaagccgacggagacggggacggcgctgctggaggcggcgacggggagcatccaggggttcggccccgtgaaccagatccaccagcacctgtgcgcgttccacttctacgccgacgacatgacgcggcaggtggaggcgcaccacttctgcgcccacctcaacgaggacatgcgccagtgcctcatcttcgacgggcccgacgccggcgcgcgcctcatcggcgtcgagtacatcgtcgccgagccgctgttcctcacgctccccgacgacgagaagccgctgtggcacacccacgagttcgaggtcaagggcggcgtcctcttcatgcccggcgtccccggcgtcgtcgagcgccgcgacctcgagagggtgtgcaagacctacggcaagaccatccacttctggcaggtcgaccgcggcgacgcgctcccgctcggcctgccccagatcatgatggctctcacccgcgacggccagctccgccaagaactcgccaaatgtgtggaggagaagttcagcgtgtcgttcgacaaggagagggagaaccgagcgtacatgagcggcccggatcacggcatccacccgctggcgaatgccgccggcaagggcttgaagaccgatctccgggaggttgatctgccggcgatgactacggcgcacgccgggagggttttcacctgatgacgacacactgatgagcgattgagcgacgactcgacggccttgctgcttctgcctgacgacggttaagtagtatgctagcatatcacgggatgctccgattagcttgtgtaccttcactcgtgttatgtatcgatctgttgtccctgagcgtttgttctgaaagaagcacactagagtatccgactgtagtacctgtagcctcttttctagcagcttgatgaacacaagaacaacagaacaggttgtgtatagctagttcaaaacgtgacatagtaaactgtctcaaatcgtctcacgtctccccaaatgtactgtgttgactcgtctcacgtctccccgagtctacacgtcaccacgcacgtacgtacgacgacacagaactctcacacgaaggggcaaaaattttccaaaaatttttctttttt

SEQ ID NO: 13002 - DNA, 434 bp, Oryza sativa
  unsure (1)..(434): unsure at all n locations
  Clone ID: PAT_MRT4530_19078C.1
cttttgctcttgctgctcctcttctcctcgcttcgtcttcttcctcctctcgcctcttcgttgcgagtagagagatttttgttgtgatttttgagggaatatttttggatttttggtttatttttgtgtgggtttttttggaggtgtatttattttgtttttttggtggtgatttatttttgagaggttttaagggattaagggaggtgtgtgaggaagatggggttagtgtgtgtgagctccaatggcgagagctcgtggcggaaaccctactaggttgaggaggaggaggaggtcgtcgtcgcgctcgcgtgtggaccatggagnccaagtcgggggaagcgagcgttgcgccggtngccgtggcgacccaaggcaacgncggcgacggtgagctttccagccgaaggccgggttggcccagcaaggtaact

SEQ ID NO: 13003 - DNA, 431 bp, Oryza sativa
  Clone ID: PAT_MRT4530_19079C.1
cgctttcctctactctaccatgccaaacccccccacctcgagctctagggtttagcggatcgaggggcgccgcggatagggtttgggtggggggtgcctgcgcgatggccgctccggcgggggactcagaggaggtgggggtgggggaggcttcggacaccagcgcagcagtgagggatggttttgcggaactcgagcagtaatagctagatgtctgcgacctagacgcacctgtaccagcaggtcacagaacacttctactcgatagagcgacaactggccgcgcgctacaagacgctccacaccaagcgccggttgctagacctgcgcacctaccacaggattgaggctctacgtcggcaggaggcctacatagacagatccatatagatcgcgctctaccgacttgattacctcataaaggacgacgc

SEQ ID NO: 13004 - DNA, 318 bp, Oryza sativa
  Clone ID: PAT_MRT4530_1907C.1
cactttgatacatatacacatgtagctaggtaagagtaaactcatgatgatataacaaaatgaggggaaaaattaatgttctttccgggtatacgtattagtacaatatagtagtacaaatttatgccatttggatgtggcttcgtcatatatactccaaattatacatgtatacaagatttttgtttcaaaaaaaaaaaaaaaaaaaaaaaaaaaaaaaaaaaaaaaaaaaaaaaaaaaaaaaaaaaaaaaaaaaaaagaagaacaaaaataaaggaaccaaactaacaaacgcaaggcaagcaacgaaagtagcca

SEQ ID NO: 13005 - DNA, 631 bp, Oryza sativa
  Clone ID: PAT_MRT4530_19080C.1
tcaatgacatttagaacccacatgagtcaatgacatgtgggtcaggatggcatatgtctcgcactgcacgccgaggccaccgctttgacccctattctcgcccgcttcgcccgccgcgtcgggaaagcacagcagcagcgtggcggctggctcgagggggacagcggcgggcgcctggacgcgtgacagcggcggcgggctggacgacggcggcggtgggctggacagtggctgcggcggcggctggagggggctggacgcggcgggctcgagggggacggcggcggcggctggacgcgcggcggcgggggcagctggatgcatggcggcggcgggcggctggatgcgggacagcggcggctggatgcgcgacgccggcggccggctggatgcacgacggcggcggcagcctcgattggcgacgacgacgaccggctggatgggggacggcgacgacggcggcgacgacgacggcgggctggatgggcgacggcggcggccggcggccggctggatgcacgacggcggtggcggcctctattggcgacgacgatggcgggctggatgggcacgaacgacgaagagatgtttttttagtccgatcatacccctgctaaatcaacggttagat

SEQ ID NO: 13006 - DNA, 342 bp, Oryza sativa
  Clone ID: PAT_MRT4530_19081C.1
atgttttttaataaaaatggtccgagttcatttgatgttgttgaaatcttcgacaagctgagagctgctccggatacatattttaagaacatcaaggaagctggatgcatgggggcgagcatggcattggcaatgaccaagtccttgtacccgaagatcgacattgatgccgtcgacggctttgcagacgggacaagtgaagaacacgcccttgacctcatcgatgatgcacaaaagattgccgacaagatcgctgcggatgtagttgaggggtttcaggacaacaacctcgggccgactgggtctgatgattttgatgatgaaaaaactgagtcttattga

SEQ ID NO: 13007 - DNA, 358 bp, Oryza sativa
  Clone ID: PAT_MRT4530_19082C.1
atcttactccgtggctgttcctcttctgggtggagggggacgggtggatttcttcaattcaaccaaatatcaactactttactttaaacagaacatcatttataactatccttctactataaatctcaatttccaaaaaaaatttgacaaacaatattacttataaccacctatacagatacaacatgaaaaaaataaagaatcatacacaaataattaaaaaactcctactgttcaaaacaaaaccttaaaacatatagactatcaaattaacctttaacacccgtatataacaatactcaagtaaccacttcaattacaccattataataacaagctttatactattataaaaatt

SEQ ID NO: 13008 - DNA, 1176 bp, Oryza sativa
  Clone ID: PAT_MRT4530_19083C.1
atgcatcccctgtgtgcgctgccactcctcatcaccctactgctgatctcttcagtgccactttctgtacaagaatccgatgccttcttccggtacacaaattgtaccacagcttcttaccagtgcggatcactcaagctcgacgtcgattaccccttctcggcgaatggcgtcgaccgtccaaactactgctcttaccctgggtaccgtctcatctgcaacccagacaacaagctgatgatccacatgaattccaccgtgttccaggttacagatatcgactatggcaacaagtttcttgcggtcatcgatcaaactcaacctcaggagacatgcccggatcgctatcacaacaccaccatcgacgagagcaggttcatgtacacagaccttgatcagttcctgacggtctatgtcaactgcagtgccaagtcttcatctctgccttttatctatgatcttctgtcatgcgtttctgggggaagctcctactataggctgcacaagaacaaggatgactcgttggaatcagatattctgggatcatgcagctcaagtttcgttgttccattcaattcaaccatggcaggctcattggctgccggaaattctagccttgtggatgtgattagagggggtttcacggcgagatggaaagttggggtaggctatcggatcatgttcttcatcaggtaccgtttgtatcttctaacaaacttgagggcaagtcaaggatcaaagatatcgaagaaaaaggctattgcaataggtgtatcagtcgtttcaggtgtaattttattgttcctgcttctcatgtgcaccttgtgtgttaagaagttctggcatggtctattgtcctcgatgggaaaatccaaagaagcaccaaacatcgagtccttcttgcaaaagcatgaagctcaacacccaaagagatattcttactcagaagtgaaaacaatgaccaaatcttttagtcacaagctcggccaaggtggctttggtactgtttacatgggcaagatgccaaatggcaagccaattgcagtgaagttactgaagtcttgcaaggatgatggccaagaattcatgaatgaggtagcaagcatcagcagaacttctcatgttaacgttgtcaccttgttgggatattgtattgttgagattatagacatataa

SEQ ID NO: 13009 - DNA, 3241 bp, Oryza sativa
  Clone ID: PAT_MRT4530_19084C.1
ggcagcgcgcagacgcagagctacacaagaaaccttgagccaatagagcaacgatgccgccactactcttccacctcctcgtactctccgtcgtcgtcgtcgtcgttagcggtggcgcggccactgccggcggcggaacgtacgacgacgccatatgcgcgaggccgatcttttgcggcgagcaggtggagatcaagtaccctttctacctctccaacaccacggatcaggtcgtcgtcgtcgacgggaacacccgctactgcggctacccgtggctgggcatcatctgcgaccacgaccgcgccatcctgcgactcgggaattacaactacaccgtcctggagatcaaccacggcaaccacaccgtcacggtggccgactccgacgcgctcgacggcggcgactgcccgagggtgaagcacaacgtcaccctcccggaggtgctcacgttcccgagccccggcaacgacagcatcaccttcttcttcgactgcaactccacggccaacgtcgtgctgcggccgccgccgtacatccgcccgatcaactgcagcaccttcgacttcccggggcggcgagacacggcgccgtctttcgtcgccacgcagccggacgtggcaggcgagacggagtggttggggctgtgcaaggaggtggtgatggtgcccgtgctcaaggattggctcatgaacgagaagtactacggcaaattgggcgacgatggatacggcgccgtgctgaagcgcgggttccagctgagctgggacccgacggcggggatgtgccacgagtgcgaggtatccgggggacgctgcagctacggcacgaagaacgagttcctgggatgcctgtgctccgatggccacgtcagcaaaacagactgcgttcaccacacctttgagaagatgcatcccctatgttcgttgccattactcatcatcatcctactctcatcggtgccaccttctatgcaagaatccggtgcctacttccggtacacaaattgtaccccagcttcttaccagtgtggatcactcaagttcgatgtcgattaccccttctcagcgaatggcgtccaccgtccagactactgctcttacccaggatatcgcctcatctgcagcccagacaacaagctcatgatccacatgaattccaccgcgttccaggttacagatatcgactatggcaacaagtttcttgcggtcatcgatcaaactcaacctcaggaggcatgcctggatcgctatcacaacaccaccatcgacgagagcaagttcatgtacacagaccgtgatcagttcctgacggtctatgtcaactgcagtgccaacttttcctctctgcctcttatctatgatcttgtgtcgtgcgtttctgggggaagctcctactataggttgcacaagaacaaggatgactcgttggaatcagatattctgggatcatgcagctcaactatcgttgttccatgcaactcaaccatggcaggctcattggctgctggaaattctagccttgcggatgtgattagaggaggtttcacggcgagatggaaagttgggctaggttggtgtagtgattgtaaggcttctggagggcattgtgggtttaatggcagttttcctgatcagtatacatgttactgcccttatggtcaagctattggatcatgttcttcatcaggatcaaagaagtcgaagaaaaaggctattgcaatagcaacctccatcgcctccggtgttctgttcctgcttctcctcgttgtgtccttcttctacgttcgcaagagaaagcacaagaaggtgaactcgtcttccaagctcctcaagtacagcggctccggcgggacacctcgctccatgggcggcgacatggagtccggcagtgtcaaggacctgcagactcacctcttcagctacgaggagctcgaggaggccaccgattccttcaacgagaacagagagctcggtgatggcggcttcggcaccgtctacaaagggatacttcgagacgggcgcgtggtggccgtgaagcggctgtacaacaacagctgccggcgggtggagcagttcgtgaacgaggcggcgatactgtcgcggctgcgccacccgaacctcgtgctgttctacgggtgcacgtccagccgcagccgggagctgctgctggtgtacgagttcgtgcccaacggcaccgtcgcggaccacctgcacggccaccgcgcgccggagcgcgccctgacatggccgctccgcctcaacgtcgccgtcgaggccgccgccgcgctggcgtaccccccccgtcccgagccggcgcccatcgtgcaccgcgacgtcaagaccaccaacatcctcctcgacgccgacttccacgtcaaggtcgctgactttggcctctcccgcctcttccccctcgacgtcacgcacgtctccaccgctccccagggcaccccaggatacgtggatccggagtatcaccaatgctaccagcttaccgacaagagcgatgtgtacagcttcggcgttgtcctggtggagctcatctcgtcgaagccggcggtggacatcacccggcagcggaacgagatcaacctggccggcatggccatcaacaggatccagaagagccagctcgaggagctcgtggacctcgagctcggctacgagtccgacccggcgacgaagaagatgatgaccatggtcgccgagctggctttccggtgcctgcagcagaacggcgagatgaggccgccgatcaaggaggtgctcgaggggctcaagggggtacaggacctatgcgtgatggagaaagatggaggcaaagacaagaagggacctgacccgccattatctcccgacacggtgcatgctcagtgggatagcaggcagacgactcctaacactagccagtgaccagcgggttattagattagaccagtatatttgccaccgaggcttaatatgtgtgttactgctattacgctgaggcgtgtgcttgttgtatgagaggtgcgagaccttttttcccccactttccaggcttccctggtgatgtgtgcatatgtgtttgttgggctaccagaacagagggaatgtacataagatgtttagagtggtgatgaccgatgatacatatggatatgtacttagtggatgttacaaaaaaaagggcgcccctcgtgatctagaacaaaaaaaaaaaaaaaaaaaaaaaaaaaaaaaaaaaaaaaaaaaaaaaaaaa

SEQ ID NO: 13010 - DNA, 192 bp, Oryza sativa
  unsure (1)..(192): unsure at all n locations
  Clone ID: PAT_MRT4530_19085C.1
catcccaacccgggaccctaaaccctaactccattgctttcgtcggggtcgccggagttggagaaggtgtcgccggagctggaggagaagagctaaggtcgccggagcacgaatcgcgaacaaatcccaagaaaagccaacctacctccaaaaaaaaaaaaaaaaaaanaaaaaaaaaaaaaaaaaaaaaaa

SEQ ID NO: 13011 - DNA, 426 bp, Oryza sativa
  Clone ID: PAT_MRT4530_19086C.1
tggcacgagggtcggcgaggtcggtgagtcgccgcctcgccggagaccatgccgccgccgcggaccggcggcctccccggcgctcggtgctcgggggtgctcggtggtgggcgtaggcgagagggggtgccggtgatcaggatctgcggccgcactcccgccacggaatccccaaagaccgccgcctccgccgcgggctctcttctccggccttccccgggggagcaccctcgctgatcgcccatagtggtggccccgctagctcgtcgcgcagatatgcagatgaaatggcttaagctagttgccttagcgaatcgagaagcaattggaggggccatttgggccagctgaagaaaaaactggcatgtttgtggttgggtgaaggtatctacctagcatgaggataccatgaaagcaagagcatga

SEQ ID NO: 13012 - DNA, 2274 bp, Oryza sativa
  unsure (1)..(2274): unsure at all n locations
  Clone ID: PAT_MRT4530_19087C.1
atggcggccgccgtctccgcgccccttctccggttccaccaccaccaccgctgcctcctccgccactcctcctcgccgcgccgctacccagccggcttctcgcgtgggctcagctccgtctcgttcggcctcccgcgcagcaccaccaccgccgcgcgctccaccgcctcgccctcggcgccgtcggcggcggcggccgaggccacggatgcggcttccgcccaggcgggatccgacggcaagggggatgggattggggaggaggagcgcgtcgtgctccccaccaacgagtcctccgaccgcctgctccgcatccgccacaccgtacttgctttttgctgcctcccattcctcacttctctacctgtcattaatctgtgtgcgcatgtgatggccatggccgtccagaagctgttccccaactccaaggtgacaataggtccctggatagacaacggcttctactacgacttcgacatggagcccctcacggacaaggacctcaagaggatcaagaaagagatggatcggatcatccggaagaatctcccattggtgagggaggaggtgtccagggaagaggcccaaaagaggattgaagcgcttaatgagccatataagttggaaattttggagggcatcaaggaagatcctatcacaatctatcacattggagaagagtggtgggatctctgtgccggacctcatgtcgagtctactggcaaaatcgatagaagagctgttgagcttgagtctgttgctggtgcttactggagaggtgacgaaagtaatcaaatgctacaaagaatatacgggactgcatgggagactgaagaccaattgaaggcttacatccacttcaaggaagaggccaagcgccgtgatcatcggcgattaggtctggatcttgatctattctccatacaggaagatgctggtggcggtttagtattctggcatccaaaaggtgctattatcagacatgttttagaagactcatggaaacagattcacttgcaacgtggttatgatctattatacactccccacgttgcaaaggctgaactttggaaggttagtgggcatatcgatttctacaaagagaacatgtacaatcaaatggatgttgaagatgagctatatcaacttcggcccatgaattgcccttaccacattttagtatacaagagaaagctacattcatacagggattttcccattcgagtggcagagcttggaactgtctacagatatgagctatctggtagtttgcatgggctgttccgtgtcagaggatttacgcaggatgatgcccacatattttgtctggaggaccagataaaagatgaaattagaggtgttcttgatctgactgagcaaatactgggccaatttggctttcggtattatgagataaacctttcaacaaggccagaaaaatctgttggcagtgatgacatatgggaaaaagcaacacttgcactaaaagatgcactagaagacaaaggttgggagtacaaggttgatgaaggtggaggcgctttctatggcccaaaaattgatttgaaaattgaggatgctcttggaagaaaatggcaatgttccactgtgcaggtcgatttcaatttacctgagcggtttgacattacttatgtcaattcaaatagcgagaagaaacggcctatcatgattcatagagctatccttgggtctttggaacgattttttggtgtcctcattgaacactatgctggtgattttccactttggcttgcaccaatccaagctcgtattctacctgtgacagacaatgagctgcaatactgtaacgaggtggcttcagaactgaaatcaaaaggcattcgagctgaggtatgtcatggcgagcgtctaccaaagctaatacggaatgccgaaacgaagaaagtgccgctcatggcggtcgttgggcctaaagaagttcaagccaggaccctcactatcaggtccaggcatagtggggagattggtactatgcctgtggatgaattctttcgcagaatccaacttgctattgcgaacaaatcttcttcactatgaaacatttaaatatgctaaagancanttgatattgtagaagtattagatcttgttgcacatacacnatatagcagctgtgctctaaaaaaaaattagcaactgaggtctgggaagancanatcaaataattttgtgcataatccgccntcgcccgtgttttgcaatataacaaatgtccantattctttttttgtt

SEQ ID NO: 13013 - DNA, 353 bp, Oryza sativa
  Clone ID: PAT_MRT4530_19088C.1
ttttcgttcacgcgtacggagaagaagcaagcaaaatgcggagaggctgctgcaaggtatgcgagagagactgcgcaagctcgagagaggtggaaatttagcatatgatgtcttcaagaaagccggaacgggtcttcagtcacaattgtctcgcaccttctcacggaagaaggctgcccaaacacccaaaggtggtggcggccgtggctgcatcctgccttcaagcggagaacatggtggcgggaggaagaagaacctgaccgacatgatgccatccctctaggacaacccggataacgaagaaggatttaacctcgagataggatacacgggcccgaggaagaacatgcctg

SEQ ID NO: 13014 - DNA, 376 bp, Oryza sativa
  Clone ID: PAT_MRT4530_19089C.1
ccccaaaagggggggaaaaaaaaacccctaaaaaattaaaaaccccaaagggttaaatggcgggggggaaaggaacagaagaaaaaacccacgttttccaacccccaagggaagggaccccccattatggaaaaaaaaaccgtgcaaatacccgcaaaaaaaatggccgctccccaaggcacccgggaaacaacaagagaaaaaggccaccgtccccctaaccgccaaaaagggcgggttaacatcctttttttaaccccggttttgaaaaaaaaagcattttcctaatcgcggggcccgcgccttatcttaaaaaagaaaaaccggtttgggtggggttcaaagcggcccgagcgccttaccagaagccaaaggg

SEQ ID NO: 13015 - DNA, 400 bp, Oryza sativa
  Clone ID: PAT_MRT4530_1908C.1
cgtgccacatacaccacggtatacggacggaagtacgtaacatagtttccaacccatcctagccatagacaagagtaccgacccaaccccacttacggccgaaacccccgggacaggtaggcaggatcgaccccggacttcgtccttatatggccgaggtgctactatcaaaaccatacaccccgagcccagcctaaaaccattttgaggattttgaatagagggggagatgatgtgacttgccttgctcgctttcccaaacgtcggcttcaacctccacgaagagcggatcttccgaagctgcagcgtctacacgaccaacggaaaataaaaggcttttactctaataaactccatataacccacaagaacaaagaacaaaaatgggttcttgacttct

SEQ ID NO: 13016 - DNA, 243 bp, Oryza sativa
  Clone ID: PAT_MRT4530_19090C.1
cccacgcgtccgcccacgcgtccgcggacgcgtgggataaaaaataaaaaaaaaaaaaaccaaaaaaaaaaaaaaaaaaccaaaaaaaaaaaaaaagggcaggccctttaaaagatgccggcttttttaaaggggccagggttgccttcccttttttgtaccggcacttaaattccattgcttgcccctaatttaattacttggcgagtggttaaaccctggggatcgggaataattttggtg

SEQ ID NO: 13017 - DNA, 366 bp, Oryza sativa
  Clone ID: PAT_MRT4530_19091C.1
atgcccatcccggccaccctttccggcactagaacgacgacgtcgacagcaactgctccaccccattcgccaacgccatggacgacagcatcgacagcaactacggagctcgagttcggcgagctctaccacaacggccagatccagccgcgaaccttgtccccgcccccgaatctcgaccctgacagcgatgacgatgacgactgctgccctgtgccagtacgaggctgtgagccatcgtcgcggagcggatccgcgcaccacacgcacaaggtccatgtcgtcgctctggatcttggctgggctctcttgcactcggctgggtcggaggagctagccgcgaaggcgtcgcatgaggatccttga

SEQ ID NO: 13018 - DNA, 813 bp, Oryza sativa
  Clone ID: PAT_MRT4530_19092C.1
atgtgcctgattgccatgtcaagtgacttctttgacatcgtcatcccaaatccattatctgtccctgtggcaggcctggagactttactaggcacagacaccttctttacaggagctgaggcagctgatggttcagtatttgaggttgatcttactcctaaagccatgcctggccggatatcaagtggacgaactggagctcgaggtcgtggaccaggggaacttggacgagatgacggagccgatgaaggtgctgagttccggccaccatttgctgcaggtcgattgatagatgatgtcaagctactgatgctagaactccgcccaacagaaggcgagcgaccaacagcaggggccgatgagcgcattgcaggctggcgtgtaggtgtggatgaacgtgagctggagcggctcattgaaggaactgtacttgaagacaatgaggtggcacggcttatcccaggtacattacttgaggatgagccaggacggcttgttgcagatattgtagatgcatttgagcgacttgttgcagaaattgtagatgcacctgggcggctcattgcaggaattgcaccagaagatgaattgggcatagcacgagtagatgggcgagttttggttggtgtagatggacgagttttaacaggagtggaggaccttgctggaacagggcgtgaagctgcaattgattgctttggtgcaacaacagtgctgcttcgcctacttggggttgtaggtcttgagctgacggaggaaatgcttgtattgagaactgctgtcctgttggagctagacatgagagtggactga

SEQ ID NO: 13019 - DNA, 1734 bp, Oryza sativa
  unsure (1)..(1734): unsure at all n locations
  Clone ID: PAT_MRT4530_19093C.1
atggaggacctgctgggcgcggaggtcggcaagaacgactatgactggcttcttactccccctgggacaccccgttgtcctgtactggaggttgctgagaaaacaccatccccaaatatattacctaagcgcactgccactagatcatcgtcaaccaccagagcgtcgaggctttcagtatctcaaacagagaatggtcattctacagctcccactagaccagctagaagtaactctgtcactcgcccttctattcagtccactctcatgtctagctccaacaggacagcagttctcaatacaagcatttcctccgtcagctcaagacctacaaccccaagtaggcgaagcagcactgttgttgcaccaaagcaatcaattgcagcttcacgccctgttccagcaaggtcctccactcctgttaaaactcgtccatctacaccaaccaaaactcgcccatctactcctgtgagaactcgtcaaacagccaattctacaagcgactcagctgctgccaggaccacatccgctcaaaattcaaggccatcaacgccaacctctagatcacgtgctatgcccaattcatcttctggtgcaattcctgcaatgagccgcccaggtgcatctacaatttctgcaacaagtcgctcaaatgcatctacaatatctgcaacaagccgtcctggctcatcctcaagtaatcaaatggtggccggaactcagcaccttcatcggctccgtcatctcgtccaagttcccctggtccacgacctcgagctccagttcgtccacttgatatccctgattttccaanatgaaacaccaccaaatcttaggacaaaactgcctgaacggccactatctgctggtagatcacggccaggcatggctttaggagtaagatcaacctcaaatactgaaccatcagctgcctcagctcctgtaaagaaggtgtctgtgcctgctatgagtcgaagtaaattttctgatgcaccatccaggacacctactctcacaaatggacgccaaaacagacagagtgagaggtctactgtggatagtcaacctagtaaagtctccaggcctgccacagggacagataatggatttgggatgacgatgtcaaagaagtcacttgacatggcaatcaggcacatggacattcggcagaacttgggtggaatccgtggcgcatccctcttcccgcatagcatccgctcaaccgccggcaagggcaggccagctcgaatgtcagatcctgggcacaccatctcaaacggagaccaccggcactacgccgacaatggcagcaccaacgggcacttctccggggactccaatggggctctctcgcgcaacggtggcagctcgaccgactcacccgaccggggaagcatcggaggcaaggagacgctgagcgagctggacatgtacggcagctcgcgctacgaggcgatgctgctgagggaggacgtgaggaacacgagctggctgcacggcttcgacgacagcaagcccgaccagagcccactgttcgaccaccggttctacacgctcttcccttgggtacaatactctgctgtgaacgagcggtcatcgtgtattaagcagtatccggtgaccagtcacattttggaaccctgtgtcaagctcgcagctgcttccatcacccatgctagtgacccgtgtgataaaacacgagacggtgcgtcgtgctgggacgggacagcatga

SEQ ID NO: 13020 - DNA, 741 bp, Oryza sativa
  Clone ID: PAT_MRT4530_19094C.1
cccacgcgtccgcccacgcgtccgcttgggtggaatccgtggcgcatccctcttcccgcatagcatccgctcaaccgccggcaagggcaggccagctcgaatgtcagatcctgggcacaccatctcaaacggagaccaccggcactacgccgacaatggcagcaccaacgggcacttctccggggactccaatggggctctctcgcgcaacggtggcagctcgaccgactcacccgaccggggaagcatcggaggcaaggagacgctgagcgagctggacatgtacggcagctcgcgctacgaggcgatgctgctgagggaggacgtgaggaacacgagctggctgcacggcttcgacgacagcaagcccgaccagagcccactgttcgaccaccggttcgagccgctcccagagcccttcagcccgctatgacgaatgcacggttgccgctgcctgtaaatctgctgttccatggtctgctttgcaagatgtgtatgccattccatatgttttctgtttggttctgtttcaggttctacacgctcttcccttgggtacaatactctgctggtaatattttactttaccgatataagacggagagattgtggggtgtggctcatttaatttatccctggagtagggattggtttccacgtactgttgtactgagaatccacaagagtataggaattgataaaaacagtaaagatttgtaagttattgtaatgccattggtt

SEQ ID NO: 13021 - DNA, 413 bp, Oryza sativa
  unsure (1)..(413): unsure at all n locations
  Clone ID: PAT_MRT4530_19095C.1
gaaattgaaaaaataacagataaatttatatattgttaattacatagttaggtgtgtaatattacatccaacatattcttttatgggattttcatgtgcaacatgacgtggagcttgttttccagtgccatgctantctcaaaaagngacggtaacantccttttgacgtttaagaaattctagagtacaccattnnaacctgaacattttctgtgcatttagaaatcccnttgcagaggggtaatgtttatgttcatttcgaagaaagtcagatgaatttcccaaacagccatttccatggnttccagtaagctgttatggttctccaaaacccctcgccccttgaatgcttangacagatcacctagggcaatggtggacatctcttacacccaaatcaaagaggaaaatc

SEQ ID NO: 13022 - DNA, 341 bp, Oryza sativa
  unsure (1)..(341): unsure at all n locations
  Clone ID: PAT_MRT4530_19096C.1
gaagttcatcatttattcaccatatgtatatatgcttcctgacaaatgaaagcactagttatttagcaacccctctttttttttcacacagctagctttagtagcctagggggcaggtttcggggtcctaggataacctagccagtagcagacaccagctgtcccattggggatgtccacgttgcaaaaagccgggagggttgtcgtcgggcgctccaagttccttttttgggagttggggaacacctgggtgatgggggggcaaaaatgggggggngggaggttcctgtagatgnttncaaccatgtgggtgaggggcgagtatttgtaacagttgtggt

SEQ ID NO: 13023 - DNA, 846 bp, Oryza sativa
  Clone ID: PAT_MRT4530_19097C.1
atgtctctccgtgccctcggttcccttctcacctgtaggagattctcgccacgcgcgcaggcgcaggcggaggcggagtcctcgctggggatcttcactcaggctacggcggggaggtcagcacgctctctccgcgccctggtgaaatctccgtccgtttcacccggttctcagatcgaaaattttatttcttgtgtgcactcgcagctcatgtgttctcatctctgtatgatacagagggatctcgccgttggtgatggtggcgcttatggagttgtagccacgattgcgttggctggattggccacaatcctgtatttcaacgagagcacagacaagtcaggagaggatgtatgtgacaggggggctgtcaaggaaccttacccttacctgagtaaggaagcagccatcaaggcagggtttgtggacaaagatggcacagttcagtgggctagttatctcgatcatgaagcatctgctaaggaggtgagtgactgggaagaagctgtgaagcagcaggatgtgaaggtcgatgaggcaaccatgaaggccaggtttcaggactggatgaaggagcacaaccgttcgtacagcaccgaggaggagaaggctcgctgctatgaaatattcaaggagaccgcgataagggcagacaaggctaatgcggtaagaccaatggatgtccctttcgcccctaacggattcgcagactggactgatgaagagtgcaatagtctgtattcccatcctggtagctttgactgggagaggtacatcgatcacatgaacactatgaatgctaatgggggatacattggcaatcaagactgtaaagaaggtatatag

SEQ ID NO: 13024 - DNA, 1161 bp, Oryza sativa
  Clone ID: PAT_MRT4530_19098C.1
atggctgcacacacaattaagctcgccgtcgcggtgacttgcacgctgctccttgcagccgcgtgcagtggcttggaggttggctactacaagaagtcgtgcccccgcgttgagaccatcgtgagggaggaggtgaagaagttcgtctacaagaacgccggcatcggcgccggcctcatccgcttgctcttccatgactgcttcgtcgagggatgtgatggctcggtgctcctggacccaactccggcgaacccagccccggagaagctgagcccgcccaacttccccagcctccgcggcttcgaggtgatcgacgccgccaaggacgccgtcgagaaggcctgcccgggcgtcgtctcctgcgccgacatcgtcgccttcgccgcccgcgacgccgcctacttcctcagcaggatgagggtcaagatcaacatgccggcgggccgcttcgacggccgccactccaactcctccgacgccctcgacaacctccccccgcccttcttcaacgtcaccgagctcgtcgacatcttcgccaccaagggcctcgacgccgaggacatggtggtgctctccggcgcccacaccgtcggccgctcccactgctcctccttcgtccccgaccgcctcgccgtcgcctccgacatcgacggcggcttcgccgggctcctcaggaggaggtgccccgccaacccgaccacggcgcacgaccccaccgtgaaccaggatgtcgtcacccccaacgcgttcgacaaccagtactacaagaacgtggtggcgcacaaggtgctcttcgcgtcggacgcggcgctgctgacgtcgccggcgacggcgaagatggtgtcggacaacgccaacatcccggggtggtgggaggacaagttcgccaaggcgttcgtcaagatggcatccgtcggtgtcaagaccggctaccccggcgagatcaggaggcactgcagggtcgtcaactaatcatctatatattgaattcaacgtgtgttccatcaaattttctcattgctacgttttgtttttgtatttattcgttcattcttttgtgtagtgtattttgtgttgattattatatatgtcctctcctattatgtaattgtgtaatatgacactttatcatgtaataacattggaatatatttttggagt

SEQ ID NO: 13025 - DNA, 2820 bp, Oryza sativa
  Clone ID: PAT_MRT4530_19099C.1
gctgtttcgatgcgtatttctgcagctttgcttttctctctctcctctcctctctctctctctctctctctcccttctccacgcacgcacatcatcattattgggaggctcgtccctgtccgtcgctcgcctgctctcatcctctccctctctctctcctcccccgtttctcggttagattcacgcctctccaacctcctcccccaaccccaagaattcccgatcgattgattgactggccgacccgcccgttggtgcgtgttcgttgatcctttttttgcctctggtgaggaggagggggtttgattcttttgtgttcttggtccaagaaccaaggggggaattagcgggtgaggatttcttggtttcttgtgggtggtgtgccgatcaattagatgtcaggttggatgattggagccgatcatggcgatgatcgcggtcctgatgatcgtctgttcggattggtgttctctgcttaaagatgatgttctcggttttggtgatcctttcatcagaatcggggcgattagcgtggatccttcgttgtttactcgaattggggtctttctttactggataagaagccacgcgctctctctccttccccgtctctctgtctgttttccttctccgcaccctcatccccccacctcaacaacttgcgatcgattgattgactcgcctgcccgcctcctctccctcgctcgttcatcctctttttctcggtggtcttcaggagtggccggccctccactcgtatcctatgaatccctaacccagtgcgagtcgcagccgtggcactgggatgactctactatcaatttctcgagctccactaaccccccacgtcttagattaaaggatgaggttgcccttgtttctccgttgcagcagtcgtttcagaagtcgcagcgcaattgcttcggtggctctgctcctggagaattccccttggctgcaaacccatgattcgccgttcctgcagtcgcttcagacgtcatggcaccagtggtccgggggctcttgtcctggagatttccccttttccggaagcctgtcaattgtcctccatgtcctcacattatgcattctggaacctgatgacctcgctcatttggaggcaagtagtgttttgttcttcctctccaatgtaggattgatatttccactgatgaaatttgtgcttgcgataggcaacatgctcgtttttccggaagcctgccaatttccctcccgattttcagttgtcaatgtcagaactcgcagcgttggatatgtgccagaaacgggcgatatttaaacctatgactcaacaagaaagagaaatgtttaagcaacgttgacggcgggagttggaagctggttcttagcggtttattggcaggtgaagcatgttgccggagggttcaagcggcagcaggagcaggacgcacaatgcttgttagtgatgctggtagggtctatgcatttggaaaggattcatttggagaagtggaatatgcagcccaaggttctagggttgtcaccacaccacagctggtggaatcattgaaggacatatacattgtccaggcagcaatcgggaacttctttactgcagttttatctcgggaaggtcatgtgtatacattttcttgggggaatgacatgaaacttggtcatcagacagagccaaatgatgttcagcctcatcttctagcaggccctcttgagaacattccagttgtgcagattgccgcaggctactgctatctcctggctctggcatgccaaccaagtggcatgtctgtttattctgttggttgtgggttaggtgggaaacttggccatggttctcgaaccgatgagaaataccctaggttaatcgagcagttccaagctttgaatatacaaccagtagtggttgctgctggtgcttggcatgctgctgttgtaggcaaggatgggcgtgtttgcacttggggatgggggcggtatggctgcttgggtcacggtaatgaggaatgtgagtctgttcctaaggttgttgagtccttagtcaatgtgagggctgtccatgtagcaactggagattacaccacatttgttgtatctgataaaggtgatgtttactcgtttggatgtggtgaatcatcaagtcttggccacaacactataactgagggtaataataggcacactaatgtccttagcccggagttggtgacttctttgaaaagaacaaatgaaagggttgctcagatcagcctcactaactccatttactggaatgcacatacatttgcactgacagattcaggaaaactctatgcgtttggtgcaggggacaaagggcagctaggtaccgaactcgtcgcgcaggaaagcgagagggggacaccggagcgtgttgaaattgacctcagttaggtccaaattgcaacgccacttcatctccttttctctccagatgcactcttctaacgttaactttcaaattgattgcattgcgcgccctttagcttgttggctgttcatcagcctcatcctgctctgcagctaatccttgtgaaaatagttaccatcaattaaacagtctgttgttcatatgattggttcggtttagaaactttgtatatatgattatcatgtaaatataacagtcaggtctcattgccagttcctttaaaacatgagtagctggcttttaacatcctgtgaaatttaccttaactctacatctgcaccatttatatttcttctaaacaggggtgtgtgtgtgtgtgagagagagatataataatatatatttatatatttatttctagttgattgacaaaa

SEQ ID NO: 13026 - DNA, 462 bp, Oryza sativa
  Clone ID: PAT_MRT4530_1909C.1
gttctgtcttcttgggcgtagagccagctatctgtcagccaccgcacaacccaggggtggccttcacaaagggaggaagaagatgatggaggtggagaagccatgggagttgaaggaggatgtggagatcatgactgaggaggaggaagaagacgacagcatcaacctgctgtaagccaggggcaggaacaagaagcacgcgcttatcaatggagattaacaacaacctcttccataagaagaagaagaataagaggttgttgaggagcacaagagcgttttttttgatcccacccaaggttttgagcatgttacttgagtaagtggtcagaatgaagttaccagagtggagcacttcccttgctaaaaggaaaaagtgccttgaaaatttaactcaaaaggggaaatgaacttttggacacctggaaaaaggttttttttaagaaacttatgtaatttttt

SEQ ID NO: 13027 - DNA, 657 bp, Oryza sativa
  Clone ID: PAT_MRT4530_190C.1
atgatggaagtcgaggacatcgcccaagtggggaccaaaactgacaagatcgccaaaaccaccatgacgaaaaccaccatgggcagcgagctcaggacgacaacggacgaggtcgacgatgccaagccgatagacgacgacgggattcacactccccagatccacagagggatcgagaacaaggatgtcgacccagaggtcaaagcccaaatcccagtgacccctcatcgtctttgtcatcatcatcagcggctagcggttctcgaacaccgcgagggcaccgaccaccccatatacccgaagaaggatgcatggcgttcactccaactttacgagaagttaggtggcccgaaaagtttcgaccaggagccaaagagaaatacaatgggagcactgaccaagaggaattcctacgcgtctactctacggttctctatgcgatcaggcgtccgagatcgctatacaactcaagagttggcaacaagacgggtcacctccgctcgcaagttgttcgagatcattgacagatgcgctcatgcggatgataccctcaggaggaaggaaggaaagagcaaaacgggtgacgggaagaaaacaaccaacaaagatgcactagagtccagcaagaagatgaacagaagaaatgggcactggtag

SEQ ID NO: 13028 - DNA, 390 bp, Oryza sativa
  Clone ID: PAT_MRT4530_19100C.1
atggcggccgaagtgagcaaagttctggagaggggaaggatggccatggccatggcgatcggcaggatctcgacgcaaccctgcaaggagatcacgctgcagatagaattaactcggacagcatccgagggccggattggtggcgatcatttcttgcacctgttcgagctagctttctttacctctgggcatgtctcactctcactacggtgcccaggcagtgacacctgccataacattggtcaaattcaagcccgtggtactggcgtcccctcctccattagcaccgacttaattatgattcatatcaacgacttcgtctgccgacaagacaatctgtacacaaatgaaacaagaagcgcagctgatgagggcatgaggccgagctag

SEQ ID NO: 13029 - DNA, 1384 bp, Oryza sativa
  unsure (1)..(1384): unsure at all n locations
  Clone ID: PAT_MRT4530_19101C.1
tttttttntccnnntnggngggggggcttttgggcnggggcccccccccctttttttttccgggagnaaaaaaaccgggaaaaggnaaaggccccnatttnggnaaangtttgggcnncccccggtttnaatttccccccaaaataaatanggngggncccaatttnnattnntttnaaaaaagggggggccctttngggaaaaaaaccccccnaanaaacccncctttnaaanaaanggngggtttngggcccccccccctgggttttntttgggnaaaatttggggttttggnccccaanaaatttnggggnaaatttncccaaanaaatttccccttttggggggggaaaaaaagggnggggaaaaaaanaaagggncccnaantttccccttttccccgggnttttgggncccccccnggnaaaanaaatttntttgccccgggnggggcccnaaaccccgggnaaaaagggnaaaaaaaatttccccccccnaaattttccccncccnaaattttggggnggggttttggganaaaattttggggggggnaaaaccccgggncccccaaangggncccctttttaaaagggnnaaaagggnccccngggnggggnttttgggggggggccccnggnnaaaaatttggggnccccccccggggnttttcccccgggncccctttttgggggtttttccccggggnccccccccnggggggggggccccccccnaaaacccccccccggggntttttccccccgggnccccngggggggggnccccngganaaaaaagggggggggccccccccnggggaaaaaagggncccccnaaaaggggncccccccccnggggncccccccccgggggcccccccccctttttttttccccccnaaacccccnaannaaaaanggggggggggttttnccccggggnncccccccccnggggnccccccccccaaaaanttttngggggggggggcccccccccnaaaaccccccccccccccccaaaaanggggnaaaaaaaaaaaangggccccccccccccccnaaaacccccccccctttttcccccccccgggggggggggcccccaaancccccnnaaaaaaaanggggnnaaaaaaaaatnnnngggggggggggggggggggggaaaaaaccccggggaaaaaaancccccggnggggggggntttggggggtttttttanaaancccttttttttttttccccccccccccccccgggggggggggttttttnggnnnggggnggggggggggggnggggnaaaaaaaaaggncccccccccccccggggggggggggggggggggggggccccccccccccggggaaaaaaaaaag

SEQ ID NO: 13030 - DNA, 404 bp, Oryza sativa
  Clone ID: PAT_MRT4530_19102C.1
actagttctagatcgcgagcggccgcccgcgatctatctttattgtcaggggttacggggtcaacagcagggtaatttcatccacctgaatcctggaatccaaccgcagcagcaagcccaacatatgtttgtccctttactagaacagcaacctgtgatcaatggttttcacccctatgatttccatttggcccagctaattcagcataacgagaatatagcgttacaaaggaatatagcttatggaacctatccatattacaggagatgacagttgcagtatgagaatgtagctaggtaatgtttctgagataggaagttcacaccggtcgcatgtaccctggtgcaaatcaattcgttgatttggtgaaaatttaagtgtgtgttggcatatatgtgctggg

SEQ ID NO: 13031 - DNA, 668 bp, Oryza sativa
  Clone ID: PAT_MRT4530_19103C.1
gccacccggcaggacgaggtgggagaggagaaggtccggcggcctgcgaggcggcggtggtgacgggcgaagccgtggcggtagcgatgacgcgggagacgagatcacctcaacctcatcgtggcatagcgagccagtcgacaaagatgaacgatggtggtgttgtttgtggccacgaggtatcatccatttgcggcgctgtggagcatgaggatggggaagccgttctagtggagtatgtgcaccaccggaccgattgccgtccggaccaccctatggatccgccattatgcaccgcccacgtcacgtgcacaaacgcacagcccaactacatggaaacgctgctcccgtcgtcgtctgcgcagaggcgggcggaggagcttggtgctcttggtttcttggcgcttgggcacaagatgggaggggaccctggccggcgatggtgggttgcaccgccgccatggggatttggcggcgccggtggagacgaggcggatggcgttggggatgacgaattggcggccgcattgcctgccgttggccaccacgcgcaccccctgctcatcttcagccgcgtggagagaacaaatgttcccatgatggtgacgctctgctcccgtctttgtgatattgatgctagaggctcagccttcaggcaacggtggtga

SEQ ID NO: 13032 - DNA, 249 bp, Oryza sativa
  Clone ID: PAT_MRT4530_19104C.1
atgggcgctggaatagcggcaatgacgaacccatctaggcaggaggtggaggtagaggtgaaggcgaagagctgccgatcccctagccccatctccaacagtggcgacacaccattccccgttccccgttcccccagcggcacgccaattcaccatcaccctctccgcactgacggcacaccattcccctctctggcggcaaaggaggggccaccggcagcgtcgtcagcaaagccggcgatggagtaa

SEQ ID NO: 13033 - DNA, 6084 bp, Oryza sativa
  Clone ID: PAT_MRT4530_19105C.1
atggccgagcaaggaaaagcgcacgacctctctccgagtgtgagcggcgacgacggggagccgaatccacgccgtcgagctcgtactcccccacctcctccgcgccaaagccctaagcagggggaggcgcttgagaaggtcgacaaatccgtggcatcaccagttgcaggtggtgcaggaggacggcaagatggggagcgccgcctcctcgtctacggcgacggcggcacgcctcagggtgcgcttcaggctgctggcgcgctcctacgacacccgcctgtcgtccatgacccggagtctccagcccaacgatggctggaagatgtggccaacttggtcatgacggcacagcagcgcctgggtgctggtggacggtccgccaccaccaagacctccggcgccgctaccaccggctccgtgtcgtcaaggcggagggcgcggcgagcggcggcggctgcacggcattcggctgccactccctcgtcgacaccctcgactcgggaggatcagcacggggagccggatgcccgcctcaacatcgagcgccggcgtaatggccggcgtactccccgtgcgacggagggcgcctcctcgtccagagtgtcacctcgacatggacgtgaggatcagccctccgtgcccccggctggtggtgtcggctgtagagcctttgtggcgagtcttcggaatgtccgttggcccccaaggttccggcccaccatcaccgagaagtacgatgggagcgtcaaccccaccgagtttctccaggtctatacgaccgggatcgaggccgctgggggagacgacagggtcatggcgaacttctttcccatggccctaaaaggacaggcgcggggttggctaatgaacctgccacccgcgtcggtccactcctgggaagatttgtgccaacagttcaccatgaacttccaaggcacatatccgcgcccaggcgaagaagcggacttgcatgcagtacagcgaggcgatgatgagtcgcttcgctcgtacattcagcggttttgccaagtccgcaatactataccatgcatccctgcacacgcggtgatctacgcgttcagggggggcgtgcggcacaaccgcatgctcgaaaagatcgcttccaaagagccccagactaccgcggagctttttcagctcgcggaccgagtggctcgtaaggaggaagcgtggacatggaactcctccggttccggtgtggcagcttcggccgcccccggatccgccgctcagacagggcggcgtgacaggaggaggaagaagaggtcggaccgttccggcgacgagggtcatgtcctcgccgtcgaaggcgctccgcgggccacccgaaaggggaggcctgcgagcgacaaaaagaaagaggctggtactcccagcagagagcgccccgccggcaagtggtgctccgtccacaacacctccctccacgatctcgcggactgtcgcgcagtcaaaaatttggctgagcgaacgaggaagtgggaggaggacaggaggcaggaacgccgtgagggcaagtccccggcggttccttccggtaaacggcgaagtgaggccaagcagaaggcccccgctgttgacatcgatgatggtgatgatgacctaggtttccaagaacctggggccaccattgccaccgtcgatggaggagcgtgtgctcacgtctctcgccggagcttcaaggctatgaagcgagagcttctggccatggcccctactcatgaggcgatgcgtcgggcgcggtggtcagaggttgctctcactttcgaccagaccgaccacccaccgtgcattgcccggggagggcaggttgcgatggtagtttcccccaccatctgcaacgtgaagttgggacgtgtcctcatagatggaggagcggctctcaacatcctttcccccgcggcctttgatgctatcaaggccccggggatggtgctccgaccgtcccagccgattatcggtgtgacgccggggcacacgtggccattaggtcacatcgacctaccggtcaccttcggtggacctgccaacttccgcacggagcgggtgagcttcgatgtggcggacctcagtctgccctacaacgcggtcctagggaggcccgcgttggtgaagttcatggcggcggtccactacgcctacctccagatgaagatgccgggccccggtggccccatctctgtccatggcgatcttaaagtcgcgcttgcttgcatggagcagcgcgccgaccgcctcgctgctgcgtccaagcccgagggtggtgacgagaggcttggcccctctgcccccaccgccccgaggcagcggattgccacatgcgacgaggtcccggaagacgcgctcgtctccttcttgcgggcaaacgctgacgtcttcgcatggagaccagcggatatgcccggggtccccagggaggtgattgagcaccgtctcgccgtgcggccgggcgcaaggccggttcggcagaaagtgcggcggcaggccccggaacgtcaagccttcatccgcgaggaggtggcgagacttctggaggccggattcattcgtgaagtcatccatccggagtggctggcgaacccggtggtcgttcccaaggcgaacggcaagcttcggatgtgcatcgactacaccgaccttaacaaggcatgtcctaaggatccttaccccctgcctcgcatagatcagatcgtcgactccactgcggggtgcgaccttttgtgttttctagatgcatactctggttatcatcagattcgcatggctagggaggatgaggaaaaaactgcgttcattacccccgtaggaacctattgttatacatcaatgcccttcgggttaaagaatgcaggtcctacttttcagcgtactactcgaatttctttgggtagccaaataggacgtaatgttgaggcgtatgtcgatgacttggttgtaaaaacgcgcaaccaagaaactttactttcagatctagcggaaacttttgagaacctccgctccgcccgcataaaactgaaccccgataagtgcgtgtttggtgtgcctgcgggcaaacttctcgggtttttggtctctgcccgaggcattgaggccaaccccgagaagatacgagctatagagcggatccgcccccccagcaaacttagggatgtgcagtgcgtcactggttgcatggccgccctaagtcgtttcatatcgaggctgggagagaaggcgctacccttgtttaagctcctcaagcgcttggggccgtttacttggacggaggaagctgaaaatgcccttgcccagttgaaggcgtatctcagctctcctccagttctagtcgccccggagccaaatgagcccctactactttacttagcggcgaccccccaagtagttagtgcagcgttggttgtggagcgcgatgaagacaatcctcattctgcgcacccccactctgtgccgacttggcccgggagcaggcagggaggagaggcccccgagtcgaacggtggcctaaggcccctgacgaccggagtcggccctctgcccgcttgtcagacggtgctgggtgcccccgaccctcaggaaggccccgaggccactgagggaaggccgcacctatcgccctttggccccgaggctaaccctgtgctgactcgacccgggagagagcagggagaagaggcccccgagccgaacggaggccagaggcccctgacgaccggagttggccctttgcccgcttgtccgacgatgccaggtgcccccgaccctcaggacggccccgaggccactgagggaaggccgcccctttcatcctccgaccccgaggtcatcggtacagaagacaagtgcgccccgaaaggccacttaaacgaaaaacgccccagggatacggcccctagcgaagaggatcggccccgccgaaaggtgcagcggcctatctactttgttagtgaggccctccgggacgccaagacccgatacccacaggcccagaagatgctttacgctgttctgatggcctcgaggaaactgcgccattatttccaggcgcatcgggtcactgtggttacgtcttaccccctcggtcaaatcttgcataatcgagagggtacaggacgagtggtaaaatgggcaatcgagctttctgagttcgatctgcactttgaaccacgccacgctatcaagagccaggccctcgccgattttgtggcagagtggaccccggctccagagaccgtctcaatgcccgaggccagcacgaacccctcacagctgcctcaaaccgcccactgggtgatgcagttcgacggttctctgtctctccagggcgccggtgcaggggtcacgttgacctctccaaacggagacgtcctcagatacttggtccgtctcgactttcgagcgactaataatatggcagagtacgagggactccttgccggactcagagtggcggccgggctggggatccgccgcctcctggtgttaggcgactctcagctggttgttaaccaagtctgtaaggagtatcggtgctctgacccgcagatggacgcctacgtgcgccaagtacggcgtatggagcgccatttcgatggaatagagcttcggcatgtgcccaggcgggataacatgatagccgacgaactctcacggctcgcgtcctcgcgggcccagaccccaccgggcgcctttgaagaaaggcttacccagccgtcggcgcgacccgatcccttaggggagacggatgcgcctgaccggcccccgaggcccgtcggagtccaggcctcgggacccgaagggagtgctccaagctccctgagattgattgcttggatctctgagatccaaacatacctcacagataagactctacctgaggatcgcgaagggagtgaacgcgtacaacgcatttccaaacgctatgtgctggtagaagggaccctctatcggcgcgcggctaacgggatcctcctgaagtgcattcctcaggaacaaggcgttgagcttcttgctgacatccatgagggcgagtgcggagcccattccgcctcacgcaccctggttggcaaggcctttcgtcaaggattttattggccgacagctctcaatgatgcagtcgatctggtccggcgatgcagagcgtgtcagttccacgccaagcaaatccatcagccggcccaggccctgcagatcataccactgtcatggccatttgctgtctgggggcttgatatcctggggccgttcaaacgggccccgggcgggtttgagtatctgtatgtcgcgatcgacaagttcactaagtggcccgaggcttatccggttgtcaagatcgataagcactctgctcttaaattcattaagggcatcacggcccgttttggagtgcctaaccgtattattacggataatggcacccaattcactagtgaactcttcggcgactactgcgaagacatgggcatcaagctctgcttcgcctcacctgcccaccccagaagcaatggccaagtggagcgcgccaatgcagaaatcctcaaaggccttaaaaccaagaccttcaatattctcaagaagcacggcgattcatggatcgaggagttgccagcggtgctctgggcaaaccgaaccacaccaagccgagcgacaggggaaacgcctttcttcctcgtctacggcgcagaagcggttctcccatctgagctcaccctgaggtctcctcgggccaccatgtactgcgaggctgatcaagatcagcttcgtagagatgacctcgactacttggaagagcgaaggcagcgcgcggccctccgagccgcgcgctaccagcagagcctacggcgctaccatcagcgccacgtccgggcccgatcactctgcgtcgacgacctcgtcctacgccgcgtccaaacgcgtgctggactgagtaagctctcaccaatgtgggagggtccgtatcgagtgatcggcgtcccccggccgggctccgtacgactggccacgggcgacggcactgagctgccaaacccgtggaacatcgaacaccttcgtcgcttctacccctga

SEQ ID NO: 13034 - DNA, 5298 bp, Oryza sativa
  Clone ID: PAT_MRT4530_19106C.1
atggccgagcaaggaaaagcgcacgacctctctccgagtgtgagcggcgacgacggggagccgaatccacgccgtcgagctcgtactcccccacctcctccgcgccaaagccctaagcagggggaggcgcttgagaaggtcgacaaatccgtggcatcaccagttgcaggtggtgcaggaggacggcaagatggggagcgccgcctcctcgtctacggcgacggcggcacgcctcagggtgcgcttcaggctgctggcgcgctcctacgacacccgcctgtcgtccatgacccggagtctccagcccaacgatggctggaagatgtggccaacttggtcatgacggcacagcagcgcctgggtgctggtggacggtccgccaccaccaagacctccggcgccgctaccaccggctccgtgtcgtcaaggcggagggcgcggcgagcggcggcggctgcacggcattcggctgccactccctcgtcgacaccctcgactcgggaggatcagcacggggagccggatgcccgcctcaacatcgagcgccggcgtaatggccggcgtactccccgtgcgacggagggcgcctcctcgtccagagtgtcacctcgacatggacgtgaggatcagccctccgtgcccccggctggtggtgtcggctgtagagcctttgtggcgagtcttcggaatgtccgttggcccccaaggttccggcccaccatcaccgagaagtacgatgggagcgtcaaccccaccgagtttctccaggtctatacgaccgggatcgaggccgctgggggagacgacagggtcatggcgaacttctttcccatggccctaaaaggacaggcgcggggttggctaatgaacctgccacccgcgtcggtccactcctgggaagatttgtgccaacagttcaccatgaacttccaaggcacatatccgcgcccaggcgaagaagcggacttgcatgcagtacagcgaggcgatgatgagtcgcttcgctcgtacattcagcggttttgccaagtccgcaatactataccatgcatccctgcacacgcggtgatctacgcgttcagggggggcgtgcggcacaaccgcatgctcgaaaagatcgcttccaaagagccccagactaccgcggagctttttcagctcgcggaccgagtggctcgtaaggaggaagcgtggacatggaactcctccggttccggtgtggcagcttcggccgcccccggatccgccgctcagacagggcggcgtgacaggaggaggaagaagaggtcggaccgttccggcgacgagggtcatgtcctcgccgtcgaaggcgctccgcgggccacccgaaaggggaggcctgcgagcgacaaaaagaaagaggctggtactcccagcagagagcgccccgccggcaagtggtgctccgtccacaacacctccctccacgatctcgcggactgtcgcgcagtcaaaaatttggctgagcgaacgaggaagtgggaggaggacaggaggcaggaacgccgtgagggcaagtccccggcggttccttccggtaaacggcgaagtgaggccaagcagaaggcccccgctgttgacatcgatgatggtgatgatgacctaggtttccaagaacctggggccaccattgccaccgtcgatggaggagcgtgtgctcacgtctctcgccggagcttcaaggctatgaagcgagagcttctggccatggcccctactcatgaggcgatgcgtcgggcgcggtggtcagaggttgctctcactttcgaccagaccgaccacccaccgtgcattgcccggggagggcaggttgcgatggtagtttcccccaccatctgcaacgtgaagttgggacgtgtcctcatagatggaggagcggctctcaacatcctttcccccgcggcctttgatgctatcaaggccccggggatggtgctccgaccgtcccagccgattatcggtgtgacgccggggcacacgtggccattaggtcacatcgacctaccggtcaccttcggtggacctgccaacttccgcacggagcgggtgagcttcgatgtggcggacctcagtctgccctacaacgcggtcctagggaggcccgcgttggtgaagttcatggcggcggtccactacgcctacctccagatgaagatgccgggccccggtggccccatctctgtccatggcgatcttaaagtcgcgcttgcttgcatggagcagcgcgccgaccgcctcgctgctgcgtccaagcccgagggtggtgacgagaggcttggcccctctgcccccaccgccccgaggcagcggattgccacatgcgacgaggtcccggaagacgcgctcgtctccttcttgcgggcaaacgctgacgtcttcgcatggagaccagcggatatgcccggggtccccagggaggtgattgagcaccgtctcgccgtgcggccgggcgcaaggccggttcggcagaaagtgcggcggcaggccccggaacgtcaagccttcatccgcgaggaggtggcgagacttctggaggccggattcattcgtgaagtcatccatccggagtggctggcgaacccggtggtcgttcccaaggcgaacggcaagcttcggatgtgcatcgactacaccgaccttaacaaggcatgtcctaaggatccttaccccctgcctcgcatagatcagatcgtcgactccactgcggggtgcgaccttttgtgttttctagatgcatactctggttatcatcagattcgcatggctagggaggatgaggaaaaaactgcgttcattacccccgtaggaacctattgttatacatcaatgcccttcgggttaaagaatgcaggtcctacttttcagcgtactactcgaatttctttgggtagccaaataggacgtaatgttgaggcgtatgtcgatgacttggttgtaaaaacgcgcaaccaagaaactttactttcagatctagcggaaacttttgagaacctccgctccgcccgcataaaactgaaccccgataagtgcgtgtttggtgtgcctgcgggcaaacttctcgggtttttggtctctgcccgaggcattgaggccaaccccgagaagatacgagctatagagcggatccgcccccccagcaaacttagggatgtgcagtgcgtcactggttgcatggccgccctaagtcgtttcatatcgaggctgggagagaaggcgctacccttgtttaagctcctcaagcgcttggggccgtttacttggacggaggaagctgaaaatgcccttgcccagttgaaggcgtatctcagctctcctccagttctagtcgccccggagccaaatgagcccctactactttacttagcggcgaccccccaagtagttagtgcagcgttggttgtggagcgcgatgaagacaatcctcattctgcgcacccccactctgtgccgacttggcccgggagcaggcagggaggagaggcccccgagtcgaacggtggcctaaggcccctgacgaccggagtcggccctctgcccgcttgtcagacggtgctgggtgcccccgaccctcaggaaggccccgaggccactgagggaaggccgcacctatcgccctttggccccgaggctaaccctgtgctgactcgacccgggagagagcagggagaagaggcccccgagccgaacggaggccagaggcccctgacgaccggagttggccctttgcccgcttgtccgacgatgccaggtgcccccgaccctcaggacggccccgaggccactgagggaaggccgcccctttcatcctccgaccccgaggtcatcggtacagaagacaagtgcgccccgaaaggccacttaaacgaaaaacgccccagggatacggcccctagcgaagaggatcggccccgccgaaaggtgcagcggcctatctactttgttagtgaggccctccgggacgccaagacccgatacccacaggcccagaagatgctttacgctgttctgatggcctcgaggaaactgcgccattatttccaggcgcatcgggtcactgtggttacgtcttaccccctcggtcaaatcttgcataatcgagagggtacaggacgagtggtaaaatgggcaatcgagctttctgagttcgatctgcactttgaaccacgccacgctatcaagagccaggccctcgccgattttgtggcagagtggaccccggctccagagaccgtctcaatgcccgaggccagcacgaacccctcacagctgcctcaaaccgcccactgggtgatgcagttcgacggttctctgtctctccagggcgccgtcgatctggtccggcgatgcagagcgtgtcagttccacgccaagcaaatccatcagccggcccaggccctgcagatcataccactgtcatggccatttgctgtctgggggcttgatatcctggggccgttcaaacgggccccgggcgggtttgagtatctgtatgtcgcgatcgacaagttcactaagtggcccgaggcttatccggttgtcaagatcgataagcactctgctcttaaattcattaagggcatcacggcccgttttggagtgcctaaccgtattattacggataatggcacccaattcactagtgaactcttcggcgactactgcgaagacatgggcatcaagctctgcttcgcctcacctgcccaccccagaagcaatggccaagtggagcgcgccaatgcagaaatcctcaaaggccttaaaaccaagaccttcaatattctcaagaagcacggcgattcatggatcgaggagttgccagcggtgctctgggcaaaccgaaccacaccaagccgagcgacaggggaaacgcctttcttcctcgtctacggcgcagaagcggttctcccatctgagctcaccctgaggtctcctcgggccaccatgtactgcgaggctgatcaagatcagcttcgtagagatgacctcgactacttggaagagcgaaggcagcgcgcggccctccgagccgcgcgctaccagcagagcctacggcgctaccatcagcgccacgtccgggcccgatcactctgcgtcgacgacctcgtcctacgccgcgtccaaacgcgtgctggactgagtaagctctcaccaatgtgggagggtccgtatcgagtgatcggcgtcccccggccgggctccgtacgactggccacgggcgacggcactgagctgccaaacccgtggaacatcgaacaccttcgtcgcttctacccctga

SEQ ID NO: 13035 - DNA, 6084 bp, Oryza sativa
  Clone ID: PAT_MRT4530_19107C.1
atggccgagcaaggaaaagcgcacgacctctctccgagtgtgagcggcgacgacggggagccgaatccacgccgtcgagctcgtactcccccacctcctccgcgccaaagccctaagcagggggaggcgcttgagagggtcgacaaatccgtggcatcaccagtcgcaggtgatgcaggagaacggcgagatggggagcgtcgcctcctcgtctacggcgacggcagcacgcctcagggtgcgcttcaggctgctggcgcgctcctacgacacccgcctgtcgtccatgacccggagtctccagcccaacgatggctggaagacgtggccaacttggtcatgacggcacagcagcgcctgggtgctggtggacggtccgccaccaccaagacctccggcgccgctaccaccggctccgtgtcgtcaaggcggagggcgcggcgagcggcggcggctgcacgtcattcggctgccactccctcgtcgacaccctcgactcgggaggatcagcatggggagccggatgcccgcctcgacatcgagcgccggcgtaatagccggcgtactccccgtgcaacggagggcgcctcttcgtccagagtgtcacctcgacatggacgtgaggaccagccctccgtgcccccggctggtggtgtcggctgtagagcctttgtggcgagtcttcggaatgtccgttggcccccaaggttccggcccaccatcaccgagaagtacgatgggagcgtcaaccccaccgagtttctccaggtctatacgaccgggatcgaggccgctgggggtgacgacagggtcatggcgaacttctttcccatggccctaaaaggacaggcgcggggttggctaatgaacctgccacccgcgtcggtccactcctgggaagatttgtgccaacagttcaccatgaacttccaaggcacatatccgcgcccaggcgaagaagcggacttgcatgcagtacagcgaggcgatgatgagtcgcttcgctcgtacattcagcggttttgccaagtccgcaatactataccatgcatccctgcacacgcggtgatctacgcgttcagggggggcgtgcggcacaaccgcatgctcgaaaagatcgcttccaaagagccccagactaccgcggagctttttcagctcgcggaccgagtggctcgtaaggaggaagcgtggacatggaactcctccggttccggagtggcagcttcggccgcccccggatccgccgctcagacagggcggcgtgacaggaggaggaagaagaggtcggaccgttccggcgacgagggtcatgtcctcgccgtcgagggcgctccgcgggccactcgaaaggggaggcctgcgagcgacaaaaagaaagaggctggtactcccagcagggagcgccccgccggcaggtggtgctccgtccacaacacctccctccacgatctcgcggactgtcgtgcagtcaaaaacctggctgagcgaacgaggaagtgggaggaggacaggaggcaggaacgccgtgagggcaagtccccggcggttccttccggcaaacggcgaagtgaggccaagcagaaggcccccgctgttgacatcgatgatggtgatgatgacctaggtttccaagaacctggggccaccattgccaccgtcgatggaggagcgtgtgctcacgtctctcgccggagcttcaaggctatgaagcgagagcttctggccatggcccctactcatgaggcgatgcgtcgggcgcggtggtcggaggttgctctcactttcgaccagaccgaccacccaccgtgcattgcccggggagggcaggttgcgatggtggtttcccccaccatctgcaacgtgaagttgggacgtgtcctcatagatggaggagcggctctcaacatcctttcccccgcggcctttgatgctatcaaggccccggggatggtgctccgaccgtcccagccgattatcggtgtgacgccggggcacacgtggccattaggtcacatcgacctaccggtcaccttcggtggacccgccaacttccgcacggagcgggtgagcttcgatgtggcggacctcagtctgccctacaacgcggtcctagggaggcccgcgttggtgaagttcatggcggcggtccactacgcctacctccagatgaagatgccgggccccggtggccccatctctgtccatggcgaccttaaagtcgcgctcgcttgcatggagcagcgcgccgaccgcctcgctgctgcgtccaagcccgagggtggtgacgagaggcttggcccctctgcccccaccgccccgaggcagcggatggccacatgcgacgaggtcccggaagacgcgctcgtctccttcctgcgggcaaacgctgatgtcttcgcatggagaccagcggacatgcccggggtccccagggaggtgattgagcaccgtctcgccgtgcggccgggcgcaaggccggtccggcagaaagtgcggcggcaggccccggaacgtcaagccttcatccgcgaggaggtggcgagacttctggaggccggattcatccgtgaagtcatccatccggagtggctggcgaacccggtggtcgttcccaaggcgaacggcaagcttcggatgtgcatcgactacaccgaccttaacaaggcatgtcctaaggatccttaccccctgcctcgcatagatcagatcgtcgactccactgcggggtgcgaccttttgtgttttctagatgcatactctggttaccatcagattcgcatggctagggaggatgaggaaaaaactgcgttcattacccccgtaggaacctattgttatacatcaatgcccttcgggttaaagaatgcaggtcctacttttcagcgtactactcgaatttctttgggtagccaaataggacgtaatgttgaggcgtatgtcgatgacttggttgtaaaaacgcgcaaccaagagaccttactctcagatctagcggaaacttttgggaacctccgctccgcccgcataaaactgaaccccgataagtgcgtgtttggtgtacctgcgggcaagcttctcgggtttttggtctctgcccgaggcattgaggccaaccccgagaagatacgagctatagagcggatccgcccccccagcaaacttagggatgtgcagtgcgtcactggttgcatggccgccctaagtcgtttcatatcaaggctgggagagaaggcgctgcccttgtttaagctcctcaagcgctcagggccgtttacttggacggaggaagctgaaaatgccctcgcccagttgaaggcgtatctcagctctcctccagttctagtcgccccggagccaaatgagcccctgctactttacttagcggcgaccccccaagtagttagtgcagcgttggttgtggagcgcgatgaggacaatcctcattctgcgcacccccactctgtgccgacttggcccgggagcaggcagggaggagaggcccccgagtcgaacggtggcctaaggcccccgacgaccggagtcggccctctgcccgcttgtcagacggtgctaggtgcccccgaccctcaggaaggccccgaggccactgcgggaaggccgcacttaacgccctttgaccccgaggctaaccctgtgctgactcgacccgggaaagagcagggagaagaggcccccgagccgaacggaggccagaggcccctgacgaccggagttggccctttgcccgcttgtccgacgatgccaggagcccccgacccccaggacggccccgaggccactgagggaaggccgcccctttcatcctccgaccccgaggtcatcggcacagaagacgagtgcgccccgaaaggccacttgaacgaaaaacgccccgggggtacggcccctagcgaagaggatcggccccgccgaaaggtgcagcggcctgtctactttgttagtgaggccctccgggacgccaagacccgatacccgcaggcccagaagatgctttacgctattctgatggcctcgaggaaactgcgccattatttccaggcgcatcgggtcactgtggttacgtcttaccccctcggtcaaatcttgcataatcgagagggtacaggacgagtggtaaaatgggcaatcgagctttctgagttcgatctgcactttgaaccacgccacgctatcaagagccaggccctcgccgattttgtggcagagtggaccccggctccagagaccgtctcaatacccgaggccagcacgaacccctctcagctgcctcacaccgcccactgggtgatgcagttcgacggttctctgtctctccagggcgccggtgcaggggtcacgttgacctctccaaacggagacgtcctcagatacttggtccgtctcgactttcgagcgactaacaatatggcagagtacgagggactccttgccggactcagagtggcagctggactggggatccgccgcctcttggtattaggcgactctcagctggttgttaaccaagtctgtaaggagtaccggtgctctgacccgcagatggacgcctacgtacgccaagtgcggcgtatggagcgccattttgacgggatagagcttcggcatgtgcccagacgggataacatggttgccgacgaactctcacggctcgcgtcctcgcgagcccagaccccaccgggcgcctttgaagaaaggcttacccagccgtcggcgcgacccgatcccttaggggagacggatgcgcctgaccggcccccgaggcccgtcggagtccaggcctcgggacccgaagggagcgctccaagctcccttagattgattgcttggatctctgagatccaaacatacctcacagataagactctacctgaggaccgcgaagggagtgaacgcgtacaacgcatttccaaacgctatgtgctggtagaagggaccctctatcggcgcgcggctaacggaatcctcctgaagtgcattcctcaggaacaaggcgttgagcttcttgctgacatccatgagggcgagtgcggagcccattccgcctcgcgtaccctggttggcaaggcctttcgtcaaggattttattggccgacggctctcaatgacgcagttgatctggtccggcgatgcagagcgtgtcagttccacgccaagcaaatccatcagccggcccaggccctgcagatcataccgctgtcatggccatttgctgtctgggggcttgatatcctgggaccgttcaaacgggccccgggcgggtttgagtatctgtatgttgcgatcgacaagttcactaagtggcccgaggcttatccggttgtcaagatcgataagcactctgctcttaaattcattaagggcatcacggcccgttttggagtgcctaaccgtattattacggataatggcacccaattcactagtgaactcttcggcgactactgcgaagacatgggcatcaagctctgcttcgcctcacctgcccaccccagaagcaatggccaagtggagcgcgccaatgcagaaatccttaaaggcctcaaaaccaagaccttcaacattctcaagaagcacggcgattcatggatcgaggagttgccagcggtgctctgggcgaaccgaaccacaccaagccgagcgaccggggaaacgcctttcttcctcgtctacggcgcagaagcggttctcccatccgagctcaccctgaggtctcctcgggccaccatgtactgcgaggctgatcaagatcagcttcgtagagatgacctcgactacttggaagagcgaaggcggcgcgcggccctccgagctgcgcgctaccagcagagcctgcggcgctaccatcagcgccacgtccgggcccgatcactctgcgtcgacgacctcgtcctacgccgcgtccaaacgcgtgctggattgagcaagctctcaccaatgtgggagggtccgtatcgagtgatcggtgtcccccggccgggctcggtacggctggccacgggcgacggcacggagctgccaaacccgtggaacatcgaacaccttcgtcgcttctacccctga

SEQ ID NO: 13036 - DNA, 953 bp, Oryza sativa
  Clone ID: PAT_MRT4530_19108C.1
cacgcgtccgggcatgtacatttgaatatgtcaagaggacatttagtgtgttactactatcattttgtgatgcctttgcatgatgaattgatgaacatgttggcatgaactatggcaaaaaatgtgggagttaaaagagaggcaaatgtggggttgaggtgtcatttgagaggcacaaatgtaaggaaactggcaagattttggagacacaagacaaagaaacatagaagggaaaatgtggggagattagtaataaattggatgtggcagttagcaggtaaagagataggatcaacaaatgtatgaaaatgctgaagactcctgatccaaatgctgcggcaagctctttaggatggtaacagcaaagaagctgaagggcaaggatgaggctgtactgttgagctcttggcaactcaagtaaaaggggtagaaggctcggatgattcaggtgctgctgttcattgtcggaataaacactgcgccaactggtcttcgggccttgtcttctggctctgatgcaaggatcgtacgccgttgttacactgagagtttccattatactggctgccatccccgcaatgaagcatgtccttatgagggggaaaagggtcgggtgatccaggcgctgttgctgctcttcattagcgggattaacacgctgtgccaattgttctttggatcttgtctcctggctctgatggaatggttgtaccctgttgtagatctgttattacaaataatctgggattcataaagttctttgttaggcaaggttgcatgcttggattggagtagttcctggagagttttggtgcctcgcctgaagtgtttcctgagatttgctttgcttggaaatgaatgtaatctttttttattggcggtttttgttggtttgtaacttactaaatacatgtattgctcatctggtaattcagactcaagtgagttaacct

SEQ ID NO: 13037 - DNA, 753 bp, Oryza sativa
  Clone ID: PAT_MRT4530_19109C.1
atggcgttcggggcccaattaagagcgaccggacggatcggcctagaaccaaaacgagcagatctagttccagttcattcattcgagagggcgcacacgcatgtggtggcgtatcaaaagcgtggatcggatcgatgcatcgacgcgcgcatgagcgtctcgtcgatcggctcgtcgtcgctggcgtgccacggtgccagtgctgttggctatgggctcatgcatggccagagcctttgggagtccctgtttatgagtacaagccaaggaaaggtagacgataaaggcaaaaaacctgtgatgcagtctcggctcagttctccggacaaccatgaaaggaatcacactacgaccatgggatggacccccccgccgatgggctgggttaaagcaaatgtggatggctccttcattcaatgttcggaagctgctagtgctggaattgtcattcgtgaccacactggctcagtactgctcacttcctggagaattatcagccattgtggatcagcggaagaggcggaagcgactgcatgctgggaaggggtgaatctcgcagctgagtgggtgaaaaaaccgttaattcttgagacagactgtgccaacttgaagattagaagggaatgcaatagagtagcccatgatttagctaaatttgccatgcgtacgaaccattcagctgtttggcgtatgcaggctccttcttgtgtttttggggctctggcaaatgattgtaatcacattgatgagtaa

SEQ ID NO: 13038 - DNA, 486 bp, Oryza sativa
  Clone ID: PAT_MRT4530_1910C.1
atggagtacctctctgatgaaaccggctttgagaagcttgtcgagttcttctcgtatggcttgttttcgatctggtgcaaatctccgcagtttttgctttactggcttggcatcgggtcgcaccatgagtttgtgctcaatcacctccctgggtacccccagcatgtcggacggctgccaagagaacacgtcagcattgtcgcggaggaaggtgatgagcgcgagttcctatttctcgcctacgacatcaaaggtgtcaactcgcttcgtgggatcctaatcgcgtccaaggtgctggcgaagagaaggttgattgagctgccgccgtcgatcagaactcgtgcgaccttgatattacgaatagtgggttcgaccacgatcggatattgccctgggatgacagcagtcctggggtggtcctcttctgagaattctatcttctgctcggaccacttcatcttgggcgcagccccctgccacatctaa

SEQ ID NO: 13039 - DNA, 166 bp, Oryza sativa
  Clone ID: PAT_MRT4530_19110C.1
atacatctacttactttataggcaacggggcagtaaagcccttggggtgatactaaccatagatacaggcttttacaaaaaattaatcaggaagctggatggtactcttagagtatttacagttttaaaccacaatctcaaaattttaggtccaaaaattaaaatc

SEQ ID NO: 13040 - DNA, 3431 bp, Oryza sativa
  Clone ID: PAT_MRT4530_19111C.1
atgcttgaggcaaagggatttgcaaagccaaactcttcaaataagtatgggatgcacaaatcttctggtggtacatattcaaaacctgatgcaagagtaaagataattcctgcagaagaaattacatatgtacgtcatggaaaactatgtggtaaaactgttggctcagatggattacagaaaaggcaacgcagacgaagtgtcaccccccctccgagttcacgtaaagtgtctcttgtgacacctacagtggttaatcagaggcctacaccaccagtctcaccagctgcctcgcgtatctctcctaaccggcctgggacagctaaaaatgttcactcagtcgttacctcatgtatctctccaaacttgaccgggaaagctgaaaatggtcactcacttgctacctcaggtatctctcctaactgtcctggggcagttaaaaagattcactcacttgctacctcacctatctctcctaactggcctggggcagttaaaaagattcactcacttgctacctcacctatctctcctatgtggcctgagacagctggaaatggtcactcacttgttgggggctatatcacaaattcctttacaacacaaatagcttatctttcacagcgtccatcaccattctgcagggctgttctttcacagccttctgggacacctcttggtactgatgccactgctcccaagaatcttagcagatcgggtaatagagaagcatatgtcaaaagttgcagttcacgcaccagaaccttctcatctgcgcatgcacattcaactgtagttcctcctggtacaaatgcagaaccttctgctgaaagtttttgtgcgcctggcaatgagaagtcatcccctatgagctgtaagttgggcacgttacaatgtcaaggcacaagaactgctgtggcgccttcagtgcaaaaaaagctaaccatggagcctgcattaccgagcccaaaatctgtgcttagtgaaaagtccaacgaggcatatcctgatactgctccaaggccttcttccagaccaaatttatttgatacaaaatgcaaggtgggctcaccgcaaagtgaaacaatcattcctccatcacaaagtccacagtctacatctcatgcacgatgtgttgaaccgcctgatgattttgaagcagttccatctactaagagccatataattacagaaaaacaaatgaaccaggaggcaccaatcaattgtaatgtatcttcaggtatcccagtaattttacatacaaagctgcacaagaagcattaccaaccagaagcctgctggaagggtaaatttgaagtgactggagagctaacacatatttgtgatggacttgaagcccatttccctttcgaaatttctgcccaagtatatgaggcttcaaaacaaatgcctgaaatattaaagctagaggctagacctctttctcatctgtggccgaaaacattcaagatgaaacctccagaaggacaagatattggactgtgcttcattagctctcttcaaagaccaaatgggagttctgaccatctcctgaaaaatatttcttcgcatattgggttacgaaccaagattggtgctactgagttgctgatattttcatccaagttacttacccaagaatatcaaagaaaatgtgataagttttacttttggggtgttttccgggcgctgcacagatcctataatcaaacaagtatgtcatttgatgcaacaggatgcaaagagattgagaggcacaaaaataaggaaactggcaagattttggagacacaagacaaaaaaacagagaaggaaaaatgtggggagattggtaataaattggattcggcagttagcagagaaagagataggatcaacgaatgcatgagaatgctgactcctgatccaaatgctgcggcaagctcttcagattttacttgtcaatctgctcctagagttcctgctggttctgaccttgttttggacacacctcccgggtttcctcatgatgaccctccaggcctcacaaaagcccattgtctcctccatacaggagaaaccactgagccttacatagactcatctccaagccttaatttgggcgtacctccagggctttctcttgatatccctcctggctttatgaaagctcattatctccctcatacaggagaaactactgagtctcacataaacccttctcacagtcacagcctttcttgggacacccctctaggattttctcttgatgttcctccgggatttactaaagcccatcgtctacccatagtatctactgctggatctgaaactgttgtttctgaaaagaaacccctcattaagttcactctgaatgttccaagggttgcacaaacagaagccattcctggatttattaaactgcttgcagtgaaacaagagcctgggttgcctgcaatctgtatggccacagagaaggcatcaactggaaaagaagatgaaattaaaagtaagcaggatgagctgatattagcagctgtactagtgcaggtagtaacagaacgggacgaaagctcagaggagcgtttgtttccaaagaccaggcttctttctgatattctgagctcttcggcggcttctaatgcgaacacaaatgcttcacccaagcctacaagcaagtttcatgatgcaccagacaaccaaatacaggacagaaagagagatcacccagaatcacccgagccttctcctgcagatacactcaaaaggctcagggtgaatgggcgcatagctctaaacagagtcatggatcgtcgaacattgagttcccaaccaatctcaagggaaggattagttgatatacaagtgtcaggtcctacagtactgacgagaagcaaatgctgtagttggcaacatttcaggtgatgaatgtgcatgttttgtatgcagcgaagagttcccaacggggtgatttgtggcgctccatatcatttgttttaagcaacaggaagcggcaccttttcgttttaagcaacacttgttaacaaaagtgcgcagctttgggtttcttgcgaggtgtagctaacgagtaacctggtaccaccaaatatcaacgaaaccatttgctatatcatttaatagtattattatccccctgtgccaattgttctttggatcttgtctcctggctttaatggaatggttgtaccctgttgtagatcttctgttattacaaataatctgggattcataaagttctttcttaggcaaggttgcatgcttggattggagtagttcctgaaaagttttggtgcctcgcctaaagtgtttcctgaaatttgctttgcttggaaatcaatgtaatctttttttattggcggtttttgttggtttgtttcttactaaatacatgtattgctcatctggtaattcagactcaagtgagttagcct

SEQ ID NO: 13041 - DNA, 179 bp, Oryza sativa
  Clone ID: PAT_MRT4530_19112C.1
aacctcctcaatcaaaaaaaatttaagaagattctttacttcgcgcaacagcaattacctattcatactcaaacatctatctaatatccacttataataacatttttaacaccttataccctttaataccatgacccaataaaccaccttcttacacaaatccctaccacccatttttc

SEQ ID NO: 13042 - DNA, 315 bp, Oryza sativa
  Clone ID: PAT_MRT4530_19113C.1
atggcgctgtccgggtttcttgtgctcgcgccgcgcgggttcgtggaatcacggtgggattgcggcgtcacgagggaaaatataggtgggggcgcgcaggtgcaaagcggcccgtgggcggtgggctctctcgcatcggcaaaaaacgggtggcggctacgtcccttgtcccaggtggcccaactgaacggggagctagttttggacgagaaattgttcgagaggcttgggctcgcgataagatgggccgagacaccagtgctgcaagccggccacagccaggggccaatagcccactactgcggggaccgctaa

SEQ ID NO: 13043 - DNA, 176 bp, Oryza sativa
  Clone ID: PAT_MRT4530_19114C.1
aggttagtaggatgtgttacaccctgtactaaattaacttattctgtaacagaggaagtaatacactggtaaagggcaggatgttggattgggtttttatgaacttgtataaattaatcttgatcttttagtattccgtatttgtttactactggcctgcatgtgagtcagtccct

SEQ ID NO: 13044 - DNA, 285 bp, Oryza sativa
  Clone ID: PAT_MRT4530_19115C.1
atggcaatttcattgtatgtagagcagaaaaagtttacatctcctaagtacaattgtttcatagggactatacattgttattggtgccaaggatctatttgtaaatatctttttaacaaatttgtcctcaacgccaatgacattgatgtcattcccttcttcgtattagtgacttccatgagggacaaggaggacaacgtaaatgtcactggcgctgtcatattgaaccatggcaccaagagaaaatggtatattttcctaataagtttttcaaaggatgagtaa

SEQ ID NO: 13045 - DNA, 249 bp, Oryza sativa
  Clone ID: PAT_MRT4530_19116C.1
atggcgtggcggtggcggccatcgcacttggttctcatggcaagggccgcctacctcatcttcctcaagttccgccgcatgcttgacctcgccaccgccgacctcgccgccaccgatgaagccttctcctccccttcctccgacccccccccacccccgcgcacgcgctcctgggataggcttcgtgaagtggtgatcgggactgagctacgtcagaaattcagaatggaggtggaggactttctctaa

SEQ ID NO: 13046 - DNA, 265 bp, Oryza sativa
  Clone ID: PAT_MRT4530_19117C.1
aagcaaatgaagggacatccccttaagggatcaaaatagttcccccatttacagtggtagtagtactactagtattacaatcggtagaagtgattctagctgtagttttatgatttctactaccagaagtaccagtagttaaggtggtagtataaattagatatcatccattagcttagataagatgaacggtctaaattgattctaccaccagtagaatcaattgtagaacacatagaaagagagtaattaacctgcctgatgc

SEQ ID NO: 13047 - DNA, 663 bp, Oryza sativa
  Clone ID: PAT_MRT4530_19118C.1
ggtgggccatttcccaccacctcccgcacctccttcatccagtagttagcctagaagggagggccctccagatcccccttaacccgctccaaaatatcctcacccgctaaacccacctccactctcctccacccatggccgccgcggccatggccatctccccttccatccacctccacctccacctccacctccaccacccgcctcgcctccaccgcctcctccacctctccaccacctccccctacccatggctctccgcctggccgaccgcccaccgccgccgcgtccccctccgccgccccgcctccgcgctcgacctccgcccggagccctccccttcctccgactccgacgacgacgccgccttcggcaccagccgctcctcctcccgctccgccatgtccctcatcctctcccgcctccgcaattccggctactcctactcccccccggagctcccgccgcgcccgccgaggggctcggtggaggacgtgttccgcgtcgacgacggggtggtgccgaacgcgcggggagggttcgacgacgacgcggagtcggcgctggtggacgcgcggttcccgtgggagctgccgatgccgccgcccgaggcggggcccagggcggcgaggtcgaaggcgtggatggcggagctgacgctcc

SEQ ID NO: 13048 - DNA, 2119 bp, Oryza sativa
  Clone ID: PAT_MRT4530_19119C.1
ccacgcgtccgcggacgcgtgggtagctcacttccaagagcctcgtgacacacaccactcactatactggcccctcctcctcctcggagatcgagccggccagccatggcggcggcgacggtggaggtgacgtgggacgtggagtacgtactgtgggcgccggactgccagcagcgggtgatgatcgggataaacggcaggttcccggggcccaacatcaccgcgcgcgccggcgacgtgatcagcgtcaccatgaacaacaagatgcacaccgagggcgtcgtcatccactggcacggcatcagacagtttggcacgccgtgggcggacgggacggcatcgatatcccagtgcgcagtgaacccgggcgagacgttcgtctacaagttcgtcgccgacaagccgggcacctacttctaccacggccacttcgggatgcagcgcgccgcgggcctgtacggttccctcatcgtcctcgactcgccggagcagcccgagccgttccgccaccagtacgacgacggcggcgagctccccatgatgctcctcagcgactggtggcaccagaacgtctacgcccaggccgccggactcgacggcaaggacaggcacttcgagtggatcggcgagccccagacgatcttgatcaatgggagaggacagttcgagtgcacgctggggccagcgaggaagagctttgagaagctcctcaacgagaacgtggagacctgcgtcgacgaccagaagatgtgcagcgaccaggagaagtgcctgaggaggagcgagtgcgggccgtactgccccaggagccagtgcgcccctgtcgtgttcaatgtcgagcaggggaagacttaccgccttaggatcgccagcaccacctccctttctctcctcaacgtcaagattcaagggcacaagatgacggtggtggaggccgacgggaaccacgtggagccgtttgtggtcgacgacatcgacatttactccggcgagagctactccgtcttcttcaaggccgaccagaagccggcgagctactggatctccgtcggcgtcagggggcgccaccccaagacggtgccggcgctcgccatcctcagctacggcaacggcaacgcggcgccgccgccgctccagctgcccgccggcgagccccccgtgacgccggcgtggaacgacacacagcgcagcaaggccttcacctacagcatcagggcgcgcaaggacaccaaccggccgccgccggcggccgccgaccggcagatcgtcctgctcaacacgcagaacctcatggacgggcgctacaggtggtccatcaacaacgtgtccctgacgctgccggcgacgccgtacctgggcgccttccaccacggcctccaggacagcgcgttcgacgcgtccggcgagccgccggcggcgttcccggaggactacgacgtgatgaggccgccggcgaacaacgcgacgacggcgagcgacagggtgttccggctgcgacacggcggcgtggtggacgtggtgctccagaacgccaacatgctgagggaggaggtgagcgagacgcacccgtggcacctccacggccacgacttctgggtgctcggctacggcgacggccggtacgacccggcggcgcacgcggcggggctcaacgccgccgacccgccgctgcggaacacggcggtggtcttcccgcacgggtggacggcgcttcggttcgtcgccaacaacaccggcgcgtgggcgttccactgccacatcgagccgcacctccacatgggcatgggcgtcgtcttcgtcgagggggaggacaggatgcacgagctcgacgtgcccaaggacgccatggcgtgcggcctcgtcgccaggacggccgccacgccgctcaccccggcaacgccgctgcctccgtcgccggcgccggcgccatgagctcctcctcagcatgcccattccagttaaatgccatttttgccgtaacattgtgattggccactgcgaaataagatcactcactgatgaagagtggtttagattgtttggtcatatgcatgctcaataatctcatgtaactaagaaataatgtccatgtttgctaattaagatgattgtgtaaaaa

SEQ ID NO: 13049 - DNA, 4191 bp, Oryza sativa
  Clone ID: PAT_MRT4530_1911C.1
atggtgcactgctttgaattgtgttatgcggagggtattgtcacaatctctattcggtggtacacctctggccagagtaaaactattcgaatagccgtgcccgcgtatttattgaatgccatttatacaaatgagactatattatgccatcctttgttatcccctgcacttgcatatttgctgcatggcttgttgagtatgtcatatactctccttgcaatcattcatcagaggaggagttctaaagtgatgctgaagatgccgcgcttcaagcctgagtacttgttcggtattgagggatttgtccaagagctgcgtgcgatgtcctttaccataggattcgggactgcccctttgtatgcccagattccacatgatcgtgatgaagagaagtgccgtgtcaaggtcaccttgaacagtgatcgtgaagatatcccatcggtgatgttcaaggctggagggggaagctatccacatgcttgtcaggaggtggcaaggatcgccataggagagctccgcggccgttacaatgatctgttggccgacactgagtatcgctaccatcctcgtcagccacagggaagtgaccgtgcgagctatgttgatcctgaaggaattgagaatgatgctaccacaagacatttggtcgagatgctgtgggccatggatgagtcccgcgttgaaatcgtgtcagctgctcaagctcgtgaagaccggaaccgtggtaagatctgcaagctagagggcaaggttgatcgtctggagaaggaattggccgaattgaagggagaagcgccaccacagaaggccagggttcgtcttaccgctaggaagagagctctttttgttccccgctaccagttggcgcccaaggttcatgtggtgtcaagagaagctgtcccagtggatcctcctgtcgttaatttaagcgatgatgaggaagaagattcaaagcgcacccattcaaagaaccaacagaaccaggggaacaatcatgctcctcctcagaacaagtttgcagaatttcttcgcgtgaggccacctactttttctagcactaccaatctggttgaggccggtgattggctgcacaccatagaaaagaagttggacctgcttcagtgcactgaccaagaaaaagtctcctttgcttcacatcagcttcatggccctgcctttgagtggtgggatcatttccgtctcaacagggctactgctgaaccaatcacttggcttgagttcactgctgctttcaggaagactcatgtaccatcgagagtggtgtctctcaagaagaaggagttcagggcgctcactcagggatcccgttctgtcaccgagtacatgcatgaattcaatcgtctggcccgttatgctccgaaggatgtgcgtacaaatgaagagcatcaagagaagttcttggaagggttgaatgatgagctttcttacccgctgatgactggagattattctgatttccaggagttgcgtcagttctacaacaacaataacaaccgcaaccaagctccacgtcctgttgcaactccagtccagcaccagcctgtcaagagggagcaagaaaacaagccaggggtgtgcttcaactgtggtgaaccaggtcattattctgacaagtgtccgaagcctcgacgtgtgaagaccattcctgtgcagaataactccaatgcaccaacgtcaaaggctcatgtcaatcatgttgctgttgcagaagcccaaggtgctacagatgtgattttggagattcaaggtgttccatttccggccaaccttattctgttagaatccaaagaccttgatgtcatcctagggacggactggttagacagatataaacgtgtgattgactatgccaatagaaaagtaactctcaccagcaatgatggtcaagttgtaactgttcatgcattgccttctgaacctttaaggtcaagtctgaaccaaataactttggaagagattcccatagtacgggactacccggatgtgttcccggatgacttacctgcaaaggtcaagagacaagtagatgatttgcttcagaaaggatacattcgaccaagttcatctccatggggagctccagtcatttttgtggagaaaaaagatcatacccagaggatgtgtgtggattatcgtgcactaaatgatgtgaccatcaagaacaagtaccctctgcctagaattgatgatttgtttgatcaacttaaaggtgccaccgttttctccaagattgatcttcgatcagggtatcaccagttgaggattaaagacgaagatatacctaagacgtcttttaccactcggtatgggttatttgaatgtactgtcatgtctttcggacttactaatgcccctgctttcttcatgaacctgatgaataaggtgtttatggagtacctggacaagttcatggtggtctttattgatgacattcttatttactcccaaaccaaagaagagcatgaagaacatcttcgccttgcactagagaagctacgagaacatcaactgtatgtcaagtttagcaaatgcgaattttggttgtctgcagtaaagtttcttgggcacgtcatctcagccggaggagttgccgtcgaccctagctattaccggaggttcatagagaatttttccaagattgcaaagcccatgacacgcctgcttcagaaagacgtgaagtacaagtggtcagaagaatgtgagcagagttttcaagagctgaagagtcgcttaatatcagcgcccattctgattttgccagatccaaagaagggtttccaagtgtattgcgatgcatctaagcttgggttaggttgtgttctaatgcaagatgggaatgtggttgcctatgcatctcatcagttacgtccccatgagaagaattatcctacccatgatcttgagttagccgcagtgattcatgcattgaagatttggcgtcactatctctttggtactcgtacggaggtgtacacagatcacaagagtttgaagtatatcttcatccagccagatctgaacatgagacagcggagatggttggaattaattaaggattatgacatgggaattcattatcaccctggaaaggctaatgatgtagcagatgttctcagtaggaaaggctattgcaatgctacggaaggacgacagttgccgtgggagttatgcaaggaatttgaaaggctgaatttgggaattgtcagtagaggttttgttgtagctttagaagcgaagcccactctcatcgatcaggttagagaagctcaaatcaatgatcttaatatccaagagattaagaagaatatgagaagaggaaaggctatcggttatttggaagatgagcaaggaactgtatggttgggtgagagaatttgtgtcccagacaacaaggagttgaaagatacaatcttgaaggaagcccatgacactttatactccattcaccctggtagtaccaagatgtaccaagatctcaaggagaaattttggtgggcaagtatgaagcatgagatagcagagtatgtagctgtgtgtgatgtatgtcaacgagtcaaggcagaacatcagaaacccgcaggagaacgtcaggtttttgggactgatattctgagggaagcagaagagaaagtaaagatcattcaagaaagattgcgtatagcccagtctcgtcataagagctatgctgacaatcgccgcagggatttaagttttgaggaaggagatcatctgtaccttcgtgtcatgcctcttcggggagctcatcgttttcgcaccaaagggaaattggcaccgtgttttgtgggaccatataagattatcagtagaagaggtgaggtcgcctatcagttggagttacctcaatccttggcaggtgttcataatgtgttccatgtgtcacagctaaaaaagtgtttgagggtacccactgaagaagctaatcctgagcagatagaaattcaggaggatctgacttatgttgagaaaccaatccgtatcttggagacagatgagaaaagaaccaggaatcgagttatccgtttctgtaaggtccaatggagtaatcactcagaagaagaagctacctgggaacgagaagatgaattaaagtcagctcatccgcatcttttcgtcatctcttccgaatctcgaggacaagattctgtttaa

SEQ ID NO: 13050 - DNA, 255 bp, Oryza sativa
  Clone ID: PAT_MRT4530_19120C.1
atggcgcgaaagggaagcaagaggaaatggcgccagattttgccttttggcacggagggatacgggcatacggctggagcaaatgcagaaacggagaatcggcgatgccacatgggcccagctcttctcgtttcagctggaagccagctcctcgtccatagcaatggtgagaggacagctacggcatcagaggccaagttgacaacgcaccaatgtgatgtgacgctcgtttactcggagccttctttttggtga

SEQ ID NO: 13051 - DNA, 246 bp, Oryza sativa
  Clone ID: PAT_MRT4530_19121C.1
tcataggcggccgcccttttttttttttttttttttttttttttttttttttttttttttttttttttttttttttttttaacagcccatgagcgtttattattttttacctggtaaatgtggcaaaggcaccacccggatgaaacatctcacgttaaaaaagggagaaacggattagaaagagtttttttaacgccaggggaaacaccgtcctcagggctttctactactctgcggggggcgacg

SEQ ID NO: 13052 - DNA, 440 bp, Oryza sativa
  unsure (1)..(440): unsure at all n locations
  Clone ID: PAT_MRT4530_19122C.1
atttggtaggcgtttcatcaaggtgcggccgtgtttgcatttcctgtctatatacatggcatgcatgcaaaaatggtgttattcattcctttccggtgcgcctccttcaacggggcaacttacacaaacttgtattcccnccaaccccngccggttaattaaccaannttttggggggtttaaaggaaaantaagggcttggtttaaaaaggccccttggttntccttttggaaaaaaantttgccccnnnanananananananananananaaaaanaaccttccccaaaaggggggggggggccccccggggttaaccccccaaaattttccnnccccccttaattaaanttgnaaagttccnntttattttaaacaaaaattttccaaccttgggggccccggtcccgnttttttttaaccaaaaccgnttcccgt

SEQ ID NO: 13053 - DNA, 552 bp, Oryza sativa
  unsure (1)..(552): unsure at all n locations
  Clone ID: PAT_MRT4530_19123C.1
atggccatggccgacctggagttggagaaggttgcgagcttcttgctggcggcgctgctgccgctcgtgctcttcaagctggcggcggcgaagcgcggtggtggcgatggcggcatgaggctgccgcctgggccgtggcggctgccggtgatcggcaacctgcaccagatcatggcgggtgggcagctcgtgcaccgcaccatggccggcctggcgagggggctcggcgacgcgccgctgctgtcgctcaggctcggcgaggtccccatcgtcgtggcctcgtcggccgacgccgcgagggagatcatgagcaggcacgacgccaagttcgccacacggccgtggagccccaccgtgcgggtccagatggtcgacggcgagggcctcgcgttcgcgccctacggcgcgctgtggcggcagctgcgcaagatcaccatggtggagctgctcagcccgcgccgcgtcaggtcgttccgccgcgtgcgggagggggggtcccgnncnncttcnncnntcgccgtcgcccccggcgggcgacgcggcggccccggc

SEQ ID NO: 13054 - DNA, 1869 bp, Oryza sativa
  Clone ID: PAT_MRT4530_19124C.1
atgcctccctcgccgcctcccctcctcctcctcctcgcggtcctcctcgcagccgcgccggcggcggcgcagtcggcgacgccccgggaggacgacgtgcggtgcctcaaggaggtgaaggccgagctccgggacccggacgggcgcctctcggcgtggagcttcggcaacacctcggcgggagccctgtgcctgctgtcgggggtgtcgtgctggaacccgcaggagtcgcgcatcatcggcctctcgctctccgggttcggcctccagggcgggatcccctccgcgctgcagttctgcagcgccgccaccacgctcgacctctccaacaacgcgctggtgggggttatcccgcccgcgctctgcgactggatcccgttcgtcgtcaacctcgacctctccgggaaccagctctccggccagctccccagcgagctcgccaactgccgcttcctcaactcgctcaagctctccggcaactccttctccggccagatccccgactccctcggccgcctcgaccgcctcaagtcgctcgacctctccgacaacaggctcgacggccagatcccgccccagctcgccacgttcgggaaggactccttcgccggtaacaagggcctgtgcggccgccccgtgtcctcgcgatgcggccgcgcgctgagcggcgcgggcctcggcatcgtcatcgccgcgggggtgttcggagccgccgcgtcgctgctcctcgccttcttcttctggcgttgcaccgggaagagcaagggcggtcgccgccgccgccgcggagggagcgagtccggcggcggctccgcggaggacgggagctggtgggcggagcggctgcgggcggcgcacaaccggctggcgcccgtctcgctgttccagaagccgatcgtcaaggtcaagctcgccgacctgatggcggccacccaggacttcagcacgagccacatcgtggtggccgggagctcgcgggcggggacggcgtaccgagccgtgctgcgcgacggctccgctctgacggtgaagcggctccactcgtgcccgttgtcggagaaggcgttccgggcagagatgggacgggttgggcagctgcggcaccctaacatcgtgccgctgctggggttctgtgtcgttgaggatgagcggctgcttgtgtacaagcatatggagagtggagctctttcttcggtgatgaaggagccaggggaggcaccgctggattgggcgacacggcttcggattgctgtcggggcggcacgcggtcttgcttggctgcaccatgggttccaagttccgcaaattcaccagaatttgagctcaagtgcagtgcttctggatgaggactatgaagctcggttcacagatgttgggcttacaaggctggtccgaatggcaccaggcgagggtggagatacaagccccttcctgaatggggacttcggggagtatgggtatgtcgccccagagtgtgctagcaatccagttgctaccatgaagggtgatgtgtatgcatttggtgtgatactgctcgagctcgtgagtgggcaggaggctgccactgtaacgggtgatgcggcaggtgaaggattcaaggggacattggtggattgggtaaatcagcttaaggcctccggccggatcggtgatgctgttcataaatcattgcgtgggaatggccatgattcagagattgatgagtttgtgaagatagcttttgcgtgtatcatggttcacccgagggagaggttctcaatgtaccgggtttaccactctctgaagagcattggacagggtcgtgatgtctcagagcaatttgatgagttcccgctggcctataacaaggatgaatcagataccatgtaa

SEQ ID NO: 13055 - DNA, 1043 bp, Oryza sativa
  Clone ID: PAT_MRT4530_19125C.1
atctgctggtctcgatctcctcttcccttccctatctatactctctctatctcgctgctgttgcataatcatatcgacttcttgcaagctaggttcgatgtgttgagacgcatactagcttaattagcagctggccggcagatattctcttggtacagcagccatagctaggggggagtaggtgcactgtagcttaatttgggggatataggtcatcccaaggtgtatatatgtcgatgggtgtgccctaatggtacatggctgacctgaccgagcatccgtcgccgactgctcctcctcaagtgcaaacagctggcctgccggcggcggcttctccgggtcctgcctcgcctcattcaccgtcggagcaaggggacaagacggcgcccggggcagccacggcgtcgacgatgacgacggcgagctcgggcgagccgtcgccacggtcctcggggaagcacgccttctaccggggcatccggtgcaggagcggcaaatgggtctcggagatccgcgagccgcgcaaggcgcgccgcatatggctcgggacgtacccgaccgccgagatggccgccgcggcctacgacgtggccgcgcgcgcgctccgcggggccgacgcggtgctcaatttcccgggcgccaccgcctcccgccctgtcccggcgtccgcatccccggccgacatacgcgccgcggcggccgcagcagccgcggccgccgcgcaccttgagcggccgcacggccccaccggcactgcctatcctgccaccgccgcagcggagcaccaccagcagcagcagcagcaacagtacggcagtggcagtccggccgccgacgacgtctcaggctacccgccgatggagggagggattggcaatgacgatttcatggacgaagaagccatcttcgagctgcctcagctgctgcgcaacatggcggctggcatgatgatgagcccgccgaggctgagccccaccacctccgacgtgtcgccggagccgtcggaggccggcgagagcctgtggagctaccgtgatccctag

SEQ ID NO: 13056 - DNA, 729 bp, Oryza sativa
  Clone ID: PAT_MRT4530_19126C.1
atggcccatgagcgaacaagtgaaggccttaggcccatgaggaaagctgggaggcgcacggcgcacctcacgcacccaggagcgacgcgccgcgacccgcgaggctcgctcgatcaccgcacctctgaactcctcgtctcccgtttttcttttatatttttcctttctttttcccaccgcgattccgcgtctccacgataccccgtctacaacagggagacagggagcagcggaggctcgcagcaggcagtagcagctggactgcaaagcagggcactagggcagccgagcaatgcacagcagcacagccaaattgaaattgatgaagccttgacactctggcaccaccattcctcgagggatgacgtgtcgaaccagttttgcggttttcagctgtgggaggtcatccgcgttgccaccacatcccagattttcctggtcatcgggcattcgttgaaaagccatgtgaaggacttgcattttgcagttggtgcccaacatttctacaccacatttgtcgtgatcgagggaactccgtcgaggaattgcatctggtattccaagtccaccatacttgattggcctgcagacccttttctagttcaccttgcctttgcctccatggatctcatcgcctctgtcccaaagaaattttctcctagctttgtcaatttcttggatgagctgcttgtggatcttgagcgctgtgatgatatagatcggcattga

SEQ ID NO: 13057 - DNA, 441 bp, Oryza sativa
  Clone ID: PAT_MRT4530_19127C.1
atggggaaggcccaacaaaaacgagcccaaaatggccctaccaagcatcaaaccctaattcctctccctgatcccctcctactcactctaggcgctaggtgtagcactagccttgctgctcgcgtgtgcctagtgtcggccgtccgcagattcccagcgccgccatctgatggcatccccgcgctcctgcccccggcaccgctcgcctgcgaacgccccgtgcagccgcctcctgttggcatcccagcgccctgcaccccagcgagcacgaacgccgccacctgccgccagcaccgtccacaactacgagtgtttcccagggccgtctcaaaattagaggctccggtgggaaatacaaagttgaggcctcaaacgagccaagctgagccgagccagtttttagctcgtaggatattaatgagccaaaccgagttagcttga

SEQ ID NO: 13058 - DNA, 467 bp, Oryza sativa
  Clone ID: PAT_MRT4530_19128C.1
tttgaggagctccggcgcgccatcgacgggtcggaagcttttaagcggtcgagctgtcgtcctttgttttttttttttttacttttattttttttttttttttttcggagggggtcgttggtattccacctatccaaacaagcctttaatagttaaaggaaaaaccttccaatcacggtttggcctgcaataatatttacataatacctataaagccctataactgggctatagaggggatcacttcctgtgaacatactaagaaaacgattttgttaacattgtgggctctaggtacctgttattctaaaacattgtttttggttggagagaatccagaactgttgtttaaaatgggtcggatggagtcattaacacacttgcaagaatttcctgcaaaattgctacatggctagggcgtgacaacacatatgcactttgttggacactgcccaacagaggggggg

SEQ ID NO: 13059 - DNA, 236 bp, Oryza sativa
  Clone ID: PAT_MRT4530_19129C.1
gctggcacgcgtgcaggtgctggtacgctatacagcggtcgacctacgcgttcgaacatgggcctacagcaatagtcgacacacactgcagggaccgccggatctggctccatcactgcacacaccgacttcgatggaccaaccaccgacgcctgcagaactgcatatacatctaccacacattcatctcacgagaagattggtatgatcgacaacatcatggtatagatccatac

SEQ ID NO: 13060 - DNA, 2459 bp, Oryza sativa
  Clone ID: PAT_MRT4530_1912C.1
atggcggccggatcttccgcggccgattccccctcccccggccgctctctccccctcccaaccttatataaacgctccccgtgcctccctccaccgtttccgccactcgccgctctctctctccgtcggaatcgagcccgcgccgtcgctctctctctccaccgtcgccgccgagctccggtccgccgccgtcgtcgccccggaccttctcccgcttcggcgtcgccttcttcgggttcgccgcaacctcgccgacctcgtccacctatccgtttcggtcgccaaccgccggaacgccgccgtccccgtcaacctgtgccgcgccgccgccttcctccgctccggtcgctgttcccgtcgtcgccgtcgacccggggtgagccgtggaccgcccatttcgtttcccccttccctcccctctctcggccgccgctccgccatgcctatggccggcgccggcgaccataggggcgcgggcgcgccgcctcccgtcggctgtgccggcgaggccgctttcaggcgcgccccgcggctgccatgtggggcccggccgtcagccgcccgcgccctcgggtgcggctgacgcatgggacccacggcgctggccggtgtgagccgggtgcaaccagtccaccgtggacccacctcggccatataaggaccggtcttcgggcctctgttgcaaagcactaccgtacttccacatgtctagtgggacaaatgaaggctacacgagctgcggcccggtagtcgagatgtcatggcacagggccggtgtcctgctgctaggggctcagtcctgcctgcctgtcccgggggttccggccgtaggtgggattgggtcgatgtacacctctgatcagagtaaaatctattcgaatagccgcgccctcggttatgggcaagccgagcaatgtacccaagttagtgtttttaattcttaacacctgcttaacaactaaaatgtggaatggttggcctgggttggcttgggacgagctgggacccagggtcgggttgccagttcggtggtggttgtactcagtcttgctcaatttttcccaaacccagaagaggagcccctggatgatgaaggctttggtgtctagctcgtgccctacgccgaactcattatgctcggtgatgggactagggccaccagatggcgaaataatctggcagaccccttcaacaaagggaccgatctccggtcgggaggtgaagtcggcagagacaaactggggcgcggtgagtgtcatatcagacacagcgccagaggctttcgccgtcgccagttgcaatgcctggtccgaagcaacagcgttggccgaagtgctgcccccggttggcgcgtcggcatcactagcaggcagtggagacaggagcctcttttgtggaggtgggtgtcgtggcgccgacgaagttggcatcccatccgaagatgtttcgctgtccgagaagccaccggccacctgcaccacccctttcttcttcctttgggcggcggcaccggcctggcttctcttggccacgtcgcgcttccacttttttgacgtcccaacgtcgtgatcgactctcgcagggttcgcccggctggctagcgtgccgtcgtagacgcgattcgcctgtccattggacttgcgaagaaggatgagccgtgcctcaagcacgccatcaacatccacgttcggcttgatgatcatggcgatagaaagacgccggaagcgaagccacttcgccttgtcatcttcggcggaatcgtctttggagaagtaggggttgtcgatgtagaaccatttttgcatcgaattgcggtcccactttgccatcgacacaaggacaggccatgcatccgagcgctttggccgaagcatgaagtttacactgccaaaaacagtcttctttggccccgccagagtgttgtcgtccttggtcgccacgcacaccatgaacagggtggcgaagagctccgcggtaggagtaaatccacacgtccggcacatccagacgaacacgaccaagttgagaaatgccgatgggaccaccgttcgcccgtccccggtcgaagggacaacgtcttcgcccgcacaggacacctggcgctccgcaaggacgctggagaggacaagctcggccaggtcggcctccttgacaagaaacttgccaaggtagcacgaccaaccatcgctgaggctgccagggtcttcgccagacgatccggccttagtaggcttgcgaggagccatcgaatccgcgatgaaagaggtggcgaagacaggaggcgaaaagctagagcaggaatgatagggccttgcccgtgaggggcttgttggaggtataccacgagggccttcggccagaccgtgggcaacagctttatcttttgtatagcgtgattcattatagtgcgccagactgagaagtggcgagaagtccacgggggtcgctggggagtccat

SEQ ID NO: 13061 - DNA, 403 bp, Oryza sativa
  unsure (1)..(403): unsure at all n locations
  Clone ID: PAT_MRT4530_19130C.1
ccaaagcgtccgcnagtcgcgacantcaaagccgcacgcaacgccaccactgctccgccgccgccgccacgcgccgccgcgattcctccccccgccgatcgaacgccacgcgcgcccgccgcggaaaccctagcctcctccttcgctcgcccgagcgccgtcggggngaggaggattacttttggtcctgcnngcnaatcgggatcgcaattngtnangngntttcggccccgtntgccccgacggccgcctggtccccgctacgccggcnacctcacgcggaatcgagaggacagtagaaaantctacanccaaaattctgaagatctncaagaactttgcagtctaacatcagtgccgaatatcagaaatggatcatgggcgttatgcttccacagcatgg

SEQ ID NO: 13062 - DNA, 226 bp, Oryza sativa
  Clone ID: PAT_MRT4530_19131C.1
agcgtctggtaaggtgaagggccagacccccaaagtagaaaagcagcaaaagaagaagaagaagaccggccgtgccaagcgctaggatccagtacaacagacgattcgtgaatgtcgtgcagacattcggccgtcgcgcggacctaactccaactcgtaggctataataatttgtaaataaaatgcaaatataacatccatttgcaccaaaaaaaaaaaaaaaaaa

SEQ ID NO: 13063 - DNA, 224 bp, Oryza sativa
  Clone ID: PAT_MRT4530_19132C.1
accgaagacatgatagtcataataaagtgaacagttcaaaggacaatatgaaatcatctagacatatcaaaagaagactaaaatctgccaaaaagcagaaaaactccggagtgatagcattggactatgtccaaacggctaaaaatttgacagatcagtttaccaaggggctaccatgtaatgtgatagacagtgcatcgagggaaatgggcttgatacccacc

SEQ ID NO: 13064 - DNA, 557 bp, Oryza sativa
  Clone ID: PAT_MRT4530_19133C.1
ccggccgggacacctgaccgtgactaccatcacatgctggtaatagctatactggcttgtagcaggcttaattaaactattagccgtggcggatgacaagcactcacgcaccatctgtgccaccacaagagggacgacgagccggacaccgaagtagactcctacgcctgaaggctcgtccacacgtctgcatacgcagaccaccgatgtggccgtccacggccaggcactagtacgagaggacaggagggacgaaatgcaacacaaacacattgagcacctcggtgaggccggggccctcaacgtcgacgccttcgccctgtatgagaagcacgagggcgaataggacctagacaacgcacacctgcactggaccacggcagagaacacaggcacggctggggtttgagccgtaggctacgtcttccacgagcaccacgagacgaagacggaccacaagagctcccaggagtccaccgccgagaataatcaccacctcttcggatgatcgacctcatcacaacgtagccggcgaagcgaccgaggtttctaatgat

SEQ ID NO: 13065 - DNA, 542 bp, Oryza sativa
  Clone ID: PAT_MRT4530_19134C.1
tgttttttttttttttttttttttttttttttttttttttttttaaggtaaaaccaagcgtccacaaacttaagattattcatggataaagcatcctaagcagcatctgatcccccccattcttttttatcaacagaagtcagtattgacaggttagacactacctagttcaaacttccaatagtcttatgagcaaagttatttcatattccgacgagggggggcagcaagccaaaccaacgtgaaactagtagcctcccttggtaaaagctccagggctttgccctccttcggatttcggatttcgcatgggggcaggatttcattttctttcatgacaacatacccaggagtcacagttgccccccttggggatggccagtttccggatccggagaaatatcgaccgtgcatcgggcctggtctgtaggtaactttgatctggtcagcaccccgcaggtggcagtaacatccggtttcttccacctgtgatgcccggggtacatgggttaacacctgcgccggaggataccccctcaaca

SEQ ID NO: 13066 - DNA, 612 bp, Oryza sativa
  Clone ID: PAT_MRT4530_19135C.1
ctgcaggaatcggcacgagggtagcttcagttcttaaaccccagtattagctgctttgcttctctgttcatgttcatgacatcagagggttcaaacagggttcactatgacttgctctttcgaagtaatgcatatgtttctcagaaacaaagcccattgtgtccaacattgagtttctcttttagaataatcttccaatgttgctgcagtaatagtttcaattccttgtctaggaagaaaatttttttcatatctgacatgatgccaacagccctgttgcctacgtacacaaaacgcatattacccagcttgcacttcttataaatgattggtgaacatgtcggtaaattagggctcaagtatcatacttgaagtttatcatttttatagactttttttttattccagtctatgcggaaagcatgcaatcaaccatctattattacaaaattttagggctttatccataggctaccgaccaatgctagcaaatagcactcgtttacagaattcaaagtttggatatgctcatagcgtactcctttgagagtcctgatattttctttttcttccatcttgcaggcagatatcatggaaatgcagaaaaatgag

SEQ ID NO: 13067 - DNA, 378 bp, Oryza sativa
  Clone ID: PAT_MRT4530_19136C.1
ggcaaccaagggcacattttggttaaacaaatggcaaggttaaatccacccttttcttgtctgcgcaaagtaacagaagaaactaggcatggggatttttttacaacactccgcccggtcactggagcaactacaagattgggagagtttaaaataaaacttttctaaagaaacaatcaccccccaccatatataggcatttggttatgagatggcccggcggaacattttagaacatagcccaccaactttttttggtccccacatgtacttcaggggcacttggggatctacagaacaggtgccttctaccactcctagcagggtttgtaaaggctaaaactagggggaaaccggtaaggcttacgactggggcag

SEQ ID NO: 13068 - DNA, 585 bp, Oryza sativa
  unsure (1)..(585): unsure at all n locations
  Clone ID: PAT_MRT4530_19137C.1
tcggatccngatctatcatggacgcancancagcccatgggagaaagcagcnccngccgggcgnaganagaaacatcaccggcggccnaagaaagaaggaggaggaaggaggtgatcancancctccggtnccgaaggatggaagtcgatgccatnccttgattngggancnatacgttcgaaaaagctgggcaccatcggcaccaccgccaaccttgctggtngtncctcaccacccgtctaccacctccccagcgtccgcgccgccaccctcctcnacttcttctccggcaccaccaacctcggccccctcctcggcgccttcctctccgacaccttcctcggccgctacnccancatcgncgcccgcctccctcgcctcctggcctcggcatgcttgttgcttacctcaccgccgccatcccatctctccaccccccaccttgcnctgcctcctcttcctcgtcgtcgtgccangggcccacacacggccagctcgccgctctcctcgccgccttcgccttcctcgtcntccgngccngcggnttccgcccctgcatcctcnccttcnggngccancaattc

SEQ ID NO: 13069 - DNA, 1558 bp, Oryza sativa
  Clone ID: PAT_MRT4530_19138C.1
agagtcgacacacgagcgaatctgacctaaaccctagctcgcctcctcctcctcctcctcgccgccgccgccgccgccgtcgccgtcgagcaccacccgagcagccatggcgaatccggcagcagcagcagggccgtcggggggagcgaggtcgttcctgcaggccgtgtcgaccgtcaccgaggaggcgccgtcgccgctccgcgtcgtgcagatggagggcctggctgtcctgaagatcattaagcactgtgaggagtttgcacctgctctagttacaggccaactgcttggtttggatgttggcagtgttctggaagtaacgaactgttttcctttcccaatgagagaagatgatgaagaggcagatgcagatggtgcaaattatcagcttgagatgatgaggtgcttgagggaggttaatgttgacaataacactgttggatggtatcaatcttgcttgcttggatcttttcagactgtggaactgattgaaacgtttatgaactatcaggagaatatccggagatgtgtgtgcatcgtttatgacccatctaggtcaaatcagggggttctagctctcaaggccttgaaactcacagattcattcatggatctttaccgtaacaatggtttaactggagagaagttaagagagaagaaattgtcatgggttgatatttttgaggagataccgattaaagtttccaactctgcacttgtcagtgccttcatgacggagctggaacctgaatcacctgtttcacagtgtgattttgaccgccttaaattgtcaactgctccattcatggaaaggaacttggaatttctgattggctgcatggatgatctttcatcagagcagaacaagttccaatattactatcgcaatgtctcaagacagcagtcacagcagcaggcatggctccaaaagagaaggcaagagaatatggcaagaaaagctgctggagaggagccattgccagaagaagacccatccaatcccattttcaagccgattcctgagccgtcacgtttggagggttatcttgtaaccaatcagatctccagttactgcaaccatattaatggggttgctggtcagaatttcaacaggctctacttaatgaaggccttgcaggaggactagatggctaggtgatgagtggcaactgttatgatatttgacttgctagatgtcaattttgccttgtgctttatgcctattataccttttgccaagaaaagccagagcctattgtaccaatcttacggatacaaagtccgcagtatgataaattgattttatcgcttggttgggtctcaaaaaaaaaaaaaaactatcagataactcaaattgctataactacaattaaattgttttttatcagacctcattttcttcagataatctgtagctacatgtttgaagcagaccatcgtatcctgctagagagctgaacgcattttgattgtgccaatgccttgtgaattgtagctacagattatctgaataaaatgagaggtttagctctaatcaccttatttgggcaatagc

SEQ ID NO: 13070 - DNA, 349 bp, Oryza sativa
  Clone ID: PAT_MRT4530_19139C.1
ccgacgtggaggtcaccgagatcgacgacgccgaggaaatggacccctccttcggagccatgatgatctacgaccagaaggcggtgcacctggagctgaaggcgatcgtccagacgaacgccatcgacggcacgatcaagaaggccgcgtcggcggcgacgcacccggagctgatcctggcgttgaatgacaacagccagatcgtggactcctgaacaaatagtacagggtaaaaaaaaatccgcaagacgtgatggagacactgaagatttgctgactagaagaagatgtggactttactctgtgtttttatttcgggattagcattgatccccttgagtgatttagc

SEQ ID NO: 13071 - DNA, 816 bp, Oryza sativa
  Clone ID: PAT_MRT4530_1913C.1
atgcgcaaccttgcgaagaaggatgagccgtgcctcaagcacgccatcaacatccacgttcggcttgatgatcatggcgatagaaagacgccggaagcgaagccacttcgccttgtcatcttcggcggaatcgtctttggagaagtaggggttgtcgatgtagaaccatttttgcatcgaattgcggtcccactttgccatcgacacaaggacaggccatgcatccgagcgctttggccgaagcatgaagtttacactgccaaaaacagtcttctttggccccgccagagtgttgtcgtccttggtcgccacgcacaccatgaacagggtggcgaagagctccgcggacacctggcgctccgcaaggacgctggagaggacaagctcggccaggtcggcctccttgacaagaaacttgccaaggtagcacgaccaaccatcgctgaggctgccagggtcttcgccagacgatccggccttagtaggcttgcgaggagccatcgaatccgcgatgaaagaggtggcgaagacaggaggcgaaaagctagagcaggaatgatagggctgaaggcacgagagtctgacagcggtaaaaacgagaagtggggaggagtgatagcgacctgggatgagggttgtatagcccgatcgcacgacggttcgactcccacccaaccacagcctgacacatgtcaaatggtagacggaacggtaaattcccatcgagccgggccacacagtggcaggctagaaccaaggaaaaccaagaggcccacggagcccgatactgttcactttcaatttcaaaccacctaa

SEQ ID NO: 13072 - DNA, 155 bp, Oryza sativa
  Clone ID: PAT_MRT4530_19140C.1
tgacaccaccccaatggctgatgtgctgaaggccatgggatgtggatgttggttgatgtgccatgtgtggcaggactgaaatgagatcatcctaagattgtataaacctctaggaattgtaaaagttggcccacaagtgtaaaaaaaaaaaaaaa

SEQ ID NO: 13073 - DNA, 462 bp, Oryza sativa
  Clone ID: PAT_MRT4530_19141C.1
atgtgcaaggtcatcacgatccagtcgctcgtctggctgcgccgcacggtgcggcggtggcgctcccgcgccgcggcgcgcccggccggcagcaagatggagcgggacggcgacgcggttccggcgggtcacgtggccgtgcgggtgggaggcggcggggaggacgcgaggcggttcgtggtgcgggtggcgcacttgaaccacccggcgttccgggagctgctccgccaggcggaggaggagtacggcttcccgtccggcgcctccggccccgtcgcgctcccctgcgacgaggaccacttccgcgacgtcctccgccgcgtgtcctccgacgagcgccacgacctggccttctgccggcccgccgccacctgcggcgtcacgaagcgccgcgccgagtcgtcttcgtcgtcgtcgtcgcgggcgccgctgcttcaagggatggacagcctcgtctggtga

SEQ ID NO: 13074 - DNA, 201 bp, Oryza sativa
  Clone ID: PAT_MRT4530_19142C.1
agcggcgtacgcacatcaaaggtaataaaaggctgacagtacggaaacacatggtaatctttacacatggaagatgttcacacacaaacacactatactctagttgcctctaacccctggtaggacccatcactatcactgacacggaccggtctatggccttactatcagagacagcacccttgtcggatcagagtaaca

SEQ ID NO: 13075 - DNA, 413 bp, Oryza sativa
  unsure (1)..(413): unsure at all n locations
  Clone ID: PAT_MRT4530_19143C.1
gcaatcaacaaattttattaaaatgtgaatataaataccaaaatttacaatacttgttaaataagactacataaaaaacgtgtgaaaaaattttataaaaatttgttcccctccttgagacacttctccatctgtcggactttttgacactggtgtgggtgctatcaacggttctcgttgggcttcttcactttgttctggtattgccttcttttgtggggattcaccctttttcgtcccatttccattcatataagaataagttgtgtgctgggtggtgngataaacagctatatatttggtacatgggccgaagaaggggcgtaacatggttaagaaagcgtgtcgaaaactgtcattgattaggccatacattattgggttgacgcaagcagatgtcatgccgatcaaat

SEQ ID NO: 13076 - DNA, 230 bp, Oryza sativa
  Clone ID: PAT_MRT4530_19144C.1
cccccggcgaccttttttttttttttcagtggcattctaaatcaggcaaaacgccaagaacggggttaatattcacagggaaggaagaccgtgtcttcttgaattggggggaagagggaaattaaaaaagcccaagaaccaggcaggccgcaaaaataaccagatgtgagaaaggaagaggggaaaagaaaaaggtgtttgagcctattgtgccaatatcttactacatc

SEQ ID NO: 13077 - DNA, 633 bp, Oryza sativa
  Clone ID: PAT_MRT4530_19145C.1
atggcggcggcggtggcctcttcctcggcagcggcagccacttcatcggcagcggcggccacttcctcagcagcggcggcggcggcggtagctacggcggcctcttcctctgcagcaatggattggtaccttgatgcggtgcgtggtgtggcgacgacagaaaaggcattgggcttcttcaaggaaaaggcatcaatcatgcacgcaaagtcattttggttgtacaagcatattccccttgtatatcatactatattcacaatgattttactcccaactcggagaatcaaagggatggaacgtgcacgtgcatacgtgtacatgcggtattcagctgctagtgtcaaatactccctctgtttcataactcaagtcgtcgttcgctgcacggacgccgtggcgcgctggcctggggtaaaagtgcagcggtacgagtacgaccgaacggttgatgaacctgacgctgccttttctttagacaggccgcatagggcttctcactcaattaatgggcctggcgtttgcaaggccgagatgccgcatatggcaacaggcttatcttcactctttagatgggcctcaacaacggttcatcagtacatcaaagccccaaagacctgccgacctgattaa

SEQ ID NO: 13078 - DNA, 260 bp, Oryza sativa
  unsure (1)..(260): unsure at all n locations
  Clone ID: PAT_MRT4530_19146C.1
ncggcgacaatgacacatgcgaggtgaggaaaccacattgccgcaagggaagaagggagtatatgccccatcagttgaagcatgggtactggtcggcgttgctctcagtccgcacgggtggcaatgccactcaccatgccgtgcctcccttcctcccctccgtcgctgtccaagctagcaatcggatatctgtgcagcggcaaggtcaaaggcggtgggggctgcttaccagctccgcaatggttgaaggcaagcagtag

SEQ ID NO: 13079 - DNA, 240 bp, Oryza sativa
  Clone ID: PAT_MRT4530_19147C.1
acggtattagcgataacatgtcgtggcctcggccactattgcgtgagcatcataaagtcaagacagtcactcttgcataggctacttcagcttgcgctgacagtgctagtctaagccactccatggtgccgtgacagataatatcagtgcccgtgcatcgtcgcctgaagcatattctacatgatcatgcgacatcgacattatcgtattctctatggacagaggatatggatactattg

SEQ ID NO: 13080 - DNA, 1502 bp, Oryza sativa
  Clone ID: PAT_MRT4530_19148C.1
atggaggggaatggagcagttcaggaagcattcagttgcttcaacaagtttgctggtgctttctatttctggctttctagagcatcaaatcccaagattttccacaggttgtcagctattgcaggctcaagttcaagagcctgccagtcgcaaataaagcaagtgacttcttgcatgcagcatttggccggattgcgttttggttctcaagttagagaagagcacgctatacaaattcttttagcaaagcttgctaatgcaacatttgggcgactgtggaacgaggtggaggagcgccatgcctgtaacattcttatgttagctgctgctactgtaccaccatttgaaaacatatcgccgaagatgcttgcagactcaatgacattgggaagagataatggtcgtaccagagaacctgttgatcagcattctttggaggaaaaccattcaggctgtacttgtgttgctgtgccaagaataattttaccagaagacgcaactgaaccaaaaactgggataaagttccctactcttctcgaggataattcaaatccaacttcagaggtgctcgtcgggatgggctttagaagcatgcgaataatgagggtcaaaaacctgaatctctatgcctttggattatatatacaaccagattctatttgcaaaaggctgagcccaaagtatgcttctgttccagtttctgaactgaaggaccacccagatttctatgaagatcttttgagggaaaatattcatatgacagtcaggctgatagttagctacaatggtcttagcattggcacagtgcgggatgcatttgagaagtccctttgcttccgattgcagaagatgaatcctaatactgattatcattgcttgaagacgtttggttcttattttagtgaagatatttgtatacctgcgggtacaaagatcgacttccggcaaacctctgatggccagctcataactgaaattgatggcaaacaaattggtgctgtccagagcaaagatctttgcagggctttcttcgatatgtatattggtgatccacctgtttcagtcgagaccaaacaagacattgcacagaatgttggtggactcattagaagatgttattgaaaggcataattaaacgacagactggtcggaattatttcattcttcgatacaaggatactagggtgagggggaagcatatacaaagacaggactaggaggagaggatgaactgtatgtatagtgatagatcaacctgtaaactaaacagagccttagcatctttctccggagcaattgcctccatgcttttcatatgggttggctttggctatttcctggccactgtatcatgtgcaatgatccagccagacaatgtaaaagaatgcttccttcccccatctaaaatgagggacaccagctttgctggtttagattaaaaaaaaaaaaaaaaaaaaaaaaaaaaaaaaaaaaaaaaaactcgagactagttctctctctcc

SEQ ID NO: 13081 - DNA, 1217 bp, Oryza sativa
  Clone ID: PAT_MRT4530_19149C.1
ggtgaatgtgctcttatcctgatacgtcatagtgaatcattgtggaatgactgaaatctgttttattatggaatgagcaaaaattgtttacttgcgtcgatgtcgagaaggctatatatgtcgggagctgtttggaaaatgttttaaaacattattgggaaagtattttgcggagcagtttggaaagggttttattggagcaacgctgggaattgtacttttattggatcaataatgattggaaaggattttatcggagaaatcttgattaggaaggcattcccatgagttgcaaatccaaggaagttaataacaccacttgtctacagtattacaagttaattgatttatcccattacaagctaaagcccactggtttatatttgtttaggcatcatccaccgttgcaaatccaaataagttaatcttttttccttcgatgaatatttaatgttaagttctttattcctcgaccacttaaaatctgcagtttgatattgctttatcccgctgctttgccattagaaccaacaaaaggaggaatgcctttagctgaagtcctcagattcaataccaaagttgattgtttgattctaaacgtaattatcatggtttcttctggtcctttaatggtgatattaagatttgggcaaaattagtacaaaagctacatgtccaaaataccttggtagcttcccacttctactatctctccaatttactcttaaattgtatgataccacattatcaagtttcatagtagttattttggactcccctcttcaaagtacttgtcatctgggttgggaggtaatttctaaatctcagctctgctatttgatgatctgacattcatattttactatatacttcttgtcactagaattcctgctgcatacgtactagctaggtatttcctcttacaataatggctgttagaattagcagcatgaaactgatcagctcaactccatgctatgtaatacttgaacaatctgagagtttttctttactccagaacacctgagagttgacatatatgatatatttaacagattgtgttgattgcgcataaagaagtagccgaacatatttctgctatgcacattaacatattggtacatatttacaattctatttttacgaagcactatgctactgataggctattgatgggctacagcttgatttattttaaaaacacccccggttttttt

SEQ ID NO: 13082 - DNA, 133 bp, Oryza sativa
  Clone ID: PAT_MRT4530_1914C.1
aagttacaagagatagaggtggtatggacatcaataactaatatagcagctgaacatgttagagtgctgcgggtaaattgtacaactcataagcaatccatgcctgcatcaagggctctaccactgtttcaat

SEQ ID NO: 13083 - DNA, 231 bp, Oryza sativa
  Clone ID: PAT_MRT4530_19150C.1
atgacgacctcggcgacgacgacggcggcgggcggtggcggcgaggtcgggcgcggcggatccggcgcggtggcgagcggcggcggcgagctcgggatgcgggttccgccgccgtctccgctctggtgctctcagccagcccagcgaccagcctcccgctcccactccggtgctcctggctggcctcccgctcccgctccggcgctcgtcacctcggttgctcgtccctag

SEQ ID NO: 13084 - DNA, 276 bp, Oryza sativa
  Clone ID: PAT_MRT4530_19151C.1
cagggcaggcggcgcgcgtgcacgacgtacgcgtcgaatggtccgaaaaattggctcctcacccttgcgcagatgcagcctccttttgcagttttgttttgctgcaaattcggattcgtttttgtgttggaaacgttccgaaaaatccggtgcgtgcaaacggcgtggagtccggataagttacgcgcgacttatccggttcggttacgcgcagtagagatcacacctgcgaaaagtttcgaccaagcagccggtcttttcgtcacctcggtacgt

SEQ ID NO: 13085 - DNA, 611 bp, Oryza sativa
  Clone ID: PAT_MRT4530_19152C.1
cgacgtacgcgtcgaatggtccgaaaaattggctcctcacccttgcgcagatgcagcctctttttgcagttttgttttgctgcaaattcggattcgtttttgttttggaaacgttccgaaaaatccggtgcgtgcaaatggcgtggagtccggataagttacgcgcgacttatccggttcggttacgcgcaatagagatcgtgcgggcgccctgatcaagcgacccttctctatataaaccgacccgccgtcttcacgcagtatatacgcaaaatcaatctagggtttgcctcctactctgtactgcgccgtcgctcgtagactactccatcccgctcgccggcgtgcaccagcgatcgggagagcaggtctccggaacctctgcctttgacatcctgcaccgggagaaggcggcaataaggtttttgggaagcgcttcgcgcgacggctcgccttcctcttcgctcgcgtgtttcgtgccttcgtagacacctgcgaaaagtttcgaccaagcagccggtcttttcgtcacctcggtacgtgttcaatatgttgcgcatatttgatctgttcatgttatactgtgtagtttacatgtgtagatctaatga

SEQ ID NO: 13086 - DNA, 692 bp, Oryza sativa
  Clone ID: PAT_MRT4530_19153C.1
gcgcgtgcacgacgtaagcgtcgaatggtccgccaaaattggtccctcaccttgcgcagatgcagcctccttttgcagttttgttttgctgcaaattcggattcgtttttgtttttggaaacgttccgaaaaaatccggtgcgtacaaacggcgtggagtccggataagttacgcgtgacttatccggttcggttacgcgcagtggagatcgtgcgggctccctgatcaagcgacccttctctatataaaccgacccgccgtcttcacgcaacacacgcgaaatcaatctagggtttgcctcctactctgtgctgcgccatcgctcgtagattactccatcctgctcgccggcgtgcacctgcgattgggagagcaggtctccggaacctctgccttcgacgtcctgcaccgagagaaggcggcaataaggtttttgggaagcgctttgcgcgactgctccctgttcgtccgtgacggctcgtcttcctcttcgctcgcgtgctgcgtgccttcgtagacgcctgcgaaaagtttcgaccgaacagccggtctttccgccacctcgcccttacccaataataacccaaacaaacactcatgctccatagctaaaggactactctctccgtccaaaaaaacccaatccagattcaaatacaggattgagttatttttgagacgaagggagtac

SEQ ID NO: 13087 - DNA, 621 bp, Oryza sativa
  Clone ID: PAT_MRT4530_19154C.1
ggtggagagaagaggggaaacacgcgcgcgctcgcctcgcctcgcctcgcctggcagggcaggcggcgcgtgtgcacgacgtacgcgtcgaatggtccgaaaaattggctcctcacccttgcgcagatgcagcctccttttgcagttttgttttgctgcaaattcggattcgttttgttttggaaacgttccgaaaaatccggtgcgtgcaaacggcgtggagtccggataagttacgcgcgacttatccggttcggttacgcgcagtagagatcgtgcaggcgcctctgtactgcgccgtcgctcgtagactactccatcccgctcgccggcgtgcaccagcgatcgggagagcaggtctccggaacctctacctttgacgtcctgtaccgggagaaggcggcaataaggtttttgggaagcgcttcgcgcgactgctccctgttcgttcgcgacggcgcgccttcctcttcgctcgcgtgtttcgtgccttcgtagacacctgcgaaaagtttcgaccaagcagccggtcttttcgtcacctcggtacgtgttcaatatgttgcgcatatttgatctgttcatgttattctgcgtagtttacatgtgtagatctaatga

SEQ ID NO: 13088 - DNA, 255 bp, Oryza sativa
  unsure (1)..(255): unsure at all n locations
  Clone ID: PAT_MRT4530_19155C.1
agtaacccaaccagagagcttgcggaaggggggtttggtgcgggcgcgcgcgtgtgaggggggagagaaggcaggaggaggcgacgcgtcgccgagggagnaaaaatccgatcctcctcctgccctgctcgctcgctcgctcgctgcgctgcggacttggcccgtccgtccgttcccgctcgcagnatagaagatggtgtctgggtcttcgctatgntccctgatctgaacccgattcncttcgtgagagtctgg

SEQ ID NO: 13089 - DNA, 213 bp, Oryza sativa
  Clone ID: PAT_MRT4530_19156C.1
atgccgagagggagggaggaagaaggcgacgtcgaggaggctgaggaggcgcggccacgcgttgaggtccggtggcgggaggcagatgtggcaggggtaggggtggtggaagccaccgacgtcgccgtcgctgtcgacaccgacgttgggagggtaccgccggatcttgagggtggagagggcgtcatcaccgacagaaataaagaggcctag

SEQ ID NO: 13090 - DNA, 512 bp, Oryza sativa
  unsure (1)..(512): unsure at all n locations
  Clone ID: PAT_MRT4530_19157C.1
cccaactatggtgttaagtttccaaaaaaggggcctcacccctggggaagaagcaccctctttaagattttttttccccaaattgaaatttgtttttttttggaaacgtccaaaaaatccaatgcgtcaacacgggtggaatccgattagtaccgcgcgctttatccggttcgnttacgcccagtagatatcgtccgggccccctgatcaaggganccttctcttatataaaccgacccgcggtcttcacgcaatatatgcgaaatccattctagggtttgcctcttactctgaactgcgccgtcgctcgtagatactccatccggttcgcgggcgtgcacagcgatcggaagagcaggtctccggaacctctgcctttgacgtcttgcaccggaagaagccggcaataaggtttttggaaagcgcttcgcgcgactgctccctgttcgttcgcgacggctcgccttcctcttcgctcgcgtgtttcgtgccttcgtagacacctgcgaaaa

SEQ ID NO: 13091 - DNA, 675 bp, Oryza sativa
  Clone ID: PAT_MRT4530_19158C.1
gcgacccagcagcgccgactccacaacaacaacgacaatctatccatctatatactaattggacaccatctatctatacctatactaattgggcactgtttaggagctctcacatttattagaaagatccgtacgcgtcgaatggtccgaaaaattggctcctcacccttgtgcagatgcagcctccttttgcagttttgttttgctgcaaattcggattcgtttttgttttggaaacgttccgaaaaatccgccctgatcaagcgacccttctctatataaaccgacccgccgtcttcacgcaggatatgcgaaaatcaatctagggtttgcctcctactctgtactgcgccgtcgctcgtagactactccatcccgctcgccggcgtgcaccagcgatcgggagagcaggtctccggaacctctgcctttgacgtcctgcaccgggagaaggcggcaataaggtttttgggaagcgcttcgcgcggctgctccctgttcgttcgcgacggctcgccttcctcttcgctcgcgtgtttcgtgccttcgtagacacctgcgaaaagtttcgaccaagcagccggtcttttcgtcacctcggtacgtattcaatatgttgcgcatatttgatctgttcatgttattctgcgtagtttacatgtgtagatctaatga

SEQ ID NO: 13092 - DNA, 679 bp, Oryza sativa
  Clone ID: PAT_MRT4530_19159C.1
cgacgtacgcgtcgaatggtccgaaaaattggctcctcacccttgcgcagatgcagcctccttttgcagttttgttttgttgcaaattcggattcgtttttgttttggaaacgttccgaaagatccggtgcgtgcaaacggcgtggagtccggataagttacgcgcgacttatccggttcggttacgcgcagtagagatcgtgcgggcgccctgatcaagcgacccttctctatataaaccgacctgccgtcttcacgcaacatacaaaaaaaaatcaatctagggtttgcttcctacctctgtactgcgccgtcgctcgtagactactccatcccgctcgccggcgtgcaccagcgatcgggagagcaggtctccggaacctctgcctttgacgttctgcaccgggagaaggcggcaataaggtttttgggaagcgcttcgcgcgactgctccctgttcgttcgcgacggctcgccttcctcttcgctcgcgtgtttcgtgccttcgtagacacttgcgaaaagtttcgaccaagcagccggtcttttcgtcacctcggtacgtcctaatcctaacgaaaatgaaggagaaactgctaagggatatatgagtcttagggcagtcccaaccctccatctaggatggtgtctatggcattaactacattgtcatgtagta

SEQ ID NO: 13093 - DNA, 6533 bp, Oryza sativa
  Clone ID: PAT_MRT4530_1915C.1
ttaagggtgggagaccgaggcgaagcatatcttgactcccagcccgatgcagtaatcctggaaatcagcgctgatgaactgggagccgttgtcggttatgatgcggtgcggtagtccgtatctgcaaaatatacccttgatgaatttgatggcgttgtcggccttgatttctcccgtgggtacccgtttggcgctttcttgtatagattgttgggccactgtatcgtcctcgggcaactcctcgctgttgatgaatttgattagtgggatgcgccagtcgtctgtggtctcgatatcggcaacggcgtgttctgcctttgtggcctccgagctaatgtcgggggtgaccgggctaacttcaccgctaacctcttttactgatggcttcgttaggatgtccagaaaggtgccgggctcgagcggttctcgtctagacgcatgtcgtgctaggtcatctggctcgatgttgtctttgcggtagacgtgtcggacttcgatcccatcgaaccttttctctagcttcctgacttctgcgagatacttggataactcagggttagagcatttataatctttgtgcacctggttcgcgactagttcgaagtccccttttacgattagtcgcttgaccccaagtgcagctgcagctcttgtcccggctagtagtccctcgtattcggctgtgttattggtcgccctgaagttgaggtggattgcgtgcttgaattgatctacggagggagacgtcaagataaaccctgcccctgctccttggctgttgagtgcaccatcgaacgccattgtccacgtttcgttgtcgacttggttgtctgatttgttatcaggcatagtccaatcggctacgaagtcggcgagtacctgggatttgatggctgttcgtggcgcaaagtggacatcaaactggctcagctcgactacccattttgcaatgcggccgacaacgtctttgtttctcacgacttcaccgagagggaaggaggagacaactgtgactctgtgggcttgaaagtagtggcgtagcttccttgatgtcatgatgaccgcgtaaagcagcttttggatctgtggatatcttgtctttgcgtcgtggagagcttcgctgacgtaatagactggtcgttgtactttctctctctcgacaatgatgacggtgctaacggaatatggcgtggcggcaatatagaggaataattcttcattaggttggggggcaacaagtacaggggggtttgataggtagcgcttgagtgcaacgaatgcctcttcggcttcctccgcttgagctttccttttcccatttttgcgattcttcttcttgcttgactcaggtgcgtccgtggctggtttcttctctcccccggtcttcggcttatcgttcttgcgtcttagcgcatcatctgcgtgggcgcatcgctcaacaatctcgaacaatctccgagtggttgtgatgcgtcttgtcgccaactcctgggtagtatagcgatctctgacaccggatttgaaggcgcgaattacagaagcatcggtgatttcggggattgtatttttgcactcgttgaagcactgaacatattccctcaaggattcacccgagttctgtgtcaacgcgtgtaggtcgtcttcgatcgcgtggcgcttgtaggttccttggaagttggcgacgaactgttgccacaggtccagcgctgggggcggtgggttgtcggcgatcgtgtgtccttcgtggatgtctgtgaggatgtcggcctggatctcgagaatcttgtcgtcatctcccgctgttgtctcggcgccggtctccatcattgtcatcgttatggcgacgtcctcgaccagtatcgtctggcacccgccgttcgtgatcgttgtgatcgtggcggttgtggcggttatcatggcctcggtcttcgtttgagcggtctcctcgatcttcgttattatggcgccgtgaagagacatgacgccgggaacgattctcattgtctcgtgcgcgtcgtgcctctcggcagccgttgaggtgatctcggagatcgctagtgccgcgaggtggaggggtggctcgatgaggcgattccctccgttcagggtcttcaccattggcatcgccagttggtggttgctccgggtgcgcggtgaccaaagaagcggcggagaagcaacggacggcgacggcgacgaggaggaagcggcggaaaccttcgggttgacgacggcgatgaagctccggcggtctccggcgacggcgaaggggcggacgaggacggcgacgaccttgcgaacccgacggcggtcttcccgagcgacggcgacggctgaaacgacggcggcgcacggctggagcggcggcggcgacggcgaagctagggcacacggcgctagagctcttgtcacttcggaagtcatcttcgtcagctcgcggttcatgtcggaacgacaaggtttggccgcattagaatccttctcgagctcggatgtcgtcgatgttccgttctccgcctcggcgggaggatctttcgacatggagtcgtcttggtttgtagccattgcgttctcgtttctagtcattggcggaccggttgagatcggcattgtggtgtaaaccgggaagacgatttcgccgacttgagtccacaccagcatcgttgaagcagggaatacttggctgaggttggtgttgacgctattgtcgacgaggctggatgacatagtagtggaaccttgagtaccaagtcccctctgacgaagcggacgcatggcggctctgctgtcaagtgtcggtctcttgggctgctccatctgcgacgtcctgctcgtcagcatggcgacgatttcggacatggtcggcctatcgtccgccatgtcctggatgcaaagaagcccgatgtggatgcaccgttctagatcgtacaggagctctgcatcgtcgggtgcaggcctcgccattgccgggtcaaggaggtccatgaggttgccctgttcccacaacctccatgcctgtggaagaagcgtctgcattgagccgttgcgaacgccgctgagcgtctccaggaggacgactccgaagctgtagacgtcgcacttgagcgtcatctcgtctcgtaacgcgtactccggagatgcataaccttgtgagaccacgagggtctggcctgactgatcggcgacgaacagcttggcggtgccaaagtctgcaatcttaggcttcaattcgtcgtctagaagaatgttgctcagcttgagatccctgtggattacactcccgtctggtccttcgtgaagatacgcgacacctttcgcgatggcctgaattatgtcgagtcttcttctccagtgcagattagctcgacgcggcaacgggccgaaaatgtggttgtccaagctcttgttcttcatgtaggcgtataccagtatacgctcattgccttcgttgcagtaagctaggaggcggagaaggctaccgtgatggagcccggccatcactgccacttctctggcgaaatccttcttgcctttgttcgtcagagctgactgctttagcctcttcacggcaaattcagacttagccaatctcaggtacaaatcctgcccgcggtcaacgtagcgaagatcgacgatgtcgtccgtccaaatgacgcagccgccgccgttgatgtcggcggcggcgtaggccacgcacgagcagtttcccaggcacctccgctcgcactccgccgccgtggcgcccatgtccaccgacgcgttgcgcgtgtctggcagcttcaccccccgcaccaccttgaacttgtccgtcgtcctgctcccgccgccgccgccggcgcagtccagcgccacgcctcgccggcacccaccggaggtgttccgcaacgcccacgccgacggcgacgcggcggtgaacccatccacgcagccgcagaacgacgtcgccgcggcgtcggcgtcgcacaggccgaacggcccgcaccgcgcgtagctgtcgcaggggtccctcgggccctggaagaatcgctgccatgcccggctgctcgcgacccacacgaggcgctcgaccacgccggtgtagttcaccacgacgcgcgtcaatggcgcggcgccggccgtggcgaccgatccgtagccgtaggtcacctccctcgcgctggacgtcacctgcagcgggaacttgtcggagtagttggacgcctccgggacgccgttgaagaacctgccgttccacgggcccgtgcggtacaccttggtggcgccgccgccgccgccgcctcgccacaggacgagctccggtaggccgtccgtggccagcgtgcggcggtagtcgcccggcgacgggtcgtcagcggagcgccacgccgtgatgaaccactcctgcccgctccacaggctcttgcccatcttcatgccgggcagcagcgtgtccgacggctggtcgaacgactgccacaggtaggcgtcgccgccgctgccattgcgcacgacgaggttgccggagtcgagaagctgaaccaccgcggcagaggcggccaagaagctcgcggaccacaccgtccggcgagagccgccgtcgagcaggacgagctggctgccatcgtcgttgagcagcagcacgccggacttgccgtcgagggggcggtcacggttggctacccagtagacggtgtcgccggacacggtgaaccatatgccgaggtatctcttggtcgacttcccgggagagaagaaccccagagtgtacgagccgccgccggacgagacgagcgtctggccgtcggtgaggttctggcccttgtcgagcttgtcggcgacgcccgcggcggcggcggccgacgtttggccggagaggaggaagaagaaggcgaccaggcggagtaggttagacgattgcgtcaactgattccccgatccagtattgttatcatccagaggaacccttccgacgaaaaatgcagcttgcttcggagcaggaagtgtaacatccccactgagcatcctgagcaccaggggcatgcttggcctatcacctggtaattcctgcacgcacagaagaccaacctggatgcatctgcatacttcatcgtaagagcatatggtgcccatgagtggatcgatcagctccgagacactgccttccttccacagtgtccacgcgtaacccaagagattcattgaccattcttcatcaacaaatgagctgttccttcgtccgctcacaatctctaggatcaacacgccgaaactgaagatgtctgatttctcagagaatttgccctccattgcgtactcaaagtcagatatcttggggttgaaatcatcatcaagcagaatattgctcgctttgagatccctgtgaataattttgagcctggaatcctcgttcttgaactcttccaatccctgactggatctgtttgacagcctcttgacagcaatctcctggccatcaggtagtacccccttgtaaacaaaaccaaatccgcctccaccaagcttgttgctaaaattatttgttgcgccggcggcttcggcctcgtcgcctccgccgtcgccgcggcacaccacctcgccggcagcgaatcccctcccctggaggccagtccgactaatgggctttgccgttagcggccttcccatatcagccattgccgtcgacgaagaagcttcgcgtgggtggtagagcggggcggagtgaggggcggcggcccggcggatcctcgcgaccacgtacggcttcgtcttgacggcaccgacgacgcggaaccggtcgccgccgacgtaccccacctcgccggccgccaccccgccccccactccgccgcggcgccgccgcccgccggagtacacgacgccgatcctggagccacgtgtgcaccatggtccggttcctgaactcgaacgcctggagctgcaccgtcgcgccgggaagaccactgacgggaacagcacgatggggatctccgccgcttgctcctgccgcctcctcgacgccgccgcggcgccctcgtccacgcagccgtgcaggctgctgccgcccctgcattcgaggcgcctctctccggcgacacttgcggcgagccgtgccgatgcaggctttggccgcagagaaaactgagacgacgacgacgaagaagaagaagaaccgatgaagctgcggttgatcggccttgcaaagctagatggaacttgcagcgtcttgagggccatataagtgatcaaatacttcactttatttgtttcaatctgatgatgagctcgatggatgtgcagaagactaaaataccaattaaactctcgtttgtaagcggcggttgcagcggatgggagagagaggaggtgaagagaagaggtgatccgagaaggagaattcaggaggaggatgccgaggaagaggagcctgactcttcttctttgagaagtctgaagaagaagtggagataagatagaggctcccacttatagcgagtgagagaactcgttggtttgcttctctgcacgtatcagtatcgccaccagtgtagtgctat

SEQ ID NO: 13094 - DNA, 395 bp, Oryza sativa
  Clone ID: PAT_MRT4530_19160C.1
aaaaaacccaaaacaaaggccggagacccccaaaacaaagggccaaaaaaacccccggggctagaccccctatttttagggggggttaacgcgggagcccccaaaacccagggggggtgggtaaaaaagcaagcttgtggccggccccccggaaaaatccccggggggggagaaaaaataggggttatggggttcacaagggggggcaggggtggaccttctgggaaatgaacaggggcaaggaggggcccccgggggggggggggccggccaaggggggggggttgccggggacaaaaccggggggggccctcttggagaggggcccgcccactgacgggggggggggcaaggggcccgggaccccaggcccaaatttcgcccccttcccgggg

SEQ ID NO: 13095 - DNA, 312 bp, Oryza sativa
  Clone ID: PAT_MRT4530_19161C.1
aaggataaaggcaggcctgaaaatgattgatcttttatccaatgggtcctatttctagtgtcagcacacgacagtatgcaacaccttattactagagcccatgtcccccccgtttggtcaacaccaacctctggacgagagttggactttgacatgggccatgttgcacatgtctggcatcagcatcgccatcttgatcatccgctgctgcccgagtccatcacaaataactttgcgcatgctctagcttatttggcaacaggtgccacaatggcactgaggcatcatgccgttgatctccatgcaacattg

SEQ ID NO: 13096 - DNA, 252 bp, Oryza sativa
  Clone ID: PAT_MRT4530_19162C.1
atggcgcaccagatgggctggcggaagacgacattgctgcgggcggaaatctcatcgaaggagaggtcgcctggaaatcgcctttgtgccggaggagtcgccagaggagagagagaagaggtttcgcttgagcggaaagaaggttggatcaaagtaaagttggaggcggagatcgagttcggaaacagagcagtaatcagctggagtccagatcggctacgattaggatcggctgggtctgagtcgggctga

SEQ ID NO: 13097 - DNA, 207 bp, Oryza sativa
  Clone ID: PAT_MRT4530_19163C.1
gctacatcacagggtgaaaaaaatatgggcactcaatcatgcatacggtgtatccctctctataactcactgaccctcacatcagggaaactattaaggcctgagcagctttgccagacgattcttcctatagttgttaccaaccatattacatcttggaggacacgtatacttttaatgcttgacggcctgaacgtaccctgaaat

SEQ ID NO: 13098 - DNA, 273 bp, Oryza sativa
  Clone ID: PAT_MRT4530_19164C.1
atgtcaggtttgaaggtggcgaccatgggtaagcatcgtggtagccaaggcggtggtggaagccacatccaggccaccacagcaggatccaacgtcggagagaagctttgcaacgacaacaatgatcatgtgttgaggcaacggctgtgtggtagcccgatgcatctatggcggccactagtgacgacccaagggggagccattgaggccttcaacggcgatggagtgacgaccttatgtgacgctggagtacgaggtgtggaggctggctga

SEQ ID NO: 13099 - DNA, 641 bp, Oryza sativa
  Clone ID: PAT_MRT4530_19165C.1
ccgccgcctcatctcccaagctcctcctcggccgcgtgacgggaagcggagcgggaaaaggagggcacgagggtcggtacacgagctcctcgtcgacgccgccggggaagggagggagggggaggatgatccttccgctggcgaagctggggacgctggcgctgaagacgatgtcgaagccgatcgccatccgcctcaagacggaggccagccgccaccctcagttccgccagctcatcatcaacctcgcccagacaaatcatcgggtctccacaaatatccagagaagaatatatggccattcaactaaggttgagattcggcctttgaacgaggagaaagctgttcaagctgctgctgatcttattggggagctctttgttttctcggttgctggggctgctgtaatctttgaggtgcaaagaagcgcaaggtccgaggcccgaaaagaggaggctcgtagaaacgaagttgaggcgttgaggcaaaaggaggatcagttggctcgggagatagagattgtgaagcagaaacttggcgagatagagcgccaagctaattctcgaggtctctctggagttcttttcagaagcagcagtgctccagaccaaacaaaggcctcatgagtttgattaactagg

SEQ ID NO: 13100 - DNA, 366 bp, Oryza sativa
  Clone ID: PAT_MRT4530_19166C.1
acgtaataccatccattttttttattggcgaccaatttatcaaaattgctctaaaaacatattttgggggaatatagccggggctttgttttaaaatattcttacccaacgaaaattggagaacttttacaataaaaccggtcggaaagggagggaaaagatttttacatatgggtctaagagcagaggcccttgaaatggtccaaaaccaaattggaaaataaaaatttatggcatattaaatattgggttatcatcaaaatagccccaaaacaaaggtggatactataattaaagggagaaatccaccaacgcgaagcttgatcttaggttaagtgcccccaaaattcttgaaacctgggggct

SEQ ID NO: 13101 - DNA, 562 bp, Oryza sativa
  Clone ID: PAT_MRT4530_19167C.1
ggggagctcgtcgaagagctttctgaacccggagtccccgacgcgcgggcaggcgaaggcgaccgccgtgacggggcaggcgccgtgctgattcaggccgttggagacgatgtcggcggcgttgagggtcgcgacggcggctccgaggctatggccgacgacggtgatgctggtctcctcgtccttgtacttgtccattagcctcttgatctcatccgaaatctgctccctggcgctgagcttgctgtacttggacgccgggtcgctcgccgtgtagatggacagccaccccctgtgcaccctcggcgccggcgaacggccaccggcgccgagcactccggcggcggacacgagcgtgaagtcgaggtcgttgagccactccatgggccggacggtgccgcgccacgcgaccaccacgtcgcgcctgcccagcgcggccaccccggcgtccgtcgccacggccacgtaccccatccagttcgactcccggttccgcaccatgaacggcgccggcacgccgccggcgcccgcggtggcgtagaagaaggccgtcaccacgaac

SEQ ID NO: 13102 - DNA, 1481 bp, Oryza sativa
  Clone ID: PAT_MRT4530_19168C.1
ttttgtttttttttttttttgggtcattttttccagtatcttctaaacaaagatgcaaacttaccacggttcactgatttatttcactacaggctacaggtacagaaaatttacgcgcatgtcacagattgcacacaatcggaagcaaaaacagcatatgacgaaacatagggacaagctagttagcttcacatttcacattgatcacagcgtcatttgtcctggctactttcttctccctcgtaatccatcaacttccagtggccatcggcgcccctcaccatgcccttgtccctctgcacgctccacgacggcgggacgtggtactcctccttgagcgcgtccacattcttgttcaccagcgccacgtcccggtcgacctccagcttgaacccgccgcgcttgccctgcgccccggcgacgccgtgcatgtagcactcgaggctgtgccacaccgcctggttccccggcgacttgaggtacggcgacctcctcgtgtcgacggggagctcgacgccgacgtccgcgtaccccatcggcgggtacttgggcacgacgtccggcgagttgcagacgcggaggaggcgaaggccggggagctcgtcgaagagctttctgaacccggagtccccgacgcgcgggcaggcgaaggcgaccgccgtgacggggcaggcgccgtgctgattcaggccgttggagacgatgtcggcggcgttgagggtcgcgacggcggctccgaggctatggccgacgacggtgatgctggtctcctcgtccttgtacttgtccattagcctcttgatctcatccgaaatataaaccgtgtaatcaagtcctataatagtatatatagatggttttgttgatgtggcatcccagtcaacaatatgagactgctccctggcgctgagcttgctgtacttggacgccgggtcgctcgccgtgtagatggacagccaccccctgtgcaccctcggcgccggcgaacggccaccggcgccgagcactccggcggcggacacgagcgtgaagtcgaggtcgttgagccactccatgggccggacggtgccgcgccacgcgaccaccacgtcgcgcctgcccagcgcggccaccccggcgtccgtcgccacggccacgtaccccatccagttcgactcccggttccgcaccatgaacggcgccggcacgccgccggcgcccgcggtggcgtagaagaaggccgtcacctcgtacagtcccgccagctgggtcgacgcctgcgccttctccaagaacctgtcgcggctgtaccggcacgcgccggcgtgcggcgaccacgcctcgcggatgaacgcgtcgttggtggcctgcgccagctcgccgtagccgatgacgctgcgccggaggtcggcgtcgagagggtcgaggaggcccttccagtggtcctcgccgtggagctccctccaccgctcagcgacggccctcggcgcagtggttgacat

SEQ ID NO: 13103 - DNA, 420 bp, Oryza sativa
  Clone ID: PAT_MRT4530_19169C.1
ggagcgagcggcggcggcggccgccgtgggctggagctgaagcggcggccgctcgccgttccttttgcaccaccaccacccgcatcacccagcggccggcatcgagacgtcgtcagcagccggcatcgagacgtcatggctttgcttttggctggcctgcgactgcgggagggagaggagggtaacatggggagcggcaggtgggcttggggaaagtatttacagctcggcgtatgggacgacgattactggtggccggctgtgcgccgctcacacgtcgtcctcgcttgcgccgaccgcccccgccggagcaccgctgcccgcgcaccccacccgtgcgccgtcgctgctcgcatcgcccgccgtcaccgcaggagcgtcaccatcggcccgctgcctttgcccacatgtgggagttaa

SEQ ID NO: 13104 - DNA, 797 bp, Oryza sativa
  Clone ID: PAT_MRT4530_1916C.1
ttgttgtttttttttttactctgaacttgatgtaggccattaattctgcaatcgtagtaatttcacacacaaacagcagagcaatgcaagaatttttgggacagatttaaaaatcagtacagcaccaaaataacataacataacacaaccacatgcgtctcactcagaattgtcttgacattcttattaccatgtgaggatgcagaaccgaaacggactcacgataagtctccacctctctaggactctaaatgctagcgagtggaatgctaaagtaatattacctccagtaataccagcaccacggcaaaagggggtaatccaatctcatgtaagccatagcagcagaccaaaacttcttacgcgtcacagcaccagattacctcttcaggtgaaggatgaccaccgcaacgacggccgtggcggcggctccagcggcggcagctgccatcagcccgtgataacctacctccgcttccttagatggcgtcgcgggagcagcagcctcatcctcatcctctgcatcggcggcggcggcggatgcgttctcagccttgatctacttatctacgcttcctacgatcgccccgccgccctagcagcctcatcctcatcctctgcatcggcggcggcagcggatgccttcagggccttgatctcctcctcgagggccgccacctccttctgcacgcccttcagctcggcgtcgaggtccgcgcccctgcgccgctcggcctcgtggttggacttctcggcggcgaggagctccttcacgcgcttgatttcgtcgcggagcg

SEQ ID NO: 13105 - DNA, 302 bp, Oryza sativa
  Clone ID: PAT_MRT4530_19170C.1
ccagcctcgtccaccggctgcggtcttgcaggggctacactagggcggcgcgcgtgcttgtgaagaaccttcatcgacacgcgcaacctggacaggaacgaacccatcacttacatgacacctgcacaggaacggcttaatcacctccttgacgtgatcggatgactgcttatcgagggacccgaacctgatcgcgttcgggctgataacggggaccgccccacggagctcttcttctataaaatggaacaggatcactgggattttcttttgcagcatgggctagaatctctgctacttct

SEQ ID NO: 13106 - DNA, 165 bp, Oryza sativa
  Clone ID: PAT_MRT4530_19171C.1
atggagttgacaagcacgtatgcagagtgtgatgatgagctagctaacttagccaaggcgaagaggagttgtcaggagaaggcaactgcaaccaggagcgctcaggacgacgaggtggcagtgcagatggacgcgacggtctacctgttaattgctgatgattga

SEQ ID NO: 13107 - DNA, 393 bp, Oryza sativa
  unsure (1)..(393): unsure at all n locations
  Clone ID: PAT_MRT4530_19172C.1
aaatatcattacacttattcttttcattatccaagcagcattttacatacaactccaccacacttattatnattcacacacatcctatatataattctaattaaacaacatattttattacttattcaaccaacctttttctctactttttcactaaacatacacacatacatctatacatttctttacctcttatttaacccctctaaaatcccacttttaaattaacttgcttctatttatttcacacatcctaaaatcattaacctaataacctcctaattcttaatataatttaatctgaataccactcctattaacttataataccaaaattctcattatcatcaaacaaatatttaattaacaaaatcttcatataattatttcaca

SEQ ID NO: 13108 - DNA, 246 bp, Oryza sativa
  Clone ID: PAT_MRT4530_19173C.1
atttcaccacaggaaacaagttatgaccaatggattacagccaagctctaatgacggactgcactatagggaaagctgggtacgcctgcaggtaccggtccaggaattcccagggtcagacccaacagcgtcacgagctggaaggtacagagttggtatcaagtaattcagtatagatatggtgtgctgcctgcccagtggcccaatgcgcttaagcgccaactggctatggttaattgttggctg

SEQ ID NO: 13109 - DNA, 324 bp, Oryza sativa
  Clone ID: PAT_MRT4530_19174C.1
atggcagggatgcagcagggtggccggtgcgcggaggttgaggagaggcaacatggcagtgatgggggcgacaacagggtagctcacaaatcggcgacaaaggggttgaggtggagcgtgctccggtggggagtggcggtggcagcgacggggagcggccgtgtgctcgcgcggcgcggcgacggcggtggggagcggcggtggcggcagcggggagcggctgcgtgcttgcgcggcgcggcggcgatagcagcggtggcggtggcggaaacctctttggcctcgccacggcctcctccttggagctcgtcgccaggaacgtga

SEQ ID NO: 13110 - DNA, 435 bp, Oryza sativa
  Clone ID: PAT_MRT4530_19175C.1
tttgtttttttttttttttttgtttttttttttttttttttttttttttgttcggtgttttatccttaaggaaatattaaaaggaatacggggaacaaaacaaaaagggtttaagaaatggaaaacaatcggcctccaagggtattgggaattaacccccacaaattaaccccctcctataaaaaaatgagcttctttgatggcaccctactccaggtgggagaaggggccaaatggcccaaattttaaggtttcccgggcccccggacacgggaacaaccaataggtcaacaatcctgggagcctaaagctattgggcccgggatgtccctccaaaaagggccccggaaaactcttaaaaagggggccccaaataccactggatctggtggaggtagggcccctgggaccggggcccttggccttggggaaccc

SEQ ID NO: 13111 - DNA, 182 bp, Oryza sativa
  Clone ID: PAT_MRT4530_19176C.1
atggcatgggcgaacaccgtccggtggggtgggtcacagcacttgccatggcacacgaaaagtgcgggctatgaaaggttccagaggcgtcgatgtgagatcggacggtgcatcggaatggtgttccattcaccttcttcctcctcgcctcgccgtgacaagcgattggagagcgccgaaag

SEQ ID NO: 13112 - DNA, 282 bp, Oryza sativa
  Clone ID: PAT_MRT4530_19177C.1
atggtgattggcgatgcgagtgccgtgcgtgcgcgcgtgagaagcggggattattttttctttcattttttcccggtggatgtggacatcgaccggctcctcccatttgtagatagatgcggctctagctttttcaagtcccttgtgtgggctgcaaagagaacacagtatcagcctgtgaccaatgtgctgtcactgggctacaggatcatcgtgccactgccagtttgtcaccgatttgattggcttatctcctgggagattctccttttaagggtttaa

SEQ ID NO: 13113 - DNA, 756 bp, Oryza sativa
  Clone ID: PAT_MRT4530_19178C.1
atggcccacgcgcggctgcccacgccagtccccacccgtcgttgcaccgccgcgcccatcgcccacgcgccgccgcccatgcccgtccccacgcgccgttgcaacgcctcagtagcggcctcgctattaaaggaggaagagagaggaagagaaagagagaggagggcaatttggtcatgccatagaaaagaaaggggaaatcggcgaggaggagaagccgtccgctcccgccgccggccgccgtcggcttcgagccattcactcccgccgaccccggccagatccaacgtgaagccgcggaagccgccgacgacgacaagaagaagcaggcgcaggtcaagcccccgccgcacctgcacccgcacctcctccgtgccgccgccggcggcccggcccacccgctcctcctcctcgcggcggcggcggctgctcgaggtggaggcgtccctcggtgaggtcgccgcggtggagccgcctgagcagcagcagccggagaaggaggcgcggcgagggaggcgacgaggacgacgggaggcgaggaggacgccagagctgcagcctttcccctcctcctccgccgcccccgcctctcccaccgtcgggaaaggcgtggcggtggaccgggaggaggcgcagcggcggaccggcgcggtggcggaccggcgcggcggcggaccgggaggggagcggcgtgggaggcgaggaggcgaggagcggtgtgggaggcgaggagacgccgggaggggagcggcgtga

SEQ ID NO: 13114 - DNA, 885 bp, Oryza sativa
  Clone ID: PAT_MRT4530_19179C.1
gaaaacccctgctcccgtctcctcgcctctcacgccgctcccctcccggcgtctcctcgcctcccacaccgctcctcgcctcctcgcctcccacgccgctcccctcccggtccgccgccgcgccggtccgccaccgcgccggtccgccgctgcgcctcctcccggtccaccgccacgcctttcccgacggtgggagaggcgggggcggcggaggaggaggggaaaggctgcagctctggcgtcctcctcgcctcccgtcgtcctcgtcgcctccctcgccgcgcctccttctccggctgctgctgctcaggcggctccaccgcggcgacctcaccgagggacgcctccacctcgagcagccgccgccgccgcgaggaggaggagcgggtgggccgggccgccggcggcggcacggaggaggtgcgggtgcaggtgcggcgggggcttgacctgcgcctgcttcttcttgtcgtcgtcggcggcttccgcggcttcacgttggatctggccggggtcggcgggagtgaatggctcgaagccgacggcggccggcggcgggagcggacggcttctcctcctcgccgatttcccctttcttttctctaccaaattactcgagaaattttcgaggccgctactgaggcgttgcaacggcgcgtggggacgggcatgggcggcggcgcgtgggcgatgggcgcggcggtgcaacgacgggtggggactggcgtgggcagccgcgcgtgggccatgggcggcggcatgcgcgcacactccgaagacggacgcccgtgcggatggtcctgggcggccgctcaggggcacaggctgtgcttactagggcctcgtgctatcccctgtgcccgaaggtcccttggacagccctag

SEQ ID NO: 13115 - DNA, 504 bp, Oryza sativa
  Clone ID: PAT_MRT4530_1917C.1
atggacatctctagggcaaatgaaggctacacgagctgcggcccggtagtcgagatgtcatggcacagggccggtgtcctgctgctaggggctcagtcctgcctacctgtcccggaggttccggccgtaggtggggttgggtcgatggccggcagcatcaaccgtcgtggcctggacctgactggcttcattttggagctgcggggcatgtgcgttgtcctggggtatccgcatggagtggactaccagggcaagcagctcccggagcaggagggtgacgatgcagagccccacgctgcttgggagagcgccgtgctcctcgccatcggcactcttcaccagcgctacctggacgagttgcagcactcgccctaccgctaccaccctcgtcgaggaggagcccgcgactacgtgtcacacgctgcagcttcggaagatccgctcttcgtggaggttgaagccgacgtttgggaaagcgagcaaggcaagtcacatcatccttga

SEQ ID NO: 13116 - DNA, 300 bp, Oryza sativa
  Clone ID: PAT_MRT4530_19180C.1
atggcatatacaggtgtggaaatacctttaccaccagaagctccaatggccacacgatcaccaggtggtggcttggtccgtggaggaaagagggctcaggggctaaccacctcgcaacttagggctctggcctccgtctcccgccttttcgccgagagcccgcaagaggaggtgagcaggagtggcggggaggaggaaggcgagggagccagcgagctcaagctcgccatccccttcgcggtaaggcggcaacggcgaggagagggccaggagcagcgttggcagcggtgcgagagttga

SEQ ID NO: 13117 - DNA, 382 bp, Oryza sativa
  Clone ID: PAT_MRT4530_19181C.1
tttttttttttttttttttttttttttttttttttttttttttttttttttttttttttttttttttttttttttttttaaaccccccaaaaaaaagcaccaggcttaattatttaacggggaaacacgctgtactaaaggggccaaaaaaaaccataaaaaaaaaaaaatgggggaacagcccccaagattttagttaccagtttttggcccccacaactttggttcccaagcaaaaaggaaacagtttctcaaagagctaaacttaacttgggcctttggaaaatctggggcaggaaggattaaaaaacattctaaacggtttggtggggaggggcttgaaggggggaaaaaaactaatggaaaccctccctttcgaatt

SEQ ID NO: 13118 - DNA, 216 bp, Oryza sativa
  Clone ID: PAT_MRT4530_19182C.1
atgaacacgacaagtttcttgctccagattctgctgctgctagcgatggtgattcttatggcaatggcaatggagcctgctgctccagagacaatggcgcgacgatctcccggaaacgtgaatgctaatcacgacccgtccaaacaatctggttctgcagtgcaccccctcaatacaccatgcaactacccaggacaagctggttgccctcattga

SEQ ID NO: 13119 - DNA, 2061 bp, Oryza sativa
  Clone ID: PAT_MRT4530_19183C.1
gccacgcgtcccgtctacttccagctagcctgagctctagcttagctctagcttagcctgaagaagctaagagaggaagcaacaatggagattgagagagagagcagtgagagagggagcatcagctggagagctagtgcggcacatgatcaagatgccaagaagctcgacgcagatgatcagctgctaatgaaggagcctgcatggaaaaggttccttgcccatgttggtcctggattcatggtgtctttagcctacttggatcctggcaatttggaaaccgatctgcaagccggagccaaccacagatatgagctgctctgggtgattctgattggactcatcttcgcacttatcatacagtcgctagcagctaatcttggagtggttacagggaggcatctggctgagatctgcaagagtgagtaccccaagttcgtcaagattttcctatggctgctggcagagttggccgtcatcgctgcagatatcccagaagttatagggacggcctttgctttcaacatattgttccatattccggtgtgggtcggcgtcctcatcaccggcaccagcactctactgcttcttggcctccaaaaatacggggtgaggaagctggagtttctgatatcgatgctggtgttcgtgatggcggcgtgcttcttcggggagctgagcatcgtgaagccgccggcgaaggaggtgatgaaggggctcttcatccccaggctcaacggcgacggcgccaccgccgacgccattgccctcctcggagctcttgtcatgccccacaatctgttcttgcattctgccttggtgctatcgaggaagacaccggcatcagtcagaggaatcaaggacgggtgcaggttcttcctgtacgagagcgggttcgcgctgttcgtggcgctgctgataaacatcgccgtcgtctccgtctccggcaccgcctgctcctccgccaacctctcccaagaggacgccgacaagtgcgccaacctcagcctcgacacctcctccttccttctcaagaacgtgctgggcaagtcgagtgcgatcgtgtacggcgtggcactgttggcatctgggcagagctccactattaccggcacatacgctggacagtacatcatgcagggtttcttggacatcaggatgaggaagtggcttcggaacctgatgacaagaaccatcgccatcgcgccgagcctcatcgtctccatcatcggcggctccaggggcgccggccgcctcatcatcatcgcttcgatgatactgtccttcgagctgccgtttgctctcatccctcttctcaagttcagcagcagtaagagcaagatggggccccacaagaactctatctatataatagtgttctcgtggttcctgggtctgctcatcatcggcatcaacatgtacttcctgagcacgagcttcgtcggctggctcatccacaacgacctccccaagtacgccaacgtgctcgtcggcgccgccgtcttcccgttcatgctcgtctacatcgtcgccgtcgtctacctcaccatcaggaaggactccgtcgtcaccttcgtcgccgactcctccctcgccgccgtcgtcgacgccgagaaggccgacgccggcgacctcgccgtcgacgacgacgagcccttgccgtaccgcgacgacctggccgacatcccgctcccaaggtagagaagaagaagatcgacatgcatacgtatggtatagcgtatgtatacgtacgtatatacgcgtacattgtgaatatacgtacttacgtacgtatatgtgcatcctctatggatgccacgtgcgtgcgtcggagccgttcgtttatatttgtgcggtccagatcgctcgcagatcgatcgatcgacaagggtgtgcaattaatatataagcatttgaggggaggtggctcatgtatccttgtaatttatatgtacgatatgatttatcataattcagggcagagccaacgtccttcaatttaaaaaaaaaaaaaaaaaaaaaaaaaaaaaaaaaaaaaaaaaaaaaaaaaaaaaaaaaaaa

SEQ ID NO: 13120 - DNA, 354 bp, Oryza sativa
  Clone ID: PAT_MRT4530_19184C.1
ccataagaccgtgtgtaatgaaatggtggccacggaatgcctgcgtgtaaacgttggccaatccagatgaaaggaatgaactgaaatgaaatgaaatgaaaatgaaatgtgcgcaaagcccattggcgttggctggctgatggtgacatggtgaaaaaagtgtgtgcatgtaatgaatgatgccaagtgtgctggaatggctgaaagggacaatgcccctgccaaaggatgggtgctgtgtgctgatgtgtttatggttccaatgtactttggtatcctcttggagattcatcaatatgagaaaacagagactgcccaaccctcccttatcttatggaaaaaaaaaaaaaaaaa

SEQ ID NO: 13121 - DNA, 464 bp, Oryza sativa
  Clone ID: PAT_MRT4530_19185C.1
gacttatcacagccaaacagccaaacagccacacggcagcggtgtctccagggcttgcagaaaagacgagatttggcatgatcatttcattagctacaaaaagagatctataaactattcactgaccagcaaagtcaatcttcattccagccatgcttgaattcgccccaaatcctcacgcccggtcatgaaattgtatccatctaaagttctaaacagcaagccaacaacacaaaaagtacgacacaaagtattagccaaaaatattcgaatttcttcgggaaacatgaatggatttaactaaatttcaccacatagaaaagaatgaatttagcgaaaattcaccaccatagaaaagagaatgcccgggatcaaaccgaagattcgattcccaatccagcggagagattgggaagaacaaaaaaccttttcatgattcccaatccacatcaagtaggaatatt

SEQ ID NO: 13122 - DNA, 525 bp, Oryza sativa
  Clone ID: PAT_MRT4530_19186C.1
gtgctcctaagagtgaatttttgtcttaggggtatgattttagttccaacacagtccatacatttgttcaaatgaagagacctcttatttaacttatacgaaggccattcaactagttacgagaagatgtctagctacaacaatacatcacatttttctctgcatgctagctgctacattggattgttggctacagctcgatacaacttcctcaccctactatatatatacatatacaaggccgaggaatccaagacaacacctgaatagctccttcagggttggaacggaacgaccgatatattatcacttcactggccaatgagctctactaacaaagcctccactccagcaccgtgcatgtggaatggttacatcttatccaccaaacacacaagttgacagcaattagcagctcctgatgaccaagaatctgatctactctcattgcttctctactcatggaaatcctcgtaaggtgactctgatgatgagtccgagcccacgcgtccgcggacgcgtggg

SEQ ID NO: 13123 - DNA, 181 bp, Oryza sativa
  Clone ID: PAT_MRT4530_19187C.1
cggagggtgggagcgacgcaagaccgtggaacggcgatgaaccaggggccccaaacccgggacacggtgtcagttctcgtaccgagggcgctgcagaacacgtgcctcaagacgttggggccggcatcccggagaacgtgaaagccggcgccagacgcgcttgctcactccgcgccaaggc

SEQ ID NO: 13124 - DNA, 423 bp, Oryza sativa
  Clone ID: PAT_MRT4530_19188C.1
actaaaacatgcattattgttttttgataaatagccttcacctttcacgtgacaactgtgcgtgcaaatagcgtccaaagcccccctggcttcaaaacatttaaatatttggcctaaagggccaaattccctatactgagcggtataaaataacgactattatcatactgtgaaccctgtgagaaatgggggtacccctcacaattccacaaaacaaacaattccgcaagcgttatatgttacaatcaggggttcctattgcaccgaactactcacattcatggggcttggctgacagcacgcttttcagctggaaaaccttaacggccaccatgcttattaaatcgaccaacgcacgggggagaggccttcttgggtattgtggagctctttcacttcctgggtgactgactgcgctcccta

SEQ ID NO: 13125 - DNA, 873 bp, Oryza sativa
  Clone ID: PAT_MRT4530_19189C.1
atggttgagatttggatggagaattccggagttgtactgaggtggaggatgaataatggaagggggaatggctggcgcaactacgcctcttgctgtgctgcggtgatggcgtgcgtcaacgggcagtgcgcgacggcagcggcacgcaaacgggcggcgagcgcggcgacgggcgctgcagggaatggtggggccggggcaagcggcgggcgggttgggggcgcagcggacgtggtggagaggcggccggtggccggcgggcatgacggcgcccgtgccctcctgtcgtggcggcggcgacgccgcggacgggcgcgggctcgggttcacggtggaccgggcgcacgggcgacggttcacgggaacggacggccgagatcgatcctatccaaaacggacggccgagatcgaacggtccacgaccggctcacggggagcggcaacgatgacgtcagcgatgacgacagcgatgacgtcagcaccggcggcggctcgggagcgcaagctcgccggcgaacgacggcgctttggcacaaacggagggcaccaacgggtagagcgcgatgcggtgaactcaccggtgaccaaagaagcggcggaggaacaacggacagcgccggcgacgaggaagaagcggcggcggagatcgggttgacggcggcgacggagctctggcggtcttcggcggcggcgaaggggcggacgaggacggcggcgacttggcgaccacgacgatggccttcccgagtgacgacgacgaccgtagcgacgacggcgcacgactggagcggcggcgacgacggcggcgcgaaagctcacggggctagggcgctacacatgacggcgggcgaaggcaagggaggcgacgggtag

SEQ ID NO: 13126 - DNA, 694 bp, Oryza sativa
  Clone ID: PAT_MRT4530_1918C.1
ccaagtgctttgccgggttggatcctgtgtagggtcaaatgtaatggcaatatctatcttacagtcgcagcttcctgcgtacatgctacatagtgctgcagcccatgcaggtgagttctgtaaggcaacagtctcccatcggtggctccccccctcttggcagcctgcgcaccccccttctgcgaccaccacgcctcgtgcgtgcagcaccagggcttgcccacactggccccacgccgcgggcgcgctcccctacgctcccccgaccaggccattgagtgattggttcaagcgattggtggcaaacagctgacagactggcagcaatgttgagtgggtggtgctgactgtgatgctagactgcaagctgcaagcccaaactgctggtgggacctgtgcaacttgccatgccatgatggtgggtgatgctgaccctgaactgactgatgagtggctgcccagggagcattgcccccgtgttgggtggtgtgctggtgcctggaatgtggtgaacaatgatgaatgagttgcgtgatggttgaaaaatgaaagtgcatgacatgcatgcatgtgtgactgttgaaacttagggtcatataaatctaaataaaatcatcttacctatttaaatagcattcctctatgaggataaatcctatgacattatcgtagctaattaccatcaaaaaaaaaa

SEQ ID NO: 13127 - DNA, 2457 bp, Oryza sativa
  Clone ID: PAT_MRT4530_19190C.1
atggatctcgacaagtccacctccaccacagcgtccctgaagaagttgcaggacgacgacaccctccctgctcgcgggaccatgcagagggagataggagagaactcggatcctgttgttgttgtctttgaagaacaaccagacaagatccttgagtggaccgccaaacccgacctgactccctccctccaatctttcatcgacatcatcgatgacctccgagtacgggggttgtcggggtacaaagtcgctgcccacccggcctttgactactctgggccggaggacgcgacccgggtttctcctcggggtttggatagcgacaccgtggcacgccgcgtcggccaggtgatgatcagtggccctgcgatggcgagcgacatccccgtccctctttgcgagaagggtccggccgaacacgaagccgcgatcaacgcctcggacgcgtctcccccgcctcagcgaagacagaggctggtgacgatcgacaagaaggcggcgcgggcgaaggcggcgcaggatgggtccggggcggcctccagcgcgtcccctgtagtagcctcgactgatgtcgtggtcgtgactagggatcgggaggggacgccaagcggccccgccggcggccttgtgcccactcggggcccgcctgctaatgccctcacctggggggagctccaggccgagatcgaggaggccagggcggcagcgtcgtcggctaaccaacgcgccgacaagccagcacgagacctggtggaggcccgtgaggacctcctgaagatgagggagctggtggctggcaacgaaaggcagcgacaaggactcgagcaccggatgtcggagctcaagaacaacttgtcagagatccgcggctggttgcgggtatcttacaccagcctacaccagcttgctggggagtgcggcgtcacgatcaccatcccggcgaaccccgacgagttctcgctgacgtcctcgcttgtggagctggctacggcgatggaggagatccccttcaagcatgcaaccaggatcggcgaggagacgtccaacgggatctacactggggcgtgccacgtcctcgcatgcgtgaagctggcctatcccgaccttgacctcaaaagggctctggatcggggggctgccgatgacacgcgcaagggcgtgatggaggaagtcagtgacttgggggagtatgttctccccctttttgaagaagatgtcgacatcgaggatgtccagcagcacgggcagcctgagatgccggtggtcgtcccggcacttgcacttgagacgtacgtgcagcaggaggatgtcgcaaagactgtccgtggagacgaacacggcgatgacgtccttaggctgtggaagccctccgaggtcgcgaggtatggttcaattcgtaactcaggagctgctgcatggcaatggctggagtctgtagggagctccgagttcctcgcgggaatcccgaggaggatcggcaagcgcatcgacgaggccctgaagcaggagtgtcgtcggtcgagccactatgccggagggcatgtgctggcctgtatccgagatcaccgcccgcagctgcagctcgagttcctccatgaagggttctcgcgttctcggaggactcccgcagagattgaccaactggcgcagtcgatggcgccgcttgccgagaaggtctttcagtccatggattggcgttggccgtcctggtggggcccacctgtcagggccgtcttcctcctcgcgccgccgcagccccttccaaattcggccgcgtctttcccgatccgccgtgcgccgccgccgctccggtcgtcgtcgtcgctctggaaggccaccgtcgggatcgccaagtcgtcgccgtcctcgtccacccctgtcacgcccggaaattcactacgggctcgggttcacggtggaccgggcgcacgggcgacggttcacgggaacggacggccgagatcgatcctatccaaaacggacggccgagatcgaacggtccacgaccggctcacggggaacggcaacgatgacgtcagcgatgacggcagcgatgacgtcagcaccggcggcggctcgggagcgcaagcttgccggcgaacgacggcgcttcggcacaaacggagggcaccaacgggtagagcgcgatgcggcgaactcaccggtgaccaaagaagcggcggaggaacaacggacagcgccggcgacgaggaagaagcggcggcggagatcgggttgacggcggtgacggagctccggcggtcttcggcggcggcgaaggggcggacgaggatggcggcgacttggcgaccacgacgatggccttcccgagtgacgacgacgaccgtagcgacggcggcgcacgactggagcggcggcgacgacggcggcgcgaaagctcacggggctagggcgctacacatgacggcgggcgaaggcaagggaggcgacgggtag

SEQ ID NO: 13128 - DNA, 486 bp, Oryza sativa
  Clone ID: PAT_MRT4530_19191C.1
atggcggcgacgccgggctccgaggaggttccgtccaccggcgaggggcggccggagttgcgcgacggcggcggcgtaggaagagaacagcgcggcggccgtggagagggagaggagaacgggcagaagttaataaatgaggaatggagagaagtggttgaaagatttgggagggggtacataagaaacttgactaccttcgatctagattctattggcatgggcatggatataagaataaatactggcttgctaagtgggtcattatatgtcatcccaaagatccagggtgtaactctaaccaaggataatctagctaagcgcaaatggaaaggtggttattactttagtcacccggtggattcgcacctgggctatccttcacaaaccgggtcttcggatactattacagtggtaatcgcgacatttgggccagaggccggggtgggctcagttggaatgtatcatcttggtgtatttggctga

SEQ ID NO: 13129 - DNA, 131 bp, Oryza sativa
  unsure (1)..(131): unsure at all n locations
  Clone ID: PAT_MRT4530_19192C.1
atgctgcggaggcgtgcgaactgggatgctgttgccgcnagcggctgccgcggccccatgagatgcggaggctacatccctggctggaacgcggaactgtggtgcacagtggggaagccccgagcacccgg

SEQ ID NO: 13130 - DNA, 246 bp, Oryza sativa
  Clone ID: PAT_MRT4530_19193C.1
atggctggcgcagtgtggtggatggataaggatgtcgatagtattggtggggtggataaggatgtgctatgggtgccatattctattttgccagtagcagtattatacgtcggtctacatgtacgaggaaaatggagaaatggtggaggatcgtatatgctaatgcttgttgcttcagaaaaaggtgtgaccaagacgaaagattcgttcctacggaaatttcggttcctaacagttgacggctaa

SEQ ID NO: 13131 - DNA, 237 bp, Oryza sativa
  Clone ID: PAT_MRT4530_19194C.1
atggacgggggcttactcaccaagggtcaaccggtcgacgtcgcgcttgacgccgcagtgggtggcgagccgaggagatctcaccgtgcatgcaatgcagcccctgtggtggctcgggaccgggaggaggggaagccccgggcgacgtgggccgaggcgctcgccagctgttcgatgcaatgcccacgcctgcctctggttcatgtgcctgtgggaggaatcgagggggtggagtag

SEQ ID NO: 13132 - DNA, 747 bp, Oryza sativa
  Clone ID: PAT_MRT4530_19195C.1
agttccatcaaagaaaagatcatgggatgggtaaccgatgagcgcgaggcattttgctcggtcgttcttgacatgtcaaatgtggtaaacatggatacttcaggtcttgtggcgctggaagaactgcacaaggagctggcgtgtctcggcatccagatggctatagccaagcctggatggcaggtgatccacaagatgaaactggcacggctcgtcgacggaatcggagaaggatggttcttcctcacggtgggcgaagccgtggaagcttgcctggcaaacaaggcgggaaacgccctggaatgctgctgaatcgaatccaccgtgtgcatggtctctccggtggttgaataaagagagacactagtgcttcgtggtacgctacaaaaggattgtgttgtgtgctagtgctgcacgatgatgcagcttcagctgtagtgtggtgcttcatggattgtgcgacgtgcaactgttgggggaagacgaactgtgtctgtctgaacttagtatgccgagttcgtctaaattccccactatagctgtaggtttgtgatgtatcggatgcatttgtgaagagcaaatgccaggttttaagtgttggaactgatgattgtgtaatattattatattaatcgagtttgtataattaatttgtactcgagtttgtgcgttttggcaaaatccgagctactatgctgcaaaattcatttgtcccaaaaaaaaaaaaaaaaaaaaaaaaaaaacacc

SEQ ID NO: 13133 - DNA, 328 bp, Oryza sativa
  Clone ID: PAT_MRT4530_19196C.1
ataaaaaagaaaacgtttgtttttgctcaaaatatattaaatcataaaaaaagaaaatgatgttcaaaggataaaaaaataaaaaatttactgtgggaaaaaagtaagtttaaaaaaattttttgaaaaggttgggaaaactttattttgattggaaaaaccaaaaaaattttgttgggaaaaaaaacatgaaagtaatttttgttctactacacataaaaaaatggggtaaatgggcacggacgcttatgtaaacacggtaatttgggaaaggatccttgaggcttacaaatttttcatatagggaggtatatataaatttggggga

SEQ ID NO: 13134 - DNA, 2611 bp, Oryza sativa
  Clone ID: PAT_MRT4530_19197C.1
atggcctcgcggtcgccgaccaacaaacagatcagctcggaagatcgcgtacgtggtgctcgcggcaagaggcaccatcattcctccgacgagtggagcatggagcacgcggaggagcacgagcatggccgtggcggcggcgagcgcgacgacgcggcggagcccgaggcggagcagccggagctggagcaggaggagctgagcgactccgagtcgggcgccgagtcgatcgagatctccgacctcaagaagcggatgtggaaggaccagatgctgctgatgaagctcgagggtggtcgccccggcggcggcggcggcaggggcggcggagggttggcggcggcgggggccgggacgtcgtcggagggccagctggaggaggagacgccggaggcgcggtgccggcggaaggcgatgctccgggcgcaggacggcgtcctccggcacatgctcaagatgatggaggcctgcaacgcgcgcgggttcgtgtacggcgtgatcgacgaggccggccagcccatgtccggctcctccgacagcctccgcgggtggtggaaggacaacgtcagcttcgaccgcgcgggccccatggcgctcatcggccccgccgccgccggcgacagcccccaggcgggcggcggcggcctccaccggctgcaggacatccaggacagcacgctggggtccgtgctctcggcgctgatccagcactgcgagccgccgcagcgcagcttcccgctggagcgcgggctggcgccgccgtggtggccgaccggggaggagccgtggtggggcacccagggcgagacgcaggcgcaccagggcgcgccgccgtaccggaagccgcacgacctcaagaaggcgtggaaggtctccctcctcagcgccgtcatcaagcacatgagcccccgcttcgaccagatgcgcaagctcgtgtggcagtccaagcggctgcagcagaagatgagcgccaaggagtccgacacgtggtccaaggtcatccgccaggaggaggccctcgaccgccgcctcaagacctcgctgcacatcaccctgctcgacgccgacggcggcgaggaggacgacagcgacggcctggaggacgtggtgcgcggcgccgcggcgcaggacaagcgcaagcgcgagtacaccagaagcggtagcgggagcagcagcggcaactccggcggcgggaagttcccccgtggggggagcggcggcgccgatcatcatcagctggccgtcatgctaccggagctcgcggcggcggcggatcaggaagggcggagcccgatcaacgagctgatgaagctgtactacagctgcctgcagcaggaggagggggcggccgacggcggcgaggcgggcggcgaggggtgcgacgtggcggcggcggcgctggccgttccgccggaggtgctggccggcgtggatgaggtggcgcaggacgtcctgttcgacctcatcgggagctatccggaagtggacgacatcctggttgtccacgcgccgccgtcggatctggacacgatgcgatgcggacgcgcgcggctctccaaccacttcctcaacgcgtacgcgaggctgtttccctcccgaatccctgtccgcgcgcagggtgttcgacgaaatgccttaccggagagcctcgtggtcacggccagcccgggtgccccgtgcccggaccatcctgtcctggtgtctggtgatggtgaagtttttgatcccaaaactggtatatggagtgagttgcctgaaatgcctttcatgaaagcacaggtattaccaacagctttcttggctgatgttctgaagcctatcgccactggaatggcgtcctacaagggaaagctgtatgttcctcaaagtttgtactcatggccattcttttttgacattggaggtgaaatttatgacccggaattgaattcttgggaaacaatggcagatggtcttggtgatggatggccagcaaggcaggcaggcacaaaattaggtattgtggtgaatgaggaactttatacgttggagccttctagctccttggacagtggccagataaaaaggtatgattctgaacaagacacctggaaaactattgtaccacaggttcctgttcatgatttcaccgatgcagaggctccttttttacttgctggccttcatggaaaggtccacgttattacaaaagaggcaaacaacaatcttcaagttatgcaagctgtattgcagaataacattgagaacagtccatctgaagaaaacatcatatggaacatactggcttcaaagaactttgggtctgctgagcttgttagttgtcaagttcttgatgtttaaatgtgggataaattcagttactgatgttggcatcccgtggttcaactatctttttgactgattggatctataatttgacaaggggagagatagatatatagattacaggtatttagatttgtataagttgattcttgcccaaacactgttatataggccataagtatacatgattactgtatagttagtgttcttgtacacatggagagatttccagctgttgaaccttatccattctgctatcaactgtacaccaaaaaaaaaaaaaaaa

SEQ ID NO: 13135 - DNA, 361 bp, Oryza sativa
  Clone ID: PAT_MRT4530_19198C.1
cacagtgtcatgaggtgatggagcaagaccgkchttyttgtcacgcggatggccatacagcvgkagaccgacattcaaarttgattaatttgttkacaatagtatcgactcatgccatgttgagaacggtgatcagatgtbcagaatttctactagggrggatggttgdtgataactggtaattgactttctdactaakcaccttggaaaccatsststtwvctamcaattggtchgggtttabyaggtccgmkgatgvatttgaatacccytggaacctggmtmcawmtagcacacdaatscscmchdcactttyaaccttsahagsttagccccmcttggccctttkkgcggcmctaah

SEQ ID NO: 13136 - DNA, 183 bp, Oryza sativa
  Clone ID: PAT_MRT4530_19199C.1
atggcggtgcgagctggtgaagacaccagcacaggggaatggtgcagccgccggatttgggaggaggaaagagagggaggggggcagcaggaggcggttagttggtcggaacgtgctggcactattgatggccttcagccaactgttcagatcaaggcggcggcggcggctcagtcgggctag

SEQ ID NO: 13137 - DNA, 264 bp, Oryza sativa
  Clone ID: PAT_MRT4530_1919C.1
tcagacgtgcccagggatgggcctcaacatatatatcacaaactcaacagtagatattattgcagttactagaagcaaccacatgttggagagcatcaggtcaaacaaaccaacaggaacaacaatacaaggagagcagtcaagccagcagacaagtgcccatccccagtacatatgccatttcatccccatgaacagatgcaatgccgccaatcccctgcaccaatgccgtttcttccccgtgaacagatgcaatggcgccat

SEQ ID NO: 13138 - DNA, 324 bp, Oryza sativa
  Clone ID: PAT_MRT4530_191C.1
ggtctggattaaaacgctatgcggggaggggagttttaaagcaattctgggtctactacacctctgccaacactcaatgcaaaatagagagagagctaactcgatagaataggtttcagtgcttgcgctcgcgctaatccacatctcaacgccagagtttagcagccgtacaagacatgatttgacaagactgaagagaggtgctgtaagagccccatgtatcaaataagggctgtctgccattacagcggaggctggggaagcgaagcactgctgaacagggcacgagcacaggcaccaatgttgagctcagcttggacgact

SEQ ID NO: 13139 - DNA, 7948 bp, Oryza sativa
  Clone ID: PAT_MRT4530_19200C.1
atggagatcttgggccccctcccaatggcggaatcttctcggcaagcggcaattgatggctgtacttgggtgaaccgcgtcgcgaccagctcggctgcgaactgttcctcgactactactactacagtctctacttgcccttgctgctgcaatggtggtggtccatgtgagcctttctcagcgcggtacacactacacgctgctgactcaggtgaccagaaataaaggcaaaaggggggtgatgttgcatattgcaaagcttattgccttgccttgctacagctgcccactgcctgcgcaccagtggacacagccccacttatagcatcggatatggaatatcatgaatgtgaggaaaactgcccacaattggcgggtatattaggtgtgcttttcaggctcctagcacttcgttttgcatggaagcatgatatattttgctgttgcttgaatgcatactttgaagaagtggaaacttcttttgttgttacatatgatttaccacgctgctgctcaattctgagcaccaaagacattgagacagacagacacatcgtgcctctgtggcagcttacttgctcatttgtgccaatggcttctttggtccggcatgattcaaatcccacccagtactcatggtggtgggttagccatatcagccccaaaaattccaaatggcttcaagagaacgttacagatatggacgtgatggtcaaagcaatgatcaaacttatcaatgaagatgctgactcttttgcaagaagagcggaaatgtactataagaaacggcctgaacttatgaatcttgtggaggagttttacagagcataccgtgccttagcagaaaggtacgatcaagctactggtgcactccggcaggcccaccggacaatctcagaagcatttccaaatcagatgccgtcaatgtctgaagactctccctcctctggccaggatgtggaaccacgtacaccggaagtgttaatgcccacccgtgcaccatttgatctggatgatctgcaggatgcagctggtgtatcaccacaccttttaactgtcaagaggaatggtacacagcctgatgacataggtttttcgtctagtcgcaaaggtcttaagcagttcagtgatttgtttgcaggcagtgacagtagccagcgtgtcaatttttctgatggaaaaggccaatgcagtctgagcttgagactctggatcagaaggtcagggtgcaggagcaagaacttgaacaaaagtagaaaggagatagaaagcttccacttaagtctacaagatgaaatggccaagcgcaagcaagctgaagatgctctatgctctttagagaaacagtacgctcaatcgcagaaagaaataaataggttgactctagatatggagatggcaaatgatagattgaatgacttcaatctggtgaggctcaatctggagaacacagtctgtgagctgaagaaggaagtcacgagcctagaagtgaagatacaaatactggtgcaggaacttgaacagaagagagaagaggctgatgtcatgcatgctcagttgcaagatgaacactccaatcacatgcataaggaagcagctcttcatgcattggagaacttgcattcccagtctcaagaagacttcaatctggtgaagctcaatctggagaacacagttggcgagctgaagaaggaagtcacgagcctagaactgaagatacagatacaggcgcaagaacttgaacagaagagagaagaagctgataccgtgcatgctcagttgcaagatgaacgctccaatcacatgcaaaaggaagcagctcttcatgcattggagaacttacattcccagtctcaagaagacttcaatctggtgaagctcaatctggagaacacagtctgtgagctgaagaaggaagtcacgagcctagaacgcaagatacagatacaggtgcaagaacttgaacagaagagagaagaggctgatgccatgcatgctcagttgcaagatgaacgctccaatcacatgcaaaaggaagcagctcttcgtgcattggagaacttacattcccagtctcaagaagaggttaaacagatggctcgagatgttgagcactcgaacaagaagttgagtgacctggaaaataataacttgaaattgcatgacctgtcacaaggactcaagaagacggttgcagagctgaattctatgaaagattctgcacttcttcaacagcagaagtcctcggagaaggtatcttatttggaagcacaggttttagtagtgcgatcagaaatggagaagatggtacagaaaactcagatgctggaccaggaacttgaacacaagaacaaagagatcagtgaactccaaaatagtttgcaagagcaagtccagaagtgcattcttgctgaaacatctctgctcagattggaggacctacatactaattcacaaaaagaagctaagacattagcacatgatcttgaaagattaagcgagcagcttactgaggttgaaaatgataggctggatctgcagaacatttcacgagaacttaagaatactatttcagagattaattctgagaaagacttaatgctacttcaacagcagcattccttggagagacagtcttacttagaggctcaacttttagatgcactgtcagaagtggaggaaaacaagaaggaagcccaattgttggaagaaaaccttgcacataagaatgatgagttgaatgacctccaaaataatttggaagaggaaggccataaacggatgcatgctgaagcagcccttagtatggtggaaaatctgcattccaaatcccaggaagaagtgggtaagctagttatggatcttgataaattagaaaatgagctaagtgaattgcaaggcagaaattcgagaatggaagaattatcatatgagcttcagaacaccatctcccttcttaattctgagaaagacgcagcacttctacaacagcagctgtcctctgaaagagcatgtgatctgatgtcacagctctcaaagatacagttggagctggagaaggctgaggagaagatgcagacaatggagcaaaaacttgcagataagaatgaaatggtggattttctgcagttgagtttgcaagatgagggcaagaaacgtgtggaagttgagacagctctcatttcatcgggtaacttgtactctcaatcacaggaagataacaagtcttctgagtataagagcaccatcttgcttctgaattctgagaaagacatgagtgttattcagtacaagcagtcttcactaagaatatatgagctggagtctaaactctcaggggtgcaggaagaactagataatgctgaacaaaaagtgcaaatgctggataaagaactcaaggagaagagagaggtggttgaaactatgcaggctagtctgcaggatgaagcccaaaagcgtatgaagggtgaagcaactcttctcacgatgactaatctgcatacgcagtctcaggaagaagtgaataggttgaccccagagattgagaggctgaatagaaagttaaatgaagtggaaaatgtctcttgtgagcttaagaacaccatactgctgctgaattctgagagagatactactgttcttcagcacaagcaggccttggtgagagtgtctgatctggaatctgaactctctgatgtgcaggctgaactagtcaatgctgagaaaaatgtgcaaattctggataaagaactcaaacagaaaagagaagaggttgacagcttgcaggcgagcctgaatgaagaagcccagaagcgcattgagggtgaagtagctcttcttgcaatggaaaatctacattctcagtctcaggaagaagtaaggggattggttttgaagattgagacactacatggcaagttgaatgagatggagaacagtaatagggaccttaagaacatgatatgcaagcattcggaggagatacatgtgcttggtgagcaaaatctttctgccgagttaactattaaaggtctccatgatcaattggagaagtttacggaaatgaacataggtcttcagaatgaagtgggaatccacgttggtgagaaggaagttcttcaacaagacttggcccgccagaaagaagataaggatattctggagaagcatctctgttctttggaacatgagctgaaggcagtaaacataagggtggcaacacaacagcatttaattgaggaattgcagagtaagaacattgaattggaggaggtatgcaatgcatgtgatgttgaaaagacactcctcttggaaaagcttcatggcatggaggagctgtccacagagtattcaatcttgaagaaatcattttcaaatgcaattgttgaaatggaagacctgaaggaaattgtaaaagaactggaagcttcaaaaaactctctgaaatatgatgtctccttgcatgccactgagaaggatgctttggcattagaactagagacccttggtaaaagatgtgctgatgttttagaggaaaaatccattctggaaacttcattctctaatgtgaattatgagcttcaagaattgagagtaaagtataaagattcagaagaatcctctcggtcttatcttgctgacaacactgctcttcttgctgaaaagcacaaactactctcccagctggaaagcactgcagtgtctttgaaattcctggaggataaacatgctgatctgagagataatcatggatctttgttatcagagaaagttcttttatgcaaccaagtaaagaatatgcaagatcagttgggaataaaaaatgaacagcatgaagcgctgcttaagttgcaccaaatgcagatgcttgaacatgagcagcaaaaatgtgcagatgcttctatcagcacattgatattggaaaatagcttggttgatgcaagagacaaaaatcttgcactcttcaatgaatgccagaagttcatacaggccactgattctgcagaggtactaattgcgcagctcaaggaggaagccagaaaggaagaagaggacaaaaaagcattgctgaatcgcaatgagaaactaagggatgggatctcagagcaaattaaggtcctcaatatctgtaaagatttaggacctactgatgtggttcatgatgaaattatgctgcagactatgtctcgtgaaactttcaaccatgtaaaacataaagaggaaaccgaagagagaaatgtcttcatggatgctgagctatctgttcttggagcaattctggcacaaacagtaattggcttcagagctctgcaccagcagaactgtgaacttgtggaagaagtggagtcaggagcagcagaactgctttttctgcaaaaggaaaatcacaagcttattgaattgaatgaacagttggagcaaagattgcagttaggtggcaacagggaggagatgttgaagattgaaatactgggattatgcaaggagctatcaggcttgagacagtcctaccagacttctcaaagtgaaatttgcaacctaactaaaaaatacgattccttgctgcaggagtacaaagttttagttgagaagtacaatgctttggatgatgagaatgctgctgttattgcagaatgcataaagctcgacctcctgtcttcattctttcatgaccttactgttgagtctgcatctgttttggtttctcttgacaatgatatggctatgttgagttcggttaggcatgaacttgatcatgaggttaccatgctgaacagaagagctaagattcttgaaatggactttcagcacctcaagtgcactctagagaacttgttggaggctctggggagtcgcttggttctttcagagtttgattcaaacacaagcaaaatcatctgccaggaattaacaattgaatgtaacagtagcatgacacagttgatgcagaaagatgataaattacgcaaagtagatgagaaagttcaattcttgcaagagagaaaccaggaattgtgcagagttctcagggatcttgaggttgctgtagaagatgcagaaggagtaaaagtagaccttgagaagaaaatcacaacactaactgaacgaggtgctgtacaagacaatgagacccgtcttcttcgcgaagcaaacaacacgctgcaggtagaggttggcattcatgaacaaaaggaagagagtttgatgtctacatttgagacgatgagaaaagaggctgaacagcatgaaagggaaattactttgctggtatgtgatacgataactcgttcagtgaatacaatggtccttgaggaacaagtgcttgaaatgatgatggagcgtgaggtccttgagacaagattttttactgaaaaggacatgctaatgaaggaaatctcctcaagagatgcttatgttgatgacttgcagaaaagggtcgccagcatgaggggagaaaatgcaggactgatggcagagttggccgcatatctgccacttgtagcatctttgtctgatcagataagagcgctggaagagctagaagacggcacacttttactgtcagaacttaataaagaaggcaaattggaatttgtgcaaaaggacagacatgttccagaatcccaagatgattcatcaggagctttgaagttgcgaagcttaattgcaagagttgaagcactccatgttgtaatactggatgccaaaggccgccgagataaggagtttactgaatctgttgctcaactggaagcggcaaatatggaaattcaagagcttaaagcaagaaaaggctcgaatgctaaggaagaatgcaccgaggatgataggcaaaagtatgatgctgataactccaaagggaaacatgtacagatcatgaaagacatcgaacttgatcaagtatctacttgtgcactatatggtactggtgccaccatctaccctcttggtggcgatgcaaatgtggagcttgacgatgagatgcttcaactgtgggagactgctgagagggattgcaagaaccaaacagctaaatcttcatcgtctgagaatgacatacaagcagtggaggaggtgaagagtgagtacccttcgtttgaactagcaaggggaagagatccaggaattgacaggcttgagatatcagcagtgtccctggaacctcagcaattgtggagcaaaaatgtccttgataaactagcttctgatgctcagaggctgtctattgtccaagccagcattgaagaaataaagcagaaaatggtgggtgcttctaagggaaaatctaccgtaagctctgaatacagcagcatcagagctcagctgcaggagattgatggctctgtcttggagcagatagatttcaactgtaatgtgacaaagaaggctgagaattaccctgcatttgaggtgagtgctgaactagaaggctattccagcagaagaaaaatctcagagcaagtgcagaaaggatcagaaaaggtcgcaaagttggaattggaacttcagaagatacagtatgtcttgttgaagcttgaagaggagcatgagtacaaaagagttaaagcccctgagaaacgttcacgcgttcttttgagggattatatgactgcaaggaaggacaaaaatgatgccggacagaagacgaagaagaagaggatacccttctgtggttgtgtccgtattaaatcaagaactgagccttaaccattaagtaggtagcaggaggaacatattcatgtcagcccaataggttgacagaacgtgatgctcttaggatctcttctgagatgagtaaccctatgatattaacaagaaactcgtgcactcaaatttccctttcttgtcctgaaatgaggcagtgatgtctagtgtaatgagttaatattattaatgctgttattaattgaagcattgtgcatatgtgtttcaaaaaaaaaaaatataa

SEQ ID NO: 13140 - DNA, 672 bp, Oryza sativa
  Clone ID: PAT_MRT4530_19201C.1
ctgctcttcttgctgaatacgcaaactactctcccagctggaaagcactgcagtgtctttgaaattcctggaggataaacatgctgatctgagagataatcatggatctttgttatcagagaaagttcttttatgcaaccaagtaaagaatatgcaagatcagttgggaataaaaaatgaacagcatgaagcgctgcttaagttgcaccaaatgcaggtaaatgattatgaagagatggtttcttctctgcaagataaaattcgtcatatggatcagatgcttgaacatgagcagcaaaaatgtgcagatgcttctatcagcacattgatattggaaaatagcttggttgatgcaagagacaaaaatcttgcactcttcaatgaatgccagaagttcatacaggccactgattctgcagaggtactaattgcgcagctcaaggaggaagccagaaaggaagaagaggacaaaaaagcattgctgaatcgcaatgagaaactaagggatgggatctcagagcaaattaaggtcctcaatatctgtaaagatttaggacctactgatgtgggtcatgatgaaattatgctgcagactatgttctcgtggaactttcaaccatgtaaaacataaagaggaaaccgaagagagaaatgtcttcatggatgctgagc

SEQ ID NO: 13141 - DNA, 335 bp, Oryza sativa
  Clone ID: PAT_MRT4530_19202C.1
aaaaaaaaaaaaaggggtaactaagtttaaagcggcaggggacacaaaaggggaaaaccccaatttttttaagtttgtgaatttgggggggataatattaaattcataaaaggttcttaaaatttggggaaggtttggtactatggggggggggaagggggggttttttaaaagggggggggggccattaacgagcccgggggaaatttgggggggaaaacccagggtttgttgggaacgggttcgggaaggtgattacaaaaatttttaagggggccctttccggtaagaaggggtcggtcaaaaaagcccaccttggggaacatggggggggg

SEQ ID NO: 13142 - DNA, 150 bp, Oryza sativa
  Clone ID: PAT_MRT4530_19203C.1
atgcataaagtttcaactcgtgccaaaatagaaattcgtgaggaagctggacggtggggaaaagccgagaaggtcgtcctcaccctcaagatcaggaggaggcatctcggaaagcgggcaggtgtggtggcaataggaagggatgaatag

SEQ ID NO: 13143 - DNA, 1314 bp, Oryza sativa
  Clone ID: PAT_MRT4530_19204C.1
atggggaacgtcgtgttccttcacgtgagccggcctgacgtggttcgggacatcaacctctgcgtgtcgctggacctgggcaagagctcctacctcaaggcgacgcacgagcccctgttcggtgggggcatcctcaaatccaacggagaggcgtgggcacaccagagaaagatcattgcccgtgagttcttcctggacaaggtcaagggcatggtggatctgatggtagattctgcgcaaacactgcttaagtcatgggaagaaggaatagacaaaaatggcgggaccatagacataaagattgatgatgacataagggcttactctgcagacgttatctctagaacatgctttggaagcagctacatcaaaggaaagaatatatttttaaagatcagagaactacaaaaggctgtgtccaagccaaatgtactagctgaaatgactggcctaaggttttttcccataaagaggaacaagcaagcgtgggagcttcacaaacaagtgcacaaactaatactagaaattgtgaaggaaagcggagaagaaaggaacttactacgtgcaattcttcttagtgcaagcagcagtaaggtggagctcgctgaggcagagaactttatagtggataactgcaagagtatatattttgcaggatatgagagcacagctgtcacagctgcctggtgtctaatgctccttggactacatccagagtggcaggatagggtacgggaagaagtgcaggagttgacaatggtgatccaggagactttgcgtttgtacccagctggcgcctttgtatcaaggcaggcccttcaggaactgaagtttgggggtgtacatataccaaaaggtgtcaacatctacatccctgtttccacaatgcaccttgatcccaacctgtggggtccagatgtgaaagaattcaacccagagcgcttctccaatgcacaaccccagctacattcctacttgccatttggcgctggtgctcgaacttgccttggtcagggctttgctatggctgaactcaaaaccctaatttccctcatcatctccaagtttgtattgaagctctcgccaaactatgagcattctccaacactgaaactcattgtggaaccagaatttggtgtggacctcagtttaacgagagtgcaagggaagatgtcaatggacaaatggtttatgtcaacatcatatggttatgttgtgagtaccaaaaggcaacatatactggaaacattaaagaaaattccattttcctccagtggatatcatctaaaagttaacaagtccatgatggattaa

SEQ ID NO: 13144 - DNA, 2995 bp, Oryza sativa
  Clone ID: PAT_MRT4530_19205C.1
gaatggaaccgggttgctattatgctatcagcctcatttcgaattgacactcatgtgatgattctagaaaagggaccaagaactgatccgaagcaacggcttcacatccctgaaaaattgcaagcaggctaaatcactagccatctcctcacattctttggtctttgcaatcatcccatctatcaaagacaaaaaaaaggaactaataaagggaaagagaaatggaaccaaaaaatagatttcaaaccagatcatcctctggggtaccctgagaactcctcaccatctcaagcatgctgactacctcacccatgtccggccggtgggagggcacctgagacgtgcaaacaaggcccagcttgatgatcagcatagcctcttccatggagaactcacctgatagccgtggatccatgcagtcctccaccctgccatcgtcgagtgcagctctcaccacatcgcagagcacgacgacatcgtcttctaggtactcgactggtctcctgcctgtcaagatctcaagaactatcaccccgaaaccatagacgtcgcacttctctgtgacattgactgtcctgcatgtgaactccggcgccatgtaccctagcgcgctctgaatcttgctgctcagcacgtagcgatccagcataggcagcagcttcacaaggccatagtcaccaacccttggctcgccgttgctatctagcaagacattgcttgacttcagattatagtggattatcccatggcggtgcaagtgcgcaagggctcgggctacgccgattattatgtcaaacctttccatccatgaaaccgatctctctgctgaggactcatgcaggtgctgatataagttaccgccaggcacaaagtcatagatgaggagctgcagtgatgaagtccagtagaagcctctgagggtaacaacattatggtgccgcacctttccaagaagcttaacctgccgtttgaactcgtcctctgacttgaccaagcttgacactgtcagcttcttgatggccacaggctggccatctcttaaaactgccttgtagactgtgccaaagcctcctcgcccaagttcgcaatccttattcagcaaagcatgcccacctgcactgaaatctgggctgcccctgccaaacatgacaagcttgccagggttggcttcattctctggggattggctatcataatcatctgatagtgcagtgggaactgcagagtgggaggccgcagagcggacacgacggttgagcactgtgatagttaccacgccaacaataatcaacgctccacccacaatggcaatcagtgttgagatgctcaatatgatcttcttgtggtgctggctgctgggggcacctggggaagcctctgagaggggatctgatgaggcattagggttaaatacaattggctttggcatgacgccgctgcaggaattatctctctgtgagctgcaaagtccagcattgtccaagatgaaagaatcagggatagtatcaaaaaagtgactgatggggaggtttcctgatagtagattgtgggagacattgaagactcgaaggtttgcgagtttagagagctccactggcagggttccattcagcttgttctccgagaaatcgaccatttggagaccggtgaggttgcctatggtcgcaggaataggccctgtaagcttgttatgtgatagatccaatgcaatcaggtttctgcaattcccaatctgcggcggaatgattccggtgagtgaattactccccatcagcaacttccggagcgccgccgcaccgccgatctccggtgggacgcccccgctcagctggtttctgctaacatccatcacctccaacaatgccatccgtccaatgctcaccggaagcttccccgacatggtgtttgaggacaggttcagatgctgcaaccttgaaaggctcgcgatctcgcgcgggatcacgccggagaaggcattgcccgacaggtccagttcttgcagcgctgaggcattgtcaccgggagctttgatccagccggaaagcgcgttgccggcgagggagacgcgctgcagcgctgccaggccgaacacccaccacgggagctccccggtgagcgcgttgccgctgaggtcgacctcgaccaggttcttgcagcccgaaatgccgtctgggatggcgccgacgaagcggttgccggacaaatctagcgtctccagcgccgccatctcaccaatccaccccgggagctcgccggcgagcgcattcccgcccgctccaagagagctcagcccggtgagcccacgcagcgactccggcagctcgccggtgaacaagttgtgcccgacatccaacgatttgagcagcccggcctctccgacgtccgccggaatctccccttcgagaaggttgcgactcaaatccagcacgcgcaacgagctgctccgtgggaatcccccgggcacgcttccggcgagctggttgccggagaggtccagcgaccggagcgacgggagagaccagatgccatcggggacggggcccgagaggaggttcccggagaggttgagcgacacgagggagccgcaggaggcgagcgcggcggggaggtagcctgagagcgagttggcggagaggtcgagcgcgcgggcgcgcgggggcagcgcgtcggggagcgggccggagaggttgttcccggggagcgcgagggagaggagcgcgtcgaggcggagcagcgcggaccgcgggaggcggccggagagccccgcggacgggagcgcgacggcgtcgacgcgccccgcccgcgcgtcgcacgacaccccgggccaggcgcaggcgcggtcggcgtcctccgaccacgccgccaggacgccccccgggtcggacaccccggacttgaagaccaccagcgcgagcacgtcgtcgttcacggcgcccgccgcggcgaggatggcggcgagcgtgaggaggaggagggcggcggtggcggtggccat

SEQ ID NO: 13145 - DNA, 507 bp, Oryza sativa
  Clone ID: PAT_MRT4530_19206C.1
tttttgtagctttaaacacctacttaagtttcgctactgcatttttagataacacttcctcagttctctctacaaacttgcaaccatgcagaaattcagtgctcattgttctacgtgattgaacatttgaacccccatcgttctcgttctaagttaaagttgcctagtggctgaaaatcgctgcaagcctgcaactatctctcgcaaaaacgtgcagtcagcgtggagatcggatcccaatatacgccgtatcactgaaactaatgtttctagtgctagtgctaagttcaatctgatcagagtcagcagccatgctcggtgatccaccgagcaatgccgctagctcgccggagttgggctgcccccatgggtgcagcgacagcttccccagcctgtcgagctcctccgcgacctcccgcatcgacggactcttctcgccggagatctccaggcactgcttcgccagctcggcgacctgctcgagcacctccatgctctgctcgccct

SEQ ID NO: 13146 - DNA, 215 bp, Oryza sativa
  unsure (1)..(215): unsure at all n locations
  Clone ID: PAT_MRT4530_19207C.1
taccacatttcgccaccatgggcctctgctcttaacacatatntaataatctcttccctccctctccgggcgggtttattgttagaatnataccattatccttgggtgagganatntnaaaacaaacccnggntatatncaccccagaaatgttctngancatatctgaanaaattcctcnacaataaaaaaaatggattggtatcncgttccaa

SEQ ID NO: 13147 - DNA, 182 bp, Oryza sativa
  Clone ID: PAT_MRT4530_19208C.1
gacacggagaaacacgtgagagacatatgctgcactgcacactagacagtgccttgctatgtgacccaagtaacagagcgcacactctatcgctacactgcacgcacacgcaagtcagaagcacttctagcactgacaatgtccacactttctaagacagctattgcgtcgcaatgcacaca

SEQ ID NO: 13148 - DNA, 1230 bp, Oryza sativa
  Clone ID: PAT_MRT4530_19209C.1
ggggtggggttttttttgaggatacaaacaaataaatagaggagtaatatccacgtacattgaacctagggaaacgatccagtctcccgtagcaatacaacacgaccatcaaatccagggtcaaaagcaacgaactatggtgatcggtcaccagcaaacttattgttaacctaaggcatactcacccttcagcttacttcagccatcagaatacacgtatcctactccgagtttctctccatttaaccccgtgagatttgaattaaaacatgtatacatggtggtacacaactacattgggtaacttttaccagttgttttttaagcatatccactactcccttgcccatgcaagaagcgcacgacaacacaagttatgttgtcactgctctccctcttgtaggcctcttgcaagagcttctttgcagcttcttctgggtcatgaatcgatctggtcatgtcgacagcctcctcattggttactacatcccacagcccatcacttgcaagaatgaggaactcgagagagtgatcaataacttcctcccgaatctcaggatccacaactacatactgctttaagagtttgtcaccaaaagcgcgagaaacagcaagcacaccaccaacacgccatgttcctgcccacattacaaaacctccagcatcttcgatacgttgtcgctcatctgtctgatcaggcttgtgatcttttgaaacagctatagcatcaaaaactccaaaaagaccaataatctgcccatcaacagagtcaattcttgtctcgtaaaagtcttccatggaagcccttttaccaggggagctcgcatacccatagctaaacttaccattctggctgaggccgccgccgctgaccggcgatccatccgtggggatcacggagctcaagtaccccatatccccccccgtattgtttaacttcgacatcgagttgcggaggctcacgctcagaaattcaacaatggtgtactcaatgatggggtattttcgatcatcatctgtatcggcgccgggcctcctccacaatcttctcggagaggtcatcgggcaactcctccacaagccgtctaggaggcggcaacctccaagagtaacaagcaatgacccggcgtggagatgatcaagtgccacactagctggctccgtcggctctgtatcggccatcccgagcagcaccatcccggcctccagggggccggtctgaccgcgcat

SEQ ID NO: 13149 - DNA, 202 bp, Oryza sativa
  Clone ID: PAT_MRT4530_1920C.1
tacgtgtggatagtaaccacacaaaagtgaggggtgcgtgcgtatgtataaagacagtccacatgtatgtccgcgtagtatagatgtcgtgcgtatagatatatacacacgtgaggcccacataccacgagtgccgcacccaaacccgtgtgtgaaattgtagagtgtgtggtaaaggtgtcgtgtgtaggtgtgtgttaaa

SEQ ID NO: 13150 - DNA, 687 bp, Oryza sativa
  Clone ID: PAT_MRT4530_19210C.1
acaccaccaacacgccatgtcttgccacattacaaaaccctccagcatcctcgatacgttgtcgctcatctgtctgatcaggcttgtgatcttttgaaacagctatagcatttccccccctgcatatgatagccctagagtcccccaacgtttgcaacaaagagacggtcaccaacaaggacagcggttgatgcagttgatccacactggttttgactgctgtcagattctaagaattcactgtcggtacttttataagcatcatctattgccactttggtgtcactgatgaactttggatgccttagaagatgactgaagagattctgtttaacatactcagctactttagcaccaccatgaccatcaaaaactccaaaaagaccaataatctgcccatcaacagagtcaattcttgtctcgtaaaagtcttccatggaagcccttttaccaggggagctcgcatacccatagctaaacttaccattctggctgaggccgccgccgctgaccggcgatccatccgtggggatcacggagctcaagtaccccatatcccccccctagatcacacgaacgcgaacgcgaccagctcgtccgaatcccagcagcagcagcagcagcagcagggggaagcgcgccccacgaatcgggcccctcgcgcgagtcaaatttggcggatttggg

SEQ ID NO: 13151 - DNA, 1173 bp, Oryza sativa
  Clone ID: PAT_MRT4530_19211C.1
tcgtactctccccccccccccccctccaaacgcttgttaaaatccctcattcccatcacctcagcccgtacgtacgagagtgatcgatcgctagctcgccgagatcaccagcctcctcgtcttcttcttcttcttcctctcgatctcgaggagggtgccatgggtaccatggttggccatgtcgcgccgggcgccggcttcatcctcatcggcatgtggcagctgttcaaccacatccggctgttcgcgctgcggccgagctcgtacgcggcgccggtgtggttcccggtgcgcggggtgcgccacctggagctcatactggtgatcgtcggcgcggctatctccatcctgatggagctcgtgatcgggccggcgaggcaccagccgttcgacgacgacgggaccatcccctccaaccacctccacaacttcgagcacgcgtccatctcgctcgcgctgctggtctacgccgcggtgactatccacatggacagggccagggcgcccatgcgcgacgccgtgtcgcagctggtcgccgccgcggcgttcgcgcagcagctgctcatcttccacctccactccgcggaccacatgggcgtggaggggcagttccactggctgctgcagacggtgatcgccgtcacgctcgccaccacggtgctcgggatcccctgccccaggagcttcgccgtcagcctcgtccggtcggcgagcctcgtgttccagggcgtctggttcgtcgtcatgggcgtcatgctctggaccccggcgctcatccccaagggctgcttcctcaacctcgaggaaggccacgacgtcgtccggtgccgcaccgatgaggcgctccaccgcgccaagtcgctcgtcaacctccagttcagctggtacctcaccgccaccgtggtgttcgtcgtcgtgttctacctccacctgacgaagctgtacccggaggagccgaggtacttgccgctggtcaagggcggcggcggcggcggcgacggtgacagcgacggcggcaggttcagcatcggagacgacgaggacgacctcgaggccgcgaaaggtggcttcggacacgtggcgggtggcgggaacgccgttgaaatcgagcgacaagtagcttccacgcccgccaccatcatcaccaagatcaaggaggaggcgcgaacttag

SEQ ID NO: 13152 - DNA, 177 bp, Oryza sativa
  Clone ID: PAT_MRT4530_19212C.1
atggaggccatgaggccatcaaagtcgccgcacatctgtgctgaagtcgtcatccaagctaccattgggcccatctgtcagctactgaggatgatgaaagggggttccaccggattcaaccggaacatacctcagggctctagcccacttccagaggacatcatggcctcgggctga

SEQ ID NO: 13153 - DNA, 711 bp, Oryza sativa
  Clone ID: PAT_MRT4530_19213C.1
atggactggtacgcgtggctgtgcagggcggggctccacccggacgtggcgttcgagtacgcgcgcctcttcgcgcgcaacgagctcgccgccgacgacctccgccacctcgaccacggcctcctcgccaccatgggcgtccccatcgccaagcaccgcctcgagatcctcaagctcgccaggagggagagccccccgtcgtcgtcgtcgtcgtcctccctcgccgccgtccgcctcccgtggcgcgccaccaggctgctcgccgccgccgcgcgccgcgccgcgctctccctggccgcccgcctccgctccgtcgcgcgccgcgacagggccgccgtcgccgtcgcgccgcgcccgccgccgccgccgcagctgtggaagccgccccgcgctcgcgcgccgccgccgccgtccgcgacgcggaacggcggcaggaagatggcgctgctgaggcacctcagcaagcccatgctcaccaaccactccagcggcggcggcggcggcgggaagaggacgaggacgacaaacggcgcggcgacgacctacaaggccgccgcccccgccgccgcgtcggcggcggcggcggcgataaccggctgcttcgccgcaaaccccgacgcctacagctacagcgacgacgaattcgatctatacgacgacggcgaggacatgcgatgggagtccatgttccaagatctcaagcccacataa

SEQ ID NO: 13154 - DNA, 416 bp, Oryza sativa
  unsure (1)..(416): unsure at all n locations
  Clone ID: PAT_MRT4530_19214C.1
gtctgatgcaataacngtgaatccatctngtnagtnttctcaacgtactatttttcagccttgggatnttaaaacacttaattgtanaaatatcaaaagannttngttgctttgatcacgtgtcatggcttattataaagccccagccaaaccaantcctaacctcaaagttaatattgggatataatttaaaatcttgatntcttcgnagncgggcccaantcnngcctatattacantcctaacnctattttgtttgcctgngcagatnctgcctcaacagttaaagggtctgactgacaacttcaaggaaaaaanacactgcctactcgggctctgcnactntcacttangaaagctttcatgcngactgtactcccttttcncattgcataaaatggcagtgttgctgcgca

SEQ ID NO: 13155 - DNA, 531 bp, Oryza sativa
  Clone ID: PAT_MRT4530_19215C.1
atggccgcctccgcccttctctcgcctgtgcggcctctcgccggaaccacactttccttcggtgttccctaccaaaacaagagaaggatcccaacgatgcgggtctactgcgctgctgatgaagaagaggaagtcaatgacttgggagtcaatgtggcactatccatgctaaaattttacaaaagagaaatatcgcccttactaccctcaagctgccgttatgtgccaacttgcagccagtactctatgcaagcatacaaaaaatacggcgttgcaaagggtacaatcttgacagcttggcgtctatgccattgtaatcctcttggtggtcatggttatgatcccccaaggtggtttggtgttagattatatattcgcaaggattccattgcatattgtttaccgatgcaactgtcgcaagcaagggtgttcaggagttctactgcacctgacaaggggaacttatttgtttacagtagtatcgactcatgccatgttgagaaggtgatcagatgttcagaatttctatga

SEQ ID NO: 13156 - DNA, 307 bp, Oryza sativa
  Clone ID: PAT_MRT4530_19216C.1
cagagaacaaggaccgttgatatataatgatcgggtttctatttgaagacacatacacgatcaaactgtgctacggtacaggatccgtgataataggtaactacagagcttgatctacaatcttaaccatagcagttgctggagacacacggggctaaataggcaggcgtcgttcttataaaaagaactgaatatctggaatgggaccatgagttctgacatctactaccttacgatagaacaggtaacctgtaaaagggggcagacgcttaatatgggtctgcagatgccttctacacatgttctt

SEQ ID NO: 13157 - DNA, 204 bp, Oryza sativa
  Clone ID: PAT_MRT4530_19217C.1
atggcgcatagcctcgtcggcttctatggcatgctcggtgacatgcgccgcctccgcgacctcatcccggagagctacgtcaacgatgccgcgcttcggcagaagggggaggatgaccacggcatcggtttactcagtggcgatgatgattgccccgccttcgaccgcctctggaagtactgccgcgcctacgcccgtgggtag

SEQ ID NO: 13158 - DNA, 1116 bp, Oryza sativa
  Clone ID: PAT_MRT4530_19218C.1
atggcaatcggcgctggcggcgaccgcctgtccgccctccccgacgacctcctcctccgcgtcctccacttcgcgaacgccgtggaggccgcgtccaccagcttgctctcgcggcggttcggcgcgctctggcgctcatccggcgcggtcaacctcgccgcgcgcgtccccggcgccggcggcagagacgccttcgtccgtgccgctgatgcggcgctcgccgccgccggccgcgtcgtcacgaggctcaccttacacgtcgacgacggagatcacagcggctactgcacctccatgtacaacttgctcagagatcacgacgtggtcgacgccgtgcggcagcgtcaggatctacgacatcaagctcgcctcccttccgtcgaaaaccctccgcgtgctggacctcaccaactgccgcaacctcacgccggcctccgccgccgccgccgccaccgccttcccgtggctggacacgctacggctgcggcattgcattgtacggcgaacatcgacgatctccaccgcgtcatcgacgccgcgccagtgctcgccaccgtgcacctcgagtccgtctacctcgtgtccgatggccacagctccgatgtctggacagtctggtccacccgcctccgcttcccggcggccaccgtgctcgtgctgatcaactgcgacaccaccggcgccatggagatctacgcgccgaggctgcgatccttcacatacaagggggatgccgttcagccgttcgacctgcagatctcgccggcgccgccgccggacatggcattggtgaacctccacttcacccacgccttctgtcgacacgactacctacacttcatccacaacttcaccatggcgatcaaggtgctcaagctgaaggcgccggcgtcgcgccacctcagcgacatggcgttcgtgagagtgttccccaacatcgagcacctcgagctcgacggagcttacgacacctggaacaagacggcggcggcggtcgcgagcatcctccattgctgcccggtgcttcgcgagctcaagctgaatctcgtcggcacctccaagaactccaaacgagtgcagcatttctttcgaagaaattctcaggttggtttttga

SEQ ID NO: 13159 - DNA, 1998 bp, Oryza sativa
  Clone ID: PAT_MRT4530_19219C.1
atggcctcaatcaattccttctgcaaccatatgatcttattacgctcaggcggtaacaatttattaccggtcaggcgtctaacagtcatacaataaattgctacaatatacatgtctgttacggaatcaggcgttgcaaatgatcaaaaatggcctcaatcaattccttctgcaaccatatgatcttcaaattgattttgggagcaattgaaaaactgaacaaaaagaaaaaacagcggctttgccaccatcttatcttccagttgctgctttgctactggggactgctctgcctcatcgcctccatcttccagttgttgcctgtaaaaggaatcggaaagctacttactctttgcagaccatcgactgcgccgatgccggtcgatcgatccagagagaaatatctctctttggatctgaaatgtgggcctaggggtagaaatgcccacaaacctgtaaagaacatataaatggaagaggccattgttggggccaaaagatctaccgctctgcatcaataagctgcccccgatgatcgatcgtgagcctgcgggtagtagtaggcacggaagtaatatggatccatccatcaacataccggtcaacagagatgccatcaccgaagaagtcgccgccgcgttcgcggaatccgaggtgatccccgagaggtattgccgacctgatgaggtccatgacggcatcgtcgttggccatgacgatgacgaggcctacgagctgccggtggtggacatggagaagctgcttgacccggagcttgcggaggcagagattgcaaagcttggttctgcatgtcaagattggggtttctttcagttagtaaaccatggagtcgacgaacaagtggtgaatgaaatgaaagacagcacggtcaaattcttcagcttgccactagaaagcaaaaggacagtggaaatccaagacaatggctttgaagggtttggccaccattacagaagggcatcaggtaagctggactgggcggagagcgtgatcctccttacgcagccaatccaagagagaaacccggaaatgtggcctacaaacccatcgtcgttcagggatgcacttgacaagtactccgccgagatgacgaagctggctatgaggattgcgagcatcatggctaccgacctcggggtcgaccaggaggctttggttggcgcctttagggataaacagcagagcatggccatacaccactaccctccttgccgccacccagacaaggtgatcggcatcacgccgcactccgatggtctcggcctgacgctgctgctgcagctcgacgacacgcccggcctgcagatcaggaaggatggcaggtggttaccagtgcgacctcgcccgggcaccttcatcatcaatgtcgccgacatactcgaggtccttaccaatggcgcgtacaagagcgtcgagcacagagtactcgcggacgcagagaaaggccgaaccaccatcgtgacatttcatgaagcctatgtcgatggaatggtgaagccgatcccggaggtgctcaagctcaacggagcagaggcacgctacaagtccatagaaagaattgagtatatcaagggaaactttgtggcgctttctgaggggacacgatttctggagagccttaagatatagcttgtgaaagttacgcaggcaactagaagatctctatggaacccaattaatcatggatgctggaaaatactgcgcctcctatatattatccagttcaatgtaatgtggaggaaggattattatcgaaaaatgttaaatgtgtttgttaagaataaaccttgtgtgctgattagtagtagctctatatggttagctgttcatttttaggtgcatgtttgcatgtgtcggcctgattggaggctatgtctgctttccttgtaacagcttattttaagcaatggaatatagtctggaaaagctgtcaattcagcagcaccaaaaaaaaaaaaaaaaaaaaaaaaaaaaaaa

SEQ ID NO: 13160 - DNA, 1159 bp, Oryza sativa
  Clone ID: PAT_MRT4530_1921C.1
ccggccggggagagcaatcagatcatcctcattgtatcctctactcatggatttgttgtgcggtgaaatggagggtacaccaaacaaatcagttcaaagcttcgctggctcgagaactgagaaatctaccgggtctagtcatcatagagaagcagagcaaaatgacagttttacaagaagggaatatacttgtgctgattttattgaagcacttcgcttgattgatcaggaggcattcaagtgtagcattgttctgaatgacttctccatgcgagcaaacatcactgaaccatcttaccgcacagtgaaattagatggtatctgctcaacctttgtttcatcagttttagctggtggatatacctacacaggtgaggttgctaccactgatggagatgcaaaggaaaatgcagcccgtgtggcgatcaagtcaatccttgtagatattattgcagttactagaagcaaccacatgttggagagcatcaggtcaaacaaaccaacaggaacaacaatacaaggagagcagtcaagccagcagacaagtgcccatcctgcagtaattttcaccccacctgctagtaataacatcccttgtgctccccaccatcactatatgctgcatgcgccatttgctcctcttgaacagatgcagtggcgccatcctggtactccacagatggtgccggtttttcctcatgaacagatacagtggcgccatcctaccccagtacatatgccatttcatccccatgaacagatgcaatgccgccaatcccctgcaccaatgccgtttcttccccgtgaacagatgcaatggcgccatcccgctgcaccaatgccaacatttcctccccatgaacagatgcaatggcataatcctgttgcacagatggcatatcttccacctgaacagatgcaacggaatgttccaattgtacacacaccatctgaaatgatgcaaatgtggcagcttcctcaatcaatatccagctctaatcctgtgctgcaaaatgggctttactcgaatacaggtggcgatgatgacatggtagtagaggttggttccgctgaggagactatgactttgagtggtactaagcgcaaaatggaccaaactgaagaggcagagggcaagcaggcaaagatctccaagtag

SEQ ID NO: 13161 - DNA, 766 bp, Oryza sativa
  Clone ID: PAT_MRT4530_19220C.1
ggccaaagtttttgtgctgaaaaggttgattctacagatggtggccatgaagaagattcagattcgaccccagctggtttcggtggcctattcgggccccacgcttgcaggtactggaccggccgtggactcccagccccacaacgactcacaccaaaattctacctctcctaggccacgtgacggggttgcccaccctttggcggagccatctcccgctcccaatctcgtggactgatcccctgtcgaattgcacgtacattggaagagttgtttgtggattgtcattgctctgagctgatttactgtgttggtacatggtactgctagttctgttgactagaatctcagaaacaaatacggctcatttcaatgttgagaagatatattgacgacatttggttgcttccgttgcaatatctgtgctcctttgtacttcaattgcaatttgcaaggtttgtctttcttcgattcaaatcactggacatctgtctggtcaatttgcaaggtttgtctttcttcgattcaaatcactggacatctgtctggtcaaaatgaagttcaccatgttgttctttgttgttagtgcttgtaattgttgtaacatattcagaaacacattgttgtaccttgtgctaagtgagaaactatatttttgttgtaccttggtgcggtgcagcacgattgctggtctgtatctgatatgccacttatgttttttaacccactccaaaaactgtttttaataataaaaaaaaaaaaaaaa

SEQ ID NO: 13162 - DNA, 496 bp, Oryza sativa
  Clone ID: PAT_MRT4530_19221C.1
gtggtgatggccttgtgagagagattgaatttcgccgacctgttgttgtgagcattctttcggagagaagggtgcatgctcccaggggactgaagggaggaagaaatggggcccgtggtgcaaactatctcgtcaagaaagatggtcgtagagtttaccttggagggaagaacactgttatggttaatgctggtgagattcttcagattctcactcctggtggtggtggttttggctctccttgatggctattcttgtggacgatcatctacctcgcttctgggtactgtcatttctacttctttagtcctacttttatccacaaataaaacatgcagaaggcagaaacttgcacaaatattgcctgatacagatccaaactgctattgttgcttctgggacattggagctgaataaggaagcatgttgcttgtttacttcactgttgttcaacttaataatgttttgtgttaaaaaaatagtaatgtggaatcat

SEQ ID NO: 13163 - DNA, 1500 bp, Oryza sativa
  Clone ID: PAT_MRT4530_19222C.1
cgcggcggcggcggctaaatcggagacccgcctcatcgcggcgcgagctgcagagtcgcaccaatggaagccgccggtggcgcaggcggagcaagcggcggcggcggagagtcgcagccgccgaagacgctggtggactgggcgctggagatcctcggcacggccgaccccgacgagaaggcccgcctgggggacctcgccgccacggagtggctgcgcggcgccatcccgctcccctacgacccgtcccgccccgcgcggccccctcccgaccgccccgcccggagcgccgccgtgcggctgctcccgccgtcgcgggcgcccaagctggggaagggcggcagcgcgcagagccggctggcgctgctgcactccctggcgcacaccgagagctgggccgtcgacctctcctgggacatcgtcgcccgcttcggcgcgccgctgcgcatgccgcgggagttcttcgacgacttcgcccgcgtcgcccaggacgagggccgccacttcgcggtgctctccgcgcggctgcgcgagctgggctcgcactacggcgcgctccccgcgcacgacgggctctgggactcggcgacgcgcacctcgcactccctcctcgcgcgcctcgccgtcgagcactgcgtccacgaggctaggggattagatgttctacctaccaccatatcaagattccgcgcaggtggggatgaacaaacagccaaattactagaagatgttatttatcctgaggagataacacactgcgcggctggtgttagatggttcagatacttgtgcctccggtcccgcaatggtgatccaactgcaagttcaattccgcaggctataacccaatgctctgaactcccacgagatggtaccggtgacatccacaaggtcgaagaggtggaaggtgatggaccgaaagccgagttagcacaagcctccaatggcgatgacaagacagtccaacaggtggaggatgaactggcaaaatgcaaactagtcgacattggagatgatgttgaagcagcggtcattcggactttccacagtgttgttagagagtatttccggggacccctgaagcctcccttcaatacggaggcgaggaaagccgctggcttcgagcctgcctggtatgaacccttggcagtgaaggaggtagagggacaagcagttgagtgagatgtttgatttctgccatgtactgtagcaggctagaacctactacatggtgggcattacacttctgttgaacctcttcttccctgttcccttcttttagccagggaaaactgtactgaacttgtgatcatgttttgtttgccatacggaaaccgactggtctgtccgtggaccagccaaaccaaattaaagacagaaactttacatttcatcgcattagcttcgttgtaaatttcttcccccaacgcaatggaggattccttttcgtttaaaaaaaaaaaagcacaatagaagtggtttcaaaaaaaaaaaaaaaaa

SEQ ID NO: 13164 - DNA, 149 bp, Oryza sativa
  Clone ID: PAT_MRT4530_19223C.1
ttgttgtgtactgacagggggtgtattttaatatcataatagagagttaacctcgtggatcaatcaaacagctgattgattaacctggacaaatgagcgaccatagatgcccgtacgaaaatgtccatgtgcattcgaaactgacatta

SEQ ID NO: 13165 - DNA, 2394 bp, Oryza sativa
  unsure (1)..(2394): unsure at all n locations
  Clone ID: PAT_MRT4530_19224C.1
cccacgcgtccgcccacgcgtccgcgatcgcagatcgggatctcggctcagcgcgctgcggcgaccccgctgcagcttgcagaaattctggttcaacaccagccacctttcaccaatctaaagaacttgagtacagcaattgtgaagaattgagcatactgttcaaagatgggtacaaggatgccaaccttacggagattgtcagccacactgtcatcggtgttgctcgagtggatcttgatgctgctgctgttcatcgatgcggtttattgcttcttggtcaccagatttgcccgcctctgcagattaccggcaccgtgccctttctgctcaaggctagaccatgtcctgggtaatgagaaaccatgcttctacagggaattgatctgcaaaactcacaagtcagagatctcatctttggccttctgccgtctacatcagaaacttgcaggtgcccaaagtatgtgtgagagatgcagtgactcacttgtagaaaacaatgatgaccgcaccgatgagccaacaatggctgccactctacctgatagtaatcaaggattatattcccatgatacaagaatttgctcatgttgtgcacagcattatacacaacagagaccgacaatgttttctcgaatgatcacagaactagaacctgctgaggctgtttgctcaccaaagatttgcacagattattccatacttcatcaagtggataaatctttggataaagatatttgtcaccagagtgatcactccatccatgaacgatacagtgtgctgcagatgacatctggctccgaggatgaggctccctgtgctgatgatggcaaaatttcacaccatcataaaaccaattgtatggaggaagatttgaatgaagatgccactgccgagaaatttgctgcttcttccactgagttgtatattggtgagggccaaatggaagcagaagatgcttcattagaaaaacagacatgccagcatgatcccctagctgtcaaagaagagtcaggtttgacagatgatctggaaggtcacaggtcagaaattactgttacatcaagtagagagtttcaccagaaaagtgcattggttgatgatgatccagttaattttagagatgaccatgtttcacaagttaattctagttctgaagctgttgatgaagctgaagattatgctaaggaggctgaacagacttgtgatatggtaacacatgaagcggcactcanagatccttccaatacaaattccaaagatcctacagcaaaaggttttgtggaagaagctcctatatcaccacaggctattagaccaaacagtgaggtatttcagggtctcaatgtcatcgaggaacatccgcaaacaagcgcgactattggtgaaaggagaccatctctaagcactcagattagcatgaatgaagcctacaagcttgccattggtgccaagagtagcttgccatcccccaccttgactgatgtgattcttggaaaggattcctcttctagtgtaaatgaagaattgaggttactgctgtcacagctctcggcttccagaggactcgaggctccatgggtcgacccaggccctagcccacgtgcgtatgggcgtggtgatgatttgatagtgcagaacatcacgaacagaatttcaattgagagaaatgcatctggtttggagtcactggagggtagcactgtaagtgagatggaaggtgaaagtgccactgaacggttgagacgacagattgatcttgaccgaaaatctatacacctcctctgcaaggaactggaagaagaaaggaacgcttcagcgattgctgcaagtcaagctttggctatgattaccagattgcaggatgacaaggctgccatgcagatggaagctttacattaccagcggatgatggaagaacaagcagagtatgatagtgatgcgcttgctaaagctaacgagctacttgctcagagggaacaacaaatagaggaattggaagctgagctcgaaaactacaggatgcagtttgcaggtggaccaacagagaaacaatccaatcaggtctcctttaatgaagaaaacattgccgaaactttgcttgatgaaactggtcttgaagctcctgcaattaccacaccaagtggtataaattcattagtgagctttgaagaggagagggcatatatagttgattgcttgacgaagctggagcagaagcttcaatcctactccaacaacagtactaacattcacttgtcaaattcagatgtcatagaggattacctttccaacaaaatgcacgttgtagatgatggctcactgcaatgccaagaaagctcaagagaggcccaggagcccgttttcttagctaaagaagctcattcttcaaca

SEQ ID NO: 13166 - DNA, 2931 bp, Oryza sativa
  Clone ID: PAT_MRT4530_19225C.1
aatgcatccgttttggagtcattgcagggtagcattgtaatcaggatgggagttgctggtgccactgaacggataagaggatagagtgatcgtgagcgaaagtgtctacgcctcctcttccaggaactggaagacggaagcaccgcctgaggatgttttgaaattcaagagttttctatgattacaagattgaagcaagtcaaggatagcgggcacctctgttgagcatatcgtcgagcaagtaatgctgggtcaaaaccggccatttatttcgaagcgaaagaacttgcgtaccgaaattatgtgctatggagcttacagtaaaaagaaggatacaaagatgccatccgaacgtacatggtaggtctttgtatcatcggcgaccctcgagtgtttcttaatgctgcttttgtaaattgatgcagtgcccggagtatgggagagagatgcagtgtctcaattgtagaaaagacataagagtgagctgttgaggtttcaatggctgccactctacctgatagtaatcaaggattatattcccatgatacaagaatttgctcatgttgtgcacagcattatacacaacagagaccgacaatgttttctcgaatgatcacagaactagaacctgctgaggctgtttgctcaccaaagatttgcacagattattccatacttcatcaagtggataaatctttggataaagatatttgtcaccagagtgatcactccatccatgaacgatacagtgtgctgcagatgacatctggctccgaggatgaggctccctgtgctgatgatggcaaaatttcacaccatcataaaaccaattgtatggaggaagatttgaatgaagatgccactgccgagaaatttgctgcttcttccactgagttggtcaggccattagaaatgaatgttccgatggaaaccgatgttggtgactcatatgatatatccttgccatatgttcttgtagatgatcatcctgatagtataattggtgagggccaaatggaagcagaagatgcttcattagaaaaacagacatgccagcatgatcccctagctgtcaaagaagagtcaggtttgacagatgatctggaaggtcacaggtcagaaattactgttacatcaagtagagagtttcaccagaaaagtgcattggttgatgatgatccagttaattttagagatgaccatgtttcacaagttaattctagttctgaagctgttgatgaagctgaagattatgctaaggaggctgaacagacttgtgatatggtaacacatgaagcggcactcaaagatccttccaatacaaattccaaagatcctacagcaaaaggttttgtggaagaagctcctatatcaccacaggctattagaccaaacagtgaggtatttcagggtctcaatgtcatcgaggaacatccgcaaacaagcgcgactattggtgaaaggagaccatctctaagcactcagattagcatgaatgaagcctacaagcttgccattggtgccaagagtagcttgccatcccccaccttgactgatgtgattcttggaaaggattcctcttctagtgtaaatgaagaattgaggttactgctgtcacagctctcggcttccagaggactcgaggctccatgggtcgacccaggccctagcccacgtgcgtatgggcgtggtgatgatttgatagtgcagaacatcacgaacagaatttcaattgagagaaatgcatctggtttggagtcactggagggtagcactgtaagtgagatggaaggtgaaagtgccactgaacggttgagacgacagattgatcttgaccgaaaatctatacacctcctctgcaaggaactggaagaagaaaggaacgcttcagcgattgctgcaagtcaagctttggctatgattaccagattgcaggatgacaaggctgccatgcagatggaagctttacattaccagcggatgatggaagaacaagcagagtatgatagtgatgcgcttgctaaagctaacgagctacttgctcagagggaacaacaaatagaggaattggaagctgagctcgaaaactacaggatgcagtttgcaggtggaccaacagagaaacaatccaatcaggtctcctttaatgaagaaaacattgccgaaactttgcttgatgaaactggtcttgaagctcctgcaattaccacaccaagtggtataaattcattagtgagctttgaagaggagagggcatatatagttgattgcttgacgaagctggagcagaagcttcaatcctactccaacaacagtactaacattcacttgtcaaattcagatgtcatagaggattacctttccaacaaaatgcacgttgtagatgatggctcactgcaatgccaagaaagctcaagagaggcccaggagcccgttttcttagctaaagaagctcattcttcaacagtgagtcggaagactgatcttagcacgcttcaagaagaaatctcaaacttgaacaaaagattgaagacgctagaaggagaccgcaactttattgaacatagcataaactcactcaggaatggcaaagaaggtgtgatgtttattcaggaaatcgctagcaacctaagagaactgcgagcaattgctggtagtaaataacacgcacaacttctttttagttttttacacaacttatttgtatagcagatacccatccatcttgtaaattgtatacttggcaatctgttctagtttgagggaaattgcatagaaaaagcttgtattaaacacaaggcagacataattgtaagctgtgcatgtttttcatttttttgagctttgggtttgctcataatttttttaattgtattactccaagacagatttgttcatcttaatagcagcaaaggagtcatgtgggtatat

SEQ ID NO: 13167 - DNA, 489 bp, Oryza sativa
  Clone ID: PAT_MRT4530_19226C.1
atggggacgaggcggaggggagcggtggcggcggtgacggcggtggggagcgacggcggtggcggtggggacgaggcggaggggagcggcgacggtagcggtcgggaggaggaggagaaggcggaagaggtggtttacggggacgattgtggcggaggagagcagaggaggaggatgaggaggaggaggagggcgtgcttcgtgcttcagggaggagctcgtgccgctgccgccgcgctagccagccgccgattcttcggagctaaggcggggagggttctgcggccactgttcttctcctacttcaaggagctcgtggggaaggaggtgacggtggagctcaagaacgacctggccatccgcggcacgctccactccgtcgaccaatacctcaacatcaagctcgagaacactcgggttgtcgaccaggacaagtacccgcacatgcaaacacagtgtttcttggttctttacggtggtcttctgtag

SEQ ID NO: 13168 - DNA, 2421 bp, Oryza sativa
  Clone ID: PAT_MRT4530_19227C.1
atggccggtcagaccgtgcccaccatggccggtcagaccgtgtattataccggtcagaccgtgccaaccatagccggttttcataccacgactagcagtactgattttaactattattcatcacctgttaatactggtagtcatgctacttcacatatccctaatacttacaatgatcctaatagaggatatcttcatgacaccgggtatggccaatataatcatattgcgccgcaacaaccacctcttaggccactaaacccaccaccaaatccaccaaggcctgagactatggaggagttgattagtgtcattattagggataaatttggaattgaagcaaggaatcgtgctagggtttaccaaaagccgtatcctgattattatgacaatatcccatatcctcgtggttatagagttcccgaatttaccaggcagaaacatgatgaatctgtcactgattatattgagaggtttagagatgctagaaaccgatgttttagtttgaatataactgacaaggatttggccgacattgcatataatggattgcttgattctattaaagagagattgaatggccagatatttcttgatgttgatcatgtgttgcatgaagctctggctcaagaaagccgagtggatgacaatagcttaaatgctagtttggatgataatgcaataaccaatatagccgaaccaagtgttggatcggattgtgttactagtttaagcaatgatggaatagccgaatcaagtgatggtttggattgtgctagtagtttagacaatgacaccgttgaaaatatagccgaactaagtgacggttcaaattgtattacaagagaaagtgaaatagtattgtcacctaaaaccgagtcacaaatcgatcatgtgaatgttggaaaagatagtgacaatgtcttgcgggatggtaatgaaatagaatccaaaatagctatgtatacatatcaaaggccatatcctgaacacatagattcggtcccatacccgcaaggatttgatgtgcccaacttcacaaaattcacaggtgaggatgctagaacaacaatggagcatatcggccattttgttgatcaatgtggtaaggctggtagtgctgatttgcttaagttaaaattctttcctctttctttgtcaaactttgcatctacatggtttagtttacttgctcctaattcaatttctacatgcttgatggagcaaagaccgattgatgattcatcggtcacttatgatactattttggttacacctattgctaagaccggaattgttagtaatccccttcctattgctcctattgattttgacaacaagaaagtagtgattcggcctagtcaagccgaatccacaaaagggaaaagtgttattattggggatcctcggtccgagacaattaggattaataatgctaaggccgaagatcataaagttgtaaaggatgagtcatctagttcccagaagactaaaaagccgaagcttacttttgagatgcttatggctaagtacaagaaaggattagccggtcaacgatttgataatcagactagtgattcaaaaagactaagatcatctcgtaggaagagaattggtcaaacgctaaagcaattggagccatcaactataccaacttcatacaaacctccgacaagaccattctcacaaaagaatcgatccgatggatcaaaggtgaaaaatgtgaagaaggtgtgggtgagaaaagaagccaaagcttcggaggtcgttactatcaaggaggagtctcaagatgttcgagtacctactggagatgcggtgaaaactatacaagcggagaagaccgaaggcgacatcgcgactgtcaacaatggtggtctgaccgggacatctagccggtctgaccggcggcttactgccggtccgaccgaacctcctggctggtctaaccgccagtctatggctggtctgaccgggcctagaggtggtatgaccgggggcaccagggaggccgaattaattgtaaattcggacatttgtgcccaggagttagaagaaaatatgagaatccctttgatagaatatttgaagtatcctagttttagggttgatcagaaaattcggcggagagcggggttctattggccgaaagtgattgatgattgtttcaagtactatagaggatgtgaagcttgtcaacggttcaataatgttcaattggcatccaccgctgtattgaatcctatcatcaaaccatggccgttacgaagttgggttttgaatttcattggtcaaatttatccttcatcattaaaagggcataggttcgtgctagttgcaatggattacttcactaagtgggccgaagccgtgccttcaagaatattacttacatggaggctaatggacaagccgagttga

SEQ ID NO: 13169 - DNA, 321 bp, Oryza sativa
  Clone ID: PAT_MRT4530_19228C.1
cctgctttttgactgccaataagggtttcatcgggatttcagccgatgagttatctggatgttgcatcggcttacaaggattacatccgattggtttctactagattatattattgatatattatattatcatcagtcgattgtctttatatcattatccacattgggtatatagcagattgctcaaaaccatatcgctagcggctgcaacaaactgactggcacgcccgcatctcatcaacctttggacctgcactggagctaagcacatctcccaggccagtgtgtgtttttcgcatcaacacctcccctccctaggag

SEQ ID NO: 13170 - DNA, 1183 bp, Oryza sativa
  Clone ID: PAT_MRT4530_19229C.1
atgaccggtcgtgacactggtctaaccgcaccctatgccggtcagaccgtgcctaccatagccggtcagactgtgccctatctaggccagatcgcgcctcctgtggccggtctaaccgcaccactgaccaccggtcagaccaggccatgggccggacggaccggttccttgggagtttctccaggttttcataccacgactagcagtactaattttaattattattcatcacctgttaatactgttagtcatgctactccacatatccctaatgcttacaatgatcctaatagaggatattctcatgacactaggtatggccaatataatcatattgcgccgcaacaaccaccccttaggccaccaaatacaccaccaaatcaacaaaggcctgaaactatggaggattggattggagatattattaggaaaagttttagaaaaattgatcttagtgatttgacatcggttaggcaaagatacaatgaacctgtcattgattatatcaagagatttagagatgttagaaaccgatgttatagcttgaaaataactgacaaagatttggccgacattgcatatgatggattgcttgattctattaaagagagattgaatggccaaatatttcttgatgttgatcatgtgttgcatgaagctctggctcaggaaagccgagtggatgacaatagcttaaatgctaacttggatgataatgcaataactagtatagctgaactaagtgttggttcggattgtgttactagtttagacaatcatggaatagccaaaccaagtgatggttcggattgtgttggtagtttagacaatgacgccgttgaaaatatagccgaactaagtgacggttcagattgtattacaagcgaaagtgaattagtattgtcacctaagaccgaaccacagatcggtcatgtgaatgttggaaaagatagtgataatgtcttgtgggatagtagtgaaatagaatccaaagtagctatgcatacatattaaaggccgtatcttgaacacatagattcggtttcatacccacaaggatttgaggtgcccaacttcacaaaattcataggcgaggatgctagaacaacaatggagcatatcggccaatttattgaacaatgtggtaataaatctgggactattttcgtgtttaaataaaaaa

SEQ ID NO: 13171 - DNA, 375 bp, Oryza sativa
  Clone ID: PAT_MRT4530_1922C.1
atgacgggtcgcgcgccggccgccgctacttcgttgccgccggggaacgctccgcctccttcgcgcgccccaccgcgctcagcgccgggatcacgctccccgacgccatacgcaaccgctaccgtgtcgaggaattcaccaaggaggaacaagatgaaatgtatgtcttctcatcaagtcagaagcgcgtgtcagtggaattggttggcaagaacaaagttgaggaaaagctgaaaaacctcaatgatctgaccagtgcatctgtatcctacatggagtaagctcaattgggccaggagatgaactaaagaatttggctccaaatctcagacagcttgatttaactggaaatcttctctcttagtggcagatata

SEQ ID NO: 13172 - DNA, 514 bp, Oryza sativa
  unsure (1)..(514): unsure at all n locations
  Clone ID: PAT_MRT4530_19230C.1
ttnaatagtctccaataagcgatctgcagaaatttttttaaaacaataacaaagatcgtttgaattctggagagatttaatgcagcattattattgccattgtcgtatactacagttaacactcgcataagcaactaaaaattcacgccacttctgatgccactgatggcgacaccatcttgccatggccaccggcgatgccccccggcgacggcggtggcggcggatcaaccacaaccatgtccctcctccgcgcgacgtgccagaccatgtcggcgaggtcgcgcgccgacgacccgccgtccgccatcgccgccctggcctccgccgcgagctccctcgccctcgcgcgcctcgccgccgccgccgccccgtcgcccatcagctcctccaccgcgctcgccacctcgccgctccgcacctgcaccgggggagttcacggcgttcgacgtgcgtgacgggcaccttcacgccggcgcggacgccggcgccgagcacgtcgacggcgaggcac

SEQ ID NO: 13173 - DNA, 253 bp, Oryza sativa
  Clone ID: PAT_MRT4530_19231C.1
gtgcaaaaccggaacaagaacatacattcaaatgcttcatcagcgcatgaccccgccacgtggcgaaaaaaatgggaagcagttacccaagatatgttagacctgtacacactttttttgtaatactcaatttgatagaccattataaaaccttgttttgtgtcaaatccaggatatagctccggaagatcttccaaacagaattgatcctaaggcattcgatggtatgcgcccataggaagatgactgatga

SEQ ID NO: 13174 - DNA, 147 bp, Oryza sativa
  Clone ID: PAT_MRT4530_19232C.1
atgtcaaagcaggaagtaatgaagggcgaaaatgcacatatgaaagtacctgagcgtggcgacgctggtgctttccatgataaagatctggctggtgtagggcggtatgctgctgaagccggagacatgcacatcgcagaagcctaa

SEQ ID NO: 13175 - DNA, 222 bp, Oryza sativa
  Clone ID: PAT_MRT4530_19233C.1
gggagaacaaaacagtgggagcattttattagggcttcaaaaacttagaacagaaccgccccaaaggttcacatactgggggcattattttttggaaccacctatcccatttcattaggccatcactctaaggcccggttctccgacttatttgaaaagccgggggggggctgttggtgaactttaggagggaaggccccccccttttctcccctattattc

SEQ ID NO: 13176 - DNA, 893 bp, Oryza sativa
  unsure (1)..(893): unsure at all n locations
  Clone ID: PAT_MRT4530_19234C.1
cggacgcggcgcggattcgcgatctctctctctctctttctttcgtcgttggatccaaagctcctcctcctcctcgcctcgcgctcctcgtcccttctctcgtcccatctctcatctcatctcttggtagttgccagttgggacttgggagagagaggagcaggaggcaggagcaagaggagggcaagatcgatcaagatcaacatgtccaacaacaaggtgctgaccctggaggaggtctccaagcacaacaccaaggacgattgctggctcatcatcggcggcaaggtgtacaatgtgaccaagtttttggaggatcaccctggaggtgatgatgtcttgttgtcttcgactgccaaggatgctaccgacgacttcgaagatgtggggcacagcaccactgctcgggcgatgatggatgagtattatgtcggcgacattgacgcaaccacgatacccaccaaggtgaagtacacgcccccgaagcaaccacactacaaccaggataagacaccagagttcatcatcaagatcctccagtttttggttcccttggcgatattgggattggctgttgctgtaaggatctacaccaagtcagagtctgcttagtattgttgtcagtctttcaaaaggtcaagaacttaataagttagtgaggatccgaggattgcgtattttgtaccagcatggtctgtcatgtttgttatggttctaagactaatactggtaaaatgtgactaaatcaaatggatatttgatcatattttccatggtaaaaaaaaaaaaaaaagaatggctgctctaatttgatgtcattttctgtaccttgctcaaccagatatgcttatggatgtatctgcagcattacagatttnnnnnnnnnnnnnnnn

SEQ ID NO: 13177 - DNA, 207 bp, Oryza sativa
  Clone ID: PAT_MRT4530_19235C.1
atggtcgatgacggtgtattgaagaaattcaagtttgagtacattgctaggtgtgtcaattatatgtatcacagggctggtgctgatgttggaggatctctgatgaccatgcctaggatacctgcccagatggaaaaaaccggaccgggccggcggttcaacctgaaaaaaccggaaccagaagtctccacagttcggtccagctga

SEQ ID NO: 13178 - DNA, 147 bp, Oryza sativa
  Clone ID: PAT_MRT4530_19236C.1
gcggccgtccttattgtggatgttttgatatcggccgtatgtaaaaacctataacatggaaatcatctgagcactgtccaggcaggtgatgctaataatacgacgaactgatgcacaacttcaagacaagaccaactaacggggccc

SEQ ID NO: 13179 - DNA, 993 bp, Oryza sativa
  Clone ID: PAT_MRT4530_19237C.1
atggctcaacctcaacgtcccctccaagttcctgacataacaaagtctactcattctggagggaacactgtacttgcttatgcttcatcagctatgcaaggataccgtagcaccatggaagatgcccatgcgactattgaaaatcttgatgctctcactaacacgtcattctttggtgtttatgatggccatggaggttctgctgtagcaagaatggatgagatgttgagaaatcaggcggcaagcaaggaattaactgagtatggtagtggcaacgagtattggagaacagctgggcggtcttggctcagatgtgctccttgtgtgctgggacctgtctattgtggaccattagcagaaggatgtacagcatgtgtggttctcattagaaatacgcagatcgttgttggaaatgctggtgatgctcgttgtgtaatctcaaggaatggtcaggcaatcgctttatccaatgatcacaaaccaaattttccggaggaaactcagagaatagtagctgcaggaggttccgtatctttttctaggggttcccaccgtgttaataatggaattgcagtatcaagagcaatcggtatagcttatatgtttgttggcggggatttatcttacaagaacaacaaaaagttgcgtcctgaacaacaattgctgacttgttctcctgaaattcgagctgaccaattaactgatgataccgagtttcttgttatagcatgtgatggagtctgggatgtcttggcaaaccaggctgtggttgattttgtacgccttcacttaaacaatggggtggagctgtcggtaatctgcgagagccttcttcaggaggccattacacgagacccaccatcgacggacaacatgagcgtcatactggttcggttcctgcacccagagggcaacaggggggcgagggcggctacttccagcaccagtaccggcaccgtccccagccgccacagcaaaagcatatcgctttga

SEQ ID NO: 13180 - DNA, 3585 bp, Oryza sativa
  Clone ID: PAT_MRT4530_19238C.1
ttaaatccaccttgcctcgcctcgcctcgccggatccagatctccaccgcctcgcctcgccgcgccgcgccgccaccaacccactcgccgtcgccgtcgccggcggcggatcggccccacatcacctcggcctccccgagcaaaccggcgggggacgcccccgggcaacgggcgggcgaagaggggcgcaatggagcagctgcggacgatcgggcgggagctggcgatggggtcgcagggagggtgggggcagtcgaaggagttcctcgaccttgtcaagtccatcggcgaggcgcggtccaaggcggaggaggaccggatcatctcgcgggagctggatcacctcaagcgccgcctcgccgaccccgacgtgccccgccggaagatgaaggagctcctcctccgcctcgtctacgccgagatgctcggccacgacgcctccttcggccacatccacgccgtcaagatgacccacgacgagtccctcccgctcaagcgcacgggctacctcgccgtctccctcttcctcgacgagcgccacgacctcgtcatcctcgtcgtcaacaccatacagaaggacctcaggtccgacaactacctcgtcgtctgcgccgcgctcaccgccgcctgccgcctcatcggggaggaggccatcccggccgtgctgccccaggtcgtcgagctgctcgcgcatcccaaggaggccgtgcggaagaaggccgtcatggcgctccaccgattctaccagcgatccccctcatccgtctctcaccttgtctccaacttccgcaagaggctctgtgataatgatcctggggtcatgggtgcaactttatgccccctctatgacctgattttggaagatccaaattcgtacaaggatttggttgttagttttgttaacatcctcaaacaagttgcagagaggaggcttccaacttcctatgattaccaccaaatgcctgcaccatttattcagattaaactattgaaaatacttgcggtgctgggtagcggtgataagcaggcaagtggaaatatgtacatggtcttgggtgacatattcaggaagggtgacactgcaagcaacattggcaatgcaatattgtatgagtgcatatgctgtatttcatccatattcccgaacgctaagatgcttgatgctgcagctgaaacaacatcaaagtttctgaagagtgatagccataatcttaagtacatgggcattgatgctcttggccggttaattaaaataaatccagatatcgcagaagagcaccagctggctgttattgattgcttagaggatcctgatgacactttgaaacgcaagaccttcgagcttctttacaagatgacaaaatcaacaaatgttgaagtgattgttgatcgaatgattgagtatatgattaacatcactgatcaccattacaagacagaaattgcatctcgttgtgttgagctagcagaacaatttgcacctagcaatcagtggttcatccagaccatgaacaaagtctttgagcatgctggagatcttgtcaacatccgagttgcacataatttaatgcgacttattgctgaaggctttggagaggaggatgaaggtgctgatagccaactaagatcgtcagctgtagattcctatctacggattgttggggagccaaagcttccttcttcgtttctgcagataatatgctgggttttgggagaatatggaacagcagatgggaaatattcagcttcatatattattgggaagctgtatgatgtggcagaggcccacccaactgatgacactgtcagggcttatgcaatctccgcaattttgaagatctttgcgtttgaaatcgctcttggaaggaagatcgatatgctacccgagtgccaatcgttgatagatgaattgtcagcttcgcattcaacagacttgcagcagcgtgcatatgagctacaggctttgctaggtttggacaaacaggctgttgagaatgtaatgccagccgatgcaagctgcgaagatattgagatcgacagaaacctctcgtttctaaatggttatgtgcagcaagccattgaaaatggtgctgcaccctacattcctgagagtgaacgctcaggagtggtaagtgttggcaactacaaggcccaggatcaacaagagacatctgcccatgctcttagattcgaggcctatgagctacctccagcagcttcacaggccagtatttccccaactactgacctggttccagttccagaaccaagctactataaggaagatcaccaaatgtcaagatcccagccatcaggcgattctctttctggtgaatttggtctcaaacttcgtcttgatggagttcagaagaaatgggggagaccagcctattcctcctcatctacgccttcaagttcaacatctagtcaacaagcaaccaatggaggcgttagttctgaggtgggagggtcaacaagttcacaggctcgggaatccacatatggttccaagagacagcaggccactgaagtttcagcggaaaagcaacggttggctgcttcactctttggtaaagctgataggaagacccaggctgggcgaaagacagcaaaggagagttcctcaactgagaaagtagctactgctaatgcaacaccgcagccagccaaagagcaagtaatcccttctgccccaccacctgatcttctggatctgggagagccagtttcatcaagtcctccattagctgatcctttcacacagttagaaggtcttctcggaccagcatcagcctctcctgtggtttctgaaaccccagcttcgagcacttcgaaaacaccagatcttatgtcaatcttttcggatgatgtacaaactggagtgaccagtggatccacagaaccatcactcggggtaaatgtggtcgctgcaaagaagggccctagccttcaagatgccttgcagaaggacgcagcggcccggcaagttggtgtgacgccgacagggaacaaccctattctattcaaggacttgttaggctagaatatacagcatatgttcagcgtgctcaaattgggtaagtggagtttgcctccaagatggtcttgattgcctgatcggtgaaccagtaatgaatgatgctgttcgatcagcacagggcacatgagggcatgaggtaaatttggttttgattcacaggacacgaccttttaccctcccaattgggagaaggtaggtttgggatgagatgtggatggttgcgggtctttttcctgttgcgtttttcacatggtaatttcttgtcgagacttagtgtacatgtgtttattacatgatgtgtaatttgtacatgatgagaccgtggtccagaagcgtgtgccggcgctttttttcggttcatctggcagggagtatatgttttgagatatacccacattggatatacagtagctgctgggcactagaaacttggttgccacttcctctgaaactggctggaataataatatgtaagttttttcttccccttaaaaaaaaaaaaaaaaaaaaaaaaaaaaaaaaaaaaaaaaaaaaaagggcggccg

SEQ ID NO: 13181 - DNA, 380 bp, Oryza sativa
  unsure (1)..(380): unsure at all n locations
  Clone ID: PAT_MRT4530_19239C.1
cccacgcgtccgcccacgcgtccgggagtagaaggccggcgcggcggcctcctnctccagccataggcgggtatcgagcgcgctcctcgcccggagcatcaccaccgcccagcccggcgccggcggctctcgccggaaccaccacccgtggaggtcccacatcacgtccacgggctggccgtcgacgaacaccgtctggttccccctgaagttccaccggagccgccgcgcctgcaccgcgcgcttcccgtcgatgctcacccacagctcgtncccgccgtcgccgccgtcgccgccaggcgcgcaccccacgctcaccttgtgctccggcactgcctacgagaaccgggctcgcgcggtgtgcgttacctgcgccgacg

SEQ ID NO: 13182 - DNA, 302 bp, Oryza sativa
  Clone ID: PAT_MRT4530_1923C.1
atggtgctgccgccggggagagcaaggccaagaaattcctgaagagggcgttgtcgttcacgggtagctcgtcattggggagtgcgatggtggggatcctgtggcctcggacggagtcgtgcacggcggagcagggatcccgacgtccgacggcggcgcagcgagggcgcttaaattataatgagatggagactgggctcctaccccgcgcgtgcgcggatcggcgacacaccatggagaaggacgacgacaccgtggcggttgatgacggtggccggcgagcggtggccggcggcggttga

SEQ ID NO: 13183 - DNA, 578 bp, Oryza sativa
  unsure (1)..(578): unsure at all n locations
  Clone ID: PAT_MRT4530_19240C.1
aaggtngaggtccanggngggtgggganaaattccngngggggcanaccaccacaagacttntcttgtgttcatccaanaagggattttggaggaatgaaaagccgtggagacgggagacggcggttgcggttgnaanaccngaagnggggcacnagngcagcggtgttcctggtgttccggcaaangaatntattnttnttnttcgcccggcngcangaggatttatcgnatggatgntgcnactgtcgatcagagctttgatngagcccttaatttgcttgcattagnacccagcttanatgtaggcaggccttnccttttgttnngacgccnaaataaaaccgtngtngtngttgtcagngngngcgngtgtcgatcaatgttggatggatccctagctagctngganggatcatctatcatcanggggatctcatcangaantcctgctccatntcctcangcgngccaggnttcttaanataatnaacctntgctttcatccnaaaaaaaaaaaaaaaaaaaaaaaaaaaaaaaaaaaaaaaaaaaaaaaaaaaaaaaaaaaaaaaaaaaaaa

SEQ ID NO: 13184 - DNA, 504 bp, Oryza sativa
  unsure (1)..(504): unsure at all n locations
  Clone ID: PAT_MRT4530_19241C.1
gggcaaaaaggagggccacccctaaaaaaaacaacgggggccaacccgaaccacccaacacgaaccccaaacaaaaacccaacccacccccggaggaaaaaaaaaaaaagccccccaaacacaaaccaaaaaaaacccgggcgggaaaaaaaaaaaaaccaggccaaaaaaaaccgccccccgagcccacaaaaccaccccccaccccccccgcccccgcaaacgggcccgcccggcccgacccgggggcccacccgggaaaaccagacccggcccgggagggcaaccaaccctccctaaggggaaacggaaaaaagccgggcgaaaccaaagaaaaagccgctccccggggaaaaaagaaatccnctcacaatcaaaaaaaaaaaaaagccgggagcaaaaaggggaaagccgggggggccgaaggaaggggcaaaccccaaataagggggggggaataaaaggccggtcnncaggggaaaaaccgggcgggccacccgcaaa

SEQ ID NO: 13185 - DNA, 237 bp, Oryza sativa
  Clone ID: PAT_MRT4530_19242C.1
gttttatcaaaagggtcatcttgtatacctgggaaatgttgtttatggaagtgtggtggcgtcctccagaggctatcggaactgtcttcgactgagggtcagtataaatcagacagactaaaatatctgaagaggcacctacagcgtattctactacagtggatgaagctagagtaaggtcactatgagatcgtgatgctagaagatgcacacacttttcgagagtgctgcgagaat

SEQ ID NO: 13186 - DNA, 284 bp, Oryza sativa
  Clone ID: PAT_MRT4530_19243C.1
cccacgcgtccgaccacgcgtccgctgacccaagggcgaccgcgtctgcctctctgtctctctctacgacgacgacgccgagggctccacgagagggaggtgggcggcgcggccctacgccggagggagcgctctacgacgccgacgctcccgataccgacggcgcgggagatccgggcgtcggctctcggaccattggctttggacagacacgagctgacatggaaccatcctcacaggctcagcctgtgatgggtgctgccaccggtgggtcacaagcatat

SEQ ID NO: 13187 - DNA, 459 bp, Oryza sativa
  Clone ID: PAT_MRT4530_19244C.1
atggcaatgggaaaagaagaagaatatcaaatgatgtgcatggcactgcaaaatgagaatcgtcattacgaaaggttcaagatacagagcatagttgctattgatgagaagttctattttgacatatccgcatcagaacttggagttatcaagttaaatccgaatccaacatttaccacaatacaagttaagacactgaaagtttcacggaactgttgggagctggcattcccacatctggtcgtcgaatcccgtgggaggctctatctagttgtttatgaccgacattgtatacgcgatatgtgcctcttcaagatggatttctcaagacttgaatggtgttcagtggataggctttatgatcagatcttttttgtgggtaaactgcatttcacggcatcatattgtgctcggcagcttggattgaagcaaggtttaccagtctgcttctctatttag

SEQ ID NO: 13188 - DNA, 1251 bp, Oryza sativa
  Clone ID: PAT_MRT4530_19245C.1
ctagtcgatccccgtcgccgtcgcgtggatatttgacgccgaccggccgcggccgggacgcctggacgcctcgtcgaggattaccgcggggaccgtgcctacgccgccgctctctacaatagcagatgataccgcggcgtcagcccatgggctgacaccgtggaggttgtcagccacacgtgcaagtacaaccacaaccgagggccaggcggtagtggacaccgcgccacgcccgccagtcaatccacgcgagtagtgcctcctctctctctctgagaagcgcggagcggagttgagagagggagagacgcagcaaccaacagcacgcgcggggctgagggggatgaaggccgagaaggcagcggtcgccgtcggcggcggcggcggcggcgacgagtggcggtgccggaagcacccggtggcgagatccggcggcggggtgtgcccgcactgcctccgcgacaggctcctccgcctctgccccaactgcgcgcacgtgcgaccctgcccctgcacgtgcgcgtccccgtcctcctcctcgtcggcgtccggcgaagcggtcggccgggtccacaccctcatcgagcgggagcaccggattgcgcggtcacggtccgtcgccgcgtcctcctccctcgcggcggcctccaccgcatcagccactgccggcgcggtcggggggaggcggaaggcgagggtctgggggtggccgccgttctggaagcccgcggccaaggacggcgttgctgctgcggcggaggaggacgaggaggaggagggggggatggggctcgcgaggtcgagctcggtctccgcgacggtagtggaggcaaaagcggcggccgcggcggcgaaggcgcggtgggggtggcacttcccgagcccgctcaaggcgttccggcaccggagatcgtcggcgagcatgccggagcgaggatgagtgagatggctcggcatggccggaaaaagcgatcagtagggatgtgtgctgctttagaggactaaattaattaattaactagacgggggagattacaggagatttttccttttggcctttttgtggcttcgcgtgctaatcttatgattaaattagaccaaactccaaagcctgtgatttgggcgtaatgtgtgcatatgctcctgccagtggtgttctcttcgttgcttttgctcctttttagcgtgcttgaaaacgttgtagcctgtgtacatcaaattggtaattttaaggtcgctgatttgatccgc

SEQ ID NO: 13189 - DNA, 352 bp, Oryza sativa
  Clone ID: PAT_MRT4530_19246C.1
ttgcgtatgattacagggacggactctactgaacatggtaaaacctctggggcatgaggggacggtgccaatactcaataccaataaagattacgtgaaactactatagaaggaagtgattcaagttctgtgtaccgtacatatgactatgcaagttgacaataacaagacaaaagcctgagagatcattacattggtacagcacgtcatccatttctacttaccatcaacaagtctatggtagtcgtgcctatgacatcaagtgacgcagtacctgctccaactaccaactataacgtacgctgggactactgttcccacttatttaactctgctccatttactcgtgaaa

SEQ ID NO: 13190 - DNA, 585 bp, Oryza sativa
  Clone ID: PAT_MRT4530_19247C.1
atgccgctgccatctcttactgtcaacgagtcctcccagccaccgccgctcgttgtctcccaccgcctcccctccttttcccctcctccactgcctcccgtgtccggcaccgcgttgtgccgccatcaccggccatccgccactgccttgccaggctatatgctcatgggaggaagaggtgacagaggcgaccaccgtgaccacggcgcctcgacgaggagctccaccgtgagcaggtcaccacccacattgaggagctcattggaggagcgctcgacctcttccaggagatgcagcgggacaacgagcttgtgcccgacgcatacaccgtgcatagcatcattggctcgtgcgccggtgctggcgctctccgcaacggccttcctcttggctctccccgagggccgccagctgcacgcgctcgccaccaagctcggcctcgtcccgtcccacaccatcatcgccaaatcgctcctacacctctactcttccggtggcctctcgggtgttgcgctcgacctcttccgctgcatccccgacaggttgcttgtgtcatggaacaccgccgtcgacgccctcgggtaa

SEQ ID NO: 13191 - DNA, 388 bp, Oryza sativa
  Clone ID: PAT_MRT4530_19248C.1
atggggaaggggagggagaggacgccgatgcgacagtacgggaacgacgcgagtgcgcacagcgccgtgcccaggacgaggagggggagcgggcggagagacgagcgccaaggccgccctgcctgacaacgacgattacgagctcccagcgccgccacacccgctcggggacgacgacgacgccgccgaccgcctgccaccgcctccttcctctcccggtctcgcccgccgtccgctccgcccgcagcccgccgccgctatgcccgccgcctgcatccgcgctcgcccgccgtccgctccgccgcagctcgccgccgcactattgtctcgctcgcccgccacccgcatccacgctctcccatcactgctgcgcccgccaccggcctga

SEQ ID NO: 13192 - DNA, 427 bp, Oryza sativa
  Clone ID: PAT_MRT4530_19249C.1
ccaaaagaagcttttttataccccttttttttttagatcagcccaaattacaattctccaatcccgggcccgaccctacgaggggcaacaccaaagggccggatgggggccaacctatagcccttgtataaaagcatttacataggggccctggccgggggtccccatggccccccaggaaaaatcggggcattcctttttggcccaaagcaaacacctttggggggaagtggcgggacaagcccatcggctttcatgtttttatggcaaatttttttttgtataggggttacgggcgttaaattggccatcgacccattaatgggtttaaggagcagaacgaaggggccttgccccattaacagaagggaccgttgcccccgttgaaaaactcgaagcacttggaatagggggggcggcctttacc

SEQ ID NO: 13193 - DNA, 1197 bp, Oryza sativa
  Clone ID: PAT_MRT4530_1924C.1
atggcggctcgcttgctgttcgatctcaggtctgacatggtgagtgcggcgtccatgtcgctggactacaggcccgagtacgatgacatcgaggaggccaagtcccccaacaccagcgtcgccgccgtcgcagtcaagaacgccgacgcctccgtctacaagatcatccacggcttcctcaagcagaagaacaactccatcatcaaggtcgccgccaatgtcgccaggaaagcggcttccaacaagttgtcgaggaagacttctgacgtttttgacagcttaattcagaagcagcaaagcaagtggggaaacaaaactggacctctactctcggggatttgttactgtattgcctcttgcagtatgatattgctcaacaaagttgtactctccaactataatttcaatgctggcatatcgcttatgctgtaccagaatcttataagcgtgataattcttctggtacttgagctctttggtgtgatttcaacggagaaacttacatggaagttgattaaagtctggattccagtgaatcttatttttgttgggatgttagtaactggaatgtacagtttgaagtacataaatgttgcaatggtgacgatattaaagaacatgacaaacattttgacagctgttggagaaatatatattttcaggaagggtcagaacaaaaaggtttgggctgccttgtgtctaatggttatatcagctgtatgtggggggattacagatctttctttccatccggttggctacatgtggcaacttttcaattgctttctgacagcaggctactcgcttacactaagacgtgtgatggatgtagccaaacaatcaacaaaatccggttccctcaatgaagtttctatggtgttacttaacaatgcgctctccatacctttagcactcattttgattgttatcttcgacgaatggcaatacgtttatgaagttgaagttactagagatcctatgttctgggcttttgcaacagctagtggtttgctaggtctggcaattagcttctcatctgtgtggtttttacatcggactggcccaacaacttacagccttgttggttcactgaacaagatacctatttcggtggctggtatcttgcttttcaacgtaccagtctttttgctgggatattctttgcaaaggcaaaaatgtcctaatgtgtatttatga

SEQ ID NO: 13194 - DNA, 628 bp, Oryza sativa
  unsure (1)..(628): unsure at all n locations
  Clone ID: PAT_MRT4530_19250C.1
ggtctgtcttcaggggaggaggtntttncanttaanggagctaaanaattgggntgttttgagtggctggtgcccttngcattanaattagggaggaagacntgatgggnanagggtagnananattttcagggnacagacantcttaaagtcgnatttgaggatttaatggagatatccattccatggtcctgctttcnacagataaattaataacattanttgtttaacattaatacntgataaattaattaccttaatggcctatattcttcntaatcctgttntggacccaaaaaaaatcccagcttcctgagaatantctgcagctgcatgggtgccaaagtccaatgcctgtaacatcataggcatgaattaatttgacttggatacaatggacatatatcagcacatctatgcattacgaccttctgatcctcatgaagccttggttttaaccgttgccgtacgagtgcttagtgcttgcccctgtttagcctttttatattttcccttttccagggatgtaatttacaggttccttttatttggattgcattgtactaattacataaatgttttaacgttttttggcccaactattttctaaaaaaaaaaaaaaaaaaaa

SEQ ID NO: 13195 - DNA, 548 bp, Oryza sativa
  Clone ID: PAT_MRT4530_19251C.1
gcacgagggtcgcattagtaatcgtaaccttcctctcaaatttcaccgcatatttgttgcatgcagaaaagcacaaacctcagtgatcaaagctaacttgacccttactggaacgaggaactcaaagctctctgttcctcaacagtatggtcgtcgcatgttgcaagtgttcgatgggtgacaattttcgtagctagaaacgacaacagttgatgactgccaatgctttacccactttaggacatgcacggattggggatttctattcatggagtaacaatatctttattgtacttttgtgtgggcacaggggagtgtggagttgctgtcgtggcattcttcaaatccaaccctccatggaatcaaactcctcacctgctagccacagctcaaaagctggtgcgttggttttctcccatgtagaaaatacagaattttcttattacatttcattgtttgttgacgaccgacatttccattgttgccgagaacaacatctacggtttgcatgtgtactcgcaattcctccttgaaaatgtcttgatcag

SEQ ID NO: 13196 - DNA, 644 bp, Oryza sativa
  Clone ID: PAT_MRT4530_19252C.1
atgcctataaatagagccccctccctctcctctttcggccgccacctcccccttcttccgctgtcgccggaaatcctctcctcgcgagctccacctctctccgccgctggccgtcgctccagccaccgtgcgccgtcgtcctggttgccttcatcctgcgccgccacttccttcggcaccgcagcgacgaaagcaagcccggcagctacctccacgaagccgcaagccatcggaacaccgtcgccgtcgtgaagccgatctattccatcttattccatgttcagccgagccgcgccaccgttgccgtcctcgctggtcgtggcagaagcctccgtcggcatagcagaagcaaagagaagcccgtcctcccctccgttctcgctgcaagccaccggaacgtcgtcgtcatcgtctacctgaggtcgccgtctcttcaagatcgctgccggccatcttctgccgctgttcatcgtcgttcacaccggggtaagcattgccgtcgcctcctctctctcccggtgctgtcgcctctcgccggagcgccgcccttcgctgctgccgcacgtgacatgcaacgtgtgtgtgcacgcccctgccacttagtacgccgcaacgtcagcccctccatcctccatagagcctat

SEQ ID NO: 13197 - DNA, 510 bp, Oryza sativa
  unsure (1)..(510): unsure at all n locations
  Clone ID: PAT_MRT4530_19253C.1
cgccggagctggcgctggcgttggcgccgccatcggggctggcgctaaggccgccatcggggctggcgccggagctggcgccggcgtcggggctggcgctaaggccgccatcggggttggcgctggcgttggtgctggcgccgccgtcggggctggcgttggagccgccgccaaagtcgccggcgccgccgagggcgccgccggcgcggcacccaaggtgtacgcgtgagatcgatcgatcgagcggcgtccatctccactactccatccatatataaactcgctgtcgattgtttgttgttaataaaagtttggttaatttaaacgtcaagcgtttagttgtttaatttacatgcaaatctcgcgatttgtgataattaactaccgaaatgtgtgtttgggctgctaattcatccttctcgctccaaaaaaaaaaaaaaaaaattacatgtgtgtaaatgttataaagatctaactcatgggcggnctatatataaaaaaaaaaaaaaa

SEQ ID NO: 13198 - DNA, 252 bp, Oryza sativa
  Clone ID: PAT_MRT4530_19254C.1
atggcggggccgccccccatcctcggagccgctgcccgtgttgcttgcaccgctctcctcgcctcgctgccgtcgcttcccgcgccgtgccggtgctccgatctcatccaccaccacaacggcatcacccctcctgctcgcgtccaccgtggccgtggggatgtccccgtcccctttgtcttcaaggccgtgactgccggctccggttgcctggttgcatatgccaactgttacgttcttgtctgcgtgatg

SEQ ID NO: 13199 - DNA, 940 bp, Oryza sativa
  Clone ID: PAT_MRT4530_19255C.1
cctcctctctttgcttcgatcgatcgcttcgttctccatgatggcgagcggcggcggcggcggcggcgaggcggtggaggagggtacgacgacgcgggtgggcgacctgccggaggcgtgcctggcggacgtgatcgcgctcacctcgccgcgggacgcctgcaggctggccgccgtgtcgccgtcgttccgcgccgcggcggagtcggacgccgtctgggaccgcttcctcccgccggactaccgcgccatcgcgcccctgccgccgccgccggctacggcggcggcgagcggcggcaagaggatgaagaagggcgtctacctcgggctctgcgacaagcccgtccccgtcgacgacggcagcatgatggtgtggctggagaaggagagcggggccaagtgcttcgcgctgccggcgaggaagctgagcttgccatgggaggacggcgagttcagctggagatggacacctcaccctctctccaggtttgaggaggtggcgcagctggtggactgcacgtgcctggacatctacgggcggctgccggcggcggcgctgacaccggcgacgccgtacgcggcgtacctggtgttcggcaccgcggcggcggcggaggggcaccgcgggctgagcttcccggaccaggagacgacggtgtccgcggcggggcgcgtcgtggcgcgccacgccgtgtgcctccgccccgacgacgccgaggcgcgcaagttcaggggcgtcggcctcgccggcgccggcgtcccggtcaggcgccccgcgcggcgcggcgacgggtggtcggagatggagctcggccgggtggccgccgacgaggtcgccggcgccggcggcgaggacgtggtggcgagcttcgaggtgctcgggtggtatcccaagcgcggcctcgtcgtcgagtgcatggagtttaggcccgtagtctga

SEQ ID NO: 13200 - DNA, 418 bp, Oryza sativa
  Clone ID: PAT_MRT4530_19256C.1
aaaaaaggggttcatcaatctcccctgggggggttacgggcatttcctttataaaaacatttgaatttttgggaactgggatgatacctttacaagccttttgtttgaaggcacaaacattttggaactttttttttttttttttatttggaaaaaaaacatttcaggaggaaagctggtcctttgggggggggggggggggggaccccggccccgggaaaaagggtttctttggggggggccccttaacggggggttttttttggagccccaccccgggaagggacggttggaacttggcaacttattatttgagcggggggcccgaataaacgggggcctgcggggggggttggtttttgcccacctggatgaggatggaccaccccccgggaacaaaaaccagggcaaggccccc

SEQ ID NO: 13201 - DNA, 481 bp, Oryza sativa
  Clone ID: PAT_MRT4530_19257C.1
agagctcaaaatcagctttggattatataggaataaagaactggacagaaacctgatggattctttggtggcatgagaggaacgagtaataccattgtcaaatgtagttttcaactttcagctgtcgcagatgctacatgctagctagatggtcttcttctaactggtactggttccctctagttgttcagtagcatcattgtcctcattcgttgccatatgttctttcagaaattttcttacttcaagggagggatgattggggtgaagattagcatgatttcttatggcaacctccgcgacctccacctcccgtgctgttgcacccgcacaataaatgtccaccaggaacaatttgagggaggtcagttgatggatgctgaaatcagacccgcaaccccgttcaggtactgtaatatgagcatgatatctaatgtttaaccgctggaactttggcataactcctccttcaatatcatac

SEQ ID NO: 13202 - DNA, 1749 bp, Oryza sativa
  Clone ID: PAT_MRT4530_19258C.1
atgtcgtcggcagacagccatgttcccacgtcgcgcctgcttccagcggaagtggagatctaccagaacacaggagtagagtattacgcttctcagcggcccgaacctgtatacatcgcccgtgtcttcggtgacgacggggagccgaacccacgccgtcgagctcgtactccaccgccccctccgcgccaaagtcctaggcgggaggaggcgctcgagagggtcgaaggatccgcgacgtcgacatccatgggtgatggagaagggcgccgagatggggagcgtcgcctcctcgtctacggcgacggcagcacgcctcagggcgcgctccaagctgcgggcgtgctcctacgtcacccgcccgtcgtccctgacccggagtctccggcccaacgttggctggacgacgtggccaacttggtcatgacggcacggcagcacctaggtgttggtgggcgatcctccgccaccaagacctctggcgctgctaccaccggctccgcatcgtcaagacggagggcgcggcgagcggcggttgttgctcgccattcggctgccactcccatgtcagcacctccgacccgggaagatcagcgcggggggccagatgcccgcatcggtatcgagcgccggcgtgatggtcgacgtgctgcccacgcaacggagggcgcctcctcgtccggagtgtcacctcaacacggacgcggggatcagccctccgtgcccccggttggtggtgtcggctgtagagcctttgtggcgagccttcggaacgtccgttggcccccaaggttccggcccaccatcgccgaaaaatatgacggaagcgtcaaccccgccgagtttctccaggtctacacgaccgggatcgaggccgccgggggtgatgacagggcacatatccgcgcccaggtgaagaagcggacctacacgcagtacagcgaagggatgatgagtcacttcgctcatacattcagcggttctgtcaaggggggtgtgcggcacaaccgcatgctcgaaaagatcgcctccaaggagccccagactaccgcggagctttttcagctcgcggaccgagtggctcgtaaggaggaggcctggacctggaacccctccggttccggtgtggcaacttcggccgcccccgggtccgctgctcggatagggcggcgtgacaggaggaggaagaagaggccagcccattccgatgacgagggtcatgtcctcgccgtcgagggcgcttcgcgggccacccgaaaggagaggcctgcgagcgacaagaagaaggaggccggcgctcccagcacggagcgcccaaccggcaaatggtgcatcgtccacaacacctcccttcacgacctcgcggactgccgcgcagtcaaaagtttggctgagcggacgagaaagtgggaggaggagaggaggcaggatcgcctagagggtaagtccccggcggtaccctccggcaatcggcgaagcgaggccaagcagaaggcccccgccgaggacatcgatgacggcgatgatgacctaggttttcaggagcctagggccaccattgccactgtcgatgggggagcgtgtgctcatgtttctcgccggagcctcaaggccatgaagcgagagcttctggccgcggcccctactcatgaggcgacacgtcgggcgcggtggtcggaggttgccctcaccttcgaccagaccgaccacccaccgtgtgttgcccggggaggacagatcgcgatggtg

SEQ ID NO: 13203 - DNA, 305 bp, Oryza sativa
  Clone ID: PAT_MRT4530_19259C.1
ctgaccccaccaaacttagcgagggggaagggagaacggtggtgaacagcgcgacggacgacggttagcgagcgagcgacgacgcaacggaagaagaaaaagaggaggacacggcggcgcacgggagggaggaaagaagaggaggacgactactcgcgcgcgcgcgcgccaattcggaggcgccaccaccggttcgtcgtccctcccccctccttcctcctgttcctcttcttgtgaggccgccaggaagagggataggagaggaggcggaggcggcgcgacctgacccgtcgcgcgccagcagc

SEQ ID NO: 13204 - DNA, 413 bp, Oryza sativa
  Clone ID: PAT_MRT4530_1925C.1
tggttcgagaaccagcgaacgtgtagagttatctctcgaacaccaatggaggttgcggtgcgagagattgctacgtacttttctcgagtagtccagccatggcgggtgctatgagataggtcgtcggtcttcgttggtgggttgggcgtgacgactctgcatttgtcgagatcgttctcgataatgcggtgtacttgaccacaacctagtcgagtgctcaattgttcgctttgatttccgctccacgacgcgcttgttttgttggtggagatcgatgccgtgttcggcttggacgcggttaatcgagccctccaccagttgatgtggcgcgtgtattggtactgatcaatctcgaaggttgtagcgaagttgtcgagtagcttgttgtcggagaattcatctcttaaacccat

SEQ ID NO: 13205 - DNA, 282 bp, Oryza sativa
  Clone ID: PAT_MRT4530_19260C.1
atggccacggcccatgactccatgggccatgagggaggcgtgcgtgagatcgagatctggcccgtctatctactgggctcgcacgagcacggcgcggcaccaccccagtcgcacgcggactgggctgagaattcatgggccgggagaccaaaacgtagacgcaatttgaataagattattggcagccatgcaatgcattatacaaacggtagtcctcggagtgacgtcacagaattgacactcggaaggttcatcttcatcatatcagattatcagtcctaa

SEQ ID NO: 13206 - DNA, 186 bp, Oryza sativa
  Clone ID: PAT_MRT4530_19261C.1
atggcctgctgcggctgcgactgcgacttgggctacagtagtagtagtagttgttgttgtttcggtggacacgatcggcacgcggacgtgctggtgacggtatacgatcgggtggacacgacccgtcacctgccggtgtacgaaacccacatcgccaaaaatcccaactccccaaggcatcgctaa

SEQ ID NO: 13207 - DNA, 448 bp, Oryza sativa
  Clone ID: PAT_MRT4530_19262C.1
ccggattgacggtcgaccactcgtacgccgagagctagcggctggctggcggcggtggcgcggtggcagcaaagtgtacgctttgcagttgctgccggcgcggcgcggcagcggtgacgactaatagggaggaggagagaggctgtgtcgggtttgtgttgtgtttgtgtgtgtagtgtgagatctggtgactgtcgtgatgatggttcgcgtgtgtagcttttccggttttggctgttgccggtgtttcttttttcatttttttttttttctttttatttctcttttttgttcgttgttatttttaatttttttctttttcttttctaattttttttttttattttattttttttttttttcctgttttttatctttatctcttagtttgggtttttattattatttttttctttctcttttctttttttacttatttttttaattt

SEQ ID NO: 13208 - DNA, 594 bp, Oryza sativa
  Clone ID: PAT_MRT4530_19263C.1
tggtaggggcagacgtgcggtaccgcccgactgacgcacgtcagtcaggactgtccggtctgtgaccgacctgtccccagacacgaccgattggacgggcggctgtgcccccacgtcgcttctgtctccggcggagtggagcgaaacgtggctagacgcacggcgcacggcacggcacgtacgagaaaggccacagctaaagccattaggtcgaggagaaccgcgctaaaaccccgccgatctcatccgaatccaaccaaaggaaacaccacgcggcgcacggcgcaccgcgcaccggccgtcctgctcctgcactgcaccacgccgatcgagagtaatcccactcgcccggacgtgtacggcgccccgtccccccatccttatctcgtcgtcgcaagccgcgcccgcgcgcaagcacgtttttctactgcgctagtatccctctccgcgtccagtactagattaatccctggagtttatctggctgacatggcggtagttagcgtacagatccatcatctagacgctctagactctagagctcatcggtcctgtgaatgtgagcgatctgctagcagaaaagcgttgggctct

SEQ ID NO: 13209 - DNA, 1226 bp, Oryza sativa
  Clone ID: PAT_MRT4530_19264C.1
ttctctaccagtgtaacacacagccacaaaatcaccatcatagaagatatcccaccaccagctttgctcccgctagttcccgctgatcgatcttttttcgggagggcgttgcttgctcggatcggcggccatggctgagcccgctggggaggcggccccgcaggcggacggcgtctcggaggaggcggcggcgaggccgagggggtttaggcttcttgggggggacaagtccgtgcaccaggctctcggcggtggtaaagctgctgatgtacttttgtggaaagacaagaagatctctgctgcagtgataggtggcgcaactgtgttgtgggttctctttgaagttgttgattaccatttcctcactctgatatctcatgtcctgatcggtgtactggccatcttgttcttatggtccaaggcaaccatcttcatcaagaagagtccacctaatattccagaagtgaagatatctgaagatcttgctgtgaatgttgcactagcactgcgcactgacatcaaccaagcacttcacttgcttcgggagatttctctagggcatgacctgatgaagtttttaggcgtgatcgttgctctctggattctttctgaaattggaagcctctgtgatttcctgaccctgttttacgttgctgtcttgatgctccatacagtgccgatcttgtatcacaagtatcaggacaaggttgatcattttgctgggaaggcgcatgtggaactcagcaggcagtactctgttctcgacgcaaaggttctcagcaagatacctaggggtccagcaaaagataagaagcagaactagaaatgaaacaccatatcacgctggaacctgacttgggagtgttggcatctcacatcacaacatatgcatgaatcttgagtccttgacttggtttggcccttgttggtgcttggtacatatatgacctgtctgtagatttgtgtgttgggagtgtcttgtgtagtaaactgtcgatatgatgtggttggtgtgcaactctgcaatgttaatatacaagatcttgctgcaagcctgcaaccatatatgatatacgtacaaggactccatacctataatttacgttagtgtggttgtaatgtagatcgtgctcaagtaattgtaaagtgctgtggttctttcttatatcgctccaagtaattctcagttcttgttacttttagtttggttaaaaaaaaaaaaaaaa

SEQ ID NO: 13210 - DNA, 530 bp, Oryza sativa
  Clone ID: PAT_MRT4530_19265C.1
cggcacgagggaacaggcaataataggcccttctgaactggcacctatgggctttcctgcactagtgaattgtggtaattcagatattggaggctgatatacctgaagttactgatactttcagaatgttcagttatatttcttttgtatgactgcattgccagctgtggaaacctagcctatttgttagaactcaaagttgggaagcactaagtaatctaattaaaaattagtaatttctggcttgctaaaatgttatgacaatggaagaggcaatctaactacctctgttgtaaatgttggatgctctaatgtgatataggtatctcaagtttgcttagaggtttgtttgtggtcattgtgtttgtaggtgtcaggcgcgaatgtaatcaacaatttttttggtgtgtgggtgtgggtgtacttggggtttcttccctatacgcagctctcctacgtgttcaagagaaaaacgtttgcatataggctttctgggcactcttatcaatattaatatatttataaattgg

SEQ ID NO: 13211 - DNA, 777 bp, Oryza sativa
  Clone ID: PAT_MRT4530_19266C.1
atggcgttaggtggtggcaccacgtcaacagaggagggtgaagatcaggtcaggagaaaacgagggacagcaagttttgttgagaccatatcagaagcagagtgcaaaaggccgaatggggagcgggagagcggcgcgacgccgtcggcggccgcggccgcggcctacggagaggaggcgggagtagtccgagagcgagggaaggcgggcgargagggagctccatacgcgagcgggagatgctaragcggcggcggcggaggcggccaggtcggcggcctcagccggatcgccggagctagggctccgcggaggcggcgaagcagccatactccagcgagcgggagatgtgctacggcggcggcggctgcggcggcgsccggagacgccgcgacggctcgtgctgatgagtatggacccttggcggcggcggcggcggcggcgcttcccgaccgcctccagagcgagatccaccttgacgacggcgtgatcgagccgccctccgtgtttcgtcatcttgtcgtccatagcctccatcttctgagtgagcgtgacatcccgccaccgccgctgccgctgccgccaccccctcctcttcctcatccctatccccaacacaaccacctcctatcagggctggattcggcaattgtggggataatctggattcgagaggcatggctcgacccgacagcgacgcactggtggatcgctgccacctcatcttgcgcatttttccacctgagcgcctttggttccccaggacctcctttgtag

SEQ ID NO: 13212 - DNA, 318 bp, Oryza sativa
  Clone ID: PAT_MRT4530_19267C.1
atggcggatggcacagtgacgccgttcgctcgtcccaggtgggacgagttcgtccgcgagatttttacggatcgattcagcggtatttttgcttaccctcagtccaagcttgccagtattttgcactccactgagttgcaattggcacgaattctaaagggtgctgcaacgacatgttatgtcgcactacatcctcaagtcaaggggataagcggaaagtacttcagcaattgcaatttagatagcccaagctcacatgcttcaaatgcagagttggcaaagaaactatgggaatttagctctaaggttgtgtcctaa

SEQ ID NO: 13213 - DNA, 157 bp, Oryza sativa
  Clone ID: PAT_MRT4530_19268C.1
tgagccaccctcgccgggcgtcggctgccacccatgctacatcgtcgatggcaatgatttgctccatttcagcatttccactaggtatgatgcctgcggtgcatgtgccatcgctcgcgacggcttcaagacgcacacgccgagcgccggcatctga

SEQ ID NO: 13214 - DNA, 225 bp, Oryza sativa
  Clone ID: PAT_MRT4530_19269C.1
atggaaccgcgtgactaccgcgtgaacagtattaaatcgctggctgcgggaccgttgcagtgccatgcgaccatcccgtgggccgttggtcccgcgttttggagctacgagatcatcgcggtcatgcgttttcaccccgcaggatgggtttatttatacaaatccttcccatgcaggagagcaggagctcccccatttccattaagaggaatgatagaattatag

SEQ ID NO: 13215 - DNA, 3726 bp, Oryza sativa
  Clone ID: PAT_MRT4530_1926C.1
atgaaggttactactgcatctggacatctcctcttggtgttgtttgcttccatcttccacccagccgtcagctcaatttcaggaaatggaacagatcgacttgcattgctagaattcaagaatgcaatcactcacgatccacagaaatccctaatgtcttggaatgacagcaatcacttgtgcagctgggaaggtgtctcgtgcagctccaagaatccacctcgtgtcacctctattgatctcagcaaccaaaatcttgcaggcaacatttccccttcacttggcaacctgacattcctcaagcatctgtcattggcgacgaacgagttcaccggacggattcctgaatctctcggccacctgcgtcgtctccgatcactctacctgagcaacaacacgctccaggggatcataccgagcttcgccaactgctccgatctgagggtgctatggctggatcacaacgagctcaccggaggactccccgacggcctgcctcttggcctcgaggaattgcaggtctcgtcgaacactctcgtcgggactatccctccctcgctcggcaacgtcacgacgctgaggatgcttcgcttcgcgttcaacggcatcgagggtggcatcccaggcgagctcgcggcgctgcgcgagatggagatactgaccatcggcggcaaccggttgtcaggtgggtttccagagccgatcatgaacatgtcggtgctcattcggstcagcctcgaaaccaaccgcttcagcggcaagatgccatccggcattggtacctcgctgcctaatctatggcggctcttcattggcggcaacttcttccaagggaatctcccttcttccttggcaaatgcttcgaatcttgttgatcttgatatttctcagaataactttgttggggtggtgcctgctttcattggcaagcttgccaatcttacatggttgaatcttgagatgaatcagctccatgctcgtagcaagcaagattgggatttcatggatagcttaaccaactgcactcagctacaagcattatctatgmctgggaatcagctggaaggacatttaccaaattcagtaggaaatttttctgttcagcttcagcgtctttacttgggacagaatcaattatcagggagttttccttcaggcattgaaaaccttccaaacctgatagtttttggactggattacaacaggtttacaggttctgtgccaccatggctcggcggattgataacattgcaggtactaagcttgactaacaacaattttacagggtatattccttcctccctttccaatttgtcacatttggtagagctttatctgcaatcaaatcagttgcttggaaacataccttcaagctttggaaaacttcagttccttacaagaatcgacatttctgataacagtcttaatggtagtctgccaaaggagatcttcaggattccgacgatagcagaggttgggttctcattcaacaatctcagtggagaacttcctacagaagtagggtatgccaagcaactccgcagtttgcatctctcatctaataatctgtcgggagatattcctaatactttgggtaactgtgaaaatttgcaagaagtggtgctagaccagaataattttggtggaagtattcctgcttcgcttggcaaattaattagcctgaaatctctcaacctgtcacacaatatattaaatggttcaataccagtgtcacttggtgatcttgagcttcttgagcagatagatttgtcgttcaaccatcttagtggtcaggtcccaactaaaggaattttcaagaattcaactgccacgcatatggatggaaatttggggctttgtggaggtgcaccggagttacacctacctgaatgtcccattgtgccttcaaataaaagtaaacacaagctatatgtaacactgaaagttgtgatcccattagccagcacggtgacacttgccatagtgatattggtcatatttatctggaagggaaaacgaagggaaaaatcaatatctctatcctcatctggtagagaatttcccaaagtttcttatagggatcttgctagagcaacaaatgggttctcaacatccaatttaattggaagagggagatatagttctgtataccaaggacaactatttcatgatataaatgcagttgctatcaaggtcttcagtctagagacaaggggagcacaaaagagcttcattgcagagtgcaatgctttgagaaatgtgcgacatcgcaatctagttcctatcttaacggcatgctcaagcattgattcaagtgggaatgacttcaaagcattggcatataaattcatgccaagaggagacttgcataaattactgtactcaaatccaaatgatgaaagatcttcaggtatatgctatatttcactggcccaaaggttaagtattgcggttgacttgtctgatgcattggcatacctacaccacagtcatcaaggaacaattattcattgtgatctcaaacctagcaatattcttttggatgacaatatgatagctcatgttggagactttggactagcaaggttcagaattgattccaaaacatctttcggtaactcaaattctacaataaatggcaccataggatatgttgctccagaatgtgccataggtggtcaagtttcaactgctgcagacgtatacagcttcggggttgttctccttgagattttcataaggaggaggccaacagacgacatgttcaaggatggattgaccattgcaaagtatacagagataaacatccctgataagatgctgcagattgttgatcctcagctagtacaagagttgggcctgtcccaagaagatccagtgcgtgtcgatgaaactgcaacacattgccttctttctgtactgaacattggactgtgctgcaccaagtcatccccgattcctatcttaacagcgtgttcaagcatcgattctagtggaaatgacttcaaagcactcgtgtatcaattcatgccacgaggggacttgcataaattgctgtactcaaccagggatgatggggatgcttcaaatctgaaccacactacattggctcaaaggataaatattgttgtggatgtatcagatgcattggagtatctgcaccataacaaccaaggtactattattcattgtgatctgaagccaagcaacatccttctaggtgacaatatgattgctcacgtcggagattttggccttgcaagattcagaattcattcgtcaacatctctgggtgattcaaactcaatttcttcctttgcaataaagggaaccattggatacattgctccacgtaatgaatgctcagagggcggtcaagtttcaactgcctcagatgtattcagctttggagttgttcttttggaattatttattcggagaaggccaacagacgacatgtttaaggatggattgagcattgcaaagcatgtagaggtgaacttccctgacaggatactagagattgttgatccccagctgcaacaagagttggacctttgccaagaaactccaatggcggtaaaggagaaaggtgtacactgcctgcgcagtgtgctaaatattggactctgctgcaccaagccaacaccgagtgaacgcatcagcatccaggaggcgtctgccaagctgcacggaattaaacatgcatatcttagagaaaactaa

SEQ ID NO: 13216 - DNA, 365 bp, Oryza sativa
  Clone ID: PAT_MRT4530_19270C.1
gtggcggatgcggaagtggtaaaccactagataacacattgtccctatagcagaagggtagatcgatggaggcagccatctgcgcatcgagctgtctcgtagacaaggtggtgacacagctgacctacgagctgtttgtgacttacatagccaacaccgagctcggcctcaacatgaaacaaattaagacggacctcatgtttatgcaagggctgctccatcatgcccggtagaggaggaacaagagctaccctggcctgcaagggcttatagaggaactcacaaagaacgcttacgacgctcaagactagcttaactagctccagtcctttatcattcatgaatcaaatcaacggctcccatga

SEQ ID NO: 13217 - DNA, 621 bp, Oryza sativa
  Clone ID: PAT_MRT4530_19271C.1
atggaggaggctgatcgtcctagaatagtcctagctggcgacgcttttgaagtgtatcctcatatctcatctcgtagaccatcaacagtgcaaggtgcactgttgcgtatgttctatcctagtgctattggtctcccagaattcaggacacctgcacttacttggagggactacaagaggtctacaaatgaaagaataatgtcaccagctaaccgagttcttaaagaattttggtattgttttaaatgtgatcccactgacaaagtggaagctgataaagtcttggagcaaaatttcaagaagaaagtgccacaaatgctgtttgaagagaagaaaagagctactaataagttatataaaaaaggcaaagtaccagcagaggatgttgatgaggatggtgggcaacaaggacttgctgctgcttggcagcacacacacgagatgcaacaaggaaataatgaacagctatgcaaccagaggacagaagaagcttggagtgattttgatcaagaggaaggaaatgagattgatgatgatgagggcaatgattttgatcttgaggaaggaaatgagattcctgaagaagagggcaatagaagacggaccacccttgtagcttag

SEQ ID NO: 13218 - DNA, 741 bp, Oryza sativa
  Clone ID: PAT_MRT4530_19272C.1
atggaggaggatgatcgtcctagaatagtcccagctggcgacgcttttgaagtgtatcctcatatctcatctcgtagaccatcgacagtgcaaggtgcactgttgcataggttctatcctggtgctattggtctcccagaatgcaggacacctgcacttacttggagggactacaagaggtctacaaatgaaagaatgatgtcaccagctgaccgagttcttaaaggattttggtattgttttaaatgtgatcccactgacaaagtggaagctgataaagtcttggagcaaaatttcaagaagaatgtgccacaaatgttgttcgaagagaagaaaagagctactaataagttatataaaaaatgcaaagtaccagcagaggatgttgatgaggatggtaaccattggcctactgtgcaagctttggtttctgctaaaccaaatgatttttcagttactgaagagggttggcatttactttgtgagcactggagtacacctgaatttaggaagaaatctttatataggaagagaaacaggtttgctggaggtgggcaacaaggacttgctgctgcttggcagcacacacacagaatgcaacaaggaaataatgaacagctatgcaaccagagggcagaagaagcttggagtgattttgatcaagagggaggaaatcagattgatgatgatgaaggcaatgattttgatcttgaggaaggaaatgagattcctgaagaatag

SEQ ID NO: 13219 - DNA, 1176 bp, Oryza sativa
  Clone ID: PAT_MRT4530_19273C.1
ggaaatagttggaagcaaaactgattcattagattgaatctgtgaattcccttcctctccgtacgtcatctcccccacaggcggaatttgttcgccgggcacacgcgagggcaccactccacgtcaaggcaacctgctaatggaggaggctgatcgtcctagaatagtcctagctggcgacgcttttgaagtgtatcctcatatctcatctcgtagaccatcaacagtgcaaggtgcactgttgcgtatgttctatcctggtgctattggtctcccagaattcaggacacctgcacttacttggagggactacaagaggtctacaaatgaaagaataatgtcaccagctgaccgagttcttaaagaattttggtattgttttaaatgtgatcccactgacaaagtggaagctgataaagtcttggagcaaaatttcaagaagaaagtgccacaaatgttgtttgaagagaagaaaagagctactaataagttatataaaaaaggcaaagtaccagcagaggatgttgatgaggatgataaccattggcctactgtgcaagctttggtttctgctaaaccaaaggatttttcagttactgaagagggttggcgtttactttgtgagcactggagtacacctaaatttaggaagaaatctttaaatgggaagagaaacaggttagctggaggtgatactggataccaatgcggcgggtcgcgaggcttggttgccatgaagcagttcctgcaacataaaaaaggtgggcaacaaggacttgctgctgcttggcagcacacacacgagatgcaacaaggaaataatgaacagctatgcaaccagaggacagaagaagcttggagtgattttgatcaagagggaggaaatgagattgatgatgatgagggcaatgattttgatcttgaggaaggaaatgggattcctgaagaagatggcaatagaagacggaccacccttgtagcttagagatttttcctctcaatctatcttattttaaatgttacagacttgtttcaattaaagtctttcatgcaagacatgtcatgtattacttagttttgctatggtgatggatgataaatattttagaacaatttggttatatatctatggttgaacttcccgtggaaaaaaaaaaaaaaaaaaaaaaaaaaaaa

SEQ ID NO: 13220 - DNA, 563 bp, Oryza sativa
  Clone ID: PAT_MRT4530_19274C.1
cggaagatcatcgacccatccactccggtgagctcctcaacaccactacaagaagacggaggtctttgggctggagatcccccccgagatcggcggcgtgccatcggaaatcctcgaccccatcaacaccctggacggacaggccgcgtaccacaggagacactcctgaagcttgccgggctcttcaagaacaacttcgaggtgttcgccagctacaagatcggggacgacagcagcctgaccgacgagatcctcgctgcaggccccaacttctgagtacttcaagccatggatctggaacggcgaggcgacggagtgggttcagtggtgggtgcggtgtgaagatcatgatgatgacgaaaaaaaatgttggtttgatgtaccaacatatagactagctatgtatgttatcatgtgtggttctgtgtacctgttctatcagcttgttcgccctggatctggtcctggactcctggtgtaaatctgtgctttcatcttgcccatgtactctatggtttaagaatttgaatacatgtatttttatttggaaaaaaaaaaaaaaa

SEQ ID NO: 13221 - DNA, 1997 bp, Oryza sativa
  Clone ID: PAT_MRT4530_19275C.1
atggccaccgccgccgccgcgctcctccgcctctcccgctcccgccgcccgctcctccccctctcctccctccgcctcccgcctcccgccccgtaccaccaccactcccactcccaaaccccaccctcctcctcctcctcccacgcccgcctccccgccttcctctccttcctcgccgccgccgccgccgccggaggaacgaccgtcgccctctgcgactccggcatcgaccaccgggtcgggggcaaggagagcaccgagctggtggtgcgcggggagcggaagcgcgtgcccaacgagttcatcgacgagctcgcttccttcctcggggagaacctgacggtggactacgaggagaggcactaccatggcacgccgcagaacagcttccacaaggcagtcaatgtgcccgatgtcgtcgtcttcccgaggtcccaggatgaggtacagaagattgtgatggcttgtaacaagtacaaggtgccaattgtaccatatggtggggctacatcaattgagggtcacacgttggcacctcatggtggtgtttgcattaacatgtctttgatgaagtttgctttaaatcgttcacagaaaatcaaatccctgcatgttgaggatatggatgtagttgttgaaccaggagttggatggattgagctgaatgagtacctgaaaccatatggcctctttttccctcttgacccaggcaaggcctggggccactattggaggaatgtgtgctactcgctgttctggttcactagctgtgaggctgttctacctaatggtgatgttgtcaagacgggttctcgagcccgaaagagtgcagctggatacgatcttgctcgtttgatcattggaagtgaaggaactttaggggtaattacagaagtgactgtacgtcttcaaaagcttccatctcattccgtggttgcaatgtgcaattttcaaacaattaaggatgctgctgatgttgctattgcaacaatgctttctggtatacaggtctcaagagtggaattgttggatgaggttcagataagggcaattaacatggcaaatggtaaaaacttacctgaagtaccaaccttgatgttcgaattcatagggacagaagcctatgctcttgaacaaacactattggttcaaaagattgccacagaacaccatggatctgattttgtttttgtagaagagctggatgctaaagaggagttatggaagattaggaaggaagcactttgggccggttttgccatgaaacctgatcatgaggctatgataacggatgtttgtgttcctttgtctagacttgcagaatgcatatctgtctcaaaggaaaagcttgatgcatcaccattgacttgtttggttatcgctcatgctggtgatggaaacttccacacaataatcctatttgaccctagtcaagaagaccaacgacgtgaagcggagaggctaaaccatttcatggttcatactgctctctctatggaaggtacctgtacaggagagcatggtgtaggacctcctattgtcttgctcatggctgtcatcacccccattactgacttttattttttctatgcattttggcagtacctagagaaagagctgggcatcgagtcgctaaggacgatgaaaagaataaaggctgcgttggatcccaacaatatcatgaatccagggaaactgattccacctcaagtctgcatttgatgatacagacgttcccaagttgctggctgactcactggctggttcagtgacttccactcaactcccagtccagcaaggcaagtcgtggcgttaccactgaatgcgcattgaacggcgaagactcaggactgttatacacgagttgaatgcaaaaataaacgtgaacgctagaactgttactctgagccattcatataccgggaataaatgagcaaaacttcgttcccaaaaaaaaaaaaaaaaaaaaaaacctgcagcccgggggatccactagt

SEQ ID NO: 13222 - DNA, 507 bp, Oryza sativa
  unsure (1)..(507): unsure at all n locations
  Clone ID: PAT_MRT4530_19276C.1
catgccagatcaaaattacagggatttgataagaggnnnnnnnnnnnnnnnnnnnnnnnnnnnnnnnnnnnnnnnnnnnnnnnnnnnntggtttctgctaaaccaaatgatttttcagttactgaagagggttggcatttactttgtgagcactggagtacacctgaatttaggaagaaatctttatataggaagagaaacaggtttgctggaggtgatactgtataccaatgcggcgggtcgcgaggcttggttgccacgaagcagtccctacaacataaaaaaggtgggcaacaaggacttgctgctgcttggcagcacacacacagaatgcaacaaggaaataatgaacagctatgcaaccagagggcagaagaagcttggagtgattttgatcaagagggaggaaatcagattgatgatgatgaaggcaatgattttgatcttgaggaaggaaatgagattcctgaagaatagggcaatagaagatggaccacccttgtagtt

SEQ ID NO: 13223 - DNA, 489 bp, Oryza sativa
  Clone ID: PAT_MRT4530_19277C.1
atgccccagtggccccaccctgcgcagatcgttgccgcgccgccctccgccgtcatcgcctccctcacgcaccgcaccttcgtcgtcgtcgcatcgctcccgcgccgcccctctgtgattcctcccctccgcgcggccctctcccgctctccgcgtcacccctctccgctcgagcccatcccgccgccagttcatcgtcgcacgccgcatcactcggatcaatgtcgccgtcgcacgccttcatctgcacatcgcccagatcggcactcgccctcaccgcatacgctcgtcctcggacagatgggcaccaccgccgtcgccgtcgcgctcattcctccccgtccaacccgcgggcctcgccacagccaaccctgcccacgagatcctgccactaaacaatggttagaggttgctggtgaacttgcatgccattcttcagtgatgcggttgaagttacttggtccttctgttttggaatcagggaagtag

SEQ ID NO: 13224 - DNA, 264 bp, Oryza sativa
  Clone ID: PAT_MRT4530_19278C.1
gcttgggcgccggctttttcagaggctgttttgttcaactacctttggaccgaccttggcaccggggtggactacccctgcaagttcatagccaagcggaagctcatcaccaaggaggacctcgaggaccttcgccgcgagagccagatcatgcaccaccttgcgggccaccggtacgttgttgtcatcaagggcgcctaccaggacccgttactacctcacaatgtgatggagctttgcgccgcggccagcttattctacctg

SEQ ID NO: 13225 - DNA, 243 bp, Oryza sativa
  unsure (1)..(243): unsure at all n locations
  Clone ID: PAT_MRT4530_19279C.1
ggnatcgagggnnanatanttgtttccnccctncggtgaaccnatnaactgnnccggacaannanaggcttcttggtantaggtggnttgggatatcgnaatgntatnattntggtccgcaacttcaacgaccgccacttcggngngcncatgctatttgnttgtttgtttttgtactnntgntttaatatntncnccnnctnnaaaaaaaaaaaaaaaaaaaaaaaaaaaaagggggggggg

SEQ ID NO: 13226 - DNA, 446 bp, Oryza sativa
  Clone ID: PAT_MRT4530_1927C.1
atgaaggttccatctaaatatattattcttctatgttaaattaatatgcacaattgaaacatagaaattatgtttgtcagtgatatgggcccgggtatcaagtttagagggaggaggctgccctccaatgccacgtggccctcccccgaggagagtcaggcccgaggtcaccacgtacggtgggttaggtgtctgcctacaggtgcccacctacccgcatttatggcgacccgagcggttgcgccatgccgcatttaatgcagcatgcagtggacttaaccggtctgtgaccggtcgaatgaccgatgggactgggtagtgcgcctgtgcgctgttcgtgtgtcaggcggcccctagcaccgtgtagcctagcgccgccgtcatcgccgttcgtccaaccgtgcgccgccgccgctcccgtcgtcgtcgtcgctcgggaaggctgc

SEQ ID NO: 13227 - DNA, 411 bp, Oryza sativa
  Clone ID: PAT_MRT4530_19280C.1
acttggcgaaccccaccgaaatccccgattggtttattttccttgaaaattggccgggttccttaaattaaaaaaattttttacgtttattccccccttagcccccaaaccaaccagttttttatttaatcaaaaacacacggttttatttaacaattttttagcccacacacaaaccacttttttttggggggttttttttggggactatttaagggggggaactccccgggggcaagggttcggttgttttggaatttaatttgcccaatttgaaatcggggcaagaacaattggtgcccaatttgcacccgcctttttctttgcgggggggaaccttttaaaaggggtttttttgggtttaaactttgacgaccccttagctggtaccttttttaacccactggtttt

SEQ ID NO: 13228 - DNA, 202 bp, Oryza sativa
  Clone ID: PAT_MRT4530_19281C.1
cgaattattatgtgccaatttcacaaggaacatttgtttaatggccatgctaatcatgattatactttaaaggttaaacagacgacgatttctctccggatatcactgccacagtgccactggacgccaacttgtctccagctatttgaccaggttatctctgagctccacagtccaaaacatcggaaatgataagatatta

SEQ ID NO: 13229 - DNA, 282 bp, Oryza sativa
  Clone ID: PAT_MRT4530_19283C.1
atggccagcggcggcggcggcggcggcgggatggaggcggtggaggtgaggttccggctggacgacggctccgacatcgggccaagcatgcacgaccaggccaccaccgtcaccgcgctcaaggagttcgtcctcgctcggtggccgcagggtaaagaaatagctccaagaacagttaatgatgtgactatcatcaatgctggacaggtactagagaataacagaacccttgctgagtctcgaaacctagcagcagaatctccagaagggtgtctcaaatag

SEQ ID NO: 13230 - DNA, 3395 bp, Oryza sativa
  Clone ID: PAT_MRT4530_19284C.1
ttccgcgccgcttccccccaagaacttgcctgctgtctgtttgaatgggtattctactcttttggctccagcaaatgaagtgctgattccacaagaactttaatagagctgctctgaaccattctattctttatgtatggttttttttcccgtaatcatggatgtttaaaccatctttgtgtctggtttttgatgtatccacatggttcacttcaaaaaagaacttagcacaaacaaaaggagggagagttattcacagctcaggaatggaacacacacacaaactctgcatcctacaaaacaaaatcggcatttccatcaagtatggaaatagtggttcttggtttggttctttactttcccttttcgttttctttgtgtggtatgcaagctagaaggtgttattgtgtcagcacaccaatctgctgcagagctgacttcatgtcatctgtactgtaaccctcaatgccaatgatatttgagctgtccagggcgacgacatcttgtaacggatatctcctgacagtatggattctgttcgcggggatgttgaactcgcccttcaggatgacggtcctgtggagaccacctagcagttcttcataatccgaatcgccactttcaccaacaaggactgcaacatttggcagctctattccccagcgtatacacaagtaccttagtgcctgggaacgtgatgcgtgaatgggaactacagagagtctggtggcactgtggttatacaaggcattgcaacggagtgattggattctcatcaatttcctcaactcctttaaagggggtagatgatttggattgaccactctaaatgcaagacaataggttgaagagtgttcagggtcttcaaaaataatttgtctttcgattcttccctttctttctaccactgaagtagcccatttcactagatactttcttaggccttctcctccccatcgatactcaatatgtgcttggtgattttgatctattgcaggagtaacctgggaactgcttggcgtatctcccgaatacaaaggataatagatattacttccactattgcagatgaaagcatcaaaaacagtaggcaacatgcctgcagacactagcagcgagcgtatctctgatattgtaagtgaagttgacagcacaaaaccagttgaaccagacattttttctgtgcgtgtgacttcaatagtgtttctgattatccggactagatcttccttgttaacagagtctacagatataacaatgatatgcttccttcctgatatgggtgccttctgttcctgtttgccaccaatagcaggtgatctcggaccaagtgtcaatatccttgacaagtaattcttgcaatgttcaggccatgagaactggtgaatattttttagcccattctctctacatctcgaccaaagttgtttgtcagaaagaagcttatacagtgcatctgcaatggcattctgatcatgtggatcaacaaggagaccattgttcagcacctgattaatttctacaggagctccattttttgttgcaataataggcaaaccattcatagcagcctctattagggtaacaccaaattgttcaaaataagccacattcacaaaagcaccctttgtcctggcagctaaacgataaatgtctggaacttcagagtgcttatgatgcttgggataagccacttgaccatacaagtcatattcatcaatcaatgtaagcactgaggtcaagacagcagcactcatgttgttcatcttagaaatggcctcacggttacccattatcagtgtcagatttgctagctcccttagagggcgacattcaccaaatgcctttacaagtgatgtaatattcttttcaggatatggacgagcaacagccagaatcataggcttcctaggatttgtaaagaagcgcattatctgagaccaaatgggtgggtcctcagaggctggacatggattttcttcttcaccatccatttcaaaatcgtgaatgatatgaccaaattcaacaccaggaggtattataaccatacgaggcatataacggccatagcagttagcaccacgcttaactcttgcccgaagcttccttgcaagtataacctcaaaaccatcatacaagttccactgctcttctatctcctgtctagtgctagcaataacaatttcagatgcatcaagagataattcctctgcctcaattcggcacattattttgtatgtcatatttatttgttcccttgaatgtcgcccttgcttgagaagcccttccaatttgtccttaccaagaaaatggcctgtaaatgccataggaatattaagagacccagacaacagagcagcagctattcctgcactggcatagtgtccatgaatcacagcaggccatactggatgcccacagccaatttcttcaccaatggtttttgacatccgcacgatatggccaagtgcaccatcaacaaattcttgaatgaaaggccatagatgttctttagctaggtatttgtcttttggtccaaatggtatccgaatgatgtatgcaccactgttctcacccttttcctgtttagaatttttaaagcttgttgaaaccaacatttctgtaggttcaccataactacgatcgaaatttggtgccaagatttgtcttgtcagcaaatcaaccctgtaaactccaggagatgaactcaacgctttagcaagttcaaccacatatttgacctggccaccagtatctgaatctcgtcctagctccatgttctcaccacggaccagaccatgtaggcttatcagtactatgtatagcttgtcaattgaactcgtcttaggtgagctccctgtggtgctgtcaccatacgcaactgagggatcaccagcatcttctcccttttctccttcaaatagatcttcagacatatctgcattagtatcagttcgtaatttctcagcttctggttggcgtttcaacagacgacaggcttcttctttctcgaactgcatgtaagaacatattgtacttagcaatatgacaaaatttaaagcttctaagattgtagcacgaggcacgatgacataaacagtagcaagagatactctctccttcttcttcctcgcgaggttccagatcctccacgtcatgttctccagccgcgtgttcctctcctgcgggctccgcatcgcgttcgcgcggagccatgtcttgtagaggtcggtctcgtcgtacccggtgatgacctcctcgacgaagtagcgcgccggggagaagtggccgcgctcccggaggaggagcgaggggcggtcgccgccgattgccgccttgccggcgtcgaggatggcgtcgaggtaactgtttatccagttgtcgttgcccgccat

SEQ ID NO: 13231 - DNA, 474 bp, Oryza sativa
  Clone ID: PAT_MRT4530_19285C.1
aaaaataaacattcatactctactagaacagggggtttctattaatcgttagacacaaatatacagacagcacaactcatttacactgcatgtcaggtgaccagcacacatgtaacttcaacatgacgataataacatactaaaggcaagtgaaatgaatcattatcagaatatcaacactcacaatacaagcttcaagctctaacctactaatacagaccatcttcatgactgattctcatcaacagtgaccattaaagcggttgttcatgatattgcgcacgacgcctactgttctgcggagctcttacttgaacatagtatccttgccccataccttcaccagcattaagaatatcctcacgatcatctctaacatcctgggcaaggacatgaactgcctgtgcttatactacatgttgtttgtgagcatttataaactttccccaaggcttactactatgcctaccaacg

SEQ ID NO: 13232 - DNA, 154 bp, Oryza sativa
  Clone ID: PAT_MRT4530_19286C.1
gttgggaatggccttagaccacgcagatcgaacccccccaagtcattgaagaagattattcttgttacaagctaggtaggtaccgttttatccacaacaccaggccgtctggcacaatcagcttcgtcaaaatcttgtttctttgcagaatcca

SEQ ID NO: 13233 - DNA, 642 bp, Oryza sativa
  Clone ID: PAT_MRT4530_19287C.1
atgtggggcccacatgtcagaccttcttcctcctccctctctcccttttctctctttctctccccttcttccccttcgccgctgctccctaccaccggcgagctccagcccctcccccgctcgcggacggccggcgagcccctccccacgcgcggacggccggcgagttcctcccctgcgtgccgacggccggcgagttcctccgccgtgcgctatcgtcgtcaccgccgccacgacgcctcggcgcatctcccactacctcgcgcaccatccgagagcgacagtggaggcgctctccgccgccttccccgctgccgatcatgtcgacgccgtcctcctctcctcgccaagcactgccacttctcctccccggagctcgtcgccaggaacgcgctcaccttcttctactgggccgcctcctcgtcgccgtcgtcgtcgaccccccactccctccgcgcctactgcctcctcgtccagctcctctcccgcaccgccgccgccgccgcccgatgccgacgccgctcgctctcgctgtccccgcgcgccaccagccgaaggggaagaaggggaaagaaagagagagaagggagagagggaggaggaagaaggtgggcccacatttctttttgtgtgaatgactaa

SEQ ID NO: 13234 - DNA, 292 bp, Oryza sativa
  unsure (1)..(292): unsure at all n locations
  Clone ID: PAT_MRT4530_19288C.1
gtgggcttgggagctaacaatggtttcattcttttttttttatgtttccccctgttgtttttgctcatgttttgtgtaattttttcttctcatctagcgatgttatttttcttagcatgatgggagtagccctccttttttttttctctaattaagtgtaaagtngcaacagcatagggntgaatgttcagtgtagtgtgtggtgtttcagttattcagagacgtccatacagtttgtncctaaaaaaaaaaaaaaaaaaaaaaaaaaaaaaaaaaaaaaaaaaaaaaaaaa

SEQ ID NO: 13235 - DNA, 1785 bp, Oryza sativa
  Clone ID: PAT_MRT4530_19289C.1
atggcgtccgcgtcgccgcgccacgtcgcgtcgtgcctgtgcctcctcctcctcgtcaccgccgcggccgcgcagcggctgcccgtgaagagctacagctacggctcgttctaccgggacgacccgtcggtgagctcgctgctgttccgcggcgccgccggcgtcagcaacggcgcgctgcaggtcacgccggactcccgcaacctcaacaacttcctctccaacaagtccggctccgtcctgctgccggagccgttcaccctgtggcgccgcctcgacgccgccgccgccgcagccggcaatggcagtagtactagtacccgcgtggtgtcgttcaacaccacgttctccatgaacgtgtactacgacaacgagagccgccccggcgaggggctcgccttcgtcgtcgcgccgaccgccgacgggccgcctccgggaagccacggcggcttcctcggcctcaccaacgcgacgcttgaggccaccccggccacgaaccggttcgtggccgtcgagttcgacacgttcaaggagcccggcggctacgaccccgacgacaaccacgtcggcctcgacgtcggcaccgtcgcgtcgaacaagacggcgagcctcgccggcttcaacatcaccatcgcgacgaacaagacggcgccggcgaactacaccgcctggatcgagtacgacggcgcggcgcggcgcatcgccgtgtacatgggcgtgaggggcgccccgaggccggccaccccggtcctcgcctcgccattggacctcagcgagctcgtcccggagcgagcctacctcggcttcacggcgtccaccggcgtcagcttcgagctcaactgcatcctcgactggaacctcacgatcgagacgttcccggccgacaagaagagcaaagggtgggtcgtccccgtcgccgtcgccgtccccgtcgccgccatcgccgccgcggcctttgtcgtggcaaggatggcgcgcgcgaggagatccatggagcggaggaggcaggagcggctggagcacacgctgaccaacctccccgggatgcccaaggagttcgcgttcgagaagctgaggaaggcgaccaagaacttcgacgagcggctccggctggggaagggagggtacggcatggtgtacaagggcgtcctccccgccgccgccgtcgacgacgacgacggccggccgccggcggcgacggaggtggccgtgaagatgttcacccgggatgacgccaagtgcgtcgatgacttcctcaaggaggtccagatcatccaccggctgcgacaccgaaacatcgtgcctctcgtcggttggtgccacaagaaagggcagctgctgctggtgtacgagtacatgcccaacggcagcctggaccagcacattttccggcgaggcgccgtccacgagcagcggccggcgctgagctgggagagccgccgcgacatcgtcgccgacgtcgccgccggcctgcactacgtccaccacgagtacggccccatggtgctccaccgcgacatcaaggccagcaacgtcctcctcgacgcctccttccgcgcgaggctcggcgacttcggcctcgcccgcgtcctcgacctcgaccgcagctccttcaccgacctcggcgtcgccggcacgcgcggctacatcgcgccggagtactccgtcggccacaaggcgacgcgccagaccgacgtgttcgcgttcggcgtgctcgtgctcgaggtcgtcaccggccggcacgcgctgctcggcgacccggcgtgcccgatgctgtcggactgg

SEQ ID NO: 13236 - DNA, 267 bp, Oryza sativa
  Clone ID: PAT_MRT4530_1928C.1
atgctggccatagaagaatgcctaacgatcttcgacccccggcgagagctgtacgtgaagcaccacatcccaaataaggagaaactgggagatgaccggaacagtgaggacaccgcggatgtcagagacccaggagttattcgccagggcaaaagcaaccgtgcgcgaacctcgaagacgttggggaacggcgaagaggagatctggagccaaggatgccaccaagcggccatcgatccattaatgagaaataaaattatttggtga

SEQ ID NO: 13237 - DNA, 537 bp, Oryza sativa
  unsure (1)..(537): unsure at all n locations
  Clone ID: PAT_MRT4530_19290C.1
gctggcacgcgtgcggtgccggtacgctatacaggggtcgacctacgctttcggttttgttcgcggaggagctcatggtggacatggtggccatatcagtatctcagttgatccagcacaagatcaggttcaagcacactcactgtcagcgagaggtgctagacataccgctggacgcgtgccaacatgctctactgcgtgagctcaccgcgcgacataggctgcagctgatgttcctactgcctggcgctcttgagctgcagatgcagtgttgncagctgctgcatgatgtgagccgagagtgccgttgtgcaggaatccgtcggatggtgacgatcttccaggagagaatgctgatgcccgtggagcatggatgaccaccaccaccatccttgttctacgggcatgaggatgctcttctggaacatgcgcactatgccgaggatggctgggcagagggcttctacggtgagcagctgcagctgccggcgatgatccatgcgaaggtcaacagcgccaggcaggacgcacatcagc

SEQ ID NO: 13238 - DNA, 1518 bp, Oryza sativa
  Clone ID: PAT_MRT4530_19291C.1
atgcggggcggcacggtgcagatcaactggcacgagcagcagccggtcctcaccctcgacttccaccccgtctcccgccgcctcgccaccggcggcagcgaccacgacatcaagatctgggtgattgcgtcggatgattccgacaagaagctccccactgccacctaccacagcagcctctcctcccacagctccgcggtgaacgttctccgcttctcgccttccggcgaaaatcttgcgtctggtgctgatggtggtggtattatcatctggaagttgcattccactgatgacggcgaggcttggaaagtacaaaagacattattgttccatcacaaggatgttcttgacctgcaatggtcccaagatggcgcattccttgtttctgcttcagttgataacagttgcattgtatgggatgctattaaaggttcggtgcaacaaaagttggagggtcatttgcattatgttcaaggcgtggcatgggatcctctgggtcaatacattgcttcactgagctctgacagaacttgtagaatatatgcaaataagccccaaggcaagtcaaagaacacagataggatgaactttgtttgccagcatacactggtgaaggccgaacatcaaaatcatgatgagtccaagccaccagttagagctcatttgtttcatgacgaaacgttaccatctttctttcggagattggcatggtcgcctgatggatcttttctggtactgccagcaggtttatgcaaatattcatctgaagtgatcaatacagcttatgtaatgtcaaggagagacttgtcaaggcctgcgatacaactccctggcgcaagtaaagcaatagtggcagtgcgcttttgcccggttctcttcaagctgcgtggttcccaatcagattgtttcttcaagcttccttacagagttatttttgctgttgctactttgaactccctgtatgtttatgacactgaaagtgttgctcctattctaatacatgctggtctgcactatgctgcaattacggatattgcatggtcttctgatgccaagtacctggcagtgtcatcacgagattgcttctgcaccattattgagtttgagaatgaagagttggggctgccctataatctctctggaacaaaggaacttgatgaagggaataccaactgtgagaacatgaagccattaaaggtggacagtatggaaattgatgctggttccagcaaagctaagataaaagccagttctgcagccgttgaagtgacaccatcaccaccagtgctggcccagaacaatatattgatgacaaaggacgttgctgaaggaaatgcgacaagtgaaaatgacaggccttcagcggtggacaatatggaagttgatgttggtgaaaacaaagctaagatggaagtcactcctgtcgctgtacaagtgacagcgccgccagtgtcgaccaagaacagcgcatcaagtaagcctaccaagaagcgaattactcctattgcaatcaactaa

SEQ ID NO: 13239 - DNA, 1126 bp, Oryza sativa
  Clone ID: PAT_MRT4530_19292C.1
tcaccagtggtagaagagacaagggagcccgccactgtcgttgccgctgcctaccccgccggatctggcggagggggggctccgccgccgctgctgccttccctcccgccggatttggcagatgggaggtcgccgccgccgatgcctgtgagccacgccacttgctgctgccgcccctcccgccgccgccgagccgttgctgactcccctcccggccagatctggtggagcggaggcgccgctgcctcccctccagccggatctagcggaggggaaggcgttgccgccgcctcccccctggccgtcgggccaccacgggctcccctcaagatccctgctaccgcctcccttcctgccaccgccacctcccctcccggtcatcctcatcgtcagccccttcgccggccatgtcataccgatggctgagctgttgcagcgcctagtcgcacaccacggctgcaccgcctcgcttgtcacgttctccggcctcgcctcgccaacatcagtgtcctccgccgccgctatcgtggacctcgacgaagcgacgcatgattgccaacgacgcagtattagaggggatgaagcgagcggcggacgagctcgaagatcaggacgtcgcgccgtcgtggacctcaaatccttcttgacgaatgggcggcgggcggaacggtggagggcaagcgcggcggcggggtgcgagcggagcggcgacgggcgcccagaagttatttccctcccctccccgaagtccagcccacctcccctctcctcccgggcgccgacaggtggggcccacctgtcggtcgtccctaacctccggcagccgccaccatccgctgctgaaaccgccgcccacgccgccgcttcctccgcatccgcgccccactccgcgcccacacgtccccacgtcgccgccccacgccctctccacgtcgtcgccgcggaaccgccgctcccggccacgtccagcctccccacctctatataaccgaccaccgcgcctctctccacctttttccctctttcgccgtccgctcccgagctccctatcgcccccgccatcggcgcgcgccgcgtccgccatcccgaggtccacctcgtccgctgttctcccgtccaattccat

SEQ ID NO: 13240 - DNA, 3004 bp, Oryza sativa
  unsure (1)..(3004): unsure at all n locations
  Clone ID: PAT_MRT4530_19293C.1
gcacgaggcccccctttttttttttttttttttttttttttttttttcatggaataagaggacaacaataatcatattacagcaggtcaattcttgtttacagattacaatgtgaccttcaaatcaagcaattcccaagctgctttacatgaattacatgacctttttgcatccaaacaaataggacaggaaaacaatatcgcgctggcaatgttgtcagcctaatcccagtaaattccaaggctttacagctaacaaacactagttttttgttgcatctacatcttacaatgaacggaagcattctccttccactacaatccgattgcgagcagcttgtttgatctcttgtttatcagaaagcttacattgttatcatcaatgtccgtgatagcaactagtagaaatgatgttactcgctatggcattcagaaagaagagagttttgtccatcagtaaacatcttaacatgacagagctttcctccagtttcatcggcaaatgttatcttctttcgttttcttggaacttcagaatgagaaacagccttcttccctgctaatctcagtattttacaaaagcgattgcaatctttgttcattattgtcaaccatttccttgtagttctctccacctctaatgcatcctcagaggctgctctgatctcagcagtgttgaaagtaggtagcaaagaatgtgattctgataacaaatttccgtctactatacttctcatgtgattcaagcttctcataagtttggatgcaatgttttctatatcatgcatttgcctttgtgaaaactcaacagccttctcggcgtccaatataactgaagcagctttcatgcaagtacaagtagtcttttggggggatggggattctgttcccttcagaattcctttgcttgtaggggagagggaactcctgccattgggtctcctcgtcttgccacaatcttcaagaaggatctttctcttgagcctttggaccccgcacaaatcaataccagtcaaagcactgcaaagcttctcctgagaagtcggggacataatctttctcttggacagcagtttttttggagcatgctcttcaagagctccttcatcaatgaaaggttgtaacttttcactttgtccatcagtatcgagagaggctgcagttgaatccaaagacccagcaggcatttcctgtgtttcttcaggactcgagctctctgatgttacacaaactttgtccaagtcagaacaagattgtaataactgcggctgaaggccaaattgttctcttgatccttgatcactgttagttttacagatgtcatcatccactgtaacctttaactgatctgtatcctttgataaccactctgtaacacaaggaagtaagagctgaccaccatgtggagctttggatccagtgggttctctgtcagtgccctcacttacgaatgggcttgaaatgatggcagcacctgagacaccaacaggagtttcagtttcagtactcttcctctgtgcatgattattcagagcatcatatactatactttctagccgtccatcttgtgtggtaaaattggcagctttcactgagtcaagagtcttgttaaaagcaaaagtgcaatcgatagttgcatgtccaacatcaataggtaatacatcctttgttccaacactgtgctgaactagtgaatcaaattgaccatctgccttcatctgcacaacctctgcaagcgacgtgaagttgctttctgcacttccacataaatcagattggatgaccacggatggagaccccacctctgcgttacactgatcagtagaactttctatagtctttgtgctttccagtgtactgccatgtagatctcgtggataccagtattcatcaatgtctatatgatcttcacaagacatattaacagaacataccaaataatcattgacaactgaagacttgtcttcatctaaatttgttatattgcctgatgttttatggcagttgctcatttcatcagtgatatccaatgaagaaagactgtcatttgtcttgttttgcagtataatgtcatccaaacagtatgctttgatactgttagctagctcacaggaatcatcagaaacatcctttagttcaatcggttgagggatgacaccactgtgttgttgacatccatcatactctattggctccctatgcaactcagcaaatgagtcctgaaaggagtcctttcctggactagatactccaacttgctcatcagagtaaatatcctcatcctcagtcttgatttcgcaaaatatgtctgggcttctaccacttattacagcaccagttgataatggtgtgttttccatttcagcatataaaatgttctccccaactatttcttcagtattaccagcagcaattgtggagtgttttacatctgcagcactcctttccatcttctctgcagttgacatagagtcatgtgatgttacctcaagtgggggtaattttataggctcagtctcctctctcctcaatgttgtatcttgcagttttacagcatttagagatattggtttgcccattgttctgtttgatttggtaggggangtcttctgccgcttctgtctgaatgcaataatgggctcatcaagatcaacttcctcttttggtacttcatcttcaaggtttctctttccacattgtctctgattcttaaagtcaggtctttcagaatcaactttcaaggccctcctgttcttagctttacactgagctcttaaatccttcagagacacattctgaaagtcttcgtcaccaacagaatcatcattaaattctgggttggaaggagatgcaatttcttcaagatcgatgacctcagttttgacaggccccaaggtaggatagttcgtttcagaatgttcaccatatataacatggatattcttgagcctaggagatcgcctaggagaaatcaggttagtctttttgcaagcagcaccaggcat

SEQ ID NO: 13241 - DNA, 255 bp, Oryza sativa
  Clone ID: PAT_MRT4530_19294C.1
gatagtaaagaatcaggtagaatattttttttcttacagttcaccatcctaaactttaaagggcatgtgcagtgaaataagtttactagctttctgttccccggcttagcccttacatagttacattgttgattaagctaaaatggttggcagtaggctcaagctcagagctccaaacagtccaggtttttctcattgccatccccgatcatgagtgtgcatgaaacccttttgcaggtggtggtgtttgtgtgg

SEQ ID NO: 13242 - DNA, 659 bp, Oryza sativa
  unsure (1)..(659): unsure at all n locations
  Clone ID: PAT_MRT4530_19295C.1
cttcgaggggccggccgggnaaccccacactcacagccgcgcgccgcaggaaaaaggtggaaaaccaccgcccacgcgggacgcgccgccgccgccgctcgccgccgcaccctcacgcgcagaggaggagcccccccgccggagcacctccacctgtttactctgagtgacatgtccccctcgccgctgctcgcccggccgccggcgccgtcgagcccgagcacgtacccgtccctcccgcctcgccggtgcgccccggctgtagcttccgcggcgctccgcgtggctccagccaccgcctcccgagccccattctccaggctggtgaccaagcggaatttcgctgcgtctgatattagagaagactnctccactccgattgacgtcgttgccgatgtgaaaaccgaaaagattgtggtgttgggaggggagtggattcgttggctctgctatttgcaaagctgctgtctctaagggttttgaggttgtgagcctcagcaggtaggggagaccatcttactctgatccttgggttggatcaagttacttggctagcagggagatgttttctatgctagagnggatgaagtgttagttggtgccactgctggtgtggtttccccttgggggattcggtaatgaagaaccggagaaaagga

SEQ ID NO: 13243 - DNA, 315 bp, Oryza sativa
  Clone ID: PAT_MRT4530_19296C.1
atggagaatggacggctcagatttttcccgaagggtttagatgggccagagaaccctgtcgcgctgctgcagctctgcgtcgaccgcaggtgcctcatcttcccgttcctccacaccgactacgtcccgggctccctcggccacttcatcgccggcgccgcggactgctttgtcggtgtcggcgttggcgtggacaaggacaccgagcggctgagcgacgaccacggcctccccgtggggaacaccgccgaccttcgccccctcgcggcgcagaggctgggccgcccggagctcagacaggcctacctagattag

SEQ ID NO: 13244 - DNA, 663 bp, Oryza sativa
  Clone ID: PAT_MRT4530_19297C.1
ccttcccaggagaaccccaaaattagcgataccagctaaagaccaaaggtggccctcagagaggatggactcaaggacctccgagaccgatgacaatgcagagtcgaaaactctggagttccgctctttccacagttgccaagagactaggaagaccatagaatcgaaactggcccggagatgccccggcaagcaaaccctagaagaaggccaccaatcttggagacagctacccccgggaggagagagggcagtccaaccaagaggcgacagcacacggagccaaacttaccgagcgaacacggaatcgaggagaatgtggttcgctgtctcaagcgaacacgcaatgaggatttggtggatagtagcgatgggacaaggatcaggcatacattctcacaccactggagatggattaatcggtacggttaccttgcaagctacgctgactccaactacagctcatccccttcttccctctcacaactttccctcacttgtgacaatggggagataaaggtccagcggcagttgatgatggaagatattcctgtagtgcagaactgctacctcatctctagcggtgcactcagggattcatctgctacaccttcactcagtgtggatgcacgcttcgtggatgcgtgggcctgttcactttga

SEQ ID NO: 13245 - DNA, 573 bp, Oryza sativa
  Clone ID: PAT_MRT4530_19298C.1
atggcagcatcagccagagctctcctcgtcgtggccgtggcggcggcggcggcggtgctcgcgacgacggcgatgggcgccaccacctacacggtgggagcaccggccgggtcgtgggacacgcgcaccaactacgcgcagtgggcgtccgccgccaccttccgcgccggtgaccggctcgtgttcaggtactcgccggcggcgcacgacgtcgtggaggtgaccaaggccggctacgacgcctgctcggcggcgagccccatcgccaccttcaactccggcgatgacaccgtcccgctcgccgccgttggcacgcggtacttcatctgcggcttccctggacattgcgccgccgggatgaagctcgccgtcaaggtcgaggccgccgccgccgcccctggcggtagtagcaccacgccgtcgccgtcgccgtcgccggcggcgttgccgccggtgaacggtggccggccggtgacgccatcgagctcggcgagcaagtcgggtggtgttgttgagtctcttgttggtctgggcgttggcgccatggccgctggtctcatggtcttttattag

SEQ ID NO: 13246 - DNA, 162 bp, Oryza sativa
  Clone ID: PAT_MRT4530_19299C.1
atggtggtagaattgggccaattgaacccagcaaagcttccagttgtggagaggggaaactacgatggtagagtggaaggttgcgaagaagatgattgcctagtggagcgtttgctcgtggctcatctggactacatctacacgcagggcaaacacaattag

SEQ ID NO: 13247 - DNA, 712 bp, Oryza sativa
  Clone ID: PAT_MRT4530_1929C.1
ctcaccgaaccaaaaagtgatgcggagagagagatgacgacggtgacccggcggcaacacatggagacgacgacgacacaagggccaaattagattttggattaagaccctatggataaactacaccgatgaacgacatcggagagaggaaagctcaccgagggacgtccggcaacgaggtagaggcggcgatggggtcgggtcagcaatggagacgacgtttcagtgatcttcggcgaagaaaacccggtggccgggcttcaccttgctcctgcgaacccaatggagacgacggcgaccgaaggcgacgacgggatgagcacctcgcgaacccaacggcggcagcggcggcgctccggttcacgacgacgggcaacctccggtgggatttggcgcaaaataaccagcgatcgggatagagctcgactttgcggtgccgagggaggtggcggcgctgaccggcgacggcggaagacgggacttgaggggataggtagaggacgactagggggtcctttatataggcacgggagctcgggtccgggcccaaatcaacgagaaactttgggaaagagaggtggccggactttggaaggggatcggcggcaataggacacgggcacggctggctcggctctgcctgagctggaagatgaacagtggcgcagggattgggcttcagaaggacaccattgagtcttcctgtcttcat

SEQ ID NO: 13248 - DNA, 380 bp, Oryza sativa
  Clone ID: PAT_MRT4530_192C.1
aaaaaaaaaattttgggggggggctcaattaaccaagggttgttgtccccctcattttttttaaaggtttttccccccaaaaaaattcccggtttagcaccccttttaaaaacctaaaaaaccaggggggggaaaaatgccaacttccttttccctgaacaaaaaaggggggaaacttgattgggaaaaaacttccattttatcttccttagaaacatcctgtttttcacccttaagggtttgggcccccccctttttttttttttttcccccaccatttcccccaccccccccttgttgaatggcccctccaatttttaaaactgccttgtttgaaacctaaaacttttttttgattttttccaaaaattcctgaacct

SEQ ID NO: 13249 - DNA, 1614 bp, Oryza sativa
  Clone ID: PAT_MRT4530_19300C.1
atggccccggcggccgcgggacgggtacccttgtctcgccggcgctccaccgccgcgctgctcctggtggccctcgcgctcgtcctcggggtgcagctccgctccgccgcggcgaggcccgacaaggagatgcgggagaagttctacgggaaactggtcaccaacggctcgggcaacgccaccggggacggcagcatcgccgagatgttcggccgcgtgctcgacaaggagttctccgatagcgacacccccgaggcaccagacaagagtagcttcaacaacagcatctcagatcatcaagctgttctggagactgtagctgtcattacacatgataaaaagaagaatgattcagagcaggcaaattcttcaaaaccttttcaaataggtgacatgtttggaggtcagaatgaaaattctgatgacttggaaactgtaatagataaggaggataatgtttttgttatgtcaaatcgtaaaacaaagtatccgacacttcaactagatttaagattgattaaagatctagtagttataattgtttcagctactgctggtggtatcatattctcttgtttggggcagccggttattgttggctatctactggccggttctctcgttggacctggaggcttgaactttatcagcgaaatggttcaggtggagacttttgcgcaattcggtgtggtgtttcttctattcgctcttggccttgagttttcactgacaaagttgaaagcggttggacctgtcgctgtaattggtggtctactgcagattgttctgttcatgttcttgtgtggcctaactgctgcgttgtgtggtgctaaatcatcggagggagtatttgttggtgctttcttgtcaatgtcatctactgcagtggtttctaagtttctagtggagaaaggtagcaccaatgcgcttcatggtcaagttacaattggtacacttattcttcaggctgcttgtattatccgtatttataactgttgcatatatgatgacttggtcatttgttcctcgattcttgaaactgatgattcagctatcatcgcagttcgttctcagtaccatacaaatgaactctatcagttggcttctgttgctttctgcttgctgctagcctggtgtagtgattatcttggattgagtcttgaactaggctcatttcttgctggcgttatgatctcaaccacagattttgctcatcatactttggagcaggtggagccaattcgtaacttatttgcagcactcttccttgcaagcatcggcatgctcatacatgtcaagttcttgtggaatcatgttgacatattgcttgcagctgttatactggttataatagttaagagcgtagtcgtaacagttgtggtgaaagcatttggatacagcatcagaacagcttttgttggaaaaatgtatctattattactgggaacaactgcacttagcttggttacaactcctctcattttcaaactaattcctgtggtaatgcaccttggtattcttatgcgctggttcccctcggaaagcagtatgcagaatgagctacctttacaggataaagcaaccatgcttgaagcctacaacagatcactctaa

SEQ ID NO: 13250 - DNA, 1373 bp, Oryza sativa
  Clone ID: PAT_MRT4530_19301C.1
ctgcaatggcagcgctcgcctccctcctcctactccgccgccgcggcgggagccacgccgccgacgctctcctccgcgcgctcactaccgccgctggagagcagccactcacggcgtcggcggccaagacccgcctccgccgggagcacgaccccgaccgcgtcgtctccctcttcgaggccatcgacgacgcctccctctcggcctcctccacccgccacgcgctctccctcgccgcacgcaggctctcccgctcccgccgcttcgccgacgccgaggccctcctctcctcccacatcccggcctcccccaccgagccgcagctcgccgctgtcctctgctcctacgccgccgcgtccctccccgagaaggctctcgccgccttccgctccgccgcgccgtccctcccgtccccgatctccccgctccccttcaacgccgtcctctccgtgttcctccggtgccgccgccaccgccgcgtcccggtcctcttcgacgagctctccaaggagttctccatcacacctgacgcctcctcctacggcatcctggtcaaggcatactgcatgctgagcaaagacgccaaggcacacgaggtgttagatcaaatgcgtgggcagggtttcacgccgaccaatagtatctacaccacaatgatcgattccatgtataagcagaagaagatggagcaggcagagcgcttgtggaagcagatgttggagagcggacgcaagcctgaccaagctgtatataatacaaagatcatgcaccatagccttcacggcaagacggaagatgtgcttgaggtgatagcagaaatggaggaagctggagtgaagccggataccatcacttacaatttcctcatgactagctactgcaagcatggtaagatggagactgccaaggagctgtacagatcactaggcgagaaggggtgctcagcaaacgctgccacgtacaagcatatgatggcacagctgtgtgcccatggagatttggacggtgcattggtgatcttcaaggaaagctataggagcaacaaggtgccagattttaggacaatgagtggattggttgagggattgacaaaggctggcagggtggctgaggcaaagaatattgttgccaagatgaagaagaagttcccagagcaattgctgtcagggtggatgaaactcgagaaggagcttgggttgaactcagatagcggagatgcaggtactcgggcagaatgtatatctgaagaaactccttctgaggccgaggctgctatgccaaagacacttgagctggaagatccttcttctgatgaaacagaatgtatggcagaggcgtccactagtgaggaaatgccacgggattctgcttaa

SEQ ID NO: 13251 - DNA, 478 bp, Oryza sativa
  unsure (1)..(478): unsure at all n locations
  Clone ID: PAT_MRT4530_19302C.1
cacttgttttgtctatgtggagacactcgtgaccnccatcgatttgtcatttctcccactgtggtcacttagtctgatcttggaagatatttggataaagtgaccgttccctttgctagaacacatcccttctcagtgaaacttatttgaatgccaaccacttctcaatgtctgtctcaagacaatccattcggttgtaactcgaagattatctgatctgaattgtttccccttgtacacggaaaagaaaaggaaaagtagattgggggaaagaaaaccaatggtctggaacctttcttattattgagacttggaagggcccatgtgtccctttagcaagcttttttgcaatgcatatctatcgttctgttttttttttcttttaactccagttttaataggatctcttcttgtgttaatatttaccttttggcncgataaagcttatatcttaccagaaaaaaaaaaaaaaaaaaaa

SEQ ID NO: 13252 - DNA, 459 bp, Oryza sativa
  unsure (1)..(459): unsure at all n locations
  Clone ID: PAT_MRT4530_19303C.1
ccctcccgtcccgcgctgagccccacgcctccaacgccaaggaggagggcttnccgaaagtccttgcaggcgagccctccccgcgtgtgagccgcagccgccgagcttgtggagctccatctcgctcgctactgccgccatccacctgagggtgagaaagagagggtaaagaggaaggagacacgtgggcctaaaatttatttttgttgttttactccactgacatgtgggtcccatttaaggcttggtgccacgtggatgaagaccaagtcaacctgccacgtgggataaaaccgctcgaggagtcgatttgcaatggttttgtaagttggggatgggttatacctggttttgcaatcgagggatgtgattcaaccagggacatgagctgagggaagcaaaatagacttattcattgatattacacaacgaaaaaaaaaaaaaaaaaaaaaaaaaaaa

SEQ ID NO: 13253 - DNA, 581 bp, Oryza sativa
  unsure (1)..(581): unsure at all n locations
  Clone ID: PAT_MRT4530_19304C.1
cggacgcgtgggccgcacctgacccacacgacccatcgacaaacaacgctcccaagttcccaagcgccgcagcccgcagccgatccgctccacactagccgttgcctttgcccggcttttccccccctttcctctttcctctccccccatccgccgccgccgccgccgccgcacgggaggcaagaggaggagttaagaaggtgaggcggatcaggagatggcgtcgaggacggcgtccaaggacatcatcacgctgcggggctccgccgccatcgtcagcgagttcttcggctacgccgcgaacagcatcctgtacaaccgcggggtgtacccggaggagagcttcaccaaggtgaagaagtacggcctcacgatgctgctgacgcaggacgaaggggtgaagaccttcatcgccaacctcaacacccagctctcagagtggctggaggccgggaagctgcagaggatcgtgctggtgatcatgagcaaggccacctccgaggtgctggagcggtggaacttcagcatccagaccgacccggnaggtgggtcgacagggtgtcatcaaggagaagagcgac

SEQ ID NO: 13254 - DNA, 399 bp, Oryza sativa
  Clone ID: PAT_MRT4530_19305C.1
ctacgccacgcctccgcgacgccacgccggccgtcgccactgcgccactccgccgccaccgcctcgaggtcgccacgccgccgctacgccactcggccgccaccgcctcgagctcgccacgccgccgctacgccacgccgcggccgccgcgcgccgccaccgcgcccgcacgccgctgggccccccgacgccgccgccgcgcccgcacgccgctggccccgacgccgccgccgcgcccccacgccgccgggcccccacgctgccgccgccggcgcgcccgcacgccgccgggccggcccacggcgccccgacgccgccgccactgcacgccaattttcctggtaatgttgcagagaagacgtcggcgtcgcccctcaagccgaagtggtagctagccat

SEQ ID NO: 13255 - DNA, 1318 bp, Oryza sativa
  Clone ID: PAT_MRT4530_19306C.1
ttttttttttttttttttgaaaaaatcgtggcacacgatcacgatgcattcaactccagtggtactttcaacccaggatttcaaaggctgaggaaaaaaaaatcatggtgaagcagcgatacacagtcgattctcccaaaatgcggtaaagaacaagaaaagggattctcccagagcacacgagttccgatagggctagggcgtgaatgaacgaacgattcacacaagcatcacgcctagcaagctaagctagctaaataagctagcagcaataaactagcaagggggtctcctcctcatggctccaacctccaccggcggcttctactcctcgtcccactcgtcgaccttgtaggagacgagcgtgtccaccttgtgaatcttggtgtcgaaggaatgcagcttcaccatctgtggattctcgatgagcttggcgtcgctctccacccaggtgaagggcaccgcgacgtccatgtcggtgtacgccagcacgtcgaatatgcatggctcgtcgaggcaggggaggtaggtgatgcaggaggcgacctggcgcatgatggcctggatctccctcatgatctccttgtcgctcttctccttgatgacacccttgtcgaccacctccgggtcggtctggatgctgaagttccaccgctccagcacctcggaggtggccttgctcatgatcaccagcacgatcctctgcagcttcccggcctccagccactctgagagctgggtgttgaggttggcgatgaaggtcttcaccccttcgtcctgcgtcagcagcatcgtgaggccgtacttcttcaccttggtgaagctctcctccgggtacaccccgcggttgtacaggatgctgcgccacgcacaaaccaagaacacaaaacaccccggatcagaaattaaccctgaatcgaagaactcgctgacgatggcggcggagccccgcagcgtgatgatgtccttggacgccgtcctcgacgccatggcacccgcaaccgcgcgaagcgcgcacctgttcgcggcgtagccgaagaactcgctgacgatggcggcggagccccgcagcgtgatgacgtccttggacgccgtcctcgacgccatctcctgatccgcctcaccttcttaactcctcctcttgcctcccgtgcggcggcggcggcggcggatggggggaaagggggggaaaagccgggcaaaggcaacggctagtgtggagcggatcggctcgcgggctgcggcgcttgggaacttgggagcgttgtttgtcgatgggtcgtgttgggtccgcccgccggcccggggatccactagt

SEQ ID NO: 13256 - DNA, 203 bp, Oryza sativa
  Clone ID: PAT_MRT4530_19307C.1
ttcttgccccgcgccgtgctaatggacctcgagccgaggaccatggacagcgcccgcaccggaccatatggccagatctttctccccaacaacattcgtcttcgatcagcccgtcaccgtcaacaactgaaccaaggaggactacaccaagggtagcggaatctcatcgactctgtgatctgtgtcctcaggacggagggtga

SEQ ID NO: 13257 - DNA, 3930 bp, Oryza sativa
  Clone ID: PAT_MRT4530_19308C.1
atggggtgttgcttaaatgatattactaaagctgataaaatttttgacttgctacttcgggagaagcaaatacaacttcctgctggccacataatcccatcggctgaggaactagggaaaagaaagtattgtaagtggcacaattctggttcccactccaccaatgactgcaaagtctttagacagcagatccaaacaaccattgagggaggaaagatcaaatttgatgattctaagaagccgatgaaggcgaaatactacgagcaagatgatgatggtttcgatcctcattggggttgtgagttcttcagattttgctggaatgaggggatgagactaccatcgattgaagattgccctggatgtagcgatagtgcagggagttcaagccgatcttacaacagaagcaatcggctgagtcaaaaaagaattcatgttcatcaaaggttgggcccggtcaatcaagatcgtcatcaagatgaggacgagggcaggaagacacaatggtgcccttctggtattttcacaaagaatcaaaagagaagggttcagcggatgaggaacagggagcgttttcaggaggtggaacaggaaatcaaccatcggctgaaaaggacaaagcctaggcaagagtggcgtgtcaagagcaaggttgcaacaaccgatgaggttaaagccgacaaggcaaagaggttggccaaaggaaagagtgttgcatctgcatcggtaaatatggtgtttttcttacctgcggagtacgaagccaagcaagccgatgttgatgaagttgaggacgcctctgctacattgattttgtcgccagagcaagctattttttataagccagaggagacagaaaatcggcatctcaagccgttgtatgttaacggttatgtcaatgtgaagccgatgtccaagatgatggtcgatggtggggctgctatgaatttgatgccatatgctacattcgggaagttgggcagaatttcagatgatctcatcaagacaaacatgtttctcaaagactttggtggcaatccatcggagaccaaaggagttttgaatgtggagctgacagtcggcagcaagactatccctacaacattttttttcatcgatgggaagggttcctatagcctgttgcttggaaggaattggattcatactaattgttgtattccttcgaccatgcatcagtgcgtgattcaatggcaaggtgacaagattgagatcgtgctagccgacagccaattgaagatggagaccccaaattattattttaagggcgtcgtgcagggttcaaatttctacaccaaggacacggtggatgatctcgatggcaaactgggacagggtttcatgtcggctgatggtttagaagatattgacataggcccaggagataggccaaggccgacatttatcaacaagaatttattggcagagttcagaaccaagttgatagagcttttgaaagagtatagagattgctttgctttggagtattacgagatgctaggactcagccgatcgattgttgaacatcggcttcctatcaaaccagggtacaaaccttatcaacaacctccaaggagatgcaacgccgatatgtatgatgctatcaaggccgaagtaactcgattgtatgatgttggctttatcaggcagtgccgatacactgagtgggtttcaaacatagtcccggtcatcaagaagaacggcaagcttagggcgttcatagattttcgagatttaaacaaggctacccctaaggacgagtacccaatgtcgattgctgatcaattggttgatgctactttggggcacaagattatcagttttatggatggcaatgcaggttataatcaattttttatggcagaagaagacattcacaagactgctttcagatgtcctggtgcaaccggtttgtttgagtgggttgtgatgactttcggcttgaagagcgctggggcaacatatcaaagggccatgaattatatattccatgatctgatcggtttgttggttgaagtctacattgacggtgtggttgttaaatcaaaaaaggtggaggactacatagccgatttgaagaaggtttttgagaggacgaggaagtatggcctgaagatgaatcccactaagtgtgctttcggcgtatcggctgggcagtttttgggctttcttgttcatgagaggggaattgaggtaactcagaagagtgttaatgcaatcaagaaaattctacctccagaagaaaagaaacagttgcaaaagttgatcggcaagaagggaataccattcaagttgtacttatcggttggtgagaagtcgatcggctcagttttgatccaagaacttgaaggcaaggaaagggttattttctatttgagtcgcaggcttttggatgcagaaacaagatatgaattacccaaggcaatcaaagggcaggctatagccgattttattgtggaacatcatgatgattcaatcggctcagttgatattgtgccttggactttatttttcgacggatcggtctgcactcatggatgtggtatcagcttggtaataattttccctcggggggcaagttttgagtttgcctatactatcaaaccttatgcaattaacaatcaagctgaatatgaagcggttctcaaaggtttgcagttgctcaagaaggttgaagccaatgctgttgaaattatgggtaattcgttgttggtgatcagtcagttggcaggagaatatgaatgcaaaaatgatacattgatgttctacaatgagaagtgccgagaattgatgaatagttttcggctggtaactctaaagcatgtatctcgggagcaaaatgttgaagctaatgatttggctcaaggggcatcaggatacaagtcgatgataaaggacgttgaggtggagatagctatgatcacagccgatgattggagatatgatgtttttaaatatctgcagaatccatctcaatcggcttcacaaaagttgcgttacaaagctttgaagtacaccttattggatgatgagttgtattatcgcacaaaagatggggtgttgcttaaatgtttgagtgccgatcaagctaaagttgtaatgggcgaagttcatgaaggtatttgtggtactcatcaatcggctcacaagatgaagtggttgcttcgacacgcagggtatttttggccgacaatgttagaggattgcttcagatattataagggatgtcaagattgtcagaagtttggagcaattcagagggcaccagcatcggctatgaatcctattattaagccatggcgattcagaggatggggtatggatatgatcggtcagattaatcctccttcaagtaaggggcataaattcatattagttgcgaccgattatttcaccaaatgggtagaggctattcctttgaagaaagttgattcgggggatgctatacaatttgttaaggagcatactatctaccgatttgggattcctcagactataacaacagatcaggggtcaatctttgtgtccgatgagtttgttcagtttgccgatagcttggatatcaagttattgaattcttcgccatattatgcacaagccagtgggcaagccgaggcatctaacaagagtttgattaaattgatcaaaaggatcaaatcaactggcacgctcacgaacctaaaagcaagattttggacctgcactgaagttaggcagatcttccaggctagtaaggcgggtgccaagaccgacacggcctacagccttggcgtcaccatccacaagctcctcaccggcaagcatcccgccgaaagcgaaatgacaatggtatggatcgacctgcagcagtgggttacgtccaatgtcaaggaggagtggaccaacggtgttcgccctagccatcgctggtga

SEQ ID NO: 13258 - DNA, 1121 bp, Oryza sativa
  Clone ID: PAT_MRT4530_19309C.1
atggcgtcgccggggagcagcgggcggtgctcgaggaccccggggttcccggcggggccgctcggcggcggagggcgcgcggtgccggcggtggggctcggaacggcgtcgctccggtccgtgggggaggagagcttcaggggcgccctgctcgccgcgctggaggtcgggtaccgccacatcgacaccgcatcggtgtacggctccgagcgggtcgtcggcgaggccgtggccggggcggcgcggcgcggggtcatcgcgtgccgcgaggaggtgttcgtgaccaccaaggtgtggtgcacgcagtgccacccggacctcgtgctcccctccctcagggagagcttgcagaaccttcaaatggaatatgttgatatgtacttggtccactggccaatgagcgtgaagcccactaaacctcactacccaatgaaaagagaggatatcatgccaatggatttgagaggcgtatggcaagcaatggaggaatgtcaccagcttggccttgcaaaaatgattggtgttagcaatttcactacaaaaaaattgcaagaactacttgccttcgcaaaaattccaccagcagtgaatcaggttgagttaaatccagtctggcagcagaagaaactgatggagttctgcaaagcgaaaggcattcatgtgactgcttactttcccctgggaggccggcatagtacatccacagtcaatccagtcctggattcagatgttctgaaagagattgccgcagccaaggggaagtcagtggctcagatctcacttaggtggatctacgagcaaggagcaagcatggtgaccacgagtacgaaaagggagaggcttaaggagaacatcgatatcttcgattggcaattgagcgatgaagatcggctcaagataagtcagattccacagcacaagacggtcagcgtgctgtcgatcctctgccccgatggtgtctccagcgttgagttgtcggaggttgacgttgttgaagtgtagcggtcgttttcgcgttcctgttcacagtaaactgaacatttagggcatgtttagttcccaaaaagtttttctcaaaaaaatcacatcgaatccttgtagaaaaaaaaaaaaaaaaaaaa

SEQ ID NO: 13259 - DNA, 135 bp, Oryza sativa
  Clone ID: PAT_MRT4530_1930C.1
atggcagaagatcctccttttctcatagaggttgaccaaaatggatcaatcaaagctaggcatcaaaagctactcgatgttctcgatccaaaatcaagaaccatccaacgtatcactgtgaaattaatgaagtaa

SEQ ID NO: 13260 - DNA, 321 bp, Oryza sativa
  Clone ID: PAT_MRT4530_19310C.1
agagcagagagagcctaatctcccgctcagaacgcctcatcactgcagcaatgccatcatcagccatggccgtcgacaccactgctcctgagcattggctcgactggaggttcatgctctgcgcggtctggccgtctgagtctactcctgcatggtcctggcatgcttcttgatctggaagtacgaggggccgagctcgcaggacggcaatggcgatggcggcggggacagtgaggatgcacggccgccccgggccgcatccggggtcgtctctctccaatctctcttcggccggtgcacaggacaacaaaaaccgccatc

SEQ ID NO: 13261 - DNA, 274 bp, Oryza sativa
  unsure (1)..(274): unsure at all n locations
  Clone ID: PAT_MRT4530_19311C.1
gggctacatactgctaatagtgtttaccttcttgtttttgctgcaggctgcaaccacagctgatattctttgtttcttctgaatgaaaacacatatgcattgattgcttaacatccaatcctccatctgtagttttgtcagatcatgcactgtataccctctattttatttacctatggggtgtgtttgattaagtccatgcgggtgaacggaccccctnattnagggagctgaatgaaatccttctaggacaggancaatntaaagaaagcaa

SEQ ID NO: 13262 - DNA, 247 bp, Oryza sativa
  Clone ID: PAT_MRT4530_19312C.1
ggagggaataattgcgacattacatatgcaattgggctcaaagcaaagatcattagagaaagacccatgcctcacttttctttttctgctttttcaaaagatcacacacacattccttggctctttttttttctctgcctaattcttgggcatgggtaaaccgggtcagatcattagacacacttttatcaaaagggtgcatgcataatttcctacagtgcagcccacgcgttcgcggacccctggg

SEQ ID NO: 13263 - DNA, 530 bp, Oryza sativa
  Clone ID: PAT_MRT4530_19313C.1
catggatccgtgtaggcagtacatgatgcaaacgtcgggcatgggtagctccacagccatgttcatgtcgcagccaatggcgctcctgcagcagcaatgttgcatgcagctacaaggcatgatgcctcagtgccactgtggcaccagttgccagatgatgcagagcatgcaacaaggtatgtgtgctggactcgggcatcagcatatgatgaacacggcgatgcaaatgccatacatgcgcatcatggcccctgtcaacttacaactctctttctgtaggttgttgttgatcaaaccttggttacatgtactctagtaataaggcgttgcatactatcgtgtgcaaacactaaaaaataagaaccattgaataaaatatcaatcagctcacagacttgctgtgagcattgaaggtgacaagctaccacatgagtggctgcaggaattctatatcaagcttatagataccgtcgaccttaaagaggtgcccggttacccaattctccctatagtaagtctgattactcgcg

SEQ ID NO: 13264 - DNA, 873 bp, Oryza sativa
  Clone ID: PAT_MRT4530_19314C.1
atgggagagaaggagcggagaatgcgcgtggagggatggatggggcgcacggagatgatcgatcggcggtggcaacggctgcactcgggagagagggagcgcaaattgtgcgtgaggaaatggatgggaagcagcgatttcgatcgaggggcgcgatttgggggcgtggatgacgggagattgggagaggggacgaagcggtgtgaggagatggtgggagcgatttgggacgttggattcgagcgagacaatcctgaccgatcaatgaggaatgagcatgtgaacgacggcaggagctctgccggaatttcattagaggagagaaaaacagttcagagaatacaggggaagacattgaaggagaagggagtaaacctgaaacaaacaaaacggaatccgaaaaagaaaaggcaattaggggggttggaaagcagtgtgtctgagatcaagttcctcctttactattctcgcaacgcgatcctctgtgtaagagatgttttgaaaaattcttctgtttctttccaaccaaacgttccaccaagtggcgagaagagatcctttaaccctgaatttgaaaggttgtgcccccggtatgttttgccattggcacaccataagccaaacttttctgaagaaggggcagacattgaagagatgccacttatcatgccaaaaatttattttttctccattgccgacatttatcgtagtggcagcctgaaagagtcttttgtcgcagtcatcgcaaggaagagggcttttatgtaccttgcatccgaacttgaggaagacgccgagaggagggaggatgatggcgatgaggatgtcgatgcagttggccgtgccgtccgacatgtcttgcagcagctatag

SEQ ID NO: 13265 - DNA, 902 bp, Oryza sativa
  Clone ID: PAT_MRT4530_19315C.1
atggaccgctctcgccacaagaactcgcctagttccgagcgcttcctcggctccttcctcccctccgcggccgccggcgaccagcccggatcggcggccttcgagctcgacgaggacgacctgttcgcctctggggctggatcccccgagcggccgcagccgtctcgccgccctctcatcctctccgcagtccgcgccgcaaaccctagccccctcccccgcctccgccgcccgccggagggcatcctcgatgctctccccgagcgccgctcccctttctcaccgcctccatcgtcttcgtcgaactcgtcgaccaccgcctccccagcggcggcggcggctgctcctccacgcctgatccccaccatcccccgcccggcggcggctctggcaccacatatcccgcagtctgcgccggtgaatgtgccggtagcgcagtttaggcggttatcggtggaggcactgatggataaagctgaggatgacgacgacgacgacgaggagatgctgccgccgcacgagatggtggcgcgagcgcgggcgcgggattcaccgatgaccaccttctcggtgctggagggcgccggccgcacgctcaaggggagggacctccgccaggtacgcaatgccgtgtggcggaagacaggattcctcgattgatccgtgccttctgcattcagctgtagcttaagttagatttgagtgattggttatgcactatgcatgtttgaatttgtctgtgtacaacatggatgatcgggtgttaaattttggttgcacctgtaaaatatgtctgtcatattatcaatcattattacttgtaaacccttgattggagctgtcaattgttcagcattgaactattggataaggtgaattgtgacctcaaaaaaaaaaaaaaa

SEQ ID NO: 13266 - DNA, 353 bp, Oryza sativa
  Clone ID: PAT_MRT4530_19316C.1
agcccatggcgctcctgcagcagccatgttgcatgcagctaccaggcctgatgcctcagtgcccctgtggcccccgttgcccagatgatcccgagcatgccaaccagttatttgtgctggactcgggccgccgccagatgatgaagatggcgatcgccagatgccatacatgtgccacctggcccctgtcaacttcccactctcttcctgtggttgttgttgatccaaccttggttacatgtactctagtaataaggtgttgcatactatcgtgtcccaaccctagaaataagaacccttgaataaaatatccatccttttcagacttcccaaaaaaaaaaaaccaaataaaa

SEQ ID NO: 13267 - DNA, 1435 bp, Oryza sativa
  Clone ID: PAT_MRT4530_19317C.1
tctcgctatggagcccctgcacaaactctttcaagttgcggaagaggcctccctgctcactccaattggagggcgttttagcaggtttcgatgctctctatacgctgatgacgtcgctttgtttgtcaagcccgaccctattgagattgatgcagttaaaagggttcttaatttatttgcccaagctttaggcctccacacaaacctgaacaagactgaaatctatcctatccgttgcgacaccaccgacttgacacatgtcattactcctttccctggaactttgaaatccttcccctgccgctacctaggcttacctttacattttcgaaagcttaggaaagtggatttcttgcctctaattgaaaagattggatcgcgtctccctggctggaaagaacgctacttcatgtcagaagggagaagaattcttgtgcaatcagtgttgagtgcattgccgacctttcatctaactgcccttcaagctcccaaatgggtaatcagcagaatagatcgttaccgcagatccttcttatggaagggagaagacccagacaaattcaaatggaaagaggacaacaagccttgggttggaatggatttaccttgcgatgactgcgacaaaagactctatcaagctgccactacgataactgtgggtaatggagaaaaaataaatttttggcatgataagtggctgcaaaatgcatgtccaaaagacattgcacccttgtgtttcaacctagctaagcgcaaacagagatcggttaaaacggaattgacaaacaattcttggctcctttcctttcggcaaatgactacaattgaagaaatcaacgatcttgtctagcttgggatattgctgcaaaatgttcagcttctgccgcaaaccaatgacagcatcatttggaacctgaatgaatcgggatcctactctgcaaacagtgcttatttatttcaattccaagggtccttctcttcgattcattttcattccatttggaggtgcccagctgaaccaaagatgcgcttctttggatggctaatccttcaccaaaaaactctcacggcccaaaatcttttgcgccggcactggccttgcaattggatttgtagcctgtgtggagaggcgtttgaagacactaaccatctcttaaatgtttgccccttcttcagaaaagtttggcttatggtgtgccaatggcaaaacatctcgggggcacagcctgcagatgacaacgcagcttggtgggctgatctcaatcaactacaccccaaacctttcaaattcagggttaaaggatctcttctcgccacttggtggaacgtttggttggaaagaaacagaagaatttttcaaaacatctcttacacagaggatcgcgttgcgagaatagtaaaggaggaatttgatctcagacacactgctttccaa

SEQ ID NO: 13268 - DNA, 570 bp, Oryza sativa
  Clone ID: PAT_MRT4530_19318C.1
cccccccaagaattttttccccctttcccccttatattcgctcctttcctccaaatccactactccatattctcccaccttatccaagatattgtccccaatgcaaacaattacccatgggcacccaccggatccgctatagcccgttacactgtatcccaacgcttggccactgggtagctccacagccatgttcatatctacagcccatggctcaccctgcagcaagcaatgttgcattgcagctgcaaggcatgatgcctcagtgcaactgtgacacccagttaccagatgatgcagagctatgcaacaagttatttgtgctggactcgggcagcagcagatggatgatgaacactggcgatggcagatgccatacatgtgcaacatgggcccctgtcaacttccacactctctttcttgtggttgttgttgatccaacgttgggttacatggtactctagtgaataaggtggtgcatactgatcgtgtggccaacactagaaataagaacccttgaataaagtatccaatcaatttcagacttgccaaaaaaaaaaaaaaaaaaaa

SEQ ID NO: 13269 - DNA, 744 bp, Oryza sativa
  Clone ID: PAT_MRT4530_19319C.1
tctcccgtcattcacgcccccaaatcgcgcccctcgatcgaaatcactgcttcccatccgtttcctcacgcacaatctggcgctccctctctcccggagcacagccgtcgtctcaactcgccactggggtcatcgccttcgccttgcctcgcctcctccaatctcctcaccaccgaaaccctcttgcgccgcaaccggcgccctctccacaacaccgccagtcaagtcggcttcgatccctcgtgcgctgccaccggcgccctctccaccgtgccgccatcagttcgtcgatccctcgcgcgccgccaccggattccaccccaccgcgtcgcaagtcagaaatgcaaaatcgttatatcagtggatgtgattaataatgcaactttcatgtttcttatacaatctcccccaaaagtcaagctcaagggattttcccttgccaatagcattggtggagataagtggaaggtgcaaaactaatgaccatgggaagaaggtctgactatctcattatcttctttgacctgtattaaagtatgcattgaggttgccatagaactatttgagcttcttgctagattcgcatttggatattcgtacttgttggtgtgggtcctcgagaccgggggcgtagctgagagactgatgatgaacgtggtgctttttatgggcgatggtgatctggtggtgctggtgtttgacacagaatttttagataaatagagtagcaaatttttgatagac

SEQ ID NO: 13270 - DNA, 598 bp, Oryza sativa
  Clone ID: PAT_MRT4530_1931C.1
aacatagtaaataggcgtgtttcagttggggcctaaaacctaaacccacaggcacgggcattccttgcataagctcattaaacagcatgcatgtgattatggcaaaagtttagtccttttacaaagcattgcacatcttcttttagttttcagtgatctcatgagtctcttttacttttctgttcctgaaaaatcttgcgagtatgggtgactaacccccttgctcctgaaaaatatcttttgacctgatttttgttcttgctgattatggtaattttttaattaatgtacagatctgcagtaagaaggaaaggttgcatgttttactatccttgcttgagaaggatgcaccaaagtcagggattatatttgttgctgaacaggtattgctacttgtggattccatttactccatggcatgttgattatagtgttgctccagcgtgatgggatgtgccaatttaggggttagaaattattctagagggaccaaccggccaagggacctcatgatggaccatttatgctatcctatattcaaatacaaaatgttacttatcatagatagtctttatctgctggtatggaataattttca

SEQ ID NO: 13271 - DNA, 591 bp, Oryza sativa
  Clone ID: PAT_MRT4530_19320C.1
ccggccgggatactgaccagtacggtatacacacatatgctaccttggtatgcctaggatgtgacaaccagccctggcagtttacacgctcaagagctttgccctgtgtgccttaattgcttgttttggatgcgccactactcgtgtcaccactatgcagcaatttcccaccaccattagccatgcgcaccatggatccgtcggaggcatgtacactgatgcaaacgtagggcatgggtagatccacagccatgttcatgtcgcagccaatggcgctcctgcagcagtaatggtgcatgcagctacaaggcatgatgcctcagtgccactgtggcaccaggtgccagatgatgcagagcatgcaacatgttatttgtgctggactcgcgcagcagcagatgatgaagatggcgatgcagatgccatacatgtgcaacatgacccctgtcaacttccaactctcttcctgtgggtggtgctgatcaaacgttggttacatgtactctagtaataaggcggtgcatactatcgtgtgcagacactcgaaataagaaccattgaataaaatatcaatcattttcagacttgcaa

SEQ ID NO: 13272 - DNA, 2247 bp, Oryza sativa
  Clone ID: PAT_MRT4530_19321C.1
atggaggaattggatctcaaaccttctcgcaacctcctctcccaggttctacttaacggttcgccaggcactgcattgcagcatgccaaaggacttcggcaaggagatcctctatctccgctcctgtttattctcactatggagccgctgcacaaactctttcaagttgcggaagaggcctccctgctcactccaattggagggcgttttagcaggtttcgatgctctctatacgctgatgacatcgctttgtttgtcaagcccgaccctattgagattgatgcagttaaaagggttcttaatttatttgcccaagctttaggcctccacacaaacctgaacaagactgaaatctatcctatccgttgcgacaccaccgacttgacacatgtcattactcctttccctggaactttgaaatccttcccctgccgctacctaggcttacctttacattttcgaaagcttaggaaagtggatttcttgcctcttattgaaaagattggatcgcgtctccctggctggaaaggatgctacttcacgtcagaagggagaataattcttgtgcaatcagtgttgagtgcattgccgacctttcatctaactgcccttcaagctcccaaatgggtaatcagcagaatagatcgttaccgcagatccttcttatggaagggagaagacccagacaaaacaaatccgggaagtagcttggtaaattggggtacagtctgtagaccaaaaattttaggaggccttggaattccagaccttgagaaattttctcgcgctctaagactacggtggctctggttcaaatggaaagaggacaacaattcttgggttggaatggatttaccttgcgatgactgcgacaaaagactctttcaggctgccactacaataactgtgggtaatggagaaaaaaataaatttttggcatgataagtggctgcaaaatacatgtccaaaagacattgcacccttgtgtttcaacctagctaagcgcaaacagagatcggttaaaacggaattgacaaacaattcttggcttctttcctttcggcaaataactacaattgaagaaatcagcgatcttgtccagcttgggggaatgctgcaaaatgttcagcttctaccgcaaaccaatgacgacatcacttggaacctgaacgaatcgggatcctactctgcaaacagtgcttatttatttcagttccaagggtccttctcttcgattgactttcattccatttggaggtgcccagctgaaccaaagatgcgcttctttggatggctaatccttcaccaaaaaactctcacggcccaaaatcttttgcgccggcactggccttgcaattggatttgtagcctgtgtggagaggcgtttgaagacactaaccatctcttcaatgtctgccccttcttcagaaaagtttggcttatggtttcgacttgcttgtcaatcttgaaagttgaggacatgacaaaatcaccaagccttagtcaattgctgattagatcatgcatctccaatggagatgcaggttctccacgattagttgagaccacgcagccgtcgtctcaacttatcgccggtgaccaacgttacgacggggtcatcgccctcgcctcgcctcctccgatctcctcaccaccgaatctcttttgcgccgcaaccggcgccctctccacagcgccaccagtcaagtcgtcttcgatccctcgcgcgctgccaccggcgccctctccaccgtgccgccatcagtttgttgatccctcgcacgttgccaccggattccaccccaccgcgtcgcaagtcaaaaatgcaaaatcattatatcagtggatgtgattaataatgcaactttcatgtttcttatacaatatcccccaaaagtcaagctcaaaggatttccccttgccaatagcattggtggagataaagtggaaggtggaaaactaatgaccatgggaagaaggtctgactatctcattgtcttatttgacctgtatttcagtatgcgtttagcttcttggcaatcaattgtggatgcaagagaactgtttgagcttcttgctagattcgtatttggatatccgtacgtgttggtgtgggtcctcgagaccgggagtgtagctgagagactgatgatgaacgttgtgtttttcatgggcgatggtgatctggtggtgctgatgtttgacacggaatttttagataaacagagtagcacatttttgatagac

SEQ ID NO: 13273 - DNA, 804 bp, Oryza sativa
  Clone ID: PAT_MRT4530_19322C.1
tgtcaaaatccggcgcggagcaagcaagcaaactccactcatggcgccgcttccgcctcgcgccatttccctcgtcttcctcttcctcttcttcacggccgcgtcggcgacgaggcgactcgacgacgccggtggccagcctacggcggcgtcgtccgcgacggcgttcctccggtcccgctgcgccaccacgcggtaccctgacgtctgctacgactccctcctcccctacgcctccacgttccagaccagccacgtcaagctcgccgtcgccgcggccaacgtcgcggcggcgaagctccgggcgttctcggcccgcatcaatgatctgctcgcccaaggcggcgccgctcgcgtggacgccgcgctgaaggactgcaagagcaccatctccgacgccggcgacctggcaaggcagtcgtcggcggagctcggacagctcgacgcgggcgccgccgcggccggcgtgagcagcaggcaggcgaggtggcatgtctcgaatgtgcagacgtggctcagcgcggccatcaccgacgaggggacgtgcaccgatgggttcgaggaagccggagaagccgcggcggggtcgcccgccgggaaggaggtcgccgccggggtggcgagagtgaagcagcacaccagcatcgccctcgcgctcgtcaacggcatcccgttgtgaacctgcagacaagcactagtgttttattaaactaagttgttgcaaaacttatatcacttcaatgatgcatgtaaaagcacatataattgtataaaggaatcattatggaagtgtgaccgttgtac

SEQ ID NO: 13274 - DNA, 597 bp, Oryza sativa
  Clone ID: PAT_MRT4530_19323C.1
ccggccgggatctccctccatgtattgtctacaccatctacgatcttgtttgctctacctactgtagaatcatgcaatgtcacgcatacaccaccatcatattctgccctgtttgccttatttgctctttctgcaagcgtcactactgctatcaccactatgcagcatttcccatcaacattacgacatgactaaccacgggatcctgtataggcagcacatgatgcacacgatgcgcatgcgtagctccacagccatgttcatatcacagccaatgactcccctgcagtaccaatgttgcatgcagatgcaatgcatgatgtctcagtgcaactgtgacaccagttaccagatgatgcagagcatgcaacaagtctatttgtgctggactcgggcagcagcagatgatgatgaacatggcgatgcagatgacatacatgtgcaacatgacccctgtcaacttccaactctcttcttgtggctgatgatgatcaaacgttgattacatgtactctagtaataaggcgttgcatactatcgtgtgcaaacactatacataagaaccattgtatatagtatcgatcaatttcacacttg

SEQ ID NO: 13275 - DNA, 421 bp, Oryza sativa
  Clone ID: PAT_MRT4530_19324C.1
cccatggatccggtgtagcaagtacatgatgcacaacgttggcatggtagctccacaccatgttcatgtcgccacccatggcgctcctgcagcagcaatgttgcatgcagctacacaggcatgatgcctcagtgcccctggtggcccccgttgcccagatgatgcccgagcatgccaccagttatttgtgctggactcgggcacccccagatgatgaagatggcgatgcagatgccatacatgtgcaacatggcccctgtcaacttcccactctcttcctggtggttgttgttgatccaacgttggttacatgtactctagtaataaggtgttgcataactatcgtgtgccaacacctagaaataagaacccttgaataaaatatccatcattttcagacttgccaaccaaaaaaaaaaaa

SEQ ID NO: 13276 - DNA, 615 bp, Oryza sativa
  Clone ID: PAT_MRT4530_19325C.1
ccggccgggatcatcctcaacaatattgtctacaccatactggaatcttgtttaacactactttgcagaatcactcaatggcagcatacaccaggcaagatctttgccctgtttgacttaattgctctttctgcaagtgccactactgcaatcaccactatgcagtatttcccaccaacattaaccatgggcaccatggatccggtaggcatgacatgatgcaaacgttgggtatgtgtagctccacagtcatgatcatgtcgcattcaatgacgctcctgcaccagaaatgttgcatgccattacaatgcatgatgactcactgccactgtggcaccagttgccatatgatgcaaagcatgcaacaagttatttgcgctggactcggagcagcataacatgatgaagatggtcgatgcacatgccatacatgtgcaacatggtccctgtcaacttccaactctcttcctgcggatggtgctgatcaaacgttggttacatgtactctagtaataaggtgttgcatactatcgtgtgcaaacactagaaataagaaccattgaataaaatatcaatcattttcagacttgcgaaaaaaaaaaaaaaaaagcggcc

SEQ ID NO: 13277 - DNA, 565 bp, Oryza sativa
  Clone ID: PAT_MRT4530_19326C.1
aacatattgtcacaccatctggaatcttgttaacactagtattgtagaatcagcaatggcagcatacaccagcaagatctttgccctgtttgccttaattgctctttctgcaagtgccactactgcaatcaccactatgcagtatttcccaccaacattagccatgggcaccatggatccgtgtaggcaggacatgatgcaaacgttgggcatgggtagctccacagccatgttcatgtcgcaaccaatggcgctcctgcagcagcaatgttgcatgcagctacaaggcatgatgcctcagtgccactgtggcaccagttgccagatgatgcaaagcatgcaacaaggtatttgtgctggactcgggcagcaacaaatgatgaagaaggggatgcagatgccatacatgtgcaacatgggccctggcaactttcaactcttttcctgtgggtggtggtgaacaaacgttgggtacatggactctaataataagggggtgcatactatcgtgtgccaaccctatgaaaaaagaaccattggataaaatattaattatttttagatg

SEQ ID NO: 13278 - DNA, 1995 bp, Oryza sativa
  Clone ID: PAT_MRT4530_19327C.1
atgagcttgtgtgggagcccaatttgctccgagcaagatgtggtctcatgtgctatgaaggaaacattggattcttcgacttgcgtgaatcatctggtggtgatttccattgttgcagtgctcactgttgcgcttgtacatcagttgctcatgaaaattccaaagagtagagcatctgcgcggcagcttgtcgcattcaattcactgctgcagttggctgctgtagtgttcactggctgcttgggtttgcttaatcttggcctaggactgtggatggtggggattagcttcaatcaggaaacctccatttaccggccgcattggtggcttgtgatcttggctcaaggattcagtttgatccttactagtttcagttttagcatcagacctcgatttcttggagctacatttgttcgattctggtcgcttttgcttaccatatgtgcagcattcatctgttgctgttcagttgtctacatggttggagagaaggagatcaccattaaagcttgtttagatgttcttttgctacctggagcccttatccttcttctttatgccattcggcacagccgtgatgaagagggttatgaaacaactgaaaatgctttatacatgccgctgaatacagagagggatcatgggacggctgattcagagagtcatgtaactccttttgctaaagctggatttttcagtgtgatgtcattttggtggttgaaccctttgatgaagatgggttacgcgaagcctctcgaagagaaagacatgccacttttaggctccactgatcgagcgcagaatcagtacttgatgttcttggagatgatgaatagaaagaagcagttgcagtcacatgccacaccatcagtattttggaccattgtttcttgccataagagtgggattctgatctcaggcttctttgcattgctcaaggttgttaccttatcctcaggcccattgcttctcaaggcactcatcaatgtatcgctgggggaagggaccttcaaatatgaaggaattgtgctagctgtgacaatgttcgtttgcaaattctgtgaatctttggctcagagacagtggtatttccgcatcggagctatttacaagaagcaacagaagctatcaaactcagcaaaaatgaagcactcttctggagaaataatgaactatgtgactgtcgatgcctaccgcattggggaattcccgtattggttccaccaaatttggacaacaagtgtccagctctgcattgctctggcaatcctttacaatgcagttggacttgcgacggtatcgtcgttggttgtcatcattattactgtactctgcaatgctccactggcaaaactgcaacacaagtaccagagtaaacttatggaagcacaagatgtgagattgaaggccatgtctgagtctttagttcatatgaaggtcttgaaattatatgcttgggaaaatcatttcaagaaggtcattgaggggttgagggaggttgagtacaagtggctgtcagcattcaaccttaggaaggcatacaacagtttcctgttttggtcatcaccagttctggtttcagcagcaacatttctgacttgctatcttttaagagttcctctgaatgctagcaatgtattcacctttgtggcaactctacgtctcgtgcaagatccaatcagacagataccagatgttattggagttgtgattcaagctaaagttgctttcacccgggttgtaaaatttcttgatgctcctgagctgaatgggcaatgcaggaagaaatatatagcgggtactgagtatcccattgcgctaaactcctgcagcttctcgtgggatgagaacccgtcgaaacatactctgaggaatataaatttagtggtcaaatctggggagaaagttgcaatctgtggcgaggtaggatcaggaaaatcaacacttttagcttcagtacttggagaggtcccaaagaccgaaggcacagaataa

SEQ ID NO: 13279 - DNA, 562 bp, Oryza sativa
  Clone ID: PAT_MRT4530_19328C.1
gcgtccggtttaacactagtattgtagaatcacacatggcagcatacaccagcacagatctttgcccctgtttgccttaattgctctttctgcaagtgccactactgcaatcaccactatcagtatttcccaccacacttacccatggcaccatggatccgctgtagcagtacatgatcctaacgttgggcatgggtagctccacagccatgttcatgtcgcagccaatggcgctcctgcagcagcaatgttgcatgcagctacaaggcatgatgcctcagtgccactgtggcaccagttgccagatgatgcagagcatgcaacaagttatttgtgcctggactcgggcagcagcagatgatgcagatggccgatcagatgccactacatgtgcacatggcccctgtcaacttccaactctcttcctgtggcttgttgttgatccaacgttggttacatgtactctagtaataaggtgttgcatactatcgtgtcaaacactagaaataagaacccttgaataaaatatcaatcatctttcagacttcaaaaaaaaaaaaaa

SEQ ID NO: 13280 - DNA, 457 bp, Oryza sativa
  Clone ID: PAT_MRT4530_19329C.1
cagtagtttccccccccacctttagccctggcccacccatggatcccgtgtagcccacgtaccatgatgccaaccgttggccatgggtagctccacagccatgttcatgtcgccagccaatggcgctcctgcagcagcaatgttgcatgcagctacaaggcatgatgcctcagtgccacctgtggcaccagttgccagatgatgccagagcatgcaacaagttatttgtgctggactcggccagcacagatgatgaagatggcgatcagatgccatacatgtgcaacatggcccctgtcaacttccaactctcttcctgtggttgttgttgatccaacgttggttacatgtactctagtaataagtttccatactatcgtgtccaaccctagaaataagaacccttgaataaaatatcaatcattttcagacttcccaaaaaaaaaaaaaaaaaaaa

SEQ ID NO: 13281 - DNA, 1351 bp, Oryza sativa
  Clone ID: PAT_MRT4530_1932C.1
atgagctcctccaacaacggcggtggcggcgacaagaagccggcgtccggcggccgcgggggccccaccatccgcaccctcgcggacatcagccgcggcccgtccggcttccctgggggcggcggcggcggcggcagcgactccgacgggggccccaccatccgcaccctcgcggacatcagccgcggcccgtccggcttccctgggggcggcggcggcggcggcagcgactccgacgagccccaggagtactacaccggcggcgagaagagtgggatgcttgttcaggacccaacaagaagaaacactgtggactcaatcttcgaacaagctagacagatgggtgctctccaagatcaaccgcctccatttgaggatcaatcttccagttcaagaagctttacagggactggtcgacttctttcaggagagacagcaccagctgcacctccaccgcctgggaatgtacttcacaatatacaattctggaacaatggattcactgtagatgatggtccgctgagggactatgatgatcctgcaaatgctgatttcattgagagcatcaagaagtcccagtgcccccaggagttggagccagctgatagaagaacacctgttcatgtgaatgttatcaaacgactggaagactatcaggctcctctaaggcctccatcacccttccagggtgttggaagaacccttggtggtggatcttctgcagaagagagccaggcaccagctcctgccactcaagaaccccgcaggtccgttggaatagttgtggacgactcgctcccatttacatccatacagctaaggctggccgatggcactcgcatggttgcccgtttcaacatgcaccacacggtgggcgacatcaggtctttcatcgacgcctctcggcctggggctacaaggccctatcagctgcagactggtttcccgccgaagcagctggctgatccagcacagaccgtcgagcaagctggtctggcgaactctgtcatcattcagaagatgtaggcctaggggcacgtctcatatgctatctttgaaacaagaacccggtgtccttaaattgtcgattatcatgccagatactgtactggaatacattctgcatcgaaccagactgctggtttcatcgacagacagacgataacaatagccatgtcggtttttaagtggcatcagtgaagttcataatcctattaatagtaattacctgaattgcaaaaaaaaaaaaaaaaaaaaattgatcctgactaattgttgcttgaaaaactgttaattgttcatcgagatatatcatcaaatcattcgtgttcatttcaaaaaaaaaaaaaaa

SEQ ID NO: 13282 - DNA, 246 bp, Oryza sativa
  Clone ID: PAT_MRT4530_19330C.1
acgccccccgccgagcaggtccggcgagactgctgccgcagctcccccgtcgacgccaaagcctggtgcaggtgcgagcggatccaagcacatgctgggaggcatctacagggagctcggcgcccccgatgtcgggcacccatggtttccccccccgaggtgttcccggccctgccccggaagaaagggggggacctttggggaggccgcccgccggcggcgacctcccggcgttctgcaacgtgg

SEQ ID NO: 13283 - DNA, 1659 bp, Oryza sativa
  Clone ID: PAT_MRT4530_19331C.1
agtcacagggaacatggaacgtgggtgagttcctcgttccggaaatttcgtcacggaacgagtaacgggaacgaagcggaacttcattccaaaaacggagggatcgtcgaccccaaaacatggtacagcagtggaggaacgagaagggcggtacaggcaatggagaaacaagaagggttcgctgctcaccgctgttatgccgaggaacaaaatggcacagccctgcgcgcgccgccgcgccgccgcgttgctccctccattgcgctgctcctgcactaacgaggaagtcatcacgctgcgccaccggcgttgcatcgacctagtggactggactactggaggcggcggctggggatagggacgacagagcagattggtacgggggaagagaaagacgggaggagccaccatgcatgaatggacgaatccgccgtccgcgccactcctgttgcctatgcacttccaacggctgtccggtggccgaatccgacgcacgcgcctctcccgcggccggatccgctgcccgcggccctcttctttggtccagcgcaggtagcaatggaccgtgtcggcaatgaggtctgaaaaatggggcacgttgatggaaccctgtccgacttctgcaagcttcacaatcgagtccatgaagaggtccccaaagttttccttgtagctgttcccgtggacgatgcccttcttaaagagcagggcaaaatctttcttatccgagatgagctctgccatgaacatgacatagctgcagaagagccgctcctcgcgcggccaccacccacacatctccaggaacacgaggttggcgagcagccgggcgtcgtaaagccggcacgtaaaagccggaatctctagcttcccgtccttgaactttacttctgtaaaccggtaggtctccgcctgctttagcctcacgccaactcggacgagttctttcaacggcgggatctccttccaggatagccagttcacaggtttggtagaggaacgcgagaacgtccgcttacaaaatgcgtagagatctatacgcttcttcttcaacatgttcatggccctgcctaccaacgatagccgtggaaccggcgtctcgggcaaagcttgttccttggaaaacgttaggtatttatacaccagatgcagtatatggtatacggagctttcgtcacagaccagttcaccatcacctacactgccgaagagatagtagagtattaataccttgagctttgtatccctgagttcggggacgcggggggtcatcgtgaacagatcctccagcacgaagaaggggatctggtttgaaaggattacgaggtccaaacgaagtgcgtgcggctccaacttgaccttcggtggaacttgcggaccttccgcctccggatagaccgactggtctgtttttatcttcccattattaatccagtgcctaatcagcacttcgatgatgaagaggccgtccagcaccatcacctccaccatttcctttgtattcaaatttttatcctcctgacggccgtagcgctgccagattgttgatgaactccgctcgatacatctgaggtactcggtcaccttgatctggacatcttcgtctctgtgcgcgcgtcggatcaggttgtacatgtatgtccacttggtctcctccat

SEQ ID NO: 13284 - DNA, 237 bp, Oryza sativa
  Clone ID: PAT_MRT4530_19332C.1
gttttagtctcatttgggccacacaggggcttgattgaaccgccatgctggcttagagctgtgacggtcggccgccgtctcgagcgccacacggatcgatcgaacaccgtggcactcacggacgatagagaaaagctatgcagagcctttggaaggccgtcagagctagacccgaggagggtcggaattctgatctccgatgacatggcaattgttctccctttgcggccttgttcg

SEQ ID NO: 13285 - DNA, 1219 bp, Oryza sativa
  Clone ID: PAT_MRT4530_19333C.1
tttttttttttggctaaaaactgaaaaactttattcgatcatatctctaatggagcgtacaattaattccgtcaggtgcaaatacaacatttgccccagatcatctcgaatcaagcaacgaaataatattgaaatgtgacaattcatgcttctgaattctgaagaaaacaaatcaaaatggcacgtacgtagctagatgcatcctcctctgaaattaacagttactcgttgacaaccctgcacatcctcctgatctcgccattggcggcggtcttgacctcgatcccgcccatcttcaccatcgccctcgcgaacctcctctcccacctcccgcgcgccgccgcgttccgcgccaccatcgccgccgtcggccgcgacgccagcagcgcggcgtcggagtcgaacagcaccttcctgtcgagcacgttccggtagtactgcctgtccatcctgtccggcgtcaccgcgtcctgcgccaccgtcgggtcgtcggtgaagttggggctcgccgggcacttgctccggagcgcggcggcgaggccggggtccatgtccgacggcggcgagaggcggtcggcgaaggaggagcagtgggagcggccgatggtgtgcgcgccggagagggtgaccatgtcgtcggcgtcgaggcccttcgcctggaagctggcgacgagctgggtgaggttgaacaccggcggcgggaggaacgcgagcgtctcgttggcgagggagacgcgtccgtcgagcctccccgcggggatgcggtagctgatgccgccgccgctaaggaagaaggaggcgtcgcgcgccgcgaacgcgatgatgtcggcgcaggagacgacgcccgggcaggccttctccaccgccgccttcgccgcgtcgatcacctcgaacccccgcaggctggggaagttcggtgggccgagcttctccggctgcgggttcgccgccgtcgggtcgagcagcaccgacgcgtcacacccctggacgaagcagtcgtggaagaacatgcggacgatgccggcgccgacgccggggttctggcggacggcgttgccgacgacggccctgacgacgtactccgccggcgcgcacttccgcttgtagtacccaaccctaagccgcccctggcacgccgccgccattgccaacacgcacgccacccacatcgcaaccctagccgccgccatggtcgacctcctcagctactcacacactc

SEQ ID NO: 13286 - DNA, 408 bp, Oryza sativa
  Clone ID: PAT_MRT4530_19334C.1
atggcgagagttttggcagggaagacgaaacgacgctctgacttcggcgtttattttgctagggtttcaggagtggtgatggacctgggcctatacaggcagaagaagtcggagtactcggattatcattctgtgctacgagaagagattgtttcgtcgactgtaaagtggcaatgccctcccctccgccagatccagcgggaggagaggaagtgggcggcggcagcgccccattcggcagatccggtcgtgggcggctgcagcgtcttcccctccgccagatccaacgggaggggaggtggcggcaggggcagtgggctccccactaggaggcagtggtgggagcgcagcgccctcccttctccgccggcaaggaagcagaaggtggagcaaagaagcccgggctag

SEQ ID NO: 13287 - DNA, 1454 bp, Oryza sativa
  Clone ID: PAT_MRT4530_19335C.1
tgtttccgtgttttttttttttttttttttttttttttttttttggtatcaaatattcgtcgccgacaataataatatcattacagacaagcaaatgtagcattcagttgccaaccaacaaacaaatccatgaattgattgtcacacccattacaatggcaaaagatctcagcatacaaagtaaatgcacatagtccattgctattcacaatttcacaccatcattctttacttgtgcagatacagcacaatatgggcgaagcatatttgtttgaaaagaaagacttcaagcatttagacccatctgcttccttgtcctaccaataaacagatctcgagatttaatcttgcctggtaagcagccaccgagtgtgaggaacggcaactgagccaacccttcgttccttccaagagagataagtgccaatgcaaatccagggctgtaagtctccagtttgctgttaggagaacctttaatcaataatctcaagttctttgctactagcagagcatgcttatgggcaaggtaaccttgcttaatttcaggaatatctgtgatgtcaccaattgcaaaaatgttattataaccttttattcttaaatccttttccaccattagtcttcccttgttgtccaaggattcctttagaatggtatcatgtagccatgatgaactgagtggcttaccgatacacacaaagtggcaatcagctgttactgtttctccagctgatgttctgtacaacttctctgtgttcgataatgaatccaagtcaatcgactgctggaaaagcacatctactttctttgaagtgagccaatcaagacactttttggaagctttgtctccaataaattctagtaaccgtgatcctctatggacaagggtcaccttcttctctgggtaatctactgcaatctctccagctagctcaacaccagttgggccgcctccaattatcagaactgattcggaggattcaatcttccctttatctctttggaattcttttatcctctcgcttctgctcccaggagaagttaatgcgtggccagttgctataactagataatcatacgcaagagattgaccatcagcggtcagcacggcttgttctgtgatattgactgcagaagaggttacaatagttgcattggtgagataatctctgtgatagattaatgatctctcagcaaaagagggttcaaccattgatctcaattcagcccaagggatctctaaatagtccttcggatcgaggaggacgacgtcggcgtggggctgcatggtcttggcaaggagcgatccggcgatgccgccgccgaccaccaccaccctcgtcttcccctccgccgccatctccgcccgccgccgcttggatctcctcgccgccgcgctgtctccctcgctgcccagcgactcgcctaccaccctcgtgccgaattcctgcagc

SEQ ID NO: 13288 - DNA, 725 bp, Oryza sativa
  Clone ID: PAT_MRT4530_19336C.1
cacactgtgcttctgcaagtgctgtggtggaggcatctgttgtgcagcggtgacaacacggtggttgctgagaggtaaagtgtgggcacccattttctggtgatgtgttctgaaagcctatagttgcggtaacagctttggatttctagatcctaaaagtggcatggaattagcagttgggacagtggattcttgattctcttgattccaagttgggtcagacagcaaatctcatggaggaccagtggcttgatatggtcctagtggtgtctcttctgaaacctcagtcaagaacatgctcctacagcccttcctcacaaacttttgtaaactcctaattttctacattaaatctccatctgattatgctggccaggataatttctgatatcctgaaactgaaccatgactggtagagacttttttttttctttttcattttcagctgcccccgtggattatagagttcccaggccagggattgaatctgagccagagttttgaactaggccacagctgtggcaatgacaaatacttgccaggccggggattgaacccatgtccctgctgctgcagagacattgtcgatcctgttgtgccacagtgggaactccatgactggtagatatttttatcccattttttttttatatagagaacagtcacctaactaattaacaatggaactaggatttaatccaagtttgactccagaatctctcatc

SEQ ID NO: 13289 - DNA, 378 bp, Oryza sativa
  Clone ID: PAT_MRT4530_19337C.1
atgtcggcgatctccatctttcgtgccaacccaccgtcccagccgctcctgttcttccaggcggcggaggcgcgcccgcacggtggagtcgttggtgagcatgaccatggcgaaggcgtggcgtggtggtcatcggaggtggaggcgatggcggcggcagccggggtgcggggtctcgcggaggcggggctgggatggggcgatgggagggggcacggggaggggagccatgggaggggtcctcgcaggggcctgtggcctgtggttctccatggagccatggaggagagctcacgcgaaggcgggatggtggccgccgagtgtagagtccgtagttggagagctagtgagggtttccatggaattatttatgggtga

SEQ ID NO: 13290 - DNA, 1164 bp, Oryza sativa
  Clone ID: PAT_MRT4530_19338C.1
gccctctcctcgtcggtttcgaaccatctagaagcgtcgccgccgactcgccatctcctctctaggtcaccggatttcctagccggcggcgagctcgtcggctcacgcggcggcggcggcggcgatggactggagctccgtgactgcggaggatctggtggacgcgctgcgggaggtggactggtcgacgccgccgcgccccgtctccgagttcttctcccgcttcacccgcccgcgatcctactccaagtggaccagccgcctcaagtgcaacctctactactacaggacgaactacttcatcttgatcatgttcattcttgggatgggctttctccggaaaccagtttccatccttgcagctttttcaacaggcctcagcattgcatttctcaatgacagttttgcagttacattcaatgagaaagtcacaaggacagtcagacaattttcaccacatttagcagcaaagatgaggccacccttaagacctgtcattcgtggccgaccaagctcaaaaagatcaattcatatttgtggccggcctcgatgggtttttgttgtattattttctgtcgtaagctgcttcctctggatgacctcatgtagtctccttacggttctgtgggcactaattgttggtctgcttgcaaccttgcttcacgccagtttcagaacacctaatctgaaagcacgcctgaacacattcagggaggaatttcgagcagtatggcggaattatagcgagttttaaacgccctttttgtctaccccattgcatcattgtggagctgcttattggatgtctctgcggtggtgcaatgtagaaggacctacttcagtgtgctttcgaatttcttgattttctctgcagatttatgtggtaaaaatgttaccaagttccatatctctgctgcctcttgcgactctttaattgtgggagattaaaaataggcatgctattttctccagtttatggatttggctttagattgtggattattctagtcccccaccacatggatctccatagttttagcttctggtccaaaacttctactgtattttgatacattggggaaggaacagcatgtaaaagagacagctatcctgaagagaagaaaaaagatattgttgtgaaaaaaaaaaaaaaaaaaagcggcc

SEQ ID NO: 13291 - DNA, 275 bp, Oryza sativa
  unsure (1)..(275): unsure at all n locations
  Clone ID: PAT_MRT4530_19339C.1
ccttcgctgaggcggatcccactgtgtctnagatcgtgtatgccctgacgaggctcttcgtgtacgagcgcgtccaaaagccgctcgagctcggtgagcatatgatccttctgctgataattatcacatggttcatggatctgtcagtctataacattgctgtattcactactgggggggggggattacttacttattataatcattgcctattaatattactggacggagcttgattatgatacctagaagtgcatattacatattgacttaag

SEQ ID NO: 13292 - DNA, 1599 bp, Oryza sativa
  Clone ID: PAT_MRT4530_1933C.1
atggcgcgcggcgggagcggaggcgggaggtggaggagactgaatgtgaggcccgacctggcgagcgaccaggagggcacgcggacgctcaacctcacggtgctgcgtcgcctcgaccccgccgtcgccgacatcctcatcatcgccgcgcacgtcgtcctctacagcttcgacgacaacatccaccaatggtgtgaactgtcgttacttattgttgtttctgatacacgtgccattcctaaagaattgaatcaagtaactataagatgggacattgcattgttaaatgttgatgtgcatattgatgtggcatttgcagtaccattcactgagttttgggggaacacccaacccagattccagtttattgtcatgaatcgtaaaaatacagaaaatctgaccgaagatctcttggggggttttgaatatcaagtacaagtcccttacatcatgtaccacaatgctgcagacgaaatcacaggaatttggttctatgatcctcaggaatgtgaacaagttggatatcttttcagtaggatacagaaggcattttccagggtgtccccaaaggccaaggtttctgtaactgaaagtgagtatgaaaagccggaagtagtgcctgctgttccttcgaatgaggatactctaaaacagccaacgtcatctatcatgttgctggataatgcgaagtatgatttcttgtcggctttgctaaagggtgctgcatgtgttggtgctaccatggacgaagcaagtgcagtacagtcaaacaaatctgttgggatggttcattcatctactcatgcgtcacctcatgctattccaccacaatctcctgcaatacagtcaaataaatctttcgggatggttcattcatctactcaggcacctcttgctattccaccacaatctcctgcaatacggtcaaacaaatctgttgggatgattcattcatctactcatgcatcaccttttgatatcccaccacaatctcctgcagtacagtcaaataaatctgttgggatgattcattcacttactcatgcatcgcatcttgctattccaccacaatctcctgctttgcatggtctgcatccttctcaaatttcagcagttcctgtgatgccccatgatgctcatagatctagtagcacttctaccatccagcctacaagtctagcaaatccgttgttctttcctccgatgccatctttgcagacagcttctcatgctgcttcgtcattgtgttctgctgctcctcttcatcctcccattaccgttcagcagcttcaaagtgctcccttgcaccagcccttctccctaccgactgcatcgtccattcaaccaccatatggcatgccattactgcagccatttccaccgcccaacccttccccatttcttacctcgggagtgtcttatggccgcccagtgatcacaagagaccaactgaaggatgtgctactgagtctttgtcagccgtgtaaattggcgccgattttcgctcaacctttactgggtccacatgattctggtgtgctttatcctctaaatgattttatggtgtcaagtgtcaaccatagttttttgcttgcatag

SEQ ID NO: 13293 - DNA, 1405 bp, Oryza sativa
  Clone ID: PAT_MRT4530_19340C.1
ggaactagtctcgagtttttttttttttttttttttagcattccagaatgtttcctctcctacattttggaatcatcattttcagttgttacctagaaacagtatacaacacaacagctcggcttgccatttagcccaaaaagaaaaggagaaaaagagtgttgttctaagattcccttaaattacattctaaggttgaggaatccaactatggattctggcaagcgaccaaaatgttgaagcgatcaaaagaacacccctaattcacaacaattcctacttacccctgtattatactggaccaaaagaacagggtgtgagaacacacctgcttcaagaacccaatcaatcaaatcctctgttgtgactcgatcaccaatgcattgagcatgatgtgcaagaccgcatcatacacatcgccgtcataatgcattccatcagccgtgcattgctgcccacacccccgggagagctttcctacatcaagcagtaggaacgggccaccgtcgcgctgcaagagccccctctgctcgacctcaaggtcgtaggcttgcagaatggtgtcgttcatgtgtactttcttggcatcagtgttgagcatgtggttcaccagcagcggcaggccgagccagaacatgtgcggcggcggcacggggagcggcgaccggagcgacttcgccgcatcgacgacggacgccaatgcgtcgccgtagcgagcggcgtccgtgacgtggagcatgtgccagaggccggatccgaggacgagcacgtccggtgtgcgcggcgcgaggcggagatcctcgtggagcagccgcgtgaggttgctctcgaagggcgcccagacgaaatcgacggagatccccctcgcagggacggtggcgcggtagtcgctgtggcggcggaacagctccggctccgcggccgccgcggcggccgggtcgagcaggaggcggagcagcgcgagcaccagcaacctcgcctgcgagtccccggccaccatcacccacgacccattcagcagcagcgacgcgtcgtcccgcgacagccgcgcgaggccgcaggtcgacgccagcgacggcggccacgcccacgccctaccgacgcccgattccccacccgcgtccgcccatgacacgcggtgcaggagaggcacgcacgaggaggaggcggccgaagacgacgacgacgacgagatgggatgggggtggaaggatgcggcgaggaggaggtgcgggagggaagggaggtaaggcgagaggtgtaccccgacggcgagcgagacgaacagcgccccggagaagaagagcaccttgttccggctgaggtgccacccggcgagccccatggggacgaacagcacgacgcacgcggcgaccacgcccgcctgcgccgcggcggaaaccat

SEQ ID NO: 13294 - DNA, 109 bp, Oryza sativa
  Clone ID: PAT_MRT4530_19341C.1
tcgtatcccaaggtcgcggacaaatgtggggatagtggttcacgctaatcccttcactcattttgacatgagagtcgcgccggttccagttttgtgccccgtcatctga

SEQ ID NO: 13295 - DNA, 228 bp, Oryza sativa
  Clone ID: PAT_MRT4530_19342C.1
atgattgtggacggacatccggatatgctacaagttggatggtcgaggtacgactacgactggtctttgaccaacagcgtagtggtcctcgcaccacgacttcagatggtcgaggagagacatagcgctgtctttgatcttgctggatgcggattcgagaaggaaggctaccctgttgtcgactacgagtcagcacttcagaccgccaagtcgacaacagttagatag

SEQ ID NO: 13296 - DNA, 297 bp, Oryza sativa
  Clone ID: PAT_MRT4530_19343C.1
atgattgtggacggacatccggatatgctacaagttggatggtcgaggtacgactacgactggtctttgaccaacagcgtagtggtcctcgcaccacgacttcagatggtcgaggtcaagggtccaagagccttctcctctgagaacttatctccgatgacaaggctgggggctagggagagtgagagacatagcgctgtctttgatcttgctggatgcggattcgagaaggaaggctaccctgttgtcgactacgagtcagcacttcagaccgccaagtcgacaacagttagatag

SEQ ID NO: 13297 - DNA, 2042 bp, Oryza sativa
  Clone ID: PAT_MRT4530_19344C.1
ccacgcgtccggcttgtttcttccaagtagacttgttacgcctgttggtgttcgagtggtaggagcccttgggcttttccaggttcagatcgacgcctccttcctctggacattgttgctagttggtgatggctgagcaggctaatcaaccgactgtccttcagaagttcggtggccagttccaccttggctccagcttttctgaaggtgtacgggctcgcaacatctgcccatctgtctcatcctatgacaggcgctttaccacaaggagctacatgacccagggccttgtcaatggtggcatcaacgtcccaatgatgtcgtcctctccaatttttgctaatgctccagctgagaaaggtggcaaaaacttcatgattgatttcctcatgggtggagtgtcagccgcagtttcaaagactgctgctgctccgattgagcgtgtgaagctgcttatccagaaccaggatgaaatgatcaaggctggtaggctctcagagccatacaagggtattggggactgcttcggacgcactatcaaggatgagggttttgcttcattgtggagaggaaacactgccaatgtgatccgttacttccccacccaggctttgaactttgctttcaaggattacttcaagaggctgttcaacttcaagaaagacaaggatggttactggaagtggtttggtggcaaccttgcctctggtggtgctgctggtgcttcatctctgttttttgtgtactcccttgactatgctaggacaaggttggccaatgatgcgaaggctgccaagggaggaggtgaaaggcagttcaatggccttgtggatgtttaccgcaagactctcaagtcagatggcattgctgggttgtaccgtggatttaacatctcatgtgttggaatcattgtctaccgtggtctgtactttggaatgtatgattctctgaagccagttgtactcactgggtctctccaggacaatttctttgcaagctttgcccttgggtggctgatcaccaacggtgcaggtcttgcctcttaccccattgataccgtccgcagaaggatgatgatgacctctggagaggctgtcaagtacaagagctccatggatgctttctcccagatcctgaagaacgagggtgccaagtcactgttcaagggtgctggtgccaacatcctacgtgccattgctggtgctggtgtgctctcaggctatgaccagctgcagatcctcttctttggaaagaagtacggctcgggcggtgcctaaactggcagaaaatgatgacgaacaagtgtttattcctggtcctgcactaacgggatctggtgaattttgcctttttaacattgaaaacaataataattcttgtaggggagaacactccccgacattcgttttttggtggaagcgtttatctccaaacattgtcataggcggaggcgttaatcgcaaacagtttaccatcatagggttgagtttgagttgagtctggccggctctgttatgtctggcgattttcctaccatacattaccctcggtgaaatatcgaaagattattgagttgctgtctaaaaaaaaaaaaaaaaaaaaaaaaaacataaatatttctactgtttcatccggtaacaatgcaaacaaccaaaaaaatagaaaataacttcttgccgcccgtgccgtgccctgggagtttcccggtcgatgcccgggccctcgctggtggtagcgcgaactggttgtgggtagcgaggcgatcccgtgggcatgagtatggtatttctagaagggtgtgccgcgagttgggctggcccggtgcggcgagttgaggtgggggacgagaggggcagtgggagcggagggagtgacggaggggaggatgggtgacatgagtgaggctggttagtcgattggggccgtgatcacagattctaggtatggaccggggatgtagtagagaaaggtcgaaggatggcgactgggtgagcggagataacgtttaagggttagagtatgtcgttggcggagtgtgaagt

SEQ ID NO: 13298 - DNA, 3655 bp, Oryza sativa
  Clone ID: PAT_MRT4530_19345C.1
atgaacaggagcaaggcgaagctgtccggcgtcctgcacaagggcttcaagcccgacaagtgcaagacggcgctgcggatggcgctggcgcggatcaagctgctgaggaaccgcaaggaggtgcaggtgcggcagatgcgtcgagaggtcgcgcagctgctcgaggccgatcaggaccagaccgcacgcatcagggttgaacatgtcataagggaagagaagttcatgcaagcatatgacttaattgaagtatactgtgaacttatggtggcacgcatgtccattattgactcacagaagacttgccctattgatctgaaagaagccatagccagtgttatatttgcatcaatgaggtgttcagatgtcacagaacttgcagatgttcgcaagcatttcacaagtaagtatggaaaagagtttgcagcagcagctcttgaagtgcgacctgacagtggtgtcagccgactggtcattgagaagctgtcagctggagcacctgatacacagaccaaaatcaaaaccttgacctctattgcagaggagcacaacatcaaatgggagccaaaagcatttgaggagaaattgccgaagcaaaatgatgatcttctgcatgtgacctcaacatatccgggaggaaatattccaactaggggatcatctgcttctaattctggcatgccaacttcacagcctgctgcaccttctcattcatatatggaatcttccaattctcacatgtctacggcacattcatattcatcagctgaggttccagacaatagggctccatatgtcactgccaattctaatgctttcccccaagaaaacagaaggggttctgatgctccaatgtcccctaggtcccagcatggtcctaacagtttctctcatgatactgctggaggttcaaatgtttctagaccttactcccaatatggtgcaacagttccagatacagatacagcgtccaggagggaagagttcaatcactctagggagagaaaatcttcagttagtggttccaattggaatatagaattcaaggatgcaacatctgcagcacaagcagcagcagagtccgcagagatggctagtattgctgctagggctgctgcccaacttgctagtcgtggaaacctttctgcggagcaaaatactggagcttttgagtcacctgcttatacccatgaaactacacccaggaagcaacaagctgaacatttaatgaaggatgggcagaggagttctaatgagcagagttcaggggcttatgatccaagactcatctcaagtaatgatgctaggaaggatggggggagaacagaaacaagccgtgtaggtagtcagaatatgccaactaattccttgggtcaatccccaccatatagccctcatattcacagtgatgagtatgacatgccaactgatccgcatcgttctcattcacccgatcctcaatattctgatgattcatctgagaaagaaagcaactttggaagacctgaggatcatcagtttaatttacctggagaaagattgtccgaggctcaacttggtgggcacaacatcaaggacacggaaagcaagcatgctacctttgatcaagagaacacagacaactactacagcaactatagctcttcccatggtacattcacccatggcagcagtaccatttgggacagtcagaatgataaagctggacctgattcttcagctgttgtttttgatcaatatgattctgatgtcggagaagaaaatttattggatcctttctcttcaaagcacactgaagaacccactgttgaagatcacaagggattctcaagtgcagattggggtcaacagcatagaaatgaatctccagttaatcatagcagctcaacactattttcaggaacagaagcaaacagaaaagatgtttcctcacctcattcttatgataatgtgccacctacatttgactcggatggtgttagttctgatgaggaaatgaccacaggcatgcatgcaaggtctttaaggtctcattccagaggatccgatttttccgagagtagagaaaatataatttctggaaaggttgtccatgatgttaatgaaaatattgaagatcatgtatccatgtccaggaagaattaccttaattcatctggttctaatgcattcaataaggagcgctacagtgaaagttcacctagatctgattactcatgggttgatggggaattggatcgtacaaaaatcagagatcttgaagaagaaagagtgccacataaattggaaggtgcatcatcattgacaacaggagaaaataagaatcagctgttttctttaggcaggcaaacttcaacatcatctgctgactatgatgaaggcgatccaggcttgaactttggaaggctaactcctggactaagaaacaaactccggcaacctcctccgtacataaaggattctgggaatacctcgttgcataaggttcctaccgccattgaaaaatcagtgcactctgaagaggatacctcgtttggaaatacaagaaatacttctacaggtatggccaggagttcgttcggtgcagattacaacagtgaacttcatgaccaaaatcaaagtgttggagcaagtgtggaagctagatcaaccatgaggaattactatgggtcagaaggtgatagagggaagttatctgagcaatcttataatgctccaagttctgtgatgaataagagttctggaggtgtaaattccagtcaagatctgtaccatgaaaagccaggtgctggagcccgcaggggaactacaacaaaaactgccaaaagttactttgattcagatgatagcgaggacgaattggcacaacgcaaggaggtccagacaaagtggtctagagagcagattcaatcacgcaggactcagatgacatcagatacaaagaaagaaaccggtgtccgagttggagtgcagcatgctgatgaaactgaggcgaaatcacctgctgggtcattttctaggtttactgaacaaaggagagactcacctgtgtactccagggttccagtaccacgaacttcaccaaaacctgtgcgtgtggaacctcccttgggcaaagggaagtcacaagaagctgatctgaatacagtttctgtcacaggaaaggaggaaaacacagaaagcccagcagaaactccgaaagaaagcacctcaaaaactgctccgtcgcatgttcaccccaagcttccgacagactatgattcgtttgctgcacattttatgtctcttcggaccaatcgccgctagttttatgatcgcataccagttgagttttacatgtgaagaagtcgtatttacaaacacagggatacatacattctatagcttcgagttgacatttgtacagtatatcaactcatagcactcggtcttatatgttggtctttttggcgagctattattctttcgttctattttggcctcatgttcatcacatcttaggtattgtcattatgaaaggattgttagcgtgtaataagcacattatgcagtcagatgtacagacgtttacagaacttaagaggtttaccttttttcatatcttctgtttgaaaaaaaaaaaaaaaaaaaaaaaaaaaaaaaaaaaaaaaaaaaa

SEQ ID NO: 13299 - DNA, 574 bp, Oryza sativa
  Clone ID: PAT_MRT4530_19346C.1
atgattaccccagctctatcgacttcctataggaaactgtaccctgcagtaccgtccgaattcccgggtcgacccacgcgtccgcaatacaacagttctagtgagttgtctttgaatttgttcttcaggcaaggcaagctgcagcccagacgccgcctagccgaacacggctgcgccgacgccgcccgctccgagcgccgctagcggcagccatccttccccctgccgccaagctccctcctcaccgcgccggccttctcccccattcgcctgacccgcctggccgccctcaggccgctgccgcgatggccgaccggcgcccgaccatcgtcgccacggctcgcgccgccgtcgcctcggcccggtcgccaggtcgcgccgctgcaccggccgtcgctcgcctcgccagtcgctcgccccgctccatcggccggagagagagagagaggagggaggagtgaggatgatatgtggggcctacgtgggtcccaccatttttaattattttatgtgtggaactggcatgtgggtcccaccaggtttattattttttgggtggaaaaaaaaaaaaaaa

SEQ ID NO: 13300 - DNA, 537 bp, Oryza sativa
  Clone ID: PAT_MRT4530_19347C.1
ttcttttttgcggcgctcaaggcccctcctcctccggatttggattcggtttgtgatcctgataggtgttcttgccaaccataagtgtttaatccaatatattttcatttgacttgatgcggaacttgctgatttattgcgtggactcgattcaactgattaccgtttttattatctgaatcgagcaatggctgcgctatgaatggggataacgaattgcaatcttttttacaacaacgcacatgttaagagtccccgggttcttgatcctgaatacccgggtgcctaaccttggtgtgcgagagctaaaccttcgccggctatccacgcttcctaccagtaggcgggcgctgtttagccctgttcgcttctcgtgtgatttgccgcacattatcgaattttttgtatttcacctccgatttttctttttgccttctttgtttatttcgtttcgagatccttctggcgtagtcgattcagcggcagctcttctttaaaattattattattattattatcattattattattattatt

SEQ ID NO: 13301 - DNA, 1764 bp, Oryza sativa
  Clone ID: PAT_MRT4530_19348C.1
gtgttaacatcaatggggagaggactgacttttttagaacttttagaggacttagacagggtgaccctctctctcccctccttttcaatctagtgagtgatgctctggctgccatgtttgatagtgctaagaagagaggtgtccttagtggtttagtccctaatatcttccctggggatcactcatctccagtatgctgatgacacagtccttttcattgccaatgatatgcatcagattgtaaccacaaaattcatcttatactgctttgaggagatggctggtttaaagattaactttcataaaagtgaggttttctctattgggatgagtgagcttgacactgaaagagttgcccagatgctgaactgtcctgtgggtcattttcctatgaaatacttggggcttcctattagtcctgataagatcctaaatgtgggtttcgacttcctaggccagaaacttgagaagaggttgaccaaatggggaagcaatttatctcatgctggtagagcagtccagattaatgcatgcctctcctccatccccttttatgccatgggtttttatcatcttcctgaggggatccatcagagttttgataaaattagaggtagatactattgggctagtaacaaacttagagggaaataccatatggtcaaattggaagatatggctttcccaaaggattttggagggcttggttttacagaaactaggaagatgaatattgctctcctagcaaaatggataatgaaggtggattcagaggacaagagtctgtgcatagagttgttgaggaaaaaatacttgaccaatgagagtttcttttcctgtaaaattggaaatgtttcccagttctggagaggccttctgaacatcagaggatggatgatgctgggggcagaatggagtattgggaatgggctgagtgtcaaattctggaaagatacctggtttggtaactgcccactgatgacccttttccctgcgatctatagagtttgtaatcaacaagagattttagttagtcaggtgggtcaggggggcccaggctgcctatcctttaggaggtcttttggtcctgaggaattagaggaatggaatgatcttaaagagataattgatcaaattgttctctctgatacacatgacaagctcaattggggtctgaatgcaaacaagaaatacactaccagatcactctacagagcactaactttcagaggcattggggatgtgaatgctaagatgtggggttgcccttgccctatgaaacataaacatttcctttcgttagctcttagagataggatccaatctgctgaacagctaaaaaagaagaattgggaggggtctgaattttgtcagttgtgtggggagttagaaacaactaatcacatcctctttaactgtcccatggctagatttgtctggtgcgtgtgtagagacactttgcgctggaattttataccaagaaactctgatgagtttttcttgatgtgtgatggggctcctgatctttgctctgttagaatcaccctgagtcttttagctgctgtttgttggaatctttggattactaggaataatatgattttcagggacaagttggtgtattccccccttgctatcctttttcaaataacttctaatcttgtgcagtggaagaagctttgtcgtcctggggaggcaactaaactggaaacactagcggaggagatgaagcggatggtggcgactcttagaccttccaggacg

SEQ ID NO: 13302 - DNA, 306 bp, Oryza sativa
  Clone ID: PAT_MRT4530_19349C.1
atggcccgtcgcttcctccacgtcgtcggcggcggcggtgaggaggagatggtggtggcgccgccgcccgaggtcgccgtggcactctgcgcccgaggccgccgccggatccgggcaagacgaggcacgccgctgccggatccgggcgggacgaagccgctaacgccgctgcagcagctcgacgcccccaccttgaccacgccgagccatgccagcccgtgctcgcggttcgatttccaccatccgatccaccgcctccatggtccttcgcatccacgccgtcgctcgttctcgcgcctcccgtga

SEQ ID NO: 13303 - DNA, 405 bp, Oryza sativa
  Clone ID: PAT_MRT4530_1934C.1
atgggaggctgccagcggcagacgggggcaaggcggccagtgaacccagccgagctccgccgccgctaccgcaccgacgcaacacgccactgcagtcacctatcttctccctttcccaccgccccacccggcgtccaccacggttttgcactcttgggttgtggtggcagcggccggcgatgggagaggcggccggccgcgctggcgggagaagggaagaggagggccgagagaggggcggagcggccggcggtggaggaccgaagccggcgcgagctcgcgtcgagaggaatccaagacagagacggcggctggtggcagagccatgagtcggcggcgaaggcagattggctgctaggtgacggggtcggaggagggtggtgccagcggcaaggtggtcaatga

SEQ ID NO: 13304 - DNA, 553 bp, Oryza sativa
  Clone ID: PAT_MRT4530_19350C.1
gtgagttggatggcggggacgggggtgtgggtgttcaagagggacggggtgatgcagctggaggcggacgtggaggggggggacggggaggaggcagaggaggctggtgtacgtgccggcgaacgagacgatggggtcgctgcaggcgctggagcggaggctggcggggctcgggtgggagcgctactacgaggaccgcgccgtggtgcagctccaccgccgcgacggcggcgccgacctcatctccctcccccgcgacttcgcccgcttccgctccacccacatgtacgacgtcgtcctcaagaaccgcgaccacttcaaggtccttgataactagctagctaatttaacatctgtcgtccatgatcactagtatgaattatgatgatcccctccctacccagctgccagctgcgtaccacttctactcatcgatcgggcacgtacgactgatttttagcatatataaagcgtgtgtgtacagtactgtatggctgtattatgcatgcacaagcaaaaaggttaatttgcttgattaaaaaaaaaaaaaaaa

SEQ ID NO: 13305 - DNA, 573 bp, Oryza sativa
  Clone ID: PAT_MRT4530_19351C.1
gaatcttgttaacactagtattgtagaatcacccaattgccacgcattacacccacgccaagatctttgcccctgtttccccttaatttcgctctttcttgcaagtgccacttacctgccaatcacccacctattccacgtatttcccaccaacattaccatgggcaccatggatccgtgtagcagtacatgatgcaaaacgttgggcatggtagctccacagccatgttcatgtcgcagccaatggcgctcctgcagcagcaatgttgcatgcagctacaaggcatgatgcctcagtgccactgtggcaccagttgccagatgatgcagagcatgcaacaagttatttgtgctggactcgggcagcagcagatgatgaagatggcgatcagatgccatacatgtgcaacatggcccctgtcaacttccaactctcttcctgtggttgttgttgatcaacgttggttacatgtactctagtaataaggtgttgcatactatcgtgtgcaacactagaaataagaaccttgaataaaatatcatcattttcagacttgccaaaaaaaaaaaaaa

SEQ ID NO: 13306 - DNA, 366 bp, Oryza sativa
  Clone ID: PAT_MRT4530_19352C.1
atgcccgagctcggctacaaggggcttcgcggctacccggcttcccctatggcgacggcggcagcacggctcttcctccactccctccaacctccagctccggccggggagcctcacaatggcgtggtgacggtgatgcgcgcacatgggcgatggcgcagctccgtgtttcctggagagaatccaggagagcggttagaagtgcggcttggcgtggcacgggccctggcacgacgagggttggggtcggacgcggctgaggggaaggaggcgcggttgcggcgcggcacgggcgtgactggcgcggccggaagcgatgtggtgcacgcggtagacgggatcgaacggttggcggacagtgaatag

SEQ ID NO: 13307 - DNA, 243 bp, Oryza sativa
  Clone ID: PAT_MRT4530_19353C.1
tcttttttttttttgccgttgtgtgcaaacctcaccgttctgtagttttaagtgctgacctgccagatttgccctgcgctcacgtttctgaaagtagttatctttgagccttgtcaaatttttatggagaacctggctaatttgaaacaagggtcatgtttgggaactttttttttcctaaatgctactgcacttaatattttcaaggtcggattaggcgggcttatatgacgttctatcatg

SEQ ID NO: 13308 - DNA, 310 bp, Oryza sativa
  Clone ID: PAT_MRT4530_19354C.1
atgggcgtccacgtcttcaccaaccggctagacatcgccgccgccgactggtgtttccgcctgcacggccggccaattatgccgccattgtcgggtgtctacaccttcaccgccggccgccatcatcaccgtcgattggtttcttcgtcttcacggccagtgtactccaccgccgttgcttatggcaaccatgtcttcactactggctgcagtcatcgccgccgaccggtgtttttattgccattgatggacgattttgttcccacatcagccacctctgccatcaccaagggaaagattacaaagctaa

SEQ ID NO: 13309 - DNA, 461 bp, Oryza sativa
  Clone ID: PAT_MRT4530_19355C.1
tttggtttttttttttttttttgtttttttttttttttttttttttttttttttttttttttttttttttttttttttcaaacaaaaaaccggaaccttatggccaccaaagttaatttatctaccagaaacccccctaggcccagggggaaaattccctttttaaagccccccatacccccaagggaaaggggggaaaacggaaaaattggtcaagcccccccccaaaaataacaggggaaaaacccgggggggggaaaaacgggcctggccaaacccaaaaaaaccccatggccgctggcaacaaaggcgaaattaagggcaaaaaggcttccctgggcccgcacccgaaagaggacaatggccctgggggaaacccaaaccctcgggcccccgccccgggaaaggggcaaactggggaccccgggaagggaccaaaaccccccctagccggggagggg

SEQ ID NO: 13310 - DNA, 612 bp, Oryza sativa
  Clone ID: PAT_MRT4530_19356C.1
attccatcaccctcaacaatattgtctacaccatctaggatcttgtttaacactagtactgtagaatcagcaatggcagcatacaccaccaagatatttgccctgtttgccttaattgctctttctgcaagtgccactactgcaatcaccactatgcagtatttcccagcaacattagccatgggcaccacggatccgtataggcagtacatgatgcaaacgttgggcatgggtagctccacagccatgttcatatcacagccaatggctcccctgcagcagcaatgttgcatgcagctacaaggcatgatgcctcagtgccactgtggcaccagttgccagatgatgcagagcatgcaacaagttatttgtgctggactcgggcagcagcagatgatgaagatggcgatgcagatgccatacatgtgcaacatggcccctgtcaacttccaactctcttcctgtggttgttgttgatcaaacgttggttacatgtactctagtaataaggtgttgcatactatcgtgtgcaaacactagaaataagaaccattgaataaaatatcaatcattttcagacttgtcaaaaaaaaaaaaaaaaaacccgcggcc

SEQ ID NO: 13311 - DNA, 2632 bp, Oryza sativa
  Clone ID: PAT_MRT4530_19357C.1
ccgggctgcaggaattcggcacgagggaacactataacatgggattatattaggagagagacaaatacaatacgtttcaccggagaccagccaagttgagaaagcagtggcaggctgtatcaggagacgccatagccatacagtatttttcttggagcatcattattgctacaaatcatcatgtgatcgcagcaaacaagtacaataccactgaccttacatgcaaggcaagatgcaattgtttctactcaccttcacgtcatagcagaaagcaccaaacaagatcactgaacactctactgtaaccagcagatgtagccgacaggcgaaagagagtgattttcttcaatgggatggcaaactaattcgtgatcctttgccatttcatatcgaccgaataaatgccggtaggtcattcgcgtacgggctccagtgtttgatatgaaactgaacagaggtcatgccactgctaacaaagaaatcttgcacagtgatgacctggggatcattctccgagcatatcacttcaacagtattaaggtgctcgcatgtaaacgatatttccgtaagctcgccaatgattcttcgacttattctcatattactcttttcgagtttcagagttagcttctgtagtctaggtgagttctgaaggaagacaattagggcatagaagtttgaatccaggcaccattgaccaagagtcaggttgacaacattgaggaattccgggcaccattgcaaatggttttcgattgtcaacttcgaaagattcaaatgaatataatcagaaaatatggcaatgctaggatactttccatgcaagtcatgtaacaaaaactttgaaccctgatagttgaactctaaatttgtaataccggaaaggctctggagatactggccgagatcattagcatcaaaacgaaatctaaaactagacattgtaactgatactgatactgatgcagtcactactgatgccgtgtcctttagtataggtgtgaaaccctcgggagtagatatggtcagagaagtaacacttggaagagaaatagatgtcttgttcagcaaggtgaattcaacagtgtccatcggcatgtagaaaaaaacactatcgaaggtcaaaaccttcagtgtatgggaggagatttcgtcatcgtgaacgccgcattgatgtaagaagagatcttccaatgctggacagccagcttcaagttgtgcgaagaaacccttgcataaaacaataccggagaacgcaattcttctcaggtagcaggaagtaaacaccgagtggtccagctcaaataagcagcagaacacgacaacctctaaaacccgggcctgcttctgcaaagcgtggctaatccacccgtaggcatcttcattggaattcgtgtttccttctggtctggtggtgtacctaagccagaaggtgtctatcatggcggtgggatcgcggagctccagcagacggttaacaaaccttttgaacgccagcacgtcatcatagtcctcgtcgtccccttggtaaaagacgagatcaaactcatcgaagtcagcgttgatgcaaggcacggtacgccagaggttgcgccaccgccgcgacagcacacaggttcgcacggcctggcgcgcgtctaggaaggacatgatgtggtggaggacctcctcggggaggtcaccgagccagtccctgccggcgtcgtcctccactgggggcagagcgcgcggtggcatttcgtcgaacagctggtgcgcgtgcggatgggggaagcgcgagacggcgagatggcgaaacgcggcgaagtggagctcgacgcggtgcaggacaggggcagacggcggcgacgtaaggtgctcgacggcgtttctggatgtccagcggctacccggcttcccccatggcgacggcggcagcacggctcttcctccactccgtccaacctccagctccggccggggagcctcacaatggtgatctctagcggtggtctgggcgctagctggaggagagggctccgttttatccattgggcgtggatgggggcgatgggacgcacgtgtctgggtgatgaaggcaggcgtggcgacggcgacgcgcgtacatgggcgatggcgcagctccgtgtttcctggagagaatccaggagagcggttagaggtgcggcttggcgtggcgcgggccctggcacgacgcggcacggaagggacgacgctggcgcgggcgtgggtccggcacgatgcgacgcacggcgcgatacaacgcgatgcggttgcggagcggcaagtgttgtcattttatgtgaccggtcagaccgggcaggtgttgccggtcagaccggcgaggggccgcggcgacgcgcgggtgagggttggagcgacagcaacggcggccgcagcagcaagagtatggcagcggcggccttccgtcgccgacaagcccgatcgatcgcgggtggcgcacggcgacgcgggagggatcgggctcgacatcctagcggcgctcaaggcgcaggaggaggaggaggcgcggaagcccgccatgtccaccgtcgctatcgcggtgttggcgtcgtcctccgccgccacgaccacccgacgccgcacatcagacgctagaaggaggggatag

SEQ ID NO: 13312 - DNA, 559 bp, Oryza sativa
  Clone ID: PAT_MRT4530_19358C.1
atctgttacatagtattgtagaatcacaatgcagcatacaccagcaagatcttgcctgttctatgctctttctgcaagtccatactcaatcaccactatccagtatttcccaccaacattagccatgggcaccatggatccgtgtagcagtacatgatgcaaacgttgggcatgggtagctccacagccatgttcatgtcgcacccaatggcgctcctgcaccagcaatgttgcatgcaagctacaaggcatgatgcctcagtgcccactgtggcaccagttgcccagatgatccagagcatgcaaacaagttatttgtgctggactcggccaccagctagatgatgaagatggccgatgcagatgccatacatgtgcaaacatggcccctgtcaacttccaactctcttcctgtggttgttgttgatcaaacgttggttacatgtactctagtaataaggtgttgcatactatcgtgtgccaaacactagaaataagaacccttgaataaaatatcatcattttcagacttccaaaaaaaaaaaaaaaaaaaaaaaaa

SEQ ID NO: 13313 - DNA, 1042 bp, Oryza sativa
  Clone ID: PAT_MRT4530_19359C.1
cattttcagacttcagagttgtgtacaagtgagaagccatgatcaagctgaggtactccaagaggctgttcaagaggagctgctcctcgtcgaaggcgactgcttgtgtcggtggcggcggcggcggccatggcaatgcggtggccgccggcggcggcggcggcggcgcgggggagatagggtgggaggtgaggccgggagggatgctggtgcagaagagggaggggagaggcggcgaggaggtgatcttggtgagggtgtccactggcttcgcctggcacgacgtgtccattgctgcgacctccacattcggtgagctgaaggtgaggttgtccatggtgacagggctagagcccagggagcagaggctgctgtttaggggcaaggaaagggaggataccgatcacctccacatggttggggtgagggacaaggacaaggtcctcctcctcgaggaccctgcccttaaggacatgaaggtccgggctgccctcgcagcagcccgggtcatgcagagcccgtgccagccttttatccaagtctaagggttagttggccgtgacccctgttctgttaccacgctaactattagagtactattaataagttgtactacaattttagtcgatcgacatctcaatttctggaaggttttattatatccggaataggtggggggttggtgctgttcaccccctcctctctttagtttactgtcagtggtgccactccatggtagggcaaagggtccctcaacatgagagtgtatgagagtgtgtgagttgtttaatgatgggttagttagttgcaagtgtccagccatggtggttgtgatgtgatgtgatgctaagctttggtgctgggctcctatggtccctggtactgtgctctggtctttttcccattcctacataggttatggacaggaaatgggggctaaagacgatgtattttgtgttttcttgaatggaaactgaatgtgtgtgttcgtttcgttaaaaaaaaaaaaaaaaaaaaaaaaaaaaaaaaaaaaaaagggagg

SEQ ID NO: 13314 - DNA, 448 bp, Oryza sativa
  Clone ID: PAT_MRT4530_1935C.1
aaatgaggggtacatgcatctttcgccaacctccttattttggatgaacagtgtccagtcccatataatgtgtgtcggtgatatgggcccgggggtatcagatttagagcgaggaggctgccccacgatgccacgtggtcctccccggaggggagtcaggcccgaggtcaccatgtacggtgggttaaatgtccgcctccaggtgcccacctacccgcatttatggcggctcgagtagtcgcgcaacgccgcatttaatgcggtgtgcaatgcactccaccggtctgtgaccggtcgaatgaccgatgggactagggtagtgcgcctgtgcgctgctcgtgtgtcaggcgacgtgcagcctgacatgtcccatcaaataatgatggtgagaggttctaggaaaaaaaaccttttcgtctctcactgggccgtcaataaggcgtttgta

SEQ ID NO: 13315 - DNA, 155 bp, Oryza sativa
  Clone ID: PAT_MRT4530_19360C.1
cggccacctacgtgacgccaccgctggatccggaccgcgagctggcgcggcagcgtcctgtacattgaccggaagctgctgacaatacttctcctccactgaaaaagaagaagaaacaggatttggaatcttgagataattaaactgcaacggaa

SEQ ID NO: 13316 - DNA, 1460 bp, Oryza sativa
  Clone ID: PAT_MRT4530_19361C.1
gttgtttggtttgttctcgcgcgtttcgcgtgaagtgagggatggagtagaggaggcgacgaatcacacggtgcgctcatgggtgctgggttttgtgtggtgtcgtactcgtgtcatcttctcgtcttgttgttattttatcgcgttgttttgtcgtgtggctggtgctctcgtccagctgttgtgtgttgtggtgcatcgctgtggtgccccctctttacacttatgtgcctgccttattttgtgggattgtgaccggataccatttcaccccagggacagcgatgacctgtgtttccgcccagctgctatatctgctgctctatttgggggggggtgtcccccctcgggttcgtgtgccggtgttttcctggtggtgtgcatccccgcgtctgatgtgggtgtcgtgtggtggtgacacatctgagttgtgggtatgttctcgcctggtggccggcattccccccagccaatgatcctttgcgccctgttgtcccctgtaagttgcctccttttcctgccaagtcccattactgcaatcaccctatccagtatttcccaccaacattacgccatgggcacccatggatccgtgtagcagtacatgatgcaaacgttgggcatgggtagctccacagccatgttcatgtcacagccaatggcgctcctgcagcagcaatgttgcatgcagctacaaggcatgatgcctcagtgccactgtggcaccagttgccagatgatgcagagcatgcaacaagttatttgtgctggactcgggcagcagcagatgatgaagagggcgatgcagatgccatacatgtgcaacatggcccctgtcaacttccaactctcttcctgtggttgttgttgaccaaacgttggttacatgtactctagtaataaggtgttgcatactatcgtgtgcaaacactagaaataagaaccattgaataaaatatcaatcattttcagacttgcaaaaaaaaaaaaaaaaaatgggagaagctagaatcagctgcttctttccagccagtgacgggccatacagccgtcctggtaggccgccaaccctcagcaaatttgattgccacccttatttagcatgtgttcagtggaggtgaaaaattagcatgtgttcagtgaaggtgaaaatggggttcttcactttctggtgatgctcaccaactgaacgacttcagacttcactattttccccttatttcttttttatgtctggattagtaagcagtgctgtaagttgtaactattttcgtatgtttatgctctgaaggcaaagcatgtatcgaagtgcttaaactccttacctggttctttgcctgtttatttatgacccgtttcctacgcctaaactcactcttcttctggtcatggttgctcaagcaacttctaatacgttgattcaaaaaaaaaaaaaaaaaaaaaaaaaaaaaaaaaaaaaa

SEQ ID NO: 13317 - DNA, 105 bp, Oryza sativa
  Clone ID: PAT_MRT4530_19362C.1
atgaggatcttgggagatgccagatgtctttatgggagccaagtagccaaccataccatgtttgattatgacaacctgaaggttggcttcccagaggcggcataa

SEQ ID NO: 13318 - DNA, 406 bp, Oryza sativa
  Clone ID: PAT_MRT4530_19363C.1
aaaaaaccccaaccccacaaagcccgggagggggggcataccctggggattccgacgggttcaggggaattatgggaaattcccgacggctcccctcgggggggggccccccagccccaaggggattcctttactacgggaggaaccaagggggatgaaaacggcccatatggggctgaatcccccggatcgggcccgatttaaaaggccccccacgaaaagcaaaaaaaacgggggcttttgggggacaaaggccccacgtttttggttccctccacccgaaaaatcaccccagggggcttgaaaaaaggaaccaaaagcccgggttttaaaaaaaaaaaggagctgttttaattggtctggggcccccggaaaaaaaaacgcaggcatttcacggccccctgaa

SEQ ID NO: 13319 - DNA, 774 bp, Oryza sativa
  Clone ID: PAT_MRT4530_19364C.1
ccggccgggatcaccctcaacaatattgtctacaccatctaggatcttgtttaacactagtactgtagaatcagcaatggcagcatacaccaccaagatatttgccctgtttgccttaattgctctttctgcaagtgccactactgcaatcaccactatgcagtatttcccagcaacattagccatgggcaccacggatccgtataggcagtacatgatgcaaacgttgggcatgggtagctccacagccatgttcatgtcgcagccaatggcgctcctgcagcagcaatgttgcatgcagctacaaggcatgatgcctcagtgccactgtggcaccagttgccagatgatgcagagcatgcaacaagttatttgtgctggactcgggcagcagcagatgatgaagatggcgatgcagatgccatacatgtgcaacatggcccctgtcaacttccaactctcttcctgtggttgttgttgatcaaacgttggttacatgtactctagtaataaggtgttgcatactatcgtgtgcaaacactagaaataagaaccattgaataaaatatcaatcattttcagacttgcaaatattgggtatttggatttctgtcccatgtccctcttgaaagccatgctgtacatgttggagttcccccttggacccaacctactccatgctcccatgttgatcttaaattccctgttcccccagagcatgtaaattttcttatgctaatcagagcaagctcgatgtctcattaacatatccct

SEQ ID NO: 13320 - DNA, 2190 bp, Oryza sativa
  unsure (1)..(2190): unsure at all n locations
  Clone ID: PAT_MRT4530_19365C.1
ctgctgcccatcgtcttctcccccctcccctcgaaaccaaccaaccttcaacctaaccccgcaagcaaacgccctgaccgactaaccctcgccaccgagcaaactcgagacccaaagccacgcaactttctttgtgttctttgatttgttcttggcaatcgcatcagagatctattgattgattttgaagcagaggaggagcagagaggtagacgaagagctgcaagattctttgcctgttcaatcgaccgtgctttgtgagagcatacgacggcggcggcggcgagggcgcggcgtctcacctgccccgacggcacggcgaccgaggaggggaggccggcgacgagatgggctccttgccgctgaggagtggtagcagcctgcctccaccgtccttctccaagtcgccggcctcgctgctgctgctgtccaagtcgctcaccctctactgctgagagagctcgagctcgagctcgagagctcatgggcggtgtcacctcgtcgtcggcggggggaggcggaggaggggagaccgcgctgggggacctgccggagagctgcgtggcggaggtgctgcgcaggctggacccgccggagatctngccggatggcgcggctcagccgcacgttccgcggcgccgcgtccggcgacggcgtctgggaggccaagctgccgcgcaactacgcgcgcctcctcgccgtcgccgccgacggggaagccgccgcgctggaggcgatccccaagaaggaggtctacgcgcgcctctgccgccggaaccgattggacggcggcaccaaggagttttggctggacaagggtggtggaggtgtctgcatgacaatctcttcaagggcactttcaataactggcattgatgataggagatattggaatttcattccaaatgatgagtcaaggtttcatgcggttgcttatctctcacaaatttggtggtttgaggtcagaggggaggttgaattctgcttcccagaaggtacatatagcctatttttccgtcttcatctaggcaggccactcaagcgactaggacgacgggtttatagctccgagcacatccatggctgggatataaaaccagtgcgcttccagctatcaacttctgatggacagcaagctcagtccaagtgctacttaactgatcctggggtctggatcaatcaccacgtcggcgatttcgtcgtgaagagctctaatgaactagtgaagatccaatttgcaatggttcaaatagattgcacacacacaaaaggtggactctgtgtcgattccgtggctgtaaaaccacaatacctcgcgaagaagaaagcatctcggatatatgtgtaggttcttcgatcaagttcagctgattctcatcgataccgcatagctttgtttttatgcaccacttgtgtgcttgcttttgagttttttacagatcctgtaatatgtagttcatggggtaagtgatttttatttcctcttgtccctctagaagcatgttacacttgtaaattgttaatttagcatacagatagcttttgtggctaaaaaaaaaaaaaaaaatttcattccatcaccctcaacaatattgtctacaccatctaggatcttgtttaacactagtactgtagaatcagcaatggcagcatacaccaccaagatatttgccctgtttgccttaattgctctttctgcaagtgccactactgcaatcaccactatgcagtatttcccagcaacattagccatgggcaccacggatccgtataggcagtacatgatgcaaacgttgggcatgggtagctccacagccatgttcatatcacagccaatggctcccctgcagcagcaatgttgcatgcagctgcaaggcatgatgcctcagtgcaactgtgacaccagttaccagatgatgcagagcatgcaacaagttatttgtgctggactcgggcagcagcagatgatgatgaacatggcgatgcagatgccatacatgtgcaacatggcccctgtcaacttccaactctcttcttgtggttgttgttgatcaaacgttggttacatgtactctagtaataaggtgttgcatactatcgtgtgcaaacactagaaataagaaccattgaataaagtatcaatcaatttcagacttgcaaaaaaaaaaaaaaaaaaaaaaacccgcggcc

SEQ ID NO: 13321 - DNA, 264 bp, Oryza sativa
  unsure (1)..(264): unsure at all n locations
  Clone ID: PAT_MRT4530_19366C.1
cccacgcgtccggtccacttctccagcagcaccgcttcgctcgctgactcgctctcgcgctcgcacacatcgctctcgctcgctctgctgctgccgcgccccgccgctcgcgctccgagcggggagcattgcgtggcgtggcttggatccggcggtctcgatctgatcgaggcggaggcgcgcgctgcgcggcggatggtgtgatcgggggaggcggcgatcgatgcggggaggtacggtgcggcgtggaggtggnngttgggt

SEQ ID NO: 13322 - DNA, 992 bp, Oryza sativa
  Clone ID: PAT_MRT4530_19367C.1
actagtggatcccggggctgccggggccgcgaggagcgttcctcccggcggaagcagcggccaacaccggagcgcagcaagcatgtccggggcggcggcggcggcggcgcgggcgctgcccaaggcggtgaccttcgtgacgggcaacgccaagaagctggaggaagtccgcgccatcctcggctcctccatccccttccagtccctcaagctcgacctccctgaattgcaaggtgagccggaggacatatctaaagagaaagcacgaatggctgcatcccaggtgaatgggcctgtacttgttgaggacacctgcctatgcttcaatgcactcaaaggcttaccagggccctacataaaatggttccttgagaaaactgggcatgaaggtttgaacaatttgttgctagcctatgaagataaatctgcttttgctatgtgcatcttttctcttgctcttggaccaggagaagaaccaatgacattcgttgggaaaacagcaggaaagattgtgcctgctagaggacctgctgattttggatgggacccagtattccaaccagatggttttgatcaaacctacgctgagatgcccaagtcagtgaagaatcaaatatctcacaggggaaaagctcttgctttggtgaaagaacactttgcagctgccaactataaagttcagaacgatggttcagcttgaacttggtgatgatccgactccgttgcgattcttgccacttcaccaagttgtgacaaccaattaaagatgtcaaatacattaaatacgtctcgcctagctatctgcttgtgcaacatgctcggtgcctgaatctgaatgggagaataagtatcttcttcacctatgcaaagtgtagcacaagtatcttcttcacttatgcaacgttaatcaggcagaagaacatgctgcagaagtgcagatgcatcttaatcataatttcatttcccaaattggtcaaaaaaaaaaacccccc

SEQ ID NO: 13323 - DNA, 895 bp, Oryza sativa
  Clone ID: PAT_MRT4530_19368C.1
ccggccgggttaaaatatcaatgatctctttggctgtttacaactgataaaaaaaaaaaaaaaaaaaaaaaaaaaaaaaaaaaaaaaaaaaaaaaaaaaaaaaaaaaaaaaaaaaaaatcatcctcaacaatattgtctacaccatctggaatcttgtttaacactagtattgtagaatcagcaatggcagcatacaccagcaagatctttgccctgtttgccttaattgctctttctgcaagtgccactactgcaatcaccactatgcagtatttcccaccaacattagccatgggcaccatggatccgtgtaggcagtacatgatgcaaacgttgggcatgggtagctccacagccatgttcatgtcgcagccaatggcgctcctgcagcagcaatgttgcatgcagctacaaggcatgatgcctcagtgccactgtggcaccagttgccagatgatgcagagcatgcaacaagttatttgtgctggactcgggcagcagcagatgatgaagatggcgatgcagatgccatacatgtgcaacatggcccctgtcaacttccaactctcttcctgtggttgttgttgatcaaacgttggttacatgtactctagtaataaggtgttgcatactatcgtgtgcaaacactagaaataagaaccattgaataaaatatcaatcattttcagacttgcaaatattgggtatttggatttctgtcccatgtccctcttgaaagccatgctgtacatgttggagttcccccttggaccaacctactccatgctcccatgttgatcttaaattccctgttcccccagagcatgtaaattttcttatgctaatcagagcaagctcgatgtctcattaacataaaaaaaaaaaaaaaaaaaa

SEQ ID NO: 13324 - DNA, 441 bp, Oryza sativa
  Clone ID: PAT_MRT4530_19369C.1
atggcggcggcggcaggatggagtgggggagttagagcggaggggcggcggacagagagggaggggaaaggctcgccggtgcgccgcccgtggaaggttttccctaaaatcgcggaacaaatcaacaaaatggcggtaacaaatcgcaacaaaattgcaacaaaatcgacgccgccgctgcacggcccggaggacgccgccggtggatggggaggagggagaaacggcgcggcgccatcgtcggtgaggagggtggggcaacgccagcgccggcgaggagacgtcgatgctgccagctccctccgtcgacaccgccggcttgaagtcgacgagcagggaaagtgcgagaccgcacggtctcgcgcaagcaaacagcgataccactcaagcaatcaacgctatcgctcaagcaaagatcgataccgtgcctccccgatttaa

SEQ ID NO: 13325 - DNA, 141 bp, Oryza sativa
  Clone ID: PAT_MRT4530_1936C.1
atggagatatcaagacaaaagggaggaggctgccccccaatgccacgtggccctcccccgacgggggtcggacccgaggcacgccacgccgcatttaatgctgcgtggagcgcgcctgaccggtgtatgacgggccagtga

SEQ ID NO: 13326 - DNA, 696 bp, Oryza sativa
  Clone ID: PAT_MRT4530_19370C.1
atgggcgccaatgacggccacctcgacgccaccagcaacaacaggggcggcctgcacgagcagaccaccaccggctgcctccccgtcgaccagtcctgcttcgcgctctcccggctgtcgtaccgccgcagcagcagcagcaacccgcgcgcgtgctgctccaccacctcctacctcgaggtcctcgccatctccttggcctcgctgctcgtcatcgtgctcgtgctctgcgccatacggtgctaccgcatgcggcgcgcggtgaaccgggtcacggtggcagccgcgtcggcggcggcggcggcggcggcggccgggaacgtcaccaacaagaagcggccggcgccgggcctcggcgaggacgccatcgccgcgctgcccaagttcgagtaccgcggcacgggcgacgagtgcgaccggtgggagtgctcgatatgcctctgcgcggtggccgacggcgaggtggccaggcagctgcccaggtgcatgcacctcttccaccggggctgcgtcgacatgtggctcgtcgcgcacaccacctgccccgtgtgccgggcggaggtggtggtcaacaaaccgccggacgaggacgacggcaggtgcgcggagacgccggaggatgaggccgcgccgccggcgtcggcgctggagccggcgagattggagaatggcgagagggacttggaggcgcaatag

SEQ ID NO: 13327 - DNA, 154 bp, Oryza sativa
  Clone ID: PAT_MRT4530_19371C.1
tgggctctttcttgattactagtttagctgcattaagctaagtattactttggttcattcgttgtgtttacgcgagctattttgtttgcaggtttaggggagtaaagggaaatggatgtggagtatattatttaaaagggatagggttttttta

SEQ ID NO: 13328 - DNA, 509 bp, Oryza sativa
  unsure (1)..(509): unsure at all n locations
  Clone ID: PAT_MRT4530_19372C.1
attcccgggagatactggtgggacacggcggggctatcggccgacccggagacgttcgcgaggaacagggaanctggaggtgatccactcgcggtaggcgatgctgggggcgctgggctgcgtcttcccggagatcctgtccaagaacngggtgaanttcggggaagcggtgtggttcaaggccggcgcgcaaatcttctccgagggggggctcgactacctngggaaccccaacctggtgcacgcgcagancatcctctccatctgggcggtccaggtggtgctcatgggattcgtcnagggctaccgcgtcggcggcggcccgctcggcnagggcctccacaangtgtncccangcggcgccttcnaccgctcggcctctccnacnacctgacaccttcccnanctcaangtgaangaactcaacaacggncgcctcccatgttctccatgttcngcttcttcgttcaanccatctcnccggcnagggccccatcnanaacctcttc

SEQ ID NO: 13329 - DNA, 2511 bp, Oryza sativa
  Clone ID: PAT_MRT4530_19373C.1
aaggggactatgtcaatctcaaggtacgttagtcaaatctctcggagaacataggaagtgttcgtgtgtagaaaaaggagcaaacaatacatacgtcgactctttcttttgcacgagaacgcgagtcgcgatcacaactttgctatacaaggggggtattcacagacgtccaaaagcgtacatcaatctcaggggtttccccctctatttgcatgcaacacgtggatcacaagaaacccgaaactttcccctgtacaaccgtagtgctctgccctgaaaacttgatcggcactctcacgtcgccagcttgagactgcatctcagccagtttttttactcgtagcagaatcgacactggtatcggtatggcagaaggattgctcttccgtggacaaacaccatcgttttcagtggaaagttgtgtctggctggccctgatcagattccgccatttgtccttaagatccaccgaggtgcggtacgaatttttttttttttttccttaaaaatggataaccaattcttatagaagataatatttcaggtgcaatccaacagcatggaactgggttgcacagagccaaacgacgcatgataaaacttaagtaccatagtaatctcctttgcccttacagaacagtgaaataggttcaaaactgtagatccagagatacaagaaacattcataaccaaaaggctcctccaccttactcctcggattcagcctcaccactcttcttgttgtgcttcctcgagtacctctggttcctgaggaactttgggtccatccccttggtggaggtctggcggtggcgcttgggcttcttgatgccgttcttgtgcgccttgtacgactggttgtgcgccgtgtggttcttcgacttggccatctccgatctctctctctctctctcactccaccggcgtcgagagaagtcgcgagcacgggaggaggtcggcggcggcgtctagggtttcggccgcggcgggaaaatccttgtcctgcagaccctgaacatccttttcacaagatgtttctacatgtactcctttcttcccagtgttcttctgatggttcttccgttcaccttccttttccaaattcactacatctgcagcaggggcctcagtacattccacagaaggctcaggatccaaaaatggaatgaagttactcctagggcgcccccttctcatccttgaaacataaggcacatgcacactacaccctccaagagtatcttctctagtaggataggctgtgctcaacgaatcaacctcatgcaaaggcgctatccgtggtctcaataacacctcatcatatacatgcctttttccaggtgaagaaagtctcccagtggattcatgagtgtcaatatctgagagctcctcaatgtatctttttgttggctttctaattctcttagtagttccttgttcggcaaaaatagttacttgtggttcatcattatctgttggtactcttttgagtctcttggacgatctctgttgctcctcactatgataggaaagacttgatggtaaatctctctcatgtccaggattcattacttggtccctaaccaaattagcctcaagttccatctttggtattgcttcaaccactggtatttcttgtttggcacccatggcaataactttataatccctaacaacacaacctgaacttggaacatcacatgaattgatcaaccccattgcaatccgtcttttgagccatagcttgtccttgacagtagtttgacgcccaaatgtggctctaaatgcttcctgaagttctctcattgtaagatcatccaagcagacttctccctttaaaatggaaaaatcaggaactgaactagtaaccccagaaacagattgtcctgcagatgcctcatttacaggtttcgagcaggcatcagccttttctttatcagaagaaaggtcatttaatactgttgattttgtagtctcagtcgaagcattgtcctgttgggcaatgatatttgccccttgttctgtatttagtttatccagctgctggtcatgaacagctgaacaatttgaaggaagaactatcgaatcattcaatgtacataacctgtcttcctctaagccagcatctaacttttgtgtctgtacatctgcagtgtctaatttggaaggcccctcttcaaactcaggcttcttcactatgcaatcattagtaaaatattcctccacatgtgttacatcgtcaatagaaggcagatcatcatcaaccttctcatcatgaaggaaagtttcaaactgtaagacctcatcctccgtagcaggaataagtgttccatcaccttcaacccgaactaactggtaaacaacaggatcagaattgtcattcttatcaaagtcattatcatcacttctgttgtccagagcatcttgtggaccacccaccatagtgagatcctcaaaatcccaccaaaaactactgaactggcagacaggggcggatccaacttgggacat

SEQ ID NO: 13330 - DNA, 362 bp, Oryza sativa
  unsure (1)..(362): unsure at all n locations
  Clone ID: PAT_MRT4530_19374C.1
gctcgatgcgtgtcgttctctctggcgaatctccagtctacaaaaagcgtaacctgcgacgtgttcagaacctgcttctcctgctacgcctgtcgactgcgtgcgatcgacgggtgctcaactccatactctttccncttntttnnnnnnnnnnnnnnnnnnnnnnnnnnnnnncnnncccccccnccgtggggggggggggggggggggggggaaacaggaaaaaaataaaaaaaagcgagacctgaaatctaatgggatcgagttagtataatgcggcattgctgggagcggagagtggggggggggggggggggggggggggggggggggggngggcgggggggggggggggggggggg

SEQ ID NO: 13331 - DNA, 469 bp, Oryza sativa
  Clone ID: PAT_MRT4530_19375C.1
tgtttgtgtatcaaaagtaacggggacataactctgtatttttcactttgaacacgatctatgtaaatcaagtttacatgatggagcctctgataccaattgcaccacttgaaactggaaagcccgtgtcttaataacaatccatgatggaggattaaaaatcccttagacacatgtctaaacacccctgatactaggaccagtaggggtccaaccaattgccaagcgtatagctggtctactctttgagtgccaccttggatacaggtgctgcctacgggattcttgatgtatctccaagcctaaaggtatttggggtggacgaggtgacaatggcataaggatcaccatatgagtgttgctaaccatcggctgggtgacttgcacctacttcttgattgccttgtgaaagagctgcattgcgttgtttttgatgagagggaccatgcgggtcggacccaccaagttc

SEQ ID NO: 13332 - DNA, 384 bp, Oryza sativa
  Clone ID: PAT_MRT4530_19376C.1
atgccgccgcttcctctctctcgccctctcgccccgctcggtggggtgtcggatttgacgagcaaggtcagcggcgaggagcagggccagcggatgtggcaaggtggcgaaggcctcagcagccggcgattatctgcattatcttttacactattgtatttggttaattgggttatctatgtgaggccagatgtagtgattggtcttacttgtgatgctaacaagcatgctttcaaaagatctacagtccttgacaatactcctacttcaaagcattcattggatgatcgcagacccttgatcagggtaagaaaaagcaatgtacgaagcaccataaaaggtaaggatgtgctccatgtaaggactttggagttgctggcatag

SEQ ID NO: 13333 - DNA, 342 bp, Oryza sativa
  Clone ID: PAT_MRT4530_19377C.1
atggatcaccaagaactagaagagggagctgagaagatgaagctgttgggcatatggtcgagcccctacgttgtcaaagtgatatgggcactaaggatcaaacacgtggagtatgacatcgaagaagatctgaggaataagggcaacctgcttctggagtgcaaccccgtgcatcagaaggtccctgtgctgatctatcaaggcaaaccatcagacgtcataatcgagttcatcgatgacgtttggaaggactccggccaggggcggatctacagtactcagctgtcacctccgatttggaagtggttcaccacacaaggcaaggagcaggaggacgcatag

SEQ ID NO: 13334 - DNA, 195 bp, Oryza sativa
  Clone ID: PAT_MRT4530_19378C.1
atgactgctttgcagtgctcaggacgacctaccagattgaacctccatgagcaatcatggacacatcagattggcaccgcaaaagataccaagcctgggcctctcgacggcatccatgatggtgtgctcttcgtagcaacagggaatgatcaagtatggagggtgttgcaatgtcgatcgcacatcccacactag

SEQ ID NO: 13335 - DNA, 165 bp, Oryza sativa
  Clone ID: PAT_MRT4530_19379C.1
atggataaccaactcgcgatcgacgacaaggtagtcttcctccttgagtatgaacccgtcgagatcagagatggtgctagatcccttttgccggcctccgttggcatcggatggggggagcttgtatttatacccatagatgtccccttctccaactctaagtag

SEQ ID NO: 13336 - DNA, 318 bp, Oryza sativa
  Clone ID: PAT_MRT4530_1937C.1
agaatggaggcccaacagcccaactcgggagcaaaaaacactagtgactgatcccgatcccgatctggtgtggccaattccgatcaatccccttctctcgttctcatcctccccgccaccagccaccacccgccaaccgccaccgccaagcgccgccaccaaccgtcacccgccagccaccaccgccaagcgctgccgccacgctcccacctaccggcctccgccgccgcatccggccactcctcagtcaccgtccaccgaaggaactcaacgccgccaaccccatggccatcggcgccgccgccgcgggagcaccac

SEQ ID NO: 13337 - DNA, 645 bp, Oryza sativa
  Clone ID: PAT_MRT4530_19380C.1
atggacgcggctcaggcgccacagttggcggcgaggcgggggaggcggggagcggaggtgggaggagggggaacgaggcggggaagggtgggtggggagagaggggccgcgagcggaggaggaggaggggtttgcagcgatggaggcgaccggcggcggcgacggcggcggcggattggaattttcaatgttggggggatatgtgcggcatagacggaccccgtcgtcaaaatcaaatccaatgaatcacagattaaaaaaaaatcggtagcagagaggagggcgccaccggactcccggccactgtcctcacggcctctgcgtgagcttggctagccagccgctgcacccgcccgcctggccgcctgccgcgccagcccgcccgcccgcctgccgcacccagacggctggccaccgccgctcccgccgggcgccgctgctcccgcccggccgtcgctaccgctcgccgggccgccgctcaaagaggggaaggggaggaacgggaggggaaatgggagagggagggatggaggagtaatgagaggggagaagatcgagaggagtgcgcggataatatgtgagttggtggcgcggtgtactttttactcccggttggtataaacaaccgggactaaagatctattt

SEQ ID NO: 13338 - DNA, 366 bp, Oryza sativa
  Clone ID: PAT_MRT4530_19381C.1
atggcacttatgtgcaattacggtcgtgtccatgatggcccatcgattctcagaatcatcgccgcggactggtcggccgatggtttgcaggcgttcccacccaacccaggtctattgagtaggacccttggccatgacgagactcaccagggcctgctcgtccctgaccttctcaccgatctagtcatccacatatcccctctcgggatctggaggctaccgtcatcaccgacccatgttggacgcaatctctgctctgccgtccacacctccaagtcaccgccaacttctcttcgtcacctgagccgactgtgcgactccggtccaccggccatccccatgacaacatctcttgtgctccactag

SEQ ID NO: 13339 - DNA, 374 bp, Oryza sativa
  Clone ID: PAT_MRT4530_19382C.1
atggcggcagctaaaacgaaagtcaaggcagactggtggtttccctttccccggatcccgggtggacaatcgaacggcagcgcgtgcagcctctgggcatcgagacagactcacagacgtcgtcctcgcgtcccgggcatgttggtgaacagacgacgcccagggagggaggggccgggagccgccgaccaccgctcccaccgcccccctccggccagatctaggagggaggggcttggagctacaccgcctcaaccctcctcgccgctgccgccctccgccgccatcgcccgccgttgccaccgccaccaccgccgccgggagcacacgttgccaccgccaccttcggccggcggccgggttgaggaggagag

SEQ ID NO: 13340 - DNA, 408 bp, Oryza sativa
  Clone ID: PAT_MRT4530_19383C.1
gtaaaaaaaaaaaaaaaaaaaaaaaaaaaaaaaaaaaaaaaaaaaaaaaaaaaaaaagaaaaaaaaaaaagaggggggaagaataagaaaacaaagattaaagggccgcccgctttaattgttccatcctatcttacccttcctgccagttgctgccccctttcattgggtggcctaaccttagcctgctgcccgtcttttgcccccctgcttattggcatttctttggctttccctatcgtaatgtggtcgcatccgatcccctttgccaccggtggcgcatcctctaagaggcctggcccgttccccttttcgatcatttgggcgccttgagtgttgagggggccccccccggtgccgatgcattcgccaccgcccttgtggcggttacactcggcgtcacccctt

SEQ ID NO: 13341 - DNA, 515 bp, Oryza sativa
  Clone ID: PAT_MRT4530_19384C.1
tgattaatacatctgtacaagtgaaaccctattaggaatatgttacattccaaactccaaccaagtgaaagagcattaaactgtagagtgctaccctctgccttccaagttaaatcagttagggcacaggtttgttgcaatgacataaggttctcctcccctcattgaaataatgttctaataagtttttcacaacctctgtatcacataaaacacatggggtcaggcatagcatgcccagctagcacaatgtatgtccatcctgaacatctaaatctgactagtgctgctgcaaaattcacctttccccaaagcattggcaaatcacaatgcagtcctaaaatggggtgcagggaggtgttttctaagttaaaatataagtatggggaatctgagggtatctcttatataaacttttttaattaaagtataacatttacacagagaggtacacaaatcacaagtcatattcatcagtaaattttcccaaaacaaaccccagctacttaatcact

SEQ ID NO: 13342 - DNA, 352 bp, Oryza sativa
  Clone ID: PAT_MRT4530_19385C.1
ctcaaataccacttaatttaaaaagggattattgcaacacacataattttcacataggaccattcaaccaccattcctttgggcccaatcgctggcaaaacaggttttccatgatcgtactgaatcaccatacagttatacattacacatgacatttgcgaagggggtcagggggagcattcaccagaacaaccacacaccaagggcttcataatagctttgaaaagaaccaaacaatgggtttaacgacagttttgtcagcagctgcaaatttgaactccagttcaatttcaccaatctaggctaatgctcctcggggggaaaaggttggcgatgtaatctatgatagggc

SEQ ID NO: 13343 - DNA, 2331 bp, Oryza sativa
  Clone ID: PAT_MRT4530_19386C.1
atgaggaagtgcaccggcgtgctgctcatcctgaccctcgccgtcctcctcctcctcctctccccgtcaccctccaccgcgcctccgcccgccgccaccgccgccggcggcccagcggcccgcctcctccccaccctcccgggcctctcccgcctctaccctcccccggccaactccaccgcccaccactcctggcgcctcctccgccccctcctcctccgctccgacgcgctcccgggcaccgccgcgggagtcctcgaggccgccgacgcatggcgcaacctcaccctcgccgtcgcggcatcggcggccggcggcaaggacgggcggcgccagggagacctcgatgtgagctgccggtcgtccgtggaaggggatctgggcggcgtgggcgcccggggcgtcaagatcccgtgcgggctcgcggagggctccgcggtgacggtggtcggggtgcccaagcccggggcggcctggttccgggtggagatggtggggggcggcggcgaggtggtggtctccgtcaatgtgagcttgggagtcgccgagatggtggtggagcagagctcctggacgcgcgaggaggggtggggattgtcggagcggtgtcctccggttggtgatgccgatcgcaatagcagctcactgcttagtctagtggatgggcttgttcgttgcaatcagcaagcgggtgtcagtggccttcaggggaggaacaatacaatggcaaatgttactgcaaacgagcatgaaaatgagaaaaggccaaaaggacgtgcaaattttggtggtagtttttctattattgaaggggagccttttacagcaacattatgggctggtgcagaagggttccatatgacagtaaatggaaggcatgatacgtcatttgcatacagagagaggctggagccatggtctgtagcagaagttaaggtttctggtgatctggagctcctgtcagtcttggctaatggattgccagtttcagaagaggtggacatggctagtgttgagcttatgaaggccccacctctttcaaagaagcgaatttttctgctgattggtgttttctcgactggaaacaacttcaagcgtcggatggctttgaggcgaacatggatgcaatatgaggctgtccgtttaggagaagtagccgtacggttttttactggtcttcataagaatgagcaagttaatatggaaatactgaaagaagctcagatgtatggtgatatccaatttatgccgtttgttgactattataccttgattacactgaagaccattgccatttgcatgtttgggaccaaagttgttcctgcaaagtacatcatgaaaacagatgatgatgcttttgttaggattgatgaagtcatctcaagcctgaagaagagtgaccctcatggacttctgtatggtcttatttctttccagtcttcaccacatagaaacaaggatagcaaatggttcatcagtccaaaggaatggcctgttgaagcatatccaccatgggctcatggccctggatatatagtctcaagggacattgcaaagtttattgttcatggtcatcaagaacgaactcttcagttattcaaacttgaagatgtggcaatgggtatctggatacaacagtacaaaaacagtggccagaaagtaaattatgtgaatgatgaccgcttctatagcgaaggatgtgactccgattatgtgcttgcccactatcagagcccgaggcttatgatgtgtttgtgggagaagcttcaaaaggagtatcagccggaagaaagaaactttctacggtttaacccgtcaaacccgttaaaaccaaaccgtatgaaccgctgcggtgagatccaaaccatcgatttcagtggctcggctgctccagtggtcaactgcatttgtgtccctctgaaacattccttcgaccgcgccagctatattgttcgggcaccatggggtgacatcctccaggtgtggaggagctttgagctcgacgatggcgaggagccccgcacatatgaactcgcggtgttcaagcttgatcttgctacggaggatctagtgcagataaaggatctgcgtggccacgctctgtttgttagcttcttcgtttctgtgaatgaattccccgtgttaactccgaattgcgtctaccttgctcatgatagcaccaagtgtaggagatttaagcatattgcaaaggcggtcagggtgtacaacttacaagatgatactttcgctgatcagtacactcagagttcctggaagaactgcccccctcctgctctttggtttcagcctacatggtcactgaacaaataa

SEQ ID NO: 13344 - DNA, 2244 bp, Oryza sativa
  Clone ID: PAT_MRT4530_19387C.1
atggtagctccaagaaaggccctccaggtcgtcgcactagaaaggccaaacctggaacagtcaaagccaattgatgaagaattgatgaagagactgaaggtcaacttgatcacctggaaaaatacccaatgtctttttgacagacacatgactttgtttgtctattttctatggaggaagaagaagccattccacatcacaagagcggttcctcttgatgctattccaggatttttatacgacgatgaggatgatgatgacgacgacgacgatgagggcgataacaatgttgaattagaggagattcgaccaagttcaactgaatgtgaatcttccatccatccagcagaagagctgaatttactcttgccaaaatctcttccgttgccaagaatatccgctgcagttgaaaggaatggaaaagccagggacaaggaggtgaaagaaggatccaacttgaaagaattgccacaaggatatttgggcaaaatggtggtgtacaagagcggcaagatcaagatgaagttgggggatgtcatgtttgatgtgaacccaggagaagagtgtaggatggcacaacatgtggctgctatcaacaccaaagagaagcattgttgtttacttggcgagatcgagagccggcatgtcgttgtgactccagatgtggactcgctgctgttgaatgacaatagagcatataatgctctacaccaggggatcagattcctagggatgaaaatggtaggaattgatagcatatttgaaacgattaccgtagatttaaaaatggtcaaaatcgatagcatctatcgttggaatgattatcgggcggcacgcattattgcccatgccgcaattcctgcgagagagaatgcatatggacgcgcggagcgaatccgcatcggagatcgagcacagatcgagcaaaaccctagttcgatcccacttgcttctcctgctcgatcgatcatggtggaggatcaggagaagtccagcagcagccctcccgttcctccgccaccggaggaggaggagatggaggagggggagattcatccgggtggtggtggtggtggtgggtactacgattcgggctccgagaccgaggacgacgacgatcggtacgtgttccagtctcgccgcgacgacgaggaggaggaggagggcgtgaacccggcgagcaagcgccgccgcctcgaggacatcctcgcggagacacggggagcgctcccgctgccttcgccgacgccgtcgtcgtccggttcggaggggacgatcagcgacgaccacggcgacgggatcgccggcgccgccgccgccgccgatgcacccgtggcgcgcgtggcgttcccgtgccacgtctgcagcaaggagttcggcagcaggaaggcggtgcacgggcacatgagggtccatcaggcggacaaggacaaggagaaggagccgtcgctgcacctcgccctcggctggacctcgacggggaagcgcggcgccaacggcaacgcccgtgctgtcaccgtcgccttcgcccccatggaacaagcggtgggcgacgacgacggcgacgcccgcgccatcgtgctcgcaccggcggcgcagccgcagccgcagcccatggtggtggcagaagctgccaatcctcctaaccaggtcgccgacgacaaccaccgcctgccagtgccagctgccgtgccgtacgtcggcgccgccgccgcccccgcccgccgccgcgctcggccgaagcgtaacgccggacagggtggaccgtacaggtgcagttacccgggttgcaagggggagtacaggacgcaccaggggctaggcggccacgtggctggccacatcaacagggagaagcaggcggccgccgccgcccagggcggcagcggcgccaggccggagggcaatcacccatgcaaaacgtgcgggaaagagttctcgacgggagtggcgctcggcggccacatgaggaagcactacgaccccaagaagaagaagaagcatgctggccttgtccttaccctctccgtcgcgccgcctacgcctgcacctgctccgtccatcgccggagcggcattgccaccggcggaggtaaaagcggacgtggatgaacatgaagcagagcaagtgccaatggcgccggtgtctccgccagctgaagcgaggggaaatatcgtgcggatttttggcgtggatatagagaagccggcagacgaagaggagcaagaaggtggcagcgatgtc

SEQ ID NO: 13345 - DNA, 492 bp, Oryza sativa
  Clone ID: PAT_MRT4530_19388C.1
aattctaaacaatgccggtggtgattcaacagagggatttttgggaccgcaacatggctttagagtcttcgagatcatcgaagatttctgcatcggcaaactgaaggactgatgatgatagagatgagaggctcaggaatctcccaaatgtgaacccttgcgttccacggatgttccttgaaggaatgaaactgtctcctgcctgtgatgaggactggccccaagctctgtggttctcatttcatctttgacctggcactcttactagtagcagtgtttggaccatatggactatatttatgtgagttcaatctcaatgttttcgtcgatttatctctttgaaaagatatgtttccttagatttatggaactttctcagataagacaacgaaatgtgccaacttttgtatttattgtttctactacaatgacaatgatatgcattttttacttggtccaaaaaaaaaaaaaaaaaaaaaaaaaaaaaaaaaa

SEQ ID NO: 13346 - DNA, 507 bp, Oryza sativa
  Clone ID: PAT_MRT4530_19389C.1
atgagggttccggcgacgaacctcgacggaggaggggtggacgaggtggacctcggccgcgcgaagctaacggcggcgacggcgacttaccccttcgccgaagaacaaagccgatgcagccccgcgccaggtgccaagttccgccggaaccgccaccgccaccgcgagctcaccctctcccgacccgcctgggagggccagactcgcctctggcgtggccggatccgccccgccagccactccggctgccgcatcccactagaaacgcgctgctccacctcgcacgtcgagggtaagctccgccgccggcacgtgttccccgcagccaccttcccggctggccacgtggtttccggcggcggcgaggaggctagagggggaaggaaagtgacggcgcgggtggctaggattccttcctcgagccgcccgcgtgagagtgacgcgagggacctctatcgaacacaagataagcatgcatgcagagacaaatgcatttcgttgtggtga

SEQ ID NO: 13347 - DNA, 217 bp, Oryza sativa
  Clone ID: PAT_MRT4530_1938C.1
tttaatattgaacggtggaacgcggacttacacacaagttaggggcatgagatggcaccatgcatggagagcgcctcgcccacggaacttacactggcactgtttgcgaaaagcggcagcccttgtccgacacttcatgcgcggagggcgtgcgacagaagtcatctaatcgactacagcaacaggggtgggattgacagatttctccgcttggcat

SEQ ID NO: 13348 - DNA, 285 bp, Oryza sativa
  Clone ID: PAT_MRT4530_19390C.1
atggtgcagtgcaggttcaggcaaaatgcaggcgatggagaagaagacacgggtggcagcagcagcagcagcaggaggaggagcaggcgaggtggtggggaggcgatcatggcgatcaagaggaagatgctgcagtgcagcagcgccaaggaacagcacggcgggaagaggttcaagcggagctacttggccggcggcgagcagggcgacgccgccgccgccgccatcttctacctcgcctgcctcgccgcctgtactgatgctttctcacctagctgcctctag

SEQ ID NO: 13349 - DNA, 711 bp, Oryza sativa
  Clone ID: PAT_MRT4530_19391C.1
atggcgatcgagctccccaagttcgacatctgcgtcgccagcatcccatacgggatctcgtcgccactgaccgcgaagctgctgatcggctcccaccggttcagggcgcggttcgcgcggcggctgatgggcacgccggggcacggggagcgcaacctcctcgccaccaacgcgcgcctggtcgccgacgtgcggctgctcatggacgtgagcaggccggagttctcctccctcgtcgagatccgccccaagcagacccggcccaaggagttcgccgccggcgtcgagctccacgagtggctcgcgttcacgcgcgcgtgcaccggacagcacaagctccagcggcagcatcagccgccgcccaagaagaagaagagcaagaagaagaggaagacactcggcgtcctcttcaagctagcccaaggacacgccggcggcggcagtgaagatggcggcgtcgtcgtcgtcggcaacaatgaggatgaccgcgacggcgacgtcggcgtcgcaagtggtttcagcagggaagaggtcgtggcgttcaaggagaggatcgccggagcattgcggtccgccgcgctcgccggcaagacggcgtcgcagctgcccaacgacgagctgctcaggttgcttcggctcttcattcactgggggatacgcttcggtagaggcgtagaaaacatcaaattcttaacgcaaatagggaaataa

SEQ ID NO: 13350 - DNA, 519 bp, Oryza sativa
  Clone ID: PAT_MRT4530_19392C.1
gccaccgaggccaccgccgccgccggcacgatgggctacctggcgccggagtacctcctgacggggcgcgccacggaggccaccgacgtgttcagcttcggcgcgctggtgctggaggtggcgtgcgggcggcggccgatcggggcgacggaggggaggtgcaacaacctggtggagtgggtgtggagcctccatggcgcaggccaggtgctcgacgcggtggacgcgaggctgcgcggcgagtacgacgaggcggagatgcggagggcgatgctggtggggctcgcgtgctcgagcccggagccggcgctgcggccggggatgagggcggtggtgcagatgctgggcggagaggcggacccgccgttcgtgccggcggcgaggccgtcgatgagcttctcggcgaaccaccagctgctgctgagcctgcaggacagcgtgtccgactacaacgcgctgggcctcaacgacctctccgacgactcctcgtcggactcgctcagctcctcctcgctcacc

SEQ ID NO: 13351 - DNA, 338 bp, Oryza sativa
  Clone ID: PAT_MRT4530_19393C.1
gattgatcaaacagaacagctcacaaacagcccaggtttctccttagaaggtagcgaaaacggtacacctctggaatccgatagaaccatggagggggaaacatgtgacatagacattgaaacagcacgtcataatctggaaatcactaattcccttcccagtgaacaaagtactgaacaaggtgaactgcatggcaccaggacagaacttcagtcaaactttagactagagagtaatcctcttaaggcacaatttccttcttgtgatgttttctccaaaaaggggatgactgacttttttagaagcaaaaaggtatatccaaaatctgttttaaacc

SEQ ID NO: 13352 - DNA, 307 bp, Oryza sativa
  Clone ID: PAT_MRT4530_19394C.1
ccaccttccctctctctcttctctgctaaaaaaaaaaaaaaaaaaaaaaaaaaaaaaaaaaaaaaaaaagaggagaaaaaaaaaaaaaaaaaaaaaaggcgcgcagctcgagcgagtcccagatgaggttcacggacaggcggtgccatcggtaggtgctggacagcccgctggacgcgtgccggcttgtgctcgacccggcttttcaccgggcgggcgaggttccagccgatgtttttgtcggccgggcgcgctcggtctgcgggtgccgtgctgccagcagctgcaggacgtgagccccgggtgt

SEQ ID NO: 13353 - DNA, 342 bp, Oryza sativa
  Clone ID: PAT_MRT4530_19395C.1
atggcggtggtggttcgagttggcggtgggatggtggttccggcgatggaatggggaagcggagcagaggccggggtgcagcacggtgaggtgaagccgacggcacaaacggcgcggcacggcggtggctacggcgactgcagcatgcagctggagctcgccgtggcgtgggactccagcgacatgggtgagtggcggctcggcgtagggctggttcccgcggggagagagggggagtggggcgggatgtgggcgcaaggtggagaggactcgggtgggacctacctgtcggcggctcaggggagaggaggtaggaggagacagctgggggaggcaaactag

SEQ ID NO: 13354 - DNA, 375 bp, Oryza sativa
  Clone ID: PAT_MRT4530_19396C.1
atggtcctcaccgtgcgctttgctcggaccaagacgggtcaccgcatccccgtccgtcccacgacgctcctccgatccctctctgtgaaggtctccatcggcgttggcgtctgttcctgcgctccgcctcaagtccaacgcccatgtctcctacaacgagcatgcgctgaggaggatcgaggtgagggggtggaggtggtgaagctgacacagcttctagggctccaggggctcgactcgctaatcattcccgacagtgagagcactgccatggccatgttcgccaactacccaacccgaaatcgaactactggtctggaccctgaagatggtgctccgttatctttcacggatgtactaaacaagttcgtttag

SEQ ID NO: 13355 - DNA, 207 bp, Oryza sativa
  Clone ID: PAT_MRT4530_19397C.1
gcgggtactacggtgaggacactaacggattactcaatacgctgcaccttatgttcttggacacggagaacaacctgtcgagaatactcgatacgggtgctggaatctcccatcctgcagttgtgctagatacatccactgggtacacacctgttcttgcattgatagatggcacatacggacatctactatggctgatcaacacac

SEQ ID NO: 13356 - DNA, 471 bp, Oryza sativa
  Clone ID: PAT_MRT4530_19398C.1
atggcggtggtggttcgagttggcggtgggatggtggttccggcgatggaatggggaagcggagcagaggccggggtgcagcacggtgaggtgaagccgacggcacaaacggcgcggcacggcggtggctacggcgactgcagcatgcagctggagctcgccggctcggggaggggagaacatggccggaatgggcggcaacgggcagtggcgtgggactccagcgacatgggtgagtggcggctcggcgtagggctggttcccgcggggagagagggggagtggggcgggatgtgggcgcaaggtggagaggactcgggtccacgccagttgggacgaggggaagcgcggatcggcgggaggggtgggcggcgtggccggaggttaggaatgagcccgacaggtgggacctacctgtcggcggctcaggggagaggaggtaggaggagacagctgggggaggcaaactag

SEQ ID NO: 13357 - DNA, 693 bp, Oryza sativa
  Clone ID: PAT_MRT4530_19399C.1
ttttttttttttttttttttttttttttttttaacaagcaataagcaaatttcacactctattgcaggaaatacagatttttccaggaaatgctagaatataagcagctacacagatactgttgaaattcatgaaagggccaacaaacagctccttcagtctcatgaacactgacaatagttgccctgatctatgtgatcaaatacaagagttaacacgatcacggcactatttgccacttggttttgatttcgatgagtgactatcctcggaggggcgtgagcgctggagttcctcaactattgccgtgaccgcacgatcgcccctcactaagaggcgctccagcaactctaccttctgcagcagctgctcagcatcaatactcgcacagctcaccagcttatctgcggtcttcagagccgtgcacagcttcagcatcaatgaaggccatgaagggtcattttcttgcagcgctttcatcaaattgtcatagtgctccccgaatagccggttcagctcggatgggtcggcctcctccgcctgctgccccgccgacgacggcgacgacgggacggacacctccccgccggcgaggtcggcgccccgtcgacggcgaggtcgctgaggaggtcgccgatggtgagcagcgggcccccgactccccgcatctcgccgccgcgccccccccccccc

SEQ ID NO: 13358 - DNA, 340 bp, Oryza sativa
  Clone ID: PAT_MRT4530_1939C.1
ttggatcaatcgccgagattattttcccggctagatggaatctgagtggaagaagaaaagtttaggaaattggtcgcgggcgaggaagttgcagctcccgaagtgaagacaaagccggcgactcgtaaagttgattccatcgcgctttttgatagataactcgacgcaacccctacttggcgcgccaactgtcgaaacatgaattcggcaataataaaagggggtagcgcacgagacctaaaagtggatggatgcggagacaaaggatttagacaggttcaggccctctcaatgagaggtgataaacccaaacagcaccttgactatataaaaaagtcag

SEQ ID NO: 13359 - DNA, 572 bp, Oryza sativa
  Clone ID: PAT_MRT4530_193C.1
atggcctcaggacgggagtgctggcacctggttgaggcccacgatatcacaaacgcatcatcaggcgtgctgcaaaaatccctttactctgtcctttactccttcctgaagaaggcggagaagctccggcgaactccggcaactgcagaggagaatctccggcaaggggacgcctacctattcctcctcctcctcctcctctacagttccatctccgcgtccgattgcctcctctcgcggcggatccgtggacagatcgatggtggccacgtcggcggccgtctaccggcgggtgctcaaggcggtgcagaagcacgtcggcggggggactccaagaagcacttccgcgagttcgtcgcctccgagttccgccgccccactggcacggacgccgacgccagagcgcggctgcggctcgccggggattacgcctacctcctcgccagcgtccaccaccacaaggacctgctattctcgtataatatagctgtggaccgatcagaggagatgaagaagatattgaacaaatctgctgccagtgtaggccttcagcttccagatgtctatcaggc

SEQ ID NO: 13360 - DNA, 309 bp, Oryza sativa
  Clone ID: PAT_MRT4530_19400C.1
atgatcgatcctctgaaaagtttgaacaaactagttcagcctttcagcgcctgaaacaaagaaaacaaacacaacgccaccgagagttcgcagctcctcacaccacacactggagaaaacactagcaccaaaccaaccgccgctaagcgggttaaggggaggaagagagcaacagagaaggagatccactcctctctcgcccaacttgatgaagacaaccaagagccgtcggagaccaatcagagagaaggagacgaaggcaaggaaaatgacctagacagcgccttccggaaggtcatggcgtcttag

SEQ ID NO: 13361 - DNA, 478 bp, Oryza sativa
  Clone ID: PAT_MRT4530_19401C.1
ttacaaaaaggctgcgttctccaacaagtactttccctctgcgttgtagttcgtgtgtttgccagtcttggaccatgccattcttccatgaattttttcacttccagcccaataatgtttttggcatctatcgcccttgatcctgaaccaggcctcggcgcagtggcggtgcgcggcgccgagctcgtccttgcagccgcacccgatccggatcacctccgacccgggcccgacgccgccctccgggacgaggtggcagatccggcacgcagcgccggcggggaccgccggatccccctcgacgtcgatgaccaccgcctccaccgagatcggcggcgaggcgacggccgccgtcggaacggcggccgcgtctcgccgcatatgctccgggtcgaacgatcggggcccggtcggtctcggccgtatcaagggccctcacggggggatatactgggtaggaggcgggaaggcgctgtga

SEQ ID NO: 13362 - DNA, 1371 bp, Oryza sativa
  Clone ID: PAT_MRT4530_19402C.1
atggagatagataatggacacacctttcaagcggaggagggcgataggctcagcaatctacctgacgatattttgttggatatcttggcgagactcaacattaaattcctacatgccccagcgttcagtagcataacgactgtgcacatggatcaagctatgtcagctctcaccaaagcagctacgagtttgctatctgtgccacagagagacacctccatcagaaacctatgcctcaaactctacatgatgggcagccactcaagcaatataggatcagtattaagtcaagcaattgaagctgggatagtaaaagaattggaccttgctgttttgcacgagaagagacatatagattgcaatgacgatgatatgcttcatcaagccagagctgtgaaggtctttgctggtgcttttcctcgtgtgatttgttgcatcacaaggctctctctgtacaatgtgcacctcgatggagacattcatcgtattcttttcgattgttgcactcagttggactatctgaatctcgagcattgcgatgatgggagccgcgatgtttggaagataaatgcgccaaattcaaagctccggcatttggagcttgcagtgtgcttctttgggaggctcgatttagtctgcctcccaaaactcgagtacatttactgggaaatttggttcactccttatgcccccttgtcattcggctcagtcccaagccttagggaattacgtctcgcatgtcctgcccaatctgacttccaaggcttgaagttaagcaaagttttacaaggtgtcccgaacttgcatactttgacaatagatttccaaggagaaaagctttgggtgcaacctgaacaaaaacagctctgccctgcattcaacaatctaaagacgttatctattctttgcgttcatgttgaatttgacctgttatgggctttaaacctccttgaagctgcgccatccgttgagctcctttgcattgatacctgggaacatgtatgcttggtggaccaagtggatgaagagggaagaaagcttgtccatggagaaacaacacatccttcatgggagatatccgagttcactggcaccagaaattggcaattgaaagaactccagttcactggctttaggccactcaagcaacaattggtctttttaaaggccatcatggagcaagctcgcaacctgcagactgttattctgaaagaggaagaaccatgcgaggactgtgaggcattaggcacgcctctttcttgtataaaagatcatgacttcccaaagtcgaaggatgagcaagacaatgtagtcgagcagctcagagagaagatttcttcggattcgcaaataattttccagtgtttgtaa

SEQ ID NO: 13363 - DNA, 171 bp, Oryza sativa
  Clone ID: PAT_MRT4530_19403C.1
ggtaaattttaacgcccacggaaactttaattcctttgttcttgcttcataagtccagtttacccatattaattgtttacttactgctctctctctctctcgtctaggaggatggatattattctattaactcatcaccaaatcattgttcctgttggtaaaaaaaaaaaa

SEQ ID NO: 13364 - DNA, 2529 bp, Oryza sativa
  Clone ID: PAT_MRT4530_19404C.1
cccctcttcctcccttccctctttctctccccttttctccctttcgaccggtcgccgccgcacgggctggagcgatgacgggcgggggccagagcggcggcggccggcgggagctgagatcagcaatggaaacgatggcgtgggcggcaccggggagcatggggaaggtgaggacgctgaggaggaaccagttgaggctgagcggcgcgacggcgtcggaggaggaggaggaggccggcctaccgccctggagcgcggcggcggactcgcggaggaagaagcgcgcgacgctacacatggacatatccactgtggcgaacatctccgccagcaacggcaagcacaacgcgtccgccgcccacaccaccgcccccactgccgtcgccatgcccaggctgaccatgctccaccgccttgccccgacgcatatgcacggacgtctcgaaatcctcctccttcgtggtcacctccgtcgtgccgccgccaccgccctcctcctcctgagcggcggcagcttcgtctgcttcgtctctcagtccttcctcttcctcatgttcgatgggcgcgtggacgccgccgagcgccgtcgccggcggcttcttgtcccacatggacttgcccctgtgctccagcccgtgcggcggtggctggtcgaaggggagagaatgggtgagaaagataggagggaacctctctgcaaattgctggtggagcagacaaatgaattggacgggaaagggaacagcgggtacggcgcgcaggggcagcgtcggggcggcggtggcgccgcccccgtggatccgagggggctcacccccgaggagatgatgatgctgcccaccggccccagggagcgctccgccgaggagctcgaccgctcccgagggttccgctcctacggcggagggtttggcgccggcggcggggaccgccgcggcgggttcgacgacgaccgccgcgggcccggtaggtcctcggatctcgacatgccctcccgcgccgacgaggcggacaactgggggacgaataagaggttcacgccggctctcggcgactctggccgccgtgataggttcggcggcccctccccagccggccgctccgatgacatcgatgactggtcgcgcgacaagaagccgatgccatcgcgctacccaagcctcggttctggtggtggtggtggtggcggcttccgtgaatcacctggtttccgcgactcaccaggcccctccgactctgaccgttggtctcgtggtggtagctttgcgccgatgccgcacaacggcgagcgtgagaggccgcggctcaaccttgatccaccgaagcgggatcccttggctactgctacgccaccagctgaggtggcacgcaaccggccaagcccatttggggctgcaaggccccgggaggaggtgctggctgagaaagggttggattggaggaagatggagaccgagattgaacagaaaactagccgccctaccagctcacagtccagccggccgaatagcgcacattcctcccgccctgggagccctggatcacaggtctcagcagttgggagtgaaggggcaccgaggtcacggccaaaggtaaatccgtttggtaatgccaagccacgggaagtggtgctgcaagagaaagggaaagactggaggaagatagaccttgagctggaacatcgtgccgttaataggccagagacgaatgaagaaaggatcttgaaagaagaaataaacctcctcaaggagaaactgaaagaaagtgaggccaataaaactgatggtccggaccaagcttcccctgaggatccagaggatttgtcggagaagataactcagatggaaaagcagcttgagttgcttactattgagttggatgacaaggttcgatttgggcaaagacctggttctggagctggcagggtttcagcagttccaccagctattgcagaggaaccacagattgtggtatccatcgtggataggccacgctctcgtggtggtatggagccatttccgaaaccagctgaggaaagatggggattccaaggtagcagagagaggggctcttttggtggaagcagaagttcagacaggccaatgacaaggcagaggtggtgagatacggcgtttgagcatttgttaaggaaactctgggtcctcgttttttgtttcgaaagaatggggaagaataagtcattttcttctgtgttttgactcccattttgtctgatctagaaagattggagagaagcttgtcaatggaggttactctgcgtgaagctatttattatcgcctcttaagttgtagggtattttggttccctttttgtcatctcccatgccaaaacaagacctggcaaactttgatactaactattgttcctgatcggttcatgtcgcatgtggtctcttaagcattcatggatggagaccttttgtatggatattttgatattttgtacagttgcatgtgttagccatctgttctgttaaaagaagcaccaaaaaaaaaaaaaaaaaaaaa

SEQ ID NO: 13365 - DNA, 2625 bp, Oryza sativa
  Clone ID: PAT_MRT4530_19405C.1
atgcagcagcagcagcgcagccgtgagatggccagggccggcgagccagccgccgcccaccgccaccgcgccgagagggccgccgccggcgagccggccacccgaactcaccggacagagagagccggcgagcctgccgcggccaccaccaccaccaccacccgccggccgccgccgacgacgtcggagaggaaggagagcctggagagcctcctggacgcgacggacgccgcccgtggcggccgtcgcggcggcggcggcgtgaaggcggcggtggccagcaggcaagggctggagttcaagaacctgtcgtacagcgtggtgaagaagcagaagaaggagggggtgaaggtgaagaaggaggtgtacctgctcaacgacatctccggcgaggccccccgcgggcaggtgacggcgatcctcggccccagcggcgccggcaagtccaccttcctcgacgccctcgccggccggatcgccaagggcagcctcgagggctccgtccgcatcgacggccgagctgtcacgacgagctacatgaagcagatttcatcctacgtgatgcaagatgatcagttgttcccgatgctgacggtgctggagacgctcactttcgcagctgaagtgaggctgcccccatcactctccagagctgagaagctcaagcgagtctgggagctcatcgatcagcttggtttgcagacaacggctcacacgtacattggggatgaagggacccgaggagtctccggtggggaacgccggagggtgtcgatcggcatagacatcatccacaaaccttccctcctcttcctcgacgagccgacctccggtctcgactccaccagcgcgcacagcgtggtggagaaggtgaaggacatcgccagaggagggagcattgtgctcatgacgattcaccagccatctttcaggatccagatgcttcttgacaggcttgtcatcctcgcaaggggaaggttgatctacctaggaagcccaagcacactgcaaacacacctggctggatttggcaggccggtgccggatggtgagaacagcattgagtatctcctggatgtcatcaaggagtacgatgaatcaacatcggggcttgagcctctggttgcctaccagagggacggcacgaaacccgacggcgccgcgaaaactccggtgccaagaacaccgagaacgccgcaccagaagtcggtgcagttcaggcagatccaactcaagagcaaccagttctccctcaacagcggcgccgccaatggcaacaccttctccaacttcgagtcgtcgtacaatgtcgatggcggcggcgatgacgacgatgaggattttgataattcgctcgagaggaagttgcagacgccgatgcacgccggcggtccagcttcggggtaccagccgaggctggcgtcacagttctacaaggatttctcggtctgggtctaccatggcgtcaccgggagcacgccgcaccggcggccgacatggacaccggcgagaacgccggtgtcgagcttccagcgtggccgcgccgtgacaatgacgccaacgccgcagaacaacccgcagcggcggcctcctccgcctccgtctccacatgtgccggtgttcaagccggaggagccgacgtaccacgagtacgagcttgacctggagccgccgctggacgcgccggaagaggactacaacggcggccatcgtcccaagttcgccaacccgtggccgcgggaggtggcggtgctgtcgtggcgcacggtgctcaacgtggtgcgcacgccggagctgttcctctctagggaggtggtgctcgcggcgatggcggtcatcctctccaccatgttccgccgcctcggcgccggcgacgtcccgacggtgaaccggctgctcaacttctacatcttcgccgtctgcctcgtcttcttctcctccaacgacgccgtgccaaccttcatccaggagcggttcatcttcatccgggagcggtcgcacaacgcctacagggcgtcgtcctacgtcgtcgcctccctcgtcgtctacctccccttcttcgccgtgcaagggctcaccttcgccgtgatcaccaagctgatgctccggatggagagcagcctgctccacttctgggtcatcctcttcgcctccctcatcaccaccaacgcctacgtcatgctcgtctcggcgctcgtccccagctacatcaccggctacgccgtcgtcatcgcgacgacggcgctcttcttcctcacctgcggcttcttcctcaagcggacgctcatcccggtggggtggaggtggctgcactacgcctccgcgatcaagtacccgttcgaggcgctgctggtgagcgagttcaaggggggccggtgctacgccggcgaccgcgccgacctctcgccggggccgctcggggggttcaagcccagcagcctccggcgggagctcaacgccagcgacgcggcgtgcccgttgatggggcaggacgtgctctccacactggacatcaccattgacagcatctgggttgatgttgccatcctgcttgcatggggtgtcctctatcgcctcctcttctatgttgtcttgaggttctactccaagaatgagaggaagtga

SEQ ID NO: 13366 - DNA, 396 bp, Oryza sativa
  Clone ID: PAT_MRT4530_19406C.1
atggagttcctatgcttcctgaacttagtacacggccgttataggaaacttggcgggttcataaagaatccaaagagagataaactctacgtaaagggacgctggccgtgttacaagcaaccgaacttgtcgaacctatgcggatattacgtgtgcgagatgctcagggtctgtgggagatacagaactgagtttacatatctcccgagcatcccttataacgcaagctggttcgatcagaaaacgcttatcaacttatgcgtggacttatgccggttcattcatcgtgacatctgtaaccatctagaagagttccacgatcctcatagcgaacttgctacagaccccaaattcaagaacctaagggagtgggagagggaacatgctgtggactaa

SEQ ID NO: 13367 - DNA, 822 bp, Oryza sativa
  Clone ID: PAT_MRT4530_19407C.1
atggcgaggcctactgaatcctctgcctccatcgctagcggcggcctcgccgcaccggctcccccaaccaatcctcgcaacgctatccccgctgcgaacccggcggcgaatcccatctccggcgcggctcactccgctccggcgaacgctcctccacccgcgaccgagtgtccagtcccgccgccgccgcctctccccaggtggtccgaggtcgacgaggagaggatcctcgagatcctctgcgaccacctccgccgccacgacgacctgccgcaaggcgtcgacctcctcatggccgtctacggcctcctcactcgtacggactacagcctcgcggagctcgaggggctcgtcaccgtgctccggcggcgtttcgaggagaacgacgcggtgctctgcagcgggagcggcggccctgctccggggcaccagctccggctctacaccctctccctcgaggtgtggggcgccgctccgacggccgtcgcgccgcccaaacccgccgccgcggccacacccaccacggcgcccgccaagaacgcgccggggacaagctatccggcccggcaggcgggccgcccccgccaagcggcggcgccgccggctaagaaggtgcggtacgaggagatgcgcgtgcagtacccgaggctggcggcgaaggtggacgagatggcgaggaaggcactcgagggcgtcagcgacatgacggcgtggtcgctggagctgaggctgcagaaccagcagctcgccggtggcacgccggaggcgcgcaccgatgaccgggcgaaggagctgacaggcttgatctcaaccctgatttga

SEQ ID NO: 13368 - DNA, 486 bp, Oryza sativa
  Clone ID: PAT_MRT4530_19408C.1
atggtgaagggacaaataagcccgattacgattcccattacactgataaccgatcaagcgtgatcaaaaagtgctgaaatgtttacaaggaagactgcaaactatcataatgtaactaaacgatgttcatcaacgtacatgggacttgcataattcacttattattacctactgaccaacacaaaatcattttcttcaaaaacccttacctttttttaacccacaaaaattttccctccaatatatttaaattttttgaacaaacttttccctttttttttaaaaaaaaaaaaaatccctttttttatttttttaaaaaaatgttttttcctctttaataattttatcaaaaaactatttttataaaaaaattaattttttccattgttaaaatcccaccttttttttttaaaagaataaaatactttttctttttaacaacatttattttttcctctttctaaacatataaaattctaccttttt

SEQ ID NO: 13369 - DNA, 4234 bp, Oryza sativa
  Clone ID: PAT_MRT4530_19409C.1
atgccgcgcgccgccgacgccgtcgtccgccacggcctgctccccctgctctgctcccgtctcctcgccatcgagtaccttgatgtcgctgagcagtgcttgcaagcattcgagaagatatcgcagaggcagccgacgccgtgcttgcaggctggcatgatcactgctgtgctcacgtacattgacttcttctctgcaagtatccagagggttgcggtctcagctgctgcgaatgcctgtaagaaggtccccaaagattgctcccaatttgtgatggattctgtgccagtgttgtgtaatctactgcagtctgaggacaagatggtagtggagaaggttgcaagttgcttgataaacatcgtggattcatttagtagttcagtggagcttctcgacatgttctgtcaccagggtgtgatagagaaagtcctgcctctgatcaatactggcgggctaacttctcttagcccatcaacatgcagtaacttgattgggcttctcgccaagctagcctgcaattcacttgtggctgtgaagtctctctttgagctgaatgttggtaacaccataagcagaattctggttacttcagatctctcacatggcatgccttacctgcctttggaaaaccaaagcaaccaggtcaatgaagctttgaaattagcaaaccaacttattccttctgcagcaagagatgttgaagatacccagatggtacttgcaaaagaaaaaataattgtagatgaaccaaggtttttgtgtcagttctctatggagattcttcctgtcttgatcaaggatcatcatgtgctattctcatcactaaagcttatcgaaattctcatgcaaaagcttcctgatgcttaccttggatcctttatcaaggaaggtgttgtctatgcagttgaggctcttcttatgcaagaagattgttcaaagtctactaatctctcagatgaagcacaacaatcagagaatcagcctatcataagaaataagcctacatgtttctgctatgcatttgattatcccagatctgatgctgctgaaacaaggacttgcatgattggaaagggcaacctttttactttcgcaaggcatgtgaagacaacctatttcactaccgaagcagtgaactctgagatgggtttgacagagattttgcaaaagctcaaaacttgctgcgcagttctgaacgattctgctgataagtcattaaaccgagacaatatacaaaatgaagagcacttgactgacattttaagtgaggtgatgatggagcttcatgggggagaaacaatgactacctttgaatttcttgagagtggattgatcaaatccttgtctaactatctctccaatggcaagtacctccaattggagagaatcccaaatgattacaatactgaacattttcttgccgtgctaaaaaggtttcagtcatttactcagatatctttttcaagaatggagcagggctggggtgatatgctcttgacactgttagtaaggaaactgcagaatgctcttacttctcttgacaacttcccagtgataatgagccataatttcaagccgaggaacaatatttcagatatccctactaggcactcaacgattactccatgtatccgagttcgatttaagaaggatgaagatcaaaccaacttgtcgagctatgataatgttgttaatttggagatctcttccttgttgcacactattgaagagttcttgtggcccaaaatttgtacaggcacaagcaatcagaagcctgaatcatcggccaatggtactgcttctgaaaacaaatatcctgaagatgacctccaggaaagatattcctcacccgaatcatcccctccaccagagggtgttataataggaaatcaaagtccatctgtagaaccaggctcaaataaagggccttcgtcatctggtgcaggccaacaagagacaaacacaagtgatcatgctgcgcaaccaaaattgttatttagcttgaaaggaaaagagcttgaccaatctgttactctgtatcaatcaatcctgcaggatcagattaatgcaggttctgacataatattggacaaccagttttggcgcattgtgcatgatgtaacatatagaacggctacaaacccagaaattgatgatcctcttaagtattcatcttgtgcaacaacaccagcacatcccgataaagctggatatatttgtcagacgctccctttcttcactagcctgttgcttggcaaacttccttgcaaacttgacagatcaagtccatcatatgacatattgtttatgctaaaagttctagaggggttgaaccgatactcttttcacctcgtctctgatgagagaaaccgtgcttttgtacatggaagcataactgaccttgatgatctgaaagttgatgtttctgtagttccacagcaggagtttgtcagtgctaaattgacagataaactggagcaacagatgcatgatcccttggttttaaggtctcgttgcctgcctttatggtgcactgaactgatgtctgcatgtcccttcttgttttcttttgaggcaagatggaagtatttccagctgacagcatttggttctttgaccccacaacatgggaatatgatggatacaagtggcagtggtgtaatgacagaaagggtgccttccttctcacggaaaaagttcaaagttgatcgcgacaatatacttgtttctgctgctaaagtgatgcaatcacatgctcggagtaatgcaatgcttgaagtagaatatgaagaggaagtaggcacaggcttgggtcctacgatggaattctatacattgataagtcatgagtttcagaagtctggtttaggcatgtggagaggggagctctccggcgaagctggcctggataatgttcatggtggttctgtatttgtggttgcccctaatggactttttcctaaaccatggtccacccatgtggattgttcttccttctcagaagtgaataaacagttccacctccttggtcaggtcgttgcaaaggcagttaaagacaacagaattctcgacattccattttctaaagcattttacaggcttatactaggacaggaacttaatatatatgacattcactcatttgatcctgaactagcaatgacccttatggagtttaaagcacttgctgctcggagaaaatatttagaatcaagttcaagtggggactgcaagagtacatctgatttgtcttatcgaggttgcaggattgaggatcttgctattgagttcgctcttccaggatatccagaatatgttctttctttagaaaatagcttggataatgtaagtgctgacaatttagaacagtatgtttcttttgttgttgatgcaacaattagaagtggaattgcaagacagctggaagcttttaagtcaggattcaatgaggtatttccattaagcatgctccaggtcttctcagaggatgagctggagcgattactctgcggtgaacaagatacgtgggattttgcgaaacttgtggatcatataaagtttgatcatggctacacttccagcagccctcctgtcattaatttgttggaggttatacaggagtttgaaggccatcaacgcagagctttcttgcaatttataacaggttcacctcgactcccaccgggtgggttagctgcgctaaatccgaagttgacggttgtccgaaagcagcataacagcaacgaggctgatgatgaccttccgagtgtgatgacttgtgctaattatctaaagttacccccctattcttccaaggacaagatgagggagaaactactctacgcgattacggaaggtcaggggtccttccacttatcttgacttgaaactgatagcatctagctgcgcatgccatcacacgcagtagaaatttgtgtgtcttgtaaagtatcacgtacgaaaacatggtgtaaatgtgggtggttcactgcttaacttaccatgacatatgattcgggtggagctgatgttaggaaagggaaaaaactgaggtggcgcatgcccttccttctctgtacatagtggtagttgcctgtaggtgtgctcaagtagtcgcgaacatggcgactctcagcttagctcgctgctgttgatgcaaaccttctcttttggtgtaaatatacgtggctggtgaaaatcttcaatactattactatcaaaaaaacaccaaaac

SEQ ID NO: 13370 - DNA, 1451 bp, Oryza sativa
  Clone ID: PAT_MRT4530_1940C.1
gctgcaggaattcggcacgaggtacacatctgccatatccgttgctctggcagttgtttttgttattattactgcgaggaattgctattgtctgcgtcgtcgtcgcaccatcgccgtcgccttcgtcgtctcctgctgctcccgtcttggcctctctggggcccccctggcgctgcgctccctgttcgtgtctctgctggtgggtgccggcctcatgggtggagccggcgtgtcgttgtcccccgggggtccactcttgttgtttcttctccgctggcatgtctgtcgcgcgtcgttcctctgggttacgccccggcctcttccgttgccccggctggggttgctgttattattactgcaggaattgctattgtcaagttgataaagggacaaattccaatgcctaagttgtttcctgatgttcccgacttggcatctatttgggaacttttcacagcagtgccagttcttgtcactgcttatgtttgccattataatgtccacccaattcataacgagctgaaggacccttctcagattaagccaatagtacacacatcattggttctatgctcaactgtctatatcacaacaagtttctttggatatctcctctttggtgaatctacgctgtctgatgtgctcgccaacttcgactccaatcttggtattccatacagtcagatgctaaatgatgctgttagagtgagctatgctgttcaccttatgcttgtgttccccatgatattccatgcactacggcttaatttggatgggcttctcttttcctcatcaagtcctctgtcttccgacaaccgaagattttctgtaatgacagcggtacttctcctagttattttcctatcagcgaatttcattccgagcatctgggatgccttccaatttactggtgcaactgctgctgtgtgtatcgccttcatttttccagccgcgatcactctaagggatccacacagtatagcaaagaagtgggacaaaatcctgtccatcttcatgattgttcttgcaattgtatcaaacgtagtagctgtgtatagcgatgcatattcaatgttccacaggaaaagttccccttccatagcctgatattccaaaatcctattggcgagtcagtggattctttatctgaaagatggcttgtacattagctagcaaataaaatcattatttaggcaagtatttacgggatttattttacggtttatttggcaaacaacccttgactcaattatgttgagttggatgtatctataggatgggtgtgtaaactttggtccgaagtgttttagtccaatgtacaattcaagatcaatttgaatcaaatgtgaattatggagttattattttaatatgcatcgctatacacagctacttacgttgtgataccaatgtgcaacgaacaatctatgaacgatggccaggattttgtc

SEQ ID NO: 13371 - DNA, 563 bp, Oryza sativa
  Clone ID: PAT_MRT4530_19410C.1
tcggcgctaaccacggctggaacccaaacatcgactactccctctggtccggcaaccagaccttctacgtcggcgacctcatctcgttcaggtaccagaaggggacgcacaacgtgttcgaggtgaaccagacggggtacgacaactgcaccatggccggggtcgccggcaactggacctccggcaaggacttcatcccgctcaacgactcacgccgctactacttcatctgcggcaacggcttctgccaggccggcatgaaggtcgccatcaccgtccacccgctgaagcacaatgccaccggcgacggcgccaagaaccacggcggcgacggagccgcacaggaggccgccgctgccgccatgccgggcgccgccgtgtggatggcagtgctcgccgtggccgccgcagctgtcgccatattgccatgattaattaatctctgcacttgtgcttggaagaactcaagaacattggcacattgtgtgttttgctcgcatttttatcagggacttgattaatgtagcaccaaaatcagatttatattcaagtattaattcagc

SEQ ID NO: 13372 - DNA, 297 bp, Oryza sativa
  Clone ID: PAT_MRT4530_19411C.1
atggcgcatgctgctatcgatggatgcattcttgggaaacaagttgaacctgaatggccggccaatttgagcctcacgtgcccgtacgatccggtgaatcaattccccgtcatagccgtggagctcatgggcaaatccggcgaactcaatcggggagagaagagccagaggttgaaggggagaggtgctgctggatggggcggcttccgtcattgggaagtcatgatggcgctagaggaggatgggggcgcgatgacgctggttgaggaggggtggcggcgcggtgccagcggatga

SEQ ID NO: 13373 - DNA, 234 bp, Oryza sativa
  Clone ID: PAT_MRT4530_19412C.1
atggcacctacggcgatagcggtgacaccgtggatggcgggtggggaggtgatggtggagatggaggaaaagcaaagggcatgtgcggcagagatgcagagagtattagaaggaagcaatgtggagggtgaagagagtagagatgcagctggagacggagagggcgtgtcggtggcaagaggcgcagaggagtttgaggcgaagatgagggcaccgagggaggaggcagagtaa

SEQ ID NO: 13374 - DNA, 600 bp, Oryza sativa
  Clone ID: PAT_MRT4530_19413C.1
atgttgagtgatacaaaaaagagaagaaaaaagattgagcagagactgattgaaattgattcaaaggctgatgaaagggatctatttgaacaggaatggatagaaagatccgaaggatttttgttgctggagcgtgatctagggcagttgaaggtggaggttaggctgcgattttggggaacgtacagggaggagtggaatctggggtgtcgcatcaccgcgtcaagaatggagaatgcttcagttgttaatgctgatgtggagtggcgcgatgagtacggcatagacactgaagattggatgtccctgagcatgcgagccacccaacgaaaatggagagtctgcatagaatcaatcccaagatataaatatcttaagctgaagtatgaaactgctgatggggttcgaatcaaattgttcatgctggagctagaagcatgtttatatgctgaaccacagatgggccttggcaacgaaggtgaagaccatgagctatacgaagatccggatgttgtaagagaagcctttgaaaggcaagctagactgcaacatattgcaagtattattgatttgttcatttgccagctgatttacatctga

SEQ ID NO: 13375 - DNA, 160 bp, Oryza sativa
  unsure (1)..(160): unsure at all n locations
  Clone ID: PAT_MRT4530_19414C.1
agagtatattgaaacactgctcttgagttntgcaagttcataaggtgcacggtcaattcctgattanctgctctaagcatggacacaacaggtatcatcagttcccttggcaaggaatgcttctaaataaaaacacgtgcatacttttcttctccattat

SEQ ID NO: 13376 - DNA, 332 bp, Oryza sativa
  Clone ID: PAT_MRT4530_19415C.1
caccgcgacttgtatcatttgcatggcggaggaggaaatagcgatgctcgcgttcctcctcgccacggcgtacagcggcgtcgtcggcctatgcggtcaaggccaagctggtggagggcagggtcttgtggaacgctcccgacgtgattatgatgtgagggagcacgcgcgccgacaccgtcgggcacctcatcgacctcctcgaccaaaacctctacgggcaggacaagttggacgatcttgccacccgccaattcaaatggttctacgggcgccgagggggcaacctgtacaattttctgaggaggcaaatgcagaaaccctttcaagat

SEQ ID NO: 13377 - DNA, 485 bp, Oryza sativa
  Clone ID: PAT_MRT4530_19416C.1
cggaacgaagataagttctctagctgagcaacgttttgtaacggatctagttcatccctgatcagtacctcacttacggcaagagagaacaagggagggtcatgctaggcgagaagatggaagatttcctaaaggaggtagctgcacagctctccatgtcgtgatgaagattaagctgcataatgggtacttcgttcttggtgatgtctctgtagcaccttcggttgagcatgtccagcgatcgttcatgattcctcccaagcctacagcgccttggaagagaaagtatgtctaatgtcttgatggaaactgtgctagctcgtgcaggattactggtcgttacacactgttgaaacaaagcccagcagttgtaacaagatggcctggtgtaggatcggcgtaacgaataaataccagagagagctttttctggtgatggtatatgccttctatagataaacatgatagacggtagattacagttc

SEQ ID NO: 13378 - DNA, 270 bp, Oryza sativa
  Clone ID: PAT_MRT4530_19417C.1
tcagattctcatcacccaaattgatccaggaagccacgggacggcacggatctttgccccctttcctggacaacctctccccgtcattatccggagaggagcaaagatcccttctttattagctcctctcccttggcttcctctcttctccgtgttcttcttgtccgctttaggggttcgcttttctagattcagtctgtcagcggcgacggcgagggagctgcgagatccggccgtgagatggtggtgatccgaaggagtcatcgtcat

SEQ ID NO: 13379 - DNA, 367 bp, Oryza sativa
  Clone ID: PAT_MRT4530_19418C.1
gacacacaaatggcacttcataccgaacctaataattataacacaacgtgtggagaaactaccaaccggatatgatgaacgttggcggaataacaaacaaatatggtaggggattacatatgcggatgaatcctgtaaacaatcaaataagatcagacaggtgaacttactggccactgggaggacatacctggagataatatcatggaacaagctctaccttgattgacatgacacacgcagattaatcgggaacctgaataatgagactctcgcgtatcttctactgttgagcgctggaagacaacttttatccaagtactcaagtgcgcgttgacacacaatgtaattatgtaccgaagcctgc

SEQ ID NO: 13380 - DNA, 877 bp, Oryza sativa
  Clone ID: PAT_MRT4530_19419C.1
acagaatgctgagatgtacagaaaattataacagaggatatacaaatgaatataaggagaaaataaatcacaagaccaataaatcattattacgcacgtatacacgatcgaacgtaaacaaaataatcaaacaaatttcatcagaaacgctacaaagaatcatgcattgcctccaccctgccaacgtccatgccgctcgacgcgtcaatgcgatctcagaagagggcgagattgaggaggatcccaacggccgccgcgacgacggcgccaccggcgtgcaggtgtgcggacgcgctggctggcgtggagtaaggcccaatccaaggttgcggcctcggggtgtcgctggagttggagacggtgacggcgagcttcatgccgctggcgcaatggttgccgattttgcagatgaagtagtgctcgccggggctgagcgctatgaatgtcacaagcgcgcctccttcgaaatcactgatcggtttgccgctgacggtgcaggcgtcgtagtcgctcttggtcacctctgtcaccgtgtgctgcttcctggcgtatctgaatacaagcgtgtcgttagcctcgaaggttttgcccttcgcccaagcggtgtagtcgacgccggtgttccaaccctgcgcatctccgacaatgaaactcagctccatcgccgaggccacggcggcgcagccgacgaccatgacgaggagcattgcgatcagagccgaaggggacgccatgctcgatcggccgcaaaatctttaggtcgcttctaacaattaagttgatgacagagttgaaaaggggaaattgaaggaagaatcaaagaatgtgtgtttgagacgaatgggcgcgcacgcgtgcgcgtccgcccacgcgtccg

SEQ ID NO: 13381 - DNA, 4011 bp, Oryza sativa
  Clone ID: PAT_MRT4530_1941C.1
atggcgaatgacagggatctcccccgtgtcaggcgggggacggtgttgggtcccacccaaggatgcacaaccaccttgcttccggttgaaggcacccgcctctccctcctcgccggagcgccgtccggtcgcgccgtcgcctcctccagcatcgcagtggcctccccttccccggcttgccctccgtttcccgcggagacccccggagctgcgttcccgccgtcgcccttccctttcctccgcgccggccgcctccagccgcctctgtctccctgcctgagcgccggtcgacgtcgccaccacctccctcggctccgcgacgccaccctcatccccggcatcacctcctcctcgcccgaatttcgccggaacaccgtcgcccgcgccggcctcaccttcctcctcgtcgacgtctcctccggcaacccctttcgccatgcccgtgcgtcagccggcgctgccgtcccctccctcggcacggtgaccggcgtggaacacgccgtcctcgtctccgtgcagccgctgccggctgccctcgtcgcctcctcgctggttccggtcgtcgtcgtcgtcgtcctctcgtcgttcccggtttcgctcgtcgtggcgttcgtccctccgtcaagccgttctcgtccgtcgtctgcgttcgtccagtgtgccgctgcagcccccgtcgtcgtcttcgtcctcggctccgtgtcgtcaagcctcgtgccggccgcgtctcgccttcgtccaaggatcgccgccgaagtcgttccctcgccgtccgtctccgccgcgcccgttcgtcgttgtcgttcccacgcctcatcgcgtggtggtaaggatctctcctctcgctgccccgtcctcgtcctttcggtgtcgccccgtacccgttgtgcggtcgtcgaccccgtgaccatggttgaggtattggagcaagaggtggtggtgcgcacccctactccttccgggagtgacgatgcaagcgggagccgcgatccccgccaccgtcgccagaattctccgactcctctgcgccgcagcccccgacggcaggaggaccccaatcggtctgggggctcggccctctccccgccacctggcggggggaggccacgccgcgccggggtgcggcgccacttgacctacggcgacggtggctcgccccagggcgcacttcaagcagtgggggctcttctatggcaccccctcgttaacccggagcccgagactcccgtccagcgatggttgtacgacgtggccaacctggtcaccgccgctcagcgcacaaaggagagcccgtcggtcagccttgacatcgaggcgatcgacagctccaacgttgtcaaggccctcgggcagccgaaggcacggcgacgacctgtatggggaacaagacgctcggatcaacatcgagcgcagcagggacaagcgccgtgctgcccgcatggggagggcgcctactcgtcaggagtgtcgcgcctctccgcgcgagacgcccgctccccgcgaccattcccggtgggaccgggtgcaaggccttcgtgcatcaacccctccgagttcctccagatctataccacgatcatcatggcagcagggggtgatgaccgggtcatggcgaattactttcccatggcccttaagggcgtgcggcataaccgcatgcttgagaagatcgcctctaaggagccgaagaccaccaccgagcttttcgagctagcggacaaggcggtgggacaagaggaggaacaggaagccggcccactccgacgacgagggctacgtccttgctgcggacgcctcgctgactaccgcacggtaaagaacttggtcgagcggtacagaaagaccgatggggagaggcgacagagtcgccgggagggcaaggcccccgcgacctccgctagcgaccggcgagaggaggccaagaaaaaggcccccgccgatgacgacgacgacagcgataatctggagttccaggtacctcacggaaccgtcgccacgctcgacggaggggcttgtgctcacgcctcccgtcgcagcttcaaggccatgaggcgtaaagttctagccgccgttccaacccgcgaggcggcacggcaggcgcgttggtcggagaacttttacaatgggctcaccccaatgtcccgcgatcacctggacgcggcagctggaggagccttcttctctaaaatggttcaaggagccattgaactcatagagaagatggtctccaatatgggttggagcgaggaacgactccagacccgtcagcgaggcatgcacaccgtcaaggagatggagttacttgctgccaagctggacctcctcatgaaacgcttggacgaccacgagaaacggccacaaggcaccgtcaagcccttggactcacacgtcacgtgtgaggtctgcggcggcacaggtcattctgggaatgactgcccggaaaccctcactgcaaatgaatccgggaggattctggggcaacccgactcctccattgaaaatgttaaggcgatcacgacgaggggagtaatccaaaagatccacatcagcataccattgttggacgctatgcaagtgccaacatacgcccataatctcaaggacatactcaacaacaagagaccgctcccaacaacggaggtggtcaagctgacggaacactgtagcaacctgatactccacaagctcccagaaaagaagaaagatccagggtgtcccacgatcacctgctcgatcagggcacaacaattcgaccaggccttgtgcgaccttggagctagcatcagcgtcatgccaaaattgacgtctttgacaagctcaacttcacggaggaaaagtttgagtttcaaccaaggacggaacaatgctccatcgtcagaatcaaaacttcctagaaaaggaaacaacaatgcccaggaactgttattggaggacgccagtaaaatcacctgcaccggccaagaagtcagagcagtcggctcagaagaagccgtctcccgcaccgaaatcaaagaaggtgtggaggaagaagccaaagatgcccgctccatcacctccggagacggatggaagatccgtgaactgaatcgaaaggaggggtcgggctctccatcaagtcgtcatgacgagtctagcactcgttcatcagctgatgtctcgatggaagacgccgacgctccgcgacaactcctgagcgacgatgaccttgaccttgtcagtgatcgggagagacaagcctactacatgctgagcgactgggagtatgctcacatgcgagaatactcaccggagttgctgaaaaagataagtggaacatacagggagacacgcaacatgacaaggaacgaacaagaaagttcatcatcctcgacacccatgcagatgtatgaggcaggttgggcaccaattggggatgcacctggatggactcaagctccacgccatagcatcggagtctcaacctggtcaagcactagtgaggaccggtggcatgcgcctcatgacatccactgggggaacaaccaaccctccagatcaagtggtgtgcctccagctccaagtgaatggcactcgagttcctctcgttgggacttgggtgaaatcactaggaggatggacacccttgatatgcagacgggggagatccgccgcgccgcgccggggttgtggtcgcagtcgccgcttagcgtcgtcgccgtagggttcgcgcggagtaggagcacctcggccgccccttttcagccgccgaagaccgccggagcgccgtcgctgacgttgacgcgtgccgagccgccgttggagttcgtcgccggccttcgttcgtcgtcgtccgtcgttgtttttcacactgggtgccagactgagaagcggcgagaagtccgtggggtcgctggggactccatgcctctggttatatttatagaggagtggtacacctctggccagagtaaaactattcgaatagccgtgcccgcggtcatgggcgggttgagcaatgtttttcgtgattag

SEQ ID NO: 13382 - DNA, 531 bp, Oryza sativa
  Clone ID: PAT_MRT4530_19420C.1
tcgattctttgattcttccttcaatttccccttttcaactctgtcatcaacttaattgttagaagcgacctaaagattttgcggccgatcgagcatggcgtccccttcggctctgatcgcaatgctcctcgtcatggtcgtcggctgcgccgccgtggcctcggcgatggagctgagtttcattgtcggagatgcgcagggttggaacaccggcgtcgactacaccgcttgggcgaagggcaaaaccttcgaggctaacgacacgcttggtgagtctttctcgataatcaatcacttcattcgcacaatgctgctaaatgctaatgctatccagtttgccaattggcatttgaaatcgaacgctgattttatttggtgtaattaactgttttttgccttttttgtttcttcagtattcagatacgccaggatgcagcacacggtgacagaggtgaccaagagcgactacgacgcctgcaccgtcagcggcaaaccgatcagtgatttcgaaggagcgcgcttgtgacattc

SEQ ID NO: 13383 - DNA, 150 bp, Oryza sativa
  Clone ID: PAT_MRT4530_19421C.1
atgaggatcgtcgcggaaacaaagattatatcaactggcacacttgcatacccaaaggcgagttttggacctgcactagagttaagcagatctcccaggcctcgtgtttttcatcaacacgcaattgggtttggtaaagagtttgcccag

SEQ ID NO: 13384 - DNA, 3193 bp, Oryza sativa
  Clone ID: PAT_MRT4530_19422C.1
atggcgcgccgcgccgcttcccgcgctgttggcgcccttcgctcggacggctcgatccaagggcgaggaggccgcgcggggggcagtggcgccgaggacgcacgccacgtgttcgacgaattgctccggcgtggcaggggcgcctcgatctacggcttgaaccgcgccctcgccgacgtcgcgcgtcacagccccgcggccgccgtgtcccgctacaaccgcatggcccgagctggcgccgacgaggtaactcccgacttgtgcacctacggcattctcatcggttgctgctgccgcgcgggccgcttggacctcggtttcgcggccttgggcaatgtcattaagaagggatttagagtggaagccatcaccttcactcctctgctcaagggcctctgtgccgacaagaggacgagcgacgcaatggacatagtgctccgcagaatgaccgagctcggttgcataccaaatgtcttctcctacaataatcttctcaacgggctgtgtgatgagaacagaagccaagaagctctcgagttgctgcacatgatggctgatgatcgaggaggaggtagcccacctgatgtggtgtcgtataccactgtcatcaatggcttcttcaaagagggggattcagacaaagcttacagtacataccatgaaatgctggaccgggggattttacctgatgttgtgacctacagctctattattgctgcgttatgcaagggtcaagctatggacaagccatggagtcattgcaaagaagggagggttatagaatctgaaaaactctttgacctgatggtacgtattggtgtgaagcctgatatcattacatacagtacactcatcgatggatattgcttggcagttgggttgaaacctaatactgttacttatagcactttgattaatggctactgcaaaattagtaggatggaagacgcgttagttctttttaaggagatggagagcagtggtgttagtcctgatattattacgtataacataattctgcaaggtttatttcaaaccagaagaactgctgctgcaaaagaactctatgtcaggattaccgaaagtggaacgcagattgaacttagcacatacaacataatccttcatggactttgcaaaaacaaactcactgatgatgcacttcagatgtttcagaacctatgtttgatggatttgaagcttgaggctaggactttcaacattatgattgatgcattgcttaaagttggcagaaatgatgaagccaaggatttgtttgttgctttctcgtctaacggtttagtgccgaattattggacgtacaggttgatggctgaaaatattataggacaggggttgctagaagaattggatcaactctttctttcaatggaggacaatggctgtactgttgactctggcatgctaaatttcattgttagggaactgttgcagagaggagtagtggtggtggtgagtggtgaatctgccaccaccccaccaccaactctcaaaattctgacatgtgggatcactgtcaatcccttctccaagacatgtgggatcactgtcaatcccttctccaaaccaattgagaatatagtagtggccaaggtgcagacaggtgcttgcggtcaggttaaagaagttggcaaaaatgcttctgaagaaaggttaattgttgtttcatctcaggagattccagatgatccagtgtctccaacaattgaggcgcttattttgctccatagtaaagcaagtacacttgctgagaaccaccagttgacaacacggcttgttgtaccatcaaacaaagttggttgtattcttggggaaggtggaaaggtaattactgaaatgagaagacggactggggctgaaatccgagtctactcaaaagcagataaacctaagtacctgtcttttgatgaggagcttgtgcagcatatcagccttatcttggttgatcggcatgctggacgagcacatctgttgtcgcatcaactgctgactgctatatatgtgctggtgctgaatcgatcgattgtcgtcgcggaagtgaagaacaaccacggcactgctgcctgctgggctctagccgccatcagttataaccgtacaaacttcagtgatttgctggtttcacattggtttataataaaggcctccgtttttagtttcacgctgggccttcagaatctcaggaccggccctgctcatgatccttacaccgtgtatcctgtagagtacttctctaaaagagagtaccctagtggaagtagcaaagttgcaccatctgcttcatacgaaagatatgcagcaactactcgcttgcctaatggagaactgccctcatctattagtcctggtgccgattatatgtcctgccgttcttatcttgaccaagtacctactgataggtactctaatagggttacactacaattaggcctctcgagagccgggaatagtaatgtgcaacaattaggaatcaccagagctggaaattccaatgcttatgattatactgaggctgctgagcagatccatggacgtgaggattaccgaagactgtcaggtctcactgggtatccaggtggctcttcgaattgtggattccaaatagttaactggagtctgtcattggtgttggtgtgatccatctctggtgcgagagtgaagttgcacgaagcccatcccggttcttccgagtccattgtggagatccagggcattccggatcaagtgaaagccgcacagagccttctgcaaggcttcatcggcgcaagcagcaacagcaggcaggcgccccagtcctctcgcatggcccattatttttagtaagctggaggacattcgcaacaggggggtcactgcacagctgagtttgtttttcagttcaactgcagaaaattgcggatcggttgccatagttgctagaacggtacatagatgccccctaactgtagtgagcggcataactttcatattgtgtttatcgactatctagttgattttagcggcaaaagctgtactgcccaatgttgtctctccttttgttcatggattcagacttgtgacttgattacttgtagtccttcatggatcaggctggagtaaaaaaaaaaaaaagacctgggttttacaggaagctccaaacggtgccagtagtaaaataaaaagggtttgttcc

SEQ ID NO: 13385 - DNA, 720 bp, Oryza sativa
  Clone ID: PAT_MRT4530_19423C.1
atggcgcgccgcgccgcttcccgcgcccttcgctcggagggctcgatccaagggcgagggggccgcgcggggggcggtggcggtggcgccgaggacgcacgccacgtgttcgacgaattgctccggcgtggaaggggcgcctcgatctacggcttgaaccgctccctcgccgacgtcgcgcgtggcagccccgcggccgccgtgtcccgctacaaccgcatggcccgagccggcgccgacgaggtaactcccgacttgtgcacctacggcattctcatcggttgctgctgccgcgcgggccgcttggacctcggtttcgcggccttgggcaatgtcattaagaagggatttagagtggaagccatcaccttcacacctctgctcaagggcctctgtgccgacaagaggacgagcgacgcaatggacatagagattccagatgatccagtgtctccaacaattgaggcgcttattttgctccatagtaaagtaagtacacttgctgagaaccaccagttgacaacacggcttgttgtaccatcaaacaaagttggttgtattcttggggaaggtggaaaggctgcggagcagatccatggacgtgaggattaccgaagactgtcaggtctcactggggacgccgtcggctcccctatcgctggatctggcggaggggagggcaccgcccctgtccgccgcctcccctcccaccggaagtga

SEQ ID NO: 13386 - DNA, 4062 bp, Oryza sativa
  Clone ID: PAT_MRT4530_19424C.1
gttcctcctctccacgactccacccctcccgactccgcctccgccgccgcttccgatccgcggcggcagccggagctcggagagagacaggccacccgccgcccccccccccttgggcggacgcgtgggcctcgttcgccggtgcgacgcgccatcccggtccgcatcgggctcaaaggcaaaggttactgatggatcatgatagatctagaaggcataaatcaaatacttccagaaaaaggccacatttcaattctgatgacggaaagaggaaacggctaaactcaaggcacgatgatggaaccatatcttctgagccaatagaaaccatttacaggatactgtgtccggttaaaaagattggcagtgtcttgggaagaggcggtgatattgttaaggcactaagagacacaactaaagcaaagataagggtcgctgattccattcctggtgcagatgagagagtaattattatctttaactactcaagtcagactgaagaagctgctcaaaatatttctactgatggatttgaggacatgaagcctcattgttttgcccaagatgccctgttgaagatacatgacaaaattgcagcagatgaagatctccatgctggaattgttcatgaaaagtctgaaaatgttgatgatgtaattgctcgaattttggttccaggaaatcaagttggctgtcttctaggaaaaggtggctccattatacaacagctacgaaatgacactggagcagggatccgtgtcttaccatctgaaaatcttcctcagtgtgcacttaaaagtgatgaattggtgcagatatctggatcttcttcccttgtaagaaaagctctctatgaaatatctactcgtctgcatcaacatcctcgtaaagacaatccacctctggaagaaattatagatgcaagcacacaaaggaagcatcaggctccaccacaattaccacatgcaaatccaatgttgccacacctgcatgtggatcactcaccacaaatacccttgcttgatccatatagaaacaggccactgcagtatcattctgctgaagctgaagagttctctattaaaattctgtgtgcttctgaacacattggtcaagttattgggaaaagtggtggcaatgttcggcaagtcgaacagcagacaggtgcttgcgttcaggttaaagaagttggcaaaaatgcttctgaagaaaggttaattgttgtttcatctcaggagattccagatgatccagtgtctccaacaattgaggcgcttattttgctccatagtaaagtaagtacacttgctgagaatcaccacttgacgacacggcttgttgtaccatcaaacaaagttggttgtattattggggaaggtggaaaggtaattactgaaatgagaagacggactggggctgaaatccgagtctactcaaaagcagataaacctaagtacttgtcttttgatgaggagcttgtgcaggttgctgggcttccagctattgcaagaggagccctgacagagattgcttcgaggcttagaactaggacactcagagatggaagttcttccaataatccgacaccttttgccccttttgatggtcctcctgttgatatcttgcctaacagggaattcatgctatatggacgatctgccaatagtcccccatatggagggcctcctaatgatccaccatatggaagacctgccattgatccaccatatggaagacctgccattgatccaccatatggaagaccagccattgatccaccatatagaagacctgccaatgatacatcatatggagggttgaacaatgatgggcctcgtgatccttacactgcgtatcctgtagagtacttctctaaaagagagtaccctagtggaaatagcaaagttacaccatctgcttcatacgacatgtagcatttatccatttttcctagcaacccctgttctataacacttccatttacttgtacatccaatcatctggcactaaaccattagctgagagagaagcaaacaaatccttggcttcatcctttctgccaacttcaagcaacgcaccaatcgtaatgttaaaggtcctagtttcaagctgcaactccaacaaacatagctactgaaacaagcgaagtgcatcatcagtgagattgtttttgcaaagtccttgacggattatgttgcacgtgctaagttcagtctctattcctcttttaacaatcctgacgtagagctctttcgcagcagctattctccctgtctgaaacaaaccatgcagaattgtgttgtacgtgataatatcaggaataacaccattgctcaccatctctatgaaaagaaccaacgcgtcctccatcctactacctttacaatatccattaatcaaactgtggtaagtaacacaattaggttccaccccaactgagaccatgccagggagtaatttcattgcttcatccatcttaccggctaggcaatatccactgatgagtgcattgtatgtaatgacatcaggcttaacaccagtatgtgccatcaagtcaaagagtttttcagattctataactctcccttctttgcaaaaattataaattattctactaaagaaaatggtgtctggacagatgccttgatccaacatttaaaaaattaactcctcagccttctcccatttgtcacaggtacaaaaaccatgaattaggggggtatatacaatgatgtcaggggttagtccttcattgatcatctgctttaaggtaagcactgcatcgtatactctgcctagcttgcagagtacatctatgactgttctgtagttcactgcattcggactcaatccttgctgcctcattttgctgaatacaagcatcgcctcatctactttttcttgtttagcgtatgcacatattagaatgttgaatacatgatgattaggttggataccgttccataccatcaaatccaggagatcatgcatctcaacaagggctcctttggtagcatacccctgaagcagggtacaataggtagtaatatcaggctttaggccacacttggtcatagaattgaaaatctttctagcttccgtgcatcttctgttcttgcaaagataatccatcagcaagttacaagtaacaacatctggttcgacaccatcactgcacatcattttgagaaatccaatagcctctgtcaactgccctgaagagcaatatccgtgcacaatactattatatgtcctgcaattaggcatgacaccattcttaaccatggtgttaagtacctccatggccttgtccatagcttgagccttgcataaggcagcgataatagagctgtaagtcacaacatctggcaaaatcccctggtcaaacatttcatggtatgtagcgtaagctttgtccggatccccctctttgaagaagccattgatgacggtgttgtacaacaccacatcaggtgggcagtcacctccatcatcaggcatcatttggagcagctcgagagcttcttggcttctgttctcatcacacagacccttgagaagaatggtgcaggagaagacatttggtatgcagccgagctgggtcattctgcagagcactatgtccattgcgtcgctcgtcctcttgtcggcacagaggcccttgagcagaggagtgaaggtgatggcttccactctaaatcccttcttaatgacattgcccaaggccgcgaaaccgaggtccaagcggcccgcccggcagcagcaaccgatgagaacgctgtaggtgtacaagttgggagttacctcgtcggcgccggctcgggccatgcggttgtagcgggacacggcggccgcggggctgtgacgcgcgacgtcgtcgagggcgcggttcaagccgtagatcgtggcgcccttgccacgccgaagcaattcgtcgaacacgtggcgtgcgtcctcggcgccattgccccccgcgcggccccctcgcccttggatcgagccctccgagccaacagcgcgggaagcggcgcggcgcgccatgcccgccctagctgacaggtg

SEQ ID NO: 13387 - DNA, 4781 bp, Oryza sativa
  Clone ID: PAT_MRT4530_19425C.1
atggcgagaagaggacgacgatactgtagagcagagggaacagaggagcggggcactggtgctccggtggctgggaggtggcgacgtcggcggccgaatgtgttcccgagcgccgcgctggagagccccgagctgcgacggcatcacgccgactaccggccgtgggcggcgcacatggaggcaaagccggtctacttcgcgtcgaggcgtgcctccgggcggcccgagctgcagcagcagctcgtccggcccaccccaatctgggccgattgggccgatctcagcctcccggagcggagaccgatctgggccgtccatccgcgccgcccagccaatcggacggtgggtgtattactgtactgccaggtcggtgaccctccgccgccggcggcggcggcggcggcggcaggcatggcgcgccgtgtcaccacccttacccgcgcccgcacccgcgcccgcggcggcggcgtccccagcgcgcagggtggtacgacccaagacctagggcgcgcggggggcagtggcaccgagggcgcacgccacgtgctcgacgaattgccgctacggggctggggcgcctcgatctacagcttcaaccgcaccctcaccgacgtcgcgcgtgacagcccagccgcagcagtttcgctcttcaaccgcatggcccgagccggcgccgacgaggtaactcccgacttgtgcacctacagcattctcatcggttgctgctgccgcgcgggccgcttggacctcggtttcgcggccttgggcaatgtcattaagaagggatttagagtggaagccatcaccttcgctcctctgctcaagggcctctgtgccgacaagaggacgagcgacgcaatggacatagtgctccgcagaatgaccgagctcagctgcatgccagatgttttctcctgcaccattcttctcaagggtctgtgtgatgagaacagaagccaagaagctctcgagctgctgcacatgatggctgatgatcgaggaggaggtagcccacctgatgtggtgtcgtataccactgtcatcaatggcttcttcaaagagggggattcagacaaagcttacagtacataccatgaaatgcttgatcggaggatttcaccaaatgttgtgacctacagctctattattgctgcgttatgcaaggctcaagctatggacaaagccatggaggtacttaacaccatggttaagaatggtgtcatgcctgattgcatgacatataatagtattctgcatggatattgctcttcagggcagccaaaagaggctattggaacactcaaaaagatgcgcagtgatggcgtcgaaccaaatgttgttacttatagatcactgatgaattatctttgcaagaatggaagatgcaccgaagctagaaagattttcgattctatgaccaagaggggcctagagcctgatattgctacctatcgtaccctgcttcaggggtatgctaccaaaggagcccttgttgagatgcatgctctcttggatttgatggtacgaaacggtatccaccctaatcattatgttttcagcattctaatatgtgcatacgctaaacaagggaaagtagatcaggcaatgcttgtgttcagcaaaatgaggcagcaaggattgaatccggatacagtgacctatggaacagttataggcatactttgcaagtcaggcagagtagaagatgctatgcgttattttgagcagatgatcgatgaaagactaagccctggcaacattgtttataactccctaattcatagtctctgtatctttgacaaatgggacaaggctaaagagttaattcttgaaatgttggatcgaggcatctgtctggacactattttctttaattcaataattgacagtcattgcaaagaagggagggttatagaatctgaaaaactctttgacctgatggtacgtattggtgtgaagcccgatatcattacgtacagtactctcatcgatggatattgcttggcaggtaagatggatgaagcaacgaagttacttgccagcatggtctcagttggaatgaaacctgattgtgttacatataatactttgattaatggctactgtaaaattagcaggatggaagatgcgttagttctttttagggagatggagagcagtggtgttagtcctgatattattacgtataatataattctgcaaggtttatttcaaaccagaagaactgctgctgcaaaagaactctatgtcgggattaccgaaagtggaacgcagcttgaacttagcacatacaacataatccttcatgggctttgcaaaaacaatctcactgacgaggcacttcgaatgtttcagaacctatgtttgacggatttacagctggagactaggacttttaacattatgattggtgcattgcttaaagttggcagaaatgatgaagccaaggatttgtttgcagctctctcggctaacggtttagtgccagatgttaggacctacagtttaatggcagaaaatcttatagagcaggggttgctagaagaattggatgatctatttctttcaatggaggagaatggctgtactgccaactcccgcatgctaaattccattgttaggaaactgttacagaggggtgatataaccagggctggcacttacctgttcatgattgatgagaagcacttctccctcgaagcatccactgcttccttcttgttagaatcttccccaatcgtctgggagcaaatatcaagaatatcatagttgtattagaggagggatcttctctttatgtgtaaatagcgaggttcaagaaaatcatttgttggattcagaatctggtgtccattttcttcttaaattattaaatcctccagtgaatcttgttgattccaaagcaccatcgataggttccaaacttcttggaatcagtaaagttcaaatgcttaatggatcaaataaggattctgactgcatttcagaggaaatcctttcaaaagttgaagagattctcttaagctgtcaagtgatcaagtcgctcgacaaagatgacaagaaaacaacaaggccagaactgtgtccaaagtggcttgctttgttgacaatggaaaatgcatgcttgtctgctgtttcagtagaggagacttctgacacagtgtccagagttggaggaaattttaaagagacattaagggagatgggaggtcttgatagtatttttgacgttatggtggattttcattcaacattggagaatctcataaaggatacatccacttcagctttggaccgaaatgaaggaacatctttgcaaagtgctgctctcctcttgaaatgtttgaaaatattggaaaatgccatatttctaagcgatgataacaagacccatttgcttaatatgagtagaaaattgaacccgaaacgctccttgctttcttttgttggtgtcattatcaatactattgagttattatcagctctttcaatacttcagaattcttctgttgtttccagctctacatatccgaaatcgtctaaagtctctcaacagagttactctgtggtgatggcggggggcgaccgtggccgaggcgtggagtgccatccgcatcagggtgtatcggccgcgctgctccgccctggtccgcaggctttggcggcgagctggcggcggagggagactgtggtgagatcggatttcgccgctggtggtgtcgctaccatgggggattcgccgcaggcgctctcagatcggttatgcgggagcgcaacaaaagtatggcgtggcggcgcggagtggacggccgaggcgttcgcgcggaatggggctgcgggaccgagccagtctcgcttgccggtaacgcggaaccgagctcagcactacattgcaaagatttgggcaactctgacaatttccatgttctacaagcttgacgtcgagggaatggagaacctgccaccgaatagtagccctgctgtctatgttgcgaaccatcagagtttcttggatatctatacccttctaactctaggaaggtgtttcaagtttataagcaagacaagtatatttatgttcccaattattggatgggcaatgtatctcttaggagtaattcctttgcggcgtatggacagcaggagccagctggactgtcttaaacggtgtgtggatttggtgaaaaaaggagcatctgtatttttctttccagaggggactagaagcaaagatggaaagctaggtgcatttaagagaggtgcattcagtgtggctacaaagaccggtgctcctgtgatacctattactcttctcgggacagggaaactgatgccttctggaatggaaggcatccttaattcaggttcagtaaagctcattattcaccatccaattgaagggaatgatgctgagaaattatgttctgaagcaaggaaggtgatagctgacactcttattctaaacggttatggagtgcactaaagaaagatggtgtttttttttattatatggaacctattcaaaggcacagacaggctttcaaggctaagcttgttacagactgaagagagaagaaatacaagactgtccattgttagtcagatttgtaaaaatagactctgatgtagtttacttttgcccctattttatttttaacaatacaaatatataacagatcctaagaacttatcttaatttaggagaagttgctcgtttcattaaattaaattgtgaagtaaaaatgtgtgctcgagtctgtcaaaaaaaaaaaaaaaaaaaa

SEQ ID NO: 13388 - DNA, 1449 bp, Oryza sativa
  Clone ID: PAT_MRT4530_19426C.1
atggcgattcctggttcgttgttctatcgctcacccgcgcttcaggtcatttatgtcttgtgcgtgcttgcggttcttgtcccagatgcaggtgggcggcggcatcatcagattcagcttcagcctgagtgtcctacgttcacctgtggcgcccatctcaggaacgcgtcgtacccgttccgccggcgaggtgacccgccggagtgcggcgttgcgtcgtacgagctgacttgcaccgatgacaaggctattattcaggtcgacaacggaacgtaccttgtgaggggaatcaactacaccgatgctaccttcagtgtcgtggacgccaacatgttggattcaagtaacagttgccctcttcctcgctggaatcgcactccttaccgaaggtacggggttgtcgaagactcaagccgcaacatcgtccaagagctgatgccatcttattcgaccataaccgctgcttttgtgacttgttcgcgggaagtaacgaacaatgggatgtacagtcctgtcgcttgcctaagcaacagcagctcattcgtttacgtgctaactggctggttcgctaattatatcaagagtctcgagccttcttgtgggtacctggccatgactcctgtggcgagtgcctggctacatccgaatgcaagctatgcggatgtcgtcaaactaatgagaggtggattcgccattcagtttcctgacacaattaatctgtactccagtttcaaagagtgcatggcagagttacttcaagacatccgtgacggtgaccaacccaagtctagtgaacgcaaccagtataggattgagctagtttcgttaattgaatatggtatcttgcaatgtgcaactcaaggctctagaccaactagagctgtgatggctatccaattgttcattcgcagaacaccaattgccgtttggactttgaagtgtattgctgggcatttcagggagaagatcggccaaggaggctatggctctgtatataaaggtgttctactcccaggtgatgtccatgtggctgtcaaggtgctgggaaactacaattgtaatggagaagagttcatcagtgaagtctccaccattggcaggattcaccatgtcaatgtggttcgtttagtagggttttgtgcagaggaagtgaggagggcactggtgtacgagcacatgcctaatggatccctcgacaagttcatcttttcacatgacatgagattctcctgggacaagctcaacgagattgcattgggcattgccagaggaataaactatttgcatcaggggtgtgagatgcagattctacattttgatatcaagccgcacaacatccttcttgacagcaatttcgtcccaaaagttgccgattttggcctcgtcaaactgtacccatgccacgggataatagttttgtgcctgttagcgctgcaaggggaacaatag

SEQ ID NO: 13389 - DNA, 543 bp, Oryza sativa
  Clone ID: PAT_MRT4530_19427C.1
acgggctatgccgcgcccatatgtgtattaagtacggtcgcacgcccacctcggtttttttcggggggcgactagatgctcgccccttgttgcaggggacaggggtaccccccccctcgggggggagatatagatagatatcgggcgtccacgaggggtggaataaaaagaggcgttgttgctccccggttttgcgggagggacgcccggttgtaaaagcgctcccatttataaatggcgcccattaagggcgcttactgtagctagctggtgcatgtatgtggtgtggttactaaaataattagtgttttaccttttgtttggaagcatatgtgtggtgaataaatgatgaactcccgatgttcctctcaaaaagaaagagaaaaaataaaaaggcgcccgccttagcggaccatccgtttcgtttattcccaaacaagctcaacgatatatttataaactaaaagtaatttattttaatatacgtcccttaacgaccccaaaccaaatgctgaaaataaatttcgatgaaaaaaaaaaaaa

SEQ ID NO: 13390 - DNA, 160 bp, Oryza sativa
  Clone ID: PAT_MRT4530_19428C.1
ttgcaggcggcgttgcaagggagatgtgtggatggacatgcttgatgagtgctggcaacctgctcggtggtctggaattgcctatctgtgtgatgcaagtggtgtgatgtggctgtgccacgactgatgagggacaagctgttcgtcgaaagcttgtggc

SEQ ID NO: 13391 - DNA, 1514 bp, Oryza sativa
  unsure (1)..(1514): unsure at all n locations
  Clone ID: PAT_MRT4530_19429C.1
atgcangtgggcggcggcatcatcagattcagcttcagcctgagtgtgctacgttcacctgtggcgcccatctcacgaacccgttctaccccttccgcctgccacgtgacccgcccgagtgcggcgttgcgtcgtacgagctgacttgcaccgatgacaaggctattattcaggtcgacaacggaacgtaccttgtgaggggaatcaactacaccgatgctaccttcagtgtcgtggacgccaacatgttggattcaagtaacagttgccctcttcctcgctggaatcgcactccttaccgaaggtacggggttgtcgaagactcaagccgcaacatcgtccaagagctgatgccatcttattcgaccataaccgctgcttttgtgacttgttcgcgggaagtaacgaacaatgggatgtacagtcctgtcgcttgcctaagcaacagcagctcattcgtttacgtgctaactggctggttcgctaattatatcaagagtctcgagccttcttgtgggtacctggccatgactcctgtggcgagtgcctggctacatccgaatgcaagctatgcggatgtcgtcaaactaatgagaggtggattcgccattcagtttcctgacacaattaatctgtactccagtttcaaagagtgcatggcagagttacttcaagacatccgtgacggtgaccaacccaagtctagtgaacgcaaccagtataggattgagctagtttcgttaattgaatatggtatcttgcaatgtgcaactcaaggctctagaccaactagagctgtgatggctatccaattgttcattcgcagaacaccaattgccgtttggactttgaagtgtattgctgtatcctgcaggttcattttgccgcccttagtagtattgacctttctggtgcacaagtattggaagaggaggatgataatcgatgcagtcgagaagtttctccggatgcaactgatgattggtccgacgaggtatgcctacactgaacagggcattttcagggagaagatcggccaaggaggctatggctctgtatataaaggtgttctactcccaggtgatgtccatgtggctgtcaaggtgctgggaaactacaattgtaatggagaagagttcatcagtgaagtctccaccattggcaggattcaccatgtcaatgtggttcgtttagtagggttttgtgcagaggaagtgaggagggcactggtgtacgagcacatgcctaatggatccctcgacaagttcatcttttcacatgacatgagattctcctgggacaagctcaacgagattgcattgggcattgccagaggaataaactatttgcatcaggggtgtgagatgcagattctacattttgatatcaagccgcacaacatccttcttgacagcaatttcgtcccaaaagttgccgattttggcctcgtcaaactgtacccatgccacgggataatagttttgtgcctgttagcgctgcaaggggaacaatag

SEQ ID NO: 13392 - DNA, 350 bp, Oryza sativa
  Clone ID: PAT_MRT4530_1942C.1
ggggaaaaaaaatttttttttttttttttttccccaaagtttcccatggcaaaaatgaggattttggggctttttttttttttccgaaccccttttttggtaaaaatttttaaaaaaaccccccaagggggggtatgggcctgggggcccccttatccctgggggggaacccctttttaggggggccgttaaaaacccacaagggttgggtttgggcccaatttccatcaaaggggggaacccccccccggggggggtgtaatttttggcctttgggccaaaaaaagttaaattccccaaaaggaaaatgggcgccccccccggcgaggtgttggcaaaattgggttttt

SEQ ID NO: 13393 - DNA, 285 bp, Oryza sativa
  unsure (1)..(285): unsure at all n locations
  Clone ID: PAT_MRT4530_19430C.1
ccgnnccggctcgcgtccttctgacccagggcgaccgcgtctccctctctctctctctctccgccgccgacgccgagggctccacgagagggaggtgggcggcgcggcccttcgccggagggagcgctctccgccgccgccgctcccgctcccgccggcgcgggagatccgggcgncggctgtcggccctttggctgggggggggaacgactggacaggggaaccccactgagctcgtctccgacgaggcgcgcatggacttgaacaccctccgccgcaccttcc

SEQ ID NO: 13394 - DNA, 254 bp, Oryza sativa
  Clone ID: PAT_MRT4530_19431C.1
agtagtcatgattggccacagactatccctgttatgagtaggagcaaggcattgcaatggtagttgttcattacagctcgatgaacactgagatttgcaatggttagatggatgaacactccaaaatacagcggaaggaatttgaataatagcttttcatatataaaatgtgacatgtgagattatggctcgggacagctgccgagataagctgctgattgcgagtgctattaaatttgttgtggcctgtacat

SEQ ID NO: 13395 - DNA, 762 bp, Oryza sativa
  Clone ID: PAT_MRT4530_19432C.1
atggggcagcagcagccgcaggacgccgtggcagcgaacggcaacggcggcggcaagcggccgcacgcggtggtgatcccgtacccgctgcagggccacgtgatcccggcggtgcacctggcgctccggctggcggcgcgggggttcgccgtcaccttcgtcaacaccgagtccgtgcaccgccagatcacctcgagcggtggcggccatggcgtcggcggcggcgacgacatcttcgccggcgcgggcggcggcgcgatgatcaggtacgagctggtgagcgacgggttcccgctggggttcgaccggtcgcggaaccacgaccagtacatggagggcgtcctccacgtgctccccgcgcacgtcgacgagctgctgcgccgcgtcgtcggcgacggggacgccgccgccgccacgtgcctcgtcgccgacaccttcttcgtgtggccggcgacgctcgccaggaagctcggcgtgccgtacgtctcgttctggacggagccggcgatcatcttcagcctctactaccacatggacctgctcaccaagaacggccacttcaactgcaaagccgctccgtcctcctcctccctcccttccccgattcttccacacgcatcaatcctcgatgctgatagtatcccccgtattctttccctcaccggcgatagtatggaagttgatgaggtcatggggtcatcggagtccgaaaagtcagcaagaagggatgcggttacagtggcaaggttgatgttatcgtag

SEQ ID NO: 13396 - DNA, 302 bp, Oryza sativa
  Clone ID: PAT_MRT4530_19433C.1
tgaaaaagtggaaacacaaagatatgtagagaggcaacattccaactcatcatttcatcttcaagtaagcaaacactggtggagaaaccatttttggtcggtccaccagatttcacaatagtcccggttgtattaaaaaccgggactaaaaacatctttagtcctggtttgaaagctctgaggaattttttgatttgttaccaaccgggactaaagatctatttatagtctcggttggtaacactaaccgggaaaaaagatcaatataagctttactcccgattgatgttaccaaccgggac

SEQ ID NO: 13397 - DNA, 546 bp, Oryza sativa
  Clone ID: PAT_MRT4530_19434C.1
cgccattgttacccagagaggcagaccacgcacactgcacttggacacgaagacgagagcggtttccggtctcttccccccaaccaccattccctcctcttcccgtctccggctcgccggagcgcgagagctgctgctgcggcggcgtgggcccgatcaccggccggcctcctgctccgccgccgcggctgcaatggcgcgctagctagatccgacccatccggcgcggtttaatacctcggtgtatctctccggtcaccgccggcggcggcgacggcggaggcggcggttgcgggctcgccggcggcgaagcaagcggtgcagtgttgagagatgagaggggttcaagataggaagcagaagaagaagcaggacctgcaggttctcgggcccttccctggatgcttgggtaggatgataaacatgtttgacctcagcaatggcgtggtcgcgaccaagatgctcacagagaaagcgcatagagatgtttctccagcagggaaagaccgtgggtatgctttcaagatggcaattggtccattctca

SEQ ID NO: 13398 - DNA, 818 bp, Oryza sativa
  Clone ID: PAT_MRT4530_19436C.1
atggatctgctgcggtgccggctgtggagggagggagcaccggcgacggtggcaggccgtggagggagcggcgggactcggctgctgctgcgcgtggcggcggaactcggctactgctgctgcgcgtggcggcggtgggaggcggccgtggctgctactgagcgcggcggcgacgggactcgactgctgctgctgtgcatggtggcggtgggaggtggcttctgctgtggcacatggtggcagcgggatgtcggcggttgctgcttaaccgattgtgggggtctttgccactgtgtcgacccagatgcgaacgcgattctcgtcgaactcttgagtgacgatggtgcctaccggaaccacctcaatcttgagatctggacgacggagtggccggagctagttggcctcaccatcgagcaggccaaggcgaaaatcaaggctgaccgtccagacctccaagttgaggtgctcccagtaggaaccatcatcctgggagtggtcgtcccgaaccgtgtcatcctctgggtcgacactgtggccgagattcccaagattggctaattagttttaagctgtgtctagctataagtgtaatgatacaataatgaaaggtccttgctttttatatatatctgatgcatgttgtaatgtgataaataaagaaggtataaataaagaagatagtatgtgcatgtacgtatgacagtttcatggccaacatgcgcacatgtgagattgtaatttgtaagatatattttcatgaatctctcacgatcatttgcatttagcattgtcatttcagccataaaaaaaaaaaa

SEQ ID NO: 13399 - DNA, 999 bp, Oryza sativa
  Clone ID: PAT_MRT4530_19437C.1
atgcgagctggcgcttggctgccaaccacgggcgacatgaaaacgacgaacgacggggatgcgctcggtggtggaggcggtggatcgagcggtggaagtcgaatcactagggcaggagcagctgcacggcgtggtgaaagtggggacgtggctgagggctctgcctccatcctttggacgcatgcgcacaggagtaggggcgggaggatgacgccggcggtgatagcgtggatggtgcggcgtggagcggcgacaagcaggcagcccagtgctgacggcagcggcgaccgggcggacggtcggtcatcgcgcgcgcgcgtgaaaatcgaacgacgcggccggattttgggtggcgtctggtcacgcgcgacgcacgtgggagaggagatgcaggccaggccatggccggattcggcccaagcgaatatgagggagcttggagatgcggcgacgatgctcgaagtagacgaagaagaccctgagcggctgacgatgaccagtgcggatgacgagggtgtcgaagcgcgaacggcgatgaagacgacgaggggcaacatcgtgacccataggggcaacacagtcaagcaagttcacagaagagaaaaaaaacaggacagggtgtcacgtgtcaggcccggcggtgctgacagccgacgtcaggagagggcgcaggtggtggagacgaaaggcggcggagtcggagggcgtggcgggccctggcgcgccgatggcgtccgtgtgtcgacggtgaagacggcacggcagagggagcccggcgacgccggctgtggacctcggcgcggtgaagagacggaggatgagccggcgaaccggctgagtggatctggaggtggtggaggctggcgacggctcgggatccggcggtcggcatggaccgagcggctcgggatccggccgtcggggccgcgccggcggaactcgggcgacggggctggagcagagacggacgccgtggcttccaagatcaccagatcgacg

SEQ ID NO: 13400 - DNA, 1029 bp, Oryza sativa
  Clone ID: PAT_MRT4530_19438C.1
cgtcgatctggtgatcttggaagccacggcgtccgtctctgctccagccccgtcgcccgagttccgccggcgcggccccgacggccggatcccgagccgctcggtccatgccgaccgccggatcccgagccgtcgccagcctccaccacctccagatccactcagccggttcgccggctcatcctccgtctcttcaccgcgccgaggtccacagccggcgtcgccgggctccctctgccgtgccgtcttcaccgtcgacacacggacgccatcggcgcgccagggcccgccacgccctccgactccgccgcctttcgtctccaccacctgcgccctctcctgacgtcggctgtcagcaccgccgggcctgacacgtgacaccctgtcctgttttttttctcttctgtgaacttgcttgactgtgtcgcccctatgggtcacgatgttgcccctcgtcgtcttcatcgccgttcgcgcttcgacaccctcgtcatccgcactggtcatcgtcagccgctcagggtcttcttcgtctacttcgagcatcgtcgccgcatctccaagctccctcatattcgcttgggccgaatccggccatggcctggcctgcatctcctctcccacgtgcgtcgcgcgtgaccactctctctctctctctcgccgcttcctgccgacgccacccaaaatccggccgcgtcgttcgattttcacgcgcgcgcgcgatgaccgaccgtccgcccggtcgccgctgccgtcagcactgggctgcctgcttgtcgccgctccacgccgcaccatccacgctatcaccgccggcgtcatcctcccgcccctactcctgtgcgcatgcgtccaaaggatggaggcagagccctcagccacgtccccactttcaccacgccgtgcagctgctcctgccctagtgattcgacttccaccgctcgatccaccgccttcaccaccgagcgcatccccgtcgttcgtcgttttcatgtcgcccgtggttggcagccaagcgccagctcgcat

SEQ ID NO: 13401 - DNA, 373 bp, Oryza sativa
  Clone ID: PAT_MRT4530_19439C.1
ggggaaaagaggggcccaaatatcaaatcttcagcggggatgggaaccctttcacaatcgactggggcaacaaaagcttcttccccaatgcccgtaaaagaaacccggtttaggcccttttttttccccctggcatttgcaaaggttctatcaacaaaaggggttaagcctaaaaaaaggggaaaaaaaaccatcccatttctgcagcatgggaagttttgcactatcacccccccgagggcaaagccaacttgggtttggcagccgtcccttaaacagggggggggtttatcggcaattcagctctcaaatgcaacacccccccaaggaaaaaaagggtgtctccagccatgaacccccaccctgggatcgc

SEQ ID NO: 13402 - DNA, 4782 bp, Oryza sativa
  Clone ID: PAT_MRT4530_1943C.1
atggccaggcgtcggggagcagcagccgttggcggcgccctgaccagcggcgagctggaggccatggcggtagagagtagcgggcaaggggcctggttggctgctgttgctgtccttgaatctatcaaaatttcattgatgattggaatctggaaaaattcgaaacgtgcaataacaaggatgccgcgcttcaagcctgagtacttgtttggtgttgagggatttgtccaagagttgcgtacaatgtcctttgtcattggatttgggactgcccctttttatgcccagatttctcatgatcgtcatgaagagaagtgccgagtcaaagtcaccttgaacagtaatagtgaagatatcccctcagtgatgttcgaagctggaggaagaaactacatccatgcatgtcaggaggtggcaaggatcgccataggagagctccgcgatcgctatagtgatcagttggccgacacggagtatcgctatcatcctcgtcaaccccagggaagtgaccgtggcagctaccttgagactgaaggaattgagaatgatgctaccacaaggcatttggttgagatgctgtgggctatggatgaaacccgtgcggagactgtgttagcggctcaagatcgtgaagaccggaatcgtggtaagatttacaagctagaagacaaggtggatcgtttggagaaggagctagctacgttgaagggagaagcaccgccgcagaaggccaggattcgtctcaccgcaaggaagagagctctatttgtcccttgctatcaattggcgccaaaggttcgtgtggtggagaaagaagttgccccaaccctagcagatccttcggtcatcatcataagtgacgatgaaaaagaagaatccaagcgcaaccattccaagattgagtgggtagcaactcaagatgatgaagacgagccgaacgagccttcaatcgacctccgatgctcggaagaactagagtgccataaccagcaaaaccaaggaaataaccatgcacctccccaaaacaagttagcagaatttcttcgtgtgaggccgcctattttctctagtaccactaatcctgttgaagctggtgattggctgcataccatagagaagaagttggatttgcttcagtgcactgatcaggagaaggtctcatttgcatcacaccagttacatggccctgcctctgaatggtgggatcacttccgcctgaataggactactgctgaacctatcacttggcttgaattcaccgctgctttccggaagacgcatataccatcgggagtggtgtctctcaagaagaaggagttcaggtcgctcacccagggatctcgctctgttacggagtatttgcacgagttcaatcgtctggctcgttatgctccggaagatgtgcgcaatgatgaagagcgtcaggagaagttcttggaaggacttaatgatgagctttcttacccactcatgactggagattatcatgatttccagaagttagtggataaggctattcgtcaggaagacaagtacaatcgcatggagcagaagaaacgccggattgctcaattcaagacacaacaggggaataatcagaagccgcgtcttactttaggaccccagaccatgccacatggaggttcttcgtctgttgttcgtccgcagcgtcagttcttcaacaacaatgctggcaataacaaccgcaatcaagctccacgtcctgttgcagctccaacacagcaacagcctgccaagagggagcaaggcagcaagcccgtggtgtgtttcaactgtggagacccggggcattatgctgacaagtgtccgaagccccgacgcgtgaaggttgtccctgcccagagcaactctaccgtaccagcatcaaaggcccgtgtcaatcatgttgctgctgcggaagctcaagatgctccagatgtgattttgggtacgtttcttgttaacttagttcctgcagcagtgcttttcgattctggtgctacacattcattcttatctatgagttttgcgggaaatcatgggatggaagtagaagatcttagacgtcctttgatggttagtaccccaagtaatcaagcactctctttgcaacgtagcccctctgtcagaatagaaattaaaggagtattatttctggccaatcttatcctgttagaatccaaagaccttgatgtcatcctagggatggactggttagccagacataaaggtgtgatagactgtgccaacagaaaagtaactctcaccagtcatgatggtcgagttgtgattgttcatgcattgtcttctgagtctttaaggtcaagactgaaccagataactttggaagagattcctatagtccgggagtatcccgatgtgttcccagatgatttacctggtatgccgcctaaaagggatatagagttcggaatagatttggtacctggaacaactccgatccataagagaccttatagaatggcagccaatgagttggcagaagtcaagaggcaagtagatgatttgcttcagaaaggaaacatcagaccgagttcgtctccatggggagctccggttatttttggtggaaaagaaagatcatacccagaggatcttaaaggtgctactgttttctccaagatagatcttcgatcagggtatcaccagttgagaatcaaagaggaagatatacctaagacagcttttaccactaggtatgggttgtttgaatgtactgttatgtcttttggacttaccaatgcccctgctttcttcatgaacttgatgaataaggtgtttatggaatacctagacaagttcgtggtggtctttattgatgatattcttatctactcccgaactaaagaagagcatgaagaacatcttcgccttgcattagagaagctacgagaacatcaactgtatgctaagtttagcaagtgtgaattttggttgtctgaagtgaagttccttggtcacaaacaaccgaagacagtttcagagatctgcagtttcttaggcctcgcaggatattatcggaggtttatagagaatttttccaagattgctaagcccatgacacgactgcttcagaaagatgtgaagtacaagtggtcggaagaatgtgagcagagttttcaagagttgaagaatcgcttgatatcagctcctattttgattttacctgatccaaagaagggtttccaggacgggaaggtggttgcctatgcatctcgtcagttacgtccgcatgaaaagaactaccctactcatgatcttgaattggccgcagtagttcatgcgttgaaaatttggcgtcattatcttttcggtactcgtacagaggtatataccgatcacaagagtttaaagtatatctttactcagccggatctgaacatgagacaaaggagatggttggaattaattaaggactatgacatgggaatctgtgtccccgataacaaagatttaaaagatgcaattctgaaagaagcccatgataccttatactccattcaccctggtagtacaaaaatgtaccaggatctcaaggaaagattttggtgggcaagtatgaagcgtgaaatcgcagaatacgtagcagtatgtgatgtttgtcagcgagtcaaggcagaacatcagaaacccgccggtttgttgcagcctttgaagattcctgaatggaaatgggaagaaatcggtatggattttatcactggtttacccagaacgtcatcaggccacgactctatttgggtgatagtcgatagacttaccaaagtggctcatttcatcccggtaaagacaacctattccggaagtcggttggcggaattgtatatggcaaggatcgtgtgtttgcatggcgtccctaagaaaatagtgtctgatcgaggcagtcagtttacttcaaatttttggaagaagcttcaggaagagatgggttctaaattgaactttagtactgcttatcatccgcagacagacggacaaaccgaaagggtgaatcagattttggaagatatgttgagagcttgtgctttagatttcggtggaagttgggataagaatctaccttatgcagaattttcgtacaacaacagttatcaagctagtcttcagatggctccttacgaagcactgtatggtcggaagtgccgcactccgcttttgtgggatcgaacgggagaacgtcaggttttcgggacggatatcctaagggaagcagaagaaaaggtgaaaatcattcaagaaagattgcgtgtggcccagtcgcattataagagttatgccgacaatcgccgcagagatttgagttttgaagaaggggattatgtgtatcttcgtgtcacgcctcttcgaggagttcatcgttttcacaccaaaggaaaattggcaccgcgttttgtgggaccttatatgattgtcagtagaagaggagaggttgcttatcagttggagttacctcaatctttggcaggagtccataatgtgttccatgtgtcgcaattgaagaagtgtttaagggtacctaccgaagaagctaatcttgaacagatagaagtccaagaggatctgacctatgttgagaaaccaatccgtatcttggaaacaaatgagagaagaaccaggaatcgagttatccggttttgtaaagtccaatggagtaatcactcggaagaagaatcaacttgggaacgagaagatgaattgaagtcagctcatccgcatctgttcgccagttcttccgaatctcgaggacgagattctgtttaa

SEQ ID NO: 13403 - DNA, 4434 bp, Oryza sativa
  Clone ID: PAT_MRT4530_19440C.1
atgggagtgcacgggctgtgggagctgctggctcccgtggggcggcgcgtgtcggtggagaccctggcggggaagcggctggcggtggacgcgagcatctggatggtgcagttcatgcgggcgatgcgggacgacaagggcgacatgatccgcgacgcccacctcctcgggttcctccgccgaatctgcaagctcctcttcctccgcgcgcgcccggtcttcgtcttcgacggcgccaccccggccctcaagcggcgcaccctcgccgcccgccgccgccaccgcgacgccgcccaggccaaggtccggaagaccgccgagaagctcctgctctcccatctcaaggctaggaagcttgaagaattggcagctcaaatcaagagtgacagggctaagcatgacaataaaggcaagcaagttgagagcagtaaaatgggagaaattgagaaaattaatggagagcaaaagaaaaacaacgatggagaaaacagcggggggattgtagcaccaatcgaccaggagaaactggatgaactgctggccgcatcacttgctgcagaggaagaggcaaatttgactggcaaaggaaaacagtatactgtaagtgttccattgcaagaagcagctgacattagtgaggatgatgacgaggatgatggagagatgatctttcctatgacaacaggtgatattgatcctgcagtattagcttcactccctccatcaatgcagttggatcttcttgttcagatgagggagagagtgatggctgaaaacaggcagaagtaccagaaaattaaaaaggaacctgcaaaattctcagagctccaaatacagtcgtacctgaaaactgttgctttcaggcgagagatagatgaagttcagaggggtgctgcaggcaggggtgttggaggcgtccaaacatcaaaaatagcatctgaagctaacagagagttcattttctcatcatcattcactggtgataaacagacattagcacaaagaggcggaaaggagcatattgtcgatagcattaaatcaaagagggaaatcaatcctgctgtcttcaaatccaatcccactagtagttctagctcaattaagcctaacaacagtgagcctttggggagttttggacctgatgttgagacatatcgtgatgagagaggaaggattagagtaagtagggtcaaagcaatgggaattcgtatgactcgtgatattcaaaggaatttggattttatcaaagagcatgaacaggtcagaaacagggggcatgactctgtagttgaaggattagctaacaatgaagagcctccagattttccagaacatctttttgaaggtaatgggctgcggagttctcttcatctcagcgaagattatgatgaaactgctagcgataaccatcacacatcatcactagtaggatctgacaaaatttctgagggtgattatcatggaagcaaagaaacaatagagatatcctttgctgacgatcaaacagaagtgaaggacaatgatgaccaaattttcttgcatttagcttctggagcttcatccaacttattcactacagaacagactgatggctctgattgcattacaaaagaaggcgtacttgaaagtgaaacacctcctatgcaagttgatgagaaggatcaccaagcatcactgatggacaatttctgtactgatgatgagatagagtgggaagaaggtggttgtgatgttcctggaggtccttccagtaatgaaaacgatcaatctaaagtaccgaaaggagatctagaagaagatgcccttgttcaggaagctataaggagaagtttagaggattttaagaagcaagaacatgaaaatgtgacccctgaagatttacaggcatcttttgaagacaaacctttgcaatcttatgatgatgttcctaagccagctggagctgcaggaaagacagctgataaaattgggaaggaaataaattgtgaagagaatgatatagtgcatggatcacttgtagttgatggacgagaaaacgagaatcagactcaacccgagaatagtgatgggcatgccgatatgaagagagcttatttgttggatcctctccctccatgtaatatgaccgccagtactagtgctgcaaaatcacctgagggctcagaagttcagcaccacaattcaatgttacattcaatcagaactcccgagtggcctaagaacgatagcgataaagttatgacgcaatacagtttgaattctgataattcaaagtgcaaaatagatgattcttgtactggagaaacctcgaggtcactccaaaatgaccttttgatggatgaactggttcctgacactgctgtacaaaaagaaaatatgatccagagaactacggacttatccacatctgagataaactatacgaaactgaacgataatgttggtatatatagtgtgtcagctagtaatctagaaaaggaattatctcttctgagacaggaacaagaatatctcggaaatgaaaggcggaagcttgaaagccacgcagagtctgtcagcagtgagatgtttgctgaatgccaggaattgcttcaaatgtttggcttgccatatataattgcacctatggaagctgaagctcagtgtgcatacatggaaatgactaaccttgtcgatggagttgttactgatgattcagatgttttcctgtttggtgcaaggaatgtttataagaacatatttgacgataggaaatatgttgaaacatacttaatgaagctgaagcaatgggaagtccatgtccttgctggaccttccacagctaatattgtaatacattttcaggacattgagtctgagcttggtctaacaagagaacaattaatacgtatggcaatgcttcttgggagtgactacactgaaggaattaggggcattggcattgtgaatgctattgaagttgcacacgcatttcctgaggaagatgggctccaaaagttcagggagtgggttgaatcaccagatccaactttactgggaaaacttggtatggaaagtggtagcagctcaaagaaaaaaaagtctggcagaaatcattcagacggaaagggaaacagccttgagcctgaatacgctaaaggttctgatgacagccaatcttctaatgagacccaacgcatcaaggaaatatttatgagtaagcataggaatgtgagcaagaactggcatattccttctacttttcctagtgaagcagtcataaacgcatatatttccccacaagttgatgattcaacagaaccattttcctggggaagaccagattcaggcttactgcgcaaaagatctaatgttgagttccttcaggttatgttgggaaagactcaactacgcatggaggcgttttactcattcaatgagagatttgcaaaaattcgtagcaaaaggattaagaaagctatcaagggtattacagggaaaagctttctagagacagatgaacttgatcatgatagtcccagtactagtaataccagcaagaagaaagagagaacctcctctggtcgtggtagggctaaagggcaaagaaccaaagatgttgggcctggtaacacaggaaatcaggactatgacattgctgatagcttagtagatgcaggtgaacatactacagaaaaaagcacgtccagtaagaaaagaactgcaaactcctctggtggttcaagaggcaaaggaagaagaagcatgaatgctgcacatgtgataattggaaatggggaagattctgatgtctctaatttagcatctgatgaggattcccatattagacataccaacgactatgaatcagagggattgacattacgcaggtcaaataggaagcgtaagcaggtcacatacgcggaagatggtcaggaagctgatgataatgatgtttccatacatcaaatcgatgaaaatcagggccaaggttctttggaggaggacatgtgtcacatggctggacttgacacacaatctaatctgctccatcaggatacgagtgaattaaacatcgatcaaacgcatacagatccctctgatatgaacgaagatccttcgggctttgagttacccgaggattgccatacggacactgcaccaaaagactatctcttcgccggtggtggattctgcatggaagagggtgacgagcaagatacgggagtggatcaatctggtgcagaaatggagcatgaaacacgtgatgcctgtgagggtattgacgaggtttctgaaagtcaaagcggtaaaagcatgagctattcggcgactggagagggcacagagaatgcaaatacagaggcccgaggggcgtcttcatcgcagggacgcaatgcaagccgtggttcaggtgccgtgccgaagcttacaaagcgtaggagaaaatcatga

SEQ ID NO: 13404 - DNA, 369 bp, Oryza sativa
  Clone ID: PAT_MRT4530_19441C.1
atgaagatgacatgccatgtcaagcgccgcggccaccaccacggcgacctgcggcagcaaggggcaggcgcagcggagcgggacggtgaggttgtcaccgacggtgggctcctacagcatcgccagccgcacgtgaggataccttcggaggcggcggcgacggtgaggaggagggggaggtgggcgacgcagtcctccgtcggcggcgaggatggggacgccgccatggtcgtctcgccgcacaaggttgtcgcgcggcgcgccgcggcgcacagctcggtgctggagggcgccgggaggatgctcaagggctgcgacctccaccacgtccgcaacgccgtcctgtgccgcactggattcctcgactga

SEQ ID NO: 13405 - DNA, 290 bp, Oryza sativa
  unsure (1)..(290): unsure at all n locations
  Clone ID: PAT_MRT4530_19442C.1
ccaagcttcaacttcaagaacccacccacttctcctcctcttctccatccgctgcggcaaggcgcanattcagttgctgcgagctcgctcngngtcgacaatggcggcggntnggcggtggtggttggttgcgttcttcttggtggtgtgtgggggttcccggagaggatttggtggcgcggctgccggggcacgtncgttcgggttcaggcagttcgccggnatacgtcgacgtcganatgaaggccgggagagcctcttctactacttcgccgaggcgcgaagtggcc

SEQ ID NO: 13406 - DNA, 649 bp, Oryza sativa
  Clone ID: PAT_MRT4530_19443C.1
ggccgcgggttttttttttttttttttctaatattattgtacattatatgctattatatacttttgtctatccatctaaatctaatacatgtctaatatttgtctaatcgctctttgatggccactttattctcctttcagccctgacatacaggttgttcggcctaatcaactggaacatgggatcgtattcgacaggtccgtcttgggccaggttaaacttgtatcggtacacaagcttgggcaagaagaccttgacctcctggagagcaaagttgaagccgacacacatgcgaggtccggtcgcaaaagggatgtaagaatccttggggcggttcttgacacggtcggtgtcccaacgatcggggtcgaacagagcggggttgtcccagatcttggtgttgttgtgaatgtggtggagggcggggatgacgatggagtccttggggagcttgtatccaccagggagaatcatgtcgaccgctgatgttctagcgggttggtaagaggggttgtggcggcgttgtgtctccttgatgtacttgtcaaggaatgtgagcttattggtcagatcagcggtgatctgggtgttttcgtcgaagccgttgtcgaccaactcctgcagaagccttttttgcataccggggta

SEQ ID NO: 13407 - DNA, 324 bp, Oryza sativa
  Clone ID: PAT_MRT4530_19444C.1
atgcagacggcccaagggggcccacctgtcagcgatggacggacggaaaaggacgtggggccgggctatcagcggctcggctccgtcttcttcctcctcgctctgtttggctcggggcgacgacatgccgtggcagcagggcgcgacgaggcgaccggcggccgagggaagacagcggccgagacactggaaggcggagccggatgcggcgagctggcggctaggcaccggagaactgggggtagccagctagtagctcggttgggttcacggaaggaggggatggcgctgcggtggcgacgcgatggcgacagagacacatag

SEQ ID NO: 13408 - DNA, 384 bp, Oryza sativa
  Clone ID: PAT_MRT4530_19445C.1
aaaggcgtaattgcatattcgcttctcaggcagcaacaaccaaccaaacaagcatatactcaagctgtctgaccaggttagatgcattggtcttctcacatgccactcaggcgcacagaaattccaggcatgttatgttactcagggcagcaaccaaccaaacagccccatactccttgatcatcaccacctaggttaagccttgcacacgagaggcttgtgcatctgcagcgacatgtccaggcgctccaacatgaggacaccgtcggcgaccggcgcctacttgaagcggtgcagcatctgcaccagccataggtggactgtggctagcgcaagcgtattgatcggtgaggcgcaccgtcccgcgccatacggctcgagggg

SEQ ID NO: 13409 - DNA, 264 bp, Oryza sativa
  Clone ID: PAT_MRT4530_19446C.1
atggcggcttcggcagttgccggcccaggctggaggaaggggaaggagctgacatgtggggcctcggggtcgaggagtcctgggatcggtggcggcgcgagggactcgaagccggttcaccttcgaggtcgggacggcgatggagcgacggcgccgacggggctgcgggcagcggcggcgtggagcgtcggcccgacctcgccttctccagccgtcgcgcggagtcacgccgtcgatggagcgcaggccgctgctgcggcgtag

SEQ ID NO: 13410 - DNA, 126 bp, Oryza sativa
  Clone ID: PAT_MRT4530_19447C.1
actatgtccaacgtcacactaacccaactacctggactcatagaaaccaaaggcggattgcccgacaagatctagtatctcctggtctacaacgaagacctcagccagtagcacctataaggggac

SEQ ID NO: 13411 - DNA, 1867 bp, Oryza sativa
  Clone ID: PAT_MRT4530_19448C.1
atggcgctgcctttgcttcgcctgctgctgctgcttgtgctatcatcggttcctctctcttgccagctcgcccactctactgctgcagacacacagaattggggacagacctctgttgttcatcttagaaatgcacatactagaaaattacttggcctattggacgatatcagtggtagaactggaagcctacatgctcttcttctcgaggagtcacctaaacaagctcctcctcatcatcacaataggcacggggggcatcacagagcagcacatacaccagcaccatcgcctgcaccatccccttctccattcactgctccacctaaatcagcctcacctgctgccataacaatccccatatctccttcaaccccacagccaaaggcagagagtaatcctgctgttgaagatgctccggctcaacctaggcattcctggagaaactacggtttggtcacagcaggaagtgcagttttccttgtcatgacaatagcatctgttatttactgtcgagctaagaaagtcggaactgtcagaccttgggccacggggttaagcgggcaattgcaacgagcatttgtcacaggtgtaccttcattgaaacggtctgagctggaagcagcatgtgaggatttcagcaatataattggttctacatctagttgcatgttgtacaagggaactttatcaagtggagttgaaatagcagttttgacaagttcaacagaatccgggaaggaatggtcaaaagaatgcgagtcacagtacagaaaaaagatcacaaatttatccaaagttagccataagaactttatgaatctgctcggctattgtgaagaagagaatctttttaccagagctatggtgtttgagtatgctccaaacgggacactttttgagtatctccatgtcagggaagctgagaacttggactggatggcacgggttaggatatcgatgggaatagcttactgtctagagcacatgcatcagctgaacccacctgttgtgccaaggaacttcaactcgacaactatatacctgactgatgatttcgctgcaaaggtttcagatcttgatttctggaacgacagtaagggatccttcaattctgctacttctgatgaaaccgtcatggtggagatagatagcatggtgcatcaatatggcataatactgctggagatattgaccggaagagttccctactctgagtcagatgggccactggagcattgggcatctggttactttgaaggcaagatgactcttgcagagctgattgacccaagcctgggatcattccctgaagacgctgcgcgtgcattgtgcgatgtggcgaggtggtgcattgagccagagccgagcaagaggccgctcatgtcacaggttgcaggtcggatgaaggagatcacctccctggggcctgagggagcgactccaaaggtgtcgccgctatggtgggcggagctggagatcatgtctggccaagctacctagctatgctgatgtcaacaccaccagcaacagcaattgattcccccatgcgatatagtagcaaattctttcatttcttttcttgtttgttaatcatcaagactactcaagagtttggtggttgtggttatagttatatatgtatacatacaaggtgttttgagcattgtaacttgtaagcatgcaaacgtgtgaaggaaggaaggaaggatgtatcatgttgagtttgttggcaaaaaaaaaaaagtagcatgcatgatagccctgaataatccagctaaggccatggcaacaaaactagtgatgagaatactctgactttgaatgagaaaatacttctgtctcttggcaaaaaaaaaaaaaaaaa

SEQ ID NO: 13412 - DNA, 1133 bp, Oryza sativa
  Clone ID: PAT_MRT4530_19449C.1
cctttaatttttccttcttttgttctaattattattagtactaattcaacctccccctcgccgccgtcctcctcctcctcctccgcgtccgcacggcagccggaggcgggaggcgaggcgaggcgaggcgcgcggcggagatggcgatcctgtacgcggtggtggcgcgcgggacggtggtgctggcggagcacagcgcggcggcgaccaacgcgggcgccgtggcgcggcaggtcctcgagcgcctccccggcgggggagccgacagccacgtctcctacacgcaggaccgctacgtcttccacgccaagcgcaccgacggcatcaccgcgctctgcatggccgacgaggccgccggacggcgaatcccctttgcgttccttgaggatatccatggaaggttcgtgaagacatatggccgtgctgcattgacatcccttgcttatggcatgaatgatgagttctcgagggtcttgagtcagcaaatggattactattcgaatgacccaaacgcagacagaataaatcgtatgaggggtgaaatcagtcaggtccgtactgttatgattgacaatattgataaagtccttgaaagaggtgatcgtttggacatgttggtcgacaagactgcaaatatgcaaggaaatacaattcgttttaaacgacaagctcgccgcttcagaaataccacctggtggagaaatgttaaactcacgattgcgttgatattcctcctcacggtaataatatacgttgtgctcgtctttatgtgccatggcttcaccttgcctacttgtattaggtgagatgccatccatgtctttgtgtggtgtgctggtgagtgctgctgaactattgcaacaccattgcaataggtcagggtggtttttgtgtagagattactatttattgtgtaatcatgctgtgttgattgtgcaaactcaatgaaagatgtaatctttgccccccataaatccgcctatttggagctgtacgacaaagggaaggagaggaggaggggggcaagatgggtcgctgctgctgcagctgggtctgcatactgcggccctttgtgctagaaaaaaaaaaaaaccaaaaaaaaaagggcggcggccaaaaaaaagaggccaaca

SEQ ID NO: 13413 - DNA, 934 bp, Oryza sativa
  unsure (1)..(934): unsure at all n locations
  Clone ID: PAT_MRT4530_1944C.1
atacccgggacaggcaggcagaactgagcccctagcagcagggcaccaaccctctgccgtatgacatctcgactaccgggccgcagctcgtnnnnnnnnnnnnnnnnnnnnnnnnnnnnnnnnnnnnnnnnnnnnnnnnnnnnnnnnnnnnnnnnnnnngcccaccttgtcagccgggaaggggccccgaagggcgccttcgccggcgcgcccgacgggagcggcgcgccacccggcgcccccgatggtcgccgccggcgaccaacggcgccggcggagtgccacccgagagagaggagaaagggggaaacgaacgggacggtcttcggctcaccccgagacggcgaaggcggtgaaacggcggacggagcggaggaagacggcggcgcggctcgggatgacgagggcgacggtgctccggcggtcggcgggcgaagcggagcggcggacggggtcggcgacaacacggcgaagcggacggaggggtcgccgagtaaggaggaagtccggagcggcggcggcggcgaaccgaaggtcgacggcgacggcggagagagaggagcacggcgctagcacgattccgacggcgagagcgagcggtgagcggcggaaacggaagagcggagctcgggcaacgaatatatagcaacgggagggggagagcgcggccggggaggaaatgcgcgcggggacggcgggatgcggcgcaatccgcggcggcggcggcgctagggcacgggcgcggcggcgggcgcggcaggaggaggaagatgacaggtgggccccacccgtcagcgagagtggcgggcgggcccgcctgtcagcggctcgcgcgcgcgcggggagccgatgggccgcgggggaagagagagagagggagggaatgggccgagccggcccaagagggaaaagggggggggaaacagacttcttt

SEQ ID NO: 13414 - DNA, 414 bp, Oryza sativa
  Clone ID: PAT_MRT4530_19450C.1
cccacgcgtccgtccacgcgtccgcccacgcgtccggttgagctcgcgccgcggcgacgccgtcttgcccatggcgtccgcctccgcctccgccggtggcggcggcggctgcttttagactccgatggtcgaccgttgcatccacgcggaggctgtcagagactccattgtgcactgctttgcagctccctgctggttgaaataggagtggaagggactcattccctacacgcaagaacgacttctttgaaacacaggaaaagatatcccccctggctagcctccccaaatcatttgttttttatccgcacaaggggggtgggctggcttgctccataggggggccatgagaatcaaggttgggagaccaaccgttcgtagtgatgtttaaagtttatactcttgttctcccgc

SEQ ID NO: 13415 - DNA, 373 bp, Oryza sativa
  Clone ID: PAT_MRT4530_19451C.1
gtatcacgcaccgtataacgactatagatagaagacgacgatgaagtgcaggttgtggcttgtgatggtggtctgcagctgccccaaagccatagccataggaggaggagcaggaactatgtagctgaacttctacttgatgaactaaaggtgcgcaatggcggaggtagtggtcaggaaggaagtgacgaaggacattctgaaaccgatggactcctagatgtttgttattgcgagatgaggcggctacgcctcctgtatactgatgtatatactaaagtgtccgaagctcgtaagtgtaagaagacttagggccaactgctgtgagcttgatgttgtgacatacacaattgtggtagtaaatagtatacat

SEQ ID NO: 13416 - DNA, 368 bp, Oryza sativa
  Clone ID: PAT_MRT4530_19452C.1
ttccgtttgcgtattgtggagaaacataagaatgcatggtgggcggggactagggggcgcacatcggcgtacaccttgatatgacctactggtgcggcggcgattgccaatacgaccgcggggaaagcatagcgaacgaccagggaaatcggaccaccccttcctacgatggatgcacccactctgagaggctcaccggagatgctcccaagaaccaggaagggatgaactcaatcaacacctgatttaaagcagagcgtctcattgtcacgagaggtaacaatgcttctgttcacagacacactaagctctggaccttgaatgtgattgctggacctggtgacaagcctatgattggtgcgcagtac

SEQ ID NO: 13417 - DNA, 267 bp, Oryza sativa
  Clone ID: PAT_MRT4530_19453C.1
atgtgggacccacatcaccaggcgcacccgttctacgcccccaacatcatccgcttcatcgatgacctcaccgcggtggtgccgtcctcatgcggcgggaggggccccaataccagcggcatcatcagatgccaaaaccgtggcaaccaggcaaaggaggactgcacccaccttcgctgccacacctgttgcaagagccatggctttgactgcaccacccacttcaagtccacctgggtcccgcctacgatgcaccgcgagcgctag

SEQ ID NO: 13418 - DNA, 288 bp, Oryza sativa
  Clone ID: PAT_MRT4530_19454C.1
gctgacagcgggaagctgggagggagcacggacggctcgccgtactaccggtcgtcatcggaagatgaccggaacgccgacgagctcttcgggcaggtaccagagatccagtggtcggtgccggagctcccctcgccgccgacggcctccggcctccactggcaacgccatccagccgccactcacggcggcggcggcggcggacccgacaccaccgccttcgtccccgacatctgctcccccgacagctgcttcccggccaccacctccaaacgccggaggcaataa

SEQ ID NO: 13419 - DNA, 1228 bp, Oryza sativa
  unsure (1)..(1228): unsure at all n locations
  Clone ID: PAT_MRT4530_19455C.1
ttcagaancccatgaaacaacttccacttttcacagccacattcatgtatttgtcaacaaagtacatcaggatgttgtttcttctcaggagatgaagggagtgcagcattgccagttggcaagatctccagatctctaacctcactagaactctcaatcttagttcttgtaattgggatctcattgtctaaaccaggtgagcagtcagctctgcgatatttcacgccattgctttcaactcccaactcttcgtcacccagttcatctgaccgacgttgtgaggtcttaaggatgtcgaggcccatctcaagatcatcctcgactttggctcgtggacggtggggtgtctcctcttctgctacattggaacggctgattcgtggtggtgctaccccatggtcctcttgaacaattgctctcaggttgatccttgaaggcgctcttttggtgcagaagaattcagaacagttgttcatgcaaccacggtcaaacacgttgggttggttgttgtatttgtacttgaggttctcatatgttgtcttatttgttgcaatgaggtaagaatggaaccctgtgagaccaccaacgaaccagaaacagatgaaacaatatgccataattgccactgatgctggagattctttaattgcctttatcactgaatgatgatccctattcatgagaagcttgatgtgcaaagcgcacattgaaaatatgtagatgcacaggatggctgctgaagatacaaaacagaagaagtagcgataattgcgataaattgagaggactatggtaacagcaagaattgcataccctgcattatatgcaggaaacatgtgtatgagatgcctcgccacaaagtagcagaagacggcaaccgggattgcaattagagagaaagatagcagagtggccttggcatctggtccaaagataaaccttccaccgcacaagattatgttgttgcctttccagacttggtaaacccgctgctgcttggccatggccatggccgcaggccgcacgaaggaagaagaagaagaggagaaagccactccacaacactttggccactcttccttgttgtagaatcctttatgatttgatttcctcttgaaagggagaaggaaaagggttcaggacaggagacgagatgccatccgcatcacttgggtcgtcttcttctccctcctgcgtctgcgtctgtgtgtgtgatctgggcctcgtc

SEQ ID NO: 13420 - DNA, 630 bp, Oryza sativa
  Clone ID: PAT_MRT4530_19456C.1
atggcaggattgcgcaaggggatacgagacggtcatgctcaacatcggcttcttcaccatcgacgagagatgtcgacttcttctcaagatgcatatgacgtacctgactataattttgcacgagttgaatctaagttaccattctacgatggtaagtatgattctattgcttatattgattgggagctagcagtagacaatgaatttgataaaaatgatttttctgatgctcaaatgattaaggctgctagtaataagtttacctcttctgctctcttctggtggagttatgtgagtaacatacctggaacttgggatgaatacaaaaccttgatgagaaaacgttttgaagatcagcacatccaacaaaaggaggagaatggtatacttgagaagaaagaggataaagcacctgcaatgtctgaagaaagttcgcaagagcaccatatggaaaaaccgaggacggttttccgtgaagaaggggaggatgatgtgaccatggctactacatatacaaccattgctcacatcatggatgaacaagatgatatcaagatcaagttctccaggaataaggttgacctgtaccggcaagatcaacaacccacggagaggtgtatcgatcgctaa

SEQ ID NO: 13421 - DNA, 1374 bp, Oryza sativa
  Clone ID: PAT_MRT4530_19457C.1
atggccagcgtcgacggagcgacgcgccgcggcggcggcgatggaagcatcaggcggcgccgggtgctggtgttcccgcttccgttccagggccacatcaacccgatgctgcagctcgccggcgcgctccacggccgccgtggcggcggcggcggcgagctgtccgtcaccgtgctccacacccgcttcaacgcgatcgacccgtcgcgctacccggagctcgcgttcgccgaggtgcccgacggcatcccgcccgacgtcgccgcgaatggtaacatcgtcgacatcatcgtagccctgaacgtcgccatggacggcgaagaccgccgcgagctcggcctccccacgctcgtgctccgcaccggcagcgccgcctgcctcggctgctacctcgcctaccccgcgctcctccaaaagggctatttgcctcccaaagagtcgcaactctatgaaccagtggaggagctaccgccactgcgagtaagggacctgtactacacgagcaacgccaaccaagaactggtccgtaaagttcttggttggatcgccgaaacggcgagaaactctaacggtgtggtgatcaacacgttcgacgagctggagccggccgagctcgagaggatccggcgcgagcttgacggcgacggcgtcgccatcgtgctcgccgtcggcccgctccacaagctctcccccatgaacgccgggggcagcctgcacctgtgcccggaccggagctgcatcgagtggctggacacgcaggcgacgggatccgtgttgtacgtgagctttgggagcttagcgtcattggactccaacgagttcttggaggtggcatggggattggagagcagtggccagccttttctatgggtggttcgaccagaccttgtgaagggtttggataaaccaagtttgccggatgggttcgagcgtgcggtggagggtaggggtaaggtgattaagtgggccccacagcaagaggtgctagcacaccacgcagtgggagggttttggacgcacaatgggtggaactcgacgctagagagtgttagtgagggagtcccaatgatatgtaaacctcaatttgcagaccaaatgttgaatacaaggtacttagaagcggtgtgggctgtaggctttgagcttgttggcaagctagaaaggggtgaaatcaagaaagcgattaagaggttgatggtagaaaaggagggagctgagatcagggaacgagcaaaagagcttaagaagaaaatggaccaatgcttggaaagtagtggatcttctcaaattgccatcaacagatctctcgtaggccctatgcatgatattcacgtcatgtggccagtggcggagctagaaagtttccacgtctag

SEQ ID NO: 13422 - DNA, 1586 bp, Oryza sativa
  Clone ID: PAT_MRT4530_19458C.1
atggccagcgtcgacggagcgacgcgccgcggcggcggcgatggaagcatcaggcggcgccgggtgctggtgttcccgcttccgttccagggccacatcaacccgatgctgcagctcgccggcgcgctccacggccgccgtggcggcggcggcggcgagctgtccgtcaccgtgctccacacccgcttcaacgcgatcgacccgtcgcgctacccggagctcgcgttcgccgaggtgcccgacggcatcccgcccgacgtcgccgcgaatggtaacatcgtcgacatcatcgtagccctgaacgtcgccatggacggcggtgagtcgtcgccgtccttccgcgacgtgctcgcgtcggtggtcgccgccgacgacgaggggcggaagccccgcgcgtcgtgcctcatcatcgacggtaacctcatggccgcgcagaagaccgccgccgagctcggcctccccacgctcgtgctccgcaccggcagcgccgcctgcctcggctgctacctcgcctaccccgcgctcctccaaaagggctatttgcctcccaaagagtcgcaactctatgaaccagtggaggagctaccgccactgcgagtaagggacctgtactacacgagcaacgccaaccaagaactggtccgtaaagttcttggttggatcgccgaaacggcgagaaactctaacggtgtggtgatcaacacgttcgacgagctggagccggccgagctcgagaggatccggcgcgagcttgacggcgacggcgtcgccatcgtgctcgccgtcggcccgctccacaagctctcccccatgaacgccgggggcagcctgcacctgtgcccggaccggagctgcatcgagtggctggacacgcaggcgacgggatccgtgttgtacgtgagctttgggagcttagcgtcattggactccaacgagttcttggaggtggcatggggattggagagcagtggccagccttttctatgggtggttcgaccagaccttgtgaagggtttggataaaccaagtttgccggatgggttcgagcgtgcggtggagggtaggggtaaggtgattaagtgggccccacagcaagaggtgctagcacaccacgcagtgggagggttttggacgcacaatgggtggaactcgacgctagagagtgttagtgagggagtcccaatgatatgtaaacctcaatttgcagaccaaatgttgaatacaaggtacttagaagcggtgtgggctgtaggctttgagcttgttggcaagctagaaaggggtgaaatcaagaaagcgattaagaggttgatggtagaaaaggagggagctgagatcagggaacgagcaaaagagcttaagaagaaaatggaccaatgcttggaaagtagtggatcttctcaaattgccatcaacagatctctcgtaggccctatgcatgatattcacgtcatgtggccagtggcggagctagaaagtttccacgtctagacgaattgtgaagaagttgaaggtttcctttaattttcttatttatatgtatcaacacagtgatatagatgtcctcattctcccaaaaaaaaaaa

SEQ ID NO: 13423 - DNA, 2890 bp, Oryza sativa
  Clone ID: PAT_MRT4530_19459C.1
atgtacgacgccgtcgcctgcgtcgtcgccgtcgtcgtcgtcgtcgtcttcgccatgctttgggtgaagctggcgaggagtggtgatggtggtggtggtggtagtggtggcgtgaggctgccgcctgggccgtggcggctgccggtcatcgggagcctgcaccacgtggtgggcgaccggctcctccaccgctccatggcgcgcatcgcgcgccggctcggcgacgcgccgctcgtgtacctgcagctcggggaggtccccgtcgtggtggcctcgtcgcccggcgccgcgcgcgaggtcacgcggacgcacgacctcgcgttcgccgaccgggcgctcaacccgaccgcgcggcggctgcggcccggcggcgccggggtggcgctcgcgccgtacggcgcgctgtggcgtcagctccgcaagatctgcgtcgtcgagctcctcagcgcgcgccgcgtccggtcgttccgccgcgtccgggaggaggaggccggccgcctcgtgggcgcgctcgccgccgccgccgcgtcgcccggcgaggaggcggccgtcaacttcaccgagcggatcgcggaggccgtctcggacgcggcgctgcgcgccatgatcggggacaggttcgagcggcgcgacgagttcttgcaggagctcaccgagcagatgaagctcctcggcgggttcagcctcgacgacctgttcccgtcgtcgtggctggcgagcgccatcggcggcagggcgcggcgagcggaggcgaacagcaggaagctctacgagctcatggactgcgccatccggcagcaccagcagcagcgggcggaggccgccgtggtagacggcggcgccggcgtcgaggacgacaagaaccaagacctcatagacgtgctcctgaacatacagaaacaaggggagctcgagacgcctctcaccatggaacaaatcaaagctgttatccttgatctctttagtggaggtagcgagacatcggcgactacgcttcaatgggcgatgtcggagctaataaagaacccaatggttatgcaaaagacacaagccgagctacgtgacaaacttaggagaaagccaactgtgacagaggatgatttgtctggcttaaagtatgtaaagctcattattaaggagaccctaaggcttcaccctgtggtaccactgcttgtcgcaagagagtgtcgtgaatcatgtaaagtcatggggtatgatgttccaaaaggcaccactgtatttgttaacgcgtgggctatcggcagagacccaaagtactgggatgacgctgaggagtttagaccagaacggtttgaacacagtactgttgacttcaagggcatagacctcgagttcataccgtttggcgcaggacgaagaatatgtcctggtatggcattcgcagaagcaatcatggaacttctgcttgctgcgctgctctaccactttgactgggaactccctaatggaatggcagcgagcgagctggatatgacagaggagatgggcatcaccgtccggaggaagaatgaccttcacctccgcccccatcctccctgcaatgttgcacttgcactgcactcgcctcgccgcgatctgatcgccatggatcacgtcctcgcctgcgtcggcatcctcgtcgccttcacgccgctgttcctccttgccgtgctcccgctcaagctgacgaacggcggcgacggggtgaagctgccgcctggcccgtggcggctgccggtgatcgggagcatgcaccacctgatgggcgagagcctcgtccaccgcgccatggccgacctcgcgcgccggctcgacgcgccgctcatgtacctcaagctcggggaggtccccgtcgtgttggcctcgtcgccgtgcgccgcccgcgagatcatgcgggcgcacgacgtcgcgttcgcgagccggccgctgagccccaccgtgcggcggatgcgccccccccccccccggcgacggcagctccgcaagatctgcgtcgtcgagctgctcagcgcgcgccgcgtccggacgttccgccgcgtcagggaggaggaggtggcccgcctcgtgggcgcgctcgatctctttagtggagggagtgagacatctgcaaccgtgatccaatgggccatgtcggagctcatgaagaatccaagggttatgcgaaaggtacaggctgagttgcgtgacaaactagcagggaagccaagggtgacagaggatgatttgtccgacctaaaggatcctaattattgggatgatgctgaggtgtttaggctagagcggttcgcaaatagtaccatagacttcaaaggcatggacatggagttcataccattcggggcgggaaggaggatgtgctctggtctagcctttgcggaagctattatagatctactgttttctaccctgctcttccacttcgactgggagctcccttgcggaatgacagcaagtgagctggacatgatagaggagatggcccttactgttcggaggaagaacgaccttcacctccgccccatcctccagaagagaaaaacagatataattcagcaaatctacatgtcgaaagctgaccaaaatcaagggcaacctggtatccgtccagaaagagttttggagaatatgaattacaggcagctgcctaggttgtcagcaaatcagccactggctgactagatgatttcatataataggggaaagttttaagactagaaacttcagtattaaatgagtcagaaaaaagttggtgcatcgacaagtttcattcttaagacattctagctctgtgatgacctcgatggaaccatactaccatagagatttgtgttttgaaactggaagctagctggattatgctgttcgagaaatgcatacaattttccacgat

SEQ ID NO: 13424 - DNA, 165 bp, Oryza sativa
  Clone ID: PAT_MRT4530_1945C.1
atgggtgacctcttctccatcatcattggtagtgggctccagccgtgggaattctacatctgtcagaggtggccgattcacaaccttcataacaacaaggttgagccatccgagaaggattttgcccaggggaaactacctcttagtctcaagggcttcagctaa

SEQ ID NO: 13425 - DNA, 168 bp, Oryza sativa
  Clone ID: PAT_MRT4530_19460C.1
ccctcgactcctcttgcgaccaccaccaccgccgacggcgcctgaatggcggtaatcggaggcggaggcggccgtgacgatcttcacaggcggcgtggaggaatcagaccaaactcccagtgcgttgcaccatggggcaaggctggcagccaagaggaccgtccaggg

SEQ ID NO: 13426 - DNA, 199 bp, Oryza sativa
  Clone ID: PAT_MRT4530_19461C.1
acgagcagtcctcgatcatgatcaagctgatcaagccccacggagtccagagaggcctgattggacacatcctgcacagcaaagggaagaaaggattctacctgagggggatgaagttcatgaatgtggagaggtcctttgcacagtagcactatgccgacctttccgacacgcccttattacctggggttggtggagt

SEQ ID NO: 13427 - DNA, 192 bp, Oryza sativa
  Clone ID: PAT_MRT4530_19462C.1
atggcaacaggtctggcgatagataaacaagctagcaccaccacaacagttgacaggacaccgtcatcttcagagcttagatccacctcctccagcgacaaccgctgctgccaacatcaaccccagctgacgtcgacaagaagtcgttgtcgaaagacccaaaacaagactaactcgagaaacatgacaccc

SEQ ID NO: 13428 - DNA, 226 bp, Oryza sativa
  unsure (1)..(226): unsure at all n locations
  Clone ID: PAT_MRT4530_19463C.1
ctcactcgtcagctctcgcttcgagggagacaggatctaagaacgcgctatactcgagaaagtctacatcactacgagcatgaaggagagagaggagaccagttagtagaccgatgnacgaggacgctcaatgcctcagatcatggggacaggactgagcagctagtcgccgctctcacaagtgacaagataaaaggacagagacagctcttcaatcgttccatga

SEQ ID NO: 13429 - DNA, 645 bp, Oryza sativa
  Clone ID: PAT_MRT4530_19464C.1
atggcgccaccgcatgcggccgatcgcggacctatgattgatgacgagattgacgagagctcggagacaaagattgacgaagcggccactcgacgaacggcgtggtcgagaccatcaacctcacggacgcgtcccatcgtccctcgcggagaaggcctcgcggtgaccgatgacgcggcgcgcaacgtgtgccgggtggagtgcaacgtcgcgcgccatcgtcggcttcggctgcggcgggggcgtggcggccgcggtgctcgccgggggccggccacaaggtggtggtcatcgagaagggcaactacttcacgccgccaggactacacatccttcgagggcccgtcgatgaaccagctctacgagttcggtgggtccgttcgtcaccacgatgaacggcggcgggctgctcctggccggatccagtacggtcgacggcggctcagcggtgaactggtcggcctgcctcaacaagacgcccgagttcgtgctcagggagtgggcgaccagaccacgcacgggttcccgctgttcgccagctccgactacgccgccgccatggacaaggtgttcgagcggctcggcgtgacgtcggggtgtacggaggaagggctccagaacaaggtcctccgcaagggggtgtga

SEQ ID NO: 13430 - DNA, 135 bp, Oryza sativa
  Clone ID: PAT_MRT4530_19465C.1
atggcgtgcaaggggcggcaaggagtggtcatggacgcactgaagggcatcatggaccgaggtgcacagcgatacgctgaagacgaagatggtgacgcaatcgtggcagtcgttggagaagatggcatcgaatag

SEQ ID NO: 13431 - DNA, 189 bp, Oryza sativa
  Clone ID: PAT_MRT4530_19466C.1
cataacttcaaccctactttctctggggggtaattaataatactatgggggtgcatgtggcaagtcatagtcggtagctgtagactctcacaagcgccatggttaagaacttgtgtaggtacctatcccttactggattaccactatcttcttgatggaagagcatgtgataacttctaatactgctca

SEQ ID NO: 13432 - DNA, 499 bp, Oryza sativa
  Clone ID: PAT_MRT4530_19467C.1
cgggctgcaggcccccccccttttttttttttttttttttttttttttttttttttttcaagatcgactatactaattacccatttgattttggtgatgattttcggcaagtcagtcacgcatacttgggcatgttgaacttttcaaaattcaaatatgacggacctgactcctcatggacaagttcgacccatcttgatgcattcgacatgccaagctactgatatgtgtcatcatgtgcctctattatgcacattgtgggagtagtgagacgacagcaacaggcatcacatcaagaggaggaatgtgtgcgttcactccaggaggatttgaaatatttgaatcacttttcaccaacccagcatttccttctgttatcagttgaacgcccgaaggtgcagaatcatcccagcatagagcgaatggtgtgtcgagatcacccttggtgtaggttctaacttggtggaggtccagacccggccgtgcgcctcctaagccg

SEQ ID NO: 13433 - DNA, 658 bp, Oryza sativa
  unsure (1)..(658): unsure at all n locations
  Clone ID: PAT_MRT4530_19468C.1
attcggctcgagctcgagccgaatcggctcgagctgtccgagtgttttgaaaaaaggnttcgctgaaactgcagaagcggctcgccgcgagcgtgctcaagtgtggcagaggaaaggtttggcttgaccccaatgaagtcaacgaaatctccatggccaattctcgccaaaacataaggaagctggttaaggatgggtttatcatcaggaagcccaccaagattcactctcgctcacgtgctcgtcgaatgaaggaagccaagaggaaaggacgtcactctggatacggtaagcgtaagggtacaagggaggcaaggcttcccactaaaattctatggatgaggagaatgcgtgtgctcagacgcttgcttcgcaagtacagggaatctaagaagattgacaagcacatgtatcatgacatgtacatgaaggttaagggtaatgttttcaagaacaagagagttttaatggagagcattcataagtccaaagctgagaaggcaagagagaagaccttgtccgaccagtttgaggccaaacgtgccaagaacaaggccagcagagaaaggaaaattgctcggagggaggagcgattagcccaaggtcctggagaaaaagtatcagccgcatccagtgctncagctgctncagcatcaca

SEQ ID NO: 13434 - DNA, 4430 bp, Oryza sativa
  Clone ID: PAT_MRT4530_19469C.1
gactacgttggtgattctgaggatgatgcggaccaacgacgacttcgcttcaaccgcctggtatggctcgtcgtcggccacgccgtgaggtacggaataatgatgattcatttggtaagattaaattcactattcctacttttgatggtaagtatgaccatgatgcttatctttcaggggagttagcagtagatcaaaagtttgcttgccatgatgttcctgtggataagagggttagggctgccggtagtgaatttactgattttgcttctgtttggtggagtaaataccatcgtactcatataaatgctttgccacttacttgggatggtttgaaatgaattatgcatgctagatttgtaccttcatattatgcacgtgacatgttaaataagctacaacaattgaaacagggtgatactagtgtggaagaatattaccaagcgctgcaaatgggtatgttatgttatgggttagtagaggacgaggaggctgccatggctcgattcttggtgggcttagaccgagaaatttatgatattcttagttacaaagagtataataatatgactcagttatttcactatgcctgtaaagctgaaagggaagtgcagggatgacgtgcgcaaacaagggctatcattcctgcaggtagaactccatggacggctcgatgtggcgctgccccagctggtcacgcatcagcttcgacatcgacatcagcaccctccaacagcaacaaagcgcggccaacaccttctgcggcctcccgtcatgctgcagaggctgcagcaaagcccgccaagagtgcctcctccgttgtttccacgggcagaacaagagatgtttagtgccaccgttgcaagggctttgggcacatgcagcgtgactgccctagcaagcgtgttttggtagtcaaggatgatggtgagtactcgtttgctagtgatttcgatgaagatacacttggattgcttgcaactaacaacaaaggtagcgaggaagaggaacacgtcggggctgatgttgcggaccaatatgagagacttattgtgcaacgtgtcttgagtgcacaaatgggcaaagtagagcagaaccagtggcataacctttttcagacgaagtgtgtcgtcaacaagcgttcctgctgcacaatcatcgatggaggtagttgtaggaacttggtaagtacggagatggttacaaagctagctttgcagacgaaaccacatccccacccatactatattcagttgttcaacaacagtggccgcattaaggtaacacaactggtgagattaaattttgcaattggttcttactatgattttgttgactgtgatgtcgtacctatgcatgcttgctccttgctgttgggtaggccttggcaatatgataaagacacgttgcatcatgatagaaccaatcaatactcctttatgcataatggaaagaaaattgtgttgcatcctatgactcctgaagttgtttttgagaatgatgttgctagagctaacaaagagaaaaatcataacaagaaaggttctaaatctaaccatagcaaggatactgtgattaaattgaatggtccttgtttgcatgccactaaatctgatattgtcaatttggatacaagtgacactgtttgctatgctctcatttgcaaggatgccttgttttcttttgagaatatgcctgtctcttttcctcctgcaatcactaaccttttgcaagagtatgaggatgtgatccccaaggacatacctctgggcctgccacggtgcgtggaattgagcatcaaatcgacttgatcccaggagcttcgttacccaatcgtgcgccataccgaaccaaccccgaggaaaccaaggagattcagcgtcaggttcaggacttgcttgacaaagggtacgtacgtgaatctcttagtccatgtgctgttccggtgattttggatcatggcgtatgtgtgttgattgtagagctattaataacattaccattagatattgtcatcctaggttagatgatatgcttgatgaattgagtggctctactgttttctctaaagttgatttgcgtagtggttaccaccaaattggtataaagttgggcgatgaatggaaaacgacatttaaaacaaaatttgggttatatgagtggttagtgatgccctttggtttaactaatgcaccaagcactttcatgaggttgatgaatgaggttttgcttcctttcattgaaaaatttgtggtggtatactttgatgacattctgacttatagcaaatctttggaggaccatctcgatcatttacgtgttgtttttaaagctttacgtgatgcacgtttgtttgataaccttgagaagtgcaatttttgcaccgatcgagcctcgtttcttggctatgttgtcactccacaggagattgaggttgatcaagccaaggttcaggcaattcagagttggtcgactcctaaaacggtttcacaggtgcggagctttctaggactcgtggggttttatcgccattttgtgcgggatttcagcaccattgctgcaccattgaatgagcttacaaagaagggagtgcctttcacttggggcacatcacaagagaatgccttcacatgttgaaagataagttgacacatgcatctctcctccaacttccagattttaataagacttttgaacttgagtatgatgctagtgggattggattgggtggtgttttggtacaagaaggaaaacatgttgcatattttagtgaaaaattgagtgggcctgttctgaattactctacttatgataaggaattgtatgctcttgtgcgcactttaaaaacatggcagcattatttgtggcccaaggaatttgtcatacattctgatcatgagtctttgaagcatattcatagtcaaggaaaactgaaccgtagacatgctaaatgggttgaatttattgaatcttttccttatgttattaaacacaagaaagggaaggaaaatgtcattgctgatacactgtctaggagatatactttgttgacacaacttgacaacaaattttttggcctagaaatgattaaagaccaatatgtacatgatgatgatttcaaagatgtgttgctgcattgtaaggatggaaagacatggaacaaattcttcttgaatgatgggtttgtttttagagctaagaagctatgcattccagctagctccgttcgcttgttgttgttgtaggaagcacatggaagtgatttgatggggcattttggtgccaagaagacggtggacatccttgctggtcattttttttggccaaagatgagacgagatgtagatcgattcgttgctcgctgtgctacatgtcaaaaggctaagtcacgttttaatccacatggtttgtatattcctctccctgttcctactattccttggaagatatttcaatggattttgtgttaggattgcctaggaccaatagggggtgtgatagcatttttgtggttgtggatagattttctaaaatgtcacatttcataccatgtaataaaactgatgatgcttctcatatcgctgatttgttctttcgagaaattgttcgcttgcatggtgtgccaaacacaattgtttctgatcgtgacacgaaatttcttagctatttttggagaactttgtgggctaaattggggactaagcttttgtttactactacttgtcatccccaaactgatggacaaacagaagtggtgaatagaaccttgtctactatgcttagggctgtttcgaagaaaaatatcaagatgtgggaagaatgcttgcctcatattgaatttgcttataactgttccttgcattctactacaaagatgtgcccatttcaatttgtgtatggtttgttgcctcgtgctcccattgatttgattgctttgccatctcctgaaaaactgaattttgatgctaagcaacgtgctaagttgatgttaaagctgcatgagacaactaaagaaaacatcgagcgcatgaatgctaagtataagtttgctggtgacaaaggtagaagggaattgaattttgaacctggagatttggtttggttgcatttgcgaaaagaacggtttcctgacttgcaaaaatctaaattgatgcctagagctgatggtccatttaaagtgttagccaaaattaatgagaatgcatataagcttgatttgcctgcagattatggggttagtcccacatttaacgttgcagatttgaagccatatttgggcgaagaagatgaacttgagtcaaggatgactcaaatgcaagaaagggagtatgatgaggacatcaataccaacgatatatacatccacacctccacaagtacaacttcatggtcctattacccacgctcatgcacgtcaactcaactatcag

SEQ ID NO: 13435 - DNA, 612 bp, Oryza sativa
  Clone ID: PAT_MRT4530_1946C.1
atgttggaaaattgcttcagatactacaaaggatgtcaagattatcagaagtttggagcaattcaaagagcaccagcatcggctatgaatcccattatcaagccatggccatttcgagggtggggtatggacatgatcggccagattaatccactttcagttcctccctacaagctggtttatggacatgaagcagttttaccatgggaagtcagaatcggctcaagaaggacggatttacaggatacatggacagccgatgagtactacaaccttatggccgatgagagggaagatttggtccagtcaagattacgagctcttgcaaaagttaccaaggataaggagagaattgctcggcattataacaagaaggtggtgcctaaatctttttctggatgggagcttgtttggaaattgatcttgccgataggaactcgtgatagtaaatttggcaagtggtcaccaaatcgggaaggaccgtttcagatccacaaagtggtgtccaaaggagcttatatgttgcaaggacttgatggagaggtttatggacgggcactcaatggtaaatatttgaagaaatattacccaagtgtgtgggttcattcatga

SEQ ID NO: 13436 - DNA, 1224 bp, Oryza sativa
  Clone ID: PAT_MRT4530_19470C.1
atggatgaccatgactacgttggtgattctgaggatgatgcggaccagcgacgacttcgcttcaaccgtcgtggtagacctcatcgtcggctacgccgtgaggtacggaataatgatgattcgtttggtaagactaaattcacgattcctgcttttgatgctgaaagggaagtgcagggacgacatgcgcaaacatgggctaacattcctacaggtagaactctatgggtggcttggagtggcgctgccccagccggtcgcgcatcatcttcaacatcgacatcagcaccctccaatagcaacaaagtgcgcccaacaccttctgcggccccctctcgtgctgcagaggctgcagcaaagcccgccaagagtgcctcctccgttgcttccacgggtagaacaagagatgttcaatgccaccgttgcaagggctttgggcacatgcagcatgaccgccctagcaagcgtgttttggtagtcaaggatgatagtgagtactcgtctgctagtgatttcgatgaagatacacttgcattgcttgcagctaacaacaaaggtagtgaggatgaggaacacatcggggctgatgttgcagaccaatatgagagccttattgtgcaacgtgtcttgagtgtacaaatgggcaaagcagagcagaaccagcggcataacctttttcagacgaaaagcaatcaatactcctttgtgcataatggaaagaaaattgtgttgcatcctatgactcctgaagctgtttttgagaatgatgttgctagagctaagaaagagaaaaatgttgagcatgctaaatgtgaaaatcagattgtagcaaaagaacttgtgcaccataacaagaaaggttctaaatctaaccatagcaaggatagtgtgattaaattgaatggtccttgtttgcttgccactaaatctgatattgtcaatttggatacaagtgacattgtttgctatgctctcatttgcaaggatgcattgttttcttttgagaatatgcctgtctcttttcctcctgcagtcactaaccttttgcaggagtatgaggatgtgttccccaaggatgtaccaccggggctgccaccggaatatcttgatcatttacgtgttgtttttaatgctttacgtgatgcacgtttgtttggtaaccttgagaactgcactttttgcaccgatcgaatctcgtttcttggctatgttgtaactccatag

SEQ ID NO: 13437 - DNA, 2443 bp, Oryza sativa
  Clone ID: PAT_MRT4530_19471C.1
cgccgatagatgcagggttttgagggaacggtggagattcactccctatggcggttggagggtattatcgacctttctaaccgccataaccaaagttgtaactcctttcattggaaaatttgtggtggtctactttgatgatatcttgatttacagcaagtctatgggtgaacattttaatcatttacgtgctgtttttaatgctcttcgtgatgcacgtttatttggtaaccttgagaagtgcaccttttgcacagatcgagtttcttttcttggctatgttgtaactccgcaggggattgaggttgatcaagccaaggttgaggcaattcagagttggccgactcctaaaacggtctcacaagtgcggagctttctaggactcgcggggttctatcgccgctttgtgcaggatttcagcaccattgctgcaccattgaatgcgcttacaaagaagggagtgcctttcacttggggcacatcacaagggaacgccttccacatgttgaaagataagttgacccatgcacctctcctccaacttcccgattttaataagacttttgaacttgaatgtgatgctagtgggattggattgggtggtgttttgctacaagaaggaaaacctgttgcatattttagtgaaaagttgagtgggcctgttctgaattattctacttatgataaggaattgtatgctcttgtgcgaactttagaaacatggcagcattttttgtggcccaaggaatttgtcatacattctgatcatgagtctttgaagcatattcgtagtcaagggaagctgaaccgtagacatgctaaatgggttgaatttattgaatcttttccttatgttatcaaacacaagaaagggaaggagaacatcattgctgatgctttgtctaggagatacactttgttgacacaacttgactacaagatttttggcctggaaacaatcaaagaccaatatgcgcatgatgctgattttaatgatgtgttgctgcattgtaaggatggaagaacatggaacaaattcgtcaccaataatgggtttgttttcagagctaataagctatgcattccagctagctccgttcgcttgttgttgttgcaggaagcgcatggaggcggtttgatgggacattttggtgccaagaagacacatgacatccttgttagttatttcttttggccacagatgcgaagagatgttggcaggttcgttgctcgctgcgctacatgtcaaaaggctaagtcacgcttacatccacatggtttgtatatgtctcttcctgttcctactggtccttgggaagatatttcaatggattttgtgttaggattgcctaggaccaagagggggcgtgatagcatttttgtggttgtagatagattttctaaaatggcacatttcataccatgtcataaaactgatgatgcttctcatatcgctgatttgttctttcgagaaattgttcgcttgcatggtgtgccaaacacaattgtttctgatcgtgacacaaaatttcttagccatttttggataactttgttggctaaattggggactaaacttttgttttctactacttgtcatccccaaactgatggacaaactgaagtggtgaatagaaccttgtctactatgcttagggctgttttgaagaaaaatatcaagatgtgggaagaatgcttgcctcatattgaatttgcttataatcgttccttgcattttactacaaaaatgtgcccatttcagattgtgtatggtttgttgcctcgtgctccaattgatttgatgcctttaccatcttctgaaaaactgaattttgatgctaagcaacgtgctaagttgatgttaaaactgcatgagacaactaaagaaaacatagagcgcatgaatgctaagtataagtttgctggtgacaaaggtagaagggaattgaattttgaacctggagatttggtttggttgcatttgcgaaaagaacgatttcctgatttgagaaaatctaaattgatgcctagagctgatggaccatttaaagtgttagcaaagattaatgagaatgcatataagattgatttgcctgcagatttcgaggttagtcccacatttaacgttgcagatttgaagccgtatttgggagaagaagatgagcttgattcgaggacgactcaaatgcaagaaggggaggatgatgaggacatcaacaccatcgatacatccacgtccccccatgtacagcatgatggtcctattacccgtgctcgtgcacgtcaactaaattatcaggacgagtgccctcgtggccgggttgacgcacaccacaagttcgcggcgaccattggagacgatcgggccacaaaccctaacggattcgcatcagatgttctggatgctgtgtctatttatacccgaggattacaagatatgccc

SEQ ID NO: 13438 - DNA, 1146 bp, Oryza sativa
  Clone ID: PAT_MRT4530_19472C.1
atggcccatctccagctcacgccgctcgccgccggcggcggccgcggcggcgccgacgagatggaggaggtcgcgctgctcggccccgaatcctacgacgaggaggcggcggcggcgccggggccggaggaggaggaggggatgcggcgggtgcaggaagaagacatcatagaagcaatagaagatgctggattcgaggcagaactactcccggactctactgtttctcagcccaagctgcagaacactttatctggacaatttaggataggggggatgacatgcgctgcatgtgtgaattctgttgagggtatcttgaagaaattgcctggtgttaaaagagctgttgttgcattagcgacctcattaggggaagttgaatacgatccttctgtcatcagcaaagatgaaattgttcaggctattgaggatgctggttttgaagctgcactgttacaaagtagtgaacaagacaaggttttgctaggcttaatgggattgcatactgaggtagatgtagatatattgcatgatatcctaaaaaaaatggaaggcttgcgtcagttcaacgtaaatttggtactctcggaagctgaaattgtatttgatccagaagttgttggtttgaggtcaattgtggataccatcgagatggaaagcagtggcagactgaaagcccatgtacagaatccttacatacgggctgcttcaaatgatgcacaggaggcctccaaaatgcttcatcttctttgctctagcttattcctaagccatactgactctcctctggttcccttacaacagattcctgtattttttattcgcatggtatgccctcgcatacacttcactcgttccctcctactcatgcacttgggaccattttatataggagacttgttgaagtggatactggtgagtatagtacagtttggtgttggcaaacgattctatgttgcagcctatagggccctgagacatggctctacaaatatggatgtactagttgttcttggcaccactgcatcatacgtctactctgtatgtgcgcttctttatggtgcattcactggatttcatcccccgaaatattttgagacaagtgccatgataatcacatttgtgctatttgggaaatatcttgag

SEQ ID NO: 13439 - DNA, 340 bp, Oryza sativa
  Clone ID: PAT_MRT4530_19473C.1
atgatgaggacacaactagctcggatataaccatgactaccttatgtattaatcaaccaaagcatcaacttcaaatggacctagctgctgatttagaaggaattttggggcccatagtacttgatggaaagcttatggagtctactttcagatggttttggtcccacgtcaaaattcctaccgagctgccaggaatctgcaaaacaagccacgtatctcattcagtccgaatctgatttaagttttgggccttgtaattgtgagacctagagcaaggtcgagtctgaggcagaccttagtctacattcttatcccgcaaacagataaaggtgtgccccta

SEQ ID NO: 13440 - DNA, 389 bp, Oryza sativa
  unsure (1)..(389): unsure at all n locations
  Clone ID: PAT_MRT4530_19474C.1
ctttccggccagagccaactcggcctgctgtttgttgccccagaggaggacaacatggagacgatcgtcgcgcaggatgcgcttgtaatcacgtggaactcgtcgccagacaccgcagatcttgcccgtggcattctgatagacactgagagtgcccgccaaggtggtctccagttgatgctccacattctgcggattgtaggtggtgtacatggacttcatttcctcacccttgaggaaataggaggtgcggcccgttagcaacgcagcgtaatgtttcatgttgcgctcttcctcttcattgggcacgggcacatccaaggctacatccgtatcatccatccagccagccatccagccagccatgtaggcgaatccaagaggnccca

SEQ ID NO: 13441 - DNA, 3126 bp, Oryza sativa
  Clone ID: PAT_MRT4530_19475C.1
atggcccatctccagctcacgccgctcgccgccggcggcggccgcggcggcgccgacgagatggaggaggtcgcgctgctcggccccgaatcctacgacgaggaggcggcggcggcgccggggccggaggaggaggaggggatgcggcgggtgcaggtgcgggtcacgggcatgacgtgctccgcctgcaccgccgccgtcgaggccgccgtctccgcccgccgtggcgtgggcggggtcgccgtctcgctcctccagagccgcgcccgcgtcgtcttcgaccccgcgctcgccaaggaagaagacatcatagaagcaatagaagatgctggattcgaggcagaactactcccggactctactgtttctcagcccaagctgcagaacactttatctggacaatttaggataggggggatgacatgcgctgcatgtgtgaattctgttgagggtatcttgaagaaattgcctggtgttaaaagagctgttgttgcattagcgacctcattaggggaagttgaatacgatccttctgtcatcagcaaagatgaaattgttcaggctattgaggatgctggttttgaagctgcactgttacaaagtagtgaacaagacaaggttttgctaggcttaatgggattgcatactgaggtagatgtagatatattgcatgatatcctaaaaaaaatggaaggcttgcgtcagttcaacgtaaatttggtactctcggaagctgaaattgtatttgatccagaagttgttggtttgaggtcaattgtggataccatcgagatggaaagcagtggcagactgaaagcccatgtacagaatccttacatacgggctgcttcaaatgatgcacaggaggcctccaaaatgcttcatcttctttgctctagcttattcctaagccatactgactctcctctggttcccttacaacagattcctgtattttttattcgcatggtatgccctcgcatacacttcactcgttccctcctactcatgcacttgggaccattttatataggagacttgttgaagtggatactggtgagtatagtacagtttggtgttggcaaacgattctatgttgcagcctatagggccctgagacatggctctacaaatatggatgtactagttgttcttggcaccactgcatcatacgtctactctgtatgtgcgcttctttatggtgcattcactggatttcatcccccgaaatattttgagacaagtgccatgataatcacatttgtgctatttgggaaatatcttgaggtgcttgctaaaggcagaacatcagacgctattaagaagcttgtagagctggtccctgctacagcacttttgcttctgaaagacaaagaaggaaagtatgctgcagagaaggagattgatgcatccttaatccaacctggagatgtcttgaaagtgctcccaggttccaaggtacctgctgatggtactgttgtttggggtacaagtcatgttgatgagagtatggtaactggtgaatctgcacctatctccaaggaagtatccagtatagtaattggaggcacaatgaatttacatggaatcctccatatacaagcaactaaagtaggatcagggacagtcttgagccagataatctctcttgttgaaactgcccagatgtctaaggctcctattcagaagttcgctgattatgtggctggcatttttgttccaatagttgtcaccttgtccttggttacgttcattgcatggtttctttgcggatcgttgggagcatacccaaattcatgggttgatgaaactagcaattgctttgtcttctctctcatgttctccatctctgttgtggtgatagcctgcccatgtgctcttggtctggcaacgccaactgctgtcatggtagcaactggagttggggctaatcatggggtacttgtaaagggtggagatgcactggagagggctcagaatgtgaaatatgttatatttgataaaactgggacactgacacaaggaaaggctaccgtaacatcgacgaaggtattctcaggaattgatcttggagacttccttactttggtagcatctgcagaggcaagcagtgaacatccacttgcaaaagctatattggattacgcatttcatttccatttctttggcaaactcccctcatcaaaagatgacatcaagaaaagaaaacaacagatattatcccagtggcttctggaagtagcagaattttctgccttgcctggcaaaggggttcagtgtttgatcaatgggaaaaaaatcttggtgggaaatcgtactttgataactgaaaatgggataaatattcctgaagaagctgaaagtttcttggtagacctcgaactgaacgcgaagacaggagttcttgtagcatatgacagcgaactcattggctcaattggaatgactgatcccttgaaaagggaggctgttgtagttgttgaaggcctaaaaaagatgggcatctatccagtaatggttacaggggacaactggaggactgcacaagcagttgcaaaggaggttggcattgaggatgttagagctgaggttatgcctgcgggaaaagctgatgtcgtacgttctctccaaaaggatgggagtgtcgttgcaatggttggggatggcatcaatgactccccagccctagcagcagctgacgtcggaatggccattggtgcaggaacagacattgcaattgaagcagcggactatgtgctggtgcgaaacaaccttgaagatgtcatcacagcaattgacctctcaaggaagacgttcagccgaatccgatggaactacttctttgccatggcgtacaacatcatcgctatcccggttgctgctggagcactcttcccattcaccggcctccaaatgccaccttggctggctggtgcttgcatggcgttctcatctgttagtgtagattttgttgacagatagttgaggagatacagaaaaccaaggctcacaaccctgttacaaataactgtagagtgaatttttttgcccccttcttcttctttttcttttttgcattattcacttaatagtagaaatgagaggtgcctatatgtggatgtacat

SEQ ID NO: 13442 - DNA, 386 bp, Oryza sativa
  Clone ID: PAT_MRT4530_19476C.1
tcggcctgctgtttgttgccccagaggaggacaacatggagacgatcgtcgcgctggatgcccttgtaatcacgtggaactcgtcgccagacaccgcagatcttgcccgtggcattctgatagacactgagagtgcccgccaaggtgggctccagttgatgctccgattcgcgatgaggtgtagaaggagtagtatagattcttcttgtggaacaggaaacgggcggtggccaccacattctgcggattgtaggtggtgtacatggacttcatttcctcacccttgaggaaataggaggtgcggcccgttagcaacgcagcgtaatgtttcatgttgcgctcttcctcttcattgggcacgggcacatccaaggctacatccgtat

SEQ ID NO: 13443 - DNA, 383 bp, Oryza sativa
  Clone ID: PAT_MRT4530_19477C.1
ctttccggccagagccaactcggcctgctgtttgttgccccgaggaggacaacatggagacgatcgtcgcgctggatgcgcttgtaatcacgtggaactcgtcgccagacaccgcagatcttgcccgtggcattctgatagacactgagagtgcccgccggtggtctccagttgatgctcaggaaacgggcggtggccaccacattctgcggattgtaggtggtgtacatggacttcatttcctcacccttgaggaaataggaggtgcggcccgttagcaacgcagcgtaatgtttcatgttgcgctcttcctcttcattgggcacgggcacatccaaggctacatccgtatcatccatccagccagccatccagccagccat

SEQ ID NO: 13444 - DNA, 398 bp, Oryza sativa
  Clone ID: PAT_MRT4530_19478C.1
agctggtcgatcgcccataaccgcaagcatgtccattcgaatagttttactctggctagaagtgtacaactatacccacaagacgcaatccaccggcatgtcaccgtgcttccgcaggcatgtcaccatgcgagtgattgcaacaagtcccttcgcataactcccctaaccaagtgcaccacattgcaggtttcacccgtacctttaaaaccaaggtgggcaatcccctcttgtgctacaatgaatccggaagccgcatagaccgctgcccagtccatccaaacttcatcacacccacccttacttgggtacatcggaaagggaaaagctatactagaagttcagcaattgcccatgctttcttgtggtaagcatggtaagtcttatagggtttcacg

SEQ ID NO: 13445 - DNA, 571 bp, Oryza sativa
  Clone ID: PAT_MRT4530_19479C.1
gtcgtaccttatcgcccagcatcatcttattctctatttgtattccctccatctttcaatggctggctggatggctggctggatggatgatacggatgtagccttggatgtgcccgtgcccaatgaagaggaagagcgcaacatgaaacattacgctgcgttgctaacgggccgcacctcctatttcctcaagggtgaggaaatgaagtccatgtacaccacctacaatccgcagaatgtggtggccaccgcccgtttcctgttccacaagaagaatctatactactccttctacacctcatcgcgaatcggtcgtccgcgtgccattcaattcgttgatgatgcgggtgtaatcctggaggagcatcaactggagaccaccttggcgggcactctcagtgtctatcagaatgccacgggcaagatctgcggtgtctggcgacgagttccacgtgattacaagcgcatcctgcgcgacgatcgtctccatgttgtcctcctctggggcaacaaacagcaggccgagttggctctggccggaaaggtggccaaatacacggccctgcagtag

SEQ ID NO: 13446 - DNA, 1205 bp, Oryza sativa
  Clone ID: PAT_MRT4530_1947C.1
ccggccgggactcatccccttcctccgaaaaccctagctgagagagagcgaccgccgccgccgccaccgagccactgcttcttctgtgcggagagagagagagagagagagagagagctccgccgccgccgccgccgctccaccgagccactgcttaccttcccttctcctcctcctgctccgccgccgccgccgccatgggcaagtactcgacggagccgtccaacccgaccaagtcggccaaggccatggggagggatctcagggtccacttcaagaacacaagggagacagcgttcgctcttcgcaagctgcctttggtcaaggcaaagcggtaccttgaggatgttattgctcacaagcaggcaattcccttcagaaggtactgtggaggcgtgggccgtactgcacaagtgaagtctcgccaatcaaatgggcagggcaggtggcctgccaaatcagccaggttcattttggatctgctgaagaatgctgagagtaacgctgatgttaaaggcttggatgtcgacaacctcttcgtttcacacatccaggtgaaccaagcccagaagcagagacgccggacataccgtgctcatggacgcatcaatccttacatgtcctcaccctgccacgtcgagcttatcttgtcagagaaggaagaggccgtgaagaaagagcctgaaaccaccatcgccccgaggaggcagtgagcttatccgaccagagccacagcggtagcacattgactaggactttgttacggcattgtgcgctatgtatgcttttggtaccattgtttagtcggaacttgttaagtttgatgctatcctttcgtttgtgtatgttcaaatggtaacaattacttgccaacttatctgccaaaattttactgccttacaaaaaaaaaaaaaaaaaaaaaaaaaaaaaaaaaaaaaaaaaaaaaaaaaggggggggcggtttaaaagaaccaaagttaactaccccggcatggcaaggtaaaagttttttaaaggggcaaccaaaatcaaatcaatgggccgcggtttaaaaacgtgggaatgggaaaaacctgggggtacccaaattaaatggcttggaagaaaatccccttttggcaagtgggggaaaaaccaaaaaggccggaacgaacggcctttccaaaaagtggccaacctgaaagggcaaagggaccccccctgga

SEQ ID NO: 13447 - DNA, 251 bp, Oryza sativa
  Clone ID: PAT_MRT4530_19480C.1
atgtctatcgtgattagtctcacacttctcaccataataaatgatgctataactggtaataatttgattagctcctggtttagaatggtacattcctagtttggagatagatctgtacagccgggtttggttgttcaggatggttgggcctgtgcagcatgggtgtgttgttcagtgttgattagtattgatgattaattactctactgttttacaattctcaaatgtttcctaaatgctgcttttgcaaa

SEQ ID NO: 13448 - DNA, 1302 bp, Oryza sativa
  Clone ID: PAT_MRT4530_19481C.1
gcgcgtgccgccccgcccgccaggcgtccgcccgacccgcctcccgccgcgcgactcagctcagctgcgcgtccgcggattcggggttatgggcatcgatcgtgcccactcccccgccatcgccgccgccgccgcgatttaagcaatccaaacgagcgagcgagcaaatcttgtcgaacaccagatcccccaagctcaatcattcaatcaaccgtgtgagtcgttcttgattcgatttgcgagatggattcacggatgctgctgatgctgatgcagctgctcggctccccgacatcgctcgccgttctcctcctctccttcttccaaggctcggtcggcgtcggcgcaatcaccttcaccttcaccaaccggtgcacggacacggtgtggccgggggtgctgtcgggctccggcacgccgccgctggagaccaccggcttcgcgctctcgccgggggggtcgcgctccctctacgcgccgtcggggtggtcgggccgcttctgggcgcgctccggctgcgaattcgacgactccggcaagggctcctgcgccacgggggactgcggctccggccaggtggagtgccgcggcgcgggcgcctccccgcccgccacgctcgccgagttcaccctcaacggcgccgacggcaaggacttctacgacgtcagcctcgtcgacggctacaacctccccatgctcgtccaggcctccgcccccgactgccccgacaccggctgcctcgtcgacctcaacgagcgctgcccctccgagctccgcgccgacgatggccgcgcttgccgcagcgcctgcgaggcgttcggccgacctgagtactgctgcaatggcgcctacggcaacccggacacctgccacccttcccagtactcgcagctcttcaagtcggcgtgccctaaatcctacagctacgcctacgacgacgccacctccaccttcacctgcaaccacaccgattacaccatcaccttctgcccccgatccactccatccagcacattgagattttgggctaaaattggggatttcgatgtggaacatgaattggggaaagtaaagtgggaattcaaagaacggatcacggagaccgagccacgagcagctcgaagatgcggtgtggctggcgagcttgaaggccagcagtggcgcggggatggctgcaactgcggcatcatggccggcatccttagctttccaatctgccttggcaattgcagtggtgatcctgcttgcccagcaggagcatcccgtattattcagctagtagcaagtgagaaggattcttga

SEQ ID NO: 13449 - DNA, 267 bp, Oryza sativa
  unsure (1)..(267): unsure at all n locations
  Clone ID: PAT_MRT4530_19482C.1
ctggcggtcgcccgatcttcctcctcacactcgttctcttgatcaaccaagttcaancaactatttggaatttgtcccaatgtaaatttatgcnatatgcccatttatgtcattcgttataaaattcanctcacttagagagaagtcagttgacagactccaggattcaggagtcacctgacagtttatcccgagttaaatggaccagtgttaatatgtcaaatgtcagatgggatcagaaattattttatttagaccaaaaaaaaa

SEQ ID NO: 13450 - DNA, 859 bp, Oryza sativa
  Clone ID: PAT_MRT4530_19483C.1
ttaattaattaaaagatataagaatcctctagagtcaatttctcctaagttgttgtccttgatcgaatcttgatcgttgatgatacacacacgttccttgtgttcgatacccttggaaactctaatgggaagtgcaacaatggtattacgtgcgtgattgtaagaaataccaacactgccctgcgtgttgttgccgccatcaacaccgccatcgctctcccttccacattcgaagctgtcgggcatctcctcgccgaggccggtgacggcagccgatgcgccgtggtctctcccaccgcaatcgctgccgccgccgttgccgtagcgcttgcctcctctgccgagaccattggcccacttctcgccaaggccggtggcaactgttgcaggtgtctgcacacctctgtcactaagttcgatgacagtggattgcgtgcctgacggggtcttgttcgacgtgccggtggtcgtcctcgaccttgatggttggccaatggcacgcttgttgccgacttcagtcgcagacaatgcctcactgtgctccttcctcgctagctgctccaaacctctgaccccggcactcctcccactgcgcccgccttcggcacccctcgccgcactggaccacgtcatcacgctctcgtagctcttctccagctccctgccctcggcacaagctgtggagacgttgtctatgcgcagctgatcgacctcacctccctcgtccgctttgcttggttcccccttgagcgccgtcgtcttcatcaccctcctggtagtacgcgtagggatcctccgaagcttcatctccggcctcagtgttcacatttgaataacgacggttctgtccaccatccat

SEQ ID NO: 13451 - DNA, 1425 bp, Oryza sativa
  Clone ID: PAT_MRT4530_19484C.1
tggatccccgggctgcaggaatcggcacgagggttcttctgttcttgaatgctccggactccatagatcacccttcttctcccaaagatgtataaggctaaaaggactgctgcccagaaagtaaggcgctgccttggaaaatatgagcttggacgcgcaattggtcaaggaacttttgcaaaggttaggtttgcaaagaacatggagaccggtgatcatgttgctattaagatccttgacaaagcgaaggttcagaagcacagattagtcgaacagattagacgggaaatttgtacaatgaagttgatacaacaccccaatgttgttcacctgcatgaggtgatgggaagtaaaacaaggattttcattgttctagaatatgtgatgggaggagagctccatgatattattgccacaagtggaaggttgaaggaggatgaagcacggaaatactttcagcaactgatcaacgccgtagattactgccacagtaggggtgtataccacagagacctgaagttagagaatttgttgcttgatactgccgggaacatcaaagtctcggactttggcctaagtgctatatctgagcaagtgaaggctgatggattactacatactacatgtggaacacctaattatgttgctcctgaggttattgaagataagggctacgatggtgctcttgcagacctttggtcatgtggagtaattctttttgtgctgcttgcaggatatcttccttttgaggatgaaaatattgtctccctttataacaagatttctggagctcagtttacttgtccctcttggttttctgctgaagctaagaggctcattgctagaattctggatccaaatcctgctactcggataactacttctcaagtgctacaagatcaatggttcaaaaaaggctatgagtcccctgttttcgatgacaaatattacccttatttccacgatgtttatgatgcttttggagactcagaagaaaaacatgtgaaagaggctatggaagagcagccaaccttgatgaatgcctttgagttgatttcactaaataagggtctgaatctagacaatttttttgagtctgataagaagtacaagagagagacaagatttacatcgcagtgccctccgaaagaaatcatcaataggatcgaagaagctgctaacttactaggatttaatattcagaagagaaactacaggatgagaatggagaatataaaggaaggaagaaaaggacatctaaacattgcaactgaggttttccaagtggcaccatccttacatgtggttgagctcaaaaaggccaagggagataccctggagtttcaaaagttctaccaaacgctctcgacgcaactaaaagatgttgtttgggaattagaagatgcggctgaggatatgagctaa

SEQ ID NO: 13452 - DNA, 780 bp, Oryza sativa
  Clone ID: PAT_MRT4530_19485C.1
cacgcatctctccccccatcgcccatcgccaactcctgatccaatccctcctctcggcacccatcgcccccatccccaatccccgaccatcctctcactagatcccaatccctcctctgtcgcccctatccccaatccctcatggcgctgcggttcttcgattcggcagtcggagatggcacgacggtcgaagatggcgaggtggcggtcggagatggcgcggcggcggttggagatggctacagcgtgcatggccagaaggcgcacactcaagcggagggtggcggaagcggcggcgaaagccgcagcgtaagtggagtctacagaggaccacgttcagcgacaagtagaatactggaggcgtgggttttgggtgtctctcaaaggcaagaacaagcaacatcccgacggcggcgcccctcccgactccgagttacaagtgggtggtggagggcaccgtgtggagcggtgctcggcactaaggacatctacttcgtccccaagtcagagctgcaaggtggtagcgatgtccctgacttcgaagagcaagtgggtgctggggtgcctaacggagagcagcagctgaacaacggcctcttcaccgacttggacgatcaacagatggatgacgttgaagagccgattgatgtagaggagatggccatcctaggagatgatgatgacacagtggctggcgacgagggcatcgacgaatttgctgaaattcgtgaaggtatgttgaggcttttactcccagcctacttcaccatacgtcactaa

SEQ ID NO: 13453 - DNA, 434 bp, Oryza sativa
  Clone ID: PAT_MRT4530_19486C.1
gggatgcggattcaaaccaaaacgtccatatgaaaccaagccagtatgcggcggggtaataaatactctagaagtctaatcaagaacattttattccgcaaaggagcactcacgcaggccaagtcttacgctagcatttgaagcctgccaacagcggttcgatgaatagcagaagaggaaatgaagtaaaaacaaatatggggcgattcttgctgccgcatatatatacaggatcatcttagcagcacagaataggggaagtgcctgaggacgtcttgaccaatgcttatttatcgaggctagcatatgatattagaagacatactgccgccatcttgtggttgtcagcctatggaagagtcgatctcagttacttactgtctgccgcaaatgactccacaccaaaaccgttgacatatacattcagtaagagc

SEQ ID NO: 13454 - DNA, 717 bp, Oryza sativa
  Clone ID: PAT_MRT4530_19487C.1
atggcttccccggcgccgccgcccaccgcccggctccggccttctcaggccgccagcagtgcctcctcctcctccttccctacatccatctgcggccttggctcgctcggcgacgcctctagggtttcctccgtctccttccggcggcgtccaccagcatcgcctctcgtccggtgctcccaagaccctggcaagattgaagtgtttaatactgaaggaaccgagcagtcacaaggaggctccactggttcgataaatcatggcaaatactcaacaaggagtttctcctctaaagatgctaatattacaacttataaccattatctacactgcttctgtgtcagcttgcttgaaagactaaagaggtatggtgctgctggtgttttgtcatatggactactaaataccgtctattatgtcacgacatttttattagtttggtttattttttctcctgctcctggtaagatgggttatgctgcggcagtagagagattcctcaagttgatggcaatggtatgggctggcagtcaagttactaaaatttttcgagcaggaggggcacttgcattggctccttttgttgatagagggctaagatggttcacagtcaggttcaacttcaaatcagaaggaaaggcatttgctacaattgttgggttctgttttgcacttgctgctctactgttctttggattaacaatactttgggcgtaa

SEQ ID NO: 13455 - DNA, 137 bp, Oryza sativa
  Clone ID: PAT_MRT4530_19488C.1
gctggtggcggcccatcagatgctgagctggatgggggcccacacatcagtctaacaaaaggtgcggacgtggtacactcgagcgcgtcatgggtttctcctgattggccgcgtccggtgggggccacctgtcagtg

SEQ ID NO: 13456 - DNA, 155 bp, Oryza sativa
  Clone ID: PAT_MRT4530_19489C.1
tcctgctgttgcatggctgtttattcccatcagtgctcctgccaccccttgcactgcagccatccaccaaaaaatctgcactgcatccacagtccagcagtgttgtgctgcacaaccctgcacctaggcactcatcaacagcatcacccagtgct

SEQ ID NO: 13457 - DNA, 398 bp, Oryza sativa
  unsure (1)..(398): unsure at all n locations
  Clone ID: PAT_MRT4530_1948C.1
cgccggagccggagagggaggagatcgcgcgcgatctgcttcttcgttacttggcccttgtggatgtcatctatctagtccgtccgtccgtctccgtgcgcaagtaagataagatcccatttaatttccttgtttgctgcagctgcaactgcaactgcaactgatgccggccgggctttgagttcttctccccccctgttggctngttagatgcccctgatccgattccatctcatcccatgggctgtgtcggctccaagcaattccatggcgccaacctgcacaaatctgcccgccccccgtcctccacctccaatcattccgattcactcaggcacctcgccacctacgattcaaccaagggccaggaggaggaggagccagaggaggccgctgat

SEQ ID NO: 13458 - DNA, 421 bp, Oryza sativa
  Clone ID: PAT_MRT4530_19490C.1
gtttatttttcttcccgtgccgccgccgccgccgccggttcatctcgacgccgaaagcggcgcaacctaaacaattggaccagctcacacgcccatcttcggattccaaccaaatctccgggatggcctcgacctgcttccgcgccgccgctccgatggcctcctccgcctgccgctcggcggcctcccgctcaataccctccgccactcgatgcgagacccctcgcatatccaggctgccggtggagcttggcagcaccgcggggtcgacgctgctgccgctgcacagcacggtggcggcggcgaggctaacgtcacggctcatcacagggtcccggagctgctgggcgctctctgagggtaccctctgtagcacctatccctgacttttacatcaatcaataccaatgatgagatgcac

SEQ ID NO: 13459 - DNA, 147 bp, Oryza sativa
  Clone ID: PAT_MRT4530_19491C.1
atgggcagcgatgtagttgacaaggagcaggtcctctaccatccatgccctgcactggaggtcctcctccataccctgccgctggcggttgcatcctcctcactgagcaagtcctcctccatggcccgtgctggaggtcgtcactag

SEQ ID NO: 13460 - DNA, 393 bp, Oryza sativa
  Clone ID: PAT_MRT4530_19492C.1
atgcgggtggggcaggtcgccttcgccggagcctccatcggcgtcatggcgtccggggccggcttcgccaactacacggccttctgctacttgattgcatcaatgggattacaatcattgtggagcttgggacttgcatgccttgacgtgtatgccttgacagtcaaaagggatctcaacaatgctcttctcgtaactgcacttctgtcctttgctgcatcttgctcagctggaggtgttatggttctgtttaaaagggacgtgcttttctgcagaaggtatccacaactgccttgtgggagattcgaacttgctgtagcgcttgcatttttgtcttgggcacttagtgctacatcagccattatcatgttctgtctccttgctgcattctag

SEQ ID NO: 13461 - DNA, 722 bp, Oryza sativa
  Clone ID: PAT_MRT4530_19493C.1
ccacgcgtccggaggaggaggggtttggggggtcgtgggatgtgggaggtggcgtggtggaggcccgggacgtggggcgggctggcgatgcgggtggggcaggtcgccttcgccggagcctccatcggcgtcatggcgtccggggccggcttcgccaactacacggccttctgctacttgattgcatcaatgggattacaatcattgtggagcttgggacttgcatgccttgacgtgtatgccttgacagtcaaaagggatctcaacaatgctcttctcgtgagtttgtttgtcattggagactgggtaactgcacttctgtcctttgctgcatcttgctcagctggaggtgttatggttctgtttaaaagggacgtgcttttctgcagaaggtatccacaactgccttgtgggagattcgaacttgctgtagcgcttgcatttttgtcttgggcacttagtgctacatcagccattatcatgttctgtctccttgctgcattctagtcttgcatataatcctgtgtaagttctgtttatagtgctgccttttttctgttttatcttgttagctttgattttgtataggatcattttcaagaatatgtagtgaaccacacgaccgaaaagtggaaatgctggggaagttcataagtcctttagagtgaacattttctagaaactactgaatggaagatttgatcgaaatgttcagctctttc

SEQ ID NO: 13462 - DNA, 225 bp, Oryza sativa
  unsure (1)..(225): unsure at all n locations
  Clone ID: PAT_MRT4530_19494C.1
tccgcatcactagcaancgcaanggcagcgcactgtgaccgagcgnaggcgcnggcgnagtagncgggtcgngaactcgggatggcgntctgcggggcgaaggcggcggcgccgtccatntntggtgncgncgagcatgngcgccgtngagngtgcaagggaccagncgggcctntnacgcntgggactacgacctncgntccntctanctccgcggcgccgact

SEQ ID NO: 13463 - DNA, 648 bp, Oryza sativa
  Clone ID: PAT_MRT4530_19495C.1
atggcggcagagcggcggggaggagtgccggcggccggagtggggcggggaaggagcggcggcggcctacgacgacaattgcagcaaggaacgccatcgtcggagcactcgtctacccggagtgccggcgtctccttgactttctggcgttgcggctctggccgttttatcctggaacgctcgtcttccttggcgccggcgagccattctacctgttgtctgacccgttccgacttcctctgcgttccctctccgccatcttctcccccgtcggaacactcgctgacaagctcctcgtcggcctcgcccggctccgggcagcgtccacccccggacgaggtcatcatcttgtcgctggagacgaccacggcgatgcacctggagaagcttgggttctcgccatccatcgtggagcaattcctgcggccgttcctggccgggatactctttgacccggcgctcgacacgtcgtcccgtctcttcaagctcgtgttcaagcgcctctcccacggcggcggcagcgagcggagcgagcgcaacggcagcagcagcgtgagcggcagcggcgttgagcagcaatggcgcggcagcggcagcagcagcggtggtgacggcgccggagcagaagcagcggggagagagagctag

SEQ ID NO: 13464 - DNA, 147 bp, Oryza sativa
  Clone ID: PAT_MRT4530_19496C.1
atggcggtgatgagttggcgcgagatcgaagagaagtcgtcgcatctcgtcggagaagaagatgagctgagctgggtcgctctcatgcttgtcgctgaatgcgaaggcgagatcatgcaggaatgggcgaacgattcatggctgcat

SEQ ID NO: 13465 - DNA, 198 bp, Oryza sativa
  unsure (1)..(198): unsure at all n locations
  Clone ID: PAT_MRT4530_19497C.1
agatgtgaacttattatgtcgttatgttttatatttggttggtgtggtatcctagttagccatattagtggaagctgtaaaaaatgatgtcatgctggtctattctntggctcgctntntattgcatcttttgccaactccaagcgggagcttatggcttaaacggtggttgttaggccaaaaaaaaaaaaaaaaaaa

SEQ ID NO: 13466 - DNA, 380 bp, Oryza sativa
  Clone ID: PAT_MRT4530_19498C.1
ctcccgcgctcccgacgcccgtcgccgcgctcgaccaccgccggtccgctcccacgcttgcccaccgtcactccacgcgctgcccgctgctccgctcctgtgctccccgcgcccgtcgtcgcgctcaaccgccgctgctctactcccacactcgctcgccgtcgctcccgtgctccccgcgcgccgctgcgcccgctccgtcccggacgccacgcccgcatctgcccgcctgctccgcgccgcccgcctgccgtgctattttgccgctcgccgccggcctcccctcaccgaggaagagaagagagaagagagagaagagaagagaaggagaggaaaagaggagagagtggctgacatgtgggccccacgtatttttttaa

SEQ ID NO: 13467 - DNA, 282 bp, Oryza sativa
  Clone ID: PAT_MRT4530_19499C.1
atggattcggtcgtgccgcggcagccgtcggccaccagccagcgaccagatctggccaccgcgcttcatgcgtcgtcggctgctccaccaagcctcatgtgcgtcgtcacaggcggtggaggcggcgctgggagttgggacggcgccaaggcggaccatctcggcgcggtgccacatgcggggatattggcagcggtagcgggacagggccggctaccggacagctggtcgattcgccggctaggtgacgacgagacgcaggagacagcggctgttttgtga

SEQ ID NO: 13468 - DNA, 4695 bp, Oryza sativa
  Clone ID: PAT_MRT4530_1949C.1
atggccgccgccggcgatcataggggcgcgggcgcgccgcctcccgccgaccgtgccgacgtggccgccttcgggcgcgccgagtggccgccgcgtggggcccggccgtcagccgcccacaccctcggggcaaatgaaggctacacgagctgcggcccggtagtcgagatgtcatggcacagggctagtgtcctgctgctaggggctcagtcctgcctacctgtcccggaggttccggccgtaggtggggttgggtcgatggccgacaacctcaaccgtcgtggtctggacttgactggctttgttttggagctgcggggcatgtgcattgtcttgggatatccacatggagtggactaccagggcaagaagcttccggagcaggacggtgacgatgcagagccccgcgccgcttgggaggtcactgcggtgatcctcaccggctctgccgagaggacttcgttggcagtcacccactcgccctatcgctaccaccctcgtcgaggaggagcccgcgactacgccaccttcagggatgctagctcggaggatgacgctaccatcatgcacctggcggatggtggaggcctcaagatcgcccagggtgaggtctgtcgccccaagcgccgccgcgtctgccgcagcctgaagatcaccgcccgcaagagtacctccaggcctgagcttgttcgtcggtccttggcatggacttgctttgtggagacccctcgcgccgaatctcgccctcggttcctcaggaggagggagcctctggcgttggcccgcgtgtgtgttcttttcgtttgttcttctgctggagtcgtgtggggcatggttataccgctctctctgtttgctggttctgtgagggattttcagatggtgacaaccaggagaagcgctgctaccggtgagggcagtcaccccgaaggcagcaaccacaacaaccatggcagcccacctccacctcctcccccgccaccaccaccgccaccaaacaccaaccccatcctcacccaaatcctcgcccagcaggccaacatgatggctgctttcctccaccacatccagaatccgccgcaacacaatgctccaccaccacccccgcaacattctaagcttaccgagttcctccgcatccggccgcctaccttctctagctccaataaccccgttgatgtcttggactggttgcatgccgtggggaaaaagttggacaccgtcctgtgcaatgatgaggagaaagtcatattcgccacccatcaactgcaggggcccgcatctctatggtgggaccacttccaggctacgcagccagaaggacagcctatcacttgggcccgcttcaccgccgctttctggaggacccatgtgcccgccagagtcatggcccttaagaagagaaaattttgggagttgaaacaaggcaaccgctccatgatggagtatttgcacgagttcaataatttggcccggtacgccccagaggatgttcgtgaagatgaggagaagcaggagaaattcctggcagggatggaccctgagctgtctgtgcgtctggtctccggggactatccagatttccagcgcctgggggacaagagcatccgcctggaagccaagcacaaggaattggagtcgcacaagcatcgcttggcgaatttccgcaaccaacagggggctaaccaaaggatccgctacaccaatctctatccagggggatcctcctcgcagcagcagcagcagcagcaaccccgctccgcgccccgacctcaattcatggtgagcgtcccacagccgcagcagcagcagaatcagcaaggggcccgtgcaccccgccctcctgcaccagccgtgcagcctggacaaggccgcagggatgctcaaagtcaacagcgtctgtgcttcaacagctttgagcccgggcactttgcggataaatgcccaaagccgaggtgccagcaaggccaagcgcctccccgcctcaacaacggtggtaaggatgtcactcggagccgtgtgaaccacgtgactgccgaggatgtgctgacaactccagacatcatcgttggtacgttcctcattcattccatccctgctaccattttgttcgactctggagcttcccactcgtttatatatgtgccattcgtggggagaaatcagctgggggtagaaaggattaggaaccctctgctcatcaccacccctggaggggttatgacagcaaagtattatagccctaccgttcctatagaaatccagggaattcctttcccctcggatttgattcttctggacaccaagaacttggatgtgatcctcgggatgaattggttagctcaattccaaggagtagtggattgtgcaaggcgcactgtcactctgtatcggggccctgatcaaccggttgttttctttgcacccccaacttccgccggcagttcagtacttcatcagctaggattgccagaaatacccatcgtcagtgagctcggagatgtgtttccggaagaactacccggtatgccgcccaagcgagagattgagttccggatagatcttgctctaggaaccactcctctgtacaagcgaccctaccgtatggcaaaagacaagacaaagaggatgtgcgttgactacagagccctcaatgaagttactatcaaaaacaagtaccctcttccccggatcgatgatctgttcgatcaacttaaaggtgccattgtattctccaagattgatcttcgttccggatatcaccagttgcgcatccatgaagaagatatcccgaagaccgcattcaccacgcgatacggactgtatgaattcacggtgatgtcgttcggtctaaccaatgctcctgccttcttcatgaacttaatgaacaaagtgttcatggaatacctggataagtttgttgtggtctttattgacgacatactggtgtactcacaatcagaggaagaccatcagcagcatctccgtttagtgttgagaaagctccgggagcaccaattgtatgccaagctcagcaagtgtgagttctggttgtccgaagtcaagttcttagggcacgtgatatctgctaaaggagttgctgtggatcctgaaacggtgaccgccgtcactgattggaagcaacccaagacagtcactcaggttcgcagctttttgggtttggcaggatactaccgaagattcatcgagaatttctccaaaattgccagacccatgacgcagttgctgaagaaggaagaaaaatttgtgtggagccctcaatgcgagaaagcattccaaactctcaaagaaaagctggtttcctcgccagtgctaatcttaccggatactcgcaaggacttcctgagaagatggttggagctcatcaaggattatgatgtgggaatccactatcaccctggtaaggccaacgtggtcgctgacgcgctgagtcgaaaaagccgttgcaacactcttggcgtccggggcattccaccggagcttaatcaacaattggaagccctgaacctaagcatcgttagccatggattcttggctacgctggaagccaagcctatcttgctcgatcaaatccgcgaggctcagaagaatgatccagatatgcatgggatcctcaagaatatgaaacagggtaaagccgctggtttcacagaagatgaacacggaactctatggaacggaaatcgtgtatgcgttccgaatgacaaggaacttaaacagttgatacttcaggaagctcacgaaagtccttattccatccaccctggcagcacgaagatgtacttagacttgaaagagaaatactggtgggttagtatgaagcgggaaattgcagagttcatggccctttgtgatgtgtgccaacgtgtcaaggcagagcaccaacgaccggccggacttctccaacctctccaagtaccggaatggaaatgggatgaaattgggatggatttcatcaccggacttccaaaaacccaaggcggatatgattctatatgggtagtcgtggaccgactaaccaaggtagctcggtttattcttgtgaagaccacctatggagggaacaaattagctgaactctacttcactaggatcgtgagtctccatggcgttcctaagaaaattgtatctgataggggaagccaattcacctctcacttctggaagaagctccaagaagagttgggtacccgattaaatttcagcaccgcgtatcacccgcaaacagatgtgcagaccgagcatctgaatcagatcctagaagatatgctccgtgcctgtgttctagattttgggaagacctgggataagagtctcccctatgccgagttctcctacaataacagctaccaagccagcatacaaatggcaccttatgaagcgttgtatggccgcaaatgccggacaccactattgtgggaccaagttggggaaagccaagtgttcgggactgatatcctgagagaagctgaagctaaagtcagaaccattcgggataatctaaaggtggcacagtcccggcagaagagttatgcagatacccgacgccgtaacctggaattcgcagtgggcgattttgtgtaccttcgggtcacgccattgcgaggacaaaagggaagctcgcacctaggtttgtggatcctttccgcatcattgctcgacgcggagaagtag

SEQ ID NO: 13469 - DNA, 304 bp, Oryza sativa
  Clone ID: PAT_MRT4530_194C.1
aaaccaaaacctttatccaactttttttaaaccatattgttgcttgattaacatgaccaaccaacaacataggagggggtggcgataaaaaaaaaaaaataaaaaaaatgaggctattttacccttaacaaaggatgtcttgcttatttatttttgcccaattttcccggttttaagaatcattcatttgaccttcttttttactcattcaggcttcaccacctagaaaacccccaaaatggcctacagaacttttccactgggccgggggccggggcaagcccagccgggctttttaaggggc

SEQ ID NO: 13470 - DNA, 435 bp, Oryza sativa
  Clone ID: PAT_MRT4530_19500C.1
tgattgggtactacctcttcatctacttccagcccaccgacgtcaaggtacgattcgccacccttcttttcgttggatgcctcgttgtggtttggcatcggggtgaattagtggagctggaagcgagaaacgggatggttttcgaggcttctctgtacgagatgatacagtgatatgcattcctgaaaactcatcgtttagttctttcctttggtttgggcttgctgtatagggtagctggagttagcttgctttcatcgtataacagtaggattgtgttctaatgggatccttcgaattagccctgcatctctactgtggatgtgaagaataatcatctgattggatgtgatttatgagaagacgaatttgcaatttacgaatttttcggtatgcatgaggtcttttgaaatggaggtggggggtttgttttcc

SEQ ID NO: 13471 - DNA, 1399 bp, Oryza sativa
  Clone ID: PAT_MRT4530_19501C.1
atggcgtcgctcaccgccgccctggccacgccggcggccgctgccctcctcctcctcgtcctcctcgccgcccccgcctccgccgccaacttcacctgcgcggtggcttcaggcaccacctgcaagtccgccatcctctacacctcccccaacgccaccacctacggcaacctcgtcgcccgcttcaacaccaccaccctccccgacctcctcggcgccaacggcctccccgacggcacgctttcctccgcccccgtcgccgccaattccaccgtcaaaatccccttccgctgccgctgcaacggcgacgtcggccagtcggaccgcctccccatctacgtcgtgcagccgcaggacgggctcgacgccatcgcgcgcaacgtgttcaacgccttcgtcacctaccaggagatcgccgccgcgaacaacatccccgaccccaacaagataaatgtcagccagacgctgtggattccgctgccctgcagctgcgacaaggaggaaggctctaacgtgatgcacctcgcctacagcgtcggcaaaggggagaacacgtcggcgatcgctgccaagtacggggtgacggagtccacgcttctcaccagaaataagatcgacgaccccacgaaattgcagatgggacagattctagatgtcccgctccctgtgtgccgttcatcaatcagcgatacctcagctgatcacaatctgatgctcctcccggatggcacctatggattcaccgcaggaaactgcatccgctgcagctgcagttcaactacctaccagctaaactgcactgcagtacagaacaagggatgcccgtcagtgccactgtgcaatggaacgctgaagcttggtgagacgaacggcaccggttgcggatcaacaacgtgcgcctacagtggttactccaacagttcatcgctcatcatacaaaccagccttgcaactaatcagacaacagcctgccagagaggaggatctgggaggtcgcagttcgctaggtccatgtggagcatgtctgttatctccttccacatggtgttgatcattatctgtttcctttgatgttggagactactgcaactctagatggtacatttcaaagagttctctacgatctatgattgttgtatacgatatatgattgttgtcgtaacttagattttgatgactggtttatccagctttgaaatttgagttttgactctgttctttagaggatgagtggcacttgtacggctgcttgaataaaacgtcgatgtattgtattcgatctgcatctgaaaaggaatattcattagataggattattcgaaataaaaagatcccacatgtttttgttataaaaaaaaaaaaaaaaaaaaaaaaaaaaaaaaaagggggggcctcgtgc

SEQ ID NO: 13472 - DNA, 131 bp, Oryza sativa
  Clone ID: PAT_MRT4530_19502C.1
acaatcaggagggcgatagtagagctgcgagctgtatgatggatgccaaatgttggatgccatcatggttgaatgagagcacacctgatgggggcgctcatggcgggctatgaatcgcggatgcaggacta

SEQ ID NO: 13473 - DNA, 319 bp, Oryza sativa
  Clone ID: PAT_MRT4530_19503C.1
gcgagacaaagacatactcatagagtattatacgcaatcgtatatccactgcactcatattgctcttatttatcatacgctcactggggggatccgtgcatcacagagcagagaaaggtaaccttatttctgactaccacaaaaacacttccaaagaatatgaaaccgctgactatgctacattgaaatgatacctaactggaaacagatctcatgaccatgactactgcgggaactagattcataactcacgtaaggtcatcatgcttacaaggctgccacaccagatgctcagaccatagttactctagaagcacac

SEQ ID NO: 13474 - DNA, 195 bp, Oryza sativa
  Clone ID: PAT_MRT4530_19504C.1
atgggggcggggatcggaattaacccgcaggtgacccggaggggccccggagcaatttgcatccacggcagcgatgagaggagcgacaccattgacatcgacaaggaggcctccagtgagcaggcaacgacggctgacggaaacctccaatatgcaggcggcgagccggcgatcgatggcgcatccgggcactag

SEQ ID NO: 13475 - DNA, 358 bp, Oryza sativa
  Clone ID: PAT_MRT4530_19505C.1
gcatgcaagcttttctttctcatttcatcgaaactggctggcaaatctcaagttgacttatgtaaccttggcaatgaaacgaactgtgattacgccattacggcatcggctgatgccccctctgtcctctcaccacaccaatcgccatggcgtaacatgcgacgagcacaccacagtcaccgtggtcacatgctcacagcctcgcaggtgccacttgagagcaagtcttgaaatacagaaaaataatgatttaactacaaaatttcgtgcagctagaagtagaaatggggacaagttttgcagattttctgacagcaactctgcaagattgatcttcccggaaataccggctgaacaa

SEQ ID NO: 13476 - DNA, 450 bp, Oryza sativa
  Clone ID: PAT_MRT4530_19506C.1
ccgtctttttgaaagaaaccacctgatcgagcccggatcttttcagccgcatgagaggaggacgagtcgttcgttgtgcagcaggaggcggcggcgaaaatgtcttggcatacttacttttactatcacctgttttgctagatcgagggcctccacctatctttcgcgtctttgtttgccatttcttgttcccttctctgtttcattttttcacctcttttttttttattctttttcctttcttactttttatctctttttcttctgctctttttcctttatctacttcctttttttcttttatatttttctttttcttttcttttctgtctaattttttgttcttcttttttacctttttatttttatatttttctttttttttcctatcttccttgtgtgtatagatgttatttctcattttctttctctcatgacttttcttttttt

SEQ ID NO: 13477 - DNA, 276 bp, Oryza sativa
  Clone ID: PAT_MRT4530_19507C.1
atgacgtggatgcagtccaacgcgcaggtggggctccgcgacctccacttcctcgacaagacgtccggccggcaggaaggagggatcgaagctggcagcggctgccggagcagggagcagcggccggagtggggtggaacggcggcgttgacgaaggagcagcagctcaccagcgaccggctgtggaggacgacggctgtggcgacgaccggcgacgatcggcgacagcggcgacgtccggcgatggcggtgcccaaaacagataaagacggctag

SEQ ID NO: 13478 - DNA, 1530 bp, Oryza sativa
  Clone ID: PAT_MRT4530_19508C.1
aatcccgaatccaaatctctccaaattcaaatccctctgtaaaagtctagtttgctctcccctcgctctgctcgtgcgccgcaagcgcgtgcgcgtgagccgacgccgagccgagctctttctctctctctctctctctctttctcgttctcttgctctcgctctccccggtccatccccggcaagctcacggcgcgccattgcgtcgcgcgcgcgcccccgcgcggtcgccgccgtcgtcagctgcttgttgcccgtgcctgtgccgtccggccccgcgccctgccgcgctgcgccgcctgcgctgcgccctgccccacgagccagcacgcctgcccgaggcacgccgcccgcatccgtccaaaacctgaggcagcgcctcccgctcccatctctctccctccccaaattggcatagcgcgagctccctttccccccctccgtttctccctttcccctttcggcctggcccctgcttcccccattgcagccgcgccagccgtcgcccatgccgtttgaccccacgcccgttttcgctcgccgttcgttgtcgcgcgtgtcggaggagccggcacgagcgaggacacgtgacgtggactccgggcacaccctctccttcctcttccccggcccgaggctggagcgatcacgccccgcgccgtcggccatcgtcaccgcgccccccccgtagctatctggcgccgccccaagccttgccgccgcctattgtgtgctcaccgccgtcgccgcccgagctccgtagcgcctctcgtcgctggcctccctcggtgcatttcctcctcccggtgtgttcgccctcgcccgcatccccgtatatcgccccgccgctcgccgccgccatccgccgtccgttcgcggccgcgtcgtcgtcttcctctcgccggtccgcgtggcagccacgtcggcgccagctcggccaagaccgggtcaagcagaccacggccccccgctccccttcgccacgctcgcgcgcgcggtccaccgcgagccgtgaggctgcgcgtgggcccgccgcatccgcatcccaccgcgagccgcgcgcgtgcaccgcgccccctccgaaccctggtgttggtctgggacccctctcgttggcatatggtgaacctgtgtcggctttcaaaatgccttgtcatgaaagcctcaaggtctccagacgtggccattctgcacgggctgggtgatccggttgtggaagaagatgatgtggatcctgctgatgaggagttcttccaggagcaagtcagctacgatgattgtgagctcgggaactatccgcagcccaacatgactgttaatttggagcgtcacgggctagctccgttcggggctagttcggggctgcattgtcacgaaccaaccaccatcgcgaagttgtcatcttgccgatgcgatctgttcggcaacacggtttggaacctgctgtcgcgcacctatatcaacaccaaccagcagcagtcagttgtgtcgccgtgcaccgaggcaagcagcaagacataccattgttga

SEQ ID NO: 13479 - DNA, 769 bp, Oryza sativa
  unsure (1)..(769): unsure at all n locations
  Clone ID: PAT_MRT4530_19509C.1
gcggacntatcgtcgagccgagcacacaaggcggcggcggcggcggccggcggagaggcgggtgaagagccagcgagcgggagggcgagagggttttcggagcgggaggggaagatgccgctctacgactgcatgctgctggtgaagccgctggtgaccagggaggccatggcggagctcgtggggcgggtggcgcggcgggcgtaccagcggaacggcgtcgtcaccgacgtcaagtccttcggcaccatctgcctcggctacggcatcaagaagctcgacggccgccacttcaagggccaacttatgcaaatgaccatgatggttccaccctccttcacccaagaactccactacctgaacaaggaggacaggctgctccgctggctggtggtgaagcacagagacgcggtgtatggtgtggagttcatcaacgaggacgacgggaggagggagatgacggacttccgctaccgcaccaaagacgaggccagcgatgtcgatgagtatgatgacgacgatgatgactatgaatatgagatcgacgaggagtaagctttcatcgcatctctgctcccataccggcaggcagatattgttgtccaccaaatagggaatatcttgaaatgtgattttttttatttcttcccagttgttctagatcatggatagcaagtagtagcctgtttgtttgtctgacgtttgtgatgcgaataagcaccaaaatgaatcatatataatttcaaagctgtcactgcttttgctcaaa

SEQ ID NO: 13480 - DNA, 1128 bp, Oryza sativa
  Clone ID: PAT_MRT4530_1950C.1
atgtcatggcacagggctggtgtcctgctgctaggggctcaattctgcctgcctgtccgggggttccggccaataagtgaaacagacaacacatcaacaagaagagttagttcctttaaggtcctgtctctagtgctggtctattctttcctggcttgttttcctctctcacctcaatccctgtcacagatgtttaacagagaaaaaggaaagaatgtcagcgggtatgcctccagtaactcaagttttcaactcaatccaccattggcctcaagagagttaacaagggcacacccttggtccattccaagcatgctgcttagttcacagctaccattggttggaagtcaagaccaaaatcagtatgtgtttgatcgagcatttgccacccaggtcaatgagcttccaatgccagaagaggatgtccccttttgtcacgattgtagagaacaaggacactatgccctgaattgtccatgggtatatgccaaagaagccccttcctttggtttagcagggcagacatcgctaaaccagcctcctcgcaccaagtcaagcttgcagcctagtgtgcaaagtagagagcccaatggagagaatccattgaatcccgggaaatgctttcctcctagcctttcgtaccatgtggggtcacgtactaagcaagccaaaggcaagaagagtaagaatcagaagagaaaagcaccgatgcgaactgaagaagaagtatgtaagatgactattaccagcaccgaatggcctccggcagggataactattcctagacgtcaaagaggaaataccttccgaggtgcacgacagttgacccagcacctcctaagccatggtggcagagtatctgatagtgaaggcctcagcaaagagttgtcatcgatggaagaagttgtgtctctccccgacctactccaggccgagggaagggcaatcaacctcaggagggcgataccaagcagaagaccgttatccgcttcaaccagcaatcagaaggaagcttctcctatgaatgatagcaatatgcagtcctatcacatcatcacagaaccaatcaaggatgatgtagtcactagaacaatgccagctatatctctccagaatcagaatgagtag

SEQ ID NO: 13481 - DNA, 618 bp, Oryza sativa
  Clone ID: PAT_MRT4530_19510C.1
atgacgtggatgcagtccaacgcgcaggtggggctccgcgacctccacttcctcgacaagacgtccggccggcaggaaggagggatcgaagctggcagcggctgccggagcagggagcagcggccggagtggggtggaacggcggcgttgacgaccatcaacaggagcagcagcattcgttgcagatcatcaacaacagcagaagcagcaacgaggatcggcagcaacaacaagccatgcatcagcagcaaggaagagatcagatcggcagcagcagggaaattaacagaaggagcagcagctcaccagcgaccggctgtggaggacgacggctgtggcgacgaccggcgacgatcggcgacagcggcgacgtccggcgatggcggtgcccaaaacagataaagacggctagggctgggatcgatccctttttttgcccccttttttttttactggtggttatatagagtctagaaaggagaacaacgggccaaatcgattcaatccccgagacttcgtttggactccgattactataaacttatagtctattttgcattagtcggcaagccctaaataaaaaaaaaaaaaaaacaaaaaacggggtggccgctcccg

SEQ ID NO: 13482 - DNA, 621 bp, Oryza sativa
  Clone ID: PAT_MRT4530_19511C.1
atgccgctctacgactgcatgctgctggtgaagccgctggtgaccagggaggccatggcggagctcgtggggcgggtggcgcggcgggcgtaccagcggaacggcgtcgtcaccgacgtcaagtccttcggcaccatctgcctcggctacggcatcaagaagctcgacggccgccacttcaaggaatatcaggattattctggttgggtggctcagaaaaacagatgtgctgcagtaaatggtctatttgctttgaataatataacccttgatagttttgaggatcctatttacttaaatttggttattgggactctaaaaactcactttgtgacacggcacttgaatgttagtgccattgaaggccaacttatgcaaatgaccatgatggttccaccctccttcacccaagaactccactacctgaacaaggaggacaggctgctccgctggctggtggtgaagcacagagacgcggtgtatggtgtggagttcatcaacgaggacgacgggaggagggagatgacggacttccgctaccgcaccaaagacgaggccagcgatgtcgatgagtatgatgacgacgatgatgactatgaatatgagatcgacgaggagtaa

SEQ ID NO: 13483 - DNA, 168 bp, Oryza sativa
  Clone ID: PAT_MRT4530_19512C.1
atggcccgtgcggatgataatgggaagcggcgacagggcgtgccggacgagcgacaagcactagcggcgagggtggccgtcgtcacgccccacgccatcaacctccacggcgagctctccactgccatctgcacgctcttgcgccaggccatcctcaacatgtcctag

SEQ ID NO: 13484 - DNA, 598 bp, Oryza sativa
  Clone ID: PAT_MRT4530_19513C.1
gcacgaggctggagtatatttttgcttaatctcacacgtccaatttgcaaatttgctccaacaagctgacatggcacaaactttgaattgaagttatttatttttcttgttggcataattgttccataggaatggtttcaatatttttttgatatttagttgctctgcagtaatatgtctcaattttgaattactgattgagttgtgatcttggttctgaatttgttgttaattactttggtctgcaataatatgcagttcaaaattcatatgccataatgttgttcaacctaagaacacacatgacaattgaatcttaagataatatggtctgtgatgtttctataaagtcttaattctacaagatgtcagttacatatttttagtattgaaattacaatgtttgttttatgtaattcttatacaaaataactgtaatttaagaaaaaaaattgaatgctattgaatcttctcattttgtgaagcattgtgcttgatttgaatggtttatggaatcaaatttaataatacatgtgagtattgaaatttgtactatgcaatgaaatgcaaattcaaatttagaattctttgaagagca

SEQ ID NO: 13485 - DNA, 2478 bp, Oryza sativa
  Clone ID: PAT_MRT4530_19514C.1
atggagatcgcggtgggcgccctgtccggcatggtggacgctctgccggccaagctcggcgacctgctgcagcaggagtacacgctgctgtccggcgcccgcggggacgtcggcttcctccagtccgagctcggcaccatgaacgccgccctcctccggtgcgagtccctcgagagctccgacgtccagacccgggcctgggtcgcccaggtccgcgacctcgcctacgacatcgaggactggatcgacctcttcgcccaccgcgtcgacggcggcgccgccgcctctccgggcgctgcggccgccacctcctcctcctcctcctccggcgggttcctctcctgggtgcgctgctgcgtcaacaaggtcacgacgctccccgcccgccacgtcatcgctaccgagctgcaggagctcaagaaccgggtcatcgagctgagcgagcagcggaagcgctacaggttcgatccgccggcgcgtcacgccggcggccggagcggcgtggcggccgttgaccccaggctggttgcgctctatgctgacactagttccctcgtcggcctggatgcgccggtgaagaaggtgtccgagatggtggtggacgacggcacgactgggctcaaggtggtttccatctccgggatgccgggcgccgggaagacgacgcttgccacggcggtgctccggcgactcaaggaggagaacaagttccattgcagcgctttcgtctccgtcggtcagaagccggacattgtaggtaagacactgaagggcatcctctcccagatcggcaatgggtatgcaggaggcgaagatattggccgattgatcggaatgctgagagatgaattgaaggataagaggtacctcattgtcattgatgatttatggggtagaacagaatggtcaacactcaagtgttgtttccgagatgataatcttggcagtaggataatggtcacaaccagaaatgatgagttggcaaaggaatgttcttccaattcggatgaatcagtttacaaaactggtctccttagtgacgcggactccaaagatttattttccaacaaagcttttgggaaagggaaggattgtcctaaccatttgaaggatctctatgatataatcgtggaaagatgtgggggcttgccgcttgctatatctagcgtagctggcgcactagcacatcgtttttcaaaagatgaatgggagaggtatgaatctaacttgctacctagttcacattccgatgagctgaacttgaagcaaatacttaatctgagttacaacgatctaccttcacatctcaagtcatgtatgttgtatctaagcatattcccaaataaatatgaaattgatgtggagcgcttggtgaggcgatggattgctgaaggattcatcgctgatgcacgccatgcaagcaaagaggagacagcaagaagttaccttactgatctcattagcagaaacctgatccaggcattgcatctgagacataatggcaccccaagctgctacacacttcacccagtaatacatgatttcattgtggtcaagtccatggaagagaactttgtcactgttctagatgctaagaaagaagctctctccaccaacaatggcacagtccggcgactctctcttcaaaacagtgtcaaacaggatcttgctggtgcacgaaatgatatgatcaagcatgctcgctcagtgactgtctttggtcatgccaatggggtgcctcgcctgaatgatatgagcgtattacgtgttctggatctggaaggctgcaatggtccattatgcctcgatggcctctgcaaattgattcttttgaggtacctgaacctcaggggaactgatgtcagcgagctcccagcacaaattggggagcttaggtgcctggagacacttgatgtgagatctacgaaggtgaaagagctacctgccagcattgtcagcttggaaaagctaatgcatttgcttgctggaaatgctaagttgcctggcgagatcagtaagatgaacggcctactaacgttgtcatgcgccaacgtctggaagaacacagggagtgtcttgccagaacttgctgatcttgcaaacttgagggaattggaactgttttgtgatgcttctgaaatctctggtgataataagacacgagtctctttttctagcgacggattcaaaaggcttaagcagctgagcatccagggcagcttgccatcagtggcctttgttaacagttccttgcgaaaggttgaagttcttgagctgaagtacgaaaaaggcatttcagatgggtcaaatggtgtgtctggtatagagcatttgcctagcctgaagcatgtattgattgagttctcgcagaaggatgctggcgccactgcgacaatcgcttctgtgaggaacgccgctgagatggttcaccctaatcatccagatgtctctgtcaaagttgatggaaaggccatctga

SEQ ID NO: 13486 - DNA, 1221 bp, Oryza sativa
  Clone ID: PAT_MRT4530_19515C.1
atggtccctccgcctccgccttcgccttcgccttcatcatcatctgacaagcttgtggcaggtgctgctcagtctgcacctctagtacccttacaagagccagatgtttcatccttgggggagtcttttgacaccacatcatcacaagatttgattactgccagtcataacatcattgatgatggctcatctagcacttgcccatccagaattgacaagcctgtggcagatgctacactgtccacatctctgcaagatgtggccctttcgctcttggacgaaattttcgatgataatccacgaacggcgccagataacaccaccactgatggctatctgcaatcagcttcctcatctgttgggtctagcattttggtccgcagttttgtaaattgctaccagctgttctacattagaatagaccccaggggctcttgctggacttaccctgatgtgggtggaccgtttcagagagtagatgaagctgacgatgctatcaagtgctttcttgatgaactgcagcatggagcaaggtgcacacaatcaggtgaattttctcgtgtggataggatgatacatgattgtaaacactatctttatggtccaccaaagagagatcccagttctccgagtagcaagactacctatgatgaaaagcaatacttggttcaagctatattggaccagtataatgatgacaacaaactttttgggaatcatgcatatgaacttgaagatcttgtgagtaggcaattattttgtgagaattcaaaacaaaagggagctgacgatagcagtggcaaactattctttgctgaagtgacacatgtgcaaagaagaatggcctggaaggtcagctgtttctgcaagattgacactgaagttaatgggggtcactgttatggttgcagaaacaaggggactcctcctatgaagcacccccaaaatactaatgcatacgctggtggtcacttggatgtagagcgatatcgtttggtactgacaagcagctccgaggatgaggaatcggaggatgaatcggaggaggagttggggttgtttgaagtggatgatgtggaatcggaggaagaggaggaagaggaagaagaggaagaggaagaggaagaagaggaggaggagactaacatgtggctaagaagggatacattcgataaattcctagatactatgttgaatgagttacaagccgaaggagattag

SEQ ID NO: 13487 - DNA, 185 bp, Oryza sativa
  Clone ID: PAT_MRT4530_19516C.1
actagttctagatcgcgagcggccgctcgcgatctagaaccccacgcgcgcgccttcgcgtgcgcggacgcgtgggaacagggtcagagggtgtgatgtatttgagaaggagcgatggcccacatcaataaccgaatagacttgtcatctgggtgacaattggcagcaaataataaagctaccga

SEQ ID NO: 13488 - DNA, 599 bp, Oryza sativa
  Clone ID: PAT_MRT4530_19517C.1
cccggggcgccccagtctttcggccaggccttcggtaaaacacggggggggcgttcatcatgtctgacaggtttcaccatactgatcttcgccatgtttgcctctaatagctcactctctatgtgccaatactgccgtgaccagcacaccgaatttccgatttcattttttttatttctccatgcaaccgagtactcggggcgtgacgcggacggatgatatgatgtagtatcacatccatgtctatgtctcttctcaaggctctcctacaggagatatgttgcatacggctccagcgtatgatgcgctcaaacacgcacgtggtaccaagctatcagatgatccacagcatgcatcgatgtgtttatgcatgtctatgggagcgatgtccgttaaagatggcgctgcatgtgccatgcatgcgcgacatgtgcccatctcacctgacagactctcgtgcctgtgtgtgttgtagttcaaactttgtgtacgttggctttgcacatagggaggtcactacgctcatgtgctgtctcttgttcttgcagctgagtgtctggctaaggccagaagcacgtttgacttttgtatgtatacat

SEQ ID NO: 13489 - DNA, 277 bp, Oryza sativa
  Clone ID: PAT_MRT4530_19518C.1
gacagttattgagtatttgcatgagttcaaccgtctcgcgcgctatgctcctgaggatgtgcgcacacatgccgagaggcaggaaaagtttctgtctggtcttgatgatgaattgaccaatcaactgatctccaaggattatgaggactttgataagattgtggacaagactatccgtcaggaagagcagttcagctctgccagcttagccagaaagaccaagaagtttggagaaatgcccgaactctgcttcaattgtaacaagtccggacacatg

SEQ ID NO: 13490 - DNA, 167 bp, Oryza sativa
  Clone ID: PAT_MRT4530_19519C.1
ttttgtggcggtgtacgctctcatcttaatgatcagatctattgactctcttagcggaattagatatatgagagacataggctacggactgctgtcaatgatgattaaatgaaaagagaatggtttgggaaccaatgtctgaacaaaagagatttcggagtaccaat

SEQ ID NO: 13491 - DNA, 732 bp, Oryza sativa
  Clone ID: PAT_MRT4530_1951C.1
ataactaaatgcccgattgagatgaggtgtcacgcccagaaattcccgaatagaattccaagcagaatgtgcattaaaacccccgtccaggaccggctgggcggaaaacgaaagataacaggagctaagcctagacttgaactgcagcgggaacaccactccgacggcacggacgaagcctactcctcagagaacccgccatcggacacatactcatactctgggggattaacaagggatagctatacagaggtgtacaactgtacccacgagacacagccccacgacacgtttccgtgcgccgacatgccaccacgacataccggaaagaagccgtttcacccccgtccccagcgggcgacaggaagtcccctctcgtgcctaggtgaatccggaagccgcataggccgtcacagggcccatccaaactccatcacgcccacccttgcattagaacatttgcaatataggatcaacatgatcaagtgacaagcatgacttgccttgctctgctgctggaggaacctcggcgactatttcgaagtacaccggagcgtcggaagagccggaatctaacgacatacaaggcaaacaatgcaaacaggctataagactatttaatgaattattgcgcaataaagccttccagggctgacgtcaacaaggggttgggcggcgccgacaggcgggtcccactggtcagcggctcgggacagaggggaagggggcgcc

SEQ ID NO: 13492 - DNA, 1320 bp, Oryza sativa
  Clone ID: PAT_MRT4530_19520C.1
atgtactactacatcgtagccagttggaataattccacgagatgtcagcaaataaaacgtggtgtctccttcgatatctgcaacggcggcgagacgcccatccttgcggatgttccaaaggctcgtgtcgccgtccaattcaacgaattccgcagcggcggagacgcgcctctcgacgcggaggacccagccggtcagcgcggccagcgccatggcgacggtccaaatgaacaaggtggcacggcggacgccgtcctgggtaccgaagcggagaacgcaaaccacgacgatggcaacgcacgccaccgccataagccggcggccccggtcgaggatggcgaggacgaaccgcgggaagacgtcccagtggagcagcatcgatgccttggcgtgcgcgaagaagcccacgaagaaagcggcggcgagagccatcccgagggcccgatgacggccaacggcggcagcggcggcagcacctctactggcagcaccacctctacttgcttcctcaccctgactagtttcttcgtcttatgcatctgtggggatggatccgccgccatgagagaagaacgcggagacttgagatacgggtttataactaatcagctgcaacggaatcgatccggaggctccgagattcgcgcggatctccgcatgcgtggcgtggatcgatcgattgatccagaggtcaagggactgtggggatatatagatgatttggaactagtagtggactatactattaaacttgctctgaacagcatcatcaaaacgtctcagagcaggatagccttcctcctcgaatccgcatccggcgagatcaaagacaacgctatgtctcttctgacagtatccatagacaccaaggcttgcagcgtgcacgcgttcgccacgaagtgcgcgaaccacaggtacggaacgcctcgccgcgcacgccgtcgcgcctcccgcgcgcacgacgactacaggatgcagaacgccatgctcgcagggcccaacgccggcggatgctcgccggtccaggagctcctgcacgaagaagtatgcgacgcgctggaacgccgtgccgtgcacgggcgcgccggcctacagcgttgccgcctgcgcgcggtcgcagcacacaccaccgcctcagcgcaggcgaccagaagctgcgcgggctgcatcccgtcagctcctcccctcctccgccaccgtcaccaccaaccccctgaccctcaccttcccgaagcggcgctgtcgccgcctcgccggtgtctctatagcctccaaggcctcaaccttctgcttgcagctgacaagaacatcctagaaggc

SEQ ID NO: 13493 - DNA, 453 bp, Oryza sativa
  Clone ID: PAT_MRT4530_19521C.1
atggagatggacaacttcggctcgccgtatcagcaggcgtggccaccagcgcaggccaccgtcgacgtcgtcgggtcggtggagacctgcaagcagaaggttgaggccttggaggctatagagacaccggcgaggcggcgacagcgccgcttcgggaaggccggcgcgcccgtgcacggcacggcgttccagcgcgtcgcatacttcttcgtgcaggagctcctggaccggcgagcatccgccggcgttgggccctgcgagcatggcgttctgcatcctgtagtcgtcgtgcgcgcgggaggcgcgacggcgtgcgcggcgaggcgttccgtacctgtgaagagacatagcgttgtctttgatctcgccggatgcggattcgaggaggaaggctatcctgttgtcgactacgagtcaacacttcagaccgccaagtcgacaacagttagatag

SEQ ID NO: 13494 - DNA, 813 bp, Oryza sativa
  Clone ID: PAT_MRT4530_19522C.1
atggatgtatacgggactgctcgcttatatgtagaccttcctctactcgttggtaaacaatttggttatacgtctccgcgttcttctctcatggcggcggatccatccccacagatgcataagacgaagaaactagtcagggtgaggaagcaagtagaggtggtgctgccagtagaggtgctgccgccgctgccgccgttggccgtcatctgcaagcacaaggaacacgtatggatcacgcaggacgattacacattcaggttgttcgatatcaacctggtgctcaccttggctgccgtcgggtgcgccgggctaggcttcttcctcttcccgaggaaccgggccctcgggatggctctcgccgccgctttcttcgtgggcttcttcgcgcacgccaaggcatcgatgctgctccactgggacgtcttcccgcggttcgtcctcgccatcctcgaccggggccgccggcttatggcggtggcgtgcgttgccatcgtcgtggtttgcgttctccgcttcggtacccaggacggcgtccgccgtgccaccttgttcatttggaccgtcgccatggcgctggccgcgctgaccggctgggtcctccgcgtcgagaggcgcgtctccgccgctgcggaattcgttgaattggacggcgacacgagcctttggaacatccgcaaggatgggcgtctcgccgccgttgcagatatcgaaggagacaccacgttttatttgctgacatctcgtggaattattccaactggctacgatgtagtagtacatactgccaagccatgtgttacatgtgtatga

SEQ ID NO: 13495 - DNA, 629 bp, Oryza sativa
  Clone ID: PAT_MRT4530_19523C.1
ccggccggggccaatccatttcctgtcttttgctgaaatatcaccgtacgtgtagcattagcatatcatgtcgtcgtcgctgctgcagcagcagcagcagcagcagcaaccgcagtcgccgccgagcttggtcggggcctggctctgccagatctcgtcgggcctgcggcagcgtgaggcccgccgccggggcggccacgccgaggttgacgacgagcagtcgtcccccaagaacgccgccaccgccgccgggcggaataaggcggcgagagaggaagccaacaacaaggcttcaagcacggcggtgacggcgtcgtgccgcgccggcgcggccatgccggaggccaccgtctgcctgctcctcgaccgcttcgcccccagctagaggtttcgtcgacgaacgcacggcggcgaagagtatatatgtctgttcgtcgtgctgcctgagtacctgatgatcactgtaaatacggcttgtcgatctgatgatattcagatcttgccttttcatttcttttcgattcctctttcgatccgttctgcagatgtcaagcctgtgtacgtaagttgatgataaataaaaatggaaaaggggtgttgaacctaaaaaaaaaaaaaaaaaagcggcc

SEQ ID NO: 13496 - DNA, 342 bp, Oryza sativa
  Clone ID: PAT_MRT4530_19524C.1
agtggacggtgccagcctctctggcgccgtccccctgccgacgtggcggggcgatgctgaggtggaataaaataaaaatgacaccgttgcaactccatatagagaaacaggaatggaggcggcggcgctagcatggctggcgccctcctcctgccacgtcggttcgcgtgcgccacagtggcagaaggacggcgccagcctctctggcgccgtcccgttggatgacggcgccagccactctgtgacaccaaaattgggcgtgtggttcggattgagcagaaatgctctcaaacagatactttctggtcctgaattctccttcttcctcctctgttcttccat

SEQ ID NO: 13497 - DNA, 2367 bp, Oryza sativa
  Clone ID: PAT_MRT4530_19525C.1
cttctcccttgtcatgtccttcttggcctcctgctcctctccctgcacactccggcgagctccgccgccgccacggataccgtgtcacccggccattcacttgccggcagtgacaggcttgtctccaataacagtaagttcgccctcggcttcttcaagccaggtaatgagtcctccactggcagtaagtcctctcataacaccctaaattggtacctaggcatatggtacaacaaaatccccaagctaactccagtatgggtggcaaacggtgataacccagtcacagaccccaacaattcagagctcacgatctctggcgatggcgggctcgtcatcttagatcgatccaacagatccatcgtttggtctacccgaataaatatcacaactaacgacacagttgccatgctattgaacagcggaaacctcgtcctacagaatttcttgaattcatccgatgcgctgtggcaaagctttgactacccaacacatactttcctccctggtgcaaaacttggttggagcaagatcagtggtctcaatagccgtctggtttctaggaagaattcaattgacctagctcctggcaaatacagtgttgagttagatccaagtggtgcgaatcaatacatctttacactgttgaactcatccacaccatatttgactagcggggtatggaatggccaatactttccctcaattccagagatggcaggaccctttatagtaaattttacatttgtcgacaatgatcaagagaagtacttcacatatagcttactagatgagacagtggttttccatcatttcttggatgtctcaggtcgaacaaagacatttgtttggcttgagggctcacaagattgggtaatgacctatgcacaacccaaagttcaatgtgatgtatttgctgtttgtggacctttcacaatctgtaacgataatgaacttgggttctgcaagtgcatgaaaggtttctccataaaatcaccaaaggattgggaattagatgatcggacagatgggtgcatgagaaatactccattagactgtgctagcaacaaaaccgcatcaagtttgactgacaagttccattctatgccatgtgttagattgcctcaaaatggctacagcattgaagctgctacaaatgcagataaatgcgccctagtttgcctaagtaattgctcttgcactgcatattcttatggcaatggtggctgcttggtctggcatgctgagttgttcgatgtaaaacagcagcagtgtgatggcataactgatactaatggagggaccctttacattcgccttgcttcaagagaggagcaaagccagaaaaagaacagaagaggattgatcattgcaattgcccttggtctaagcttcgctgctctgtttatgctggcaatcgcactagtgatttggtggaacaaaagtaagaggtataattgcacatcaaacaatgttgaaggtgagagtggaattgttgcgtttagatatattgatctgcagcatgcgactaaaaacttctcagaaaagctgggggaaggtgggtttggttctgtattcaagggatttctccatgactcaagaactatagcagtgaaaaagcttgctggtgcacatcaaggagaaaaacaattcagagcagaagtgagctcgattggactaatccaacatataaatttaataaaactaattggcttctgttgtgacaatgatagtaaactgcttgtttatgaacacatgccaaatcgttcccttgatgttcatctattcccaactgatattaaaattttgaattgggatactaggcatcaaatagctattggagttgctagaggactatcttatttgcatgacagctgccgcgactgcattatacactgtgatgttaaacctcaaaacatacttctcagtgaatcattcactcccaaaattgcagactttggaatggcaaagtttctaggaagagattttagtcgagttttgactacaatgagaggaactataggctatgggatggttttgttggaaattgtttcaggaaggaggaattcaaatggaggatgtatcactggtggtgacaaagatgtttatttcccagtgaaagtcgcgcataagcttctggagggagatgtagaaagcttgatagatcccaacttacatggcgacgccaacttaacagaggttgagagagtttgcaaggttgcttgttggtgtattcaagataatgagttcgaccgacctactatgggtgaagtggttcaaattctcgagggaatatttgaacttgacacacctccaatgccaagactactgcaagctattgccggaagctcttgttctattgcagaa

SEQ ID NO: 13498 - DNA, 183 bp, Oryza sativa
  Clone ID: PAT_MRT4530_19526C.1
atggctaatgaggcatatgcctgtaacgttcttctcttcttcagggagcagggttgcagcttaattggaatcttctgcacatcagcacatccacctcattgtcaaattaaattcgacttcagatcgtatgaagagcatactgagatacaagatggaggaaacatgaaggactacagtacatag

SEQ ID NO: 13499 - DNA, 616 bp, Oryza sativa
  Clone ID: PAT_MRT4530_19527C.1
attgcatgtacaaatactgtttaccgtgactaacggtgttgtattgaaaagtattgattgttcacattgacaactgagacatcatcagcttgacagggcaaatacctgcaaaaatactttacatagcatgtacaaatcttgtgccgaagcaaagtttttggacaaaagaacattttgagatagtttgctccatgcggtaacaaacgagcatgtaaaagcaaataagattattttttgtttcttcagccagccaaagttcctagcagatcaagcctccacatgcaatggtgaggtgacatgcatctgtaaccatggccctctcaacttgtaacttgcacttcaaatggtacccctgcatatgtaaccgacctagttcacctgctctccactccacgttgagggcgccgtcgatctggccgtgctggtgaagtttcccgccgcccggccgtcgccgtcgccgtcgccgtcgccgctgacggccggatccagattctccggcagcatcaccagctggctgctcgccgccggtcttggggaagcggcggcgttgggggagagtgggagaggtcgggagcgagcgagaagccgagaaggcatatgcaggatgctgggccat

SEQ ID NO: 13500 - DNA, 252 bp, Oryza sativa
  Clone ID: PAT_MRT4530_19528C.1
atgtctttcatgattagtctcacacctctcatcataataaaagatgctttaattggtaataatttggttagctcctggtttggaatggtatattcctggtttggagatagaactgtacagccgggatggttgttcagtatggttgggcctatgcaacagggtatgttgtatagcgttggattaatattgtttaattattacttaactattttattaaattctgagatatttattaaatgctgtttatgcaaa

SEQ ID NO: 13501 - DNA, 321 bp, Oryza sativa
  Clone ID: PAT_MRT4530_19529C.1
atgatgcgtctcggcagcctaaagatagacccgattcggttgctacttacatgtgtcatagctgacgccttctccgtgccagcgccgcgccgtgctcggttgccaccggccgccaacgcgtgcgacgcgatgtgggagccggaaccagatgcggcgtgtacgggttatggcccgcccggccacacgtcgtgctcctgcgcgatttatcggtcagcttcactcgaagatggtggcccgaggtggagcccatatcatcatgcacctcctcaatctctttgcgacgctgagattcctgagctacgttttgaggctataagttag

SEQ ID NO: 13502 - DNA, 216 bp, Oryza sativa
  unsure (1)..(216): unsure at all n locations
  Clone ID: PAT_MRT4530_1952C.1
tcttgccatgggtgttttcttacttaatnntgaatgaatggagatcgcagnaccctcnnctgcgttttcatttcaactaattgaaatgacccttctgcttcactcaagnaacttgaactgaacttgtctnngtctgaaaaaaacaaaaaagagggggggggcggggggcctctannanngatccaanncttactntacnccttgccatgccgacnn

SEQ ID NO: 13503 - DNA, 178 bp, Oryza sativa
  Clone ID: PAT_MRT4530_19530C.1
cagggtcactcccctgtctctggatcaccagagtacagacatgaccgcatgtttggagactgctccagcctgtcacggtaatatgcggcaagaatgcctcaatttcttgcaatatcgccgggcaccggacaccacccacaacagattgggacaggtcccttgatgtgataattctgcg

SEQ ID NO: 13504 - DNA, 462 bp, Oryza sativa
  Clone ID: PAT_MRT4530_19531C.1
atgggcactggtgaagtagaggacgccgtcgacggcgggagaggtgggcggaaggccacggcggtgggcgacgtgcgaggcgagggcacggagggcggatctaaaggactcgtcgcccggcccccatcgatctccttgccgctgacgcctcgtctccaccagcctccctaccatcgccgtcgccgcccacctcatccaatgacctgtctcctccttgcgccgctccacctcatcgcccacgcctcatcctccacacttgtcgtcgctgccagccccacggcctacaccgtcacggaggggatctccaccgtgtactgcgccctcgcaaccaactcctctgctgccgctgtcgcttcgcgccgttcggaccgcttccctgtccaggtcgcgggtgggttctcctccctcttctccgacaatgacttcacttgcacggtggagataaacacctccgccgtatga

SEQ ID NO: 13505 - DNA, 360 bp, Oryza sativa
  Clone ID: PAT_MRT4530_19532C.1
atgggcactggtgaagtagaggacgccgtcgacggcgggagaggtgggcggaaggccacggcggtgggcgacccccacggcctacaccgtcacggaggggatctccaccgtgtactgcgccctcgcaaccaactcctctgctgccgctgtcgcttcgcgccgttcgtgaggttctcccaggtgtctagcgggggaggggcgttcatcgacgcgttgcaagttggggcactcgcgcttttcttgctggccgtccgccgcgccagggaccgcttccctgtccaggtcgcgggtgggttctcctccctcttctccgacaatgacttcacttgcacggtggagataaacacctccgccgtatga

SEQ ID NO: 13506 - DNA, 314 bp, Oryza sativa
  Clone ID: PAT_MRT4530_19533C.1
atgatcgtgtatacgatgactctatgtcatgacgatgatattagagtagtatttgttaatttaagcatggtgtttagattactggatatcattattttgggttatatgctgcggaagttaggtgggccgctgatggtgataacttagtacgggtattcctccgtgtgtgtatatagtcctaagttactttcctggggagggtactactccgtatttagccccggttggatggtcatgacggattgttgtaagaaactcggcaatcaggggtggcttctcgaaacaccaggtggcattggaaagagggtattagc

SEQ ID NO: 13507 - DNA, 273 bp, Oryza sativa
  Clone ID: PAT_MRT4530_19534C.1
atggccgctccgggcgtggcgcgcgacggcgagacagaggtggggcgcgctcgtcgtttcgcgtggcgtgttttcggggtggccgtgcgagccagccgggaggaaagcgcacgggctgaccatttctgccagaatctggtccacctgggctctgaaactacatggacattctcttgtggaaataagtccctcaactttgcattgagtttgtttgacatcccatatgttcaaataccagaaaccttcggccctaaactatacaaaaccgtgtaa

SEQ ID NO: 13508 - DNA, 297 bp, Oryza sativa
  Clone ID: PAT_MRT4530_19535C.1
atggccttggcctccctcgccgccgccgcatcgctcctccccgccgccgcggcgaggtcacgcgtgtcgctcgcccgctgccgcgggatggcctcctcgtcgtcaccatctgcggccgcgggggcatcggcggcggcgagggtgggcgtggtgcagatgacctccgtgggggacctcgacgccaactacgccacctgctcccgcctcgccaaggcaagcgcacctcttcaactggtcgccgtgtatatttcctcaactgcggcgagcctgcttgctctgctctgctgctgttgttag

SEQ ID NO: 13509 - DNA, 217 bp, Oryza sativa
  Clone ID: PAT_MRT4530_19536C.1
gttaaccactagtaagcatatatcccagggtggggcaggtgaaacctgtgatacaaagcattcacataactgaaaaagcgcacgaaaaagtgtgctactacaacaatgaaccaggccagaccacatccaaaacaatgaccgcaaggtgatggtggtttttacgatagcaatactggcagcacgaatacgaggtgccgtacaacggggcaccacattc

SEQ ID NO: 13510 - DNA, 266 bp, Oryza sativa
  Clone ID: PAT_MRT4530_19537C.1
aacgcaaatttttaccgtttttctatatgctcatgaaagtagcatgcatgactggctctgatggcatgctggatggacacagcctatctaagctagagtatatcaggggacttggttaccgcaggaggccactatcacatgatgctttataccactagacacacttgcatcagagttaaactctgttccattaacggggagctgagttcgtgctattgacagcagtgctgcacaataaacacatatatagatcgctagcttttaac

SEQ ID NO: 13511 - DNA, 321 bp, Oryza sativa
  Clone ID: PAT_MRT4530_19538C.1
atgggctcccgcggccggcggctgcctggcagaggtgtcagcggtggctgtaccctctcctccgctagatccggtgggaggggagacggcgagctcccctccactagattcggcgacaggggagccggtggagaggcagcgggctctcatggccagtggttgcctggcaaaggtggtggcggtggccgcaccctcccctcctctagatccagcgggaggagagccagcgagaaggcggcgggctcccgcttggcggaggcagcggtggcacacctcgacggcggcagcggccgtgccctccccatgcaacgacgacggtga

SEQ ID NO: 13512 - DNA, 3368 bp, Oryza sativa
  Clone ID: PAT_MRT4530_19539C.1
atcttccaaatccattacctttcacttattggtataaccgaagacatgacaatggaaaaaaaatttacattacgactgaagtactgaactatcattgcaaacagaggatgagaatgcacaattttgttctatccaacaggagcccagcaaagtgattgcgtcaaaagggcatctaaattaagcactaaccgtttaaccgtccttgaacaaggatacgttacaagtgggattaatgccgatctttactagaatataccaccaggtagctacatcgctgatgcgcgggcttgacatgaaaatacccatcgaattggagtgcatttctgagggagagctcgtcagatccacaatgacattgccgtagtggggaggccagtaggcatcttcacatcagaacctctgaatgtcaggaaagtgagaactcattcttctgtagctggggttgtaccttccactttttctgtagctggggttgtaccttccacttcttctgtagctggggttgaaacttccgcttcttctgtagctggggttgtaacttccgcttcttctgtagctgcaattgtaacttccacttcttttgtagatggggttgtaacttccacttcttctgtagctggggttgtaacttccacttcttctgtagctgcggttgtaattttcgcttcttctgtagctggggttgtaacttccaccttttctgtagctggggttgtaacttccaccttttctgtagctggagttgtaacttccactcctgtagctgcggttgtgacttccgctacttctgtagctggggttgtaacttttgcttcttctgtagctgggtttgtaactgttgcttttcttttttccctgagaagattgatctcccgaatcagttcttctgttctgcaccatataaaatggatagaacgtgcccagtcatcaagctttgaaaaccattcatgctggaagttttcaatcatttcatttgctattgcaagtttctgctgcacctcctccaaccgcttcttctccaactccttgacactaagaacaaggccaccgccaccagcaacatcacaataacgaggcttgtcacatgggaacttcttcctgtactcatcaaaagaggctcggttctgtttcaatgccctcctataaccagtaaccaattgtgccatcacattcagatcatgctcaaagcgtctaagctctgcttgccacttattctcttgctcaaacctggctgagttcaacgattggataatttgttccttctcctggagcatgttggccaaatattgcttctccaccagaacatcttgaagttctctctctttctgttcatagaacatgctagctttgctcatcaagctctgaaagggttctgcaaaatgtgcattgaagactgatgatccaggtggtatactactattgttgctgttccgcattctcttatttggatttctctggtcaaactgctcatggcctggcatagggtcattgtactcttcaatttctccaatgtgcctcttcccattattctcaaagaaatatgagctcccagtccctaggtccagtccatttttatgagcatcagcccccatagccaagaattctccggacgacaggtcaggcgcgttctctgaaacattgtatgtcgcaggaattgagctcattgcctgcagaaggtttgtggatgtcatcccatgcaaagatcccatctttccagagaatccatcatcgtagctgacttcattcctgatctcatcatcacctttgttcaaattatcgaactgaaggtttacaaaatcactcccgtgatccttctcatcccccattgtccaattcatatcttcgcccctatactgcccaaatgcatcttcctctgattcctctgcctcttcattgccactatcaccctcacccagattctccacatttgcatcctcttcaccatctgtactgtcataatcattggcggagccgatgcccaagctcaaccctgttgcatcattctcctcatccccatctgcctcttcttcatcatcctcaggcactgccacaaactcctcatgtgtcatcactactgtttctgccaatgagcctgcatcattttctaccgcagccattgctgtatcgccatctccctctgtcgccacctcctcgtaattaggaagcatcacctcatgtgtaacagaaacttcttccacagacacaaaccccatctccgattcaccaaagctcttgcctttcgcatcctcatccacagcctctgattcatccaagtccatatgatttgcatccacatcttctgcacgagtttcctccaatcccttactcaccttgtcctcaacatgcgattccaattcctccgcactcgtcccccgtacatccgcatcacccgacaccagctcctccaagcaattgctcctcaaatctgcacccccggcctccgacttttccaagttactgttcttcgcatcagcatctgcatcccccgactccaactcctccatgctcttgctcttcacatccgtatcatcctccccgtcctcctcatccatgtcggacacctccaagacaacctctcctcctctctctccctcctccgtgcgctcgaacagctccggcttttgcgcccagatgagcctctgcagatacgccccgtagtagcacagcccatcgtccctcttgggcaaatcctgcatctccttctcgacgaggccccagatcaggcccgcccagtcaaccctatgcgccgacccgtccctcaccgcctgctccgcggcggccacctcggggggtagtatgcacatgtcgtcgccctggaacggcggcaggacgtaggcctgcaagagctccatggcggcggcggcgaccgcggcggggtccgcatcctcgggcggcggtggggccgcggcgggggacggcttgcaggggaggcagagcgcgtcggcgaagtgcttccgcgtgacggcgacgcggacgccgcggacgaagctgcggcgctggggcgggtcgtagtaggcgacgaggtgggcgacgaggtcggggcggaggggctcggaggcggaggaggagaaggcggggccgaggcgggcgaagccgaggaggccgagggcacggagcgccgcctcctcgggggacccctcgggcgcgagggcgcgcggcggcggcgggggcagcgggtggaggcggaggcgggcgcggaggtgggccaggcgctgctcggcggcggcgcgcagcttcagggtgaggggccgcttgagcttgccgccgccgccggcgggggccttccgcggcggcatgtcgggatcggagttggcggcggcggcggagggttggagtgggggttggggatcggcggaggagtcgggcat

SEQ ID NO: 13513 - DNA, 1274 bp, Oryza sativa
  Clone ID: PAT_MRT4530_1953C.1
gcgggcacggctattcgaatagttttactcttgccttgcttcttcactttgatcttccgaactcttttcctcgcgaccgcggacttccgaaacgacgggaactacacgctggcacgcaaaacgaggaaaaactcgtggaccgggaccaccgaggcgatccaccgccggtccaccacgcgaaagggaaggggagcgggaggaggggctcaccgagcgtgcgggccgacgaggcagagcgggaggtcgccggcggcgggaagaggcggcggcgctcctcggggaggcaacggcgacggcggttcggcggcgttccgtgaggaggaaccggcggccgatggtcggagggaccgccgaccgaaatgacgacggagctcaccgggaggcacggggagatgagtccggcgacgaccggcgaacacggagggattggcagcggccggctgaaggcggtgtgtggcggtagtggctcggcctcgcgatgggaaggtggttccggcggtggaggagggagatggagtggatgccggggtgcggcgaggcgctgtgatgctataggtggcggcggcgcagcgcggcagcgacgggagcggcggtggcgggcggctggagatcgccggcgagcggcggcgaaggggatcggcgtggagagctcggtagagggcgtgggggactcgggaaaacggggaaaaaggaagaggagtccacggggattgattttatagctcaagggggcgaggagagggccggggagcggcggatttcgaggggaagtggggcggcgaagtggagctcgtggggaggtcaaaccggcgccgtttcttgcggggtgagtgggggaaaaggtggaggacgtggagggggtcgtgtccatgtggttggatgcgagctcgggtgcgggaggtcgccggattttgcggcgacgtggggcggctcaggcggccatggcggttgcagccggccagccagaggaaggaggaggagctgacgggtgggaccgccggtcccacctgtcggcgaagggagagaaggagggatgcaaaacagacttttgcgagcgggccaagggaggccagcggccggtggtgaagcgcggaccggcggccgggcgcggcatcgggcgcggggcggtggcggcgtgtgctcccggcggcggaggagggcggcagcggcgaggaggcggcggcgcggacgacggcgggccgcggacgacggcgtggcgcggacgtgccatagcggcgatgagcgacggctgtgcgacggcggacgacggctag

SEQ ID NO: 13514 - DNA, 484 bp, Oryza sativa
  Clone ID: PAT_MRT4530_19540C.1
ttaatcgaagtagtcatcaattgctgtcacccggtgcgcaccaagtacatcaagaagaggagagaggacactgaaatgctgtaaaagtgtaaaatttgcatctactaactcatggcagctatcagctatggcctgacgaggctgagctttgggaaaaagagcaggagcgtctctgactctcaggggttcagacttcagaccaaagtagaccagaacgtgtgagaactgacaaggcggacccgaaaatctcgcgccgcctccgccggacttggagccgacgagcatctccaccaccgcccgtacgacgccgccgccctccggcagcagccactcctcccccggcagcgtcctcgccgccgtgagcacgccggagaactgcaacaacaccgccagaagcagcacaagcttcgccgtcgccgccactaccgccatcgtcatgctgtcgagtaaacgggagacagaaaatggagaacactttagctaa

SEQ ID NO: 13515 - DNA, 347 bp, Oryza sativa
  Clone ID: PAT_MRT4530_19541C.1
agttccaaacttttttttcaaacttccaacttttccactacatcaaaactttcttacacacataaatttctaactttttcgtcacatcgttccaattttaaccaaatttctaattttggggggaactaaacacaccttatgttgggcagtactactataatactcaatgcggccggcagcaacaggtggcaagtcgtctccggcggccggtcagactgccgcgttgggctaattcgccggttgacactgtcagcatggtaccggagcggcagtcgagcagaggcagcgaaaaaaatgctagtataggaatccatcactgcaaaattgtaagcttcgtaagatctgga

SEQ ID NO: 13516 - DNA, 221 bp, Oryza sativa
  Clone ID: PAT_MRT4530_19542C.1
aaacaaatatatataattatatagacacttttttttattagagagaacacaaagataattaggtttcagcataaataacactactacctacaattacattaactacacaatacatttattatagggcatcactctacaaaaaacacaatggatgcaacttcacacataaacagcgcctactgactcaacaacaccaatcgttcccccccttaaaatccacc

SEQ ID NO: 13517 - DNA, 330 bp, Oryza sativa
  Clone ID: PAT_MRT4530_19543C.1
atgacaacgccacaccaatccccgtcgcctcctcgctcttcctctcacaaagacagcagcggctctaccgcccgttggcttgaacagcggcggatgcactcgccggcgcattgcatcgacgacaacggcagtccaagccctgtatcaaaccctggtcatgcatccatcgtcggaccacctcactcgctgccgtgcctcctcgcgactccacgccgcacgccaccgcatcgtgcccctacagacgccgtggtggttcccccttccgccggagccctacccggggctgcccttgcaccgctagaccagcgccgccggtcccatgcaacttag

SEQ ID NO: 13518 - DNA, 372 bp, Oryza sativa
  Clone ID: PAT_MRT4530_19544C.1
atggctgtctgtgccaccttcgacctaggagtaggagtagtatatggctacatggatgatcatgctagctacacatccacggcgtcggcgtcctctcctcctaggcagcgtcggcggcggtggctccggcagctgtgcgcggtggcgacgagagacggtcgtcgggggggggggggcgtggcgacggcgacgggaggagccgtcgtggggcgcgacagtgactgcgacgggagcgatgcgactgcagcggcgacggggggcttggtgcggcagaaggagctcggaggcagtgatgctcggcaatggggctcacacatccggtgctgctcggtcggcgacggcgacaacgacctccttcctctcttctgttga

SEQ ID NO: 13519 - DNA, 1920 bp, Oryza sativa
  Clone ID: PAT_MRT4530_19545C.1
acgaaacagtccatgactcggactctgccggtcagaccggcccacacaccgccggtccgaacggccctcactcggcggtctgaccagcctatacacggcggggcaagacattaatatgcttatgaagaaatcgagagagatgaacggcgatggatacaatgtcacatctttgagccgccgtttgttggatgctaaggcaaggtatgttctaagtagtggaattggtaagttggcatatgatttgtttaaagtctaatttggctcatgagtctttgatatttatttaaagccaaatcatatgtgtttttatggatcaccatataatatatataattcatatttattgcaccatgaaagttttgcttattagtaattcgtctaatgtcaatggtcaatgtgatgatttgttctagagttgttatgtttcgaacattggctttgttttaatattttgccaacatgctcaagccgattactaacatttgtagtttattagagttcatgtgtgagaggcatatgactttggtgattcgttattgatcatacttcaagtggctaagtgttttgataccttgatgattattgtttcaaaagccacttaaattggtattcatctagacatattagttgggtgttataattttctcatatgtctagaaagaaggaattttagtccaataatttgatacaccaagcatctggttaatatgtgaagaaaggagtatttttgatattagaaaagccagtgcttgattttaaatctttgggcaaaattggtgaagttccagattggggatggcctgaccgtcgcattatagccggcctaaccgcggatgaccggtggtctgaccgggtagacagggcggtctgaccggcattgcgtggccggtctgaccgatcccgggcagagagctggggggcatgttacaattggttcaaaggccaaattaattgtaaattcagacatttgtgcccaagagtcagaagaaaactagagaatccctttgatggaatatttgaagattctagttttagggttgatcaaaaattcggcggcaagcattcaaatacactttgcttaatggagagttatatcgccgaaatatagacgaagtactttttctaaagttgctatgggatcaaatttatccttcgacatcaaaagggcatcggtccgtgctagttgcgatggattacttcaccaagtgggccgaagcgctcaagaacatgattcatatgaaggtaattgactttatcttgaagcatattgttcatagattcggtattccttaaactttgactacggatcgagccgagtcaagtaataaaacattgttaaaattagtcaaagagaagattgaagaacttcaaaagaagtggcatgaagtgttttcggaagtattttgggctcataggatatctaaatatggtgctaccaaagtcactcctttcgagttggtttatggacaaaaagccgttttgccgtttgaggtaaatcttggctctcttcggtatatcaagtaagacgatttgttggtcaaagattacaaaaccttaatgcgaagcaattttgaagacgtcatcgacaagcatttgaaaactttgaaagacatagagacacttcaaggacagcatttttctgcgagcaatcaatgggaaatacttgaagaaatacttcccgagtgtttggcaatatgcttaggaggttctatggccggtaatcgtattatcaccctaagacaaacatgttctatgcttttagattcacgatgttcataaaaaaggaaggggggcatttgtttacacccaaatttggcacctataggcgaaataggggaaaattgccaaagtttggaaagtgatgggtttccttcacaggaccggtcagaccgcaggtatgtgggcagtctgaccgcggcc

SEQ ID NO: 13520 - DNA, 923 bp, Oryza sativa
  Clone ID: PAT_MRT4530_19546C.1
ggccgcgggttttttttttttttttttttctataattaagatcaatatttattgcatcaaatagacgaactgttagtattcccaaaatcattattacaagtttacaacacgcttcaaatacttacatagaggtgaacatctctaatctatcgccatgctgcccagcgaggggatccaggatgctgacccatgtgctgtagtcaataggcgatccaccaccaggctgaaggaatccgttcacaaagaagaacggtgcaccggctactcctctcgtgcacccatacttgaaggaaaccctcgctgctaggtcagtccttatatcgctgaagcctgactggaactcagacaccgaattaccgacaacccgtgctgccagctttgacatctcgccacttataacagtgctcgatagtgaggatgttgcagcattgtagaacttaccctggctcttgaagaacagctccagcaaaggataggtcgatgatgagttcaatttgttagctatgtaaagtgcacggcaggcaaggaatgaattggtgtggtacgggagggggaaggggtggacgatgagggagaccctgggggcgtagcggtcgacggcgagcctgaggggcgcccaggcgtcgcggctgtcggggcagagcgggtcgaggaaggcctcgacgaggatggtgtccttccaggcggcggtggcggcgtccccgtaggcgaacccgtcgtagcgcggcggcacggaggcctgcgcgtggaggacgaggaggtagtaggagcaggaggccgccaccgcgcacagcagcagcatccgccgcagcagcggcgccctcggcctcgccatcggggggccaaatctccctctcctcgagctcgaggctgcgcgcggtgcagcgtgtgctactcgtgggcggacgcgtgggcacgcaagc

SEQ ID NO: 13521 - DNA, 215 bp, Oryza sativa
  Clone ID: PAT_MRT4530_19547C.1
atggcagcgaggccacgatgcatggagtttgtgagccaaatcaccaattggggctgtcaaaggacggcgagaagatggggggagccaatcaatgtgtccctcgacgaaataatccatgggaagggtatgaacacgaagcacgccatgaaaatgtcgatcgacaaggacgatgaagaggccaagatgacgatggcggcggcggcggtggcggtcgg

SEQ ID NO: 13522 - DNA, 335 bp, Oryza sativa
  unsure (1)..(335): unsure at all n locations
  Clone ID: PAT_MRT4530_19548C.1
aaaaaaaaaaaaaaaaaaaaaaaaaaaaaaaaaaaaaaaaaaaaaaaaaaaaaaaaaaaaaaagggggggcgcgataaaggagacaaaggggcgcacgcgcgcgcgcgccccgacaaaccnncgagagagcgccacaaaaaaacaggcgccgggcgcggcgaaacacaacggcgaggggggaaaccccgcggcgacccaacagaaaaaccccgggcaacacccacctcaagcgcgagggggaaaaaacgcaaagaggcgcacagcgagcgccccccaacacaggagcacacggaaaggcgaaagggacgcgcccccggaaggggcactaaaagcg

SEQ ID NO: 13523 - DNA, 241 bp, Oryza sativa
  Clone ID: PAT_MRT4530_19549C.1
acgaccacgcatacgtaaaagaggaatatcaacttgttcactcttagagatgttctgattcaccagcatggggttggattgtcgtctacttaacggcatatcttatggctgccatggttgccataactggtgcacatacttgcgagtcggtaatgaggttcacggacacgcagtgccagcgtgacgtgcctgactggccccttgacgcgttcctgccagtgctcgaccggattctcaccag

SEQ ID NO: 13524 - DNA, 1578 bp, Oryza sativa
  Clone ID: PAT_MRT4530_1954C.1
atggccatgatcggcgcttccgtctgggtgtccggcgacccacggggccgcactgccgctggtaagaagatcatctacgcgtccatggcaccgctcgtgctggccgccgccggcctagcggtggtgatggcgcactcttctgcaggcgtggcgctgctgccgacctgcggcgagcgtactgaccatcgtgagctgcggcactgcggctgcgccccccaccggctgtccggtgaccgaaatgatgatactgtgctcccgtctaccgctggtccgctgcgtagcctgcggttatcagctaaagcgatgacgtggagagccgagagcgacgtcgccgccgcattccgagtctccgacgatcttaaggacgacctcgtggacggcggcgctggcatttggatcagggtgtgcgactgggtggcgacggcggcggccgacggggcctgggatctccagcggctggccgcgtggctcaaggagaagatgaagcgcaacgatgacaacgacgaggtgtcaacgtggctggaggagtcgtggatgcaccgctacgcagtgatttcaaccatgtgcaagcggccgcgatgctggagctgtccgtttcttgcgtggacggcgagctcgcgcgcggggacggcgtgcacggactggcacccggggcagcgccaggaggagtccaggtcaggcgcgtcggcgacggacgccggggagcacgcccacgcccaacgtaacgactaccaacacgacgacgaccactaccacgacgaccaccacggtggccgccgagatcggggcccaccagcaccacccaccacggcccgggagatacggaagcgggagatggagggtgtcgtggtgttcgccgacgagaacagcatcctccggacggagctgttcgacgaggtgcagaaggtgaagtcagtgggcgccatgcctgtcggcgtccttggcgaggacgaaggcaccaacgagatgttcctccaggcgccgccgggctgcttgcccttgacagcgggctgctacgcgtcatcgccggtgatcgcctccggcgaacccgagttcgctccggcccccttctgccgctgcccctccgacccccgcccgccaccgccaccgtcgccgtcaatccggtctctgctcccccgcgcaggagtgaatttagtaagcatacaagaacacgagatgtctcaggccggaatcgacaatcttaatcttgagctaggcatggtgggagcgcaagtcgccggcggcgaggctcccgccgccggcacatcgccggagacgactgtgaaggcgctgcggggagtggggttcctcaccctcgtcatttcagtgggcacgctcgtttacaagccacctcatggccttctcttccagcttcacgtgcttgcctactacctcacgctcgtggggatcttcttcgccggagtggtggaggtgtggacggcgttctgggtgtccgaagccggtgtcggcggtggccgtcgcgcgttcgggagagccgtgctctgggcctccgtcgtgccgctcgccgccgccctcggaatcggcggctacaccgtcctggccaacgtgcccagttga

SEQ ID NO: 13525 - DNA, 1198 bp, Oryza sativa
  unsure (1)..(1198): unsure at all n locations
  Clone ID: PAT_MRT4530_19550C.1
acgcgcacgcgctggcccggttgggggacgaaccagcagcggccaggaaggcaggccggacggcggcgccggaggcgcagccggggcagcagcagcagcaggaggagtaggcgcgcgcggcctancagcagcagggggagcagtgggcacgcgcctgggcccgcgcggcgtagtatacgacaagctcaggccaccatagctgaagctgtagcggccggtggtcggcggcatggtcctcccacgaggtgcagcaggaggaggagcagccatggacggcgcacgaatatgaggagcaggcgcgtgcagtgcaagaggagcagcgggcgcgcgcggtgcagcggacgacgagctcgcaccgctgtcgccgaagctgtagcggccggtggtcagtgacacggtccactcacgtggtgcagcagcaggaggagccgatgcggatggcgcacgaggacgaggaacagcaggagcagccatggacggggctgtagcaggaggaacagtcacgggcggcgcaggaactgtagggaaaggcatggacggcgtagggatggggggagcaggtgcgggcggcataggaataggaggagcaggcatgcgtgacacacgaagatgaggtgcaggcccgcgcagtataaacccaggtggcacatcagcaggaggagcagtcacgggcggcgtaggaactggagtggcaagcgtgggcggcgtagcaacaggaggagcatgtgcgggcggtgtaggaacaagaggagtaaacccgggtggcacatcagcaggaggagcaagcgcaggcggcgtaggaataggaggggtaggcgcgggcggcgctggaactggaggagcaggtgcgcgtggaacacgaggatgaggtgcaggcacacacagtgcaagatcagcaggagtaggcgcgagcggtgtaggaactggaggggcaggcgcgggcggcgtaggaacatgagttgctagcgcggatggcattggagcaggaggagaaagcacgcgtggcacacaaagatgaggtgcaagcccgcgtggcacaacaagaggaggagcaagcgtgggcggtgcaggaagaagaggagcaggcccccgcgtggtagtaggagcagcaggcctcttgggctggcaaatgagtttgtctggcaaaaaattgacaaccttcgcatgtccgctcaatcttgtcagcatcggacacagc

SEQ ID NO: 13526 - DNA, 1179 bp, Oryza sativa
  Clone ID: PAT_MRT4530_19551C.1
acgaaccagcagcggccaggaaggcaggccggacggcggcgccggaggcgcagccggggcagcagcagcagcaggaggagtaggcgcgcgcggcctagcagcagcagggggagcagtgggcacgcgccgtgcacgaagatgaggagcaggcgagcgcagtgaaagaggagcgatgggcccgcgcggcgtagtatacgacaagctcaggccaccatagctgaagctgtagcggccggtggtcggcggcatggtcctcccacgaggtgcagcaggaggaggagcagccatggacggcgcacgaatatgaggagcaggcgcgtgcagtgcaagaggagcagcgggcgcgcgcggtgcagcggcagccatggacggggctgtagcaggaggaacagtcacgggcggcgcaggaactgtagggaaaggcatggacggcgtagggatggggggagcaggtgcgggcggcataggaataggaggagcaggcatgcgtgacacacgaagatgaggtgcaggcccgcgcagtacaagaggagcagcggctgcacgtggcatagcagacggtggcacatcagcaggaggagcagtcacgggcggcgtaggaactggagtggcaagcgtgggcggcgtagcaacaggaggagcatgtgcgggcggtgtaggaacaagaggaggaggcataaacccgggtggcacatcagcaggaggagcaagcgcaggcggcgtaggaataggaggggtaggcgcgggcggcgctggaactggaggagcaggtgcgcgtggaacacgaggatgaggtgcagcgggcggcacatcagcaggagtaggcgcgagcggtgtaggaactggaggggcaggcgcgggcggcgtaggaacatgagttgctagcgcggatggcattggagcaggaggagaaggaggagcaagcgtgggcggtgcaggaagaagaggagcaggcccccgcgtggtagtaggagcagcaggcgtgcgcagcacagtagaggatgagctctcgccgccaaaaccgtagccaaagcgatagcggccggtggtcggcgacacggtccacccacgtgggggcactggccacgtgaacatggtagcaatgggctgcgccgacggcgccgcggggcggcgcacggtggagacgagcagcggcggcgtcaaccctcctctaaatat

SEQ ID NO: 13527 - DNA, 1587 bp, Oryza sativa
  Clone ID: PAT_MRT4530_19552C.1
atgttcgcgtggccagtgcccccgcgcgggtggaccgtgtcgccgaccaccggccgctatcgctttggctacggtttcggcggcgagagctcatcctctactgcactgcgcacgcccgctgctcctactaccacgcgggggcctactcttctttttcttcccgcgccgcccgtgcctgctcctcttgttcatgcaccacccacgcttgctcctcctcttgttgtgccacgcggcgggtggaccataccaccgaccaccagcaacgattgcttcggtgatggccatgcgagctcgtcgactgctgcgccgctcacggccgctggtcattctacaccgcccgagcctgttccttctgttcctgtgccgctcggtttgaccatgtcaccgaccaccgcccactacagcttcagctacggtggagcgagctcatcatctgctacgccacgtgcgcccattgctcctcttgcactgcgcgcacctgcacctcatctttgtgtgccgcgcgtgctttctcctcctgctcctacgccacccgtgctagcaactcatgttcctacgccgcctgcgcctgcccctccagttcctacgccgctcgcacctgctcctcctgctgatgtgccacccgggtttactgtgtcaccgaccatcacccgctacagcttcggctatgatggagcgagctcgtcgtctgctacgccacgcgtgcgcactacttctcttgcactgcgcgcgcctgcacctcatcttcgtgtgccacgcgcgcctgctcctccagttccagcgccgctcgcgcctacccctcctattcctacaccgcctgcgcttgctcctcctgttgatgtgccgcctgggtttactgtgtcaccgaccaccacccgctacagtttcggctatggtggagcgagctcgtcttctgctatgccacacgccgccactgctccccttgcattgcgcacgcctgcacctcatcttcgtgtgtcacgcaagcctcgttctcttgttcttacaccgcccgcacctgctcctcctgttgctacgccgcccacacctgccactccagttcctacgccgcccatgactgctcctcctgctgatgtgccactcgggtttattgtgtcactgaccaccacccactacaacttcggctatggtggagcgagcttgtcgtctgctatgccacgtgcaaccactgctcctcttgcactgcgtgggcctgcacctcatcttcgtgtgccacgcatgcttgctcctcctattcctatgccgcccgcacctgctccccccgttcctacgccgtccatgccttcccctacagttcctgcgccgcccgtgactgctgctcctgctacagcaccgtccgtggctgctcctgctgctgtgtcgcatgggttgactttgtcaccgaccacgacccgctacagcttcggctacagcggcgtgagctcgccgtctgctgtgccgtgcacgtccagtgttcctcttgcactgcacgtgcttgctcctcatctttgtgcgctgcatgtatctgttcctcgtccttgtgcgccgtccgcatcggctcctcctgctgctgcaccatgtgggtag

SEQ ID NO: 13528 - DNA, 376 bp, Oryza sativa
  unsure (1)..(376): unsure at all n locations
  Clone ID: PAT_MRT4530_19553C.1
ctcttagtcaaattatagacagggggaggggagtggggtgtcctgctacagcaacaagtgctcagcccatgcagtgagttcgtaaggcaacagcatagcatagtggcaacccccttctggcaaccagctacgttncaattgataaacaaccaagtcatgcagcaacantgttgcgggagggggtgggggtggtncncaacaatctnactaccatgccattattagcgttcaggcgattgtgcagcaactacatttgcagcatgtntgtgttgtctatcttgatcagacttatacttaagcttaagctttgctggccttaaactngccatncatatttggtttntattntaactactacattgctccgaggagcatt

SEQ ID NO: 13529 - DNA, 2652 bp, Oryza sativa
  Clone ID: PAT_MRT4530_19554C.1
ctaccaccacttgagctccccggagcatctgggcgcgagcggcggcggtggctgctgggcgcgagcggcggcggcggccttcctcttgtccatcctgttcttgcgacgctccctggcctccttggcctccagctccgccctgtcgcggccaccgcctgccaccgcaaacatggggccaccagttttcctgcttctgccgatcatctcccatggcgtatcgtccaccgtagcttcgatcgcgcggcgctgcacgaggtactcctcgaacgcctctgtcggtgtggcaggcgccagacgcgcacgcgctggcccggttgggggacgaaccagcagcggccaggaaggcaggccggacggcggcgccggaggcgcagccggggcagcagcagcagcaggaggagtaggcgcgcgcggcctagcagcagcagggggagcagtgggcacgcgccgtgcacgaagatgaggagcaggcgagcgcagtgaaagaggagcgatgggcccgcgcggcgtagtatacgacaagctcaggccaccatagctgaagctgtagcggccggtggtcggcggcatggtcctcccacgaggtgcagcaggaggaggagcagccatggacggcgcacgaatatgaggagcaggcgcgtgcagtgcaagaggagcagcgggcgcgcgcggtgcagcggacgacgagctcgcaccgctgtcgccgaagctgtagcggccggtggtcagtgacacggtccactcacgtggtgcagcagcaggaggagccgatgcggatggcgcacgaggacgaggaacagatacacgcagcgcacgaagatgaggagtaagcgcgcgtagtgcaagagtaacactggacgtgcacggcacagcagatggcgagctcgcgccgccatagccgaagctgtagcgggtcatggttggtgacacagtcaacccgtgcgacgcagcagcaggagcagccatggacggggctgtagcaggaggaacagtcacgggcggcgcaggaactgtagggaaaggcatggacggcgtagggatggggggagcaggtgcgggcggcataggaataggaggagcaggcatgcgtgacacacgaagatgaggtgcaggcccgcgcagtacaagaggagcagcggctgcacgtggcatagcagacgacaagctcgctccaccatagccgaagctgtagtgggtggtggtcggtgacacagtaaacccaggtggcacatcagcaggaggagcagtcacgggcggcgtaggaactggagtggcaagcgtgggcggcgtagcaacaggaggagcatgtgcgggcggtgtaggaacaagaggaggaggcatgcgtgacacacaaagatgaggtgcaggcgcgcgcagtgcaagaggagcagtggtggcgtgtggcatagcagaagacgagctcgctccaccatagccgaagctgtagcgggtggtggctggtgacacagtaaacccgggtggcacatcagcaggaggagcaagcgcaggcggcgtaggaataggaggggtaggcgcgggcggcgctggaactggaggagcaggtgcgcgtggaacacgaggatgaggtgcaggcacacacagtgcaagagtagtgcgcatgcgtggcatagcagacgacgagctcgctccatcatagccgaagctgtagcgggtgatggtcggtgacatggtaaacccgggcggcacatcagcaggagtaggcgcgagcggtgtaggaactggaggggcaggcgcgggcggcgtaggaacatgagttgctagcgcggatggcattggagcaggaggagaaagcacgcgtggcacacaaagatgaggtgcaagcgtgcagtgcaagaggagcagtgggcgcacgtggcatagcagatgatgagcttgctccaccgtagctgaagcgagtggcataggaacagaaagaacaggctcgagtggtgtagaatgaccagtgggcgtgagcggcgcagcagtcgacgagctcgtgccgccatcaccgaagcgatcattgccgatggtcggtgatacgatccaccagccgcgtggcacaacaagaggaggagcaagcgtgggcggtgcaggaagaagaggagcaggcccccgcgtggtagtaggagcagcaggcgtgcgcagcacagtagaggatgagctctcgccgccaaaaccgtagccaaagcgatagcggccggtggtcggcgacacggtccacccacgtgggggcactggccacgtgaacatggtagcaatgggctgcgccgacggcgccgcggggcggcgcacggtggagacgagcagcggcggcggtggcgcgggcacgaacacttcctcggaagtgaagctggtgtcaatgatgtggtagctcttgccgtccgggaggagtgacgggatgatgcggctccagcgattgcgactaggcaggcgcctctgggctgcgatggcgtgttgggtcggaggctgctgggctaccgccccgccaccaccgctgagaagccgagcctggctggctaggcgaatgggccggttcgccatggcagcggcgacagagtagggaatgatgaggtggcgaggtggaaggcctcgatgggccgggttcccgttggcatctccttgctgggccaggttctcgttggcgtcttccat

SEQ ID NO: 13530 - DNA, 1172 bp, Oryza sativa
  Clone ID: PAT_MRT4530_19555C.1
gtcgggcagccacgaatcgatcgagagatctaatggcggcggcaaagctactgctgggtgatgctcgccgcgaaccggaggcctcagctttgggcgcgctcggcgtcgccgccatctccacggccaccactttggccaccgcggcgttcgagccgccgccgggcggcttcggcaccaccacctacaaccatctcgccgtcgccgggctcgcagggaccttccttggcggggtggccctggtcggcacttcagtgtgggtctctgacaacccagctgcccgccgtggcaccggcaagaagctcctctacgccgccgtcccgccgctcctcgccgccgtcgttctatcggtggcggcgctgctctggcaactgttagaagagagggaatggtgggccatattaagtggggcccacatgccgtatcatatccatgacctttgtccttgcgttgccgccggcggcggcggctacggccatggagatctcacgcgaccatttgccggtgaggtcggctgctccgcctccgcctccgcatctacgcctgattggatccccacccctatctccactgactgtgctatcgcgtttccggcggtggttgatcgaggcggtagcccgtgcggcgcgcgagattccgcccgtccacggatttccggtcgccatcgccggggttcgtcttctccggccagcccctcgccgcgcgaacctgcgccgcccgtcctcggccaggatctggtcggggatcgcttgtggtaggtgtttgggggcactgggggtgaaattgaagcttgtttgacaacgaccattattctgatcgatctctttgtgatggggtaacattgatgtgatgctttctaatgtccctttaccaatcgtgatagcgctctcaacagtatgcaacagtattcctgaagtttttcgccaatcaggtggtgatgaccttgatctggtgtcccttgcaggcttgcattgtgttggtctaacaatccatttggaccatttgtcgtatccaaaggctcgtaagtttgtcaactcggctttgtatattcctatgaatacacgcacgcaaaccctacccctatgagtatcttcgaagactgggccgctgtcgacgggtacgtcgcttaccactgaaagcacaacgctgttaaatcctgaaaaattcgctctcat

SEQ ID NO: 13531 - DNA, 1248 bp, Oryza sativa
  Clone ID: PAT_MRT4530_19556C.1
atggaggggaaagaagacgacagacggcggggcggcggtggcggaagctcgacgccggggatgaacctgaagaacctggtgtcgagggagtatttcggccacaagaagaaggtgcactctgtagcatggaactgcctaggcatgaagcttgcttcaggctctattgatcatactgcacgtgtatggagtatcgatccccatggccattccaaggttaaagacattgaattgaaaggccacacagattgtgtagatcagctctgctgggatccgaagcatcctgatacagttgctacagcagctgctgacaagtcaattcgcctctgggatgcacggagtggaaaatgtcaagtcgtcgaacttagtggagaaaacatcaatatcacttataaacatggtggtactcaaatagctgttggaaacaaggaggatgagttgacaatagtggatgttcggaagctaaaagcccttcacaaatttaagtttaattatgagataaatgagattgcatggaacaaaactggagatttattcttcatcactactggacttggaaatgttgaggtatttggtgatccttcccttgatgacacccttcatgtggttggcaaattgaatgctcatacagcgggttgttattgcattggaatggatccccttgataggtattttgctgttggaagtgcagattcacttgtcagtctttgggatgtcaaagagctcctttgcattaaaacctttaccaaactcgagtggcctgtaagaacagttagcttcaatcatactggagagtttcttgcatatgctagcgaagatcccttcattgacattgccaatgttcaaactggacgatcgattcatcagattccatgcaaggcagctatgaatagtgttgaatggaaccccaagtacaacctcctggcttacgcaggagacgacaagaacaagtaccaggctgatgaaggtgttttccgaatatttggctttgaaagcacataactgatggttagcagattaccgtcaccaactattcattgtagattgatttccgagttctgatctgcatttctgacagcagtttgggtcctgattgtaacttcaattttattaatgtcctggccgcttgaactgaattgtattgtactttgtgactcgagagtcgagacccatatttttgttagagtaaatttcagaaatcctatatgttttgttgtctacgtagggaaaaaacaactgcatgtttgcatc

SEQ ID NO: 13532 - DNA, 644 bp, Oryza sativa
  Clone ID: PAT_MRT4530_19557C.1
ggacataatcgatgcatatcatgttttacaggaggtgcatcatggagtttgcagggcacaccagagcggacccaagatgtatcatagcatccgacccgccgggtattattggcttggcatcatggctgattgcctcaaagttgtcaagtcgtgtcacgactatcaaattcacggcgacttcaagcattaacttcctagagtgcatgcttggccattaaaagcatggggaatagatgtcatcggactgattgaaccccctttttccgggggcatcgcttatactcgccatcatagtgcatttatctaagtgggctgaagcagtgtcattacgggaagtgaagactgacagtgtcatcagcttccttgaatggcatataatctatcgcttcagagtcccttaccgcatcacttcatataatggtaaagctttcatgtcccataaaatgcaaagattaattgcaaactacaagagtcgatggaattattccactggctattatcctcaggcaaatggcatgattgaggccttcaattagacgcttggcaagatactaaagaaagttgttagccagcatcgaagggattggcaagatcgtctcttcaaagctctttgggcgtacggatggtggtgcggacgcttcagc

SEQ ID NO: 13533 - DNA, 228 bp, Oryza sativa
  Clone ID: PAT_MRT4530_19558C.1
atggaggatttctctgatgaagcctactttgaaaagtttattgagctcttcttggatagcctctttgcgatctggcgtgaagcgacgcaacttctgcttgacaggttttgcgtcgggtcaaaccatcaacttgttctcaatcacctccctgaagactccggacatgtcggacggctgctagtcgagctcggcgccaatcttggccgtgtttgtcaagtgtgctactag

SEQ ID NO: 13534 - DNA, 1320 bp, Oryza sativa
  Clone ID: PAT_MRT4530_19559C.1
gtttttttttttttttttttgtcatcaatcagttttttattcctgaaaaacaagtattacttctgtaacaaaattgggagaattgccatggtttcagttcattgatagacaatgctgcatcaatggcagctgaacaaacattttgtttcctatgcatcaatggcagttttcacttgctctgctcctttgccttcagcgcctcgattacagcagagaagtcctggtctgcaagcccaagcgatttcgcgaccttgtacagctcgtttgcagctgcgactgtaggaatagactgggacaccgattctgccagggccaatgcgagcctcaaatccttctgctgatgcttcagaggaaaagcagtagggtatgcagctttaaccatggaagggcccttgagggagaacatgggagcactgatagcaccttgtgaaataacctcgacaagagtattggggtctaggccaactttttcgctcaggagcagtccttctgaaaacgaaaccatcatgctccccatgaccatattaacaacgagcttcatgtctgcacctttgccaacgtcaccgaggaaaaatcttgactgccctaagaaagatgagcaggccatcttctgctggcttttttgagcctgaaactggagcctactgaaaaggtatcgagttagcattggaccaacagtacaagagctgaaatcggatcgctcaaggaaagatgccccagtacttgtaatgtgcttgccaatcagcttggatgtagcagcatcaaccgtcgacacatccacataccctttccctggggccatcccctgtgcagctccattggccccgcatgcaacctcaaccgcgctctccggatcagcaagcatcgcgaaggtcacatcgcaagacgaagcaacatcggccggtgaaggctcgtacttggcgccgaggctgaggagcgggtcgcacttgctcctggtcctgttccacaccgtgacatcgcacccggcgttgatgaggttggaggccatgggtgcgcccatgatcccgaggccgaggaaccccaccttcccactgaaccctccttccccggacggcgacgacgaggaggcggagcaggagaagacgaggcgtgctcccctgcctccgccgcgtaggcgcagcgtgggcgccgccgccgccgccctcgcgcacaggagggaggccgccgccatcgccgccatggatgcaggaaggggggtagagagtagagatacggaaggaggcgctgctgccgcgagcgcgcgcgctgcgcgcaaaatctcgtctcgcggcccgcgtgccgggtcccgccgcccggggg

SEQ ID NO: 13535 - DNA, 282 bp, Oryza sativa
  Clone ID: PAT_MRT4530_1955C.1
atggccgccgggccggtttgcgccgtgcccgcgcgccccggccgcgagctcccgctgccgctccgtggtgggcccgcgtgccggcgcccttcctccctctcccgagtcgctgaccggtgggccccgcatgtcggcgccgcttcccccgtgctgacgtcagccctggcaagggtgggcgtgatggagcgggacgggccctgcgacggcctctgtcgcttccggattcacctaggcacgagaggggactgcccgttgcccgctggggacgggggtgaaacctga

SEQ ID NO: 13536 - DNA, 397 bp, Oryza sativa
  Clone ID: PAT_MRT4530_19560C.1
tgcaggaattcggcacgagggtcaacagcacctcggtgaacattttcccgggctacaaccaccttgcagctggctctattgtctcgacccctgccgacatgaccaagttgcttcgcttggtcttgaacaaaggcacagtggatggtgtgcagttgttcaagtcaccagcgaccattgccgagatgatcacgggcaagaacaaggcggtagatgagctgcttgctcagaacggcgctgggcttcctttgcttggattcggctatttaccagacggcaactcgctctcggcgggctacggctttgacatcattgggcatgtgctctggggccacgcgtacgttgatcaaggtggtgacacgtttgtgcatcacacggtgaccgggcttttgctccaaac

SEQ ID NO: 13537 - DNA, 304 bp, Oryza sativa
  Clone ID: PAT_MRT4530_19561C.1
atgctgctccctaccccaagaacaccctcccgcaccaagaacaacaacaacaacaagaagaagaagaagaagaagctgggacaggatgaagcagacagagcatggatggggaactggaaagtgcagtggagaggggccagagcagaggggggccatctttccagtgaggacgcgcaagcgcagcggcagcagctgggcggcgaggcgatgctggtgagggaaggtggtggcggacatggcgagctaaacaaatggcgcaaatgcgccgcgcggcgcgaggtggcagaacagcacaggtcgcccg

SEQ ID NO: 13538 - DNA, 546 bp, Oryza sativa
  Clone ID: PAT_MRT4530_19562C.1
atggcttccaacaagatcgctccccttcttgccctgaccctcctgatcctgttcttcgggtgtgcagtaactaactgcaccggcaagccagttgccccgacgccgccgtcgcacgacgatcacggccgctgcccgatcgacgccctgaagctgagggtgtgcgccaacctgctcaacgggctgatcggtgtgaagattgggcgcggcccagacgattgctgcccgctgctggccggtatcgccgacctcgacgccgccgtctgcctctgcaccgctctgaaggctaacgtgctcggcctcatcaacctcaacctgcccgtcgacctcagcatcatcctcaacaagtgcggcaagaactacccgtccgcggcgatcgggatagcatgtctccggaacctctgccttccacgtcctgcaccgggagaaggcggcaataaggtttttgggaagcgcttcgcacgactgctccctattcgttcacgacggctcgtctttctgtttgctcgcgtgatgcacgcctttgtcaacgcccgcaaccgcgagtaa

SEQ ID NO: 13539 - DNA, 2745 bp, Oryza sativa
  Clone ID: PAT_MRT4530_19563C.1
ttatcaggtccagggacctcgtaattgtctgttcgttaatgtggccactccaagattctgttgtagcaggtgtgtcgactgtatgaattgttgtgaaactaacgataatacatgaacttttgaattacagggcagcgttcaggtgtgacagtaatcactatgatgtgaaatattagtgtcttgacttatatggtaattagaagaatacaatatagtttgcttccttatcctgagttgctcgctgggactggacctaccagattgcatgtttagcgacgctgacggtagtctgcattgggcctaaccactaaatagccttatagattcgttgttccatcctattgcaaaagcatggagccaccagtaatttgactcccgtgacaatcatttactggatggccctcgcagtcgccgggatcgggtacctcgcttatccctataactcgtcgtgctgaatgaccgctgcggcggcgttgcatgggcctctgtaccctgtacgggttcgacagaaaacaccaacttgtcgagggcatcactggggtattctcagctctcctcgaagaccaatgtttcctgcaagggtctgcgatggtgggtggtgggagagagatgatttgtacttagagacttcactactctttgctaccttctggggcctttcagtactaggaagtattgatgcattcccatgtcatttgctattgtcgagatgactacaccgctttgctgttttgaactaggttgcacaaaggactctggattgtccattgggtaagcagccgcaatggtgtgttgtgactgttgctgacgtaaaataccattctccacgcaaactacagaaccctgttgtccagcagggagatgtctatgcccaatctgtaagccacctgaaccattatacacgctactattctccagtggaaggtaataggaatcatcaggttcaggcaactcccataaatctttaacaccttttgctgcttgaccatttagatgttcttccacaggaatttgtccccctgaggtgttggaaagcaatgtggaactgtttgatggtatcactgtagtattctcaacctctttcgaatccatagttacatcattcatctctggataactgtttactaaagaaatatcatttgcactatggcctttgtctatcataattttgtatctggtgcctttcaggccctgattttgctcatgagcatgcattgatggccctgtgtaagtaatgccctcaagactttgagcttgtgtattttggctctcacgagtgtcaatgggagcggttgtataacaggtagtcttgatctgccgtctctctgggctatgatcaataatagttgtatctgtatagcttatttctttgaaatcttcagcttgaacatctggaccatcattactgaattttgtattcacgaaatcttcattctgctcctctacgttgctggcacagaatgaaatgcttctatctgcacagctggtgcccttgtaatcttgggcttgcaaatcagagttctccctaccctgactatcatgatggtcagcagatgtttcaatatgcttggtttcatcatcatcacaatcttgacgagatgggcaatgatcattaccaccttgcaacatatcttcagacaactgttctaccagagcatcctgcaaatcagtgctgccgtcattttcgcaggcaccatgttgaccaagctcttttgttatgcctgctaactggtctgccttgatctttctcatgatagatacattcttttcgcctagctcaagaccaagtaaatttctcagtttctctgttgtcaccctattgttcttaaggacctcgaaagcagcaggtatatcattgcaggatatgttcaaccaatgttcacgcagtctcctctgttcatcatctattaatgttccatatggttttacatggaatttatcaaggttaccaattacacgagtaagatgcttggttttaatgccatcaccagactgcttcatgctcttaacaaggttgtgctgtgttctgctgatctcaatatatgacataaacttcgaaacatcactactctgtgcaaccttcaagggcatttcactactggtaacttttggtcgcgtatctccttgcttgtgtttagcaaggttattatccttggaatggtagttattcaggttaacacgatatgccttctcgtcagctctaatttgcttctccttattaagtaaggcatctgggtgagtatcaccatagcaaagagaggaggaccaggtagaatattttagaaagctgatcacatttacgtaacacttagaaagagagttggcatgtgagctggagcaacacatcccaagccccagattttcttctgcatcaatctcagttggaagaaactgtatgagaaactttctgtcagcttctgtcagacatgtatcccaaaccttataggacagcacacttctcaagttctccaaggaaaatgtctctggaggaatatatgtaacatcagccagccctgaatcatgcttctgtctggaatctatgaatggtgccaagtctgaccacaaaatcccaacttgttccttttggggaaccactctcttttgatagtcatcccatttaagagcaatttgagacttcaaacttatatggcaattagaagactcaacttttgacttcttccatgtcctgttttgatctgagttagtagaccttattatacgtttcttttgcttgcctgctgccat

SEQ ID NO: 13540 - DNA, 657 bp, Oryza sativa
  unsure (1)..(657): unsure at all n locations
  Clone ID: PAT_MRT4530_19564C.1
tctcccacctcctttcctcctncctcggccagggagggaaggttccacttgctagaggcggcgagctcgccaaactttttcatcgtggcgttgtctctcctctccactccactctcatctcaccaccnccttcctntctttcttcctagccaatttttgnccggatgaacagcaacagcggcgagttcgtccaatcgatggtcacagactagcaaccttaccagcctcccaagctaagagcacaagtactgggtgccgagttgccgactagacatgctacattgctgctcttgcatcatgttgcatcccgtgccggagattgggcctctggctgtgcagaaaggagccaggggaggtagggactgggaagtggaaagggagaggagagagggattggggaatttttcggcactttggtctgaggtagaagatgactgttctctgctctaagattcgtgcgaacaagtgtcactcaagatgagaagtctttccaaatgggcgaaggacccaggtcctgtataaacaccaacaataatggggctgctgacttgtatgttgatgagttttttttttatgtatgttgattactggaaatgatgtttaactatttattttattttaaaatatcatgcagttatatttaaaaaaaaaaaaaaa

SEQ ID NO: 13541 - DNA, 889 bp, Oryza sativa
  Clone ID: PAT_MRT4530_19565C.1
cagtaatgacaattttttagatcttccagcagtagatccattacaaatcagtattttatacacatggtaacagagttttagaatgaacatcatgtcgaatagtaactttgctgctgtgtatgatatgatacatgaaaaatacaagacacatagtagtaggaacaaagtgatatcatccactatatttttcatacattcaagtaaaataccttgatctggaaaatcaaaagactttcaaacaagaattgaaaggattagtcacagcgaacctttctcatgatagatacattcttttcgcctagctcaagaccaagtaaatttctcagtttctctgttgtcaccctattgttcttaaggacctcgaaagcagcaggtatatcattgcaggatatgttcaaccaatgttcacgcagtctcctctgttcatcatctattaatgttccatatggttttacatggaatttatcaaggttaccaattacacgagtaagatgcttggttttaatgccatcaccagactgcttcatgctcttaacaaggttgtgctgtgttctgctgatctcaatatatgacataaacttcgaaacatcactactctgtgcaaccttcaagggcatttcactactggtaacttttggtcgcgtatctccttgcttgtgtttagcaaggttattatccctgaacattatttctggatcatcagaacttagccatctcttcttccatttcttcaaggactcaaccatgttggaatggtagttattcaggttaacacgatatgccttctcgtcagctctaatttgcttctccttattaagtaaggcatctgggtgagtatcaccatagcaaagagaggaggaccagctgagggaaggatttccaaagtgat

SEQ ID NO: 13542 - DNA, 675 bp, Oryza sativa
  Clone ID: PAT_MRT4530_19566C.1
atggaggagcagcaggcggcggctgcgggcggcggaggcggcggcggcggcgcgtcgatgtgcgcgaacgggtgcggcttcttcggcagcgaggcgaccaagaagctctgctccaagtgctaccgcgaccagctcaaggcggcgccgtcgtcgccgccggcggcgcctgacctcgtcgcgaacgaggaggaggaggcgagcacggccgccgccgccgccgccgacgagcagctggcgctgtgctcgagcggctgcgggttcttcggcagcaaggagaccaacaacatgtgctccaagtgctaccgcgaccacctcaaggcgacgtcgccgttgttctcgtcgtcgtcgtcgccggccaccgcatccactaccgacatcaccgtccccattgctccggccaccacggcgccgacgccgtcgctcaaggggaaggaggaggaggcgaccgccgccgcgtcatcgtcggcggcggcggcggcgaagcctaacaggtgcgtggcgtgccggaagaaggtggggctgctgggcttcgagtgccgatgcggcggcacgttctgctcgacgcaccgccacgccgacaagcacgcctgcaccttcgacttcaagaagagcgaccgggagaagatcgccaaggagaacccgctgatcgtagcgcccaagatcaccaagttctga

SEQ ID NO: 13543 - DNA, 405 bp, Oryza sativa
  Clone ID: PAT_MRT4530_19567C.1
actgacaaggatacagaagacattccttgattaccacttcaaagctgagcaggaggcaggatcggctacatttgctttcttcagtttcaatggtgcacacctcgactgttcatgttttatgtagatcacaaaaggaacatggtgatagtctcctaaacactggtaccttgttagggaccgctggtgtatggcgcacagaagctatcaatgacgcaggaggttggaaggatcgaactacagttgaagacatggacttggctgtccgagcaaccttaaagggatggaaatttatctatttaggggacctcagagtaagaagaccgaatccttaatttgttctgttcaatcactcgacgatagcatctgataaagcaaatacgtcacaggtaaagagtgagcttccat

SEQ ID NO: 13544 - DNA, 356 bp, Oryza sativa
  Clone ID: PAT_MRT4530_19568C.1
cccacgcgttcgaccacgcgtccgcccactcgtccgcagacgcgtgggcgggcgctccacatggcttggccgaacaagaaggtgaaactgagctttctgatcccggcgagcacggggcggaacatggccgaggcgctgcacgcgacgaacgcgctgctgactgcggcgaggcaccgggtggcgacgccggtgaactggaagcccagggagcgcgtcttcatacctcccggcgcttccgactaggaggccaatgcgaggttacgggacgggaccgagaccgttcagctggtctccaacatgtgctaccttcgattcacccaggtggactgaaagactgatggtttgggaaggagggt

SEQ ID NO: 13545 - DNA, 529 bp, Oryza sativa
  Clone ID: PAT_MRT4530_19569C.1
ggaagcacaattctgaagtggagacctggtgctgtgtcaacaattttatgctccagttccttgtctccaaatcagcacagaagaaatttctcaggactagtcagtcaatcggctcagcaagaggaagcgagaatgagatggtaaagcgactagcgctccaccagcattatccagagctcccaacgcttctggaaacgatggatttatctcacacccgttcactggcactgtccggtacggtcaaccgaatccctcttgatatgtttgtccacttggtggtgttggatcttgaaggatggaggagcttggacgatgatgatctgttgcagatatgcatcagatttctcctgctgaagtatttaagcgtcaagaagacacgcatcagcatgctaccaccccagatcacggagctacggtatcttgagacattggacataagtcacacacgggttgctaagatcgaagcgtacgggctattttctctgacgacactggatttaagaagcactcaggtgaagaatctacctta

SEQ ID NO: 13546 - DNA, 3488 bp, Oryza sativa
  Clone ID: PAT_MRT4530_1956C.1
aagattgcaagctggaggacaaggtggatcgtttggagaaggaattagccgcattgaagggagaagcaccaccgcagaaggccagggttcgtcttaccgcaaggaagagagctctttttgtccctcgctaccagttggcacctaagcaatgggaatggtcccaacaacaacaacaacaacaacaacaacaacaatggagagaatcccacgcttgcccaagtcctggctcaacaggcacagctcatgaatatgatgatgcaccaactacagaaccagcagaaccagggaaacaatcatgcacctccccagaacaatgcacagatcaggaaaaagtctccttcgcttcgcatcagcttcatggccctgcctctgagtggtgggatcatttccgtctcaacagaactactgccgaaccaatcacttggcttgagttcactgctgctttccggaaaactcacataccctcgggagtggtgtctcttaagaagaaggagtttagggcgctcactcagggatctcgctctgtcaccgaatatctgcatgaatttaatcgtctggctcgctatgctccgaaagatgtgtgcactgatgatgggcgtcaagagaagttcctggaaggactgaatgatgagttttcttacccattaatgactggggattatcatgatttccagaagttggtggataaggctatacgccaggaggacaagtacaaccatatggagcagaagaaacgtaggattgctcacttcaaagctctacaggggaatagtcagaggccgcgtcttgctatgggacctcaggcagtgttgcagggagggtcttcgtctgttgttcgtccgcaacgtcagttcttcaacaacaatgctggcaacaacaaccgcaaccaagctccacgtcccgttgcaactccagtccagcatcagcctgccaagagggagcaaggcagcaagcctggggtagaagatcttagacgtcctttgatggttagtactccgagtaagcaagcactcacatcacaacgtagcccctctgtcagaatagagattcaaggagtaccatttctagccaaccttattctgttagaatccaaagatcttgatgtcatcctagggatggactggttagccagatataaaggtgtgatagactgcgccaatagaaaagtaactctcaccagcaatgatggtcaagttgtaactgttcatgcattgccttctgagcctttatggtcaagtctgaaccaaataactttggaagagattcccatagtacgggagtacccggacgtgttcctggatgatttacctgccggaggagttgccgttgatcctagtaatgtggaatccgtaacgaactggaaacaaccgaagacagtttcagagattcgtagtttcatgggtctcgcaggttattactggaggtttatagagaatttctccaagattgctaagcccatgacacgactgcttcagaaaaatgtgaagtacaagaggtcagaagaatgtgagcagagctttcaagagttgaaaagtcgcttaatatcagcacccattttgattttgcctgatccaaagaagggtttccaagtgtactgcgacgcatctaagcttgggttaggttgtgttctgatgcaagatgggaagttacgtccgcatgagaagaactaccctactcttgatcttgagttagccgcagtggttcatgcgttgaagatttggcgtcactatctctttggtactcgtacggaggtgtacacggatcacaagagtttgaagtatatctttacccagccggatctaaacatgaggcagcggagatggttggaattgattaaggattatgacatgggaattcattaccaccccggaaaggccaatgttgtagcagatgctctcagcaggaaaggttattgcaatgctacggaaggacgacagttgccgttggagttatgcaaggaatttgaaaggctgaatttgggaattgtcagtagaggtttcgttgcagctttagaagcaacgcctactctcattgatcaagttagagaagctcaagtcaatgatcctgatattcaagagatcaagaagaatataagaagaggaaaagctatcagtttcttggaagatgagcaaggaactgtatggttgggcgagagaatctatgtcccagagaacaaggagttgaaagatgtaattctgaaagaagctcatgacactttatactctattcaccctggtagtaccaagatgtaccaagatctcaaggagaaattttggtgggcaagtatgaagcatgagatagcagagtatgtagctgtgtgtgatgtttgtcagcgagtcaaggcagaacatcagaaacctacaggtctgctgcaacctttaaaattaccagaatggaagtgggaggaaataggaatggatttcatcactggtctacccagaacgtcatcgggccatgactctattttagtgatagtcgacaggcttaccaaagtggctcatttcatcccagtgtggacaacatattccggaagccgtttggcggaattgtatatggcaaggattgtgtgtttgcatggcgttcctaagaaaatagtatccgatcgaggtaaccagtttacttcaaagttttggaagaagcttcaggaagagatgggttccaagctgaacttcagtaccgcttatcatccgcagacagacggacaaaccgaaagggtaaatcagattttggaagacatgttgagagcttatgctttagacttcggtggaagttgggataagaatctgccttacgcagaattctcgtacaacaacagttatcaagccagtcttcaaatggctccttatgaagcgttgtatggtcggaagtgccgcactccgctattctgggatcagacgggtgaacgtcaggttttcaggactgatattctgagggaagtagaagagaaagtaaagatcattcaaaaaagattgcgtatagctcagtctcgtcataagagctatgctgataatcgccgtagggatctgagttttgaggaaggagatcatgtgtaccttcgtgtcacgcctcttcgaggggttcatcgttttcacaccaaaggaaaattggcaccgtgttttgcgggaccttacatgattgtcagtagaagaggagaggttgcttatcagttggagttacctcaatcattggcaggtgtttataatgtgttccatgtgtcacaattgaaaaagtgtttaagggtacccactgaagaagctaatcttgagcaaatagaaatccaaaaggatctgacatatgttgagaaaccaatccgtatcctggagacagatgagataaggaccaagaatcgggttattcgtttctgcaaggtccaatggagtaatcacacagaggaagaagctacctgggagcgagaagatgaattaaagtcagctcatccgcatcttttcgacagttcttccgaatctcgaggacgagattctgtttaa

SEQ ID NO: 13547 - DNA, 128 bp, Oryza sativa
  Clone ID: PAT_MRT4530_19570C.1
cctggactatcttggagcgtatggtgacaaagttcttatttttggggatattttaagattgaaacaatatatggttggtgccctagtcgtggatatcagcatcacggtcatggttactgtggatagtg

SEQ ID NO: 13548 - DNA, 231 bp, Oryza sativa
  Clone ID: PAT_MRT4530_19571C.1
atgggcaacggattcgacggcgtggctgtaggtatcaatcgtgtagatccaatggtggaggagatggtggatgacctgcggtccattaagctcatgccaaactccatcaagctcatccacttccactccatggacatcgacattgacagtttaccttcccctttcgcttctctctcgtatggtgacattgcccagtatcttgaggacaaaggcaaggatgatgatttttag

SEQ ID NO: 13549 - DNA, 771 bp, Oryza sativa
  Clone ID: PAT_MRT4530_19572C.1
atggtggcgcgcaggtgggtaggagctgggcggcagctacgagctccgacaacggcgaggcgctctcctcctcccttcaatattgttgcaatcaaggatgtatgtgaggatggccgagcggtgcacattgtgatggagctcttcattgttggtgagctcttggacaagattcaggaggaggggcattataacgagcgaaaggctgcagagattaaagacgatgttctggcactgtcaggtttcaccgagttgattgggagtccatattatgttgctcccgaggtactgcacagatatgttatagaccagaatcttaggtactgcacttatggaccaaaatctgatgtgtggtcagctacagtggtacttaacgttttgatgagtggagtgccaccattttgggcaggacatccttggatctgtgaaagtggagttgctattaatcaagctctagatcccagtgttatcacttggctcaaacaattctgcaatgaacaagttaaaaagttggatttaagagctgaagttagtgaagatagatccaaagcctataatgctgctgatcttggagaggtgagagaaagtgaaggatttttctttctgaatggcttccaggttgctcttgagtttctctgcaaagaggatcgctataatgttattgatgttaaggaagttgtgcttagtgttattgagagcacaccagttctccacctgattgatccaaaacggatcaagttcctggcagaaaaccttgccggcaaagaaagttag

SEQ ID NO: 13550 - DNA, 328 bp, Oryza sativa
  Clone ID: PAT_MRT4530_19573C.1
ggatcccccgggctgcagggctaaaagaaggccgaaaaacagcggagatttctatggaattcgtctagaaagctgcgaatcttcccttaggattctgcttatccttgccaaatcctctccaaattcaaagcatcacttattttttttttaaaaaaaacggcaaacacgagtccatgagaccacgagtgacgacgagtagtcctccacccctacgcctcgccttctcctctcttcttttcccacgcaaacgccggagacagaggaggagacaagagtccaagaccaatgcgaggcaacggcagggggcgggaggaggaggggaactccc

SEQ ID NO: 13551 - DNA, 432 bp, Oryza sativa
  Clone ID: PAT_MRT4530_19574C.1
atggtggaggcgcagagtggctcgaggccggaggcaaggccaaagaggacgctgtggcaggtgatgttggtgaggccgatggccacctccaccaccggccaccatcgcgcctccgccaaccgtcaccgtcaccgcaagctctaccgctcggcctcacctctgccgcctctcctctactgctgccgtccagtcgcagccgcaccgccccgccggccagctgtgccggtgtctgccacgccttcgctcgatctgagcctcgggatggagcgcagtgaggcttgtggcggcggggtggcaacaaggagaagctccctctcctccgagctcgccgactttggctccgggaggcggcgctatcgcctgactctgagaagggaggaagaagacagaaaggaagaacatagatggaaaaaggtgacggcagtggcatag

SEQ ID NO: 13552 - DNA, 231 bp, Oryza sativa
  Clone ID: PAT_MRT4530_19575C.1
atgggcgttcaaattcccccaatgcacatcatgaggcacttgccatcggctctcactggcattctgccaagtcgaacctccagtgctgtggcgtggtgcttgtgtccatccgtgggcatccccagttggctcccagtcagccttgggaatggcttgcagctcacgatcaccgacaaggtcaaggtcggcgtcattcaagaggcgtggtggaacttcggcttcctccattga

SEQ ID NO: 13553 - DNA, 282 bp, Oryza sativa
  unsure (1)..(282): unsure at all n locations
  Clone ID: PAT_MRT4530_19576C.1
ggccccnccncccagncttnatggncacnnnncnggtnntntgttacanccatggttcccnnnggncgataacgccngggtttnttttnnggntanntgtgcnccnnnnntggnattgncttttccnnnggtttatcctgtggcacncncnncntnncagtggtttgncgttccnttccncnngngncttttncgtgccnttttggntcggcnnntggntattggatgctgactttgatnccntntnngntgnnnncatnangcnaanctttggggccnann

SEQ ID NO: 13554 - DNA, 256 bp, Oryza sativa
  Clone ID: PAT_MRT4530_19577C.1
aaccaatcaattaaaccatctttttttcgctcttattattactggacatctgccaaaataaatcctttattgcggaccccaaatcatcacatattccttcacccaagaggagatcccatcatctcgctgtcaccagcggcagccaaggcttattgttgctgggcatgtccatttcgagctccaagcctaaaagcacaccttggtaggcctcgacgccatgcttgatgaaataaagctcccgcatcccacccaagac

SEQ ID NO: 13555 - DNA, 215 bp, Oryza sativa
  Clone ID: PAT_MRT4530_19578C.1
ggtacaacactcattttttttctgcccccacatccgatcacaaatcaaagcaaaaaaaaaacaaccactggggacacaatataattaatatggacctagctacaaaattcaccacgcccaatatttaaatgccctgttttttaattggggccactattttttaataacttcccggctagaaagctaactagcactggtacaaaaactgatctatg

SEQ ID NO: 13556 - DNA, 291 bp, Oryza sativa
  Clone ID: PAT_MRT4530_19579C.1
atggtattatcatcggaatttataggagatgggagagccggcgaggcgggagaggatgatgatgaggacgaggtggttacgtcaacgcgcccgcgcgcgggagcgaggaggggatcgatggatcgccgccgccgatcgaagcggagagcgtggcgtgcggtggactctggcgtggcggttgttgcagtttcgctcgcgcgcatgcatggcatatgcaacggctgcgacgaccaggcgactaagcgtggcctcatgggcaatggcccatggttacctgggccgggtcactga

SEQ ID NO: 13557 - DNA, 228 bp, Oryza sativa
  Clone ID: PAT_MRT4530_1957C.1
atggcgagcagcggcggcggcgcgcacacggccaccggcgacgtcaagcggcggcgacggccgaaagcggcggcgcacacgggagaggagagaaaaagggaggagaggggagcctcaccgggcgtgacactcgccctccgttaccactctgtcgccgctgacgcctactaccaagaccaacgcttcgcccacacccgccttctggacttcgcgcaacagctgctataa

SEQ ID NO: 13558 - DNA, 1009 bp, Oryza sativa
  Clone ID: PAT_MRT4530_19580C.1
aaaaagtttttgtttttttttttttttttttactcgtgaaatcacataaatatataatttctgaaggggcagaattcacgtctgtttatattcaatgatagtctccatgttttttcgttatccacttagtttacatacataacaacagatgcctaacactgttacaggagaacgttaaatgctctgtttcttcaacagtatcatgctggcacaccattcaactcttctgggatctctttgctcagaactggaaggtgccccttctcctggaggctcttcaccgtctcgtagagcgagtcgctcacaggtatgaagtggaggccaagatcctgcagcttcttgttggacatcttgtacggctgcttccgtgggttcacctcgtcagagcaccttgtgggcacaggatactcggggaagagcttgccgaggatgtggacgacgtcctcacggtgcaggacgcgctcggcgcagaggtgccggccggaggcctccggcgcctcgaagacgcggacgtgcgcggccgcgacgtcgcgcacgtccacgtacgcctgcacggcattggcgtacttcttggccgagccgtcgaggtacttgaggatgtgcacggcgctggcgttcaccgtcggctggcagcagcgggccgaccgaccagcacgggggttgacgccgtggcagccgtcgacggcggcgcggatggagtcgtagtcgaggaggtcggccttgcagaggaccagcctctcgtcggcgccgtccagcgccttcaggtgggcgttcttcgggtcatctgggtttctcactgtgcccttcacggtgtagcccctctccagcagcagcttgacgagccacgacgcgatgtacccggcggcgccggtgacacacaccgtttggccgtgccccggcggcagctcctcctgctgctgcgccgccgctgcggcggcggcggcgtcatcggcaacgacgacgacggtcatcgttgcttgttagtgttaggcaatttgttgcctcgtgc

SEQ ID NO: 13559 - DNA, 2595 bp, Oryza sativa
  Clone ID: PAT_MRT4530_19581C.1
atgaagtacctggatccaaagcaacccaccaacactagaatcaaggaccttatcagtaggatgactcttgcagaaaaaattggccaaatgacacagattgaacgtggggttgcatctgcagatgtcatgaaaaactacttcataggtagtgtattgagtggtggtggaagtgtccctgctccccaggctactcctgcagtttgggtgaacatggtaaatgaattccagaaaggcgccttgtcaacacgtctaggaatacctatgatctacggcattgatgcagttcatggtaataacaatgtctacaatgccaccctatttcctcacaacattgggcttggagctacaaggcattgcgtgtcaaacattatctttctttgtattagggatcctgacctcgtaaggaggatcggcgaagcaactgctcttgaagtacgggcaacaggcattccgtacacctttgctccatgtattgcatggagcatgttgcaattgcatgagtatatggctatatgtaccattcttgattcattaagagctttgttgaccaaaaatgcttcatacaatttggttcagcttatggcttttaacagggataaagttgctgcttgtgctaagcactttgttggtgatggtggaactcataatggaatcaatgagaacaacacgatcactgatgaacatgggcttctaggcattcacatgcccccatattatgactctattataaagggtgttgctactgttatggtttcctattcaagcttgaatggtgtcaaaatgcatgccaatcatgatctgggatttgtgatatcagattggctaggaatagacaggataacgtcaccacctgatgcaaattatacttactctgtgcaagctggaataaatgctggtattgatatggtcatggtgccattcaattacacccaatacattgatgatgtgacatctcttgttaagaagggtattatcaatatgagcagaattgatgatgctgtcaggcgtatccttcgagtcaaatttataatgggcctattcgagaaccctttagctgatcttagcttcgcagatcagcttggaaagaaggagcacagagatttggctagagaagccgtcaggaaatcacttgttctattaaaaaacggcaactctcccaatcaacaattcctgcctctaccaaagaaagctagaagtatccttgtagctggaagccatgctagcaatttgggctaccaatgtggcgggtggtcaattgaatggatcggaggtagtggagatattactgtaggtacaacaattcttgaggccataaagtccactgtcgctgattcaacacatgttgtctactctgagaaccctgatgaaagcttcatgaaaaacaatgacttctcattcgctattgttgttgttggtgagcgaacatatgctgaaacaacaggtgatgacccagaactcaccatcctagaccctggtacagacacaatccgaacagtgtgttccacagctaagtgtgcagtggttatcatctctggtcggcctgttgtcattgaaccatatcttccaatgatggaagcgctcgtcgcagcttggcttcctggaacagaaggtcagggtgttgcggatgtactgtttggggactatggcttcaccgggaagctcccacgcacttggttcaagtctgttgaccagctgcccatgaatgttggtgacctacactatgatccactcttcccttttggttttggtttgacaataaattcatcgcagccagggttctctggtgctgacagactgagagataggaatggggggatgatatacgttgtgttgagtttggtactgtcagtaatactgatgcatgcttcgggcatagacttcgggcctccggtagccgtactcccgcgcagcgtcgtcgtggccggcctcgtggatagcagcagggcagcacagttggccccagcaaacccagtgtccacaggaggcaagctcgcgaggagcgacgactaccacaggcgcttcttgttcgcgcggatcggcgccctcgacagcatgatcatgggcgccggcatagcgttagatgacgacggccacggcgattgcctggacaggcgcccatgtctacggtactttctactcgcgaccttcctcgccactctcttattatcgctcatggcgtacgggcagtggaacagcatgttccgcgaccacgacctcgacgccttctccgtgcgcctcgccggctacgagggcatcgacctgggcaggccggccgccacggtgtcgccggagttcagggtgacgctcgggacggcgaacggcgcgtgcgtggaccgcgcggccgtgaccgtgctgtactcgggcgtggcgctgggttgggcgcgcgcggagccgcgcgactgcgcggcggggcgcttggagagggacgtggaggtggtggcgcggggccagggagtggggctgtcggatcgcctccgcgcgcgcatggcgtcggaatggcggcgctcgtcgatcgggcgcgctggagctcgacgtcgacgtgaagatcttcgacgaggacacctacccggtgcacgctacctaccacatccctga

SEQ ID NO: 13560 - DNA, 955 bp, Oryza sativa
  Clone ID: PAT_MRT4530_19582C.1
aatgacattagaaaccaagggatattgcttaagggatgaaaaaccatatccttagtaagacatttataggactacacctagcatctaggaaaaaaaaataggaatatcacttgtaacatgtgtttgtgtttgatgcattaatcgacagaggtggaagttataggtgccgggggcaggagcatacaagtgctaaatgcttaactaaagcaatgaaaatgtcctaagcatgtaagcggcataatctagtactatcttttttgaagctaagctatctatatatctactagtatctacacaactgattaacatgcaagggcatgggcagatcaagagatggattacagatcactagcacacatacagaaactcaccttgtgggcacaggatactcggggaagagcttgccgaggatgtggacgacgtcctcacggtgcaggacgcgctcggcgcagaggtgccggccggaggcctccggcgcctcgaagacgcggacgtgcgcagccgacgacgtgaacaccacccgacgcaccgtgccggcctccgccgccgcctttatcacgtactccgtcccccgcaccgccggctccaccatctgctcagggtcatcggtgacgggggaggcggtgtggaacacgccgtggcagccgtcgacggcggcgcggatggagtcgtagtcgaggaggtcggccttgcagaggaccagcctctcgtcggcgccgtccagcgccttcaggtgggcgttcttcgggtcatctgggtttctcactgtgcccttcacggtgtagcccctctccagcagcagcttgacgagccacgacgcgatgtacccggcggcgccggtgacacacaccgtttggccgtgccccggcggcagctcctcctgctgctgcgccgccgctgcggcggcggcggcgtcatcggcaacgacgacgacggtcatcgttgcttgttagtg

SEQ ID NO: 13561 - DNA, 2610 bp, Oryza sativa
  Clone ID: PAT_MRT4530_19583C.1
atggtggatgggatcgtagcgcgggtgatgaacctcgaaaacaagcagtcgacgtcgtctaccatggcaacgccaccgtccggagggcaccgcgtggaagagtgttaccagggtgttgcatccggggccaatttggtccaggagccaaccctggtcgagggcaagccttcactccatgctacagctattacttttgagttgggagagtgttctgagcggggagtgggtggatctctgaatagcagctgttttggtggttctaggttacccaaaattactgatttcgcaaaatttgatggagataacccaaaactgtggaaaactaatagtgagaaatactttagcatgtatcaagtgccctatgaaacttggtcctcgtttgctaccctgcatttcattggtaatgcagccctatggttgcagacatatgaggaattgcattgtgtagagaactggtctgaactctctgtggcagtccatagcaagtttgggaaggataggtaccagcaacatctagaggaattagaaaatcataaccaaatgggaggtgtggaggagtatcataggcttaagactgaaattaaagcaactatcaagctgcacaagcctcgttcaattgatgccgcgttttctctggctaaaacacaggaagagcttcttggagaactgggcttcttgaaggcattctcaaagcaatcattcagagaaggatacaaaagtttcaacaaggctccatttcaaggcaagggtatactgggagcaagccctgaagagaataagaagattgaagaaaagcccaagtgggaagagagcgcattgccacccttttcatttttactttctgacgagttcgcttcacaagaggagctgatacaagaatttcagtcaatcttccaagagccaaaaaaattacctccacatagagattttgatcatgggataccactggttcctaatgcaagacctgtcactaccaaaccttacagagctctcaacaacatcaatgtcaagaacaagtatccaatgccagttgtgaatgagttgttggatgagctgtcaggatcaaagtggtttacaaagttggatttgaggtctgggtatcatcaaattcgactgatagagaatgatgagtataaaactgcattcagaactcaccaagggttgtatgaattcaaggttatgccatttgggctaactaatgcctcagccacctttcaacagctgatgaacagattttttgctgatatgattaagaagttttaccagggacacattattggagtggacagtgttgccacagatccagcaaaaattaaagcagtacaggagtggtcagtgctaaagaccctgaaacaactgagaggatttctggaacttgccggctattacagaaaattcatacaacactatggagtgttagcaaagacactgatacatctacttaagaaggatgtggccttcaagtggtcaggcatagaacaacaagcttttgatctgatcaagcaaagattagtgcaagctcctatcctgtctatgcttgatttctctaaggaattcattgtggaaactgatgcaagtagagaaggaattgagacagtcctgatgcaagggggacatcctctagctttcatgtgcaaggctcttagcccaagatcacaagccatgtcaatttatcagaaggaatcagtggtgttggaggtcactctggtatacatgcaacttacaaaagagttaagaatctttttgcttggccaggccaaagcagaacattgcaaaactcctaggctgctccaacctctcccagtgcctctgcatgcttggcatacaatcagtatggactttgtggagggattgcccaagtcagatggctatgatacagtgctagcggtggtagataaatttaccaaatttgctaagttcattcccctgactcaccccttcacagccttgttagtagcaaaggctttcattcataatatctatgatgtctttgggatgcctcaagttatcatatctaacagggacagggtcttcaccagtgcactttggcaagagttgtttcgtttggcagatgttaagttgaatatgagctcctcatatcatccacaaactgatggatttggttacagaatagagcacacctcaatgagatactccaccaacaacttcttagagatgacaatggctcgacgatcctgtcagaagttgagctttcgcttctttggtccctataaggcgttagctcatgttggagcagtggcatatcatctagaactgccagaagggagtttgatccacctagtcgtgcatgcatccctgttgaaaaaagctctgaagcctaacacaccagaaagcgcagatcttccccttaactgctttgatgattctacagttgtgcagcccgaagccatccttcgccgacagttgatcaagcgtggcaaggcagttgtacattatgagtggtgcaatatggactggtcttcctgctactctggcgacatgggagaacctacgacagctgaaacaagaagctatcaaaccaactacctatctcctcttcctcctctgcttgctctgtttcttcctcttgcaactctaaaatctcgttga

SEQ ID NO: 13562 - DNA, 391 bp, Oryza sativa
  Clone ID: PAT_MRT4530_19584C.1
ggtattaaaaaggggggttttatttaaatttatataaaaaaaaatttaaagggggggggggggggatgcatgacttttttttaaaaatttgaaccattttacttttaaaattaaaacccaaacaccaccaacggggggaatgctcctcggggcaatggaatagttaggaaaaaaaccaaatatgggggggaagtttaagggcaaaaaaacttgagcttgagcttgagtttgataaaagtaaacaaaacccccctgttgaaactggagttggtgcaaaatcgcctgaaccctactaatggcctggaaaggaaattgttgccctccccacctgaggtgggggaaaaactggtgctgcatgaattgggtggttatcaattaaaaccggccccgg

SEQ ID NO: 13563 - DNA, 461 bp, Oryza sativa
  Clone ID: PAT_MRT4530_19585C.1
agtggcacctcagttcacatcaggcagatgatgctgatgaagccaccacagcagcatcacctgccgtgctggacccaacgactccctgctgctgctgctgctgctgctgctgctgctgtctgctttgcaaagcagcactgctgctgctgctgtcgccagcctgcccctcctctgctgcagccagaagaggtctgttcaacgccccttggttgctgacatctcgccgctgctgctgccgctgctgccgccgctgctgctgctgctgctgctcccgttgttgcggcttgggccagcagcagcagcaaatgtgcttcagcatccacaccatgcccttgtatatctgtgatgctgtgttgttgatgaagccgttcacgcccgccttccctgtgcgctggatcagctgctccggcctcacttggtggcagccgtccaccacctgccacactgccgcatacacactg

SEQ ID NO: 13564 - DNA, 569 bp, Oryza sativa
  Clone ID: PAT_MRT4530_19586C.1
ctctagaagcggccgcccttttttttttttttttttttttctttttttttttttttttttttttttttttttttttttttttttttctttttttttttttttttttttttttttataagggaaaaacaagccggctttaaaaacaagaaaaggagttcccccagttggggcctctaacccccaaattaaatggggggggaaaaaaaaaatagggggcccaaaaaaaaaacattcggccaagaaaaaaacccacaagggggggggggctttagcccaaaaaaaggggaccaaacggtagcccctgggggaaccaaataaaacccccccatggggaaaaaaataaaattcaccccccccccgttccaagggaaaattataaaatgggggggtaaaattgaaaatcccaggtgggttaaatcgccttttccgaaacccccatgggaattgaaaacccgggggaaaaaggggtccccaggggggggacccaaaccgggtggccccccgccctcgggggtggggcaaaaatcgggaaaatggggaagttccctttttaaaaaacggtggccctt

SEQ ID NO: 13565 - DNA, 537 bp, Oryza sativa
  Clone ID: PAT_MRT4530_19587C.1
atggcgcggaagggcgtccaggatctcagcctgaagttctcgtttgacgatctgccgcaccttcccggacccgccctcttctcctgcgccgaactcgtcagcctccgcctcgagaaatgcgacatgccgccgggctttccgggcttccccaacctcgagcgcctctacctcgtgggtgtcaccctcccgtacgcccgtgccggcacgcagctcgaacacctcatcctcgcgtcagagaacctcgccgtgctcgagttgtcaaacctgggtaccatggatggcgcggtcgtggtggacccgtgggccatcagagcgcccaacctccgggagctcagtgtcaccatgccgatgggtgtcgacttcggctgccgaatcacagaggcgctccccaagctcgaggatgcgtacatctcattcgattgcgtcttcggaacccaagaattccttgacgctttccaaaatatttctactgtcaataagctctgtttcatggtcgctgagaacttgtataaagatacatacgtcatcatgttctga

SEQ ID NO: 13566 - DNA, 1074 bp, Oryza sativa
  Clone ID: PAT_MRT4530_19588C.1
atgcaggcgtacatggcggtcgccgccgctccggcgccaccggcctcgctgacgctgctgccgcgcaccaccaccgtcatcagggacagggagcgcttcgacgcggccgtcccggtggcgccgctcgtgctgaggcatggcgccggcgtcaagcacaaggccgtcgtggtgatgggcgccacgggcaccgggaagtcacgcctcgccgtcgacctcgccctgcggttcggcggcgaggtcatcaactccgataagatgcagatacattccgggttggatgtggtgacgaacaaggtgaccgaggaggagtgcgccggcgtgccgcaccacctgatcagcgtggcgcgccccgacgacgagttcacggccgccgacttccgccgcgaggcggcgcgcgccgcggcgggggcggttgagagggggaggttgcccatcatcgccggggggtccaactcctacgtcgaggagctcgtcgaaggcgacggccgcgcgttccgggagcggtacgagtgctgcttcctctgggtcgacgtagatctcgaggtgctccgcggtttcgtcgcccgccgcgtcgacgagatgtgccggcgaggcctcgtccgggaggtggccgcagcgttcgacccgcgccgcaccgactactccaggggcatctggcgcgccatcggcgtgccggagctcgacgcgtacctccgctcccgcggcgacggcgccgacgaggaggagcgggcgcgcatgctcgccgcggccgtcgcggagatcaagttgaacacgttccggctcgcgtgccgccagcaccgcaagatcgagaggctggaccgcatgtggcgcgcccgccgcgtcgacgccacggaggtgttcaggaggcgcggccacgccgccgacgacgcgtggcagcggctcgtcgccgcgccgtgcatcgacgccgtccggtcattcctcttcgaggaccaagaacgcagcagcatcgccgccggcaaacctcccctcttcgccgccggcaaggccacttcaggcaacatctccgtcttcgcctccgcggccgccgccatggcggcggccgctgcaatctga

SEQ ID NO: 13567 - DNA, 114 bp, Oryza sativa
  Clone ID: PAT_MRT4530_19589C.1
atgacgaagagggccaggtgggtgaggcgaagggtgcaggggccgaagcccgttgccgaccacatgtaccacatgggtgtcatggcggaggtgaagctatggatcgacatgtag

SEQ ID NO: 13568 - DNA, 176 bp, Oryza sativa
  Clone ID: PAT_MRT4530_1958C.1
cggacgcgtgctctcaaggaagccactctgcctctccttttaacatggcatctattgtcacagggtgggggtgctgcatcatcagcatgctcctcaacacaccgtcttcttcctctttttcctccacctatatcttttccatttattccaactactatcgctctctattccacatc

SEQ ID NO: 13569 - DNA, 353 bp, Oryza sativa
  Clone ID: PAT_MRT4530_19590C.1
gggaaacggaaatttaaagaatgcaaactaatagtttattggggccttaataagaaacaaaacttgttgacaggggcagcccctcttatcaaaatagtttttaacttatcaacaaaagaattcatttcgccccaaggaactttttggggagcaattttttttggtctgtacctagctgtaaataaagcccccttctaataacttaaaacacaattggggggaggggcactttgttttttgaaaaaacacaactgggagtatttttgtttttacaatcccctggttttttagcaggggatgccacatgtttgggtatttgggcccgagacccggggggggaatggatcgatgcc

SEQ ID NO: 13570 - DNA, 467 bp, Oryza sativa
  Clone ID: PAT_MRT4530_19591C.1
ggtataaaacaacatgatagatttttggttcaactccatgggagtatgttcaccagccccgagagaacacattataatctaaaacttgtttctgcaagatctcattccacaatgattctgaggaaacgaaatccgcttgctcagccctaggagacaatgccataggtgaaatctaatactctgcttgagcatgatttacgaaacccatcgcttcatctctcgtataaatctccatacactcagcatgcacttaataccaagctcaaggatggcatgatttatctttaccctaaatatataaattgactttctcaggactttaaaacgatccgcttcttatcattacaatggaactcactgggcgtaatataaatgcggaccaaataacattcccattgtaacacattcagaagtgttactcttttgaggttgctcataagacaaaggaatttttggacgtgatggct

SEQ ID NO: 13571 - DNA, 475 bp, Oryza sativa
  Clone ID: PAT_MRT4530_19592C.1
ctcctcccctcctccggtgagctcagctccgggaagcgcttgcggttgcgcgggaagcgcgcgggcgagggaggccatggcgttcggcggcaggaggggctcgtcgcggtggggcctcccggtggtgaggtcggaggcgctcggcaagctgggcccctcgttcgccatcggcgccggctgcggcgtcggtgtctgcttaggcctcatcggcggtaggcaagcgattcgccatccatagccatcacccgcgctactgcttcctcctcctctggggcaccttcggtagggttcaacacggtgttcgagagggttctagcaggcttcgaactgcctaggcgcgcgagattgtttcgtcccgcttccctctccaatcggagtgaggcgagcatgggaagtgcaagtgcttcttattaggtgcaggaatcgccgctggattcctgggttgcagatgggattgggagctggtgctggatgt

SEQ ID NO: 13572 - DNA, 1428 bp, Oryza sativa
  Clone ID: PAT_MRT4530_19593C.1
atggcgagcgtggatgcgggtggcgggcgagcacggcagcagagcgacggcgggctgcaggcgaagcggacggcggacgagcgcggcggcggagcggacggcggacgagcggaggcagcggagcggcggcgggcggagcggagcggaacggacgggatggatccaagaaatcggcggatctggattctgcagtcgcagataggtctttgcgcaaccggaggcgatgggggtgagttgtccttggtagatacctggtacaagatgccagcttccacatcttcatcaacaaatatgtcttttgtcctcacaagcacaacagaattggcctcttcgtatgatatccaaagctcctctgaggaagctgctatttcccagtatcagcagtgctcttatgaagccggtattcgcatctataagcaacttctgggggacatccctgaagatggactcgatctctcaaatatccgtatctggattcagagggcagactcgcggatgctcgaactgttcaaggaagaattggtggcaatgattgatcagagcattcaagaaatcaacagcaagcatgggcaagaacaagaatctgatatgcatcgcctgctgaagcttgcaggcgtaatgactatgttgtcaccgtcatctgatctgctccctgctattttgcgtctatacgtgacccttgaaatcttccctgtcaaccaggtaaacggcattgccagtgagctcaagaggtgtgtaagggagatttttcaggggcagtgttcactagctctaaatggcatttacagtgtgccgcggggaggcggcatccacaatattacttcatatatgatgaactatatcaaatatatgtgggaacatgatagcttgcttaacgttattctcgctcaagatgacggggagagcgagaatcccttacacgatgggaaatggacgcgactggattattttgtgcagtccttgatcggatacctagactccttgcttgagacgatatcaaagtatcagtcaacagagtttcaatgcattttcttactaaacaatgctcatttcatattggagatactcgagaaattagacatgaagtcagcgctgcaacaaagctggattacgaggcaccacaaccaggtcgagtatcagatagcgagataccttgagcactcatgggaaccaatcctgtcacgcctggttgcaaggaagaacatactttttccttgctttcatctgcctcctttaactgaattttacacaatgttgaacaacaattgtgcagtgcaaaagtactggaaaattgaagaccccaaacttcggcaagtggtgagaaaaaccatatcatcccgagtcactcaatgttatcaagcatacctgggaaggagtgttaagaatcagaagcgtgcacactacacctcagaggatttgtcatactag

SEQ ID NO: 13573 - DNA, 572 bp, Oryza sativa
  Clone ID: PAT_MRT4530_19594C.1
atggcggaggcttgcgatgcagcgacgacggagaacgcggcgccgcgcggcgaagggcgagacgaggcccggggttgggtgcgcgtggtggtgcagcgggcgcagcggctgctgcttgctctgcttgttcccctccccaagcgccgtgttgcctctgaccgcgccacgcgaatgctccgctttgtccctcgacgccacgccacgcgagtagcgccacgcaccgcccaccaccccatccatccatccatcgggccgtgcgccgtggttggcggcgttttttcttggtgttcgaccagcgggtggcgaggtcggcggcgaggtggtggtggtgcgcacatgctcgaggtgctggacatggcgccgccccggcaccagccggcagctgggaaggcgggcggcgggcgcgggcatgggcatgggcatgggcatggtggtggtggtggtgggccggcggcgaggaagcagccgttgcatagtagcatggcgcatcccaaggcggatacggcggcggctactgcggcggtcgcgccgccggagggagggaatatctgccgcgttttcggtggtagcgc

SEQ ID NO: 13574 - DNA, 810 bp, Oryza sativa
  Clone ID: PAT_MRT4530_19595C.1
gccaaatcttccaatccctcttgcttcctcttcttctcatgatgttttttggagcgatcagctcctgaatcgtgatgcgcactcttatccttcttcttttctttttccttttctttttctttttctttttctttatctttactccgatctttatggcgatgtagtgcttcttctgatccttgtacttgtccttgtctttctccttgtgccttttatgcttctttactttgtctttggacttgatctttgatttacccgatatagttggcgtacctttttcagcagaaggcaaatctattggtgctgtttctcgcagctgaaatgcttgtccaagtgtttccatgtcaaagggttgaatgtaagaggtcttctcccttaggtatgcatcctgaaagagttgatcaagctccattccttcccctttacgtatttctgtgtctcccacaacattgtgaagataatttgtatcggaaattgccagtggcaaaggtttcttgcaaaagaaactatgatggttcaggagcttgtaacggctaattaagtcaacagcaccagtgagctcccgtggacctttgccaaaattgccatcagaacccatccgattaaaccctgacatttgtagtgtgcatgtccacggtccaccgatgtggcggaagcagcaggacgagcgacggtcgctcgctcgctcgcgcgatggttgggggtcggcggtggcggaggatgtgctcaccaggatggatgtggcaggaagaacaacggcgccctgctcgctcgccggatggatggggatccccgaggcggcagcggtgc

SEQ ID NO: 13575 - DNA, 775 bp, Oryza sativa
  unsure (1)..(775): unsure at all n locations
  Clone ID: PAT_MRT4530_19596C.1
gaaacatacctcaaataagctnataggcgcaccataagctttcctcctccgggttatcctatactcacttcttggttgttctctcctccctcatgcccatgcgcctcctatgcgcccagcctattccgggtcccgaaccgtaaaattccattggcacaacccctccgggcaagggaggttcctagcgcgagctgtaccatccccactaccacctaccaacgccattttcgaaccccacccttccgcgaagaanttcgcaggggtccacgaaaagccccgggggggtctaacaacgaagctaccctctcgactgcagcaaccacatgaaaccaattccagtgcacaggtacatttgtcatccgacgtgtcattgagcctcaaggccttctggtacctcgcatacagcaaatacctccctggccaatgggtcctacaattccaatccccacagggggcaagcaaggggtctcctaaattgggggaaattttaaaccatctctccccccccggggcctgggccccaagccaaaaacctaacccaaccaaaccaattccaaacaaacttcttgccctgaaaggccaaaagccaagagccaaaaaaatttagagngaatgaagccacccaaaaaagaattctcaacccccaattttaagaaccaaaaggggaagcaataattttcggttttggaaacacctgggccccacgaccttgggggttggtttttggccgcccaaatttgggggttttttttaacaaaaactgaaaaagggcggg

SEQ ID NO: 13576 - DNA, 209 bp, Oryza sativa
  Clone ID: PAT_MRT4530_19597C.1
gcacgagggttgaacaattgaaagcatgtaacacctttttgttactaaatttgtactaacaatcatatcaaccgtttgatttaagcagatggaagttataaaaaatctagatggactcatagcatgacatgtcagtgttagtaaaaatttagtaagaaaaagttagtacgtatagacttttcctaagttgaatggcccctcctgctacc

SEQ ID NO: 13577 - DNA, 498 bp, Oryza sativa
  Clone ID: PAT_MRT4530_19598C.1
atggaacagccgctccccaccgccgcggcggaggcggccgccgccggcggcgacggcgaggcctaccggatccggccgctggagctcgccgacatctccagggggtttctgggcctcctcaaccagctctccccctcgccgcccctcacggaggaggccttccgcgcgcggttcgaggagctcgcggcgctgggcgccgaccacctcgtcctcgtcgcggaggacgccgccacgggccgcctcgccgccgcgggggccgtgctcgtggagcgcaagttcatacggcggtgcggccgggtggggcacgtcgaggacgtcgtggtggacgccgccgcgcgcggccgcgggctcggggagcgcgtcgtgcgccgcctcgtggagcacgcgagggggaggggttgctacaaggtcatcatcaactgcaccccggagctgacggggttctacgccaagtgcgggttcgtggagaagaacgtccagatggggctctacttctga

SEQ ID NO: 13578 - DNA, 426 bp, Oryza sativa
  Clone ID: PAT_MRT4530_19599C.1
atggcagcgcgggtattcgcactcttcttgggcaccacaatcatcctcgtcgtctccactgcaccgcacgcccattcctacccggcggcggcggcgctccaccaccaatgcatcggcgcaccagcaataggaggagagaatcccttggaatacaaggagtacatcgtcctcctgagaccgtggccagatgccgccaccgccggcatggacgacgacgacggcgcgcggcggagctggtgcctgtccttcctccctggcaacatcaccgccggcggcaagccgcggctggtccgctcgtacaagcacgtcgtcaatggcttcgccgccctgttgacggaggccgagatggacgccgtgtccaagaagcccggcttctggcgctgtttccagaacggcatcgctcgcctctgcctccaagccccctaa

SEQ ID NO: 13579 - DNA, 2633 bp, Oryza sativa
  Clone ID: PAT_MRT4530_1959C.1
atggctgccgccgtcgccgccctccccggcaagctcccacggcagccgccgccgccgccgcctccaccttcacctcccaattcgaccttcccgcgctacccgaagtccttggccgcacaccccgcgctctcctcgagccacccctccgacgtgtcggcgctgctcgccgccgccgcgcgcgccggcgacctccgcctcgggcgcgcgctccaccgtaggctcctccgcggggacctcctcgacagagacgccgtcgtcgcaaactccctcctcaccctctactccaggtgcggcgccgtggcctccgcgcgcaacgtgttcgacggaatgcgcggcctgcgggacatcgtctcctggacggccatggcgtcctgcctcgcgcgcaatggcgcggagcgggagtccctgctgctgatcggcgagatgctcgagtcggggctacttccaaatgcttacacactgtgcgccgtggcacacgcatgcttcccccatgagctctactgcttggtcggaggtgtggtccttgggttagtacataagatgggactctggggcacagacatagcagtgggcagcgcattgattgatatgcttgcaaggaatggggatctggcatcggcacgcaaggtgtttgatggattaatcgagaagacggtagtcgtctggacgcttctgatttcgcgctatgttcagggcgagtgtgcagaggaggctgttgagatttttctagatttcttggaagatggctttgagcccgataggtacaccatgagcagtatgatttcggcatgtacagagctgggatcagtcaggttggggctgcaactgcactctctcgcactccgaatggggtttgcatctgatgcttgtgtgagctgtgggcttgtggacatgtatgcaaagtcaaatatagaacaggcaatggactatgctaacaaggtattcgaaaggatgcggaagaatgatgtcatatcatggactgcactaatatcaggatatgtgcaatctggggttcaggaaaacaaggttatggtgctgtttggagagatgttgaatgaaagtatcaaaccaaaccatataacatattccagtattcttaaggcctgtgccaatatttctgaccacgattcaggcagacaggttcatgctcatgttatcaaatccaaccaagctgctgcacatactgttgggaatgctctagtcagcatgtacgctgaatcaggctgcatggaggaggctagaagggtattcaatcaactctatgaaaggagcatgatttcctgcataactgagggaagagatgctcctctagatcatcggattggaaggatggacatgggcatcagcagttccacatttgctagtctaatcagtgctgctgccagtgtaggtatgctaaccaaaggtcagcaattgcatgccatgacactgaaggcaggatttggatctgatagattcgtaagcaactcccttgtttccatgtattctaggtgtggttacttggaggatgcttgccgatccttcaatgaactgaaggatcggaatgtgatctcatggacttcaatgatcagtggcttagcaaagcatggctatgcagaacgagcactttcattgtttcatgacatgatattaactggtgtgaaaccaaacgatgtcacttacattgcagtgttgtctgcctgtagtcatgttggtctagtgagagaagggaaagagtacttcagatcaatgcagagggatcatggactcataccaagaatggagcattatgcttgcatggttgatctgcttgcaagatcaggccttgttaaagaagcccttgaattcattaacgaaatgccactgaaagctgatgcattggtttggaaaactcttctcggcgcttgtaggagccatgacaatattgaggtaggtgaaatcgctgctaagaatgtcatagagcttgagccacgagatccagctccatatgtccttctctcaaacttgtacgctgatgctggtttatgggatgaagttgcaagaataaggagtgcaatgagggacaacaacttgaacaaagaaactggcttgagctggatggaagttgagaacaccactcatgagtttcgagctggtgacaccagccatccgcgagcacaagacatctatggtaagttggacacattggtcggagaaatcaaaggaatgggctatgtgccggacacaagcattgtgctccatgacatgtcggatgagctgaaggagcagtatctgcttcagcacagcgagaagattgccgtggcatttggtttgattactacttcagcaccaaaaccaatcagaatatttaagaacctccgtgtttgtgctgattgtcattctgcaatcaaatatatgtccaaggccaccagaagagagataatattgagagatagcaacaggtttcacaggatgaaagatggggaatgctcgtgcggagaatactggtgagctgcacagcgcaggtttgtctttgctaatgatcctgatccaggcttaacacagtgaagcttttcttagatagttgtagttcataatttttgtagttgctttgtatagttcataattttttagttgctttctgttttgtacaatcacatgttggctacagactt

SEQ ID NO: 13580 - DNA, 3243 bp, Oryza sativa
  Clone ID: PAT_MRT4530_195C.1
gcgccgcgccgtctcgccccgcgcccgccgcaccatggcgtcatcacaggagttcgaggctaatgacccacagcagccgtccgccaggcccaaggggctctaccaagtccggaagggaagtaagatattcctgtgtggtgtacgcccgaggattggctcggatgtagcctccctcccgctttctatccttctgatccttcgcgttgccaccgtctacagttatcagatcgattccgctaccgaccgctctgaaaatcgcctccaacgagctgcacatcccatcatcatcatcacatccgaacaaaaccttttccttctcttcattacatctgccttcgtcccagtgatatagccaaggaataattgagcaccaccaggaatagttgaatttcttggctcaaccacacaattgatgaagtggagctcaggaagatctccgcgaatatggttccgtacgacatagtatgatatagtcaatggcttcacggtaaaggtgaagatttgcgagaacttcctgaagtgacgcccacaacgggcttcacgttgttccatcggcgccaaatgggtggaagatttttgcaagtactatcaatgggtggggctatatcttggaattatgatgtcctgctatttttttatgtgtgaaatgacatggaatttcctgtgcatatttgttttcatcttttcatgggtgaatgtctactatgaaaggggatacaatggcggatccatctggaaggctttgcgaaaggaagtatactcatttgtgctaatcatatatacttttatcgttgtatggtttgttggtggtctcacagtatttcatctttatctgatcagtactaatcagacaacatatgagaacttcagataccactacaacaaggacaacccctaccgaaagagcattgcagcaaactttgtagatgtgttcttcaccaagatccctccaccccagaacaatttccgttcatgggtaggtgagggcgcactggaagctggataattgggacccagaaggccgtagtgttttattatccttttctaactcaacaacactgggttcaattcacttctcttcttattcaccgtattcagatgcccatctccttccagttgatcttctttttttcctttaaagataatccagatgacaagaacaggaatgaagatgatagactagtgccttttgcttcaacttgggcacaacaagcaaatgaaggtgctcgaacgtctgaaatagctactgtagaatataaggacgaaataagtgaagatggtggtaaggaaaatattagttcaaacacaagttcagaacaaacataaatagatgctaatgccccaacatatgtggaggaaaggaatgaggacactgctggaaaaaattgctctactgcctttatggtactacaaaggagaagattatacgcatctagaaatggctccaaccttgtggtggtggacgctggcgaggaggtaggtgtaatccccggcgagccgcagccgcgctctggcgtcggcgtccgtgccagtggggcggcggaactcggaggcgacgaactcgcggaagtgcttcttggagtcgcccccgccgacgtgcttctgcaccgccttgagcacccgccggtagacggccgccgcggccatcatctggtctgtgtgaatcgggccccggcacgtgggggctgctgcgatcgccgctgcccgggtaattttggcccggaactccaattccatcacatacaatatcggcccaggaatggtcttcagcccgattcctttccagccggatgcgattgttgccacccacgagcctcctgctgtcactgaagctgctgagattgtccccagaacaagtttagcttccaccgtagctgagtccttcaaacaaatgctattcccttcttgcgatttcttccttaaggaccaatgctgtgtctaatttccataccctcgaggataagtcctttcttcgagttgagctggacgatctcttgcaggttgataacaaccattccatctccttggtggttgtagaagtgccccagttgtacctccatccagccgtcaccccgttctctcggatagctcactgtctcctctgctcgtcctacttcgcttctacccatgtcaagaggtgtctcttgcgtgcgtgggtgcagagagacggtgcgcttggcagacactacttgatcgtccatggtgatatatgcctcttgtgtccggcagtcaagcccgtatgatttatctgccaatttgaagatgagatagactatgtatcgtgtgttgggtgagagctctctgcagttgatgcggccacgcaaatggaaccagcagacaaatacaagcgcagctactctttcaaacctggaatcgggtaagtagatccatctccagtaccgggcatcatccccccatgctatctctaatgatatgtcctcacttgtgcgcacccgggaggtcacccatcccctcacttgtgcgcacccgggaggaccctggagttctttggagatcagcttcttgctgcgttggtcgagaaggacgtggtcctgggcgaggctgaggaagagctccttgttggaagtggtgaaatccacaggatcgtcggctcgagcgaggatggagtggtagtccggcggcaggaagcgctcccacacggcgttggagctcgccgctgcttggaagtcggcggagacggcggagcagcggcaggcgtccgtgggagtggtgaaggagattgcatgagccaggcatgcctctgggaggcgtgagatgctgctgctgctgcagtatcctgcttcttcctccttcttaccaacgctcacatcgtcgtccacttcctcccttcgtgattgcttcatggatagacatctcaaagctgaaggcctacactagcagcagatttgttcaatatcttcttcatctcctctgatcggtccacagctatattatacgagaatagcaggtccttgtggtggtgtacgctggcgaggaggtaggtgtaatccccggcgagccgcagccgcgctctggcgtcggcgtccgtgccagtggggcggcggaactcggaggcgacgaactcgcggaagtgcttcttggagtcgcccccgccgacgtgcttctgcaccgccttgagcacccgccggtagacggccgccgcggccatcatctggtctgtgtgattggagccgccagaggtggcggctgctgggttcgccggaggccgggagtacagacgcc

SEQ ID NO: 13581 - DNA, 291 bp, Oryza sativa
  unsure (1)..(291): unsure at all n locations
  Clone ID: PAT_MRT4530_19600C.1
cgcacgcgtgcgccggatctgatccgtgccatcttcaagctggtgtggagcccggcggccaagaggggcggcggcggcggcgatgcgcgctactaggtcatcgaggtcgagccttccccgagacatcaaggaggaatcgtagtgccactgccaacgccagtgcgcttaaagtgagctgtgaacttctactgatatttgtcacagaggctgttcaacgttctgcttttattgccgaagcagagggcacaacaactattgaacncacccatctggagcgtggattgccacaac

SEQ ID NO: 13582 - DNA, 264 bp, Oryza sativa
  Clone ID: PAT_MRT4530_19601C.1
atgtcgatggcgatgtggggcggcgccgtcgccgccgccgccgcagcagcagcagccgcgtttgagccgtctttggaggaggaggcggcaatcgggacgatggagagcacggcgggcaccatgctgccgccggcgagcaccgtcgtcgggaggtcgtcggagagggagtacgggagcaagcagctgtccgagtccgacattgaggccaactcctccattctgacccgagtcggagtctcggagattccagcgtttataatctaa

SEQ ID NO: 13583 - DNA, 454 bp, Oryza sativa
  Clone ID: PAT_MRT4530_19602C.1
tttttgtttttttagatgtagtatttttttaaattgttttttattgttaaccagggggggggaccacccacctatggtagagaaacaaaaagggaaaccaaacaaaaaagcgcaagcaccttgaaaccaaaccgggcaatttaacccagaacacaatgcaatggaatgaccagaacaaagcgaagggcggggagccaaggcccgacccaacgaagccttggactaaaccaaaccacacgaaaccgatgctagaacggaaccgaaacggaaagggaaccgggacgcgaggacaggccagacttggaccgaacccaaccatttgcacaggaccgggccacaaaacaaacccgacaacaaaaccaagggcaggggggggggactgcacttcaatcaaccaaaccaaaacaccgctggggaatacaacacgccaagcaaaacaaccggtggcccttac

SEQ ID NO: 13584 - DNA, 245 bp, Oryza sativa
  Clone ID: PAT_MRT4530_19603C.1
tgctggctgagtctgctggtgaaatggcatggcagtggcaatggtgttaattgaagcattggtgtgcagcgtgatgtgactgctcccctgatggtgaatgatggtgcacacctgaggatgtatgctaagagggcgatgcgtgcgcaatgtgtgcagggcagcctgggtgacgtgtggtctggtggatgtcgtgtttatggtcatgatgaataaaatcccgtgttccttcgaaaaaaaaaaaaaaa

SEQ ID NO: 13585 - DNA, 269 bp, Oryza sativa
  Clone ID: PAT_MRT4530_19604C.1
cagttgtgttttgcgatgataccgcctcctcagcgggcgcgctgggttaccacaaggcaatagcaaacccgaagctcaccgacaccacagacaagatggggcgaaaaccataccgatccgtggatctgagagggagctcacgcgcacgggaaggacattttgcggagctgtggctgacaccagaacgatgcccggggggaagcacaatggctccaagacggaccaggcccccgaacaggacagagagggcagccgggacccacacgcta

SEQ ID NO: 13586 - DNA, 449 bp, Oryza sativa
  unsure (1)..(449): unsure at all n locations
  Clone ID: PAT_MRT4530_19605C.1
cgggtcttccataggaccagtgatggaaggtggtcacgttactcaatagtatcatccagctaacattggtgctctctctacatgcggaacaaggggatatatacttcatatataatctctcctttgttagaacctgtgatagattgtggtgtggcaacacaggatttcttntgaacagcgggcatcaatcccagtcgattctagatttctttctcctgtgagttgtcccatgtaatcatccttggaaggtgaatgaggaattattcagattttccccgtagacgcacagaagtctcaagttgatgtattagcacagaacctgtgttaggattgttgattgataggcaacatggatgatggcattccgttctcgtctcatatgctccgaccattgttacttggtattttctgaagggaacatttttcattttggcaaaaaaaaaaaaaaa

SEQ ID NO: 13587 - DNA, 218 bp, Oryza sativa
  Clone ID: PAT_MRT4530_19606C.1
tcgcgggacccctgtgggtggtgatgtgtgtgggatacccgccaccctgtgcctggtgtgtgcccccctgtgggtgtggtacgaggtgggaccactggatgaccatggcctgggttggggtgtgcccctgtgtggtgaatgaatgacgaatggtgtgccatacgcctgtgaagtgtaaccacctcggttgtgaaaccatatactctaaaatgttctgg

SEQ ID NO: 13588 - DNA, 212 bp, Oryza sativa
  unsure (1)..(212): unsure at all n locations
  Clone ID: PAT_MRT4530_19607C.1
cttttgaggcccacagtatttacgggatgttatctttacggttttatttgcgccaaacaaacccctgtgactcacattatgttgagttggatgtaatctaataggatgggtcgtgtaaactttggtccgaagtgtctttagtccnatgtacnattcaagatccatttgaatcnaatgtgaattatggagttattattgtaaaaaaaaaaaaa

SEQ ID NO: 13589 - DNA, 380 bp, Oryza sativa
  Clone ID: PAT_MRT4530_19608C.1
cttcctattaaataagtttccgacccaaaccaaaccaaacccttcggtttttcaacggttcaagggcgggggccttccccgaagtcggggactgggggccttccaacctcgggaacttgaaaacaacaacttcttacccagcctggcccttgctttggttaaccgggaacaataacttgcgcccatttaaggaccatggtaaaaaacaaccagggtggggggaccgaatttttaaaagaagaatgcaattgggaatggtctggaaaaaaaggaaaaaaatgggagaatggaagaaccaaaaccaaatgggcttttcaacatctattcaagttgcaatggtgaagtggaagcaatggcttacttatcttggcattattgct

SEQ ID NO: 13590 - DNA, 655 bp, Oryza sativa
  unsure (1)..(655): unsure at all n locations
  Clone ID: PAT_MRT4530_19609C.1
gcacgagggaccagaagtctccttgatatcaaggagcgcctttgaaggctcaatggcaggaaaaaagtgctcgggtgcctcaatggcggcgttgggaagcgcaatgcttacccttgcgtccgctggtgttgtccctcgtcaaagcccttcttcgaatccatttgcgcctattgatccccagaactgggttaacccggacaatatgacctgggatgactatgtagcaccacctacaaccaattgggctgatccatcacgcaagggcaaggacaggaacttcaacatcgccatgatcacggtcgactacccagactcgccctttgtcgtcactctccctgccaattctgatatattcggtaacccacagccgcttgctgctggtttgaagcgcgaagatatccccgagttttaccacgatcttctcaacgtccccnatgaaatcaaccaaggccatacgctccatgagtactgcatgggtgactcctttggaaaatatggagttgacctgactgtatttggtccatatcgtatgccatcgcgtagttntcagtatggaatcgacgacgaggaggggggcttcaatgaaggcgcttgtcccaaaggccctccgtgttccgttgatctgcgcactgacgctcttggagcatggcgtgca

SEQ ID NO: 13591 - DNA, 130 bp, Oryza sativa
  Clone ID: PAT_MRT4530_1960C.1
ttttaaatggcaataaagagatttacacgaagattgaattagggcctctaatattcgacggaaaattaattacgtgctttaagcacattaagcttttgtaagacacgaaaggtaaaccatggatacaaca

SEQ ID NO: 13592 - DNA, 1752 bp, Oryza sativa
  Clone ID: PAT_MRT4530_19610C.1
atggcgcggccagggtgcagacggcggcgtcgacggccaggcgcgggcggcggcgtcgacggccaggcgcgggcggcagcggcgaccaggcgcgggcagcggagtcggcgactaggcgcggcggtggcgacggccaggcgcgggcggtggcatcgacgaccaggcgcgacctgggcgggcgacggtgtcggccagggcacaggaggcggctgcgaaggccaggcgcgggcggcgaaggccaggccaagtgcgggcggcggcggctcgcctcgtcgccgttgtccatcgacggatagagagggagagaggcggcggctaggcatgccgattggagcaatttcgacggttgggccggcgatttcgccgggcatcaagatcgccgaaatcgcggaatcctttgtggcgaggaagtacagacgcttgagagattacagaaaggacgttgcacagctggtgggtgaagtggggaagatcgcagtggccgtggacacggtggaggaacaggaacagttcatgagcgaccgtcggatcgtggggcaactgagtgagctgatggacgccatccacgaggctgaggacatcttggacgccgtcgactacagagacagtatctgggcgaggaagcacaaggtcaggcaggttatccattctatagttgaacaagctaagcggatagtcggaatagacggcgcgttgaaccggctggacaagtcgatgaatgacctgccacggatgcagcagaaccagcgggatcttgtccagctgtcaaatttccggtcatcacaaggaggaggagatgggggtgcgtccgcgtcgaggccaagatcggccacgggcctattgccggacggcaaactctacggttacaaggaggagtacgatcggctggtgtcggccttgctgtacgatcctccccggcggcctggtggcaatggcaatggcggcggtcaagtcgtggcggtcgtcggcgacggcggcgttggcaagactgcgcttgctcagcacgcgctgaggcacgtggacgttcaagcaaggtttgatcatgtgatctgggcgagcgtcccacacaagtacaggaacaaggacctcttggctgagatctggatgtccggaccgggtgctactgctactgcggctacacacaggtgcgccgaccagatgagctttggtgcccttcaggcggagttcgtcaggctggtgtctctgtcatcccagaggtacctgctcgtcctcgacgatgtctgcaacgatgagtcggacgacgacgatcatcagcggagcaggaaggaatgggaggatgtccttgcccccttcaaacaagggggaacgagggaacacatgatttcttttaccttggatatccgtgcggatgctgtccatctgctgcatgaagatttcctgcatccggatcacataaaggcaatcggttcaatcagaatcgagcactacacatggtcgactgagccaaacctcaacctccttgcttctgttaggagcctgtcgttaacccgatgtcctgtgacagacaggagtttgagcatgtgcctgcataaactgcagtccctcgagagactagagatatctgattgccctgaacttcatgacttccccgatgatgccatgcctatgatggcatccttgaaatccctcgagtttaacggatgccatcctcttcttatgaagaagctacaaggcaggactggcgctgcctgggaaaggattcgctccatccagcgactagaaatcgtttaa

SEQ ID NO: 13593 - DNA, 332 bp, Oryza sativa
  Clone ID: PAT_MRT4530_19611C.1
ggtcagccaccgcgtccgcccacacctcgaactcaaggcgcccaaaccggagccaatccgagcgctccggcggaggaggcggcggcggccggacctactcgctgccgtaggtgggggctgcgagggagcgggctgggggctcgtcccgtccgcgatggactgggcggcggcggagtacacggtggcggcgctggtgtgcgccgcggcagacaccgtgttcgcgcttgtgcacatttaccgacacctcctacactacgcggagcccatctaccaatgatgcatcgaccgccccaggagcatgggcccggtccatgccgggctggcgttccttt

SEQ ID NO: 13594 - DNA, 1122 bp, Oryza sativa
  unsure (1)..(1122): unsure at all n locations
  Clone ID: PAT_MRT4530_19612C.1
gcacgaggctcatcacggcgaggagtgcccacctcctatctctctcctcctcctcctcctcttctctccacgcacaaatctctctcctcctccgctcccccacgccgcacgcattgccgccgtgggctcaccgccggcgagggcggccgcagaggaggaggggagcggcggcggcggccaacccgggcggtgtgggtagcatgtgtgaccttgtggcccgaacgggtcggcatcagcagcggtacgaggatggccggcggctggtggccggatgcataccgttcaggtatagaactagtaatgatgaaacttctgatgatgaaccgaagaaaattgttgaagttctcatgataaactctcaaagtggtccaggtctcctgtttccaaagggaggatgggagaatgatgaaactgttgagcaggcagctgctcgagaggctgtagaagaagctggagttcgtggagatatagtgcaatttctgggtttctacgacttcaaaagcaagacgcatcaagatgcgtgctgccccgagggtatgtgcagagccgcggtgtttgcgctgcatgtgaaggaagagctggactcatggcctgagcagagcacccgcaggaggacctggttgacagttcctgaagccacgtcgcagtgccggtatcagtggatgcaagaggctttgcttactggcttctctgacgggcatgacaactggagcaaaggtgccggtggcgacaccaactatgactctcctctagttgcagaaggcatccacaggagttctggttttgtttatcttcttttaactctccctaggctccaactttgcagaatgcaataatacaatgtacacttgttctgatactagtaggtggtctttgacccttcattgctatctagcgtagtatatctcatcgaagacgggaattctcacaacttttaagtgtcaattctcgtgtctattgttccctcaccacctatcaagctcaattactttatcctggtgagcattttgtacgtcactgctccagattacggagctgcatacgctatgtattaacttgaccacacctgaaattaaaaggtatttcttggctcgaatgagccacggtggctnaaaaaaaaaa

SEQ ID NO: 13595 - DNA, 423 bp, Oryza sativa
  Clone ID: PAT_MRT4530_19613C.1
ggaggatgggagaatgatgaaactgttgagcaggcagctgctcgagaggctgtagaagaagctggagttcgtggagatatagtggcttgccaagtgtcagaaacatatttgcatgtgtttttctcttacataaccgtcaaactgcaatttctgggtttctacgacttcaaaagcaagacgcatcaagatgcgtgctgccccgagggtatgtgcagagccgcggtgtttgcgctgcatgtgaaggaagagctggactcatggcctgagcagagcacccgcaggaggacctggttgacagttcctgaagccacgtcgcagtgccggtatcagtggatgcaagaggctttgcttactggcttctctgactggcatgacaactggagcaaaggtggcggtggcgacaccaactatgactctctctag

SEQ ID NO: 13596 - DNA, 1871 bp, Oryza sativa
  Clone ID: PAT_MRT4530_19614C.1
gtaaataggctcttgaatgaaattattgaaaaagcaagtatggacctaaaatgggtaaattgccaaacagcacaattggccttccctattctagtctcaatatcatgtcaaacaagaaagaaagcaaaaaggtaatccgcctctgtgtggttgaaactcttggacggaatgtggtaggtgtctaatcttttacgaactgtcacactcgatgatcttgacaacagatgaatcgccgatcttctggaaaatgatcaacctgtcatagggctttagcataccaaccgagcgaccatagttctgtgcaagttttatcccgtactcttccctggtgagcccaccagtttcagcctcctcagtactcgccatcaaagggtagacacctcttgcagcaaaacattgccttgcctgagttgtgccttaagaacgccttttttttggatcagagccttcacgggtgaagacaacggcaaacactgcctttggttgcttattcaccgcatctacccttacagtgcattttgtccacataatttgatcgtttcaatgtgtaaataggctcttgactgaaagaattgaagaagcaagcatagacctatcatggggaaattgcccaacagcacaattgacctattcttttatagtctcaatatcgtgtcaaacaggcacaaaagcaacaacgtaatccgcgtctgtgtggttgacactcttggacagaatgtggtaggtgtctaataggttaccaactgccacactcgatgattttgcccacagatgactcgcctttctaatcgtacaggatcaacctctcatagggctttagcgtatccacggagcgatcatatttttaagtgcaagttttatcccgtacacttccccggcgggtgcaccggttatcagccctcctcagcgtgaaatatcaacgcgtagacatcttttgcagatttcatcaaacttgcccgagttctcgccgtatgcaagccactttgttggctcagtgccctgaaggccatgagattgaagaaaagatctaagctccctgacatcctcggcagagcgggtatgggaaagtgatataatatcaacactgttatgtaatccccaagttgaaatgacctctttatcataatcactcaaagttggtaaactgacatgggcttttgaaacatgcaaagtgaacatggggcctgcaagtgtagctgtattggtcacaagacattcaacattttctccagaagtttccacaacctcaagccacgaagatgttgtttcacttcctgtgaagagatattgaccaataaaaagagtatcacccttcttgacagcttttgcaagaccaccaaacttaattggcaagatttcagaagagggagctttagaaagatctggtgttatggtgacatgatttccagctttcaactcaattggtccaccagttgaattgtgaacctgaatttctggacccagtgtatccagcattacagggcacagcttattgacattttgtgcagctttcctcagattgttaagggtctcctgatgatatgaagcatccatccatgagaaatcaaaccgtgcgactgccatcccagcagtgaggcattcttgaataacctcgacggagtgtgagttgggcccaagggtcccaacaatcttggtgagtgatgggaatactttgggcttgacgggggtgaggacggaggtgaggcggacgggctcgtccaggagcatgttggcgccctgcatcctcccttccagaagcttccggaaggttcgccttctagggtttttgcgcctcctcgatgcgatcgcctctctatctctctctccccaaatcgaaacggaggcgaggcgagaagagaagcggacgcggg

SEQ ID NO: 13597 - DNA, 724 bp, Oryza sativa
  Clone ID: PAT_MRT4530_19615C.1
gtcgcgttttactccacccacacatcccccccccccccgcgccccgccgccgagctcgccgggcggccggcgagagggcgtgcgcggcgatggggcagggcgccagctgcgggcggcccatcgaggaggtggacttcttcggcgcggcgcattcgggcgatctcgcccgcctcgccgccgccgggcggtggcgcccttcccttctttgtcgcaccacgctcttcgaccgcctctccgccctccacatcgccgccgcccacggccacctccaggtggtgtccatggcgttggatctttgcgtgcacccggacgtcgttaaccgccacaagcagacggcgctgatgctcgcggcgatgcacgggaggaccgagtgcgtgcggcggctgctcgacgccggcgccaatattgtgatgttcgattcgtcgcacgggcggacgtgcctgcactacgcggcgtactacggccacgccgactgcctacgggccatcctctcggcggcgcagtcggcgccggtgtcgcaatcctggggtttcgcgcggttcgtgaacgtgagggacgacaccggagcgacgccgctgcacctcgcggcgaggcagggctggcggcgctgcgtccacgtcctgctcgagacggcgccatcgtgtcagcctccagtagcgcctttggattccccgggagcacgccgctgcatttggccgcgcgcggcggcagcctcgactgcgtc

SEQ ID NO: 13598 - DNA, 277 bp, Oryza sativa
  Clone ID: PAT_MRT4530_19616C.1
attccaccaagcaattgacaaatctgatggagccgcgccatggttcagcaagacgctgacgacggcggcgtgtccccactgcacctctatagataaacctaatcccaacaactcgctcaagctcctcgatctgcaacagattccaatccccaaactaacaaaaataaatgttgggaggagaatcacaagtcagggcgcccgctgcactgatgtcaatggcttcttcgtctcctttggcatcgacccgaaagatcgccttgcatggggatcctctaga

SEQ ID NO: 13599 - DNA, 395 bp, Oryza sativa
  Clone ID: PAT_MRT4530_19617C.1
aaaagaaggaacggaaatcgcaggttcaaaataaaaccgggtcagttgaaagatagaatgcaaccccacacattctttgttacaactcggcgaggtccattcaaacattaaaacgccagtgggtgtaaaaaggcataaatttcaagcaaaaaggttagccctgcagaaaaaggcaagagctctagcccaaggacatgggacaaccaatcaacgggaggccaggacaacaaactcaacaaaatccaccaatgttgataggatcaactggccggggagcacttcccagcgtctataaaacactggcgaggcacctgacgatggtctactggtatccaaacgagcaacaatggcaaccagatggaaactaaaagaagggagagtttcacggctgcaaa

SEQ ID NO: 13600 - DNA, 219 bp, Oryza sativa
  Clone ID: PAT_MRT4530_19618C.1
atcatatatagatgggaggatagcctattttttgtatttatattgctaaaacctccgttgtagacttctgaactacattcgctaggatttgacggcatgttacctatacacttacaggcttacagcttatttgtacatacataaccagatggtatacgattggcctctctaccaatgcttgaaaattgcaaaccttcttcctgaatcctgatcaatcca

SEQ ID NO: 13601 - DNA, 631 bp, Oryza sativa
  Clone ID: PAT_MRT4530_19619C.1
atgggagacatcgtcattatcatcggctgcgacactgctattgactggattaatgatatcatcatcttcatcaacatcctaccatgcctcttcggctatgcctactctgctgttgttgatgggctacttcatcatcatacccgcgatgatcgatctccatttcacacgctcgctgctgggcatggcgctcatcatgtcgccgtcgccgccgctgcgagcccccctcctcgccgtcgccgccgccatcgtggccggattgctcctgctggcgcccgccgcggcgcagcagccgcccccgctggtgcagcagttctactactactcgcccccgccgccgtcgtcgcccgtgggaggcggaggtaccggcgggggcgggccctcgccgccgaccaaccccgcgccgccggcggtgccgtgcaactgcgggacgacgacggcgccggcggcgccctcgccgccgggtgtctacaactacagcgcgcctagcggcggaggcggcggtgggggccagctcgcgttcttgtccgggtcggcgaggtcgacgtcccacctgccgggcggcggagggtggcgccatgcgcggctgcttgcttctgctgctgctcctctactactaatagtatggtggtaa

SEQ ID NO: 13602 - DNA, 396 bp, Oryza sativa
  Clone ID: PAT_MRT4530_1961C.1
atggtgcccgcccgcgtcgccattgcgcacagcctcgtcagcgtctacggcatgctcggcgacatgcgccgcctccgcacgagacccaccacggaggcggagatccgccgcttccacttgccggagtacgtcaacctcatccgcaacctcaccccgaagagctacaccaatgacgtcgtgcttcggcagaaggcggaggatgaccacggcatcggtttactcggcgacgacaatgattgccccgccttcgaccgcctttggaagtactgccgcggctacgccggtgggtcgcttgccgcggcgcgcacgctcgtcaacggcgcctccggatctcaccgccgccgcatcgtgatgttcctgttcccgttccgcagccacatcgccccgatgctctag

SEQ ID NO: 13603 - DNA, 287 bp, Oryza sativa
  unsure (1)..(287): unsure at all n locations
  Clone ID: PAT_MRT4530_19620C.1
caccaccgctcttccgcgcttcgcttctctcgccgtctcgcggctgcgcggcgcggcgctctcatccatnccctcctcccgcttcccccacccgccgcccgatctcgacggcggatcgccccgggatgggctccgacgaagacgagctgctcgacgacgaggagtactactactactgcagcgacggggagtgtagcgncggcgggagcgggagcactggaggatgaggagttcgggggccgcgggagcancggaggngctgtgaggccgacgaggtcgtctccacg

SEQ ID NO: 13604 - DNA, 312 bp, Oryza sativa
  Clone ID: PAT_MRT4530_19621C.1
atggcgaatagactggcggcgacagcgccctcgccgccgccgccgcgtagcttcgtcgcgcggctgttcccggtgaccattggtgtccgtgcccacgcggcgcatcgcgagtgcgtaccgggcggcgcggcagaggcggccggcgagcctggaataggggaggtggccagtgagccctactcaagcccatggagagccaccaatgccgtctccggcgtgctcatggagatcctggccacacgggtgatcagcgccgtcgtcatgctccgcgagttcgccgcatcggcctcgcccgcacttattaatatgtga

SEQ ID NO: 13605 - DNA, 177 bp, Oryza sativa
  Clone ID: PAT_MRT4530_19622C.1
atgaatcaggaggaggatgtggatgctcaccaggatcccctgctctgctctgctcgccggatggagatcggcgcctcctcccctgttcagccgcggctcgtcaggagaccacgggacgggagatttctcgttcttttgcgccgaagggaaggaggggaagatactcgagtaaactga

SEQ ID NO: 13606 - DNA, 195 bp, Oryza sativa
  Clone ID: PAT_MRT4530_19623C.1
atgggatggcttatcttagtaccgagtgaagttgtggttatctatgcccattcgtcattcgtgtgggatgtttcccttggaggtaaggataccggtgactttgatgtgtcctactactatccagccaagggtggcgagggtaacgaaagtgccaggctagtcgctttttcctgggaactagctaagcatgagtaa

SEQ ID NO: 13607 - DNA, 167 bp, Oryza sativa
  Clone ID: PAT_MRT4530_19624C.1
aaatgtaaccaaactttaatttttaacaacaaaaacaattgacggcgaatggttgtggatcgatggccggcgcctgtacgggcggatggagttgtggagatgtacgccgcgctcgttcgaaacgatcgatcgatcctacataatgcactcttgggttgcctacgccg

SEQ ID NO: 13608 - DNA, 1431 bp, Oryza sativa
  Clone ID: PAT_MRT4530_19625C.1
acaacggcaaccgggggaaggtgggggcggaggcgagcctggagcagtggctgacgagcagcctgccgtcgctgacgacgggggagtcgcggttcggcgtgacgttcgactgggacgtcgacaagctcggcgtgccgggggccatcatcgtcaagaaccaccacagcaacgagttcttcctcaagaccatcaccctcgacgacgtccccggccgcgccggcgccgtggtcttcctcgccaactcctgggtctaccccgccgacaagtaccgttacgaccgcgtcttcttcgccaacgatgcctacctgccgagccagatgccggcggcgctgaagccgtaccgcgacgacgagctccgcaacctgcgcggcgacgaccagcagggcccctacgaggagcacgaccgcgtctaccgctacgatgtctacaacgacctcggctcccccgactccggcaaccctcgccccatcctcggcggctcccccgacaccccctaccctcgccgcggccgcaccggccgcaaacccaccaccacccggctgtcgctggtggagcagatctacgtgccccgggacgagcggttcgggcacctgaagatggcggacttcctgggctactcgatcaaggcgatcgcggaggggatcgtgccggcgatccgcacgtacgtggacaccacccccggcgagttcgactcgttccaggacatcctcgacctgtacgagggtggcctcaagctccccgatgtccccgcgctggaggagctccgcaagcgattcccgctccagctcgtcaaggacctcctccctgccgccggcgactatatcctcaagctccccatgcctcagattatcaaacaggacaaggaggcgtggaggacagacgaggagttcgcgcgggaggtgctcgccggcgtgaacccgatgatgatcacgcgtctcacggcgctggacagcaaccggctgtacattctggaccaccacgaccggttcatgccgttcctgatcgacgtcaacggcctggagggcaacttcatctacgcgaccaggacgctcttcttcctgcgaggggacggcacgctggcgccgctcgccatcgagctgagcgagcctatgatccagggcgacgtcaccgccgccaagagcaccgtgtacacgccggcgtccaccggcgtcgaggcctgggtgtggcagctcgccaaggcctacgtcgccgtcaacgactccggctggcaccaactgatcagccactggctgaacacgcacgctgtgatggagccgttcgtgatcgcgacgaaccggcagctcagcgtgacgcacccggtgcacaagctgctgagcccgcactaccgcgacacgatgaccatcaacgccctggcgcggcagacgctcatcaacgccggcggcatcttcgagatgaccgtcttcccggcaa

SEQ ID NO: 13609 - DNA, 189 bp, Oryza sativa
  Clone ID: PAT_MRT4530_19626C.1
atgggaaaccggaggagcgtggttgactactgcgctctcaccgagaactacacctttaccgcctctcaacaagcaatggcaagtgggccccacacccaacgaggcgagcctgtatggattaagcgggggcctaccccaaggctgatggagcaggcgagaagagaagcagcagacaagacgtattgtacc

SEQ ID NO: 13610 - DNA, 2601 bp, Oryza sativa
  Clone ID: PAT_MRT4530_19627C.1
atgctgggagggatcatcgacaccatcacggggtcgtcgaagcagtcgcggctcaagggcacggtggtgctcatgcgcaagaacgtcctcgacctcaacgacttcggcgccaccgtcatcgacggcctcggcgagttcctcggcaagggcgtcacctgccagctcatcagctccaccgccgtcgacccaaacaacggcaaccgggggaaggtgggggcggaggcgagcctggagcagtggctgacgagcagcctgccgtcgctgacgacgggggagtcgcggttcggcgtgacgttcgactgggacgtcgacaagctcggcgtgccgggggccatcatcgtcaagaaccaccacagcaacgagttcttcctcaagaccatcaccctcgacgacgtccccggccgcgccggcgccgtcgtcttcctcgccaactcctgggtctaccccgccgacaagtaccgttacgaccgcgtcttcttcgccaacgatgcctacctgccgagccagatgccggcggcgctgaagccgtaccgcgacgacgagctccgcaacctgcgcggcgacgaccagcagggcccctacgaggagcacgaccgcgtctaccgctacgatgtctacaacgacctcggctcccccgactccggcaaccctcgccccatcctcggcggctcccccgacaccccctaccctcgccgcggccgcaccggccgcaaacccaccaccaccgatccggactcggagagtaggctgtcgctggtggagcagatctacgtgccgcgggacgagcggttcgggcacctgaagatggcggacttcctgggctactcgatcaaggcgatcgcggaggggatcgtgccggcgatccgcacgtacgtggacaccacccccggcgagttcgactcgttccaggacatcctcgacctgtacgagggtggcctcaagctccccgatgtccccgcgctggaggagctccgcaagcgattcccgctccagctcgtcaaggacctcctccctgccgccggcgactatatcctcaagctccccatgcctcagattatcaaacaggacaaggaggcgtggaggacagacgaggagttcgcgcgggaggtgctcgccggcgtgaacccgatgatgatcacgcgtctcacggaattccctccgaaaagtagtctcgatcctagcaagttcggcgaccacaccagcatgatcacggcggcgcacatcgggagcaacctcgagggcctcaccgtgcagcaggcgctggacagcaaccggctgtacattctggaccaccacgaccggttcatgccgttcctgatcgacgtcaacggcctggagggcaacttcatctacgcgaccaggacgctcttcttcctgcgaggggacggcacgctggcgccgctcgccatcgagctgagcgagcctatgatccagggcgacgtcaccgccgccaagagcaccgtgtacacgccggcgtccaccggcgtcgaggcctgggtgtggcagctcgccaaggcctacgtcgccgtcaacgactccggctggcaccaactgatcagccactggctgaacacgcacgctgtgatggagccgttcgtgatcgcgacgaaccggcagctcagcgtgacgcacccggtgcacaagctgctgagcccgcactaccgcgacacgatgaccatcaacgccctggcgcggcagacgctcatcaacgccggcggcatcttcgagatgaccgtcttccccggcaagtacgcgctctggatgtcgtccatggtgtacaagaactggaacttcaccgagcagggcctccccgccgatctcatcaaaaggggagtggcggtggaggacgcgacgagcccgtacaaggtgcggctgctgatcaaggactacccgtacgcggcggacgggctggagatctggcacgcgatcgagcagtgggtgggcgagtacctggcgatctactacaccgacgacggcgtgctccgaggcgacgcggagctgcaggcgtggtgggcggaggtgcgggaggtcgggcacggcgacctcaagggcgcggcgtggtggcccaggatggacgccgtgtcggagctccgcgacgcgtgcaccaccatcatctggatcgcgtcggcgctgcacgcggcggtcaacttcggccagtacccgtacgccggttacctcccgaaccggccgacggtgagccggcggcggatgccggagcccgggacggaggcgtacggcgagctggggcgcgacccggagcgggccttcatccgcaccatcaccagccagctccagaccatcatcggcatctcgctgatcgaggtcctgtccaagcactcctccgacgaggtgtacctcgggcagcgcgacacgccggcgtggacgtcggacgccagggcgctggaggcgttccggcggttcagcgaccggctggtggagatcgaagggaaggtggtgggcatgaacggcgacgcggggctcaagaaccgcaatggcccagccgagttcccatacatgctgctttaccccaacacctccgacgtcaccggcgccgccgccggcatcaccgccaagggcatccccaacagcatctcgatctga

SEQ ID NO: 13611 - DNA, 805 bp, Oryza sativa
  unsure (1)..(805): unsure at all n locations
  Clone ID: PAT_MRT4530_19628C.1
tttttttttttttttttttttgagcaacaagaatattttcctttatttcatttgctggaagcacttattattctcttattaccagttaccgacagcaacatcatcctcagataaatccaggcaactatccaaattaagcctttccctcacagcaaaagagagaagaataaaaggccaaaacaaccgcagttcagaatttcagcaagaatgtgcgtatctccatcggtccaagctcaacaacaagggcgtggctgtcaactgggccacccttcaatggtgcaggatcagttttgctctccccggttactctccaattgagcttcttcatctctgacttcttttggtttgcagataggctagtctcagtcaaatctttgattatcctctttccaaacagctttctcaattcaacctttgccattactgaatattgtgtgtcctcttgagcctgaaaaagatgcgccaatcgaaggagtgtggtgccatcatcaagactctgcaaggtgatgattgcaacattatcaggaagactatagtttccttctaccgtacttgcttttgcaatattgttggatttccaactgcgttcgtcctcatgtgcaaaagcaacaaggaacggtgaataaacttgttggctatatgttcggcgccaatgagctcccggacgcgtgggagtcccggcaaaaccgctatgaccacactntaangggccccatctcgacgggaaagcgtggtaattatccgatagcatagctaatagatgtntntatttgtcnntcacnncnnctntcanacttanagggcc

SEQ ID NO: 13612 - DNA, 197 bp, Oryza sativa
  Clone ID: PAT_MRT4530_19629C.1
caaccaaaaggatatattcccgaatttttccagtaagggggggcttgccttaaaaaaccaaggttttttttaaataaataacccggaagagcttaaatatccactttattgtggaagaccaaagaaacaagatgccttacaggttcttacaaaaggtttttccaaataagaatttaaactttttgaaaatttccagg

SEQ ID NO: 13613 - DNA, 606 bp, Oryza sativa
  Clone ID: PAT_MRT4530_1962C.1
agatttcagacaaacacatacagcagcatcaccagctcagttaattgcaagcaagaataaacaagctcgatcgatcactgtgataatatggcggggaagctgtaccagctgatgtcgaggatgcacctggcgaggagccggtcgtcgtcgtcgtcggcggcgacggcggcggcggcggcggcggacgtgccgagggggcatttcgcggtgtacgtcggcgagaggcggaagcggttcgtgatcccgacggcttacctgaagcacccgtcgttcgtgctgctgctgaagcgggtggaggaggaattcggcttcgactgccaccgctgcggtggcctcaccatcccctgcgccaccgagggcgacttcgcctccttcgtcgccgaagccatcgcctccgacgaccaccaccaccactagctcgctgttaattagttaattagtagcttctagttaattagctagctatgacggctcggatttttgtgttctcttttcttgttgctgaggattaattggaatccttcttgctgatgagatcgttcgttgtactacttgtatgataacatcatttgatggaaagttgttgccaaaaaaaaaaaaaaaaaa

SEQ ID NO: 13614 - DNA, 210 bp, Oryza sativa
  Clone ID: PAT_MRT4530_19630C.1
atggcggccgcgacgaagccgcgggctcctggagcccggacacgccggtttcgcaggatcacgccggcggcggaggcgcaaaccacgtcctcgggcgccgggtgcaacaagaactcgtcgcccatcgtcatctgggagggtccaaagggcattttttccgacgtggcagacggctgtttgctctgtcataacggccgccaccgagggcgc

SEQ ID NO: 13615 - DNA, 498 bp, Oryza sativa
  Clone ID: PAT_MRT4530_19631C.1
atggagatcgcttatgatcttgtcacgcatggagcccacacctctatagttgttcgtagcccgatacacataatgaccaaagaactaatatggtatgggatgacaatggtccaaaatttagggctaaatgtgacagcagtggattctcttcttgtgatggctgcaaatttttattttgagacttgtcaaaacatggtgttccaaggaatatcaaagataaatacaaacagtgttgaatttcatggtgggaggcaaaattcatttgacgccattgtatttgcgacaggttacaaaagcacagttaatgcatggctaaagaatggtgaaagcatgtttaaagacgatggtttccctaaaaattattttccaaatcattggagaggtgaaaatgggttgtattgtgctgggtttgctaggagaggattggccggtattgccatggatgcgaaaaatattgcaaatgacatcgtggccgccatggataaaatgtcatgttaa

SEQ ID NO: 13616 - DNA, 523 bp, Oryza sativa
  Clone ID: PAT_MRT4530_19632C.1
ttgaaatggtgcatgacgaataatcatggtcgcaaccttttacaatatattgcttggacttgtatgtttgttttattctgatgtgcctccatgagttagtgcagcaattggtctttgcgattttgtggtatacgtttttgaagacttttttttttgtatatatgactaactcagatgaaaatggagccagtaaagagatggtgccagtggttccctgtatactttatttcactctgtaaatctgattaccataatatgaatacttatcccaaatttacaaatgttttttctttgtgctatctctgccagtacaatagcaaggtaactgctgcctacacaactgaatgatcatgtttgagcttctcctcagtttctgcttatctacaagactagatgtgcttgaaagacctctaaatgtgaggactgaagcacttgaaattcagttaaaaataacacaattagttcctgttctgactgcaaatgtgttcacacactagagatcttgtgcataggccacctgata

SEQ ID NO: 13617 - DNA, 440 bp, Oryza sativa
  Clone ID: PAT_MRT4530_19633C.1
ttttgtttttaaagaagcgacctttggatgctagttcactccaaatcgcccacaactaagaggcgatataagcacgctgatatagtctaacagaaatttactgcaaccagatttggggtggaagcataacagaactgggcaggtattaacaggtctccaacgagaagcagtagcagtagcttcagtgaaacatcatttcagctgattacattgatggattgtctctggacaccttgacagctcttgtgtcagaagacaccatctcggtcgcgctcagcttcaatcttgttaaccacattcattacatgcagtaccttgccgtacactgactgcttgcgatctcttaaccttggtaacaaccttggaggtacagaaacccttcaatttggattgccaatcagcagtggcataggtctaaatattggcatcgtaggagagtt

SEQ ID NO: 13618 - DNA, 186 bp, Oryza sativa
  Clone ID: PAT_MRT4530_19634C.1
atgacgacggcgccgacgaccacgacgggcgacgcgacaacggcgccgacgcggcagctcggctcctccctggccggcggtgcccgtggtgaggccgcggcagcgcccgtgctgcggagacagctccccgacaggtcgggcggcccgctgggctccgtcaacatcttcgctatccatcatccgtga

SEQ ID NO: 13619 - DNA, 240 bp, Oryza sativa
  Clone ID: PAT_MRT4530_19635C.1
atgtcgtcggtggtcaacaagctcactaacgccgccgagagggagtcgtcggaggcggaaacccttatcgcggtgaagcagcttgaggcggcggcgctggaactggttgcttcgtgcgaagattgcacgtgctacgccgacgcgatccggaaggtgcctggggcgtaccagccatctaatcagatattcagtttttgcgttgaactcaaggctatttgtgttgttcagtgcggattgtag

SEQ ID NO: 13620 - DNA, 596 bp, Oryza sativa
  Clone ID: PAT_MRT4530_19636C.1
ccacgcgtccgcccacgcgtccgcccacgcgtccggctttctctttccctcgaaaaccaaaaccaaaaccaaatcgcgggaaagcgggcgcggcggagatcgccgccggtcgccggagatgtcgtcggtggtcaacaagctcactaacgccgccgagagggagtcgtcggaggcggaaacccttatcgcggagattcgcaaggcgatcggcgaaatgaagtccatcgccgtcgattacgagagggagaacaagtccgacaaggtgaagcagcttgaggcggcggcgctggaactggttgcttcgtgcgaagattgcacgtgctacgccgacgcgatccggaaggtgcctggggcgtaccagccatctaatcagatgacggatttcgaaaagctgatcgaggctgaggttaacaaggtcaaggggaactcatcaacatcagtagagaaccatctgctcattcggcagttcagagaggcagtttggaatgttcaccatgctggccaaccaatgcctggtgatgaacaggaggatgttcttatgaccagtacccaaactagcatctttaatgtcacgtgcccattaactgggaagcctg

SEQ ID NO: 13621 - DNA, 272 bp, Oryza sativa
  unsure (1)..(272): unsure at all n locations
  Clone ID: PAT_MRT4530_19637C.1
aaaacgaaacgngaaatcgatggcgagcaaggcgncgtgcattgaatgcgcgncatgttggtgggagaggagaggagagnaggagacgggccgctacctcgatgctgncgagtggcgccttgttgagccgcctnaggtggctgtgcacctgccgntgccgccgagagatgctccgcgcgtagntgctgtgctgctcgcgcgcgcgcgcgaccccctagcgcgaggcaagaganacgcaaaggcgccagnatcctcgagcgcgcgcgcgcatg

SEQ ID NO: 13622 - DNA, 2787 bp, Oryza sativa
  Clone ID: PAT_MRT4530_19638C.1
atggacgccctcgcggggcgcctagccgcggcctccgtctccgaccacccctcctcctcctccgccgccgccaccgatggggccaacgccgaccacctcctccacgtcatgcgcgccgtcgagggcgccgaggccaccatccgcaaccagttggaagagaataatcgcctcaaagaggaactgatgcagaaaacgcgacaattgcagaggattcgggaagatgctgcatcccaagcttcttccagtggagtagcccaagaccgccgctcattcgttgctactaagatggatgcgtcaaggtcacctgccagcgctgcgtcctcagataattcccgcaccccctctgcccttcaccacaatggcgcattcgaaagtggagagccttcaatgcagcagaccatcaggcaaaacaatgccctgtccaatggagcatctaaaagatcatcaggggagcagcctgccctcgacagcgctgccgtctcacagttctctactccatcctcccattccctttctcctactaggcatagaaaagaaggcgagcatgatcctaggttgaacctagctggacaggggttattgcctgcttcagagatggcctcgaacatgtcatggaagcatgatcttactgctaagatcaaagaaaatgaggaagagattgcgcaattaagaaaacatcttgctgactactcattgaagcaagcacggatactcgatgataaatatatgttggaaaggcgcattgctcaaatgcggatggcatttgatcagcagcaacaagatttaattgatgcagcatcaaaagctttatcatatagacaagatattattgaggaaaacatccgtctggcatatgcagtgcaggctgcacaacaagaaaggacaactttcatatcttcgttgctgcctcttctgtctgaatatgaaaacctgcagccttctgttcttgatgctcaatccatcgtcagcaatttgaaggttttgtttaagcatctgcaggagcaacttattatcactgaggagaaattaaaagagtcacgttatcagattactccatggcaaactgaattggcgaatgatgccactcttcctgtacactcacctacggatcctcttggaaaagcattggtgacttcaaacaaaagcaacctcgatattgtgacccagacaccgtaccctcatatacaatctccaatgtcttcccctgttcaagttagaggtgattggggtgtagcagggaacaaaaaccgtcgagtcattccaactgatgttcctccaagaaatgttgatcatggtgacatgggaagaaactctctttcaagcaggagggatgtttcttctcaagtatctcagcatgatccacattctgtcccattggactttgagcccgagaatcaaaacccaccattcaagcaccttagtagaagtgacgtatcggatgcttcggagggtgctgaagtccaacatgcacgagaacattctgctcattggggtcatggagactcagttaatttggtatccggcattgaggatacaaacccttcatatccgtatcttcctactgttcttgaggagcctggatcttctttctctgaagctgctgaggatgatccactgccaggcatagagggccttcgaatcacaggtgaagcttttcctggaagagaactccaagcaagcgggtactccaccaatggaaccaccagttgtaattttgagtgggtgcgccatttagaagatggctccgtaaatttcatagaaggagcaagacaacctaactatttggttactgccgatgacgtggacacattactagctattgaagtacagccccttgatgatagaaaaagaaagggggaaattgtaaggttttacgctaatgatcaaagaaaaattacttgcgatcctgaaacaaaggagcttattaagagaactcttgaaactggtcatgtatcttatgaagtccaactacctgtgaaatttttagatatgtgggaaccagctattttggcaataaagagggaaggctacagtattaaatgtactggtcagcgtggtgttgttctcacagagaaatttcagcaagcaacttctattaatattccttacgggcgtccgacagagttcttgattacatctgctgatggtgttgaatataatttaaagcctgcagaaaatgcactgccgcgggataccattgttctggttttaagattgttcagaattatggctgttgagaagaggagaggaagaaagaagagccttttcttcaagtaggttttggctcctataccgtggtgtataatttgtattcgtgattggctggatgtatgtaattaagcgggtgataggtttggcatattctttcggctgtatcttctgctgtaaaggaccataggcgatttaaacacaagggccccaggtgatgggagttttcttcttcttatttttttcccttattccttttagaaacactgagttttgtcgttgcaagggatggaagcgtcccgctgattagaattgaagctaatttatgctaatagaatgggaaagataaataggcaagtcctaggatgctctggaaatattccctgcatcgtagggtagtgaccatcatcagttcacgggtgacctccctgcctgctggttacttccaacgagcttgcaattttggagatgacgcatagcagtacctgaacatgtatacaagtataactgatgtatcatctgctgtgtaattatttgagacgaaatagacttcagtaatttaagaaaaaaaaaaaaaaa

SEQ ID NO: 13623 - DNA, 419 bp, Oryza sativa
  unsure (1)..(419): unsure at all n locations
  Clone ID: PAT_MRT4530_19639C.1
gtaaagatgatattgaggagaaaatattacttctgctgtcccttggaaccacgtgagaatggtcactgttatgcatgcagaaaccaaggaatggatgacctgaggcatccagctacaggtggatttgagatgggctcacctgacactgtatttccttacatgtataccngtgactgagctcgtgttaccccaaaaagatatgtatatggatgatggtttggagtaatcacttagattatcatgatgtgttggatgctgacatagtttattttcagcagcactatttcgctcgcttgttgtagtactgaaggtctaaaatattgtgcattcgtttgtctgacagtattgtgatgaaattggtatgcatggttgaacatcccaaaaaaaaaaaaaaaaaaaaaacaaaaaaaaaaaaaaaa

SEQ ID NO: 13624 - DNA, 855 bp, Oryza sativa
  Clone ID: PAT_MRT4530_1963C.1
atggccgccgccgccgcgaagctcccgcgcctcaccacctccgccgcgctcttcccgaccccgaggccgttcggctcccccaggcccgccaaagccaggccgatgccgccgccgccgcccatcaccatctccatggaccctgccgccgtcgacccggcccacctccaggcgctcatgctcgcctgcgcacactcctgcgccatccgcccctcgccgccctccgccgcggaggaccccgtcgacctccgcaagctccgcgtcgcgctcgcgcacagcttcctcgtcgtgtccgtcttctgcagcgcgaggttcctggacgatggggatgggggtgtcgatggcgatggccggcggcggctgctgggcctggggctcgggctcgggcggcgagaggaccggcggctcgtcggatttggccgggccgtctccgacgtcgggctcaccgcgtccgtccacgacgtcgtggtacatccgtcactacagaggagaggtataggccgacaaattgttgagagaatgacaagagtactccataacagaggtatatttgacatttccgcactatgtacagaaaaggagagatacctggtgaagcaagacaaaaggattgccttcaaaattcatgaacacgcttcatctgaatctcttgtgtttagctgcaatctgcaggcaaatgctttctcatcaagcttatgcgttgccgtaaccgtaaacatagctttttgcgttgccgtaaacattgacttgttaggccgaccagagtcacagatggatggcatcatggcagtatggcacctcacaatcagtacacgatacaggcaaaatcttacacctaaaaaagaagtgtccacctga

SEQ ID NO: 13625 - DNA, 194 bp, Oryza sativa
  Clone ID: PAT_MRT4530_19640C.1
aacaaccatcggtcgtgctaaatttgtaaagcagaaccatgctcaatttaaatatgaaataagttccattaaacaatattactaattctggctctaaaaccattgtaacatattgctcatccaacttgtaaccaaaaacttaacatgtcactactaacccttgaccgttttcttgagcttcgcaagctctttcc

SEQ ID NO: 13626 - DNA, 742 bp, Oryza sativa
  Clone ID: PAT_MRT4530_19641C.1
aaagcaaagttgggtttttatcgttttttttgctaatgtttggcgagtcgagccgagatagcaaagcaaagaagaaaaataaagataaaagccaaaccactcggtgcctgttctcttctccaagatccaaaaccaaaccaaaaaatatatatctcctttttagcgcgcctgtaagtgcccaactttgcaacaaagaagatccttccagggttgaagtccaatctttgtgaaagaaatccaagccaaagcagctttaagacttgtccttcttcctctggcccatgaacttgctcttctcagcaggggtctggaagcgaccatgaccaaacttggacgaggtgtcgatgaacttgagggcaacgttctccaactgccaacgcttggtctgaggcaaaagagccttcctgagggtgatgacgcgcttcttggggccaacgcagcaacccttgatcatgatgtagtcctcgttcacaacaccatagtgagggaaaccaccgaggggcgtgatgttcttctcagtaagatcgaattcggtcgaggcgttgttgttgatggtcttgccaccctcctgacgagcacccttgccgatcctgtagatcttcttgttcatctcagtcctgtggtggtaaccgttctgacccgccctgggcacgctccattggacggcagccggatgccaggcaccgatacaggcaaccttcctcaaacctctgtgggtcttacgaggcagcctggtgactcc

SEQ ID NO: 13627 - DNA, 542 bp, Oryza sativa
  Clone ID: PAT_MRT4530_19642C.1
caatatcagctgcaccgcagctcatgctggcagcaacagatccttgagcccatgcggtgagttcgtaaggcagcagtggcagcacagtggcaacccccttgcgtgccaatcacccgtgtttcaactgagaaactgccaagtcatgcagcagcagtgctggccaacagctcaggatgatgcgcgcaacagtctcactccaggccatttagccagtgtttcaggcgattgtgcagcagcgtacagctacaacaggtttgcgtggcggtcgtactgtcgagtcaggctcaagctcaagcccaagcgtagtgttggcccgtaaacgttgccgatcaatatgcgggtagtcgtacccacagcgtacaacacgtgcgtcccgtggtagcagttcctaccgtcggtggtatctggtattgaattgtagcagtatagtagtacaggagagaaaaataaagtcatgcatcatcgtgtgtgacacagttgaaacatctgggtgatacaatctgaataaaatgtcatgcaattttaaaaaaaaaaaaaaaaaa

SEQ ID NO: 13628 - DNA, 1227 bp, Oryza sativa
  Clone ID: PAT_MRT4530_19643C.1
atggcaagagagaaaagaggtgctgatcgctcccctgccctaggtcgtatggtagtggtagaggatttcatccattgtggttttttgcctcctccttcggaatttcttttgctgatcctgaatttctacggcctcacgcttctacatctcaaccccagttccattgctttcctgagcatcttcgctcatctttgtgaggcctacattggggtagtgcccttcttggaccttttccgattcttttatgaactccactggatggaaactggcagggtctcgggatgttgtgggtttcgcttacatgacggtatgaaagcgaggtacataccctttcaatgccatacatcccggaccaaatggcgatcgaagtggttctatcttgagcttgaagaactcgatccggttcttgtcgtgcctgaggaccaaccaaagcgtcaggagtgctggacctccaaacctctattgaccccttcacttgaggccttccttaatgtcatcggtggcctgcgagaacaagggttgactgagtatgatgtcgctcgagacttcattgcccggcgcatccagtcactccaggcccgcgcccaccccgcgttcgatttcgagggggatttggacgtgacacggatctcgtcgcggggtacttgttctcgtgttgcagtcttcgtcttctctttaatagctatctcgtgttctcggtttgacccatcttcacctttttccttgcgtttcagatctttccgccgatgtcgtgatgcagcggacgtgctgatcagccccgtctcggcaaccgatgaactgcccactcccctctgctacaagtcagcggccgacaaggtggacgccatcaatggcaatgggggtgagatcttgattttccatcttactcaggatacgggccgtctccctcctcctccgaagaggaggataataaagagagccgctagcagatgttttgatgccgaggacgtccagcaaggcggacgccctgatatcgtgacaaccgatttggccttgctgagcgaggcacctgcttctgacgttgtcggggacattgtcgtgttagacaacacgaatgtcatctctgacccatcgggcttgggcgcgtgtttcgctccgccaagagaactcaagtgggttgccttaggtttttcgcattctccagacatatgtcctcatgggagaatttccttaaacccttgccttttccagacctcaagagcatga

SEQ ID NO: 13629 - DNA, 481 bp, Oryza sativa
  Clone ID: PAT_MRT4530_19644C.1
aattatataaattaacatcgaccatttatggtgagatcacctcaaatcgccgaggcattcttctacattcatcaccatagtactactagctggcgagaacacaactccaccaacaccgaccatattactccgttcaaacccaacacacaaaaaccgattcatacacaacatgcattctacctaccaccgatcgcagattggttacattaccccagattgcacaaagcatacaaccccatctacctgcaaacctaaaggctagaggtgcgcctgatctctatggctaaatccaaggcgggggcctatatgaagcactcccaccgcaactccaataacaaaaccccccccacgtataatgttccatcgagcctccgaacagcctccatatgcatttgctataccccccagaactcctcgaatgctgctgagctctctactccgctcacctgcgtctgaccgcttggtataagctacatcatgc

SEQ ID NO: 13630 - DNA, 315 bp, Oryza sativa
  Clone ID: PAT_MRT4530_19645C.1
atggcggtcggcttaaggcgaccgctagcgaagatgtgtttccgctggcggcccgtgacccccgacccccgccattttctgcgctggcgcctccccttcctatccggcgggccggccggcggtggggccacgcgcggcggcagccagcggcgggcggcggggcggcgcccggcggggtcgcgcgtggcagagggcggcggggcgacggccggcgaggccgcgcccggcggcgggcggcggcagtcggcggggccgcgccggcagccggcggccggcggggccgtgcccgtcgttcgtggcgaccggcagcgatag

SEQ ID NO: 13631 - DNA, 1182 bp, Oryza sativa
  Clone ID: PAT_MRT4530_19646C.1
atgagcgtcatcacggtggttgtggtggtcggcgtcgtcctcgcgctcgcggcggcggcgtcagtaatggcggcggagtacagcgtggtggactacggcgcgcgggcgggcgggagggcggacgcggcgggggcgttcctggccgcgtgggcggcggcgtgcggcgacgacggcgagcggccggtgatgcgcgtccccgcggggacgttcctggtcgggcgggcgtacttccgcgggccctgccgcagcgccggcggcgtggtgctcgccatcgacggcaccgtcgtcgcgccgccggccgtcggcaacgcgtcgtggatcacgttccactacgcccacggcctcgccatccgcggcggcacgctcgatggcaacggccacgccttctgggcgtgcaaggccgccgccggccgccgctgcccaccaggcaccacaacgctggacatcagccagtcgaacaacgtgtcggtgaagcgggtgacgctggtggacagcaagaacgtgcacgtctccatcttcgactgcgccggcgtgacgctccagggcgtgcggatcgcggcgccggcggacagccccaacaccgacggcatccacgtcgcgctgtcccgcgacgtcgccgtcctcagcgcgacggtgcgcaccggcgacgactgcgtctccgtggggcccggcacctccggcgtggccatccgcaacatccggtgcggccccgggcacgggatcagcatcggcagcctcggcgggcgcgccggcgagggtgaggtccggaacgtgacggtggagtccgcgtcgctcgccggcacgcagaacggcctccggatcaagacgtgggggaagcccttcgccggccgcgtctccggcgtacggttcgccaacgtcgccatgcgcgacgtccagaaccccatcgtcgtcgaccagaactactgccccggcaacgtcaactgccccggccagagctcgggggtgaagatcagcgacgtggagtacgagggaatcacggggacgtcggcgacggcggtggcggtgaggttcgactgcagcgggagcaacccatgcacggggatcaggctcaggaacatcaacctgacgtacgacggcggcggcggcaagccggcgaggtccttctgcaagaacgccggcgggtcggcgtccggcgtggtcatcccaccgagctgcctctga

SEQ ID NO: 13632 - DNA, 641 bp, Oryza sativa
  Clone ID: PAT_MRT4530_19647C.1
ctcctggcgccgctgcgcggggtcgaaggcgtacactgtcaacttcccaacattcctaatttgggagagaaaagcccctagcgttgctagtactttgcatggttagttgctaactgacgatgttggatgaccgattggctgagtaagcgaggtttgcctcacccagccttaagtgtgctttatgatcaacaggaagaaacaattgatcacatcgaaacatgtatctcatcaattttggcagctgatcctgatcgccatcgggcatccatgcttctttgcaaaaaaaaaaactttcttcctctcatggtggtgtgagtgcaagaagaaagtaagcgggtagcttcaccgaggattcgacaccatcgtcactttagccacctggttgatttagaaggaaaggaacaatcgagtgtttaaccaatggcaacagacctagaccgaagtgacacgtgatgcggaaaaagatgtgctttggtggatcactcttgcaatagctgaaaccccacttctccaacatgggctctcgcaccaatcttgatcaagacaacatcatgaccgcatattatggagagttgttgaaaactgatcgccaggtgtttgagactcaacttgaagaattgcttcaaaagatggcttcgtac

SEQ ID NO: 13633 - DNA, 648 bp, Oryza sativa
  Clone ID: PAT_MRT4530_19648C.1
atggctgcggcggtcgatggagcagttcaacagcggcggcgcgccccgcctacggccaagggtggcggcgtccaggcgacgggcggccgacttaatcaccaccctctcccgccgttgctcgaggtgtgttgcccggggttgtcgtcgggtcgtggccggatcggcatgtggctcctcgtgcagaggaagctgcgcagcggcgtctcggcgacaaggaggagcgccggcggcggaggaggggatgaggaggagcgccggcgaggcggatccgaccggccccgctgcccacccctggagcgcctcaccgcttcttcctctaatttccccgcctggattcgtgggaagaggatggcagcacccgacggcggcggcgtcctgactcatcggagatcgatcgcccgtccgctcgtctcatctgtcgtcggctgccctaccgcgtcgttggtcgctccctcactactctcgctctggcgctttctccgttgcccggtcgccaacccccgtttcaccgctgttggctgcccggactgcttgtgccggcgtgctgcactgctgcatctctgcaccactgcacaaagccatcaacacaccagcaatccaccatcccagcaagcacaagatgcacaacacagctgcacgccccatctg

SEQ ID NO: 13634 - DNA, 1461 bp, Oryza sativa
  Clone ID: PAT_MRT4530_19649C.1
atgacgccaccaccttcgccagcagtggagggcggcgcggccgcggccggccatggcggacgccggcgccacgtcctcctgttcccgctcccgtaccagggccacatcaaccccatgctccggctcgccggcgtcctccgcgcccgcggcttcgccgtcaccgtcttccacacccacttcaacgccccggacgccgcgcgccacccggagcaccgcttcgtcgccgtccccgacggcatgtccggccgcccgccgcccgtctccgtcggcgacgtcgtcaagcacatccgcgcgctcaacgccgcgtgcgaggccgcgttccgggaccgcctcgccgccgtcctggccgagtattccagggacgctgtcgcgtgcctcgtcgccgacgcgcacctcctgcgcatggtcgaggtggccaggcggctcgccgtgcccaccctcgtgctccgcaccggcagcgccgcctgctttgccagcttcctcgcctacccactcctctgcgacagaggctacctcccgtcgcagctcgacatgccggtgagcgagctgccgccgtaccgcgtgcgcgacctgatgcacatcggaagggacggccacgagctgatgtgcgagctgctggcccgcgccgtggcggcggtgaagctctcgtcggggctcatactcaacacgttcgacgcgctcgaggcgcacgagctggccaagctccggcgagacctcgccgtgccggtgttcgacatcgggccgctccacaggttctcccccgccgccgatggcagcttgctgcatcaggaccggagctgcctcgcgtggctggacgcgcagacggcggagtcggtgctgtacgtgagcttcggtagcctggcgagcatgggcgcgcgggagctcgtcgagacggcgtgggggatcgccggcagcggcgtgccattcctctgggtggtccggccaggcctcgtccgcggccggcgcgcggcgccgggcgagccaacgcggctgctgccggaggggttcgaggcggcgacgcggcggcgcggggtggtggtggcgtgggcgccgcaggaggaggtgctgcgccaccgcgccgtgggcgggttctggactcacaacgggtggaactcgacgacggagagcctcgccgagggggtgccgatgctgtgccggccaagcttcggcgaccagatggggaacgcgaggtacgtggagcacgtgtggaaggccgggttcgaggtggtcggcggcgagctcgagaggggggcggtggaggaggccatccggcggctcatggcggagagcgacggcggcgagatgagggcgcgggcgcgcgagctgaagaaggcggcggcggagtgcaccggcaaggccggctcgtcggagacggccatcgtcaaaatggtcactcacatgctgtccctgtaatttagagtagtattttcagcttacaaggtgctttaatttccttaatta

SEQ ID NO: 13635 - DNA, 506 bp, Oryza sativa
  Clone ID: PAT_MRT4530_1964C.1
ccggccgggacacatctagctaactcacacagtctaccatacacacgcattgcataggagaggcgacaatggaggggaaggaggaggacgtgctggctggcggcgaacaggtactcgaagaggcattcgatagggacggtgagcgcatggcgccggtgacgacaaggactacaaggagccagtcgccgtcgcctgatgttcgagccaggggagctcaagtcgagggctttgctaccgggccgggatcgctcgagttcgtcgacaccttcctgttgctctacataaccatcctcaccgtcagtgggggtctgcaagatctactccaaatgcgtaatcgtagccaatcagagtattggctgatccttaggaagcataatcttagggctaggctaatgcaccgccggtatctcaggctgacacatcaacccacaacatactttcggactattacttaaccacgaagcttgcccctaaccagagccaatcttctaaatattgaggcagag

SEQ ID NO: 13636 - DNA, 581 bp, Oryza sativa
  unsure (1)..(581): unsure at all n locations
  Clone ID: PAT_MRT4530_19650C.1
agtagtgagggagcgaccaacgacgcggtagggcagccgacgacagatgagacgagcggacgggcgatcgatctccgatgagtcaggacgccgccgccgtcgggtgctgccatcctcttcccacgaatccaggcggggaaattctggatttggatccgggctgtcgccaccctaggttgccctcactctccggcaccggcgagaggggatagcctgtgaacgatttctcctcacagaggaagaagcggtgaggcgctccaggggtgggcagcggggccggtcggatccgcctcgccggcgctcctcctcatcccctcctccgccgccggcgctcctccttgtcgccgagacgccgctgcgcagcttcctctgcacgaggagccacatgccgatccggccacgacccgacgacaaccccgggcaacacacctcgagcaacggcgggagagggtggtgattaagtcggccgcccgtcgcctggacgccgccacccttggccgtaggcggggcgcgccgccgctgttgaactgctccatcgaccgccgcagccatcgctctcctncttgcttccgctgcgccgc

SEQ ID NO: 13637 - DNA, 387 bp, Oryza sativa
  Clone ID: PAT_MRT4530_19651C.1
atggcgtacacgtggcggccacgtggagccacgcgggcagccgaactgacggccccgatcggacggcggcgggagagcgcggccggcgcgcacgagcggctcaagccggctcagcggccatggcgcacggcggcgcggctcgacgcagcggcggcgcaaggcggcgaccggccggcggcggagggcggcggcgtcttggcgatgcggacggcgctagcggcagctaagtggctaggcggcggcatggtggctaagcggcgcgggagagagagaagaaggggaggaggtgtctcacggacggcgattgacgacggcgagcgatggaggatgatgacagcagcgggacgagctccggaatcacctagcgaacatgatgaaaggggttag

SEQ ID NO: 13638 - DNA, 509 bp, Oryza sativa
  unsure (1)..(509): unsure at all n locations
  Clone ID: PAT_MRT4530_19652C.1
tntnntntgaacttaaggactgggcagttgctacaatataccgattgctgtcgggaacactgcaaaagtgtcttgctatatcaatctaagtacagcatgagcttctagattagctagatagtaatattatctgctttactaaaattacccatgattacaaggttctacagtagaatataagcatggttacaagccttgagtgatatactgatataatatacaacactatgtacaagaagagaaaaaagatgtggtttccaatcatgtagcttccacttctattcaataccatctacaagttccgcagagttctaaagtgccaaatgcccatgaaaggaggtttagcttgcctgatcccatctacaatggcttcgccaataatcctttcctcattaaggcagaaaatgcacatatgtactttgcattagttagatatttaatgtacaaattcctctgcaaaaatctactagaatggactaaatcgaccggacgcgtgggcgcacgcgtgg

SEQ ID NO: 13639 - DNA, 194 bp, Oryza sativa
  Clone ID: PAT_MRT4530_19653C.1
gaaaacccctttttcaccttctgaacggagaaatcttaaacggaggaagatgtgcggggccgccgtcgccgccgacgccatggctctcgctcttcgagctctcccccgacgactccttcgccatcctctactagactacatgcccctcttctcctagaataccgaccacagcaagctaatccgggatgagcgca

SEQ ID NO: 13640 - DNA, 648 bp, Oryza sativa
  Clone ID: PAT_MRT4530_19654C.1
atgccgtcccccgacgccgccgccggcgatattgagagcgccctcgacgacttcgcccgcgccgacgccgactgcatcgccgccgccctcgcctgcggccgcaccagcttctcctaccgccgcctccccgagccgcgccgcctccgcctcaccgtccgcaagctcgacgactcctacttcgatgtgcaaatcgcgaggtcagccgcggtgtgggagctcaaggcggccatcgaggacgtgttcgccgcgctctacgatgaaacggacaacaaggccatctcttggcagcacgtgtggagccacttttgcttatgtttcaaggacgagaaattgacagatgacaaggcaacattgcgtgcatttggtataagagatggtgatgaggttcattttgcccagcatctttctgttgaatacagaccctgcaagtccctttccctcagaaggtcaaggacttcattggatgatttcagtgctaggtcaaggagtttgttggacgatctcggcgaagatgatggtgataagtttatcgacacgaggcattctactagtgttttggaggaagggctatatgtttatcagcacgatgaggagcgcatggaagagagtcgcaagaagggaggcttctttagcgctatgcttggttga

SEQ ID NO: 13641 - DNA, 890 bp, Oryza sativa
  Clone ID: PAT_MRT4530_19655C.1
tatttttgaaaaggaaaaagggatttattgcgtcagcggctagggttttgcggtggaccaggcgcacggcagcggttcacgggaacagacggccgagatcgatcttatccaaaacgaacggccgagatcaaccgatccacggccgggccacggcagacggccatgatgacgtcagcggcgacgtcatctccggcggcggctcgggagcacttgctcgccggcgaacgacggcgcaaggacgtgaacggagggcaccagcacgtagagaacgtcgcggcgaactcaccgatgaccaagaaaaaggcggcggcactcttcgacttgacgacggcgacagtgctccggcggtctttagcgacggcgaaggggcggacgaggacggcggtgacttggcgaccacgatggcaacctccccgagcgacgacgacgaccggaacggcggcggcgcacggctggagcgacggcgacgacagcggctcaaggtcacacggcgctagggcgcttccgacagcgagagacgaaggcgagggtggcggcgggggttgaaaggcggcggcgaaggcccacggcgaccggcgacgcaaaggaaagatgaggattcggaggaaagagacgaatccgactcgagatcgaatccacggatttccaaacgattttagccgacgattccaaaagagaaaaggtagaggagatctcgggaaacatttcccctcaatcgatttcaccggagaaggaaaggcgcggtgggacccacctgtcagtgaccggacgcacgcgcgcggcggctgcggactgggccgactgggccgactgggccgagggagagagagaaggttttgggccgactttcggcccaaagccaaaagagacttttaaaaacattttttcaa

SEQ ID NO: 13642 - DNA, 370 bp, Oryza sativa
  Clone ID: PAT_MRT4530_19656C.1
gaaatgggatgaaagctgtggtcgattttatcatgaagcctgcctcctcgtgatgcgctggagatagactgcatggttagagcaacttgctgatagacgatgcatacaggctgactatggatgcatacactatcgatagactcacgcgcatactggcatgcacgacatccgttttattaacgcgggatatcaaaatgcaatgtctgcctacctattaactgagtactaatgtaagcgctttgaggtctggaagatagctataatcgacagcatcactatatatactataaatctttatgcaacattgcgaccaccactatcaattcattcttgagagcgctaggaacatcctttgcacatggtgccacac

SEQ ID NO: 13643 - DNA, 295 bp, Oryza sativa
  unsure (1)..(295): unsure at all n locations
  Clone ID: PAT_MRT4530_19657C.1
gcgacgctggcgaccctggcgaccgtggcgacgctggccacatcagtatcgcctctactgacggttnggtcagtgacttcaaggagccaggatataatgcaggctgacaacatccaagcggtgctggagcttcgtggatgctacacatcttttgggcattggtgtcggcggtattgactggcctagccaactacacgtctgtgcacagcatgtcttagagcatagacgaaaagtggcagcaggctctcactgttcacatttctgagtgctcgagttgtgtgactatgaaggagtg

SEQ ID NO: 13644 - DNA, 880 bp, Oryza sativa
  Clone ID: PAT_MRT4530_19658C.1
tatttttgaaaaggaaaaagggatttattgcgtcagcggctagggttttgcggtggaccaggcgcacggcagcggttcacgggaacggacggccgagatcgatccatccaaaacggacggccgagatcgatccatccacggcggctcacggcagacggaccctgatgacgtcagtggcgacgtcatctctggcggcggctcgggagcacttgctcgccggcgaacgacggcgcaaggacgcgaacggagggcaccagcacgtagagaacgtcgcggcgaactcaccgatgaccaagaaaaaggcggcgacactcttcgacttgacgacggcgacggtgctccggtggtcttcagcgacggcgaaggggcggacgaggacggcggtgacttggcgaccacgatggcgacctccccgagcgacgacgacgaccggaacggcggcggcgcacggctggagcgacggcgacgacggcggctcgaggtcacacggcgatagggcgcttccgacggcgagagacgaaggcgagggtggcggcgggggttgaaaggcggcggcgaaggcccacggcgaccggcgacgcaaaggaaagatgaggattcggaggaaagagacgaatccgactcgagatcgaatccacggatttccaaacgattttagccgacgattccaaaagagaaaaggtagaggagatctcgggaaacatttcccctcaatcgatttcaccggagaaggaaaggcgcggtgggacccacctgtcagtgaccggacgcacgcgcgtggcggctgcggactgggccgactgggccgagggagagagagaaggttttgggccgactttcggcccaaagccaaaagagacttttaaaaacctttttcaat

SEQ ID NO: 13645 - DNA, 873 bp, Oryza sativa
  Clone ID: PAT_MRT4530_19659C.1
gcatgcgcatcgagaaagagaaaaggcaggggatcttcgggatctcctctatcttttctcttttggaatcaccggctaaaatcgtttggaaatccgtggattcgatctcgagtcggattcgtctctttcctccggatcctcacctttccttcgcgttgccggtcgccgtgggccttcgccgccgcctccttgcccctataaaaggatccccggtgtctcctctacccgccgccaccctcgccttcgtctctcgccgtcgggagcgccctagcgccgtgaaacctcgagccgccgtcgtcgccgccgctccagccgtgcgccgccgccgttccggtcgtcgtcgtcgttcgggaagatcgccatcgtggtcgccaagtcgtcgccgtcctcgtccgccccttcgccgtcgctgtcaaccgccggagcaccgtcgccgccgtcgacccgaccttctccgccgcttcgacctcgtcgccgacgtcgttcgttgctcctccgccgttgctttggtcaccggtgagttcgccgcgatgcccgcaccgttttggtgtcctccgtttgcaccgccgtgccgtcgttcgccagcgagcatgcgcgctcgagccgccgagccgtcgccggtggtgacgtcatcgccgacgtcatcgtcgtcgtttttccgtgagccgccgtagacccgatcgatctcggccgtccgttttggatggattgatctcggccgtccgttcccgtgaaccgcttttgtatagcatggttcattgcggggcaccagactgagaagtggcggagataagcccacgggggtcgctggggagtccatgccttgtttataagggggtgattatgatccaggaatggtgcgctgtggtggat

SEQ ID NO: 13646 - DNA, 1059 bp, Oryza sativa
  Clone ID: PAT_MRT4530_1965C.1
atggcgagggcggcggcggcgggtgctccgcctccgggcgctggtcgagtcggctggcggctagggctcgcgtgccttgcctaccttgctctttggcgaatgggtggtgtatttatccatggcggcgggggaaggagcggaggccactggcgagggtggcgtagactagccgacgttagggggaggaggccagtggggcgcgggtcccgcgccaccgcccgccacgtgctccgtgaggtgggccgcgacgacgtcgtcgtcgtcgacggccgcgccgtctctgcccagttcgccatggctggcgtagacccgggcactgcgacggtggcaggaaggcgagtgtatgtgaggaggccggtggggcgaggcgggaccggcgtcaacggggcgaagcggcggcccgtcttcgacggcctctacagcttctgccagacctacgccggcggctccatcgacggtgccatcaagctcaaccacggccacgacatcgccatcaacaccctcgagctcgcctgcgcggcgacaccctccccttctccaacggcgctgcccccgccgacgccgacgtcctcctctttctcccacctcctgggcctctctgaccctaagacggtggggcaggggagagggcgagaaccgcggcgacggcctcccgcgcccaccctcacccgccgccacccagctcctctcctggtaaccatgccgcccgcgccaagctccatgtcgccggctgcgcactactctgcccccgatggccgcaccctgctcctcccccgacggtcgcgctcagctcctcccccggcgacggtggcggcgtgggaggacggcagtgagaggccgtgcggcaccggcaatcggtgtccaacggtctcgccgagggcttctgcctcatcgccctcctcgagttcctctactaggaggcccccgacgccatgcgcagcctcacctccgcctacgccgccctcgccgatggcctcggctgcttcttcgccggtggcctacgccgcccttgctggtggcctccgctccttccccctccgtcctgagaagatagagtga

SEQ ID NO: 13647 - DNA, 1890 bp, Oryza sativa
  Clone ID: PAT_MRT4530_19660C.1
ctaactctccttgcagtcattgatgcgccagaccccagtccccagcgatgcttcctgctcggacttccacagcggcgaaccaagcccgtcctggaccgggtcatcgtctacctcaaagtcgtcatcctctaggtcaccctcgataaaggggcctataagcgggttcgcggctgacccacttacagccctatgcaaaccatgcgccgatgtgccaacgccagcaaacacgtcaggtggggaagtgcggaacccacggccaatggtaagaccgggctgcgtgtgtgcacgaccagcctgcgaaccttgcgtcgacgtgccaacgccagcaaacatgtctgacggggaagtgtagagcccgtacctctggtagaaacaacagagtgctggcctggggctgcctgagtggaggaccgccgatggagtccggatggcaccgtggatgacgacactttgagaagttttgagaccaaagtaccctgactgtggagaaagaggaagggagaggggagcgtcggggatggttgagtcggacgacagtcgtgcttgctggcagcggcgacgacgaggaaagggatttatgcgcccaatccttgtctccccgtcggcggcgctgtcttccttccccctgtcggtggtggcgtcctcctccaccaccacactccccgtcggtgccctcctcccccctgatgacgtcagcggcgacgtcatctccggcggcggctcgggagcacttgctcgccggcgaacgacggcgcaaggacgcgaacggagggcaccagcacgtagagaacgtcgcggcgaactcaccgatgaccaaaacgacggcggaagatcaacggacggcggcggcgcgaggaaaaaggcggcggcactcttcgacttgacgacggcgacggtgctccggcggtcttcagcgacggcgaaggggcggacgaggacggcggtgacttggcgaccacgatggcaacctccccgagcgacgacgacgaccggaacggcggcggcgcacggctggagcgacggcgacgacagcggctcaaggtcacacggcgctagggcgagcttctcagaatctgtaccaaaagctggactgtttgggggagcttctgattctgggagaagctgcagcaggccagcaactaccctcatgttgtaccacttgtggcgttcagcttcatgtaattctttggtcaccttggtcagcttcacacgctcagctggcccgaccaattcgatcaaccgtcctaacgccttagacttgcctatctcgttcttcaagatctctttgtatgctaacaagcaagccttcttacagagcttgccttcatatttcggtgcatcatggaccaaccttaggtactcagatttggtgcccttgtatggcgccaggtacccaatccggtttgcgtatcccaagtccactagatagtacttccctggaggtggatgagggaaaacatgactgtatatactcattgcatcgtggaacaccctcatgtcatgcacgtacatgaacgcggtgtccgcagaatcgtccatgaagtattccaccggaattctttccaaatctttatcggaaacttcttcgcttgtatccgtaggatcagggcacacgtcctcccgtgcgaggtgctcaaggagggtctttcttccttcaggattggacagctcaaaaacattcactgcatctcgatccttcagcagcttgaacatggcaacccacaagtgcggtgtcgcctctgtgaccccgcactccctacagagtgccatgatgcgctcggccttttgccgcgcgcgaacgtcatcatcatccctcctctggtctaaacggccaaacagggtgtcaattgatgtcgctttgtccttctgaagattgttgtgcacctgcat

SEQ ID NO: 13648 - DNA, 176 bp, Oryza sativa
  Clone ID: PAT_MRT4530_19661C.1
catgcgtacggccacgcgtagtagtaagggtaataaatgcgcgttccagatgtgttacagtgtaggtgtactagtgtaccctacttatatatttttcatatataataatctaataatgataataatgtcgtactgatacatgcgtacacccccttgaaaaaaaaaaaaaaaaaaaa

SEQ ID NO: 13649 - DNA, 443 bp, Oryza sativa
  Clone ID: PAT_MRT4530_19662C.1
ggaaggaggggttcccaatcccctcctctgaacacagccttaagaagtacgaccgacggcggaggcgaagctcgtccggaactccgtctgtggaggcggagatcgcccgcgtggtcggcggcggaggcggagcttgcctcagttgcctgggagtccggcggcggaggcaaagattgcccaagcggcacttgtacgaggagcacttgtacgacagggacaccggcaactgcaccgccggcgtcgacttccacaactccatctcgtgcgtcgccgtcatggacgcggccaccgacaccgccctccgctcccgccaggacgccctccgcctcgagtgcgactccctccgccgcgacgccgcgctcctaccacgcccgcccccgccacgcccatcgctcgctctcagccatgcctaccgcccacctcgcccatcgccggctacctag

SEQ ID NO: 13650 - DNA, 238 bp, Oryza sativa
  unsure (1)..(238): unsure at all n locations
  Clone ID: PAT_MRT4530_19663C.1
gtacacaccaaacagggcaggggtgtatagaggttatgattatccacaattcatagntatttaccctcaaagagcacacactacattctcaaggtagttggagggggaaaaaaggagaaaaaaaaatgctatcactttttgacgaactggatgccgttagcctgggattacctcttcatgaatcgcatgaacctgtcccactcccgcggcgtgctcattacgaactctacctcaatta

SEQ ID NO: 13651 - DNA, 1341 bp, Oryza sativa
  Clone ID: PAT_MRT4530_19664C.1
ttactgttgcctacccaagactgaatatttgttcatctccttgcggtagaggccgtgttcgacgtcgtcggcgttgttgacgacgaccgcgccgacctctccccgattgcgtgccgtgccatggccgtcggacatgtcgggggcatgctcttgcacatcgcctgctaagatgactccatgaccacctcgccgctgcagccgccacaacgccggctccgacgaccacctcgtcaccatggccggcaccatcgcgcctgtcaccacctcgcagccaaggctgcccacacaccagccgccgccgctacctcgtgaccgcggccaccaccaggccaccgccgcgcccaccaccagcagcaccaggccactgccgcgcccgccaccactgcacccaacacaacctcgccgcaacgaaccacttgccgccaccgccgccgccgccacctccgcctcaaacggatcagacgccgccgcctcaaatggatcagccgccgccacgccgcctcctcccacgaagcaagttgccgccgacgaagcaacttgccgctgccacgccttccaccactcgaaattttttggtacctcctcatgggcaaatttgtacctagaggtaccacttattttccaccgtccgatttcgctgattgaatggctgggatttggtaccggacagtcccgatggtactcgaggcggagggcgtcctggcgggagcggagggcggtgtcggtggccgcgtccatgacggcgacgcacgagatggagctgcacaggagggccgcggccgccgctcatccctttcccctctccttctcttccgattccctatcctttccagtgcagcgacggtggtcgggctgagaaggcggcgacggcggtctgggcaaagaaggcggcggcgtcggcggtggttcgggcagctgcatgtacatgaggcaggcaggcaggtagcaatagttgcaggtgatgaagacgccgccgttgaagcactcggcgagggcgcagccgatcctggtgaagttgagcctaactatgaagacgaagtggccgcacttgtggaagtcgacgccggcggtgcagttgccggtgtccctgtcgtacaagtgctcctcgtacaagtgccgcttaggcaatctctgcctccgccgccggactcccaggcaactgaggcaagctccgcctccgccgctggccacgcgggcgatctccgcctccgcagccggacttccggacgagctccgcctctgccgccggtcgtccgagagtgtgtgcctcctccgttaccagccgtccgagcgcgtgtgcgagacagagagagagaggattgggttgatgaagggttatga

SEQ ID NO: 13652 - DNA, 552 bp, Oryza sativa
  Clone ID: PAT_MRT4530_19665C.1
atgactccgccgccgcgcctcctcgcgctgctcagatgcgcgctgcgcctcccgacgcttcctcgctccaggccgccgtcgtcatcgcacggtcccgacccctccagtatcccccccatcccgcctcctcctccaccgcgtcgccgatggctccatgtcgtcgtcgtcgtcgcgcggtcccggctggctgtccaccgcgccatcacagatccagccatccctcataccggactcccccatcctgacggccccatcccagcggcgaggaggcgtcgtcgcgcgggagatgactgtcgagccctgcgtcgtcgccttcccccgccgatgccaccacatcaaggcacctcacgcatggagctctttccccgaagccggacactgatgcttgcactgatgtaccatgttgtcatgggggatgatctagacgtgaggactggcaagccatctcttgatatgtttcttgctgagatgaggaggttcgaggtattgccatttttttctctcccactctttgtaaccggtttcgacaacttcgtgtggacgcttagtttg

SEQ ID NO: 13653 - DNA, 1082 bp, Oryza sativa
  Clone ID: PAT_MRT4530_19666C.1
atggccgccatggccaccgccccgtgttttccggccaccccgggactcccagcgcgcggcgccgtcgctgctaggagcaggatggccgccggaggaagcaggagccaacggcggcggagttcgtctggtcccaagtcgccccgctccagaaggcgcgccaaatccggcaggaatccccaccaccaccacaaccaccaccggccggtctcctttctgcttgcctcgctctctcgcatcgtcgcattggtacatcaacatcctgcaaacatggccgccatggccaccgccccgtgtttcccggccaccccgggactcccagcgcgcggcgccgtcgctgctaggagcaggatggccgccggaggaagcaggagccaacggcggcggagttcctctggggttttcctgtgccgctcctccacgacgggaagcagtaggatggaggactacaacaccgccatgaagagaatgatgcgcaatccctacgaataccaccacgatttaggttcggaatattcggtggtcttgggggccttggttgtatgaatactgctataattagtgaaagcttgattgttggttcgcaatctcgaaaaccagaagatattgatttgttaaaagcaggggaggaagtagcatttattctttgcttacatccggacaaggacattgaatattggggcattgatttccaaactgttgtcaataggtgcaaagaacttggcataaaacacatcagaagaccgccagtggacttcgatccagattcgttgaggactcaattgcccaaagcagtcgcatcactagaatgggctatatcggaaggcaaagggcgtgtctatgtccattgcactgctggacttgggagagcacctgcagttgcaattgcttacatgttttggttcgagaatatgaatcttaagacagcttatgagaaactaacttctaaaaggccctgtggacccaataagagagcgatccgtgctgcaacttatgatcttgctaagaatgatccacataaagagtcttttgacagtctgccagagcatgcttttgagggcattgctgactcgagaggaggttaa

SEQ ID NO: 13654 - DNA, 2154 bp, Oryza sativa
  Clone ID: PAT_MRT4530_19667C.1
ttagtgttttaaaatcaagacttctggtgtcttcaggagcggcgcggtgcacccgtcatcgtcggtgcatcccttgtcaaagccttccatccattttccgatcatcgttgtttgcttcctctccgattccgccatcccaccaccacacaaatccaccgcgctatctacgcccccacgctctccccgcgcgatgactccgccgccgcgcctcctcgcgctgctcagatgcgcgctgcgcctcccgacgcttcctcgctccaggccgccgtcgtcatcgcacggtcccgacccctccagtatcccccccatcccgcctcctcctccaccgcgtcgccgatggctccatgtcgtcgtcgtcgtcgcgcggtcccggctggctgtccaccgcgccatcacagatccagccatccctcataccggactcccccatcccgacggccccatcccagcggcgaggaggcgtcgtcgcgcgggagatgactggtggggagagtgaagagggagaggcggatggcaaccctccctctgtcacgctcgctctccaatcccccttcacagtcgagccctgcgtcgtcgccttcccccgccgatgccaccacatcaaggcacctcacgcatggagctctttccccgaagccggacgtaatggccggtccctcgctaaggcgcccagcagatccggccagttgcctcagcaacagagagtccacggacttctccactgctctgtaagaggatctggactcttctgccaacgaggccactgtctgatccaccatcgtaggggattctttccgttccctaaatgcaccacatatcttcccctcctgaaattttttttttcgaatgaaattgatagaataccaatggctgttgcaacaagacgtgaggactgacaagccatctcttgatatgtttcttgctgagatgaggaggttcgaggtattgccatatttgcagattaacatgctaactctgccaatccatcacacgattccctctgagggctaatccattcaattaatttcctggactggtaatatctctcccatagtggggaatcatgtgtcttttgtacaaattacataggttattaaactggattctccatttcactttagaagttgattttcttgctttcttggctatatttcctgtcatcacatcttacatttacaagtaggaacgaaatgatggccgactaccttcttgatcactgcgatgtgccccttcgcttcaaggatatgcataaatccaaggttgacattgtggccaactggagattttggtaaaatcctatcatgtttcaccatggcatttcactgtttggcgcacggtatttaggagctatttgtatagtaaatgctggaatattgaagtaaattatatgttcagcttattaactgcattgcgataagctttgatctagatccggtttcaattttcatttgtgtggtcgcatcctttaatttatatagcttcataagagtatactccgaagtacatgccgttttatgtatttttatgccttcatattctgattgtctaatggctctaaaacaacagacgggaactacgatgtctgaagttttccatgttttcttccttatgaaaatgatatggagctgtggcaagcttggcaatccctgttgctgtccagagtaaagatttcatgtggcttgcgagattgtctcagcaagttgtatggttgtgcagctctttggtgacatcaaagaagaaatcacaatctggagggaggcaggcttcatggattggcaagagtatgacacagcggtgcagtggtgggagggattcgtttcaattcctggaataccgaagaagcccctaaaaacgttgatcatcatggtttcatggatactatcgaacgaaaaaaacgcaaggatcttccggaatacggcgcaaacgcccacagctctgatccaggccatcaaagatggagctgcactttggtatagggcaggcgcccgatgcctaactgagtttgtaccgtcgggagaatcgaacgaaagaaacgcaaggatcttccggaatatgacgcaaacgcccacagctctgatccaggccatcaaagatggagctgcgtatagggcaggcgctcgatgcctgactgagtttgtaccgtcgggagagtaa

SEQ ID NO: 13655 - DNA, 142 bp, Oryza sativa
  Clone ID: PAT_MRT4530_19668C.1
aacaaatcacttgttcaaagcgaaaaaaactttgcaatttccatggtcgggttaaaaaattggtttgaaacccattttttccagtgacaaaaggggaaaatggggccttacaaaaatttgccccctaatgttccctaaaaac

SEQ ID NO: 13656 - DNA, 1230 bp, Oryza sativa
  Clone ID: PAT_MRT4530_19669C.1
atggagatcgccgacctccccatcgccacctcccaccgcgccaacctcctcgccgccggctactcctccctcgccgcgctctccgccgcctcccctccccgcctcgcccgagatttgagcattgaggtacatgaggctgaagaaatcctcaaggttgccgtgggcgccaacaagtccaagggagcagatgggcctagcaccagcagtgttctcaaaggtgtgcaaaatgcatgggatatgctatctgatgagcaatcacggaggcacatcaatactggatctgctgacctcaacaacatccttggtggagggattcactgtaaagaggttactgagattgtgattggcctaatcaacacatctagtttgattcaggtggtgtcccaggagtcggtaaaactcaactggggtatgttgtacacaatattaaatgcaaattcagatgaagatttcactactaaagacctaacttttgtcaggattcaactagcaatcaatgttcaaattccagtggagtatggtggacttggtgggaaagctgtttatatagatacagagggaagtttcatggttgaacgtgtctaccaaattgctgaagggtgcatcagtgatatactggagtactttccacactgccatgacaaggctccagccggacaagaaaaactgaagcctgagagtttcctggctgacatctactactttcgaatatgcagctatactgaacaaattgcagtcataaactatctggaaaagtttcttggggagcataaagatgtaagaatagttattattgacagcgttactttccactttcggcaagattttgatgatatggcactaaggactagagtgcttagtggattatcattgaagttgatgaaactttcaaaggcatataacttggcggttgtcttgttgaaccaagttactactaaattcacagaaggatcatttcagttaactcttgctctagttattgcttgtagcaagcaaagctgtggggtccttctggttgtagttcactttgaaaaccatgataatgcaggtgacagttggtcccactcatgcaccaatcgactaattctgtattggaacggcaatgagcggtatggattcctggacaagtccccttcactaccagtagcatcagcaccatatgcagtgacagttaaaggggtgagagatgctgtgaattcaaacagcaagcgagtccggggcctcccctga

SEQ ID NO: 13657 - DNA, 507 bp, Oryza sativa
  Clone ID: PAT_MRT4530_1966C.1
atggcgagggcggcggcggcgggtgctccgcctccgggcgctggtcgagtcggctggcggctagggctcgcgtgccttgcctaccttgctctttggcgaatgggtggcgagctcgagggtgttgatggcgatgtcgtggccgtggttgagcttgatggcaccgtcgatggagccgccggcgtaggtctggcagaagctgtagaggccgtcgaagacgggctagtcctcgccgacattgaagcgcttgagcgcccgaatctggtcctactgggtctccggcacacccgccgcttcgccccgttgacgccggtcccgcctcgccccaccggcctcctcacatacactcgccttcctgccaccgtcgcagtgcccgggtctacgccagccatggcgaactgggcagagacggcgcggccgtcgacgacgacgacgtcgtcgcggcccacctcacggagcacgtggcgggcggtggcgcgggaccgcgccccactggcctcctccccctaa

SEQ ID NO: 13658 - DNA, 455 bp, Oryza sativa
  Clone ID: PAT_MRT4530_19670C.1
ttgatgacttatcttcaacaagagtgtctaggaaaagggattgtgaggatgtgggcgaatcttcccttaaaaaatgtaaagtaaacccagttgaaggagcttgggattacgataagggaagttcgtttttagagtcggactggtttttcggtgatgatgagtttggtttagattccaatgagtataaagtggatacaattcccttagatcagatttctgaacagccaatcgagccaaataacaacgttgtttacataacggcgactcaaccccaccaacatccgatgagtatggggtctaattgccctgtttcagttaaattcggagcaattacccgtcattaccgagaatgatgtcagctgataggctttcttggcctaatcaattgattttatcagttcctcaacctttgttgcctgtttctctcagagctgggtcgacagggaataatttga

SEQ ID NO: 13659 - DNA, 449 bp, Oryza sativa
  unsure (1)..(449): unsure at all n locations
  Clone ID: PAT_MRT4530_19671C.1
aaaggcncggtgaagtcgactgcaaaggatcatgtactatggcgattgtcagagtgagagcttctggaagtgatttnaggtgcagaggcttncgagggagacgacgtctctggcancgagggcgaggatgtcggcgcaggagaccacgccggggcaggcctttctcgacggccggtcttgaccccggttccacggtgtcgaaacccgtncgcccggcgagggacatgttgtcccggncgcgtccttnttcggncgtcgtccatttgggggcgaaatcaaggcccgaaagcgtccaccaccccctgtaaaaatctttttactccagtttttattcaaatagtgtaaaacccaccaaatgatcttttctgcattttctacttnccaaggtgctgtttataatttatttttatncaattagaaagttaaactaaaaaaaaaaaaaaaaaaaa

SEQ ID NO: 13660 - DNA, 1401 bp, Oryza sativa
  Clone ID: PAT_MRT4530_19672C.1
atggaggcagccatttcggcaattgcaagtgacctaatgagccggttcatgtcctttctaatcaagaaatacacagtaactaccgtgaaagatgacaagacaaaaaggatgaaggaactcctactcagggtccatgcagtggtcgaggaagcagatgggcgatgcatcacaaaccctaagatgctaactcaattcaagatgcttgcagagatcatgtatcgagggtactacatgctggacacaatcaattacaaacctccaaatgatgaggaggtaagaagattatcaaccgtgtcagtttctttgaagcgctcacgcacaatttttggtacacctagaaacccagctattgataatgaattagaaactgcactgaataatctggaagctgctgtttctaatatgaatgagtttgttgtaatgccctatgatacttacctctacacagataattttatgtttgctcgtcatgtcgagaagcagcagattatcaacattttgttgcaaaatccttgtcatcatagtgctcctctcgttcttccgatcatcggtggttgcagggtaggaaagaaagctttgatcagccatgtctgcaacgacgagcgtattagatcttacttttcttttattttgtacatcagtggagacagcatggggagaatagagtatgcaaagttaaaaaaggagacgtctttgattgtttgtgaatattttacggacattgatgaagatgactggataaacttctattctactataagtcagatgacagctggaggaagtaacgtggtaatcataagtaggattgaaaatcttgcgaggtttggatcagtaaaggcagttcgtctaaatagtttatcaaaagaggtgtacaactatcttttcaagaagttagcatttggaagcattgatgaaaaggaagatcctaagatggcatcggttgcaaatgatcttgcagtagtccttggtggatccctgataacagcaaatgtgattgctgacttgcttagaaggaatcatgatgttcacttctggctccacatattgcaacgcttcgaggggatggtcaagaataatttatcaaaatatggtgaacatccaaaagatatcattgagaaagagaagccagtagatgccactagatttgtgtcatcttatcctactcgtcttcatatcatgccacctcgagtagaaagggacgatcttccaaacataggaatgccaactatattcttcggagatctaatagctggatctgtggcaattccaaatggtgattttgaaatagtaacatggaaatcacgaataccaccttatactaagtatgtatcatctggtacatcttttgtcgatgacaagaatggattcaaaactatgagaaagcgccgatctagtagttaa

SEQ ID NO: 13661 - DNA, 527 bp, Oryza sativa
  unsure (1)..(527): unsure at all n locations
  Clone ID: PAT_MRT4530_19673C.1
ccacgcgtccgagctgatgaagctggctaaggcgaccgtcgacgagttctttggcataccggtggccgtgagggatgacttggtccaggacctcgccgacggcatggaggcgatctttttggagtacatctccttcctcacgtcttgcggtagcaagcagagctacctcccgtcgctgccgccgctgacgaggtgcaaccaggactcgaagatcatcaggctgtggaagaaggcggcgacgccgtgccgggcgcccgtgtcgagcccgcgcgcccacgggcaccaccaaggccagggcggcatggcgtccggcggccagaacccgcggccgtcgaccagccgcggcacgcagcgcctctacgtccgcctcaacacgctccacttcatcctcagccacgtccacgcgctcgacaagtcgctctccttcttctcccgcggcaggtgctcgtcgtcgnccgtcgtccgncgncaccgnccgcctcctcgngccgtgctnccacttcgaccgcgcgcgcgccgcggggcag

SEQ ID NO: 13662 - DNA, 4377 bp, Oryza sativa
  Clone ID: PAT_MRT4530_19674C.1
atggccgacgacgaggctgccgtcctcccgcccccgcctccgctgccgccgccttgccgcccccacaggcagctccgcccgagggggtctcgaccgactgctgataccacccctcgcactagccagttggtggaggtgttcgaggcggcgctgcgggggaacaccatcgcggtgctcgacacggggtccgggaagaccatggtcgccgtcatgctcgcgcgcgagcacgcacgccgggtgcgcgccggggaggcgccgcggcggatcgtggtgttcctcgcgcccaccgtgcacctcgtccatcagcaattcgaggtgattcgtgagtacactgacctcgacgtgatgatgtgctctggagcatcgcgggttggcgaatggggcgccgatcattggaaggaggaagttgggagaaatgagatcgttgttatgacgccacagatactgttggatgctctgcggcatgcttttctgacaatgagtgcagtgagcttgctaatatttgatgaatgtcatcgtgcttgtggaagccatccatatgcacgaataatgaagatatacatcgtagaagatcgaaatgagcttgagagcttttcccctcctacaacaattgtgaacaaatactatgatgcttacatggttgattttgataatctgaaatcaaagcttcagatattttctgatgagtttgattctttgttggttggtcttcaagaatcgccatctaataaatttaaagacaccgataatatcctagagacttcaagaaagagcttgtccagataccatgggaaaatattgtacagcctaaacgatcttggtccaattatcacctctgaggtagtcaaaatacatattgaaagcgttaagccattatgtgattctgaagactgcattttttctaaagctagcttgtgcttacatatgtcttattttaaagaagctttaagtctaatagaggaaattcttccacaaggatatggtgaactaatgaaatcagaatctggttctgaggaattaactaaaaggggatacatttcttcaaaagtgaatacgctaatcaacatcttcaaatcgtttgggtcatcaaatgaagtgctttgcctaattttcgtagacagaattataacagctaaagccgtcgaaaggtttatgagaggaattgttaacttctcttgtttttcaatttcttacttgactggagggagtacatcaaaagatgctctgagtccagcagttcagagatttactttggatttgttccgagctggaaaggtgaacttgctttttacaacagatgtgactgaagagggcgtcgatgtacctaactgttcttgtgtgatacgcttcgacctacccagaactgtttgtagctatgtccaatctcgtggtcgtgctagaaggaacaactcggaatttattcttatgattgagaggggaaacttgcagcagcaagaacacatatttcgtatgatacagactggttactatgttaaaaactgtgcactctatagacaccccaatgctttatcctatgacttgtctatccaagggatgtacacctaccaagttcagtcaactggagcaactataaccgcagattgctgtgtcaacctaattcgtaaatactgtgagaagcttcctaaagataggtatttcatgccaaagccttcctttgaggtgaccattgaagatggattattcaaatgcacattgacgctacctcgaaatgcagcatttcaaagtatagttggccctttaagcagttcaagtaatttatccaagcagcttgtatccctagaggcctgcaagaaattgcatcaactgggagaacttaatgatcatcttgtacctttgactgaagaacctatggatacagatttcactacagcagatgaaaaatgcatatctggaccaggaacaactaaaaggaaggagcttcatggtactacatgtgttcttgctttatcaggaacttggattcatgacagtgaaaatattacactgaatacttacagaattgattttctttgtgaccaagagggtgaaaactatgctgggtttgttctcttaatggaaccagaacttgatgatgatgtggcaccctcaaaaatggatctgttcctgatccctaataaaatggtctacaccactgtaactcctcgcggaaaagttcaactaaacaaaaagcagttaggtaaagggaaattgttccaagaattctttttcaatggaatctttggtagattatttcatggttctcgaaaaagtggagcacaaagggattttattttcaaaaagggtcatgaaatacagtggaacacggaaagcatgtacttgcttttacctttgagggattcttcatatatccaggatgacctaagcatacactgggaagcaattgaatcttgtgctggtgcagttgagcagttgtggagttcgtatcaaggagatgaaaatgtcattcctgtaaattgtattccacaaaaaagaagagggggccaagaagaaattattcatctggccaataagtctcttcattgttccagcatcaaagattcagtcgtgctatcactgcatacaggaaggatatacactgttcttgatttgatcttagacacaactgcagaggactcgtttgatgagatgtatggctccactggcaaacctctgctcatggaaaaagaacaaattcatgctcgggttccacctgaactacttatccatctcgatattttggaagctataacaactttaagatgctgtgagacattttctctggagcgtttagagctgttaggagactccgtgctaaagtatgtggtaggatgtgaccttttcctaaggtatcctatgaaacatgaaggtcagctctctgatatgagatccaaggctgtctgcaatgctacacttcataaacatggaatatggcggtcgttgcagggttatgtacgtgataatgcttttgacccacggcgttgggttgctcctggacagatatcgttgcgcccttttccttgtaactgtggaatcgagactgcatttgttccttctcatagaaggtatatccgagatgacccatctttttttgtgggaaaaccatgtgacagaggtcataggtggatgtgctcaaaaacaatatctgattgtgttgaagcactggttggagcatattatgttggtggtggcattgctgctgcactttgggttatgaggtggtttggaatcgatatcaaatgtgatatgaagctattgcaggaagtgaagttcaatgcatctcatttatgctccttatcaaaaataaatgacattgaggaactggaagcaaaactgaagtacaacttctcagtcaagggccttcttttggaagccataactcatccatctctgcaggaattaggtgttgattactgttaccagcgtcttgaatttcttggtgattctgtgctggatctacttcttacacgtcatctctatgctactcatactgatgttgatcctggagaattaacggatttacgctccgctttggttagtaatgagaattttgcacaagcagttgtaagaaacaacattcacagtcatctacaacatggatccggaatacttttggagcaaattactgaatatgtcaggtcaaatttggagtgtcaagggaaagagagtgaattccttcaacatactacatgtaaagtacctaaggttcttggtgacattatggaaagcatcgctggtgcagtatttatagacaccgattttaatgttgacatggtttgggagattttcgagccattgctttctccactgattacacctgataagcttgcattgccaccttaccgtgagttgctggagctatgcagtcacattggttgcttcttaaattcaaaatgcaccagtaaaggagaagaagtaattatagagatgtcactgcaactacgagatgagctgctggtagcacaagggcatgacagaaacaaaaagagggcaaaggcaaaagcagcatctcgtattttggcagatcttaagcagcaacagggtctttcaattaaacaatgtttgtccaaggctaaacagctggatatcgtgacttcagatcttcagtttgacttgacaagtttgtgcttccactcaaaatggagaaaggtggacctcgaagtgcgcttttcaagctatgcaagattttgcagtggccaatgccagaattcgaatttgtggaacaaaggttcaggactcctattgttatggatggggcgacaacaacaaacttcaatagctttgtttcgacaatcaccttgcacatacctgacgcaacaaccattacatttcaagtgtttggagagattaaagatacgtcttagagaaagcacttggtag

SEQ ID NO: 13663 - DNA, 473 bp, Oryza sativa
  Clone ID: PAT_MRT4530_19675C.1
ttgggttttttttttttgtttgggtttttttttttttttttgtgtatttttgtggattgtttttttgttatttatacatgaaagataaggaccaaaaatacttacagggtaattaaaagggcatccaggagcgaggggacacgagaaccgggaactgcagaggagaagaaaaaacagcggggaaaaaaggggaaaaaggggggaaaacaaccagacccagacatcaaagccagggccctccactataacgtaggggaaaacaacccaggccacgcctctaggatcagggcactaccaggccgtgttgtggggcaccgaggggcctgtaaaggggcccgcctccaagacagaaatgacgaacgcaacgggggctgagaaatagttagctacatggacaggatggagctagcggcgggagcagcggcggacaaggccggcggagaggtgggaagaagcgagcgagcgagcgagag

SEQ ID NO: 13664 - DNA, 1935 bp, Oryza sativa
  Clone ID: PAT_MRT4530_19676C.1
tcagtcagaatattcgtctccactatactgatccatatcttctactcgagaatgcttaggatggtcatagagatcatcatcaaccgaagatctttgtctcttcaaattctcagtaatcctggagggcactgggaaatgctcaatttcatccccagatctgccttcttttgcttttttcttctgcaatactagcttagtaggaagaggcaaatattttgcaccatcgtcatcaaatgtgacaagatatgtcgtgggatcatctttgtcatccccccttacttcccagtggtactccctaagccaggaatactgaatatcttcagtttcatcatccaagtccttgctaagctcatggggggatggaaccatgtatgctaaaaatttctcttgttttgcagggtccgaaccattgacaagaaaacttttcatcacagcccgggattcgcattcatcacgctcagatctctctagcttgttgtactgctctgaatcggcagtaggatctccatcaaaattcaccataacaaactgatcatcatacctatcaaaatcaggaagcaaaggcagaacccattctgcttccatcccacgtttagtctggtgaacagggcgtgatttagctgccctgaaggagtcctcaatggctttaatttgcttctctctgtcattaatattttccaagaaagtatttcggccctcccttgattctcgcctttccttcgcttgcttttcagtaatggacatttttgctgcatcggtgctaagtggcgaaatatattgtgttttgaccagccaagacatacccttgtcggtgggcctctcttttttccttataccatcttttttaacaggggtgagaacctcatcatcacgcaatagctcttcatcttctggagccatgggtggctgaacaggaggagtactaaaaatagtttgtgcataagttaggtatgctaaaaagaatcttcttataaggatagcagctaagaatacatatatctggctcaattcatacttatatacgctcatatcaagtaggtcaagaggtattccgagatcctcggggacaatcattttgggtatgtagttcttctccaatgaagtgattctgtatttggtatatcggtccttatccttgttcagtggcaaccattttagctgagagcttggatctggcagctcattcctaaacttgtgtttgcagaggaaggtcgtcggcttcttgaggcgattctcaaatctctcggcgttgggagctgcggcggggcgagtcgcggtcaccgctggccgggacccacccgatggctgctgatggtggcggctctgcggctgctgggcggcgcgcacctgctgcgtcttctgcagaaccgtggcctgtgactgccgcatcatctgctggttcttccgatcctcggcccgctgcttctcgtactctcgctttttccgagcacgccgctcctcctccgtctccgcccttggcagcgccgacttgctctgctgctccctcggtggaggcggagcaagctgggcctccctaggaggcggctgcgtgggagaaggtggaggcgggggtggcgcccaaggtggaggagacggcggcggcgggggcggaggaggcggctggctgctgttcaccccgtacggcggcggcggcggcggcggctggtagtacatctgcggcggcggaggcggctgctgttgctgcgggggaccagggccgaagttgaactgcggctggtgcggcggtggcgggcccggtggcggcggcggcggcggggccaggaacggcggcggcgccccctgcggcggaggcatgtggccgtacgccggctgctgcggcggcggcggcccgtacgggttcatcggcggcggctgcggcgggaacccaccctgcggcggcggcgggtgcggcgcgtacggccggtacgacgccat

SEQ ID NO: 13665 - DNA, 423 bp, Oryza sativa
  Clone ID: PAT_MRT4530_19677C.1
gcctaagttcccccgaattcttggaaggagaagagaatcccgtaaccaagccgtcgccgccggtgccactatgcaccgaaaccctcgttcttgctgcgggccgccggcttcctgctgcggcccttcttctacttcgccgccggcgaccaaacgccggggctccctccttttttgcggcgcccgcccctcttcttcccggaggggtgcccccaccggcgcgccttctcgacggcgggcttcggcaagggatgtcgacgaggtgaaccgcaagttcgcggaggcgcgggaggagatcgaggccgccatggacagcaaggagaccgtctactttacgaggaggccgcctgcgcgcgcgacgccgccggggaggccctcgcgggcttcgagtcgctgattgcgcgccttccgccggccgacgccgac

SEQ ID NO: 13666 - DNA, 263 bp, Oryza sativa
  Clone ID: PAT_MRT4530_19678C.1
ggagacgtggtgtctttgaaggcgtaattgaagagattcatcaacactggaaacataaagaggttgtgaaagtaattaccaagcagaaccaagccagccagatcacgtacacatctatgatgcttgagtcaatgaaatacttcgctcaggagaggaaaaagtccattgatgaattgaagagagaactgatcccaataaactatgcattggtcgcccaaacgagagcactcaagcagaaggacacagagaagcacaagtgctga

SEQ ID NO: 13667 - DNA, 410 bp, Oryza sativa
  Clone ID: PAT_MRT4530_19679C.1
gctgtatataaaaccgacccccattgctggctccatccatccatccatctatccgtctcacttcctcccctgttccgttccatcgcccgatctgcttcttctacttctgtctgctcttaattggagtaccaagttatcacctgcagttccctgataattttgggaagaggcaaggacaggatgccctgggcagggacgacgtccgttcggctggcggtgttcttccgcgtcatcctgtgatcgatctggtcacgggcaaggcgatcggtcaccggcggtgaggggatccgagccgtgccgcggcggaggacatgtgcgttgggttcaacgggaggagccttgacaccgtcgttatgacaagtggcgccgtcgcatattactacagattgatgcaagtgtgccaggccgaa

SEQ ID NO: 13668 - DNA, 378 bp, Oryza sativa
  Clone ID: PAT_MRT4530_1967C.1
atggaggacgagccgccggagagcagaccgccggcggcgagggattcggcggtttcggcccatgagaagaggcagatagggtaccgatccaatcttgacccgaatttaactatttgccattttgaggcgcgtggcgcgctccctggcgaccaacaaatggacagcgcatcggcgaggaagcccgcgaggccaaagagaaggcatgcggcggagaaggccggggtggagaggaggcggcgaagcgtggcgcggcgggaggtggttgccgaggagaagaccttcggcgagctcggcatggcttcggcgaactcgccggccgctgtcgcgtggatcggcgaggcacgtcggatcggagtcgggggagacgagaaggagtag

SEQ ID NO: 13669 - DNA, 2354 bp, Oryza sativa
  Clone ID: PAT_MRT4530_19680C.1
atggagcacgccgacgcggaccgcacgcgggtggcgcccgagatcgggagcctgcacgacgaggacgcggaggcggacccggcgcgggcgcgggagatggagcggctgcagccgtggcgggagcaggtgacggcgcgcggggtggtggcggcggcgctgatcgggttcgtgttcagcgtcatcgtgatgaagatcgcgctcaccacggggctggtgcccacgctcaacatctccgccgcgctgctcgccttcctcgcgctccgcggctggacgcgcgcgctggagcgcctcggcttctcgccgcggcccttcacgcggcaggagaacaccgtcgtccagacctgcgccgtcgcctgctacaccatagccttcggcggtgggttcggatcgacattgctgggcctgaacaagaggacgtacgagctggccgggaactcaccaggcaatgtgccagggagctataaggagcctgggattggctggatggtagggctcctcctggctattagcttcgcgggtaacctcagcttgattcccctaagaaaggctttggtcgtagactacaaattaacttatccaagtggaactgcaacagctgttcttatcaacgggttccacacagcccaaggagataagaatgcaaaattgcaactccatgggtttctaaaatattttgggcttagcttattttggagcttcttccaatggttctacacgggaggcaatgcctgtggatttgttcagttccctacttttggtctgaaagcctggaaacaatcattcttctttgattttagcctcacatatgttggtgcggggatgatttgctcacaccttgtgaacctctctaccctccttggtgcggtcatttcatggggaataatgtggccacttatcagcaaacataagggggactggtaccctgcaaacatacctgaaagcagcatgacaagtttgtatggttacaagtcgtttttatgcattgctctgattatgggggatggcctgtaccattttgttaaagttaccggtgtcactgctaagagtttacataatagatttaaccgaaaaagtgttagcaacacagcatcagaggagggtgatatggtttcattagatgatctacaacgtgatgaggtattcaagaggggtactgtcccttcttggatggcatacagtggttacttcttgctaagcatcattgcggtaatcaccataccgataatgtttcgacaagtgaagtggtactacgtgatcatagcctacgcgctcggcccggtgctaggattcgccaattcctacggagcagggctcacggacatcaacatggggtacaactacggcaagatcgctctcttcgtctttgcagcttgggctggcaaggacaatggcgtcatagccggccttgtggttggcaccctggtgaagcagctggtgctcgtctctgccgatctgatgcacgatctcaagacgggacatctcaccttgacatcgccgaggtccatgctcgtgggagagctcatcgggacaggcattggctgcttcatcgcgccactgacgttcatgctgttctacagggcgtttgacatcgggaaccccgatggctactggaaggcgccatacgcgctgatctaccgcaacatggcgatcctcgggatcgagggcatctcggcgctgcccaagcactgcctctcgctctccgtcgggttcttcgcgttcgccgtgctcacgaacgtggcgagggacgccctgccggcgaggtacaagaagctcgtgccgctgccgacggcgatggccgtgccgttcctcgtaggggcgagcttcgccatcgacatgtgcgtcgggagcctggtgctgtttgcttggaacaagatgaacaagaaggaggctgccttcatggtgcctgctgttgcgtctgggctcatgtgtggcgatggcatttggaccttcccttcttctatccttgctctcgctaagattaagccaccgatctgcatgaagtttacgcctggaagctaagaggtgtagtgtgtttaatttcatgggtggaggattgcagaaataaacagtgatgattaactgtaaatgtgtcttttggttgtagtgagctgctgtttgcctatgatccaagtcatgtttgtgttttaatttacctatcgaattagctgtgtttgtacacttgtacattttataacttgagaattgtttagtttggcatacataaaatatgttataactttttttactcacatgtataggattgatgactactacactgtaatctcaactaaggttgtgttcgagtatcaattattataatctttaaaataaatttgtttaaaaaaaaaaaaaaa

SEQ ID NO: 13670 - DNA, 486 bp, Oryza sativa
  Clone ID: PAT_MRT4530_19681C.1
atgacaaaaaaaaccttctccggcaagcagcggatgatggcgagcatcgcttggcagcgttgcgtcgtctacggactcaggcggctcgacgacgtccccgacaactccgacgagatggcttgcgacgtggctggagctggtgacgccttgcgggcaccgagtagtgacgctccggccggcattctcctcgagcaactagccgatgagttcgaagaagatgacgacataagcacccaaacacgaaaaatcgatttttgcgtgagggtaactgatgattctgctcaactgccagtcatgtttgctgggattattgtgaaggacattgtaaaggtagccatgttggttgtggcacaacctcaaagctgtataaatattctgatgaagctgtcgataaacgtactacagtcgaacaccgagaggccggtgtactacatattccattttttagtgcacaacctcaaagctgtatactatggcctggtttag

SEQ ID NO: 13671 - DNA, 405 bp, Oryza sativa
  Clone ID: PAT_MRT4530_19682C.1
ctcataggctgcgttcgttagcatggattgatcttaagtttgttactaaagataaatctaatgtatctgaggtatattataataataataataataataataataataataataatagtaatagtaataatagtaataatagtaatagtagtagtagtactaataataataataataataataataataataataataataataataataataataataataataataataataataataataataataacaattttaattgtgttggaaaaagaaaagaaaggaacaaagggaaaaaaaaagagaatggacagatggagtagtatgtgcgtactgcacggaggtggggccggtgggggcgcagtagctccgcctccacgacaactcaattgctctacagaagcc

SEQ ID NO: 13672 - DNA, 115 bp, Oryza sativa
  unsure (1)..(115): unsure at all n locations
  Clone ID: PAT_MRT4530_19683C.1
gatcgaatcatgcactttcattggggaatagcatgtatacttacgaagcaacacattattacaacgccaggtagncactagtcaggttttatagtgaaaatttgaaacgaatata

SEQ ID NO: 13673 - DNA, 1945 bp, Oryza sativa
  Clone ID: PAT_MRT4530_19684C.1
ttttttttttttttttttagaataatttataccatactcccatggcttctctgttgttcatccatatcatgcaatgagaataatatcagggaggcaattctgcgagcagaatgttccaagagaagcagttcaaaacatttatgaggacaatactaactgaagtttctgaggtgtactgctaaggtagcacaacagtttaacacaagccacgggctcgcagttggagcaaaggagcaacagctagctgtacaaaaagcaagatatattacacattatgttctcacggattcagaaagcctgtcctctgatcaagtccctcatcactctagttcctgtttttaactcctatcaaagtgtctcacgatcaggatgctccaggagaggtagagactggtctactggagacatttgacgacaccagacagccataattctacttggctgctttctttgcaccttgaagctgctccagcgcggtcacaacctgatccatgcccggcctgcatcgtgcatccattgacaggcactgcaccgcaagccccgcgatcttctgcgcagctggaagcgaatactgggatcccaggcgtgagtcgaggacatggatgaccctcctcttgttggtgatgtaaggtctagcccactccaccaggttgtgctgccccggaggccggttcttgtccagggcgcgctgcccggacagcaactccagaagaacaactccgtagctgtacacatcgctcttcgcggtcaaatggcctgtcgcgagatattcaggggcagcatatccttgtgtccccatgaccctggttgagacatggcttttgtcaccactaggaccatcttttgccaatccaaaatcagagagttttgcattgtagtccgaatcaagaagaatgttggatgtcttgaaatctcggtaaataactttggcctgatcactgtgcaggaaagcaagccccctggcagcctcgagcgcgaccttcatccgcaaattccatgggagaggctggaagtgtgatcccctcctgaaaaggtggtgctccaagctgcctctcggcatgaactcgtacaccagaagccgctgttcgtcctcgaagcagtagccgatgagcttgacaagatttgggtgggagagctgcccaaggtaattcacctcagccagccattccctgtgcccctggaagctgtcaagcttgagcttcttcacggcgacgatcatgccggtgcccggcttgacgggcgtcagcgttcgctcatcgatccaccccttgaacaccgagccgaacccgccctccccaagcaggctgtccggccggaagttcctcgtggagcccttgagctcgccgaaggtgaacttgcggaggttcgacgactgcaggatctccgtctcgctccggggagtcggcggcaccgacgacgacgccgacgccttggtgccgaacgtgctggaatcggccccgttcttgctgctgttcttggaacctgtccctgacgagttgggagcactgaacgaagggttgatctcggcgttcccctgcacgccggcgcagttccccatcacgagcacaccggcgccgcccgatcgacgtgcgtgcgtgcggcggcggcggccggcgttcctgccggttttctgtcggggttcttgcagactagctacgagcttagactagaacaacactgggtttctgactgggtagaacgaagctcaaggccggtgtggctttgtggtggtgtcatcccagcgtccccttctccttctcctgcttggctaggttggaagacctatcattgctgcccgcgagtgaagggtggtgggggcaggagggggagccgtggggtcagtcgcctcattgatgaaggaaagcgcgcgccccgtcccgcttttcttcttcttctcccacttcgcttctcttcctttacagtgatgttgtgcctcctctcgtgc

SEQ ID NO: 13674 - DNA, 423 bp, Oryza sativa
  unsure (1)..(423): unsure at all n locations
  Clone ID: PAT_MRT4530_19685C.1
gattaagtattgctcatataacaactattttgctacaagaggaaataagtaaaacaaaaatgaaagaactgttacatggtcaacaatttctgtcctacatccttttcatgtcaattgacatgagtacaagtacactacttctaattagtaattacacatgaaaagatttggngaaatgtacaaaatctattacacccaccaggggcagaaaccgtcagacttaattacgtattgccatctacaacataatgaatgaatgatcttacctacaaaatagttcctggaatggccaaaaaaaacatccatcggctgggtcgttatgctttcttgagttaagagttaagagtgttcccttttgttaatgacgtatttactgtacgtctttactaaaagccctgtaaatgaagtccctgaaccttttgc

SEQ ID NO: 13675 - DNA, 128 bp, Oryza sativa
  Clone ID: PAT_MRT4530_19686C.1
gtctaatcggcagctatagctgctggcctaagccacagccacagcaacgctggatccaagtcatgtctgtgacctacaccacagttcacagtaatgccggatccttgacccactgagcgaggcccagg

SEQ ID NO: 13676 - DNA, 410 bp, Oryza sativa
  Clone ID: PAT_MRT4530_19687C.1
aggggaattaagtctcattatcccccacagacctataattcgtctgaccgaaaagaaagaagaagataatacaggctcattggagttttccctggtcccgtacaattaacccaaggggggtgagcaagacctatttttttaaatgaaatttagcaataagatctatcaggaacagaatagttttttggaggaataacgcctaacttcagctcaaggctcatgaatcctggtgatctagcttcatcatgccttagtaggagtctaggaaaaacttttttgctcaccatggctctcgctaagattggatcatcatcaaagctggctttatccttttgcatgggtgcgtgccaaaacatttaatacatgggggacaaggtaaagcattggtttggaacctggaaatcaacaac

SEQ ID NO: 13677 - DNA, 216 bp, Oryza sativa
  Clone ID: PAT_MRT4530_19688C.1
atatggtagtttagacatggtgtctacattacgggatatcattatttggggttatatatgccggtgagaggtgggccgctgatgatgacagctcagtatgggtattcctccgtatttagcaccggttatatggtcatgacgggctgtcgtaaggaactcggcagttaggggtggcttctcgaagtaccagtagggcatcggatagagggtattagc

SEQ ID NO: 13678 - DNA, 1596 bp, Oryza sativa
  Clone ID: PAT_MRT4530_19689C.1
atgggccatgtcaagaaatccgtattggtcgcgcacgagagccatggagaagttaacccgccagaaaaggaaggaggaggcagcccgaagaggaggaggacggaggcggaggaggaagaagatgatggtgatgaggaggccgccgccggcgacctcatcggggacctcccggacgacatcctccgcgacatcatcgcccgcctccccaccagggaagcctgcaccacgcaggtcctcgccaagcggtggcgccatctctggcgctccacgccgctccgcctcgactaccgtagcctccccctccgccgccacaacaaggggaacgccctcgccgtcgccgtcgccggcgtcatctccgccgtcctctccgcccacccgggcccatgccgctgcctctgcgtccccgccgacagcagccgcgacaccgtggatacctggctccgatccgccgccgtcgacaaccttcaggagctcgagttcctcagcaaccgcggcggtgcgccgccgccaccatcgccgcctcctcctccaccggtatccctcttccgattctcttataccctccacatcgccaccatcagcaggtgcgagctccagcacaccaccgtccatgagcttcgcttcctgcggctcaagcatctcgggctcgaggacgtcacaatcacggaggcctcgctgcacgccatgatcgcccgctgcccgctgctggagtgcttgctgctggctcgcagcgtcggcttccgtcgcgttcggatcaactcgcctagccttagaagcttgggtgtgttggttgcgcgtcgtcggatagcagcgctgccgcggcagacgcagctggaggaaatcatcgtcgaggatgcccctcttctcgagaagttgctcgatcttgcagtgcacaataacctgcgattatcggtaatttccgcgccgaagctggagactattggttgccttacagatcgatggtttggcccaaggatcatgtttggcactacaactgttgtcaagggagtgagtgttgttaggttgacagaggccgtgcgcactatgaggattttagcaatcaatatgtttgttcttaatctggctaaggtgattgacttgatgagatgctttccatgcttggagaaattgtacttgaagtgttgtctatctgctggaaataattattggcgttgtgaataccagactcttatcaaaatccttgatatccgtctgaagacagtggagttggaaaattaccggggaaccaagccacaaatcgactttgcccagttctttgtacttaatggcctaggaggtatcatgaatgatatatataggatgttgattcacaggcagcaagtaagggctccaaaggacgtacagaagatgatagccaacaatgtcagcttggaagacgcctgtaaaggatgtgtcaaggagatattcaggaggcccatgttggcacagcttcttctaaagcacacaatttctgagtccgaggaggtcctgactgccggcgaggggcggccagaattgcacgacggcgctgcgcaggaagagagcggcgccgcggcggaggagagggagaggcgagcggacggtatgtggagatag

SEQ ID NO: 13679 - DNA, 1313 bp, Oryza sativa
  Clone ID: PAT_MRT4530_1968C.1
atcatagctagtaaataaataaaaagaagataagtgctgaagtacagtttaattggctcccactggcaaatgttaacttatattagaattgagatgtatgtaggtgacattttcataattaatgtagatggaaaatctgaagcccgaagactgtttcaaatttgtactacgacaactcactgcaaggacagctagccacctaatttgcagagatcaactaagggagttttatttaaaataattatactaggatggtacattctacaagtaaaaactcagtaaacacacaatgtacatgcatatttctaataaatggattgatataagttggaaatggcttcactagtaaatagaacttggcttgagtagttgctgtactatgtggtgcatgcaaagttctcaattagcatttcaattattccaactggtcctgatagctgatgcatgtctgtgtgaaatcaataatagatcaaatcttaaaaaaaaatgttcaccactctttctagtacatatataataatgtctgccatgaaatgaaaaggaaatggagcaaacataatctccaatttattgaatagtgcatcatatagaagattagcacttaattgttaataccattgaagttcttgtaatggaaaagtaagcggaaatctaaaaatatgaacaattatccgtttttcaatttgatacattagatcagacagaaaaatgtccataatgtggtacactacatgagaaatagtgcattttcttagtactaccacatttctgtaaacattacagctaacttcatgagaaatataaagcagaactggagcattagctaagattcatggggaaaagagacaagtaggttcaccctaaactcttttgcaccagtattaagcatggttgcaatgcaagtttccatcccatggctatgaatgacagccccagctctcatcaaataagccttgggtgcccagaggcggtcgtcggcggcgacccagcgccaggtgctgcgtgcgtccaggagctccatcacccgccccatcacctcctccccgagcacatccacggggtcctctcgtctctgccgcctcctcctcctccccctcttccgcctctcccactcctccgcctcccgcttccgccgccgccgccgcccgcgccttggttgccgatgacgtcgcctgcaccttgctcgccgccgccgccgtcgcccgcaccttgctcgccgccgccgcccgcgccttggccgccgatgccgtcgccttgccgccgccggaggaagcgtgagtgcgtgacggctcatggacggcggatgatgacat

SEQ ID NO: 13680 - DNA, 410 bp, Oryza sativa
  Clone ID: PAT_MRT4530_19690C.1
acaagctcacaaagcaagcaagcaaagctagacagaagaagcctctagaaccttccagaagcaaggtagctaatcgaacaatggcggagatggtggcgaggctggcgtcggagagggcggtggtggtgttcaccaagagcggctgctgcatgtgcaccgcggtgacgacgctgctcggcgagctcgccgtcagcgccgccgtgcacgagctcgacagggagccgctcgggaaggagatggagagggagctcgccaggaggctctacggctccggcggccgcggcgggcccgccgtgccggcggtgttcatcggcgggagcctcgtcggcggcaccagcaaggtgatggccgtgcacctcaagggcgagctcgtgcccttgctcaagagcgccggtgcactgtggctttga

SEQ ID NO: 13681 - DNA, 2279 bp, Oryza sativa
  Clone ID: PAT_MRT4530_19691C.1
ttttctcctcttttttttttttttccccttgcccaccaccaccaccgcctctctcgccggcgaagaggaagggggaagcgcggctgcggcggcggcggcggcgcgcggcggaggtagggcttgaggtcctgaggtctctcctccgtctcgatctgcctcctaacccgaagcgagagggattttgcgcatggccttggcacagccaacattgacacttacccagcgctgtgggcctgcgagatatggtgagagcttgcctctatctgaatcttctggccctgaaaagaagctaaaattatttttctttgtcaagaccaaaaagtatttattcaaaccaaacactatgaccacacaagcttgtaagaagagaagagcagtttatataagcagtgaatcagaagactctggtacagactctgaggttgagggaagcaaactctccaaaaaagatggggtcacgtcagtctatacatgtggtcaccagccaacctctaagaataaggttgatccgatgaatactagcaagtcaaggcagtgtggaagtattctgaagaagctcatggatcacaaaagtggatggatttttaatacaccagttgatccagtggtatatggaattcctgattactttgatgttattcgcaatccgatggacttgggtactgttaaaaggaaactcacaagcaagcaatattccaacccttatgagtttgcagcagatgtgaggctaacattctcgaatgcgatgaagtataatcctccaggaaatgatgtccacggaatagctgatcaattgaacaaaatatttgattcggaatggaaattattggaaaggaaatggaaagacagaaatttggtacaagagcagccatcactgaaggtattaaaggctcagcctgctgttaccccaaaacctgtgctacctaagggggtgactgcaggcacaaattcagctgtgagcaagacactggcaactgcattatcctccaaagtaaaaattaaattttctgtgcgaggctctgagctgacctcttccaaagacacgcctttgcaagcagttggcagaagagacggcacaattaaccaatctctcccttgcaccaaggacaatgctaagacaccaaggatacaatcaagtgaggacagatctgaatcaactggagatgaatatttgcctggcgatgatgcttcaccaagcaaggctcttcgtgcagcaatgctcaagagtcgttttgctggtacaattgtcaaggcgcagcagaaagcacttctggatcatgggaagaaaatagaccctgcgaaattgcagttagaaaaggagaggctggaaaaaaggcagcaagaagagaaagcaagaattgaggcccaggtgaaggcggctgaagctgctgcacaattaaagctagacgaagaaatgaggatgaagagggagcaggaaagacgagcagcacgcctggcactacacatgatgaagaagactgttgatattgacaacagtgacttccttaaggacctggaaaacttaagcaaaaagtgggagctgaatccccctggcaaacttattgttgattttgtcgacgggatcgatctaccacctggcttagggagtccgctagagaggcttggccttttcatgaagaaggatcttgaggaagaggtcgaacatgaaatggaggacagtgtatcaccatctacggagatcgacgtggaggaaggagagatcagcttctgtcaatagcacggctctaaaatatccattgtttcttcctttttttctttccccccatcagactctgaagcaacatgctcgcatggcttataaaattgtgcgcgagtgctgtgttatttattctgcctccagacaacatcataacataagccgagtaaaatgaagcgttggttcatctagtttgtgttgtctaaccagaaaacaaaaatgtcagctgaacactgaagtggagttatcggttgcgtggacttcgccccgattttgtcggttctgtgaaaccctgtatgttgtaggtgttccacgtatgcaattctgtaaaaaaagaaaaaaaaaaaaaaagttgtatgtaatgtgatgttagactgttagtatataataatattatagttccatatggcgcaaaaaaagttggcccccttttaaacccgggccccggaaaggttttaagaatgcggctgtgtgttgttccccccaaaaaaaaaaaaaaaaaaaaaaaaaaaaaaaaaaaaaaaaaaaaaaaaaaacccaaaaaaaaaaaaaacccccaaaa

SEQ ID NO: 13682 - DNA, 426 bp, Oryza sativa
  Clone ID: PAT_MRT4530_19692C.1
tgggttgtgctgaagaaggataggcgaaagaagaggaggcggcaacgattgggaggaggtggggaggaggccaacgagcaggagaggcatcgggggtggaggagtgaggagtcgatggcgtgtagatgtggcaacgacgacaatagtgtggatggatgcgacgctcctcgtcgggctcgtggcacctgggtggtggcgtggatggaaacggcgctccgcgtcgagctcaaggcagagagagagggaagtgaggggaagagcggcgtcggcggcggcatcccttcacgcggaggcgacagagcgaaggatatggaagctagggagcatgatgacccgaccgccgatgtggaggcagcggatcggagaggatgtggacagggcgagcgtgagtctccatggcagccgtcgtgctcctcccacgactaa

SEQ ID NO: 13683 - DNA, 628 bp, Oryza sativa
  unsure (1)..(628): unsure at all n locations
  Clone ID: PAT_MRT4530_19693C.1
ccggggcggcaggacttcggcacgagcagaaacaagccccntcnactgttcacatgttgactcnaagacttgttcttagatctaagaaaacnaaaagtgaggtccgagtagctgcatctaatactgtcaaacataccaaccaagtcgtccgagaatancaanagacaaatggtntcgactgtaattgtttcgaacagcanttcaacnacaactgcagtatcgacgagagtcatgaacactgcagaagttncngcaaanacnanctaacgccatagctcncannttacnanagactanagatttaacacccgnntatantgcaagcnctgggnttnagatcaattcnnaaatnccgtgtccagcancccgcctgtaatcgcggttccnantccannctatncatgatttnggttacggggagaacnccggtcnctctgcctntttcgtctctggngggggccactnncncgggcgnggtatnagncccggctctnnagtncaagtntaanntggaatcncnggagnagttgngggggangncgtngtgcgaaggggncancaagcccgcnctgatggnngcngngncgccggnanggnaaaaanccccganggggggggncgggncccn

SEQ ID NO: 13684 - DNA, 1080 bp, Oryza sativa
  Clone ID: PAT_MRT4530_19694C.1
atgtcgtcgtcgccgttggtgcttactgtcctcttgtttgcgtcgctgacctggctggtggttcttgccccgcgctcctcgtcgccgccggcgacggcgacgccgtcgccgcctgtggtgggtgatggggtgggtggaggtggggaggatggtgatctcgcgctgttccggcgagccacgctggacggcggcgagggggcggcggcgatggcggtggcggagcctaaggtggcgttcttgttcctcaccaactcggagctcacgttcgcgccgctgtgggagaggttcttcgaggggcatggcgagaggctgaacgtgtacgtgcacgccgacccggcggcgcggctgatgatgccgccgacgaggtcgttcaaggggcggttcgtggcggcggggccgacgaagcgcgccgacgcgacgctgatcgccgcggcgcgccgcctgctcgccgccgcgctggtggacgacgccgcgaacgcctacttcgcgctgctgtcgcagcactgcatccccgtccactccttccgccacctccacgcgacgctgttcccgccccccgccgcggcggccgcggcggcgcgccgccaacgccgcctcccgagctacatcgaggtgctcgacggcgagccgcagatggcgtcgcggtacgcggcgcgcggcgagggcgccatgcttcccgaggtcccgttcgaccggttccgcgtgggctcccagttcttcacactcgcgcggcgccacgccgcgctcgttgtcggcgagcgccgcctctgggacaagttccggcagccgtgcctggaccagaacgcgtgctacccggaggagcactacttcccgacgctgctcgacatggccgaccccgccggcgtcgcgcggtacacgctgacgcacgtcaactgggccggcagcgtgcacggccacccgcacacgtacacggcggcggaggtgtcggcggagctcgtcgccgacctccgccgccccaagaagaacaccacccacgactacatgttcgcgcgcaagttctcgccggattgcctcgccccgctcatggacatcgccgacgccatcctcttcaacgattga

SEQ ID NO: 13685 - DNA, 804 bp, Oryza sativa
  Clone ID: PAT_MRT4530_19695C.1
atggcatggagcgcccaaagggagttgaagtactcatctccaaccctcctctgcccaatgcccgaagcaagaggcgtgtcgacgatccactgccgagtggtcgcccaactaagcgcgctaccaccgatgagcctagggccagctcatccaagaagccatccggtggtcccaaggtccacgaccgccacacggatcccggaggcctccaagacctccggcaaggggaaggacgttttggtgacctctgatccaagttcccgaaagaagaacccgacgggcttagggggttcacccgggactcctcaagcgacgacgaggacggcgactaccgcctccagggctgctaaggcagaggatgcgactgcaaaggtagcctcccatggcccgaccaggaccccgaagattggggtccacaagacccgtcaatccaccagggtatcaacgcaggacaacccagacgctgcagctgactcggcccggccgagtggcggagatgcagcgggagaggaggtaggtggtggtaacgagtcgacgggcgccgcagctaactcgatccggccgagtaaaggagatgtggcaggagcggaggtaggcgctggtgacgggtcgatgagtgccgcagctgactcagcccaactgagtggtggaaatgcggcgggagctgagggaggcgctggtgacgggaccttctggttccagggaggaagggagaaggaagctctgaaggagggcttcgatgatgcagctgataaggcctatgccactgttgatgtgaaaacacggcggcctgggagatctgcttaa

SEQ ID NO: 13686 - DNA, 984 bp, Oryza sativa
  Clone ID: PAT_MRT4530_19696C.1
cccacgcgtccgcccacgcgtccgcccacgcgtccgcccacgcgtccgcccacgcgtccgcccacgcgtccggtccagtcattcatctatgcacgtacattaactccttcaggcaatcatattgctgttattcgtggatggggtgggctctttctcactgttatattgtctaatatcatctttctcttttttcattttttgtccattgtgaattcagacaaaaaaaattcaaacaaggccttaatttttatgataaattttcattagattaattaggactttcaaaaggatataaatcaacctatagtattggaattgcgtaaggctttctttacagtcgtgtgattcgtcacgtttgttgcttgctgtggccatacaaagatatccgtcttgtgttctgatagatgtattgacatcaatattgttatgttatcaattcagcaaggatgtaaatggaaaaggtttcagggccaatgggagtgaatcatcgaatagacagccaaaggacaaaggattctcatgaaaaacaaggatttcagcttacaagaggtgcttgaatgcaccgcggagtgtattttcacattttgttggagaaataattgaggcaatggctggacatatacccctacagtaatcatgggaaagctattatctgacaacgggagtcaagagttcggtgattttaagctcgttatacatagaatgctgtctgtatctttatgaaaaaagaatgctgttatgtccatattgattttatcccatatgcaatttacttgctgctatagcagatcagcaatgctttaggcttttccatgctgctgtaatgtaaaatcattaggaaattcccgaagtacacatcgcttacaatgattgacagacttagtgttgttttaaattgaacgcttgtttgctactacaattgttggggtaaatgaacttctatattttgtttgatagaaaagagtttctggctcccctaatacc

SEQ ID NO: 13687 - DNA, 382 bp, Oryza sativa
  unsure (1)..(382): unsure at all n locations
  Clone ID: PAT_MRT4530_19697C.1
tccgcgacgtgccgcccgtctcctccggcgccggcgacggcgaggaggagcgccgccgcgtgagctgcaacccgtgggtggacagcgtggagagctncccgccaaaagcatacatttgatgatcttttgtgattgctgtcgttcagttgcaatccacgagatttgcatgatgactatacacgtacccagcagaacgctacactaattattagacttgctcaactagtgtgttgttaaatattctgttaatcaatttgtctttcagattatagggccacagtttgaaatttaaatatatgcatgtaacaatttctttttttcaactgtgtatatatatacgaattctttatatatgccaaattttgtcaaaaaaaaaaaaaaa

SEQ ID NO: 13688 - DNA, 465 bp, Oryza sativa
  Clone ID: PAT_MRT4530_19698C.1
gttagaggagacagggagagaagagagagagagagagagagagagagcggaggagagaggcggctcgccggctcgagctcgactgctccccactcgcggccgggagggagggagggggagagaaaggagagaggtgattcgatggaggcgaagggggagaatgacgcgcgggcgccgctcctggcggagcggcggcgcaactcggtcgggtcgatgcgcggggagttcgtgtcgcggctgcccaagaaggtgctcgacgccgtcgaccccgagaggccgtcccacgtcgacttctcccgctccaagggcctccgcgaaggagagaaagaatactatgagaaacaatttgccaccttgagatcctttgaggaagttgattcaatagaagaatccaatgtaatgagtgaagaagatgatattgcgggcaaaagcagagtgagtttgccatgaagatatcaaactatg

SEQ ID NO: 13689 - DNA, 220 bp, Oryza sativa
  Clone ID: PAT_MRT4530_19699C.1
accaacataaactcggaccaggtgtatttcggttttgccacacaaattaatatgcactgtatcacaatacacccccctttacttaaactttacattacaaagccaaccggcaccttcctttcacacacccactgctttctcacacactctcatataatcaccaatcacacacagtacgcacacacataaaaaccacccataggctttacttaccccctca

SEQ ID NO: 13690 - DNA, 136 bp, Oryza sativa
  unsure (1)..(136): unsure at all n locations
  Clone ID: PAT_MRT4530_1969C.1
nttatatttttttttttttntttttctaatcctcacattaaatcataccacatggggagggttttatttattacacgcattcctcacaacaaatacatccntttagtccacaccatgttgcctaacccactctctt

SEQ ID NO: 13691 - DNA, 737 bp, Oryza sativa
  unsure (1)..(737): unsure at all n locations
  Clone ID: PAT_MRT4530_196C.1
ttctcttctgtgaccggggcatgtttaccagagccataggtgctgnaactgccatccatctcatgccatccgatatctgtgtcacaaggcagcctgggcatgttcccgttcagaagttagtcaagaattctccagtctaccgtgagggtgatatttgagacccgagtctacatgacagaattaaatggatcaagtgaaaatataccagagatctgtgtcggcgtgatgggaagatnttcacggttgancccatctgtgatacccatgttgcccaatccttggaggagttaagggaaggattattctacgttgtgaaccaagggtgatcaccaaagtagcagagcccggggaaatggaatgttttggttcgctgcctgcttgcgcaaaaggatcctggggagtaattttttggttgagttttggagcagtgagtgaagattgaccatggaaaggtgccacatgcaccttgctgtatgcccaataatggggcttgcatggtgtctgtgttgatggtgcatgtgtgtacagatggacgataccgttgctgaatttgagattatgtgagtgaaatgcatgtgctggtaatgcctgttgtgntttgtgcctgttgaccttgtctcttggaagaggacagaactggaggtatcaccatggtccactttcatgcgtttgtgcttgtgcgtgaaagtcacatgaaagacagttatgtttgctgttaaaaaaaaaaaaaaaaaaaa

SEQ ID NO: 13692 - DNA, 407 bp, Oryza sativa
  unsure (1)..(407): unsure at all n locations
  Clone ID: PAT_MRT4530_19700C.1
gaatgccgccggttggngaacaaagggttgcatacaggccgctctcgtcggtgattctgggagaatcggaactggcggggtcttccgggggcctggtccattctggggggggggggtgaattaacccttggtttgccgcgtgtggtgcggctgtgggcgcgtttgcccccgtcctgtgcaggcgcactgctgtgtttttgtgctttttgcttttgggccggggcggcgcggtggggggggtttgctgcggcgcgggtgtggatgggcgggtggcctagcgcgtgtggcgcgcgtgttggttgtggtggggctggttggttccgcgtgccggtggtccggctggtcgcggggcgccgccttgctgggcgccgtctgggggtttttcttttgcccccccgggcgttttc

SEQ ID NO: 13693 - DNA, 1480 bp, Oryza sativa
  Clone ID: PAT_MRT4530_19701C.1
atggaggcgaagggggagaatgacgcgcgggcgccgctcctggcggagcggcggcgcaactcggtcgggtcgatgcgcggggagttcgtgtcgcggctgcccaagaaggtgctcgacgccgtcgaccccgagaggccgtcccacgtcgacttctcccgctccaagggcctccgcgaaggagaaccaggacttccactgttccacagtctatttcctccaccagaacagtactttttctccggtcctggtcaacgagagaaagaatactatgagaaacaatttgccaccttgagatcctttgaggaagttgattcaatagaagaatccaatgtaatgagtgaagaagatgatattgcggagcaaaagcagagtgagtttgccatgaagatatcaaactatgcaaacatgattcttttggcgttgaagatatatgctacaattaaaagtggatcaattgctatagctgcctcgacattggactcgatgcttgatctcatggctggtggtatcctttggttcacacatctctcgatgaagagcatcaacgtctacaagtatcctattggtaaactgagggtgcagcctgttggaatcatcatctttgctgctgtaatggctacattaggattccaagtatttgttcaagctgtggaaaagctgatagtgaacgagactccagataaattgactccagtgcagctcacatggctatattctatcatgatttttgcaacagtagttaagctagccctctggctctactgcagaacatctggtaacaagatagtccgtgcctatgctaaggatcattattttgacgtcgtcacgaatgttgtgggtttggctgctgctgtccttggtgatatgttctactggtggattgacccagttggtgcaattgcccttgcagtgtacacaattacaaactggtctggaacggtgtgggaaaatgcagtgtcactagtgggtgaatcagctccgccagaaatgctgcagaagttgacatatttggccatcagacatcatcctcaaatcaagcgtgtcgatacagttcgagcatacacctttggggttctttactttgttgaggttgacattgagctgccagaggaattgccccttaaggaggcacatgctattggagaatcacttcaaataaagatcgaggagctcccagaagtcgagcgggcatttgttcaccttgatttcgagtgtgaccacaagccagagcacaacattctcagcaagttgcctagcagccaaccatgaccaccaacttgaattccaccgtgaaacgaattagctggcttgttcgcttgccatgcaggatgtgctacagtacgtgccgcattatgctatatgaaacggctgaagacaaatgagattgtctggccatcatttctgaaagtaggcctaagagaatactgtattagttaagtacctatattagagattatgtggactgaacttgtgcaaaaaa

SEQ ID NO: 13694 - DNA, 470 bp, Oryza sativa
  unsure (1)..(470): unsure at all n locations
  Clone ID: PAT_MRT4530_19702C.1
gtgctcagtgaccctcgagtcacccacgcgcacggcggctcaggggcgaaccctagccgccgccgccgccacccaccctcctcctctctttgcctcgccaccgccggagttcgccgccggtcaaccgggcggggagccgagatggcggcggcggggccataccgcggcgacgcgccgtctccggcgcgagggaggcggggcagagcgcggcgaggaaggcggggcagagccgggcggagtgtggcgcgccggtgggcgagggaggccggggatccggcaccgcggtggccggatctggccgcacggcgcagggctgcggcggcagtggcgcgagggctgcgcggcggtggacggngtcggtggcgcgagggccgcgcggcggcggaggaggcggcgttgcgagggccacgctgcggcacgagggccacgcggcaatcggagcggcgtcagcgccagggccacgccgcggc

SEQ ID NO: 13695 - DNA, 508 bp, Oryza sativa
  Clone ID: PAT_MRT4530_19703C.1
atggctcgagccgccactgcggcggcgctgctgctcctgccgctcgtcgtcgtcgtcgtcgctgccgcggcggcggcggcggcggaggagatgaggtacggcggcggggaacgcgggcggaggctggggcggcactgcggcggcggcggcggtggcggcgggggcgcttccacgcagattcctctccatcttcgggcaaccccatcggcgcctgcctccctcccctacccgcctcagtgttcaatggcggtggcggtggcgaacggcatcccacgggctcggcgcccgacggcggcggcagacttggccacgtctcctcttgcgtgcccccgccacctcgtccgcgtcttcctcggcgcgagcagcgatgtcgcccgcggcggatcgagggcggcgcgaggcgcgagcgccgggacggcccgagcggcggcgacggcggtggcggatcgagggcgggcccggcggagcggcggcgcggcggggcccgaccccccccgcccccccctaa

SEQ ID NO: 13696 - DNA, 752 bp, Oryza sativa
  Clone ID: PAT_MRT4530_19704C.1
gcacgaggagcgcgcccaaaggctaaaaaaaacccacgacgcgcgcgccaggagccaccacacagcggcgcaggcgctgcggcagcggcagctgagcgagtgagcgccgaggctccccggccatgtccaagcccgatcgccgctccggcgccgccacgtccccgtcgctccgcttcctcggcctcctcaagcagcccgacgacggcagcggcgaccacgagctggagctcgacgagcgcgacgtcgtctggtcgtcgtcgtcgtcgtcgaacacctcgccctcctcgtgggcctcctcaaccaattcctcgccgtccctcaccccgtccgcgtccgcgggcgtgggcgtccgccggccgctgtcgtcgtcccacgccttccccgccgccggcagcgtcggcctgtccgccctcctcgccgacgatcacgcccccacggcgtccatcccggccaaggcacgcccggagaggcagcagcccccgcagccgtaccaccagtcggcgccggtcgccgtgccggcctggcccaaggccacggacagcgacaggcgtcgccgtggtgtgcagcacgaggccctcaacgacgaggaggacgatgacgacgagctcgtggtgccgccgcacgagatggccgcgcgccgcgccgcggcggcggcgtcggtgatggagggcgccgggcggacgctgaaagggcgcgacctccggcgcgtgcgcaacgcggtgtggcgcaccaccggcttcctcgacctgtga

SEQ ID NO: 13697 - DNA, 1350 bp, Oryza sativa
  Clone ID: PAT_MRT4530_19705C.1
atggcgacgaacaggttcgtgtgcgagatctgcgggaaggggttccagagggaccagaacctgcagctgcaccggcgggggcacaacctgccgtggaagctgaagcagcgggggagcaaggaggcggtgaggaagaaggtgtacatctgcccggaggccagctgcgtccaccacgacccctcccgcgccctcggcgacctcaccggcatcaagaagcacttcttccgcaagcacggcgagaagaagtggaagtgcgacaagtgctccaagaagtacgccgtccactccgactggaaggcccactccaagatctgcggcacccgcgagtacaagtgcgattgcggcaccatcttctccaggcgtgacagcttcatcacgcaccgggcgttctgcgacgcgctcaccgaggagagcgccaaggccatcggcggcatccccgccgccatggccgcgccggggcaccaccaccaccaccaccaccaccaccaccagctgctcttctcgccgccgccggtcatggcgcaccaccaggagctcgccgcgctgcaggagcagcagcagcagcagcatcaccaggatgtcatgcagtcgccgcaccagcatcagcagcagcagcagcagcggcagcagctggtgcagcagaactgcgggtacgccgtgaagccggagatggcgccgtggccgacgacgatgccctacgaccaccaccacccgctgctgcagccgctctgcaacgccaacgccgccgccacggcgcagagctcggccacgtccgcgccaccgacgacgccgcagctgcccgccgccgccgccgccgcgcacctgtccgccacggcgctgctgcagaaggcggcgcagatgggcgcgaccatcggcggcgcgggcaccggcgccgcgggcgcgcactacgcccacatggcgtccccggcgggcgcgggcgcgccggccggcggcagcgccaccttcggcctcggcctgtcgtgcctcaacacccaccaggacggcggcggcggcggaggcaacggcctcatcccggccgggatgatgggccacctcgcaagaaccgcctcccacggccggagcggcgaggacgtcgccggcgccggcggcggtggcggcgacggcatgacgagggacttcctcggcctccgcgccttctcccaccgcgacatcctcctcgccggcttcgactcgtcgtgcatgggccacgtgaacgccgccgccggcatggccggctacgagccaccaccaccgcaccatggacagccacagcaccagcaccagcagcagcagcagcaacagcaaggcggcagcaacgagccatggcatggcatgggcagccatagctaa

SEQ ID NO: 13698 - DNA, 297 bp, Oryza sativa
  unsure (1)..(297): unsure at all n locations
  Clone ID: PAT_MRT4530_19706C.1
nccacgcgtccggggacgtgttntgagatttanntttggtttcgtcaatataaatcatggcggcgcgtatnatctctatacgtntacgtttntttggccgccatacttatatatntncgtatgcacagtnatcttggagaagtggagaacacataatgcttatttcccactgttttnaattagggtatggncgatcgatcagtactgtgtgtntaaccgatgtatgtatcacttngtattataatccatgtaatggaataaatctacctctatatagttatagtgggtaaaaaaaaa

SEQ ID NO: 13699 - DNA, 252 bp, Oryza sativa
  Clone ID: PAT_MRT4530_19707C.1
atgggtggagtgcgggggcttcccccaggtagatccggcagcacaggcgacgccggccgcttcccacgacccgatcaggcggtggcagcgacttcccgtggtggattcgacggcaatgacggtgctggcggcttcccacggaccgatccgccggtggtgacggcttcgtgcggtggattgacagcaacgacagcggcggcggcttcccgcaacagatccgtgtctttagcctgccagtcgacttcagcctga

SEQ ID NO: 13700 - DNA, 2082 bp, Oryza sativa
  Clone ID: PAT_MRT4530_19708C.1
atgaagaaactcctggatggaatcgacgattggaaatacgagaaactggacaaggaactccggtcctatctcaaggacaagaggtacctcattatggtggatgacatatggaccatacgagcgtgggaggcaatccaatccgtgttgtgcgataacaaccgcggcagcagaataatcgtgaccactaggatagaggctgtggccaaagcatgcagtcctgctattggtgggcaccatattcatcatacgcaacccctcgagtttgaagactccaagaagttgttcctcagcagaacatttgtcaacaaggagtgtcccgaggagctggaagatgtaatggagaatattttgaagaggtgcggtggcctgccattggccattgttagcattgctagcgttttggcaggttacacgtcaccaggaagcaaggacaaatgggaatcaatctacaaatcaattggttctcatatggagagcaacccaacccttgaagggatgaggcaaatacttgcactcaactacaaccacctgcctcatgagctcaagggttgcatgatgtactttagcatcttcccagaggattatgaggtcaacaagaatcggctcttgtggagatggattgccgaaggattggttacggagaaacggggcttgtccctaatggaggttgcagagtcctatctggatgacctggtcaataggaacatgattcaattgcgtgaagatatcgagtactattggaaggcccagatgtaccgtgtccatgacatgttccttgaggtcatggtgtccaagtccctggaatctaattttgctagcctgctaggagggcagtatgcaacaatgtcgtatgataggattcgtcgcctctccattcagggcgatgatgacaggcttgagaatgcagagcagcctaggaaaaatacggcagcatccgcaggcgtagatgatgggatactggatttggagcatgttcgatcactaagcatgtttcagcatacagggaagaaattgctcgatcaacttggcaaattcaggctgctgagggtacttgacctggaaggtttcaagggcgccctgactaaggatcatatgggttatatttgcaggttgtacctgcttagtttcttaagcttaaagggcatagaagtcgaggaggttccaagtgaaatcgggaagctagaacatctgcagacacttgatgtacgtcagacgtcagttcgcgggctgccagataccgtgacgaagctgtataaactcgagcgcctacagatctcctataacggtgatgccaatctaatgtggaagctacccctggagcttaagaagatgaagatgctgcgagaggtgggcttctcagtcctcggaaaccatctccaggttgcacaagatgttggtgagctagatcatcttcaagagatggttgtctacgtcgacgacatcaccttcgacgacaatgttctcacagagttcgctaattctttgagcaagttatactcactccggcgcctcatcatcggagacgtgggctacggcaagactctgaactttctcgaccagctcccctcgccgccacaacttctccggcaccttatgatcgccggtggcatcgataggttgcccagctggatcatgtcgctcacataccttgttcagttcaacatgtcgtgggggaaagttgctggtgaccagctattcgatgtcctgtgtgagttgcccagcctcgagaccatctgcattcacaattattgctacgagggcaatgttctagttgcacgcactagacacaggtttccggagctcatcactttaagaatagcctctggatcaaagcttcccaatgttattcggtttgagaatggaaccatgccaaagctcgagaacctgctagttaacttcactgacaatgatgagaagaagattattggcatcaggcacctgaccagcctcaaagaggtacagctctggggtaacgagagcaaccttgcactacatcgtgcactgaagcatctcaagagtgagaacaagaggcgcctttttgagtccagtagccagtttcaaattgtagtgaaatacgagtga

SEQ ID NO: 13701 - DNA, 1125 bp, Oryza sativa
  Clone ID: PAT_MRT4530_19709C.1
atgcctaccaagaaaaaggggaaaaaaagaaagaaggagaaagggaagctcgtagaaaggacggggaaaaagagtagggagagcgtctctagaattttgtcttccttgcgtggtgctaaggttgccaacttccagagcctgagagtgctacagtttctcatgtttgaattgaaggccgtcgaccttgataacatatatgagttcctcaggacatacccgccccaatctgacggagctctttgtctcccaacaaccagtgatcatggtctctttgaatatgatccaattgatgagcagaggcaaaacccgctagaggatggcttggctaatcttgaggataggagaatagagaatcatatgcgttgtttcatcctcacgctgtgctggctcaacctcaacgtccccatgttcgccgttgtccatcccatgtcctgccttgcgaagatccacctcaacgacgtcagaatcaccgacgaggccttgcgccgcatggtcatcctctcccccagtctccgcgtcctcacgttgttctactgcaatggccccctcgccatgatcattgcatcatcacggaagctgagtagcctcattatcgtggagtgcaacaacgtccgcggcgtggtcgtcatgccggattctcccctccacaacttccattgcatggggagccccctttcgccgttcaacctctccggcggcgcccgcttgcttaccgacctcctcttctgcttcaatcccccgatacttggtcatcaagtgttgagagaatggttcaggaacaatctaccttttctctccaacatcacctccctctccatctgtagcaatacccttcaggtcgtgtctttcttgcggcatcctggagcgaatcttgatatggccatcctcgataacttccagagtctgacaatgctagaattaaccatgcttgaattcaaggccgttggcctcggcaacatctttgtgttcctcaagagttgtcatcgccctaatctgaagaagttccttgtgacggttgataccagcaaacccactctgaattgcattttaatttttcagcgatcggaccgaacaatccatgacagtgatatacgttttgaagaggatttccctggctcgctgtag

SEQ ID NO: 13702 - DNA, 764 bp, Oryza sativa
  Clone ID: PAT_MRT4530_1970C.1
tggacgcgtgggctggcaataggagttgctgggttgtgcaaggcgctgcatagcagcttggtgataccaccagtttctcagaagaagttactttcgaactcagatagactttattacactggaggcctgaaaaatcttggcaacaattgctttcttaatgttatcctgcaggcacttgctagctgtgacgggtttgtttcctctctagataatttgcttggaagtgaggatgtgctacctgaggaaaagtccgaaaaaatgcctcttatttttgctctaagttctcttataaaagacttgagcgtagttcgagacaaaaggactgaactgagtccacacagagtaatggatgctttgagcttctacgtcggccactttaatttgacaagagagcaggatgcttcggaagcctttcatcatcttttgacctcactgagggatgaattttcccgttgttatgtaccaaataggagttctctggcagacatcaccatgtttccttccaaagtatatagtcaaagggaagctgtcattggacttcgaaaatttctactgcttgcctctctcacctgtggctactataaatggagatattatcaatggatgtagtttggtggattgccttgagcactatacggcgttggagcatcttgacaactatcgttgtgatcattgttggcacaatgttgctgccaaatattttgtctcttaaaatccgaggtgatgaggaaaaaattaacaaactacacacctgtgtcgactat

SEQ ID NO: 13703 - DNA, 472 bp, Oryza sativa
  unsure (1)..(472): unsure at all n locations
  Clone ID: PAT_MRT4530_19710C.1
cccacgntggcacgagcttccactcccccacccacgccgccgacgatgccacagcagcacccacagccgccggccggctcgcgcctcctcgacgccgtcccgctcttcgtcgtcgtcctcctcgccgcccacgtcctagccctcgtgtactggatgtacaggttagcctcggacaagcagccgccgcggaggaagacgcagtagccaccaccaccacgggccccgacggcttcgtgctcgcctttgtgtagccgatcaaatcgtgagctgcgtgagcaagattttacctctagaaagcttaggttgttcattattgttgcagagtttgtgtttccgtttgttttatggtaccagtgacatttggtatataatcaagaagaattagtggaggacttgttgtatgaattgccttgggttctttttaatatgagaactccataattgttctgtgacaaaaaaaaaaaaaaaaaaa

SEQ ID NO: 13704 - DNA, 571 bp, Oryza sativa
  unsure (1)..(571): unsure at all n locations
  Clone ID: PAT_MRT4530_19711C.1
ctactgttcccccatcccttctcttcctttcccttgcccttgcgccgccgccgctttgccttctcctccgccggcgacgaccggcttgtccttcgagcttttttgccgctcatcacgcgagggcgcacggcggaggaaacttttggctgacctctactgacatccaaaaaccctagccggaccgaaggcgacggctacctccaaactactctgcgcgccttccttacatcaggcgctgctgtggccccaggcgaatcgtccaccgcgaggcgaacccgggccgagcacaataaaatccggagaccctgggcgatgcgagttggtccgggggatgggggatcagccgcgcttgattgggagcctgtctgttatcatgtgcggtgggtggtggagaagtaggagatgatgatantaggttgagaggacagntcttngatttgcgcgttttgggtgttggttgctctgcnggantggaaaagatcggtgaattgtagaagagattgatgagtgaaatcgatggctattgtcgggtgactttancaagatgcttgttcatttcagttgagaatcg

SEQ ID NO: 13705 - DNA, 333 bp, Oryza sativa
  Clone ID: PAT_MRT4530_19712C.1
atggtgtcaaaaggaaacttgttcggcatgaagattagaatacggaacgggaaatatttggtgttggcgatgtctcgacgatgggttgcggcgtccttcttcctggcggccggcaacgaagaggagagggaagaggagagctggagctctccctctcggtttctttggctcacgggtggagagacagaggaagggcaagccaaggaggctgccaagtgggtccagggcgaagggaacaagtctggagtgagagagtttaatgcacattatggtgaggcaggttttagccgattaaggattataattggtctatcatttaactggtttgactga

SEQ ID NO: 13706 - DNA, 252 bp, Oryza sativa
  Clone ID: PAT_MRT4530_19713C.1
atggggatggcggatccgtcgccggccactgcggggagggcggatccatcgcccgccaccgcggggagggtggatccgtcacttgccaccacggggagggcggatccgtggctagccactgcagggatgacagcggcgggcctcggcgccgagagcagcgtcggatccgtcgccaccgggtctcgggcagctagatccatcgctagtgaccgcggggacaacagcagcgggcctcgggcaggacgacggtag

SEQ ID NO: 13707 - DNA, 573 bp, Oryza sativa
  Clone ID: PAT_MRT4530_19714C.1
atggagtcccttgccgaggagatgacgatggctagcggttgtccacatgacgaagaagatctaatccagtatatcgtaactcaacttggtgaaggatacaatgaagttgtttcagctatgtgcgcacgggttgaaccaatctctgttggggagttgcaccacggcaaccttctcctccccatcaccgcctcctatccatccccttcagacgtcaccgctgcaccatccaagccacgccaccagtccctcatcggacgagctcaagggtgccagatccgggcagaacgagcgccgacgctgcctcctgcccatccctattctgggctcccctcggacgacatgcacgggctgagcggcgacgctgtcgatgacacgacgacgacgacatcctcctcagcgagatgctccagtcgaccacccccgacggcctccttctccctgacctcgctgtggaggaacgagctagacggcggcagcctttcatccaccgtcatcctcaattttgtttattctctggcaaagaggcaataaagctcaccggagatacacacaagttatcaattccggtactcg

SEQ ID NO: 13708 - DNA, 364 bp, Oryza sativa
  Clone ID: PAT_MRT4530_19715C.1
ggacgacatgcacgggctgagcggcgacgctgtcgatgacacgacgacgacgacatcctcctcagcgagatgctccagtcgaccacccccgacggtctctggttaatccacagctgctgcagcttttccccctttattcctgctcatctttaggcctccttctccctgacctcgctgtggaggaacgagctagacggcggcagcctttcatccaccgtcatcctcaattttgtttattctctggcaaagaggcaataaagctcaccggagatgcacacaagttaccaatgccggtgctcgtttctttaggtgcagaactgggactttaaccactgtacaattcagggagagagcaatgctcatg

SEQ ID NO: 13709 - DNA, 350 bp, Oryza sativa
  Clone ID: PAT_MRT4530_19716C.1
gaaactgaaatatactgtttgaattccgacaaatggatgtccgaaacaagcaattaactaagcacacatattaccaaaccttttagctgcgtatataaaaaagctatggttttcaactgaaatcaagcttgctgagctgaacatcatcagatcatagcctaggggcgaagcaggggggggaggccaccgacatcgagtgacaggccctcgtaaggggccaacatggccatgtacagacaaaaagccatttcatcttgctcctactgtacggcagcgaaagacgggaagccgaggccacagttgatgcccagtgaatctgtcaagatggaacacacaaccgggttcggaag

SEQ ID NO: 13710 - DNA, 579 bp, Oryza sativa
  Clone ID: PAT_MRT4530_19717C.1
atggacaggcggccaagcgccggaaccgcgggattgacagcgggcggagggccggcgttggcggcgggggaaaacggattgcaaccttgggaaagagatggggggagggagaggaggccaactagggggagccttgcgggcgccgttgaccccttccggctagccagcaaggctaggcggcggggtagcggcgcggcgactgcacaggacgtggaggagcgctcacgctcacgcatgcgtgaaagcggtggtggcggtggatggattgagaagtggaggaaaagtatgtttgttatgttgcaagatttggggaggcaggcgggcgagggccacagcggcggtggcgggcgggagggcgggcgctggagtagcgacgatggcaggctggcgagggccaaacaactctccatggccacccgctgccgcaccgctgcaaccaccggtgtggacctcgacatccgtgctgttcgatgccgccgccgctccaggtccagggaagaggaggcgacgcggctagagaaacaacgcctggacaccatgcttcgctgcctggatcctctccttgccaccaccgagtga

SEQ ID NO: 13711 - DNA, 351 bp, Oryza sativa
  Clone ID: PAT_MRT4530_19718C.1
atggtccagcgtggcacaggcatggatggtggcccgggaggcggcgacggcagtaggatgacaatggcacacgcaacggtaagaaggtcggcgacgcaggaagtcaatgcgggcgatggcagggaggccatcttgggagatggcgcgagaggccggcgtggcggtggcatggtggcgtggcggtggatggtgacagcatgcgtcatttttgctcttaggggcgttgtcgagttgtctctttccttctggtggggctgccggatgaaaaccctgttttggttctccctaaggcctcgatggactacaacgatggtgctcatcgtcgtttttctccttggacatgtcgtctag

SEQ ID NO: 13712 - DNA, 1597 bp, Oryza sativa
  Clone ID: PAT_MRT4530_19719C.1
atggaggtgtcggcgtcggcggcggcggaggcggggatgatggtgggtcatggggagtggcgcgacgacgacgggcgggcgcggcggatggggacggtgtggacggcgagcgcgcacatcatcacggcggtgatcggctccggcgtgctgtcgctggcgtgggcgatcgcgcagctcggctgggtggccggccccgccgtcatgctgctcttcgccttcgtcatctactacacctccacgctgctcgccgagtgctaccgctccggcgacccgtgcaccggcaagcgcaactacacctacatggacgccgtccgcgccaacctcggcggctccaaggtccgcctctgcggcgtcatccagtacgccaacctcttcggtgtcgccatcggctacaccatcgccgcctccatcagcatgctggcgatcaagagggcggattgcttccacgagaaggggcacaagaacccgtgcaggagctcgagcaacccgtacatgatcctgttcggcgtcgtgcagatcgtgttctcacagatcccggatttcgatcagatatggtggctgtccatcgtcgccgccatcatgtccttcacctattcgacgattggcctctcgctcggcatcgcgcagaccgtcgccaacggcgggttcatgggcagcctcaccggcattagcgtcggcaccggcgtcacctccatgcagaaggacacgatcaaggcgccgccgccatcggaggcgaaggtgatgaaccccgcgacgatgctgagcgtggcgacgaccacggtgttctacatgctgtgcgggtgcatgggctacgcggcgttcggcgacgcggcgcccgacaacctcctcaccggcttcggcttctacgagcccttctggctgctcgacgtcgccaacgccgccatcgtcgtgcacctcgtcggcgcctaccaggtgttcgtccagccgatcttcgccttcgtcgagcgctgggccgccccccggtggccggacggcgccttcatcgcccgggagctccgcgtgggccccttcgcgctcagcctcttccgcctgacgtggcgctcggcgttcgtctgccccaccaccgtcgtcgccatgctcctccccttcttcggcaacgtggtgggtctcctcggcgccgtctccttctggccgctcaccgtctacttccccgtcgagatgtacatcgcgcagcgcggcgtgccacgtggcagcgcgaggtgggtctcgctcaagacgctcagcgcgtgctgcctcgtcgtctccatcgccgccgctgcgggctccattgctgacgtcatcgacgctctcaaggtgtacagaccgttcagcggatgattggaacgtgaggggcacgtgtgctcgttaaattatttcttactatctctgtaccaaaatatagcaaactagtataaataggacgaaattcgggtagttctcaggtacgaattcatcgtactaggaaatatctcacattgtattaagttgctatattttgggtcagcattagtacaatattacacaaagaggaaaaaaaaaggaagaaatgtaacatgtggcgtttttcattggagaccttgaaaaatcttgtaattgc

SEQ ID NO: 13713 - DNA, 183 bp, Oryza sativa
  unsure (1)..(183): unsure at all n locations
  Clone ID: PAT_MRT4530_1971C.1
ctcggcnccaccgatgttgggcaccccatggccgaggtgttccccndctnccgagaggggacttkgakcntcnnngnwntccctttttctncaaccgtggacattcccaatkdacaggttggtgtntgctactggtaggttatcctaggattccgagaatggtattaggtcataaagtgacgt

SEQ ID NO: 13714 - DNA, 2547 bp, Oryza sativa
  Clone ID: PAT_MRT4530_19720C.1
atggcggatcaaacgctgggcgccgtggggtcgctgctgggtgtgttgtcgaaggtggtgaaggacgaggcgaagctgctgggaggcgtggagggcgacatccagttcatcagggacgagatggacagcatgaacggcttcctggtgcacgtcaccaagacgaccaaccacgacgaccagctccgcgcctggatgaagcaggtccgcgacatcacctacgtcgccgacgactgcatcaagctctacatgcgggacgtcgtcccggaggagaaggctggcctccgcggctgcctcctccgccgcgtgcccagcgtctgcaagccctactgctcgttcctccaccgcaatctcacgacccgcgaccagctcgcgaggaggatccacgagctcaaggaccgggtgcgcgagatcagcgagaggcggcagcgctacgacgtcaagctccccgaaggcgatgcggtccagtccccgccggtgtcccaggacaggaagacgaaggagaagagggacgagttcgtacgtgccctcgaagatggccagtctcctttccgagacgcggtccgcaagctctccagcggtgatggtggtgccctgatcagagaccgtgctgctcctgcactcgtacgtagcatcgtcgacacatgcataacgaagctggccgatgaccatgaccgcatcatcaagatgctgcttcgttctctgtacgcccatccctgtgggacaaaagaactggagaacttgtccaacaagctcagagaaggagaagatgtggccaagcaagtgatgcttttctgctacagcaagctgtctgtgcactacaagagctgcctgcagtatctgatcaccttcgaactagaggaaagcatcagcaggacaagcttggtgaggaggtggctcgccgaaggcctagtgctcaatgaccaacaacaacatgggatagatgatgatgaaagcatggaagaggccggtgagcgctgcttcgatgatctcctgtttcggggcttcctttctcctgcccctgcacatcgttttccgaggaccggcggcctcaagctcaagtgctgcgttcttgatgcttcagtcaagacgttcatctacgatatgtccacaagcgagaattttttggatgacctgccaactcaccttcggcatcagattaatatcagaaagacggctcggcggcgggagctgccacagaagcagcaccagcacaaactacggtggacgcagtcgaccatctgctgctgctactgcagggttccaagaataatgaaggcaacaacagctgacgctggaggcagcaacatcaatgatccgctgctgccgcttcaccatcccatggatgagatagtaactctcctcaaaaccctacctccggagtaccgtctcaatgtgctggatctaggaggttgccttgggttgaagatgagccacctaaagaacatctgcaagctggtgccgtcgctcaagtatctgagcctccggaagaccaatgtttctcagcttccaaagaagatgaaccgactcctgcatctggagacgctcgacatcagggacaccaacgtgcggggtgcagctatgagggatatcttcctcaatgagctgaagcatctccttgtcggccgcatatttattcctgatgctgccgccggcgacaatgaggcatcagcactactctccaccgtgctgatgcctcctaagatcagcaagaacacggagatattgcgccatatccagatcaaggatggcccagaagcccagctccagctttcgcatgtcgcgtctctggatgggctaaggaagctgggggtggtcctcgacggcagggaagataacatcaagcttttgctcaccacaattgccaggcggagcgataccctgcgatcactatcagtctggatcaccgagccgccgccggagcacagtgtcactggtgaacgccacggcgttttcgtgactctcgaccacaaggagaaggcgaccacattgttctcgcatcccagtaaacttgagagcttaaacctcaagtgctacaagggaaaaaacaacaacaacaactacaatattcctccatggatcataagcctccaaaagctctccaagatcactctacgtcacagcttactttccagaggtggtctgagagagcttggcaagatgaagagcttgcgctgcctcaagctccgtcaggaatcatatatcgaagccgacgtcaccgtgaagtacggggagttcgaggacctcaggcttcttgtgattgataagatctccaacaagatgaccaaacttgtcttcgaagaagatgcagctcccaagctggagaagattgtctggaacttcgacacgatgacaacgctgatggggatcacggtaaacaacatcaaagggatcgaaaatcttcaaaacttgaaggagctatggatcaacggcgtcaacataccgtttccttcaagatcccgtgaatggaaggatataaccacagttccgcagaaattatggaggcacacttttggaccggtaattgaaagcttagcatctgaaagctga

SEQ ID NO: 13715 - DNA, 341 bp, Oryza sativa
  Clone ID: PAT_MRT4530_19721C.1
tgcttgttcaaacgaggcaggtcaaaggtccaagagccttatcctccaagaacgattctccgacgacaaggctgggggctagggagagaaaattctatttgacattatcgaagacttcatgtatctattgttctacaccaaaatcgactaaggcgagtacgacaaatgttgacaagacttcgttgcagattttacgccttctcgatcattcgagaaaggttggtggatctcggcaaggaatacggaatgaaaagatggagggatctagcgctgtctttgatctcgccgggcacgaactcgagaaggaagactaccctgttatcgactacaagtcagacctt

SEQ ID NO: 13716 - DNA, 2018 bp, Oryza sativa
  Clone ID: PAT_MRT4530_19722C.1
ttttttttttttttttttcttgtttttttttcagttacttattggtattgcgttcttcagacagatagaaagaagcatggtggagcctgaagcttcgcctgtatctgagtcgagcaaagaaaaagttgctcaagatgtacacgcacaatcagatagacatgacaacacctgtctacctgctactggtctttacatgaaagatcaactaatgacaaaccttttcaacaactaagtacctatttatgatcacaaggtcttcttttcacacgggggtattcagctaacgtcacttttgaaaccaacatctgaacaaaaatcactggaagactggttccgtttctagtcctttcatgggttctccacgctatcacttcgcattggaaaccttggagatcaacaagcagaggacgccagatccaaatggaaaacattaccaggaaacatcctggggcgggggcggctagtgcttcttgctccgcgcgggctgccttgagccgtcggtggcgagcctgtagatccagtagccgagggcgaggacgtgggcggcgatgaggaggacgatgaggaaggggaggaggtcgaggagccacggcgggcggaggacggcggcggcggcggcgtagtcccgcgccatggcgacgcggcgggagatcagcgcggcggccgggtgcgggtggtggagccccacccccaccaccacgggcccgggcaccaccaccaccaccgggctgttcgtcgagcccatctccctcgcgctcccgctcccgctccccgtcgtgggctttgcaaagtcgcgcgtgggctgtgcgcgcctgcggctttttgatggaacgcgtcgcggtggttggcgcggcgagcaaccgatgcagatgcggatttgtaacgatggcgccgccgcggccacacctcacggcaccgggtacggtggccacctcgccgacaccgccgcaggcggcgcttttttctcccgctccgcatcgtcggcctcgacctccgcgacagccacctcgccgacacagccatttgctcggcgaccggacgactcgccgccacggtggtcgccgagctccgccgggccgccctcatcgcagccgtcggagaacaccgcgacgtgcaccaacgacgaaccgcgtcacggcgacggtgcaccggacgccgccatgaccacgaagacgagcggtggcggcggcggcgctggtgggaggggaggccgacatagcgtcgcctcgaggccgcgagcgccgacggctccctcgagctctggctcccctcccccggcaccagtatgcggcggtggagcgacgcgcgtcagagccgtggtcaagaccctcctcgccggcgagcgtcacctctgcgacgagctgttagcctccgacgaggagctcggccacgagtggttcgccgatgtcgccaggagatgcctcctgcagctcatcggcttcgcggacgccgtcgccatgtccacaccggcgacggagaagctctaccgcatgctcggcatgtacgaggcactcaccgccgtcgagccggacatcgaatccctcttcaccggagacgtccgcgacttattctcctccgaggtcaccggcgtcgtggcgcagctgggcaacaccatccgccacacgatgacgatcgaccagttcgtcaacgtcatccacggcgagtcgtcgcggcgaccagtccatggaggcaagatccaccccatgacacgctacgtgctcaactactgtggtctcctcgctgagtgccgcaccacgctcgacatggtcctcgccgacaacaacaacaccaacgatgaccaccacgacggtggcggcgcctcatcgtcagggcggtgcatgcgggagctcctcactcacctcctccgcaagccggatgagaaatccaggctctacgaccacaccgggctgcagaacatcttcctcatgaataacctctactgcatcgtgcagaagatgatggaggaggaagaagagatagacccacagtgggccccacttttttttttgcgcgaatga

SEQ ID NO: 13717 - DNA, 422 bp, Oryza sativa
  Clone ID: PAT_MRT4530_19723C.1
acagggatgggggtatggctattcagaaattctaaaaacctcgatgcgctaccatactacaggaggaagtacttcacctttggtcgggaaaacagaaaagatttcaagttctatggcatcgctttggagatatttttctccttcctaagttctgtgataatctttcagataatgataccgatatcactatacatcaccatggagttagtcagagtggggcagtcatactttatgattggagatacacggatgtatgacagtagttcaggttcaagatttcaatgccggtccttgaatatcaatgaagatctcggtcaaatacgttacatattttctgataaaacgggtaccttgacacaaaacaagatggagtttcatcaagccagcatctacgggaagaactatgggagccccttgcaggt

SEQ ID NO: 13718 - DNA, 274 bp, Oryza sativa
  Clone ID: PAT_MRT4530_19724C.1
atttgtataacaccactacagacttccagatgcgggggggatcatttctagggtatgttctgtaaccaccgccatcatagaggcacacaccagaaccgggaagtaactcaaagaccgaacttcgctcacacattgggcgtgacatgcacatacgacagcgccatgctagccacgcgatgtccggccaggagcgtgctaaactccgcgcttggggcaaggggactgactgagatcttgagggagatctacaacgagaaaggcaagggggtgctcc

SEQ ID NO: 13719 - DNA, 2832 bp, Oryza sativa
  Clone ID: PAT_MRT4530_19725C.1
atgcagcaagcatccaagcccaaggcttcctcatcggtgcctagagttgctaggctgcagcaggtcaggccatcatcagctgcttccacctccaacaatgcgcatgcgaatgcgaatgcgctgctcgacaaatcttccatggacatacccaagccagaacgacgatccttcaaggcatcccgggccacaactcccgatagaatgcagaaagcgcgcggagcgaatgcgaggcccgcggcggcgtcggcggcggagcagctgctgcaggcgcagctgaacgcggtgcaggaggacctcaagaacgcgcgggaacacctggccgtcatcgacagggacaaggcccagctcctccacgacctctccctcgcccgccgcctcgccgatgacgcccacgccgctcagagcgccgccgaggaggccctcgacctcgagcgcttcaagtccatcgagcgtgagcagctcgccatcgacctggcgcagacgaaagaacgcgactggaacgccaggtgccacgccatcgacctgcgccgcgccgagctcgccgccgagctcggcagggtcaaggacgagctggcactggccgtcgaggccacgaacacggccaggcagatcgccgacgccaacgccgacaaggcggcgaccctggcggcggaggtgtcccgcctccagtcggagctggagacgaaagcagaggaggccacggcgatcgtcgccaagctggagtccgaggcctccgggctacgagccgagctccagaacgcagaggcgtctcggaaggaggacgtgggcagagcagagcagcttctccatggcctcaaggttgacatcgcctacgccaagagggcagaggccgatgccaacctcgccgcccaggagtggaagaccaaggcagagtcgcttcaagctcgcctccacgaactctcctctctcaacaaatccaacgaggactcgctccagtcactgacgagcagcttcgacgaatgcaaatccatgctgcagcacgagcaatcccaggtcgtccagctcaaagagaaggtgtcatccttggagaaggaagcgcgcgagtacaaggagtgcttcttggagaccaacaggcgcctcgacgttgcaaccaaggagtcgcatcagctgcaggccaccattgatcgcttgacctctcaacataagctgctcaacgaagcacatcagcaggttgtcaccaacgagaagacggtgaactcgcagatcagcctgctgtctcaagacaagatcaggattgagcaggagctcgatggtgccagagatgagagggataaggccaagaaggccgtcgaagatttagcggctgcgctgcgcgaagtgtcatcggaagcaagagaagccaaggaacgtgtactggcaaaacagacagagctggacagtgcacagcttcagatatccgagctcaaggcagagatgaagaatgcacaggacaggtaccagctaatgcttgatgaatccaagagcgaggttgaatgcatcagcaagacagttgagaagctgggttcagaagccaagatttccaacgacgaatgggcatcgaaagaggccgggtttgtagaaatgatcaggagatcagaagaagaaatgagctctatcaagtcagagatgagcagtctaatggtgtcacttggagctgcagagaagcaagtgcaggagctcaaggcagagagaacccagctgcttgataaactgaaacaatctgaactcaccaattcagaaggtagtagcatctcatctactggcgttcaacaaacagctgatgagtccgagagcacagtaggcctcaaggaccttgtgtcaagaaaggagaaggaagtgcttgctctgaatgatgaggtcactgaccttcgtctcagagagacagctgccttggcaaaggccaacgagctctcaaagctactagcagaggcaactgcgaagaaagccgaagaagaagaggcggcaaaaggcacagagaaatccaaggtactactgatgaagctggaaatggacaagttgctgggatcactgaaagcagcagagcaagaagcaaatgctgccaaggatgacaaggctcagctgcaggccaagctgaggctgctcgagtccaagatgaccgaggccaacctgaccgccgaagaagagaaaatcagcagcctaaggttgaaggagacgcttgcggagaaggaggaggagctactgagcattgcacgagagtacgacggcctgcggacgagagaggccgctgcgcaagcgaagatcgatgagctctcttcactggttgcagaggcctccacagctaggaagctagcaggagagtactcggctaatggagtggcggctatcaggagcccagagaagcagcacaacatgttccggaagatgatctgctcgcccatggacaatgtgcgagatgatgtgaacagcagcaacaggagaacccaagaggatgagattaagcacgtcgaagtggagacggtgatcatgaagcagcagcagcagcaggtgatagtgaagcatggaaaggaggaggctttagcaatggaggtgaagactcttgagaacagcaagatcatagaagatgacataagcaagcatagggacgacgatgataatgagtcgagcgacgatgaggagatcgagtcgcagggagacgatgcagctgtagagcagatgaatggaccgctgattcatgggccgacgtcgtctttcaacaaggagcagcacaaccagcataagaagaagaaggctttgctgaagaaattcgggagcctgctcaagaagaaagctcatttcaccaagttgaacagccatgccaaactagtatcttaa

SEQ ID NO: 13720 - DNA, 2067 bp, Oryza sativa
  Clone ID: PAT_MRT4530_19726C.1
atggcgcattggcgccagtgccacgaagcagacgctgcacgccgcgttgtcgtggtcgacttcgtcgtagtggcggaatatttgtgtcttggcgctgcgttcgggcgtcacgccggcaatggttgtgctgctgctgctggctcgcttgagggacgagacgagctacctcaacaagccgccaggatggagcctgaggaggaggttccccgcatgtggcccacaatttttaatatttttcaaatcaaattgccacagatggaaaggaagcttgttctatggaatgaatgggagatacaagtgttggtgctggtgagcttttccctgcaagtgttcctcctcttgctctcgggcatcaggaagcgtacaacctccaatgtcttgagcatattcatatggctcgcatatgtgtcggctgactccctcgccatcttcgtccttggccatcttgcgctccacatcaatggccggcgccatggtctggtgctcttctgggcgccgtttatgcttcttcaccttggtggccaggagacaatcacagccttctccatggaggacaacatgctgtggaagcgtcaccttctgaccctcgccacccaggtgggtttggccgcctatgtggttggcaagcagtggcagggagacaagcagctgctggctcccatggtgctcatattcatctcaggtaccatcaagtatgcttgcagaacatcggcactcatgtttactgctgaacaaacaacacctgggagtaatcttggcatgcaggcaaagggttggtcagctaattggaaacattattcgactaataattggatgatgaatgaggtgcacacttacaacgaacttttgtgggaagccaacgcaggctggaccttatacatggccttcctgatggatatgacaccgctgatatctaggcctgaaacctattcactgaaagggctcctgtcgaaggaacaccgagtctatgtctcttataagctagctgagctccagctctcgattgtgtatgactacttctacaccaagcttggagtgtattttgagcccgaggaacgactaaatggtcgcttcgcccagcttgctacattgggctccacctttgcagccttgtttctatttgccaggggtaatttcagctacgatagagccgatattgttgtgtcttacatattgctaagtggagctttcattctagagatactctctgtttttattgttgtctcatcattctgggcatacttcatggcaactgtatctgatttcctttgtactagatgtcatgatgtgatcttcagcatcgtcaagcttgtccatccagagagcaaaccacaatggtcccaaaagttggcacagtacaacctcatcatcggatgtataaagcagaagagagcagcagctggcagttgtttactgaaatgcatgaagcgtgtgatcggcatccagcccagcactatgactcatgtcgacatctctcatgagctgaagaagctcgtccttgataagctactacaggtgctgatcagcgatagcattcagcgtgccggtttcatgtctgctgtccttgcttggcatattgcgacggacatatccttcttccatgaagatgagctaggctgcagctctccatccagaggtccaagcagagaactatctaaatatgtcatgtacctttctgcaaagcatggcatcctatctggcaatgatgggcacatgcggcttagaaatgctcaggaattcatcgttgaatgtctggaagaccgccaggaagctctagatcaagatgctgttgtcagaagtgtagctgcaaagatagataatctaactgaggatttcgagcacccaagaatactgacggcagttgagcctgtgttaatccaaagtggccaacttgccaaggagctgcttaagatgaaagaagcaaatgatcgatgggatatcatcatgaatgtttggatggagatgctttgctacatggcatttcactgcggacctggtttccacattaagcaggtaagcaagggtggagagttcatcagccatgcatgtgaaggttgtgatatataa

SEQ ID NO: 13721 - DNA, 390 bp, Oryza sativa
  unsure (1)..(390): unsure at all n locations
  Clone ID: PAT_MRT4530_19727C.1
aaatatgagaagacactttttttctatttatatcacccaaagtttcacatgtcacatacgatgatacctgagcttatattttnacttncgaactacaatattgtgaaaattcagtacaagacaccggcaggggtggtaatactacccggggcactatagtacctagggtagataccatatgtagatggnaagttaaaagccaanagtgtttgggcttgagccagattccggttaatgtaaagattgttaaattgttggaggtgtagttgttgngntatgggcttggaaaagttaatgttctggtagtgagattgttgagtgaaaaggatgagatgttgaaagatttggtttgtttttagtngaaataaaattgattgaaagaagggggtt

SEQ ID NO: 13722 - DNA, 387 bp, Oryza sativa
  unsure (1)..(387): unsure at all n locations
  Clone ID: PAT_MRT4530_19728C.1
catcactcaacgatccacagcgatccagattatctcaccgagttctaacgctcacacgatcatctccacctcccacatccgtataggccgcttttcctccctgcgcgttctccgttcccccgtcagcgccgccatcgctctccctcctgactcccacccgtcgcccttctttccccaacctcatcgccaaacctaacctcccctctctccccgccgcacgccgtcgacccccgctgcgcatatccccatcgcacagcgccgccgctcgggcgccgcactttctcaatcggagggacaagcacgatgagggaggttgcgggagaggcggcgtaggggtttggattcttgggtnccttggaaaccagattaacgtcggataacctagag

SEQ ID NO: 13723 - DNA, 235 bp, Oryza sativa
  Clone ID: PAT_MRT4530_19729C.1
aacaacaagtgctgtgcaccaaacatggggttattgcaaatggaaaaatcaaagaaaaactcattataacaaaaaaaagcaagagaaaatgaaaaaaacagggggaaaggaaacaagaacagttgggaaataattgttcaatcatatgatgaatggctgcttataatcaatgaacaccactaatcatggtactaggtcctaataacggacacactcgactcgttatatcatacaa

SEQ ID NO: 13724 - DNA, 285 bp, Oryza sativa
  Clone ID: PAT_MRT4530_1972C.1
atggcgcgcaaggctatcatcgtgttcgctcttgtcgtcgttgctgctttgtgcctcgtcgcctccgcccaagaccctcaggctaacaagcagggtggtggcggaccaccaggctacgggcactacccgccgtggaacggcggttacccagggcgtcccgaccggccgtgggaccgccctgaccggccatgggaccaccgccctcaccctggtcccggtggccactgccgttgggggtgctgcggccaccgcaaccactggggggagtgcctccgctgctgctaa

SEQ ID NO: 13725 - DNA, 667 bp, Oryza sativa
  Clone ID: PAT_MRT4530_19730C.1
atgcccgtgcttcgctacgggtataataaaagaaaagccatacaggaaaataaacagaaactatttgccattactaaacaaggaataattaactatctgtcaatcttacaagtagtgaaaaagaatgtctcatactccatccgttccgcaacaactcaacctaggaagaaagggatttgcccctttaggacagagggagtatggtatagacacatgaagacagaccacaaagcatgcagagacttccaaaacatgaaaaaaacaatagcacggatatttgagcaaacaccaccaatacgtgcacacattttcggtcatactcaactaaacgtgattagcacgaagctgtcacgaactgagataaaccacatattccgaacacatcgagcaaactacacctgtgctgtgcggctgttctgaacacatattgtcaggcaagttcaaccaaaacgtgattccgcacaaagctaccacgagttcaaacaaataaaaacattaacagatgtctgcacagattttcaggcatgctcaacaaaaatgctattcagccaatccaagttgtcatgaatagcagatgtatgagaaaatcaatcggtcctactcccagcggatgtatagccaaccccaatttctccatcaaatcaaccacattgtgttccaatgaaaa

SEQ ID NO: 13726 - DNA, 261 bp, Oryza sativa
  Clone ID: PAT_MRT4530_19731C.1
tcttgttctagatcgcgggcggccattctcgatctataaccctacgttaccgacagggagacgcggggaggaagcttttcatgtagcatgcaactccaaagtaagacagtttactcgcatagaggtgccttggccggaaggtaatgggctgggatttcagcgcgaccgaccagctacagagcaccgcggatgcggaagatcgtcctcctgagcttctggttatacatggtggccattcacgcacgatctcctgcttcttct

SEQ ID NO: 13727 - DNA, 1171 bp, Oryza sativa
  Clone ID: PAT_MRT4530_19732C.1
ggcccccggccggggctgcggcccgagccgggcttcggccgtgagagtgaacaagagataagctaagctagtacagcaaccagcaagaacaaagaagagtggccggagtgggcgggggagatgagctcggcggcggcggcgacgaggttcatcaagtgcgtcaccgtgggggacggcgcggtggggaagacgtgcatgctcatctgctacacctgcaacaagttccccaccgattacatccccaccgtgttcgacaacttcagcgccaatgtctccgtggacgggagcgtcgtcaacctcggcctctgggacactgcaggtcaggaggattacagcaggttgaggcctctgagctacaggggagccgatgtgttcatcctgtccttctccctgataagcagggcgagctatgagaatgttcagaagaagtggatgccagagcttcgccggtttgcgcctggtgttcctgtagttcttgttggaaccaagttggatctccgtgaagatagggcctatcttgctgatcatccagcttcttccataataacaacggagcagggagaagaactgaggaagctaataggagcggtcgcctacatcgaatgcagctccaagacacagagaaacattaaagctgttttcgacactgccatcaaagtggtgcttcaacctccaagacataaggatgtaaccagaaagaaactccaatcaagctccaatcggccagtaaggcggtacttttgcggaagcgcttgtttcgcgtagtcaataaccaagaagaaaaaaatgtggtttttgttccatcaccatgatgttcagatggccccatggatctactcagaatgggatagaagatcatggttgaatcaacattgcttgcagctaggaggaacttctagttctctttttttctgcagtggagctccttttgtttctcctttctctttttttcttatgttgtaaaagctccagaaagttttacccttggtaataagatgtgctcttctggatggctacctttacccgtaaaaaaattcactttgcgaaatgttggaaactactggacctaacagacctaacagacaaacaaaaaagaagccacatgcttcaaccttttcttatatactttggattgaatacataggaagttaattaaaaaaaaaaaaaaaaa

SEQ ID NO: 13728 - DNA, 744 bp, Oryza sativa
  Clone ID: PAT_MRT4530_19733C.1
atgagctcggcggcggcggcgacgaggttcatcaagtgcgtcaccgtgggggacggcgcggtggggaagacgtgcatgctcatctgctacacctgcaacaagttccccaccgttgagtgccgcgccgccgctaatcccttcctctccgttcttgctccggcccgccgtgctggcctatcttctcttcggctcgatttggattacatccccaccgtgttcgacaacttcagcgccaatgtctccgtggacgggagcgtcgtcaacctcggcctctgggacactgcaggtcaggaggattacagcaggttgaggcctctgagctacaggggagccgatgtgttcatcctgtccttctccctgataagcagggcgagctatgagaatgttcagaagaagtggatgccagagcttcgccggtttgcgcctggtgttcctgtagttcttgttggaaccaagttggatctccgtgaagatagggcctatcttgctgatcatccagcttcttccataataacaacggagcagggagaagaactgaggaagctaataggagcggtcgcctacatcgaatgcagctccaagacacagagaaacattaaagctgttttcgacactgccatcaaagtggtgcttcaacctccaagacataaggatgtaaccagaaagaaactccaatcaagctccaatcggccagtaagatggccccatggatctactcagaatgggatagaagatcatggttga

SEQ ID NO: 13729 - DNA, 525 bp, Oryza sativa
  Clone ID: PAT_MRT4530_19734C.1
aaaacagggaggcaaattaataagggggaaaaggggaaacctaacagaaaaggggttggaaaaacccaaaaaaaaaaaaaaggggggggggggacccagggggacctaataattaatttaaagaagggaaaatgaaaggaaactaaacaagccggaaaccaaaaaaaaaaacctggtaagaaacaaaaaaaaagggaaaacccgcaacaacaattttggaaaaaccccagccaaaaaaaaagggaacggaaaaaacaggggggtaagaaggcacaaaaaaaccttttggaaaaaccattggccctgggggccgggcaattggcactcgcgggggggaaagctccccgcccggcaaacgggggccaagtggtggcggccaacccacagcccctgaaaccgggggtttgggaaaaggaagggccccccccccgccacctgggccgcccccattttgggggcaacaaggaggcccagaaggaggaagggggccccaaccttgcaaaaaaagggaccctttgggccggg

SEQ ID NO: 13730 - DNA, 541 bp, Oryza sativa
  Clone ID: PAT_MRT4530_19735C.1
ccaggagccctgctcagctcgaacaagggtccagctccagcagtggagccagcggcagcacaatatgcagtagtccacttgttggcatcgagcacctactataagcttgaagaggttgaagtgacaagccaactccatgcaaggtgtttgcatacagggacgctgtccacaaggcatccaaggattcatagacctacataattgtcacgtttaatacccatgatggaagtgcaaggactccgaaatagcgctgcaagggaaaaatattgagagaatattagcttgattgtccccatagctggaagaattctaagacaggaatcacgacacttgtcttgtttgcacaagataagcatcacggatagtactattactgttgtggcatgttttgaagagcttgtattatgtaatcagattcagtcctgtctaagtaaggcgtgttgcttatatttttaagtcctacatagcatggtttgtaatactacttctattttttaatatatgacgtcgttaactttttgataaaaaaaaaaaaaaaaaa

SEQ ID NO: 13731 - DNA, 373 bp, Oryza sativa
  Clone ID: PAT_MRT4530_19736C.1
ttttgggtgggttttgaaaagcttgcagataatcaattaattaataagcaattagtataatgctgaccaagaccaagctggtcatcaagcactccttaacgatcacatgtttggggcagcgactccaaaggtggaaaagctttttgatgaatgttcgggtgctagttaaatgttgaggagtttatattaggggaaaagcagtttagacaggcattataaatgggttgctgatgggcattgtggaagggaaaaggacgcgctgcagggcgttcttagagaagggaggcacctgaagaggaggatgaccacgtggcagcattgtacccctcgctgccacaatatggggcgggggcccaaaatcaagcccaccccg

SEQ ID NO: 13732 - DNA, 312 bp, Oryza sativa
  Clone ID: PAT_MRT4530_19737C.1
atgagggaggatgtgtcatctcccctgaacataggactgactgaccctgaatggatgtgtacctcgatgattcttcggtttcttctgttctgttctgttcttgatttgcttttacaagggaagaacagaatcggagaatccgcaggcgagaccgcaccaacccgagcgctgcttcggtttgggccgaaacgattgagcggccaccgttcagctgcggcctgcgggccttcgggccacacggcgaggccgaggcccagcacacgcgttctgaagacttctcacgggctgtggcctgtggaggaagcaaactga

SEQ ID NO: 13733 - DNA, 678 bp, Oryza sativa
  unsure (1)..(678): unsure at all n locations
  Clone ID: PAT_MRT4530_19738C.1
gtaaatgaagttcactattgaaagtcctggttcaataacacataatagactcaaacatttgcacaagggacctgctgatgtataatacaataaataaccataggctttgatcactttacacttccctaaaccttgtatatttacccagctaaagtatttttttctgcacaatatatatattttacccatcattagttgtaacacaacttaagatatcccacatcaggtcttactaaattaatgtcttctcagattctttgaaaatattcttgcctgttatgttccacacagacaatccattcatagaggctaattcttcagtcacttcaaacttgctatngcttccccaagtaacagcaattgaacattgttggtaacatctgttaattcgggaagacaacaaggaaaaccactcaatattatttgcccccccttttttttttaaattcaccactaatgttgctctcaatatcctcaactttttgagtaactgtacttggtgaaatgttaattgtctgaagtttattttctctagacatatttctttggttgttgtaagcaaacatgatttaataactcatcatcagtaggtggttctctctgcttgaccaacaaattagctttttagaaacttactttagtcactcattttcatttatgtttgtgacaaaattcttc

SEQ ID NO: 13734 - DNA, 732 bp, Oryza sativa
  Clone ID: PAT_MRT4530_19739C.1
tttttttttttttttttttttttaatccaaacagtcaaaatagacaaatcaatttagttagaacatggaagtaattcgactccccagacggtaacgtaatcaacctgagtatgataacgcaagatcatgatcaatcgcaccaatattgattacaaaacatgaattgatgtgatgacaacaaaatatcaagacgctgttgcagtttctcaaccaaagttccactgcggtaaagattattcatgctggctgacaagtgtaggtccacaaaatctcgcctcttacaaaatcacccatctagtcgccacaatttaccattagcgatacaaacttaaaacagaccataaaattcttctttatttcatacagttgcacgtctgcagcatgaaataaggctctggtaaatcctattatgcctgtgctggcgccgcctcagtagttttgtcttccttcttcccactaaaaagcctgccgacaccataaaaaatacctccccacatagctaagctggctagcacaaattgctcttccttccagttagccgggttcatcggttcttgccaaatgttgaccttcggaggcccatggtgatctgcagcgccggcgaggccacggcgggagacgaggcgggcgagcggggaagacgaggaggacgccgccgccgccgcaacgagacgagatgccatcgcttcttcttggattggttcttccttccaggcaggcaggcccggccgg

SEQ ID NO: 13735 - DNA, 609 bp, Oryza sativa
  Clone ID: PAT_MRT4530_1973C.1
atggcaccgtacgaagcgttgtatggccgcaaatgccggacaccactattgtgggaccaagttagggaaagccaagtgttcgggaccgatatcttgagagaagctgaagcgaagaagagttatgcagacaaccgacgccgtgacctggaattcgcagtggatgattttgtgtaccttcgggtcacgccattgcgaggtgtacacaggtttcagacgaaagggaagctcgcacctcggtttgtgggtcctttccgtatcattgctcgacgcggggaagtcgcttaccagttggagctgcccgcctccttgggcaacgtgcatgatgtgttccatgtgtcgcaactcaagaaatgccttcgagtgccgtccgagcaggccgacttagagcaaattgaagctcgcgaagacttgacctacgtggagaggccagtgaaaattctggacaccatggagcgcaggaccaggaactgggtaatccgtttttgcaaggtccaatggagcaaccacgccgaggaagaagctacttgggagcgtgaagacgagctgaaggcagtccatcccgatctcttcgccagttcttcggaatctcggggtcgagattccgtttaa

SEQ ID NO: 13736 - DNA, 576 bp, Oryza sativa
  Clone ID: PAT_MRT4530_19740C.1
cttcggctgagatgtcttcttcgatgacgtcggttttggtactttcttactttgacgtacaggcattacatctgcattttcacgccttgtgactttcacgatctctgatgatggctttgcctttggagggtccgcattgactggctgtgggtgcattgttccagaaagcatctcacgtagatcacgtacaccagaacccctttggccagcaaagctttgctgagagcttttcttctgaagcttcaatcgcaaatcccgtggatcaattgattttgaagctggttcatcgtcttcccggtaaagatcatgcttccatttttcatcagtttgccgttgcctcttggacggcgggttacgggccccccggccgccggcgccggcgccagcgcgggcggcgggctggtcgccgtcgatgcggtcgtggatggagcgcttccggccggtggagatctggtccgcgtacatctcctcgcccgacgcctactagcagctacctctcgctctcgctgcctctccgcgagctcggggatggtggtggtggtggtgggtctagggtttcgggggggtgatacgaat

SEQ ID NO: 13737 - DNA, 207 bp, Oryza sativa
  unsure (1)..(207): unsure at all n locations
  Clone ID: PAT_MRT4530_19741C.1
cctgtncnnccacncccccgagagcatatcactgactnngctnctgnnaggnaaaagantactgatgaanccnatcgnattactnnaaaaacgnangcnatatcaaatacntacnatccatcttnagtatatattntncanatnttgtaaannntacacttatttnatcttnngtngattgacgaagnntgctgtagaggggcaaca

SEQ ID NO: 13738 - DNA, 341 bp, Oryza sativa
  Clone ID: PAT_MRT4530_19742C.1
aaaaaaaaaagggcggtggattcataagaaattttttaattacccttgcttgcaggggcacatttgaaaaaacaacgtgaaataaaagggaaaaaaagcaagccgaaagcttgctcattatttttttccaaaaacgcgacagggtagggactcgctcgcttctccctctggcgaaataatgtgcgcaatgcctcaatcgggcagcaacaagtgcttggtctccggggatcgccgtcactggttggtcgttggcggtttgtgcgggggtttgtgctttttcggaggggctttaggttttggctcaagcttaggcttaggtttcggttaaggttttggctttg

SEQ ID NO: 13739 - DNA, 1551 bp, Oryza sativa
  Clone ID: PAT_MRT4530_19743C.1
atggagatgcccatctaccatgatagagttactcctggacctaataatctgccctcctgtgcatataatgtagtatcctccactcaggagctcggcatctctccggccaagacggcggatctggtggcctcggcggttgtccgcgtgaggccctggagcggcgagcgattcgaggcggcgttcgacgacaacggcaacggccagatctcgtggctcgagagcctcggccacacagccaccggcggcgacggcttcatcagcctcgacgagttcgccgtcctcaacgccaccgccagcggtgacgctgccaccgtcaagacggtgggagccgacgcgccgatgcagcgcgaatcctctgcgctcaggaccgaaggggcgacggcgtgcgcccgcgccagatccgccgcctccgcgccggcgaggccggttcccgcgcgggtggagatgtcagatagtagggaccctgtgtgggagcacggggagaatatcccacctggatggcgctgtaagtattgccatacaaagaggggcggtggtggggcaacaagactaaagcaacacttggctgcaagagggaagggggttacatattgcaattcagtgcctccggatgtccgtgagttcttctgccgtgagttggacaggataaaagatgcaggtgaccagcgtaagagtgatagcggaagaagggttgaagcagcaagggtcaactattatgacctaacaggtgatgccgacgaggaggaacaaatggaagcagccattgcagcctcacgacaagacgaaaactttaggagggatgttgaggagcgtggtggcacttatgagcatggcggattcttcacaaagaaggggaagcaagctaggcaagccattggtgagtcatgggcaaggttcttctttaccgccggcattcctggtagaaacgccgataatccatactttgtgagcgccgttcgggagacacaaaagtggggtgaaagtgtaccttctccaactggtaacgagatagatggaaaatatcttgattctacagagaaggatgtgaagaagcaatttgataggttcaagaaggattgggatgagtacggtgttactataatgtgtgattcttggacaggtccgacgagtatgtcggtcatcaattttctgatatactgcaatggaataatgtttttccacaagtccattgatgcgaccgggcaaagccaggatgctaactttgtgctgaaggagataaggaaggtggtacgcgaaataggctcggagcatgttgttcaaattatcactgacaatggctctaactacaagaaggcgtgcagactactacggcaagaatacaagacaattgtgtggcaaccttgtgtggcacacacagttaacttgatgcttaaggaggttgggaaaatgccagaccacgaaatagtgattgagagtgctaggaaaatttgcagatggctatacaatcataacaagttgcatgctatgatggtcttagctataggtggtgaactggttaagtggaatgctacaaggttcggaacaaactaa

SEQ ID NO: 13740 - DNA, 304 bp, Oryza sativa
  Clone ID: PAT_MRT4530_19744C.1
atggtgggttgtgagcgtatagttttgatggtcgtgctcatgacaattaaggatcggttcgcgagctactgttgtgaaacattaaccatgccaaccacaagctagcatgggtaacggcatttccttttgtatagtataattcattatggggcgccagactgtgaagtggcgagaagtccgtgggggtcgctggggagtccatgcctctggtaattgagggggtgattatgatccaggaacggtgcgttgtggtggattgtgttatgcgaggggtactgtcacagctcctttccgaggtatcgtg

SEQ ID NO: 13741 - DNA, 2697 bp, Oryza sativa
  Clone ID: PAT_MRT4530_19745C.1
atggatgtaaagcttgttttgtatgttgttatggtgaaaaaatttcatcaaaaagatgcagctgcgctcaggaccgaaggggcgacggcgtgcgcccgcgccagatccgccgcctccgcgccggcgaggccggttcccgcgcgggtggagatgttagatagtagggaccctgtgtgggagcacggggagaatatcccacctggatggcgctgtaagtattgccatacaaagaggggcggtggtggggcaacaagactaaagcaacacttggctgcaagagggaatggggttacatattgcaattcagtgcctccgaatgtccgtgagttcttctgccgtgagttggacaggataaaagatgcaggtgaccagcgtaagagtgatagcggaagaagggttgaagcagcaagggtcaactattatgacctaacaggtgatgccgacgaggaggaacaaatggaagcagccattgcagcctcacgacaagacgaaaactttaggagggatgttgaggagcgtggtggcacttatgagcatggcggtgggagtggatccgctcagccggaggcacggaaaggtagaagtaacccaattaccaatatgctacgaagggctacgtctcatagggagtcacctgctgtgagagattacaacctagcatctgccaaggcccctgtgcagccacgcattgacacaggattcttcacaaagaaggggaagcaagctaggcaagccattggtgagtcatgggcaaggttcttctttaccgccggcattcctggtagaaacgccgataatccatactttgtgagcgccgttcgggagacacaaaagtggggtgaaagtgtaccttctccaactggtaacgagatagatggaaaatatcttgattctacagagaaggatgtgaagaagcaatttgataggttcaagaaggattgggatgagtacggtgttactataatgtgtgattcttggacaggtccgacgagtatgtcggtcatcaattttctgatatactgcaatggaataatgtttttccacaagtccattgatgcgaccgggcaaagccaggatgctaactttgtgctgaaggagataaggaaggtggtacgcgaaataggctcggagcatgttgttcaaattatcactgacaatggctctaactacaagaaggcgtgcagactactacggcaagaatacaagacaattgtgtggcaaccttgtgtggcacacacagttaacttgatgcttaaggaggttgggaaaatgccagaccacgaaatggtgattgagagtgctaggaaaatttgcagatggctatacaatcataacaagttgcatgctatgatggtcttagctataggtggtgaactggttaagtggaatgctacaaggttcggaacaaactacatgtttctccagagtttccttaggaagcgagatcttttcatgcaatggatggcttcctctgtcttcatgcaaagcaaatttagtgggactttggaaggtagatatgcacatgcatgtctatctagtctgtcttggtgggagaacttagaggcagtagtgagttctgtccaacctatgtactcattccttcggtttgctgacgaggacaagaaccccaatttgggtgaggtacttttgagatatcagttgctcaaaatggagtacgacagtctttttgcgaatcaaagggacaagtttgaagcatacatggagatcgtgaacagaaggatgcacgacctaaccaatgagactctcatcaatgccgctgccgcattgaaccctaggacgcactacgcgtattctccaagtgctactgtcttccaagacctccgacaggcattcgagtggatgacggatatcgatacggctgccgccgctttgttgaaggttgagatgtaccgacgtaagacgggtgaatttgggagggcactagcaagaaggatggccatagatgggaaaacttcacctgcacaatggtggtctatgttcgcctcagacacgccgaatttgaagaagcttgcgttgcgtttggttggtcaatgttgctcctccagtggatgtgaaaggaattggagcacattcgcattcgtacatacgaagtgcctggatggactagtgttgatagcgatgaagagacccaaggaagcccagagtaccaagagtccaatgatagtagctcaagaactgaaacagatgacggcgacgacgatggtcaaggaggccaaggcactactaatgtgccctcctaggggtcacacccaacaatcagatcaccacagccccgttcaattcactggtgagggcgacttcactcatgctactcaggaccaggatcatggtgctccaagctctcaacgaactaccattgcaccgggagtccgacaacagcaacaattcagtgacatacaacaggatagctctagctcattcagtgcctctaactttgaaagtggctatccaacgtatgtgtacaaccatccccaagcttctgattatcctgttactacatgggtgtatgaatggcaagagcctcagtgttccaacatatcgcggttaccgtcctcttatcgcggttaccgtaccaaaccgtgcggttaccgtgtctataccgtggattttgaattcaaaaatttggaaacgaaatttgtgcggtttttcgcggtaaccgcacggttaccgcggtaa

SEQ ID NO: 13742 - DNA, 344 bp, Oryza sativa
  Clone ID: PAT_MRT4530_19746C.1
tgtggcgagactcgtgagagaggagaagatccagaaatcgcaagctgcacgctatagctaggtagctatctccggggaaagagagagtaggctgccatggagagcttcttcgtcttcttcacggcggcggcgttgccggtggtggtggcggcggcggtgatcgccgggctgtgcattacggcggcgtggctggcgaggccgcggcgcgtggcggaggtgttccggaggcaggggatcgacggcccgccgccgtcgtcgttcctggcggtgaacctcccggagatgaaggcgagggtggccgccgcggcgtcggcggcggcgccaacggcggactgggaggagac

SEQ ID NO: 13743 - DNA, 7219 bp, Oryza sativa
  Clone ID: PAT_MRT4530_19747C.1
atggcaggagccgttctgtggctgcagctctccagggcaatgcttgggttactgacatcaggggaggtctctcaattcaggccatcgctgaatatctcgccatctgggacttggtacagggtgttttcctggacacatcgagtttggttggcagaggccaatggtgttttctcagtaaaatcagcctactctcttctctgtgccggcaagacgaggtcggcaatcgggaaaatcatttggaagtctagggcgccgactagatgcaagttcttcatgtttttggcgatgcgaggagcttgcttgaccactgacaatctccagcgacggggttggcaaatggcttcgatttgtcatttatgcttggctgacggtgaatcctgctcacacatcttccatgactgccccttcacgcagcaagtttggacgcggattcgtagccggctggacctcccctgttccacaccatcggagggtttaatcaattggtggtacacggctcgcaaaactgtgcacaagcaggaccgaaaaaccttcgacgccggggtgatccttgtgacgtggcttgtttggaaagaacgcaatgctagaatcttcgacggaaaagctgcatcggcggagcaggctacttctccaatggtttctacgaatgagcatcttgtcggcgtcactggtgatgatcatgagcgtttcctgctcaggatcaagaaccgttttgaccgtgttggcttggagcttccaacgatagaggtgcgtgccgaggggcttgcggtggaggcagaggcgtacacttggagatcaccggcagcacccacagtcttcacctccatgggcaacacacttctggcccttgcaaacgctatgcatgtgttaccaattacctggaagaccaagtataccatcctgcatgagactaatgccatcatcaagccatgcaggttctgcgggatcaggaaaaagcacattgctgaaagccttgtctggaaagttagatcgaaggctgcagcatcaaaattaacgtgtactcataaagcactacaggtgtcagggagagtcacctacaatggccatgggatggaacagtttgttccggagaggacagcagcatacattagtcaggaagaccttcacgccggggagatgaccgtgagggagactctggctttctcggcgaggtgtctaggcactggtgaccgccaagatttgctgaatgagctgacgaggagagagaaggaagcaaatgtcacaccagaacatgacatagacatgttcatgaaggatgagacatctgtggagaatagatcttttcccctagagttccttgcccttctgccatcccacaccaccgtggcttcagagtccctatgcagcttatcgagtcaccatcctttgggaccacgtgagaaggtgaagcaaggtctcatatgctgccaccgggtgaagttacacattcaatcaatctacacagttgttgttcagtttgaaaagaaatctacacaattgttgaagaataatggattacggtacttgattaaactgataagaaaagatattgcacatcatcttaatgcgattggtctgtgccttctttcactgttggtgtactactgcatcaatttcttatcagatagtccaatgctttttcttctcccgatacgtctctttatcatggaatctgcaaatggaggcgagagcaaaatagtaataaactatataatgcagatcttaggactacatatctgtgcagatacgttggttggaaatgatatggctagaggcatatctggtgggcaaaggaaacgtgtcactataggggaaatactcattggtccggcaagagccctattcatggatgatatctcgactgggcttgacagctcaactgcattccagatagtgaattttctacggcaaatggttcacatccttggggaaacagctgtaatctctctacttcaaccatcacatgaaatgtatgacctttttgatgatatcatcttcctctcagaaggacatattgtgtatcaaggccccaaggagaaagctgttgatttctttgagtcactgggcttcatatgtcctcacagaaaagctattgctgactttttattagaagtgacctcaagaaaagatcagcagcaatactggtcaagggaagatgaaccttatcggtacttcacagtggaacgattttccgaggcctttcatactggccagaccattacaaaggttcttgaagtaccactagagaggaatctgagctctttatctgctctagaaacttcaaagtatggtgtgagaaaaaggaagttggtcaaagccatattttctagagaattccgtcttttgaggaggaatccatccgtctacatagtaaattgtgtgaatctcacggtgttatcattcgtcgcaatgaccgtattctggcacaataatatgcgccatgactcagtggatgatggtgggatatatttgggggttttattcttctttatggccgaaaccatgttcagtaatatgtgtgatcttggtggaacaatcatgaaattgccacttttcttcacgcaaagagatgttttctatccagcgtgggcttatacttttcctacatggattcttaagattcctattacacttatccaagtcacaatctgggttactatgacatactacccaattggatttgaccgaaatattgggaggcttgccaagcactacttcttgctgctagcactcagtcagatgtcatcttccctcttccgtttggttgctggagtcacaagaaacatgtttgcagcaaaaatatttggaactttcacaatgcttcttcttctgctcttaagcggatttgtagtttcaagcaaaaatctaaataagttttggatgcttggctactggatctcaccattgatgtatgcacagaatgccatttcaacaaatgaatttactgctcacagctggagtaaagtacttcctggatcgtcagaatcattaggagctagtgtcttagaatctcgtgggctatttttagaaacaaagtggtattgggttggcttaggtgcactggttggatacacatttctcttcaactgcctctacactgtggctttggcatgcttcaaatcacctggtagaacctttttgttaggaggtccaaaggttctaaacaaaaaacttgaggaactgagcagaaatactccagtaaaatctcagcaaaaaagagttacaaatgagttgcagagttctgtaagcagaagggcaacacttccatttatgccactctcacttacctttaacgacataagatattcagttgacatgccaaaggaaaaaaaagtgtgtgctgggacagaagatcgattggagatactgaagggtgtgagtggtgccttcaggccaggtgtgttgactgcattgatgggcttcagtggtgctggcaagaccacgctgatggatgttttagctggaaggaaaactggaggctacactgaagggacaataaatatctctggttatccaaagaagcaagaaacattttcccgtgtgtttggatactgtgaacagtcaaacatccactctccacacttgactgtgcttgagtcacttctgttttctgcatggcttcgattaccctcagagatcgactcaatgacaagaaagatgtttgttgagaatgtgatggagcttttggagcttacatcacttcaagatgcacatgttggacttgctgaggagaatggcctttcaagtgagcaaaggaggagactaaccattgcagtggagcttgttgctaatccttctatcattttcatggatgaaccaacctcagggcttgatgctcggggtgcagcaattgtgatgaggactgtcaggaaccttgtcgacaccggtaaaaccattgtctgcactatccaccagccaagtattgacatatttgaatccttggatgagctttttctactgaaccaaggaggggaggaaatatatgttggtccattaggaagccattcttctgagcttatcaaatactttgaggtaaattcaaatttgagcgcaaaacctattgtgaattataaaaaagaaaaaagattaaatggaatgggccaagtatgcactgttcacgaggcccactgcgctcaggaccgaaggggcgacggcgtgcgcccgcgccaaatccgccgcctccgcgccggcgaggccggttcccgcgcgtgtacatataattacgtcgtattattgcataatgggagggtggagatgtcagatagtagggaccctgtgtgggagcacggggagaatatcccacctggatggcgctgtaagtattgccatacaaagaggggcggtggtggggcaacaagactaaagcaacacttggctgcaagagggaagggggttacatattgcaattcagtgcctccggatgtccgtgagttcttctgccgtgagttggacaggataaaagatgcaggtgaccagcgtaagagtgatagcggaagaagggttgaagcagcaagggtcaactattatgacctaacaggtgatgccgacgaggaggaacaaatggaagcagccattgcaacctcacgacaagacgaaaactttaggagggatgttgaggagcgtggtggcacttatgagcatggcggtgggagtggatccgctcagccggaggcacggaaaggtagaaataacccaattaccaatatgctacgaagggctacgtctcatagggaatcacctgctgtgagagattacaacctagcatctgccaaggcccctgtgcagccacgcattgacacaggattcttcacaaagaaggggaagcaagctaggcaagccattggtgagtcatgggcaaggttcttctttactgccggcattcctggtagaaacgccgataatccatactttgtgagcgccgttcgggagacacaaaagtggggtgaaagtgtaccttctccaactggtaacgagatagatggaaaatatcttgattctacagagaaggatgtgaagaagcaatttgataggttcaagaaggattgggatgagtacggtgttactataatgtgtgattcttggacaggtccgacgagtatgtcggtcatcaattttctgatatactgcaatggaataatgtttttccacaagtccattgatgcgaccgggcaaagccaggatgctaactttgtgctgaaggagataaggaaggtggtacgcgaaataggctcggagcatgttgttcaaattatcactgacaatggctctaactacaagaaggcgtgcagactactacggcaagaatacaagacaattgtgtggcaaccttgtgtggcacacacagttaacttgatgcttaaggaggttgggaaaatgccagaccatgaaatggtgattgagagtgctaggaaaatttgcagatggctatacaatcataacaagttgcatgctatgatggtcttagctataggtggtgaactggttaagtggaatgctacaaggttcggaacaaactacatgtttctccagagtttccttaggaagcgagatcttttcatgcaatggatggcttcctctgtcttcatgcaaagcaaatttagtgggactttggaaggtagatatgcacatgcatgtctatctagtctgtcttggtgggagaacttagaggcagtagtgaattctgtccaacctatgtactcattccttcggtttgctgacgaggacaagaaccccaatttgagtgaggtacttttgagatatcagttgctcaaaatggagtacgacagtctttttgcgaatcaaagggacaagtttgaagcatacatggagatcatgaacagaaggatgcacgacctaaccaatgagactctcatcaatgccgctgccgcattgaaccctaggacgcactacacgtattctccaagtgctactgtcttccaagacctccgacaggcattcgagtggatgacggatatcgatacggctgccgccgctttgctggaggttgagatgtaccgacgtaagacgggtgaatttgggagggcactagcaagaaggatggccatagatgggaaaacttcacctgcacaatggtggtctatgttcgcctcagacacgccgaatttgaagaagcttgcgttgtgtttggttggtcaatgttgctcctccagtggatgtgaaaggaattggagcacattcgcattcgtacatacgaaggtccgtaatagacttacccacaagaagctcaacaagctagtgtacgtgaactacaaccttcgccttcgaattcagcaagcaaatgcccaaattagggtggaggacgatgatccccttcaaagattagcggacctctcattctatgaaactaacaatcatatcagtgcctggatggacaatgctcgctctaatgcttgccccgaactagatgaagattcagctgagagtgacgctcccctgcctagtcaacttgtgtctgacctagtcaacttggatgacctgcgaaggaccacgggagcttctagtattgctgagtgggctgatacgaatgtaggtgacactcatattgggaaaaggaagactcgaaagccgccaaaagcacgtccatctaaaaaggtaaagggcaagggtccacgatcgactagtgttgatagcgatgaagagacccaaggaagcccagagtaccaagagtccaatgatagtagctcaagaactgaaacagatgacggcgacgacgatggtcgaggaggccaaggcactactaatgtgcctcctaggggtcacacccaacaatcagatcaccacagccccgttcaattcactggtgagggcgacttcactcatgctactcaggaccaggatcacggtgctccaagctctcaacgaactaccattgcaccgggagtccgacaacagcaacaattcagtgacatacaacaggatagctctagctcattcagtgcctctagctttgaaagtggctatccaacgtatgtgtacaaccgtccccaagcttctgattatcctgctactacatgggtgtatgaatggcaagagcctgtctggcccgctcaattgtacgctcagtggcaaacaacatcatcatggacagaattgtaatcgtggacattatactgtggactctattgttattgtggactatattgttattctggactgtattgttattctggacctacatgtggacatcgttatgctttga

SEQ ID NO: 13744 - DNA, 369 bp, Oryza sativa
  Clone ID: PAT_MRT4530_19748C.1
cgacgggtaaccgccgtttcacgtggcaaatctcccacccggggtccaggagcgcacaaacagcctgtccacgtgattgccccatgtcgttcctcggtcgccagcttcgcacgtaatgtgagtgggtgtaattgcgcgtaaatctggcaatactccagcaagtgcgtcacaaagagcgcacggaaaggctctacagaaggggactcaacagcgagtgagacgaagagaggcagctggatgctctcttgcgatcgctaattcaagatctctcaaatccaaaatacaagacgccaacgcgaatgtgactcgtgatatattgaagtccggagcaagcagtcgctctttcaagggatctggacttgtgacagg

SEQ ID NO: 13745 - DNA, 549 bp, Oryza sativa
  unsure (1)..(549): unsure at all n locations
  Clone ID: PAT_MRT4530_19749C.1
ctgcagggattcggcncgaagcactcacctcactccccaactaaaaaacaatgngctcactnaccaggaaagtggactactgctccggaaggaagtgaaggtcggtgacccccaccggcnggnttcctcggccgcggcggcgttgcaancagcaacacgtcgtcaaagganaacgttccanaangatcnacaggtccggctccggccgccacctccacaaccacaaccacggcaacgactacctgatgggtgccncgaagaccaaggtgtaagaangacttcaacncctgcancggcgaatttccgcgaagcgcaagccanancttcctgctcaagtccgactgatcnaaacctgcttgtgtnntacccgtgtacgtacgtacgttatatgttttgcccntaccttattcctggtggtcnagttggtggcttaaccnctaccttntttttcgtgcgttgcgttttnttcntgcgtnccccggancttanctanttancncctnctccnctgtgcgatcccctnacaaacggaaaangggggggtgttct

SEQ ID NO: 13746 - DNA, 1143 bp, Oryza sativa
  Clone ID: PAT_MRT4530_1974C.1
atggatgaagtcgggcgtcgatggacattctccagggcaaatgaaggctacacgagctgcggcccggtagtcgagatgtcatacggcggagggttggtgcccaatgctaggggctcagttctgcctgcctgtcccgggtatcccggccgtagtgaagccagctgtgaagcaggagtgaagatcttggagaacccgtcgcagaacctaagccaccctctaaatcggaacaacccagcaggggcaaccaacgttcaagtacctacagtccagcaacagtgcaagagatcacatgttccctcaggaatgatcacactaagaaaacgagcgtttcgctacctgaagcaaggggatttgaccgtcacagagtacctgcacgagttctatcgtttggctcgctatgcaccagaagatgtggaaacggatgaagaaaaacaagagaagtttctccaggggttaaaagatgagcttgcagtgcaactactcctagaggattatgaaaattttgagaaacttgtggacaaagccatgcaacttgaaagtgagcataatcggatgacgaactgcaagagaaggattgtcaacatcccagtatttccaggtggtaaccaaagacagcgcactgagccacttccgatcatcggatcttctgttgggtatcacgagttcctgccccaagaagatgaacgcaatgtagacaacaacaacatcattcaccaagatatcgacgatagtatcaatgaaggcacccagaatggcaaccctagcaattttgactctgagaaagactccaagggtgatagcaataatggtaccactgatgccgatgttagcaaggatttccaaccaccaattccaactcctagtcaggacgatcgttcccaggcggacaactcagcaaagaagacgttgatttgttacaactgcaaagaaccaggtcatttctcgagagattgtccacagccgaagcgtaacctgcgtcatcactccggccattatgcaagaagaagacaggtcactcgccttgtggtcactggagcaaacgccgtacctgtttcactgaaaggcagcaagccaaaggacctcatcgtcaccagaagcatccacaactctcggagtgaagagtacctggtggacaaagtttaa

SEQ ID NO: 13747 - DNA, 653 bp, Oryza sativa
  Clone ID: PAT_MRT4530_19750C.1
gcacgaagggccacggctaataatgcaaaaacagaagcctgcctcgtctgaatcagactcaagtgattcagggtctggttcagacagctacagctcagaatcggaatcaagttctgatgagagtgacaggaagcgaaacaagaggcggaagaagtaagaggtggaagaagattttcatgtaaattctaccatggttctgggattctcctgtattttatctacgtccagtatctgatctagctgttggtgcttactaaattgagaacccaatcatattaaccgagatattggttcctacttcctaccttcagatcatgtgagagaccgaagagttatcagagcatattggtattggtccaactctaagagattggatgagcctaacatgcaagattacttcttttctatcttcccaagggatcatccaaagaacacaagtttttctacaaatttcttcacttcaattggtcttggttgtatcactatgaccatgagcgagattacctgaagagcattcctcgccatctaatgcaacagaaacctgcctcatgtatcggtatccatgtgttctgatcctaattgttttgtttttgttggatctccatgtgcaatataatcagatcttagatgctgttaaaaaaaaaaaaaaaaaa

SEQ ID NO: 13748 - DNA, 645 bp, Oryza sativa
  Clone ID: PAT_MRT4530_19751C.1
atggatgcggccgcgctgctcctcctcgccgcggctgccgccgtggcgctcaaatggctgatcctcgggagttccaccgccaggaagttgttcgcgttgagcatgtcgttctcggagtccatcgccgcccctccctcgccgcccccgctcgccgcgcgccggagccccaagagcagcgcccaccgaggagatgaatggagcctgtcacggattggcaggttggcggccgaccacgtgaccttcgccgcctccacaaatgaaatgaacggagcccgtcgcggatcggcagcttgtcgaccaaccgtcgtcgtcgtcgcaagcctccgccgtcatcgccgccgcacagctgggcgggctcacccttgccgccgccgtgccctaggaggagatgaatggagcctgtcgcggatcggcagcttgtcggccaaccacgtgacctccgccgcctccacaggttgtcatcgtcgtcatcgcaagcctccgccgccatcgccgtcgaggtcggcagctaaatgcatgcagctaccccaatcttcctgcaaatggtatagcaaaaccgcaaccaccaaaaccacatgcgaccacgcgagacccatgtaccggaccatcctgcaaaaacgtctggaaacaaaagactacccaaaa

SEQ ID NO: 13749 - DNA, 369 bp, Oryza sativa
  Clone ID: PAT_MRT4530_19752C.1
ccacacgggggtgcacagcaggcagcaggccagtggcagtcgcgcgacagcacaggtcccacaggcaggcaactgccacgccgtgcgacgagctgcaagatcatctactacagcccgtgattttggtttttggtttgggttaaatttgcgtttgggattagtggggtagattaggccgtctgattgagtgtttgaagttaatgcatgttgcgatgcgtcgtgcgagtgccgcctgactgagctgatatgtaagctgactgctacgctttgagctagtggagtgtggtcacagtggtggtgacagtgtcacgttatcgcatgcatgcatgcattgatgtcgacatgtcctcgtaatgtggcgtcgtgttt

SEQ ID NO: 13750 - DNA, 780 bp, Oryza sativa
  Clone ID: PAT_MRT4530_19753C.1
atggccggaaaaacatctaaagctgccactctaaccatgaagctgctcgtcgacaccaaggcgcagcgcgtgctgtacgcggagggcagcaaggacgtcgtcgacttcctcctctccctcctcgctgtcccgctcgccggggtcaccaagctgctcactgccggcgacatggtcggctccgtcggcaacctctacggcagcgtcgttgacaagctcggcgccgactacgcctgccgcggcgacgtcaaggccgcgctgctcgcgcccacggccgccctccggttgggctcgccggcggacgccgacaacggcggcggcgccctttaccggtgcagcggctgcgcctgctcgagaagctgctacaacttcgtgaccaaggtgaacggcacgccgtgtccggtgtgcaagaggaagatggcgaccgaggtgagtcttgttgagccggacgatgtctccggcgccggcgccaaggtcgtgacgtcgccggcggcgccgtctggcgaggcaagctctagcaaggctggttacgcgccgggcaaggtgacgtacacggtgatggatgacctcaccgtcgcgccgtcgtccaccgtctccgccgtcgccgccctcgtggcgcttggcgtgacggacatcaggggactgcaggagaagaccgtcgaggtcggctacgacgagggtttggctgtgctgaaggcttcgttgcagtcaaagacagtgctcactgatgtcttcctcggtgcgaggcggactgctcaccgacgtcatcctatgctggtttga

SEQ ID NO: 13751 - DNA, 652 bp, Oryza sativa
  Clone ID: PAT_MRT4530_19754C.1
acaacatcccactctaccaaatcatttacttctttttgaacccaaccatccatccaaatcatcccatccccaataccaacaaccaaactacacttgtatcacatcaccgccaccatgcagatcttcgtcaagaccttgaccggcaagactattaccctcgaggttgagccatctgatactatcgacaacgtcaagtccaagattcaggacaaggagggcatccctcctgatcagcagcgattgattttcgccggcaagcagctcgaggatggccgcaccctctccgattacaacattcagaaggagtcgactctccacctcgtcctccgccttcgtggcggtatgcaaatcttcgtcaagaccctcacaggcaagaccatcaccctcgaggtcgagtcatccgacaccatcgacaatgtgaagtccaagatccaggacaaggagggcatccctcctgatcagcagcgattgattttcgccggcaagcagctcgaggatggccgcaccctctccgactacaacatccagaaggagtcgactctccacctcgtcctccgccttcgtggtggtatgcaaattttcgtcaagaccttgaccggcaagaccatcacccttgaggtcgagtcatccgacactatcgacaacgtcaagt

SEQ ID NO: 13752 - DNA, 1014 bp, Oryza sativa
  Clone ID: PAT_MRT4530_19755C.1
atgtgctggctggagatcaccggcaagctgcagcctgcagctctcgctcctctctccggcgacgacgtacgccgtctaacttgtctgctcatctctccagttgttgggctgcagcagcgtctggtcctctctccagttgctgggatgcagcagcgcgacgcccccgccggcgccggcatcacacctctcaagccacatcaatcctctcctaccaagccccctgcactcgccacggccatggacgttgtgtcgtcgttgtcttcttctccgacgccggcgccatccgtgctcaagtcgctgcttctgtcctacgcgtacgtgagcgtgtggatcacattcagcatctcggtgatcatgtacaacaagtacatcctcgatcccacgatgtacaactggccattccccatatcgctcaccatggtccacatggtgttttgcgcttccctcgctgtggtgctcgtccgcgtcctccgcgttgtcgccgagccgacgtcgccgcccatgacgcccagcctctacgccgcctccgtcgtgcccatcgggcgtgctctacgcgctgtcgctctgatgctcaaggcgctcatgcccgtcgtcgtctactgcctcgccatcgcgttccgcaccgactccttccaccacgcctccatgctcaacatgctcggcatctccgcgggcatcgccgtcgccgcctacggcgaggcgcggttcgacgcgttcggcgtcatgctgcagctcgtcgctgtcaccgccgaagccacgcggctcgtgctcatccagatactgctcaccggcgcgacgcccccgccggcgccggcgccggtgccggcgcaggccgaccgcaacgtggagatgggcctcctcggcggcgagagcagcgcgtcgcggccggcgatgaagccgcgccaggttcttgattgcgaaatcgctcctccatccaaccgtgcgaccgagtttggttccaccggactgcgcgtcggcatagattgggacgcgggggcaatctgggcattttga

SEQ ID NO: 13753 - DNA, 2133 bp, Oryza sativa
  unsure (1)..(2133): unsure at all n locations
  Clone ID: PAT_MRT4530_19756C.1
tgctattaatagtcaaatttaaaaatgtttgattatcnaatgtactaaaaatgcttatattttgagacggaggaaataacatatactgcgttacagcagagaaagagtaaagcaaatgatcatataggctaagtcgtcatctcataactattcgatcctctcgcagcatcagagataattcaaacatgaattatcatatccctaaagaaacatatcgaccaatgaccatatgcatgtaccgttaattaattaccagctcacacaaatactcgatcagatcatcaccctctagcttcaatattaggcgtctcccttgccgaccagatccttgcttttgttccattgcttgttcccggggctccacttggggcacttgggactgaagtacttgccctgcaccctcgcgtcgagcagctcgacgaccgggccagggcgcacgcaccgcggcgccttgtactggttgatggacgcgccccggctgatcgcgtagtccatgagcttgtcgaaggtgccctccgccacgacgcgtatctcgagcgggccgatggacctgtcgcacgcgcggccctgccggtagacgctgttcagtgcctcctccacggacaggcagcactcctcgaacacggacgccggcaccgccgtgctgccggcgcgcagctcccagaacagcacgtagtggcccgggatggtggccgcgtccgcgtagctcgtgtactccaccagcgacgcgccgaacggcgccaggtgctgcaccgcgccgctcaccgccgcgtgcagctccgtctcgtccgtcttgtccgagtcgacgctcagcgccacgttctgccgccgcacgaagctgaacatcggggccttgttcttgaaccccgccaccctcagcacgtcgcccacgcgataacgatacaacccggaatacgtggtgaccacgagctcgtactcgtgcccgagctttacgtcgaccaggtcgacgaggtcgcggtggctcgcctcggcagtggcattgttgcaattgacggggaggaactcgtagtagcacatggtggggatgagcgtgtaggcgacgtcgctgggcttgcacatgggattcaggttgaggccgaagtagcactccgaagaggcgtacatggtgcacgtcagcggcaggccgccgccgtagaactcgagcgtcgggatgtactgcgacatggtgccggtcacgatcacgtcgatgtacttggtgcgtggccacaggcgccggatgatgccctcccacgacgccctagcgcactcgtcctcgatcgcgtcggcgagcgccgggtcggcgcggagcacccgcccgacggcgtcgcgcaccacgcggtcggtgatctccgggtcgagctcgccggtgcggatgtcgtggcagaggcgcgcccagtgcttctcgaggaaatggatggcgcggaggaagccggaggcgaacacggcgcccacgcgcagcacgtcggcgcggtggacgaggccgcagagcagctgcgcgtacatgctctggtaggagtccacgcacaggatggcctcgtcggggctcgtgtaagatgtgtaggggtcgcgcggacggtcgaggaactgccggctccggtagtagcttgtgagcaccggccgcgccgcgagcccgcccggcgtgcgcgactccgccttcacgaagagcaggtacatcgccttgcctttgtcgagcccggacaccgactggctcatcaccggcatcagcaggctgtacagcagcgaccgcctgttcatctcgtcggcgatggtcggcatgagcttcctctcccctcccgacgtgcccgagctcgtgaggaattcggagataggcttcccggagaagatcggcgaggtgtcgccgttggcgatgcggaggatgtctggctggaggccctcgtatgtgacgagcgggacgaggcggcggaaggcgtcgacaacgtcgggggacccggggattccgtaccggcgcaggtactcggccggcgcgttctgcgccaggatctcgccgagcacgcgccgctgcacctgcccggcgttcgccgtgacgtgctcgatgaactcgagcgcctcggcgtgcgccccgggggcgtagccgtaggccggtgctgtcttggcggtcggtgcttccggcat

SEQ ID NO: 13754 - DNA, 1435 bp, Oryza sativa
  Clone ID: PAT_MRT4530_19757C.1
atgtccagattgcccccacgtcccaaactcggtcgccacacaccactcgacggaaggcatcacgaagctcgccgccggagagtccgccgcgtgcagccgtcggtgggacccatcgctagagtcgccgccgtcatcaggttcctgaggtggcggagctcttggacgtgctggctggagatcaacggaaagctgcagcctgcagctctcgctcctctctccggcgacgacgtacgccgtctaacttgtctgctcctctctccggttgttgggctgcagcggcgtctgctcctctctccggttgctgggctgcagcggcgcgacgcccccgccggcgccggcgtcacacctctcaagccacatcaatcctctcctaccaagccccctgcgctcgccacggccatggacgttgtgtcgtcgttgtcttcttctccggcgccgtcgccgtcagtgctcaagtcactgcttctgtcctacgcgtacgtgagcgtgtggatcacattcagcttctcggtgatcatgtacaacaagtacatcctcaatcccacgatgtacaactggccattccccgtatcgctcaccatggtccacacggcgttttgcgcctccctcactgtggtgctcatccgcgtcctccgcgtcgtcgccgagccgacgtcgccgcccatgacgcccagcctctacgccgtctccgtcgtgcccatcggcgtgctctacgcgctgtcgctctggttctccaactccgcatacatctacctctctgtctccttcatccagatgctcaaggcgctcatgcccgtcaccgtctactgcctcgccgtcgcgttccgcaccgactccttccgccacgcctccatgctcaacatgctcggcatctccgcgggcatcgccgtcgccgcctatggcgaggcgcggttcgacgcgttcggcgtcatcctgcagctcgtcgctatcaccgccaaagccacgcggctcgtgctcatccagatattgctcaccggcgcaacgcccccgccggcgccgacgcaggccgaccgcgacgtggagatgggcctcctcggcggcgagagcagcgcgtcgcgaccggcgatgaagccgcagcatgcagggttgcttcagaagtagtaggagcatcaaaggcctgacaacaccatggtttgcaaagactacacagcatgacaggacctccaaccccaagtgcttccctgacccctctccattactggaagcctgcttgggttgccatcgaaacatttacgaagtgaagtgtttagccacccaaattatggagtctggggaggcacaatgcccatcaggcaaagctgctttgatgtgtaagcattaagccaagtagtgttgtttagatgggacaagcaaactgatctgatccctgtatatattgatcagattcattcaatccatattcagtggttcaatc

SEQ ID NO: 13755 - DNA, 376 bp, Oryza sativa
  Clone ID: PAT_MRT4530_19758C.1
atgacttgccttgctcctgtgctgctagaacctctgcaaccacttcataatagaagaccactgtggaacgggaccaccgcgacagtccattgccggtccacggggataggggctcggctcgggacgagccggctaggtgatggcgagcagcgatgtggcaaggagagagaggaggaaaagaggagggcctcaccgacgatgacagcgaccgacgcggagcggacgacaacgaaggcggcaaggggtgaacgggctccggagcaaccttgggaaggagatgagaggggttagagggagagaaagagagagagagagaggccacggcggcaagcattgccagccgtagacggcaggcatgcagagctcaccggcgaac

SEQ ID NO: 13756 - DNA, 386 bp, Oryza sativa
  unsure (1)..(386): unsure at all n locations
  Clone ID: PAT_MRT4530_19759C.1
ggatgcgttcgggcttgacctccgtcggcgaaaggagcagccgcggccanccgtgcagataccgccggagatcgccgccaagctccagcgcctcgcgcaagcggtggcgaggccgtgacctcaccgggcaccggccgaacatgtggggccctgccgtttcttcctcgtctctgcgtttttttccccgcataggaggaattaaacaacacttatgtcaagtgaaaagtaaactagcccatgttcgtgtgcatgaatacacaagtaaattaagatgtgttcatgtgcacaatgaaccgttaattgtaagacacggtctcccagaaatgaaaactgcatattgccggattaaattaacacttagttgaacacaaaaaaaaaaaaaaaaa

SEQ ID NO: 13757 - DNA, 614 bp, Oryza sativa
  unsure (1)..(614): unsure at all n locations
  Clone ID: PAT_MRT4530_1975C.1
atggatcgtgagcaacccattcgtacccagatttccctaatgggggatcataacaggtgctggtatacaaggtatcatgatgctcacaaagtggattcgttccaacgttcctaatagccttccaaacactagtatggaagtacccaatgtactacatctcctttcacaagtatgcacctgcaggggcttttaccacagaatgagttcttaggtttacgtactcaaccttgaaggacccataacagttagtggcgaganaagttacttgctgagcttatttcaagtggaaacaggtcattcaaaatgggctggatcttccagctactttgtggtatgattatgacctatagactattgtcttgtagtgattatcaaggttcttgatatagtcaagcccatacttaaggggatgacactttaggtgcaacactataatgcattcatggcatagagaacctgttggcgccccctcgtggattcttgttggaaaatagtatatctaatattgtaatattgcttggtgcacttatatacagccgagaaaaaatgtagtattgtatttatattactccatataagtatgtgactatatngtgaacaaaaaaaaaaaaaaa

SEQ ID NO: 13758 - DNA, 567 bp, Oryza sativa
  Clone ID: PAT_MRT4530_19760C.1
gcacgaggacgacgacgcgtatttaagttttccatctatctctggaaatgcatccccctctgagattgcacaggcatcctatgtgcgctgagattatcgaggagttccaaaagtgccatctggatcaccctgtgaagaagttcttcggagagtgtacagaccttaaaatcaagctagatcgctgtttccgacaagagaaagctttgaagaggagggctaacttcgaagagagcaagaaattcaaagaacagctacttgcctacaagagggagattgcagagacaaaccaggaatgagctctttaacgcttatgctccttgttcgtgacaatatgacctcaatcttgtgaaagaaaagaagtgttcccttttttggttctgtatgtgatcttataaatgctacagtaatactcaggagcacagttggccgattggcatctaatgatcggcgctaaatagttgttgaattctctattgatcttggattcttgggttatgctgccctattgttcatggatgatgcttctgtagaattcaagctctgaaccggttgtagagttgtagacag

SEQ ID NO: 13759 - DNA, 195 bp, Oryza sativa
  Clone ID: PAT_MRT4530_19761C.1
gaggggcggccgagcatcaaccaaatctagactatctactaagtaagtatggatggctactaattaatgtattgtctaacctgtcttcgcagctcttctcttgagctccgctctgtagccacagcggagatgcatgtgtaaaggccacaagagtattcaatgcaatgcagatttgataggaaacacaaatttgag

SEQ ID NO: 13760 - DNA, 513 bp, Oryza sativa
  unsure (1)..(513): unsure at all n locations
  Clone ID: PAT_MRT4530_19762C.1
gcaatgattcagcccgccgcccgttgggacgggagcttctaggcggccggccgcggcgcgtgggccgggccggcttggccggtggcacaggcccttgggggcttgcgcccctaacgtgggtcggggcgggcggcgggcgcaaacgccgcttgctatcttggattctgacttataggcgttcagggataatccgggacacgggagcttcgcgccactggcttttcaaccaagcgcgatgaccaattgtgtgaatcaacggtgcctctcgtactacggtgaattactatcgcggggcgggcatcactagggtaaaactaacctgtctcactacggtctaaacccaactcacgttccctattggtgggggaacaatccaacacttggtgaattctgcttcacaatgataggaagagcctacatcnaaagatcaaaaagcaacgtctctatgaacgcttgggtgccacaagccagttatccctgtgggaacttttctgacacctctagcttcaaact

SEQ ID NO: 13761 - DNA, 647 bp, Oryza sativa
  Clone ID: PAT_MRT4530_19763C.1
ggagcaagcgtaaagtgcgatcacatgcccagcccaaggcactagaagaattgaagaagacgtgcacggatacggcgtcggcgtctattcccgcggcggatccggcagacggcaacggggaacagcggtggagtcggccttctaaccttccgcatcggattgtcattgatgtttgtgattcggggttgattcgagagtccgtgtttcacggggtgcatgcgctcgatgcatcggctcgattcaagcttttttttgggctcccctacgcttcaaaggtgccgattttgaatgccggcaccaatcactccgactcatcaaaaaacataaaccggaaatggtcctttttgggggcgccagagtggctggcgccgtcccccaacatggcggcgctagccacactagccccatgctcgcgccaccgtggcactagggccgttgtggcggtgctgactgggcagaaggggggcaccagccacactggcaccgcccctcataccacggcgccagcatggcaggcgcgcccctcctctgtgggccgcgcccttaaaccccaggaagaccgcgactccgatgaggggcggaatccctacgacgtccggactagggttggatatcaaatggagcacgccccacttagagacagagtc

SEQ ID NO: 13762 - DNA, 318 bp, Oryza sativa
  unsure (1)..(318): unsure at all n locations
  Clone ID: PAT_MRT4530_19764C.1
ctctttcttcattgccagcagcggcgggaggacggggtgagcggcggcggctggcggcatcggggcgcangcangtcggcggctaggacggcggcggctcggccgggtaggctcgcgatagtgggaggacgagggnaacggcggcggcggcggcccaatatgctgctcgtcatcctcgcccttgcggttaccggcgcggtctccgacggctcgcgagtcgctggaccacatctccatcaactgcatcggcgtcgngnggacatgtccggctgccgnttcgtccaattgggtccgttnaagcaactgattgaggagggt

SEQ ID NO: 13763 - DNA, 1479 bp, Oryza sativa
  Clone ID: PAT_MRT4530_19765C.1
ttttttttttttttttaacaaacaaaaatgacttctcaggatggaagaacatacgtatgtgaatatgtgatgctcatgcggtgcagagatcaaaactcagcagtatggaagcacaggcaatataattcacgatttcagggctcaaaatattaattttattatctcagggccgtggaggcgaggtctttagcatacacatactaattacctagcaataacaccaaaagagtactgctaccccggtgttatgtcttcttaaaagaaatcatttggttttcctaccctgatgttcaactcctgcaagtaacttgtaattgcgttcttttgccatcctttgaagctcttttgatcaatatgtgcaataatctctcctcctgggaaagccgcttttgttgcttcatatgaaactttaatggaatgcttccacataccgccaacgtcagccacatttttaccattcatctgcttcggttcctccattggcaaagaatacccagagagcaagtggcccacccatacaccatctttcgttacaatatccatatgacgaggagcataatgaccacctcctatgcctagaaggactttttcaccattcccatgccaatttccaacagattcttcttctccaagaccaagtcctttccatagcagcagagcgactgcgtcagcagcatcctgtctaccccagtattcttcagtgcttccaatctcaacaaacagcgtcggcgtgttggtcactggcccatggtgagtgccctccagcgtaatctcaaactccggcacgaggccgcggtcggcggcgatccggcggagcaggcggagccagggcccgatccgcgggttgggcggcgcggcccacccggggcgcccgccctgcggcggcacgtccacgccgtccctgaggtgcgggacgccgatggggtggacggtgagcgcgggtcggttggagacggcggtgtggcggctgaggaggaccacctcggagacgcgctcccccgtggcggcctcccaccgcaggtccaggtcgtcctcctccacgatcccgcgcgcgtgccgcagcagccgcacccccgcgccgttcgcgaagctctccacgccgtccgggatggaggggccgggggtccagccgggcatggcgaggaacgcggcggccggagtggccgacgcggcgtcggacgtcgtggcgaccaccagcaccaccatctcgacgtcgccgccttccttccttcgtgttccttccttctttctctgcaacaagcccctgcggctgctgcaaccggctaggagctcgccgccatcacagtgcctagccaccgcgacgatgttgctgggggaggcttgccggggacagctgtggatgggcagaagcgtggcgagaccgaggccggcatggcggtcgttccgagaccccgcggcgagcagcgagagtgcgctgagtgccacgaggaggagcagcgccgcccgtaccaccgtcat

SEQ ID NO: 13764 - DNA, 357 bp, Oryza sativa
  Clone ID: PAT_MRT4530_19766C.1
tcacccgaggaaagttaatgaagaggcgagccgctcgacttcggcgttagggaagttcggctcgggctccccggctgtgagctccgagatggcgtgcaccgctctggagaagacctctggtgattcgtcaaatacgcagacctcgacgccgtccagagttgcagaagaggaggcaaccggcatctgtattcccagacctcgcaggtggggttgttcaattgagccggtggccctccatcctcggatattctgccagtttccaattgagatctctacgggccgtcgaccgttggacaccgccgccctcctctcgctcgcactcaccccgtcacccgacgccgccgactcctccctcat

SEQ ID NO: 13765 - DNA, 168 bp, Oryza sativa
  Clone ID: PAT_MRT4530_19767C.1
atgcctcatcgatctgcactctactactgcagcgccacacctagggcaacgaatgagaggaaggtcgctagatcctacggcgccggcgaaagtggcacagcggcggcggagcaaagcggcatagcggcggcagcagataagagcggcacggcggcgacggcggagtag

SEQ ID NO: 13766 - DNA, 653 bp, Oryza sativa
  Clone ID: PAT_MRT4530_19768C.1
cgccatactccaaaatctcctttttcaattctgattgtctagcaaacagcctagatacctcaacttttctctaccatcatcttcttacatctgaaaatgctaaggcaaaatggcaaggaattaatatttactgaagtatatgatattacttaatgccaggttccatgctcaatattttatatacacaactccatttagcaggtggctttagagtgtttaatcctccattcagtcccctccacagactagagtatccctttactagcagctatttgtgcacaaagtcagaaaacaaaccccaaatcatgccatacatcatagtcagaaaggcaggtttcagaggctggggttgatcagaaatgacaggtggaaacaggaaaagatcttgtcacaatcttgatgaacactacagaaagcaagctctaacggtgggtgcctagatgcttgtgtattcatgacagaccttggcctgagtaggtcaaaatcctgatgggtctaggatgaaggagacaaattctttgagcttcttaaggctaggccaagcttagctttcctcatttcctatgtgatgagtataaaattcactcaaagtcatctttccaaccaatgacaaatacatgaggggattactccttgtctgcaatcagatgctg

SEQ ID NO: 13767 - DNA, 2381 bp, Oryza sativa
  Clone ID: PAT_MRT4530_19769C.1
atggttgataaaaaacatgatatcgatgatgaaaacatcatcccggtgatgctagataaactgacagaggagcagaaggcgactctggaacagatgatgaatcagttgcaaaatcagtatctacattcgttcacattgactcggcacggtacggtacaatatcggccaagaggatcacctcaaccccaatacctgcctcaatacaatcagttacatcagatgcagcagcaattgggagggacacctcgacagcaaccttgggttgatatgatagccaatgtgatgagggaacaatttggtcttaagcccaaggacggtggtaatttgtattggcatccgtacccagagtactttgaaagggttccattgccaaaccgatacaaggttccagatttttcaaaattctcaggacaagacaatgtgtccacttatgagcatgttagccgattctccgttcagtgtggagaagcatcggctaatgatgcgttaaaagttaggttgtttcctttgattttgtctggatcaacatttacatggttttcatctttgccaaataattctatacaaagttgggcagatctagagaagcaatttcacaagtatttctacagtggagtgcatgagatgaagttgtctgatttgacagcaatcaggcagaagccaaaggagtctgtcctagattatattcaatgatttagggatatgaggaatggatgctgtatcttggctttgacagattctcagttagccaatcttactttccaaggcttattgacaccaattaaagagatatttttagttcaagccttcgagagtatagctcatctagcccaaaaaatcaataatgttgatcaatatgcttctgagtctgatgaagatgatcccgaagtagctgcaactgagtgggctaggaacaagaagattgttacttgtcaatgggttaggaattctggaagggaagtgaagtttgattttgacattactaaagctgataggatttttgatttgttgctttgagaaaaacatattcaacttcccgctggtcatgtaatcccatcggctaatgaattggggaagaggaaatattgcaagtggcataacacaggatctcatttcactaatgattgcatttcagacaacagatttaatcggctattgaacaaggaaggataaagtttgatgatccaaagaagccgatgaagattgatggtaatccgtttactgtcaacatgaatgaggggatgagattgccgtcaatagaagattgcccaggatgtggtggctctagaaggagatatgttgggagttcaagtcgatcacatgcaaggagagaggatcggcaagtgcagaaaaagttgcctgttcaccagagattgggtccaactcatcaagattcgtttcaggaggaggatgctgaagatgaagatgaaactaggaaaccccaatggtgtccttctggcattttcactaagaaccagaagagaagaattcaaaggacgaggaacatggagcaaattcaagaggccaaagaagagatcaatcatcggctaaagaggacaaggaatgagtggcgtgttaagagcaaggttgtctcagctgatgaggtcgaagccgacaaggcgagatggttagccaaagggaaggctgttgcttcttcattggtttacatggtctttatattgccagcaaaatattgtgctaaaccagccgatgcagaaatcatggaagaatctttggctaagttgggtctgtcacctaagcaagctatctttgagaagccagaaggaacagggcatcggcatttgaagccgttatatgtcaagggatttgtcaatggcaagccgatctccaagatgttagttgatggtggggctgctgtgaacttgatgccttattctaccttcaggaagttagggaagaattcagatgatctcatcaagactaagatggtgctcaaagactttggagggaatccttcagaaccaaaggaattttgaaagtggagttgactattggcagcaagacaatttctactaccttttttgtcattgatgggaaaggttcttacagtatgttgttgggaagggattggattcatgcaaattgttgtattccttcgaccatgcaccagagcttgatccaatggaaaggagaccagatagaaatcgtgccagccgacaagtcagttaatgttggtaatgccgatttgactatttgggagatggatggatgtccgattgtgatatacaaccagttagagatggagagccctaattgttgttttgagggcgtcgttgagggttcaaatttctacaccgaagatactgtagatgatctcgatgataaatatgggcacagggcagagaggatttcttagtgag

SEQ ID NO: 13768 - DNA, 255 bp, Oryza sativa
  Clone ID: PAT_MRT4530_1976C.1
atggtgaacctgttcttggtcatcatcgcctacgccgattgtttctccgccgatggcaagcccggccttgtcgtcgttgccagcgccaatcatgcatttgtcgccaacgtgcaaagtcatcctcatgccaacgacgacggcgtcatgctcgccaacctccaagcaatggcgcagatcgacaatgacaagtcctggtatgttcccagcatcgcggtggatcttccaagctgcacggatcagggcgtcgggagctag

SEQ ID NO: 13769 - DNA, 1013 bp, Oryza sativa
  Clone ID: PAT_MRT4530_19770C.1
gaagcgagacaatctgctgctgctagtggcggacagagtccaagaaggaatccaagaatcgagagaaatcgagatgctcgcggcgaggacacgattcgccggcggcggcggcgcggcggtcgtgctgctgctaatcgtcgcgtcgacggtggccaccagggcggccgtcgccgacgatttcttctcccctctcagcccgctcctcgcccctgtaatcgggtcgatgtgcaagacggtggcgtgcgggaaggggaactgcacggcggcgtcggggttcccggggtacaggtgcgagtgcgagcctgggtggaagcagatgcacgtcggcgaccaggccagcttcctgccctgcgtcatccccaactgttccattgaccgtgcatgttctaacactatagcaccagcacctgcgcctttaccatcacccaaaaatttctccctcccaacagacccctgtcaattagcttactgcggttcgggagcacatgcaagaatgggacaggcctcagctaccactgcgagtgcagtgagggtttcagtaaccttctgaacatcaccacaatgccatgttttcagaattgttcaatcggtgcggattgcgcaagcatagggctctctccatcctcaaactcttccagttctcctgcaccaccgggatctgctggcatatctaacaatggggcgatttcacataaaattctacttcccttgctgattttgggctcactgatggtctgtcaggctatatagatagagaatggagcatacgtagtacatttgagctagattgtttctgccacggacaggatagagcagttagcctgttagagatgtacaccttttgggatgtttgaagtgttgtccagtgtccacgttatggttcttttattctgtgtgagatttgatcacattcatgtgaattaaaatggaataaactgtctctgtgaataactgaataaagggatgtttatatgggcaaaaaaaaaaaaaaaaaaaaaaaaaaaaaaaaaaaa

SEQ ID NO: 13770 - DNA, 356 bp, Oryza sativa
  Clone ID: PAT_MRT4530_19771C.1
agcaatggaaaaacccgcattccaaaacagccggtggacaaaaatcggacccagagcatcagttttaacccaacagaaaaaaacggggtttaaacgaccggcatagggcccattgggagccgatattaacgggccatgaaacgagagccctggccgggggcaaaacttaacaaataccagaactggatatttcaaccggagacaggcaaaccccccctttgaacgagggctcacttttttttggggggagccctgggcaccctggccccggggggggcccttttctccacgttcttgatgaccccaacagcccccggttgccccaaggcacgcaccggaaaacgcccaaggggggg

SEQ ID NO: 13771 - DNA, 400 bp, Oryza sativa
  Clone ID: PAT_MRT4530_19772C.1
agcttagataattgccgtactctcaacagaacaaatgcattacatacagtcatacagtgaagagacacttgttccaaaagaactgcttcattaattgcacatacgttacgacatcctttatacatagctgttacgtacgtagacatgtatacaaggtttggatgcaatttgtagaaaagaaaaagatcgaatcacctgacaaatatgttacatgacactatacttacatatgcacattaccctcaactcgggcatcactcatgcatgatctgaaactcttagtgctaattaataaagaagaagtgatatatattatagtagatagagaaaagaagaggaggggaagttaacaacaactacatatgattcttacatcaattgattattgatcatgtcttcc

SEQ ID NO: 13772 - DNA, 343 bp, Oryza sativa
  unsure (1)..(343): unsure at all n locations
  Clone ID: PAT_MRT4530_19773C.1
tgcgggcggcgaggtaccagtcgacggcgttgtaggcgccgcacctgaccggcttgtctgtgagggccttcgtttggctcatggcggcgaccatattcggccggctgctgacctccgttctcaagtcgaagaacaacatcacaaggatgctgaacgacacggtgatccccgagcgccccatgtacactgcccgagtacccgtcgtaagagccggaggatggagctctgcttctggaggatgacagggaccttgtggacagagcagtggatgcacttcagtgtcttccgcgctatgatccagttctgctttggccggacagngacacaccccctcaactctact

SEQ ID NO: 13773 - DNA, 1908 bp, Oryza sativa
  unsure (1)..(1908): unsure at all n locations
  Clone ID: PAT_MRT4530_19774C.1
ttctaaccgtctctctcgccgccgtctcgcacctcgcgtcgccgccgccgccgcgagtgtcggagcggaggagaaggggaggggggccatggcgaagggcgacgacgcgctggcgcggaagcgcaacaaggtgcggcggaagcggatgcgcagcagcgagaacgccgtgtcggcccgcgtcgccggcatcatcgcctccaagcgccgccgcaagtccggcaagcggcgggcctgcgagggcatgtgcttctccctccccaccccggaggaccccttcaacgaccgccacggcaagaagcggaagggcgacgacgagccgaccggagacgcccccgccgccgccgccgcaggcagggacgaatccaagaagaagaagaagaagaagaagaagaaggattcgagcgccaagaagcagccggcgagggaggccgccgccgccgccgccgcgaacgccaagtctagggagaaggacggggcggagtacgaccggccgtccaagttcctggtggtctgcctcaacgccatccgagacgcggcggcgtccgaggacggcggcggcggcggcatccacgacaccgggtcgtggggcgtggagctctggaattgctgctcggctgcgccgcctacgcacgtgctcgacaccagcggcgagtgcgccacccgggagaagacggcttggctcgtctccacagcctgcgacatcgtcgccaggaaggagaagctcgctgtggtcgtctcttgccccttcctactctacctcgtcccctcccaggaaaaggccgtgcaagtgcgttcgatttgcaagcctctgaaatcacttggtatccattccgtcagtctgcatcccggcgcttccattgaacaccagatttctggattaaagagttgcgaaccggagttccttatatccacgccagagaggctgcttgaactaatagctttaaaggcgattgacatatcaggcgtatcgatgctggtgattgatggtctgaagtgtttcacggaccttaatgtcagcgacaagctttgttctattagggatgccatattgagcaaccctcaaataactatattcagtgacccgtctgaccgaagggtagctgcactggcaacaaaactagtcggtggaaaaaagatcacaaggctttgtacgaatgattcagttacttctagaggtgcattcataacacaaaagatacacatatgcccatcaaaggaccaaaaggcaccgaaggtgaaggaaattcttgaacaaattctaaatgatcatgctagaaagactgcaaaggtcctactggtaaccgcaagtgatcatgaagcacagcatctgtcatcatccttgaaattgcaaaattgtaccgtgaccaatgactcgcatggcaactcttttaccatatgcagcagtgttgggctgattaatgtccttgtgaaagactgggagaacataacaacggcaaattttgaggacttcgacactgtgttggttgcagacttgcctccttcagttgacgaatacattgaaatcctcgctggtgcaagctgtcatgtgcttgtgggggaggtgcattgcatcttttctagcgctgatgctctgcttgcaaaacccttgtctgaggttcttacaagctgtggtcaggtagtgcctgaatttctcaggaaactggcatcctcatagcaggatcggttttctcatggcaatcatcatatagtatacgctaccatattcatggttcttccagtcactaaacatttttgtcagtttactgttccttatcatgtaattctcacagcataacgaggatcttcagccttgttgtatctctgcaactttgtattttttgaatgcgatcaagtcctagtctgtgagaaccaattgcttttgcattcattaacattacatggtcctna

SEQ ID NO: 13774 - DNA, 368 bp, Oryza sativa
  Clone ID: PAT_MRT4530_19775C.1
gggtaaacgaagaactttattgctctcaacagagaaatttgttgctaaaaaggtgtacaattgagctatgggcctgatttagtgtgtacaaatacatgactgaagtggaaacatcagtgtccttttgtgaggcagtatagacaggtggaacatccttaaatacattcctgagactctgagagtgaaagctgtaaaaagctacccaaaaaattctctgtaactgttaactgagcagtgaatactcctacagcaatggtacagtgaaccgaaaaaaagagggtgccgccttgtcaaaaactgtagtcgatatcagagatattctgcagtgcctgattgtttaaccagcttaagccgctcgttgtacagat

SEQ ID NO: 13775 - DNA, 564 bp, Oryza sativa
  Clone ID: PAT_MRT4530_19776C.1
atggcagcactgtctgtctttgcttcatcaatactctcaaaggtcactacatttgctgttgaatatgctctcgccgacatcaaacttgcttgcacagttaggaatgctgaaaggaagcaatctacatctagttcacttaaacattggctggaaaacctcaaagacattgtctacgacatagatgatgttctcgatgacgttgggacacgagcattgcagcagaaagttggaaaaggtgaaatccgtacttattttgctcaactattcatttttccttttgaactgggaagaaagataagaagggttcgtgaaaggctaaatgaaatatctgcacttaaaagaaattttgatttgaaagaagaaccaatagacacaccttcagatcgaattgtacagagagaaacatactcaattgtagatgagcgaaagattgttgggagagataaagctaaaaatgatattgtgaaggtgatttcagaagctgctgaatctaattctgatacactgtcagtgcttccactaattggaatgggaggtgtaggcaagactgccctagcaaaactg

SEQ ID NO: 13776 - DNA, 446 bp, Oryza sativa
  Clone ID: PAT_MRT4530_19777C.1
atatatatatatatatatatatatatatatatatacacatatatatatatatacatatacacacacacacacacacacacacacacacacacacacacacacacacatatatatatatatatatatatatatatatatatatatatatatatatatatatatatcactttttaataaatatttttatggaaataagaagttaaagttgtgttttgtagactgtgtcgctgtccaaaacgacttcctttacgagtacggaaggagtaagtgctttataaacagtaattctaataatttttagtttgctaccaataccgcatataccatatatatatatatatatatatatatatatatatatatatatatatatatatatatatatatatatatatatatatatatatatgctgataagatattggtatcactcttttcagaaagaa

SEQ ID NO: 13777 - DNA, 194 bp, Oryza sativa
  unsure (1)..(194): unsure at all n locations
  Clone ID: PAT_MRT4530_19778C.1
atttcggctggcgcaactgcagctgaaacgctgcngggcgttaaacgaggatgagggagtacgtggcccgcggcgacgccgcggctgctggtgtccgaactcccggcgcgtccatganatggnagagtgttctcgcattaacgtcggtacatttgaattgcaagaactcaattccactccacgattttccggag

SEQ ID NO: 13778 - DNA, 2046 bp, Oryza sativa
  Clone ID: PAT_MRT4530_19779C.1
atgttgaacctaccttctttagaccttgaggatttagaagaggacattacggaagaagagctgaaagcgactattttctcaatgccggccgaaaaggcaccaggtccagacggtttcataagggctttctataaggttgcctgggagataatcaaagaggatctgctaaaggcagtaatttctttcttcaatctaaatacattgcaacttcgtgacttaaactcggctttcatctgtctcctccccaaaaaagatgacgctaatggagcagagcattaccgccctataagtctaattcatagcttatcgaagataatttccaagctattggcaaacagactagccccagagcttcatgagcttgtttccccaaaccaaagtgctttcattcgcaaaagggctattcacgacaatttcctttatgttcaaaatatggtgaaattcttgcataaatcgaagaaacaaagtcttttcttcaaagttgacattgctaaagctttcgacaccgtttgctggccttatctattagaagtcatgcgttattttggttttggaactcgatcgttaaattggatatctaatcttctagcgacatcgacatctcaaattctactgaatggagttcctaggccgtcaattgcgcatgtgagtggtcttcgacaaggtgacccgctctcgccaatgttgtttatcctagccatggaaccttttcatcgtattgtgaaagcggctgaaagcgcttctctgctctctccgatcggggggcgtttcgacaggttcagatgttcactatatgcagatgatgtggcgctattcatgaaacctgaaccaaatgacctatcggcactactgcaactcttatccttcttcgctcaagcctcgggtcttcacacaaatgtgagcaaaacagagatttacccgatcaggtgtgaaggaatagaccttacctccctgctagcaaatttcccgggtttgataaagcaattcccatgccgatacctagggttaccccttcatttcagaaaattaagaaaagtagatttccttctgctgattgagaaaataggttcacgtattccaggatggaaaggaagattattcacatcggcaggacgcaaaacactagtgcaatcagttttaagctcgatgccaacacaccaccttatagctcttcaggcacctaaatgggtgctaaagagaattgatcgctatcaaagagccttcctatggaagggggaagatccagacaagaccaatccgggtagcagtctcgtaaactggcaaacgtttagttggaaggatgaaggcaaaccttgggccggaatgccagtaccttgcgatgaaactgacaggagattattccaagcagcgacgtcgatcacactaggcaacggagaaaaaacaagcttctggcatgacaattggcttcaaaaatgttgcccgaaagatatagcaccttcatgtttcaggttggccaaaagaaagcaaagaaaggtccaagttgtgctgcttggaaataaatggcttgcctctttccggcaattctccacggtcaaggaaatacatgagttagtccacttgggaagcctgtcacaggatgttaacctctctgctattcctgatgatatctcttggaagtggaatgaagcagggatttacacaagcaagagtgcttaccttttccaattcgaggggtcttttgcttccataaatttctcctcgatatggaaggcgccggccgaaccaaaaacaagtgaatgtccattcgtcaggcaagtatggaaccttgtttgctcatggctaaacttggcaggaggaaatgctcaagccacaggtggaacatccaactggtggactgaaatcgatcgtcaaggttcaaatgagcaaaagctgaaaacaagaggagctctcctcacaacatggtggaatatttggttggaaaggaataataggattttcaatagttctgttatatcagagagggacatagcttactttgtcaagcaggaaatagaccttcgtagctcggcttttaagccaccttga

SEQ ID NO: 13779 - DNA, 357 bp, Oryza sativa
  Clone ID: PAT_MRT4530_1977C.1
atggcggcgccgccgcgggccccctcgccggcgcgcgcgtgcacccgcggatatgatcctggtacatgtgtttgttgtgatggtgatcctgacggtgatggcagtgtcaagtataagtttttcagaggtctgtcaaatgctgcaaatttggaattagtagctgaagctgggatgggccatgaagatatggtggaaattgaagaaagtagcagttcaattggacaattggtccagtttcagaaccttgaaagagtcaaagggaaggaggctgagaggcatccccatggattctccaagctcgtcctcgtcttgaagtcgctggaagaaggtggtgttgatcaagtgcccgttgtgtaa

SEQ ID NO: 13780 - DNA, 1716 bp, Oryza sativa
  Clone ID: PAT_MRT4530_19780C.1
atgttgaacctaccttctttagaccttgaggatatagaagaggacattacggaagaagagctgaaagcgactattttctcaatgccggccgaaaaggcaccaggtccagacggtttcataggggctttctataaggctgcctgggagataatcaaagaggatctactaaaggcagtaatttctttcttcaatcgaaatacattgcaacttcgtgacttaaactcgactttcatctgtctcctccccaaaaaagatgatgctaatggagcagagcattaccgccctataagtctaattcatagcttatcgaagataatttccaagctattggcaaacagactagccccagagcttcctgagcttgtttccccaaaccaaagtgctttcattcgcaaaagggctattcacgacaatttcctttacgttcaaaatatggtgaaattcttgcataaatcgaagaaacaaagtcttttcttcaaagttgacattgctaaagctttcgacaccgtttgctggccttatcttttagaagtcatgcgttattttggttttggaactcaatcattaaattggatttctaatcttctagcgacatcgacatctcaaattctactgaatggagttcctgggccgtcaattgcgcatgtgaggggtcttcgacaaggtgacccgctcttgccaatgttgtttatcctagccatggaaccttttcatcgtattgtgaaagcggctgaaagcgcttctctgctctctccgatcggggggcgtttcgacaggttcagatgttcactatatgcagatgatgtggcgctattcatgaaacctgaaccaaatgacctattggcactactgcaactcttatccttcttcgctcaagcctcgggtcttcacacaaatgtgagcaaaacagagatttacccaatcagttggaaggatgaaggcaaaccttggaccggaatgccagtaccttgcgatgaaactgacaggagattattccaagcagcgacgtcgatcacactaggcaacggagaaaaaacaagcatctggcatgacaattggcttcaaaaatgttgcccgaaggatatagcaccttcatgtttcaggttggccaaaagaaagcaaagaaaggtccaagttgagctggttggaaataaatggcttgcctctttccggcaattctccacggtcaaggaaatacatgagttagtccacttgggaagcctgttacaggatgttaacctctccgctattcctgatgatatctcttggaagtggaatgaagtagggatttacacaagcaagagtgcttacctttttcaattcgagggatcttttgcttccataaatttctcctcgatatggaaggcgccggccgaaccaaaaacaagtgttcagatactatgcgaggaatcgagaggagacagccgagcttcagatattgtggattgccataacactatcaccttccaagtgcaaattagcactgagatttctgggttgatcagtcgttgtgagtatgggtcagtttgcaagacggtggcatgcgcgaagggtggcatgcgcgaaggggatccgcatgccggcgaaggggttatcggtgtcaaggtgcgacattgtagcagacgcacgtcggtgacgtcgacagctgactgcgctgagtcaccacgaagcgtaaggattcatataccgctccttctcaaatggattgaaatatga

SEQ ID NO: 13781 - DNA, 342 bp, Oryza sativa
  Clone ID: PAT_MRT4530_19781C.1
tctgtttctctcattcaagcgagacgaagctctgcattcagacatttgcccgccagctcttcctgccgacgacgaagcggacgtggagcagccgcagctgaagcagtcagagggatggtggcatgtccaataacgggagctgcgcgaagcggacacatctcccggactgaggcgtctatcgtcgcgtctgctggggtagattaagagtcgtactcgaacgacgcgctgattgctaggtcgacaccggggtcggtgctcgctgcggagatctcgcagtgtaagctggaggccgcgctcctggggctggagcacagagagcccaacgacaaggagctggacacc

SEQ ID NO: 13782 - DNA, 810 bp, Oryza sativa
  Clone ID: PAT_MRT4530_19782C.1
atgacgcaacatctcttccaaatctgcaaatttaccatcatctacactgacattaccatcatcagcatcatcaactatactatgctaaccattgccaccaacatcatcatcatcaacgggttctactgcatgcacttcttcttcttcttcttcagctactacaatgacatcctcgtcccagctcaacacttcgtcgtcgcatttttcctggcggtcgtcatatgtaggttcgttcaaaccgccatagaaaattatttgagatgtcggagggttaaggacgccgccagaaaagatgcagttaagaggcccgccagcgaatacacctacatcttcgctggcgggccgcatccccttaccgccagcgaagatacaataccttcactgcgctttcatcggctgcggtgggagggaggcggcggcagcagcgggcggcggcgggaggagaggtggcagcggcgggtggcgccctaccgtccaccagatctggcgggaggggaggaggcgtcggcggcccgatggcggaagggttggcagcgggaggggaggcggcagtggttcgacggcctatcgacggtgctctcccctccgccagatctggcgggagaaagggcggcggcggcgccggcccggcagcggcgggaggggcggcgggcgacgggtggcggcgggtggcaagatccggcgtcggcgtccgttcccgcggcgtcggcgtccgttcccgcggcatcggcttctcccgtggggacggtgagcttctcccgtggagttgtgaaaaaatttagtgaaaaaggaattgatggctgtgattga

SEQ ID NO: 13783 - DNA, 275 bp, Oryza sativa
  unsure (1)..(275): unsure at all n locations
  Clone ID: PAT_MRT4530_19783C.1
ccatggaaacgntggcccaaanactgcaaaggctganattggtctctggtttgancccnngnanctggtctcttacnccagnaacgaananaantggatctacggggtcaactaaccggcgaancatctcccctgtttgntttgtttttttttcattttctctcnctttncctaattncatcnccatggnngantgtnataaagtttcgancgtgacatttggggttntgcccaaaaaaaaaaaaaaaaaaaaaaaaaaaaaaaaaaaaaaaaaa

SEQ ID NO: 13784 - DNA, 381 bp, Oryza sativa
  Clone ID: PAT_MRT4530_19784C.1
atggcggaagggttggcagcgggaggggaggcggcagtggttcgacggcctagcgacggtgctctcccctccgccagatctggcgggaggaagggcggcggcggcgccggcccggcagcggcgggaggggcggcgggcgacgggtggcggcggtgggtggaggcggcggcggcatcagcggtgatggccgcgccctcccctccgctagcggccacgaatgaggtcgcgggatccggcatcggcggcgggcagggtggcaagatccggcgtcggcgtccgttcccgcggcgtcggcgtccgttcccgcggcatcggcttctcccgtggggacgatttgtgattgatgaatgtttggttcacggggtgatttgtgatttgtga

SEQ ID NO: 13785 - DNA, 264 bp, Oryza sativa
  Clone ID: PAT_MRT4530_19785C.1
atggcaagatcgtcggcggtgatgagggtgatcatggcggcactcgccgtggcggcgatcatcctctcggcgacgctgcacgaggcggcggcggccaggccggtgcacggctggaacccacaggcgaagggagcggcggcggcggcgacgactcggcacggcggcttcgccgccgttcagctcgccggctctgtcccgtcctgctgcaccaacggcggcggcgccgggaattgcccaccgggtgtcacgtgcccgttcgaataa

SEQ ID NO: 13786 - DNA, 205 bp, Oryza sativa
  Clone ID: PAT_MRT4530_19786C.1
gggtattgttaacacattattttttttttaatattattagtggacacagcacccactggaacagtatcgagctggactaaaacaaccatcgccaaccaaagggcaaacacgtgggataaacacaaggaggtgctaaccagaaaggaaccaccgctaagctacggaagccccacttacacttgccagggcgacgaagactgcgcgg

SEQ ID NO: 13787 - DNA, 249 bp, Oryza sativa
  Clone ID: PAT_MRT4530_19787C.1
atggtggaacgtggccgaaagatggggtcgggtgtggctaaaagcaaccagagagatcggatgggtagcgccatggacgacgtgcccaacacacacgggcctgaggacgacgtgatcgtggatggtgaacacaagcgttatgactgcagtgagtgcggaaacacaaacaacacatatggagaatgtgctatacacacgcaggatgagcaaggcacaaaatggcagttgacaacaaacaacgtcgtgtag

SEQ ID NO: 13788 - DNA, 4143 bp, Oryza sativa
  Clone ID: PAT_MRT4530_19788C.1
atgacttcaagccttctcgacgacaacgccaaccccggcatcaaccaaggatcttcgacctcaacgatactggtgtggacccaagtcggcgaaatcgttttcccggtctataccacgatgccgatctcgactggcccagcaatggccggaagtgagagtgacgtggttacgaccttgacagactccatgtcgaaggatcctcccgcagaagcggaaaacggaacatcgacaacgtctgagcccgagaaggatcctaatgcgacccaatcttgtccctccgacaagaagtacgagccgacaaggacaacttccgaggcgacaagagagcgcggaattcaacgtatttctccaacccgtgatgtctattgtcctatccacaagacgaagaatcatgacctctcaagctacaaggttcttctcagcgccatgaggacgtcacctcctaaggtccagcagtcacaaatctctcctagagatgcggacaaggaacgaggagcggcagctatctcggatcgattcgttggggtaatcgatatcgatccccacgagccgtatgttctacatttgctcgaagaccaggcctcatcatcaacaagtacaccgcgcgacgtgtacgctatcgatgggaccagcacgtccaggggcggcaacacggaagcggaggatcaagtggctaccccggcccagcacattagtaccatcaacgcaatactaagggaaaccccttatgatcccgttctgaacgatgatctcgaacagtggacagaacgactacgtgaatcagtggccaacctcagcaacacgttcgaggaggccgctgccagggtaccgccagaacaaccgccaaccggtggtgacaatggcgaactgcctgagcagcgggcgtcacctcgtcaagccacccctccgcctcgtggcaccagtgatctccgtgaccacctgaatgacagacatccacggaggacatatgatcgccgacaacccaccgcccccggcggcggatgcagggctttcagtcgtgctctacgagatgtccgatggcctgagagatttcgaccgggagcgatagagaagtacgatggaagcaccgaccctaaggagttccttcagtctggcgtccgagatcgctacaccacccaggagttggcgacaagacggatcacaactgctcgtaagctattcgagattgtcgatcgatgcgctcacgcggacgacgccctgagacgcaagaacgacaagccgaagacggggggagagaagaaatcagccaaggatgcacctgagtcaagcaaaaagaatagtcgcaggagtgggaaacggaaagctcaaacagaggtcctcgctgcagaatatgcggacccacccaaacacccagactcacaaggcgacgatacgaagaaaatatggtgccctatacacaagtcggacaagcactccttggagagttgtttcgtcttcaaaaaggcgctcgcgaagcaactggcgttggagaagggcaagagagtacgtgtagtcgagaaggccgctgaagcagctactcaggactcagactcagcatacccagactccgacctccatgtttcacacatcttcggaggttccacggcgtactcctcaaagcgagagtacaagaaagtggagcgtgaagtttgttcaacatggcagggggctgcacccacaatgaagtggtcagagcagaagatcgagttctcagaggccgaccaccccaagaccgctgtcatcccagggcgatatccgatcgtggtcgagcccactattcggaatatcaaagccgcacaggttctaatcgacggcagcagctccattaacctactcatcgccaacaccttgggacgcatggggatcccacgaagcgagttgacgcccaccgatcagcccttccacggaatcactcctcagtcatcgtccaagccattgggcaagattacgctgcctgtgactttcggccaagcaaacaacttcctaacagagcagatcacctttgatgttgctgagttcgacacagcatataacgccatcatcgggaggactgcactcgcgaagttcatggccgcatctcactacacgtatcaagtactcaagatgcctggactgaagggaacaatcactattcaagggaatgcgatgctagcggtacagtgcgacaagcggagcctcgacatggttgagcacacccccaacccacccgccacagctgagcgacccaagaaaccgtccgacatgccgggggtccccagggaggtgattaagcacaaactcatggtgcgacctgatgccaagcctgtaaaacaaaaactgcggagatttgcaccagaccggaaacaagccatacgagaagagctcgacaagcttctcaaagctggtttcatcagagacgttctccatccagagtggctagccaatccggtcatggtgcacaaggccaacgggaaatggaggatgtgtgttgacttcaccgaccttaacaaggcgtgtcctaaggatcactttcctcttcctcgaatagaccaattggtggactcaacagccggttgtgagttgttaagctttcttgacgcttactccggctaccaccagatcagcatggaagccgaagatgcattcatcgcactcaaatgctacctgtcaaatccccctgtacttgttgccccccaacctaatgaagaattattccattatattgccgccacaccatattctgtgagcgtcattattgtcgagagagaaaaggtgcaaagactagtttattacgtcagcgaagctctccacgacgcaaagacaagatacccacagatccaaaagctgctttatgcagtaatcatgacatcaagaaagctacgccactacttccaagcacacagagtcacagttgtttcctccttccctcttggtgaagtcgtgagaaacaaagtcgttgtcagccgcatcgcgaaatgggtagtcgagctaagccaatttgaagttcactttgtgccacaaacagccatcaagtcagacggtcagaccgacaacgagacatggacaatggcgttcgacggcgcactcaatagccaaggagcaggggcagggttcatcttgacgtcaccttcgggagatcagttcaagcatgcaattcacctcaacttcagggcaaccaacaacatagccgagttcgaaggactactcgctgggataagagcagcaatcgcactaggagtcaagcgactaatcgtgaaaggggattccgaactagtcgcaaaccaagtgcacaaagattacaagtgctctagccctgagttatccaagtacctcgcagaagtcagcaagctagaaaaaaggtttgacgggatcgagagccactcgaacaccttcctgggcgtcctgacgaagccatcggtgaaagcggcaaatgacgaagatagcacagtcgtccccgacatcggctcaggggctacagaggcagaacgcgctgttgccgacatcgagaccacagacgactggaggaccccactcatcaagttccttagtagtgacgagttgcccgagaacgatgcagaagccgagaaaataacccgacaagccaagatttactatatgatcggcaacgatctatacaagaaggcgccaaatggggtactcctcaaatgcatctcgttcgacgacggcaaacatctcctcctcgacatacatgaagggatctgcgggtcacacgccgccggtcggacattagtcgagaaagtcttccgacaagggtttttctggccgaccgcgctcaaaggcgcttgcgacatggttcagcggtgtgaagcctgccaattcctcagcaagcatacaaggctaccagcgcaagcgctacagactatccctcttatttggccattctcgtgctgcgggctcgacatactcgaaccattcccacgaggacagggtggctacaggttcctattcgtagcgatcgacaagttcaccaagtggattgaagcgacgcccacgggggaaatcaaggccgacaacgccattaagtttatcaaagggatattctacagatatggattgcctcaccgcatcataacagataacggctcccagttcatcagtgccgacttccaggattactgcatcggattgggagtcaagatctaa

SEQ ID NO: 13789 - DNA, 519 bp, Oryza sativa
  unsure (1)..(519): unsure at all n locations
  Clone ID: PAT_MRT4530_19789C.1
cttcggctctgccgnaaccgcgacggcccacccaaaagccagtgttcgccgggggctccccatttggtggcttcagcggcggcggcnctgctctccgaaactgctgccacactggtcgagtccgccgccgcttcccgcatctgcccgccggcctccctcagtgaagatgagaagagagaagaggagaaagaaaatataatgtgcagctgacatgtgggccccacatattcctttttattttttttgctgactagatgccacgtcagcgaaaccacccatctatttgtgtgcacggtttgtgtgagtttatggatacatatttctggtagttaagggacctaaaaaatttcgctataagttgagggacctccggtgaacttattcctttcaccgtataggtcccatggcccatgtgttcatcttacatgggctaggctttatactttcctgtccaatgtgaggcggcattttaattcagagcaagtnccactttacgttcctcaaaaaaaaaaaaaaaaa

SEQ ID NO: 13790 - DNA, 3559 bp, Oryza sativa
  Clone ID: PAT_MRT4530_1978C.1
tctatacaagaagggggcccgaaggcctcggaagaagaaagaaaaagctattcaagattggcgggggcctgggggctcactccgacgcgcccgggtcaccagccttgtcgtcgttatcgtccgcaccaccgtcgccgccctcctcgtcggagtcgagggcgaacgcgagccgaggggccgtaccctcgaagctgtgaacgatgtggtcggcggcgtcccggacctgcgcgcgtgcgccgtcctcggttccgaaagggaactcttccagcgctgcccacggggagaagtcagggtccgagaggcccccaagccgaacggcggcccaaggcccccgacggccagagttggccctccgcctgcttgtccgacggtgtcaggcgcccccgaccctcaggatagcctcggggccactgcgggaaggccgcgcctgtcgccctcttaccccgaggatatcggcgcagaagccgagggcgccccgcgctgcctctcggatgaagagcgccctggagatgcggcccctagcgaagaggatcggccccgccgaaaggtgcagcggcccgtctactttgttagtgaggccctccgggacgccaaaacccgataccctcgggcccagaagatgctatacgctattctgatggctccgagaaaagcaccatcaccatatctccaggcgaagcaaatcggctcgcccagattcgtgcgctgctcaggcaagatgttgtgtgaagaagggcaaacatgcacgttgccaagattacacgcggtggacaagaatgaccgatttgtgaccggtctgacactgaccatatcgtcagcgcacagccatgttcccacgacgcgctcacccccggcggaagtggagtttttcttgttcagcctaatggccgagcaaggaaaaacacacgacctctcgccgagtgtgagcggcgacgacggggagccgaatccgcgccgtcgagctcgtactcctccacctcctccgcgccaaagccctaagcagggggaggcgcttgagagggtcgacaaatccgcggcgtcaccagccgcaggtgatgcaggagaacggcgagacggggagcgtcgcctcctcgtctacggcgacggcagcacacctcagggtgcgcttcaggctgctggcgcgctcctacgacacccgcctgtcgtccatgacccggagtctccagcccaacgatggctggaagacgtggccaacttggtcatgacggcacagcagcgcctgggtgctggtggacggtccgccaccaccaccaagacctccggcgccgctaccaccggctccgtgtcatcaaggcggagggcgcggcgagcggcggcggctgcacgtcattcggctgccactccctcgtctacaccgtcgactcgggaggatcagcatggggagccggatgcccgcctcaacatcgggcgccggcgtaatagccggcgtactccccgcgcaacggagggcgcctcttcgtccagagtgtcacctcgacatggacgtgaggaccagccctccgtgcccccggctggtggtgtcggctgtagagcctttgtggcgagtcttcggaatgtccgttggcccccaaggttccggcccaccatcaccgagaagtatgatgggagtgtcaaccccaccgagtttctccaggtctatacgaccgggattgaggccgctgggggtgacgacagagtcatggcgaatttctttcccatggccctgaagggacaggcgcggggttggctaatgaacctgccacctgcgtcggtccactcttgggaggatttatgccaacagttcactatgaactttcaaggcacttatccgcgcccaggcgaagaagcggacttgcacgcggtacagcgaggggatgatgagtcacttcgctcgtacattcagcggttttgccaagtccgcaataccataccatgtatccctgcacacgcggtgatctacgcgttcagggggggtgtgcggcacaaccgcatgctcgaaaagatcgcttccaaagagccccagactactgcggagctttttcagctcgcggaccgagtggctcgtaaagaggaggcctggacctggaacccctccggttccggagtggcagcttcggccgcccccggatccgccgctcagacagggcggcgtgacaggaggaggaagaagagtctatacaagaagggggcccgaaggcctcggaagaagaaagaaaaagctattcaagattggcgggggcctgggggctcactccgacgcgcccgggtcaccagccttgtcgtcgttatcgtccgcaccaccgtcgccgccctcctcgtcggagtcgagggcgaacgcgagccgaggggccgtaccctcgaagctgtgaacgatgtggtcggcggcgtcccggacctgcgcgcgtgcgccgtcctcggttccgaaagggaactcttccagcgctgcccacggggagaagtcagggtccgagaggcccccaagccgaacggcggcccaaggcccccgacggccagagttggccctccgcctgcttgtccgacggtgtcaggcgcccccgaccctcaggatagcctcggggccactgcgggaaggccgcgcctgtcgccctcttaccccgaggatatcggcgcagaagccgagggcgccccgcgctgcctctcggatgaagagcgccctggagatgcggcccctagcgaagaggatcggccccgccgaaaggtgcagcggcccgtctactttgttagtgaggccctccgggacgccaaaacccgataccctcgggcccagaagatgctatacgctattctgatggctccgagaaaagcaccatcaccatatctccaggcgaagcaaatcggctcgcccagattcgtgcgctgctcagttatccgacaagagaacccaggccgatcagagagttgggtcaggaataagcacatgtcttctttcaacgagtggctgaagaaccgaattgccaggttgcagaacttgcctagtgaaacacttcagtggttgtcacagggtcctgaatggagtgccaccacctggcaaggatatgacataaatggatacacctttcacacggtcaagcaagacagcaaatgcacagtgcagaacagtgggttacgcatcgaggctgctagtgacggtggtcgtcgtgatcaatactatggtagagttgagcaaatattggagctagattacttgaagttcaaagtcccgttgtttcgttgtcgatgggtcgatcttcgcaatgtaaaagttgacaatgaagctttcaccactgtcaacttggctaacaacgcgtacaaggatgaaccgttcgttctcgccaaacaagttgttcaagtgttctacatagttgacccgtgtaacaagaaactacatgttgttcgtgaagggaaaaggagaattgttggattggacaatattgcagacgaggatgattacaaccagcacgtccatggcataggtcaagaaatacctctagaagaggaggaggaagaagatgaagttcaatatgcacgtgtcgaccatgaggaaggattatttttgtaa

SEQ ID NO: 13791 - DNA, 189 bp, Oryza sativa
  Clone ID: PAT_MRT4530_19790C.1
atgcccggtggtgagaaggacgggaagctggcggggaaggcggccgggtttcaggcgagcacgccggggacggagatggaggccgaggctggcgagatgcgtgggagcggtgttgccgcgttggcggcatggggcgtgaggaggtggggccaatgtgacatggcggatgatagcaaaaaggagagctgg

SEQ ID NO: 13792 - DNA, 574 bp, Oryza sativa
  Clone ID: PAT_MRT4530_19791C.1
acaggtggaatctgtaatttgttttgttattagtctatgtttaatacttcaaatatgtgttcgtatatccgatgtaacacgctaaaacttttcacccatagatctaaacacatcctcaatcactcaactcctgaatcttgatgcatcgccattgttgccaggtttactacaggcacagtgcagaggacaaggagaggtacaagagggagatgcaggagtacaacgagaggctcaagcttgcgccgtcaacaatggctggatgatcagctgaatgataaggtcttttgggcacgcagagcagtgtgtacttactgaagcagttgacagctgacaagaagaacagctacagtatttaattagcttaaccatgatggacaccagaacaaccaccctaattaccaacttataaatatgtgtattatgtcaatcagatgtactactacttccctgtgggcaagctgatcctggaactgaaactactggtgcagttctgtgtctcactggctgctctgtgcctctgttccttccaatgaagcttctcccagttttggtttcagttgataaatatttattt

SEQ ID NO: 13793 - DNA, 422 bp, Oryza sativa
  Clone ID: PAT_MRT4530_19792C.1
cagacgcttggacagaacgggtggccgacagacctgatgaagcagaacacaaaagatgatcatgctgaggctgcctaacaggcactggttcctactctcttggtcactgaatgttggctgagacgccagaccctaatgctcgtctttctaatggccgctctacgactccatttttaaacttcaagactcatgaaccgaaaggaataacatcagatattatggcgaaagggaccccataacatgtgaagaaacaatgcttctatacaggagtatgagacaggttccgcacaaccccccaggaaattaccatgacatgtgcctatattctcccccctgaacgacgatggatcgtcagcatatgcctgcatgatggttgaagaagaggtgaagttacggtgccgatgtatgaccaccttgttgac

SEQ ID NO: 13794 - DNA, 1048 bp, Oryza sativa
  Clone ID: PAT_MRT4530_19793C.1
atggggccgaaacggcccagcgtgcccaagttcggcacctgggaggccgacaatgtcgggtacacgctctacttcgacaagatccgcgagaacaagggcgccaccgcgccgccgctccgccatccgtacaaccataacgaccccgccgaaaaccccggcgtgatccgcgccgccgacaacctcgccgccgcgccgtcctccaggccggcgacgtcgagcggccaccgcgaatcgcagaggcatcatcagcagccgccgggctcccaccagcaccaccggcgctccggcagcgtggcgtcggacccgggcgacttccagagcaagttcgcgccgccgccgcagttccgcccaagcccaagcccctcccaatacgatcaccacagctccgaccaccgccatggccacggacaccacccaccccatgccggggtacaactgcggcggcggtgggcgccgcgcgccgtcgccgtcgccgcagatgcacgcggcgtcgaggcggcaccaccacggccgccaccaccagcaggtggcgcccaaggcgcggtccgcgtccgcctcgccgcagcacaacatatacggccgccagagggcatcggcggtgcccaagttcggggtgtgggacgagcagaacggcgaggcggcggcgcaggggttcacggtgatgttcgacaacgtgaagcggagccgagccgcggcccggggcgccggcgcggccggcgtcgtcccgcgctcgccgccgcaggagataagcgccgccaacatgaggcactctcgggatcactccctcatgtccaaggtacacgttgtttgcattgcagcagatgttcgggtgcttccaaccaaccacaagagaatgaggacgaacggcgatgtttctctgatccgatcctgtacatgtatcaacttttcacttgtgtctcttctccttttggtgaagaaagagatagaagtcacccagtccatggtcaccaacgcagcagcagcctgcgtaccacccttgctgggctatatatccctcgcaaggaataagttctctttgagtccctaa

SEQ ID NO: 13795 - DNA, 410 bp, Oryza sativa
  Clone ID: PAT_MRT4530_19794C.1
gggcactaccgcatcgagctggtgctcaacataggtgccaatcaggtctgtctgatggcactatacatcagcccggaccccgaatgccacgagacggaggtgggtcgcgaccgcgcgccggtcaccctcgttcaggacgccggcctcgccaccatggtccgccgcgccaatcctctcggcttcctcaagacccgcccactccccatctgcggtgaccttctcaagagctacgcgctcggcaccgcaccaagctactagctacctcctgcactgctccctttattattatttcctcttcttgcttttatatttatattatactgaaaaaatacccgtgcattataatgggtgaaaatattctaatcataatatactttttcatgtacaatcatattaatgacaccttctgt

SEQ ID NO: 13796 - DNA, 3519 bp, Oryza sativa
  Clone ID: PAT_MRT4530_19795C.1
atgcccctcctccgcggcggcctcgtctccgtcgtcctgctcctgctcgcctcccccttcttcttctccgccaaccccgcagcaaccgccgtcggagattgccctttggattttagttgggccaacttcacattagcttcagccgcgtgctctgatcccacgcagcgggcggcatgctgccgatacatcaatgcattcgtcgccatttccatggctcgctacgccaatgccaccggcaggctgggtgtccctccggccttctctgagatatgtcttagctctgtatccgagacattcaagctacggggaatccccaccgatgctgatgtcttctgcgggctgggacccaagataagggggtcctctatccttggatatcacttgcaagacctgcttgaattacggcattgtttcttgcatcgcctcattggctcggatgataacgttggtcttagcgtctgtcggaacgcggtttttgtcacgcttgcaactcaacagggcattttctcttacgacgacattgtcaagtgcttcttcggtgtacaagggatcacaatttttccagggccatcatctgttacatcgactccagcttcttctccaaatgtgacaacccctgttgatgctccagctccaaagaccaaaactgttctgcagaaacatcaccagccttaccggattacagtgatacctgggatagggatagcggttatattgcttgctgttctgctccaacttgtcttagtcatattgattcgtagaaagaacagggaattgaaaaatgcagaccttcatgctcagaacccagaaaatgcattctgtcagagtcaatcctggagatgtccagaaggtcaatcaccaatgttccaaaggtacagttacaaagagacaatgaaagcaacgaacaatttcagcacagttattggaaagggaggttttggaacagtctacaaagctcaatttagtgatggatctatagctgccgtaaaaaggatggacaaggtatcaagacaagctgaggaagaattctgccgagaaatggagcttttagctaggttgcatcatcgccatcttgtaaccctcaagggcttctgtatcgaaaggaaagaaaggtttcttgtctatgagtacatggcaaacggaagcctaaaggatcacctacactcatctggaagaaaggcattaagctggcagtctagactacagattgcaatggatgtggccaatgctctggaatatctccatttcttttgtaaccctccactctgccatagagacatcaagtcgagcaacattcttttagatgagaattttgttgccaagagagatgataatacaatatgtggctcatactggagctgttactggtcggagacaattccaagacaccagaatttgttgagtggcacaggacacttatcatccggaaagatcacacctgaatttgtggacccaacgatcaggggcttggttgacatggatcagctgcatttggtagttagcattgtccagtggtgtacccagagagaagggcgggagaggccatccattagacaagtactcaggatgctctcggagaggctggatccagggaatggcagctttggcgaaggcatggaagatgcagaagggggattttatcctcggaacagcaaatttcgcgtccaccagaaggatctgtttccccacggaggtctttttagcttagctagtgttagcgagctccactgccagatcaagaagaagctagagagagagcagaggagcaagcagatcaagaagaagaagacgaggaagatgcacgccaagacggactcggaggtgacgagcctggcgccatcgtcgccgccgcggtccccgacgtcgcgcggcgggcggccggtgtactacgtgcagagcccgtcgagggactcgcatgacggggagaagacggcgacgtcggtgcactcgacgccggcgctgagccccatggggtcgccgcggcactcggtgggcagggactcctcgtccagccgcttctccggccaccccaagcgcaagggcgacaagtccagctccggccgcaagggcgccccggcggggaaggggtggcaggagatcggcgtgatcgaggaggagggcctcctcgacgacgaggacgagcgcaggggcatccccaagcgctgcaagtacttcctcatcttcgtcctcggcttcgtcgtcctcttctccttcttcgccctcgtcctctggggcgccagccgctcccagaagccacagatagtcatcaagagcatcacgttcgacaacttcataatccaggcggggacggacgcgtcgctggtgccgacggacatggcgacgaccaactcgacggtgaagctgacgtaccggaacacgggcacgttcttcgggatccacgtgacggcggacccgttcacgctgtcgtacagccagctgacgctggcgtccggcgatctcaacaagttctaccaggcccggagcagccggaggacggtgagcgtgggggtgatggggaacaaggtgccgctgtacggcggagggccgacgctgacggcggggaagggcagcggcagcatggctccggtgccgatgatcctgaggacgacggtgcactcgagggcgtacgtgctgggggcgctggtgaagcccaagttcacacgcgccatcgagtgcaaggtcctcatgaaccccgccaagctcaacaagcccatctccctcgacaagtcctgcatttacctctgaatccatcatattcattcattattatcacctgctcctcggatcacctccattcctgctgcttctttcttcctttctctctacgatctgatctgtgcattcttccttttcttttttcctttttgcggatccaacaacagccataaatatgtatgtactgtatttcccagtcagattcgttattataccaaacgatcaattcgttgcagattgatgagatcgatcgatcaggtggcagaaaatgaaatacacagagctgagtatgcttatctttcgagattgaaaaaaaaaaaaaaaatttttactttagtttattttcttatctcttattttttttatttttcctctcccccctcctaatattttttatttcttatttctctaactttttatattttttttttatttttttctatttttcttttttatttattttttttttttttaatttttctatttatatttttattcacttattaagttcattttaattttttaatatatttttaatttttttttcttttttttccatatttctctcataatatcttatttttattattattattaaaaaatatatctaataataacatatactttatttttttttttccttttcttcttctttttatttattttttttttctattttttattctctttactttctcccttatcttcctttaatatatttaatatattttaatttatttcattcacacctattttatatatatttattttacacttctaaatttttaatcttaattctctttg

SEQ ID NO: 13797 - DNA, 121 bp, Oryza sativa
  Clone ID: PAT_MRT4530_19796C.1
atgttgaagaccggcagtttaggccggttagctgtatatagcataggtgcagcagagctgcgagctataagaggctgttcaattggtggagcattgggtggtgacgataagtgcgaagagg

SEQ ID NO: 13798 - DNA, 282 bp, Oryza sativa
  Clone ID: PAT_MRT4530_19797C.1
atggcggcaatggtgatcttcttcactgctctcctcttgttggcatcgtcatcttcttgccttgcacgagctaggatgatgatgatgccaggtgatcatgctgtgaatggcaaggagactagtgcttcttctaaggaagctacttcacctcatgatttgctgcaaggtgtagcgccgccattgccaccgtcgccgccggcgaccgagatcatccgcccggacagcagcggctggatgccgcaggggtcggtacccagcccagggatcggccaccgggcgtag

SEQ ID NO: 13799 - DNA, 355 bp, Oryza sativa
  Clone ID: PAT_MRT4530_19798C.1
agaaaaaagggcccgcattaaatcaaaggggggggggaaaactggccccacccccaggggacaaaccagggggccttttggcaaggggcccccaaatttaaacggggagcgggacccaaattaagggatcaagaatgggttcaaaacaaatgggacctccaaaaggcccgaaacttggtcaggggcccaaaacttgcaaaaattggggctgggaaccatccgggggaaccactttaacccttacccaacccgttaagggtcaccatgggggcaccaccataaccttctttggccataaaaccaagctgggtggaggaccttcccccatttgggaagggcggaccccccccttggc

SEQ ID NO: 13800 - DNA, 192 bp, Oryza sativa
  Clone ID: PAT_MRT4530_19799C.1
gggacgcgtgggtcggttaggccgggtgggtcaaggctgcctcggagatcttgaccgagggcaggctcaactacttctggaaccctagcctgagccaggcgcacagaatgctgcccatctgggctgcgcaagtggcgctcatgggcgccggctaggggtaccgcatcgccggcggggcggtcggttagaccc

SEQ ID NO: 13801 - DNA, 4605 bp, Oryza sativa
  Clone ID: PAT_MRT4530_1979C.1
atgtcggcgcacgggaacgtgtcgtggggctgtgtcttgtgggtacagttgtacacctctgatcagagtaaaactattcgaatagccgtgcccgcggttatgggcggtcgaccagattcacaatgggtagtactcagtcttgctctcttttcccctactccagagctaaagttcttctcagctggagctgtctcagaaaggtttgctgcttgtgggttagccggcggtcgatatcatgtgttagtgatggtgaagacaaggaatgatccccgtgactccaacggcgccagtggcagcgaagagcagatcaatggagcacataccagtggtgcatctagcaacattccatctccaccgcccgagaacccaatggtcattcagatgatgacaatgatgatgcaacagatgcagcaacattaccatgagatgttgcagcaggcgcagcagaaccagcagtctggtcctccaccattacatttgtccaagctgttagacttcctctatatcaagccacttactttctcaagcaccaccaacctaatggaggccaacgactggctccatgctattgagaagaaactgaaccttctgcaatgcaacgaccaagagaaggttgcttttgctacacaccagttgcaaggaaggcacagattcccgaggggatcatggcacaaaagaagagagttccgtgcactgcaacaaggaaccagaacagttacagaatacctgcatgagttcaaccgccttgtgcgctacgctcctgaggacgtgcgcaccgatgccaagaggcaggagaagtttttgtttggtctggatgatgaattgaccaaccagctgatctcaggagtttacgaggacttcaagaagcttgtggacaaggctatccatcaggaagagcaacgcaacaaaatggaccgtaaaagaaaggcagctcagttcaggactcctcaggggaacagtcagaagcctcgcttcatgacgggacagctgggtgagccttccaccctgatcgtccgtcagcaccgtccctaccactcgggtaacttcaacaacgactacaacggtggcagtcacaacagtagtgagcagcaccaccacaactcaactccacccccattaatggcaccagctgagtcagaactaccagctatgtcagcccagtcagaacagctcaagaaggagtctgcaggaaagccaggaccctgcttcaactatggcaagcacggccactttgctagcaagtgtccgaagctaaagcgtgctggacccaagttcgtccaggcccgcatcaatcatgcgtctgcagaggaggcacaagcagcaccagaggtcgtgctgggcacgtttctagtgaactcatatccggcaacagttctttttgattcgggtgcaacgcattctttcatttccaagaagtttgctgggacacatggattgtcggtagtggaacttaaaataccaatgcgggttcatacccctggaaatgacatgaacaccgcacactactgcccctcgatgactatagagatcaaaaggtcaccgtttctatccaaccttatccttcttgaatccaaagacctagatgtcattctcggaatggattggttgaccagacacaagggagtgatcgactgcgcgagtcgcaccatcaccctaaccaacgacaaaggggagaagatcaccttccgttctccagtgtcgcagaagtccgtagcaagtctgaatcaggctgctattaaggaacagacagaaatagtggagaaaagtcctaaggagttagaggatatccctatagtacaagagtatcctgaggtgtttcctgaagacctcactacaatgccaccgaagagagaaatcgagttctggattgatttggcaccgggaactgctccgatctacaagaggccttataggatggcagctaacgagctagcagaagtcaaagagcaagttgatgaacagctgcggaaaggatacatccgactgagtacttcaccttggggtgccccgattatctttgtggagaagaaagataagaccaagaggatgtgtgtcaattatcgcgcactcaatgaggtcattatcaagaacaaatatcctttgccaaggattgatgacctgtttgaccagttaaagggtgccaaagtgttttctaagatagacctacgatcaggctatcaccagttgagaattcgggaagaggatattcccaagacagccttcactactcggtatgggttgtttgagtgcacagtcatgtcttttggactcaccaatgcaccagctttcttcatgaacttgatgaacaaagtgtttatggagtttttggacaagtttgtcgtggtgttcattgacgacatacttatctattcaaagtctgaagaggaacatgagcagcacctccgtctggtactcgagaaattgaaggagcaccagttatatgcaaagttcagtaagtgtaacttctggttgtcggaagtcaagtttctgggtcacgtcattactgctcaaggtgtggcagtggatccgtcgaatgtggagtcagttactaagtggaccccaccaaagacaatttttcagatccggagttttcttggacttgcgggttattaccgtcggttcatcgaaaatttctctaagattgccagacccatgactcagttgctgaagaaagatgaaaattttaagtggtcagttgagtgcaaccaaagttttgaagaacttaagaagaagttagtatctgcaccagttctaattctgccggatcagatgaaagacttccaggtctactgtgatgcatctcgccaagggctaggatgtgttttgatgcaagaaggcagagtggtcgcatatgcttcgcggcagttgcgtccacacgagaccaattatcctactcatgatcttgagttagtagcagtggttcacgctttgaaaatgtggcggcactatcttattggcaactgctgtgaagtctacactgatcacaagagtctgaagtatatcttcactcagcctgacttgaacctccgacaacgaagatggctggaattaattatagattatgacatgagcattcactaccatccgggcaaagccaatgtggtggcagatgcattaagcaggaagagctactgcaatgctttgggcaccgaaggcatgtgtaaggaattgcagcaggagcttgaacatctcaacttgggaatcgtagaacacgggtttgtggccgctctagaggcgcggcctacgcttatggatcaagtcagagcagctcaaataaatgatcctgaaatagctgaactgaaaaagaatatgagggtcagaaaagcccgggatttcctggaagatgaacatggcacaatctggctgggagaaagattgtgcgtatgcgtacctgatgacaaagagctgaaagatctgatactcaccgaggctcatcagactcagtactccattcatccgggcagtaccaatatgtaccaagatctcaaggaaaaattttggtgggccagcatgaggagggaaatagctgaattcgtcgcactctgcgatgtttgtcagcgggtcaaggcagaacaccagaggcccgcaggtttgcttcaacctcttcagattccggaatggaaatgggaggaaattgggatggatttcttcactggtttacccagaacatcatcgggacatgactcaatctgggtagctgtggaccgtctcacaaaggtcgctcatttcattcgagtgcataccacatatacggacaaaagattagcagagctttacctctcaaggatcatgtgtttgcatggggtacccaagaagatcgtatcggatcgagggagtcagttcacttcaaagttctggcagagactacaagaagaattgggaacccgtttgaatttcagcacagcttatcacccgcaaactgatggtcagaccaagcgagtcaaccaaatattggaggatatgctgcgagcctgtgcactcgattttggcggagcttgggataaaagcctgccttatgctgaattctcttacaacaatagctaccaggccagtttgcaaatggcaccgtttgaagcattggaaagattgaggatcgctcagtctcggcagaagagttacaccgataaccgccgaagggagctcacttttgaagcaggggattatgtgtaccttcgtgttactccgctccggggagtacaccgtttccagacgaagggcaagttggcaccacgctttgtgggaccatacaaaatcttggaacgaagaggagaagtcgcgtatcagctagaactcccgtccaacatggctggtatccatgatgtgttcgatgtgtctcagttaaagaagtgcttaagagtaccagaagaacaagccaattcggagcacatcgacattcaagaagatctgacttatgtggagaagccagtccgcatccttgagaccagtgaaagaagaaccagaaacaaggttaccaggttctgcagggttcaatggagccaccactccgaggaagaagcaatatgggaaagggaagatgagttgaaggccgcccatccgcacctcttcgccagctcttccgaatctcggggtcgagattccatttaa

SEQ ID NO: 13802 - DNA, 2130 bp, Oryza sativa
  Clone ID: PAT_MRT4530_197C.1
atgtcgggtgaccgctacggcggagggggaggcggaggcggaggcggaggcggcggcagcggcagcggccaccggagggatcggtacgccgaagggggaaggcgcggcagctgctccccgcacccgcaggaccgctacggatcaggacggcgaggaggaggtagcggacggggagggctcgtcgacggcgaccgcagccaccccagggaccgcaccggtgggggtgaccactacggcgcaggggaaggcagcggcccccggatggatcggcacgccgaagggggaaggcgcggcagctgctccccgcacccgcaggaccgctacggatcaggacggcgaggaggaggtagcggacggggaggactcgtcgatggcgaccgcagcggtggtggtgaccgttacggcgcagggggcgggggcggcaacggcaacggcaaaggcagccgcagccgcagcgcccatccgagggaccgctacagcggaggcggacacctctacggcggagggggtgggtacaccagcgaccgcggccccccaacctgcagtcatagatacgacggccaatcgagtaaagaacacggggacagtttctacagcggcgggaacagttccaaattcgcagataccccgcgcaacaaccaacaccaaccattgaccagcatgagattcattttagcaggattcgggtccccgctcaaggccgagtacaaacaattgatcaatggaatgggcggccaagttcttacttctttggaatatgagatagctacacacattgtaccaatgggaggacgagaaggcgctgccatagtgtgggaacttgacggaaaaagagtatactctaaagagtggcttgactcactgttgtatgtgcggcctaaagcattagaggcgtcatatactggcaggactaggaatggcagtcaagctctatatcctggggaaaggagggtaaggagaaggatcaattttgattcatatcatgatgacggtgcttcactttgctccaaacatcacgacatattcaagtgtccgtttgataaatccacacaaacaacattgctccaattcgctgagaagaataggaagaatctgatatacgcaggccctacccctgggagttttgacactcattggtccattgtaggaagtactgagatcaagttgaaattgcgaagagcttttagacttattcaagccctgcataaggaaaatatatcactttgtggaaaatttggtgctgaaaatttcttctatgatgatgataacaatgcaaggattggaaatcttatggaagacaatttgaagtatggcgctgatctcagtgataagaacttggactatgagagctttgttaagatggtgaagaaggaggtttttgtacgcacatcaattccaaatagtctttcagaatggctatgtttgatgtcttcaggtgtcaaagggtttgagtacctgctctgtcatcatgatggtttgatggaaccaaggcagaatgctagctcattcatgtctctccatgacatttttttggagatcgaaacatctgatccagcagcctatgggagtgtgctgtctgatcttagacagtacaattattggaaaagtaagatgccaaataattccttcctaaagagcacaaaggaatatatggataaagatggcaagcaaatagagtataaggatgatgtgaaggatctcttgaggttccttagaaactgcaggcgtcatgcggcacagttcaaggaagacgagtttccttccatagtggaccatttctacccaaagctgatgtgcgatttccagaaagctatgtttaaggaagttgagcataattccaaggaggaggtgtccatggcgtacttctctcggctccctgctggttgtccatgcagggggcagctgctcaccatggaccaccggctggaggagaacgctagcggtggggaggttggccctcttgggtgctggccaggtggcctgtgcctatcaagatccattggctgtaggggggcgatttcacatgtcgaccaagttaagcggcaaaggcatgccggttgccgagatttacctgcagaattggctgcaaagcttatgcaagctctaaaaagaaactgggctgaaagatga

SEQ ID NO: 13803 - DNA, 549 bp, Oryza sativa
  unsure (1)..(549): unsure at all n locations
  Clone ID: PAT_MRT4530_19800C.1
cacgangttntccnagctngaaacancaaagcgaggtnagacatggccgccgccaccatggccctctcgtccccggcgctggccaggcaaggncgccgcgaaggtgttcggcgaggggcgnatcaccatgcgcaagtcggcngcgaacccaaacccgccgcgtcggggaaccgtggtacggnnccgaccgcntgctctacctctgnccgctctccggcgancgccgaactacctgaccggnganttccccggcgactacgggtgggacaccgcggggctctccncccacccngaaacgttcgccaaaaacggganctggangtgatccactccangtgngcgatgntnngcncgctnggctgccttttccccgaactcctcccccncaacngcgtnnngttcggcnaagcggtgtngttcaacgnggggtcgcnnatnttcancnaaggcgggctcnantacctcngcaacccaacctgattcacncncaaaanatcctccccatctnggcngtccnngtngtgctcnttggcnccctccaagggttcc

SEQ ID NO: 13804 - DNA, 1181 bp, Oryza sativa
  Clone ID: PAT_MRT4530_19801C.1
atggcgatgggcgacgcgaagccctcggcggtgcacatcccgatgcccgcgcgcgaccgcgaccgcgaccgggaccgcgagctgctgctcgtcccgcccgccgccgtcgccacctccgcctccgcctccgcctcggccgcgggccgcgactccgactccgacgacgagtccaagccttcctccgcctccgccgccgccgccgccgcgcagaccggccgtgaggcgtttcacaaggttgtgcatagctgggcgtccaagaagttcatgaccggatgtgtaatcctctttccaattgcagttacattctatatcacatggtggttctttcgctttgtggatgggtttttctccccaatatatgctcatcttggaatcaatatatttggacttggttttgtaacttcaatatcattcatttttgtggttggtgtgttcatgtcatcttggctgggggcatctattctcggtctgggagagtggtttataaagagaatgccatttgttcgccatatttacaatgcatccaagcagatcagtgctgccatttcacctgatcagaacaaacatgcattcaaggaagtggtcattataaggcatcccagaattggcgaatatgcatttggattcatcacttcggaagttctacttcaggattattccagtgaggaacaaatgtactgtgtatatgtaccaaccaaccatctctacattggggacatatttctggtcaactcaagtgatgtgattagaccaaacttatctgttcgtgaaggcatcgagattgtcgtttcaggaggcatgtcaatgcctcaagttctatccatagtggaaacggagcagaaccaatggagcaggatgagatctagtcgaagctaagataaccctcctacgtgtgcccagtcgccgcttgtaatcccgtgtttactggtttctgtaagtacaagggtaggatccaatagtagaatgtacagttctcctggctgggaatgcaaaatcacgctgtgcacgcacttaagctgtcactccattcaaatgcgcgcgtgtgaacttcgttccttaggttggagcttcatgaggtagagtttgtcctgacggtttagatgacacagtttattcgcttcatttatttggttaagagggagttctagttctgattgtctgaaaaaaaaaaaaaaaaaaaa

SEQ ID NO: 13805 - DNA, 125 bp, Oryza sativa
  Clone ID: PAT_MRT4530_19803C.1
cctctgctccaggttggcttaccgatttcggccatgggcatgccccaagaaccctagttgcactgctgtttcggtacattctggtgtatatttatcatgcaccaatgttcttgagatgatcaagg

SEQ ID NO: 13806 - DNA, 2116 bp, Oryza sativa
  Clone ID: PAT_MRT4530_19804C.1
aaggaccggccatgtattttaatctataaaaaatttagaggtaactagtatatgaagataacaagttttacactaaaaaatatgacaccttcaattgtcttcaacagctcactccaacagctcaaattatatatttttcacatgtacataaatgtgctttgagcatacattgcaagtaaacacataaatgttgtttgacaattacattataagctagctgatcaacaccataactcttcttccatgtatatgtgcagcggatgatcaaattgcaccgcaaaaaagagatgactgaactcatcaggttttcaggaggaaaccctcatcacatccggcccgcagaaaccagatgcccacacgcatctatgactctccgcgcatacaaaactcatctgaatcttaagctgtcctcttctcgcgaatcacggaagattggttgcggcgaccacttcagatgcaagttcagtttcccggactttgctccctccagtttgaagctgtccttgtaatcttcttcgatcaagaccttcgttaatgttaggatgcaccgtcccatgtaatctctactaaaagtatcatgatcatatacttccaacataagcatatcatgtaaaccatcttcgacaacaaaatcaaaagtttggttccaaactggattcaagctttcgctcacaacccttgtcttgtacttggtttttgatttcttgagtgaaagtacaacatatgggtcagactttccattcatatccattgctggcagatcttccccagatatcacagttactgacaaaactccccgcataatgatttcttttttcttcctggaagacaacctgttaaaaccattgctccctgacccattttccatgctcgtcattgtcctctccaaagatgtcatagaaaactgctgtctaaaaggatttggagtctcctccttcatgtcaaatgggcagtagagtagctcaagatgcacctgaccccgatctttccggtccctttgaatctccaagtcttttacaagcttcaaccagacatccttcactttgcctggctgtagatccttcagagtaacttgagcacagccaatcaattcagattcctgaataccatcatcatcataaatcttcactgtcacagtctgagtatctgcatcttcaacaataaactcaaagtgttcattccagatagggttcaagtcgttgttaattgttttacttctcttcattttatctggcaagggtcgtacatacacaattgcaaaagggtcagattttcctatcagatctttgttcgtcaaatccctcgcttgtactagcttgacttccaatgtaccaacaggctttagttccaaatcactgtagtccccaggtattataggaatgactttccttacaggccatgttattgagtcttctatagcattttttattgtgtcctcaagagcatccgaaatcccaggtatagcagaaatttcaccaccaatgaccttcagtctgaaatccagctttttcttctttcgtagagaaaagcaaactgctccaaagcagggcaactgatcaacaagtggcttgaagatcaagcggaaaactcctgtaaagccaatatctttcacctgtattggaagtgacacgccaagtctagtttttacgtctagtatgatacttggattggcatcccaattcatctctagttccatgacaatgcctgattcgtcattctcaatgatcgaaacaccagtaaactgtggtgcaacagtaccaagagtgagttttgagaacttgagagaagctaagattattggtcgatattgttcaagaacaggctccacggaggttttgatcagttctgatgctgccgcgttcacaaatggccatatttttatcagctcttgattgagccattttaacttttgctgtgttgagaaaacaacccaggaagggtacaggtcagctgggagtaacttccgtgaatcttcaatagtcatcttggagaaactagcaattgtggcagccagctgccggcggcgggcggcgcgggagttctcggcgcgggcgaagcccactatgagagccacgcccgccgcgatccccagcaccaaccccaccaggaaccccat

SEQ ID NO: 13807 - DNA, 5148 bp, Oryza sativa
  Clone ID: PAT_MRT4530_19806C.1
atggcgatgctgacggccaagctcacctccccccccgccggagaagcgatcgcacgttcgcacgcagacgcagccgcggcggatcaatggcgatgctgacggccaagctcacctccccccccgccgccaccacctggctccccggcggcggccgccgatccgcgccgccccgccgtgctacggtgatccgcgccgccgccgtctcctacgccgacgagctcgtctccaccgcgaaatctgttgcttccccagggcgtggtatcctggcaattgatgagtcgaatgccacatgcggaaagagattagcatccattggtttggacaacacagaagttaaccgccaggcttacaggcagcttttactgaccactgctggtcttggtgaatatatttctggtgctatcctttttgaggaaactctttatcagtcaaccactgatggtaagaagtttgttgactgcttgaaggatcagaatatcatgcccggtatcaaggtcgacaagggcttggttccattgcctgggtccaacaatgaatcttggtgccaaggcctagatggtttggcttcaaggtgtgctgagtactacaagcagggggcacgcttcgctaagtggcggactgttgttagcatcccttgtggtccctcagcattagcagtcaaggaagcggcatggggacttgctcgatatgctgccattgctcaggacaatggcttagtgccaattgttgagccagagatccttcttgatggtgaccatgcgatcgagagaactcttgaagtggcagagaaagtgtggtctgaggtattcttctacctggcccaaaacaatgttttttttgagggtatcctgctgaaacccagcatggtgacccctggagctgaacacaagcagaaggccactccagaagccattgtgaagcacacccttacaatgctgaggaggagagtagccactgcaggcccgtggaatcatcttcctgtctgcgcagaaggctctgctggtccgtgccaaggcgaactcgctggctcagctcggtcgctacaccggcgaggtgtccttgtcatacgcccgggctctccagaactcggtgctgaagacatggcaggggcgccccgagaacgtggaggcagcgcagaaggcactgctggtccgtgccaaggcgaactcgctggctcagctcggtcgctacaccggcgagggcgagagcgatgaggccaagaagggaatgttccagaagggctacacttactgatgcggcagaagagacttccgtgatatacaacatgccatttcgtgtcactgttttttgaacaccggagtgaataatcaccagagtatgtttggtgccaccgattgttgttagcttcgttagcacgggagaaaccttagagagctgtatctgactctgaaacacactattttgatagcacgcttttactgtaagcatatgcctttcggccatgagactgtgagagagatgtttcatttgtgtgaggggtaaactaaaaacaatcaaaaaaaaaaaaaacggcagcctcgctccgccgccgtccgcggccgcgcaggctcagccgggtggatccactttagataatattgatgaatggaaatggaaactgcacatgcttcttcgtaacgaagatgagcaagaggttatctctagggaaagaaaggacagacgtgattttgaacaactttcccaactggccgaacgaatgggtttgtacagccgtcagtattctaggattgttgtgtttagtaaggttccattgcctaattatagatcagaccttgatgacaaaagaccacaaagagaggtgtctattccttctggattgcaaagagaagttgatgctttgctttcagattatcttgcacggaagagaacaagcagtgggagctttcctaatgccgctttctcaaggtcaagtagcacagacagttttgcaactgacgaaagcttcttggagcagcaagataatcagacttcaaccagtgctgtgatagagagaatacaaagaagaaaaagcctacagttgcgtaatcaacaggaatcatggcaggaatcacatgatggccaaagcatgatggaatttcgtcgcagtcttcctgcttataaagaaaggcaaacattattggaagctatagctcagaatcaggttgttgtagtttcaggtgaaacaggatgtggtaagacaacacagctacctcagtacattttagagtctgaaatagatgctgctcgtggtgccacttgcagtattatttgtactcaaccaagacgaatatcagccatagctgtttctgaaagagttgctgctgaaagaggggaaaaaattggtgaatcggttggctacaaagttcggttggaaggaatgaaaggacgggacacacgccttcttttctgtactactggagttctgttgcggagattgctggtggatagaaatttgaaaggtgttacccatgttattgttgatgaaatccatgagcgtggcatgaatgaagattttcttcttattgtcctgaaggaccttcttccacgccggcctgagctaagacttgttttgatgagtgcaacccttaacgctgagttattctcttcatactttggtggagctcccatgatacatatacctggtttcacttatcctgttcggagtcgatttctagaagatattctcgaaattactgggcacagattaactccttacaatcaaattgatgactatggtcaagagaaaagttggaagatgcaaaagcaagctctaaggaagaggaagagccaaattgcttcggttgtagaagatacagttcaagctgctgatttaagggactacagtgcacgaactcgtgactcactatcctgttggaatcctgattcgattggttttaacttgatagaaaatgtcttatgccatatatgccaaaaggaaagagctggcgcagttcttgtatttatgactgggtgggatgacatcaatgcactgaaagagcagctgcaagcaaacccattacttggagaccctagtaaagttttactgcttgcatgtcatggttcaatggctagctcagagcagaaactaatatttgatagacctgagcctggtgtaaggaaaattgttcttgcaaccaatttggctgaaacaagtattactatcaatgatgtagtttttgtggttgattgtggcaaagcaaaagagacatcttatgatgcattgaacaacactccatgtttgcttccaacctggatctccaaggcttctgccagacagagacgaggaagagctggtcgagtccaaccaggggagtgttaccatctatatccacaatgcgtgtatgaagcatttgctgactatcagttgccagaactcctgagaactcctctgcaatccctctgtttgcaaataaaaagcttgcgccttgggagcatctctgaatttttatccagagctttgcaatcacctgagtctctatcggtagaaaatgccattgaatatctcaaagtcattggagcgtttgatcgtaatgaagagttaacaattctaggaaagcacttatccatgcttccagttgagcctaaattggggaagatgctgatttttggtgctatttttaattgccttgatcccatattaaccattgtttcgggacttagtgtgagagatccattcttgactccatttgacaagaaggatcttgcagagtctgctaaattgcagttttcatgccgggactatagcgatcaccttgcacttgttcgtgcatacgaaggatggagagaggctgaaagagatcgcaatggctatgactactgctggaaaaattttctatccgtgcaaaccttgaaagccatagattcccttcggagacaatttctctttcttctcagggatactgggttggttgatgaaaacatgactgcgtgcaataaatggagccgtgatgaaaatctagttcgggcggtcatttgtgcaggattatatccaggtgtttcctctgttgtgaacaaggagaaatcaatttctctcaagacaatggaggatgggcaagtcatgctttactcgagttcagtcaatggaaaagaaaccaagattcccttcccctggctggtgttcaatgagaaggtgaaggtgaattctgtttttctccgggactcaacggctatatctgattctatactgttactctttggaggcaacataaaacaagggggcttggatggacatttgaaaatgcttggaggatatcttgagttcttcatgagtcgtgatcttgcatcaacttacttgagtctcaagagtgaacttgataatttaatccattgcaagctccaaaacccgaggatggacatccaaaccagtgaagagcttctgtcagcgattagactgcttgtcactgaggatccatgcaacggtcgtttcgtatatggtcgacaagagcaaagatcaaagaaagcaaagacaatgttctctgcagcccccatgagccatggtggtggtggaaatggaggagacaatgctaagaaccagctccagacccttctcactagggctgggcatgataacccatcctacaagacgaagcaaatcaagaacagcctcttcaggtcgaccgtggagttcaatgggatgcagtttgtagggcagccgtgtgccaacaagaagcttgcggagaaggatgctgcaggagaggcactgaactggctgacaggaggagctccctccgactcaagagatccccaagacatggatcacatgtccatgcttcagaaaccaccacgcaggaagaggcatcatcataggaggggttgatcagaggccactttggcatttcctttctatgtagtagcaaccaggggtagtcagcattagaagctaaaagctagcaacaaaaataattgtagcttagggtgctctaaacacagcaattttgttagtgtgcccggaaattttacagggcgctggagtttggccgtggcaaaagggaaatctacaggggaagactgactgtattggtgagagtctgcaaggagtacaatccatttttgttttagtagattttaggatcatttcacacaatgcccactatgttgtccacgattgtaaaactagagagtttggagtttaatgtatagttcaggacc

SEQ ID NO: 13808 - DNA, 296 bp, Oryza sativa
  unsure (1)..(296): unsure at all n locations
  Clone ID: PAT_MRT4530_19807C.1
anaaatcccccatgcctgccaatcgntttcaaataatntgagttttgtgtttcgaccactttgagtcccgaagttccagccacgaggcttccatcgtcgtctcattttcatgctcattgcttcacctatctaactcccacattngctctactgttaatttttgttcttaaattgctcgatgttcatgtggtacacctgctgtgtcggngccactgaaccgacgactataatttgtgtgcactagaacatcatccaactagggctagtcctttgcccaaaaaaaaaaaaaaaaaaaa

SEQ ID NO: 13809 - DNA, 569 bp, Oryza sativa
  Clone ID: PAT_MRT4530_19808C.1
cttatttttcctttaataaacaaaagaacaatatcagacatggcaagcagtcgtggcacgtacctttctttttggttcactgagtcgtacaaacaagtttcgtacgaacccttgccactggacaaagcaaaggtccaatggattatgtaaaacaaggagtcgatcagcttggccaagcagctgagaaagttaaagaagctgttaggagtgccacgtcaactgttgtgggtgccgtgtcgggcgatgctaatactaatcaaaaagctgaagaagcaaaacgacacggcgatcgtgctgctgacaacttccgcaatgccgctaacgaagccaaaaatcgttcaggatatggaaacaccagtagttcatcgcgctcaaacagcttcagcagtgatgaaagtaccaccgataaaatcaaagacaaagccaacgaatttgcacaacaagctaaatctaccgctaagtcagccggtgcaacagctcaaaactatgcacaacaagctgccagtaaagctcgcgaagtcgctgatgatgtcgctagttctgccaagaatgcagctaacaaagcagcc

SEQ ID NO: 13810 - DNA, 486 bp, Oryza sativa
  Clone ID: PAT_MRT4530_19809C.1
aatactccatgatcaactgttatttatccatcagcattgattattgtccacaagcttaaaggctttggtttggccagctaacaacaccacaactaccgtatcaaaagctaggcatcacgcagatcatcacgttggctccccatcaaggcccccacccacagcccacacaaccactctcacacacagacgcgcaccgtagagcatcctaaaacagtgtcaagattgcccacatcgtctgaaagaaaaaaaaaacacgacaatcaaattcagatagtaatgctactccctccatagtccatccacgtgtgtagagcatttctaagattgttatgacattattaagaaggaaaataaaagacttttgatgcctcttattcaagtgcggttgccatcttctgattagacaagatgaaaggctgaagcctgtggttcgacgagaatttagtgataggtggttgaaaggagatagaatactttataaatttc

SEQ ID NO: 13811 - DNA, 2021 bp, Oryza sativa
  Clone ID: PAT_MRT4530_1980C.1
caggactaagttaaataagacagtacgaaaaaaacgacagcactatgccactttggtatgttcaggtctttgttagccgaatatacagtgaggatgtaacaagggggcaatgctgactgctactgctaggagaacaattatttggataaactttcttgattgttgcattagcatcctccacgacaccatttttaccgacataattgtcttgtctgccgctttgtagtttttattgaggattctgcttagtacaggacttgcctacgaaattcatacctaaaaaaccggagggaaaacttacctaggaaattctgaatccaaggaccacatattcgttggctactcaacaaggtagtgcattcacaagcatcaaacctttcagttttctacagataggctcgctaagtggcatgccttctacctgctacaaaaacctaaagtacacagaattagcctactcgaagatggcgattctcccttgagcaccatggtcgcttcctctaatataagcagctgcaaaattagcaaaataatttctctgctgaatgactccagctactatttcttcagaaccaattcgagtagtcaaagtcgcggagcttcctaaagtgcttctccacatcttgcctcgactttgcccactcctctctttggatcacagtggtcgcatcatcccttttggtctgatacaaacagcccacattagcccttgaagcctccttgtcaattattctgaatgattcccctccatctcgtatgagtagcaagtcatttctcctgtccctcttctttccttcagggacactaaccacaacttttgctctcgtgattgaccttgctttcgagtcaataacatatatctcttcaaaatcaaggaaaaaatctgggtcgttacaccgcctattcctgtaatgttttgttaagaaaaccttcatgatctccctttctgtcttgtataggggatcacgcaaatgctcaacaggcggctcactaacgtggtaacgaccaaaatttttcttcatgcacctcacatacttttgcggcatcggagcaagaacccttgggatggagtagatgtcagtgtcaggcggcgtgacatacatctcccggaagtcgaagacgtcgtcgtcggggtcaggcaccttgcggataaaaaagtcgcagtgcagtaggcgaatcttgtggaattcgtcctcgttgacggagtagtcgaccacggtgtcggaggcggagtcctgcgtggagacgaagctctgggcggcgaccatggcgatgtccccctcctcctcgtcgccctccccggacagtgggcgcggcggcgccttgacgggggcgagcaggcggtcgtagtcgacgttggacagcgcgcctcgctcgcctcccattcccacctccgccggcacggcgctgcgggacgagctccctccgccgcctcccgccggccccgacgtcgacctggaacggaggaagccgtaggggtcggtgaggtcgtgcttgatggccgtagcggaggaagccgtagggctgatgacgacgccgtcacccgcggcgtggacgtggtggtggtgcgcggcgacgggcgaggggaggagcatgacagtgaggagcaatgcaataggaggcggcggtggtaggcggtggcggaggatggtctgagcatgagcatggctggtggtgttcgtcggtggcgtggtccttgcattatgtgatggattggattggattggatttgaagcactgccgctggccacgccgccgcacggcgccgcgccgagagccgacgcgccccgaacagtgccgtcacgagccacggccggccgcgccccgcaccgcgccgccgcgagccgcagccgactgcgccccgcaaggcgccgccggcctctccgcctcctccctctccgcgccctcaccgccggcctcttccgcgccgtcgcgtaaggcgtagcgaccacaagccacggccggccgcgtcgccgcacgccgccgcaagccgcagccgactgcgccaagattaggcccat

SEQ ID NO: 13812 - DNA, 994 bp, Oryza sativa
  Clone ID: PAT_MRT4530_19810C.1
aacaagacgagtggtcaaacagttcaaataaaaactaaaaatcccttaggtagtgtttggttgcaaggatgggatgggatgggatgggatgaacccacttttagaggtgtttggttgagaggtgagtgggatgggatggtccctggagaggaatattcctcccagatccgggacgaaacggtccgccaaaatcggccggaccaatccatcccacttcgacggagagaacggcgtctgctcccgctcggctccgccgcggcgccgccacggccgcccgtccctcctccgcctgctccctcccccggcgccgctccgtcctcctccgcctgctccctcccccggcgccgctccgtcctcctctgcgtccgcgaccggccgccgcctcatccgcaaccgtctccgcgaccggccgccgccgctcgtcatcagctcccgccgcctcccgctcagctccgccgcggcgccgccacggccgcccgtccctcctccgcctgctccctctcccggcgccgctccgtcctcctccgcctgttctctccgccgcgtccgccgcctcatccgccgcctcatccgcgaccggcccccgccgctcgactgctcctcgcctcgtctccgcgcccgcctccgcctcgtccgcgaccggccgccgccgctcgtcgttagctcccgccgcctcccactcgactccgccacggccacccatccctcccccgcctgctctctccgccacgtccgccgcctcatccgcgaccggccgccgccgctcgaccgctcctcgcctcgtctccgcgcccgcctccgcctcgtccgcgaccgcctccgcgaccggccgccgccgctcgtcgtcagctcccgccgcctcccgctcggctccgctgcggcgctgcctctccttcgctcgcgccgacctgctcctccgtcccccattctaacggtccgtgaaacactgtccattggtttctaccccgagttggacgtggaggagggcctatag

SEQ ID NO: 13813 - DNA, 1260 bp, Oryza sativa
  Clone ID: PAT_MRT4530_19811C.1
atggacgcggcgtggcgcggcggcgttggctgctcgccggtctgcctcgacctctgcgtcgggctgtcgccggtgcgggagccgtcggcggcgaggcacgagctgcttgaccggccggccggctgccgcggcggtggggattccaagtcgggggccttcctccaggcgaagatcgtcgaggcgaaggtcactcagatgagcgaggagaatcggcggctgaccgaggtgatcgcccgcctgtacggcggccaaatcccgcggctcggcctcgacggctcggcctcgccgccgcggccggtgtcgccgttatcgggcaagaagaggagcagggagagcatggagacggcgaattcctgcgacgccaacagcaacaggcatcagggcggcgacgccgaccacgccgagagcttcgccgccgacgatggcacctgccggaggatcaaggtcagccgggtgtgcaggcggatcgacccgtcggacacctccctggtggtcaaggacgggtaccaatggcggaagtacgggcagaaggtgacgcgcgacaacccgtcgccgagggcctacttccggtgcgccttcgcgccatcgtgcccggtgaaagaagaaggtgcagcggagcgcggaggacagctcgctgctggtggcgacgtacgagggcgaagcacaaccacccgcacccgtctccgcgcgccggcgagctcccggcggcggcggggggggccggtggctcgctgccgtgctccatctccatcaactcctccggcccgaccatcacgctcgacctcaccaagaacgggggagccgtgcaggtggtcgaggcggcgcatccgccgccgccgccggacctcaaggaggtgtgccgggaggtcgcgtcgccggagttccggaccgcgctggtggagcagatggccagcgcgctcaccagcgaccccaagttcaccggcgcgctcgccgcggcgatcctccagaagctgcccgaattctagcttcctttacaattctccaattcttcttacaggaaaaaacatagaggcgcatttcaatagagattagagcttaatctccccccaaatttgaaaattttatacagggtaagaattccgaatgcttttctgctgcttttaggatgtgaattgtactctctcataataacctgttggtccttgggccgtcggaagaagattgcgggcttctatcgggcctcacgatcctgagccccattgcgaggctccttgagcttaaaaaaaaaaaaaaaaaaaa

SEQ ID NO: 13814 - DNA, 1025 bp, Oryza sativa
  Clone ID: PAT_MRT4530_19812C.1
gcacgaggcacattctcaccctcagcagctcctcctcctcctcttccaccaccagcaacagcagcagcggcgtgcgctctcgcctccgtctccggcgacccatggccgtggacctcatgggcttcagcccgcgcggcggctgccgcccgtccgtggagacggagcagctcgctttccaggaggccgccgccgcggggctccgcagcctcgagctgctcgtctcgtcgctctccgccgggggggagcaccaccaccgccgccgcccgcaggagaagcagtcttcgccgccgctgggggagatcgcggaccaggcggtgtccaggttcaggaaggtgatctcgattcttgaccggaccggccacgcccgcttccgccgtggccctgtcgtcggagcggcagctgcggaggcggctgccgcggcggcgtcggcgtcaccgtcgtcgtctcctgtctcgccgcctctcccgccggtgacgacgcagccggcggccgccgtgaagagcctgacgctggacttcacgaatcccgccaaggtcgcggcggcgtcggtgacctcgacgtcgttcttctcgtcggtcaccgccggcggagacggcagcgtgtccaagggccggagcctggtctcctccgggaagcccccgctcgccggcggcgtcaagcgcaagcacccgcacccgccctgcgccgccgccggcgacggccacggccacggcgcaggccacgcgcacgcgcacggcgggtgccactgctccaagaagcggaagcagcgggttcggcgcacggtgcgcgtggcggcggcgagcgcgcgggtggcggacatccccgccgacgagtactcgtggcgcaagtacgggcagaagccgatcaaggggtccccctacccgcgcggctactaccggtgcagcaccgtcaagggttgccccgcccggaagcacgtcgagcgcgccgccgacgaccccgccaccctcgtcgtcacctacgagggcgaccaccgccactcgccgccgccgccgccgcttgtttaa

SEQ ID NO: 13815 - DNA, 450 bp, Oryza sativa
  Clone ID: PAT_MRT4530_19813C.1
atggcggaattcgacggaggggtggacgaggtagccctcggccgtgcgaacccgaagacgacgacggcgcggctcggcggcggcgctagtggcggccggaggcgtggagaaggcggcggcggtgagccttataggggctcgagaggggcggacacggccgggaaaccccccgatttggccggcgacggggcgacgacgtgggcacggcacggagtggggaggagtgggcgcgggaagggcgggaaacggcaccggcatgggcggtttcggcggcggctgccgttgtcggaggttgaagacggggccgacaggatcctgtatggtcccacaaagcgtggtgccaactttcctttagtctggaagcggtggactccccgaagcggagtgatacgaaggatcatttacctgagcatctctgacttgatccacgagcgtagggcgtgcctctag

SEQ ID NO: 13816 - DNA, 206 bp, Oryza sativa
  unsure (1)..(206): unsure at all n locations
  Clone ID: PAT_MRT4530_19814C.1
tnctcctcgacacgtggacgcagccttccgtggggggtttgtaaaatacaaccgacggtacctaatgacaacccaaaacaaagcgggatgcattagctctagcctgccaccgatcagtaaccatatactgataccggccaactaaatacataccaagatccgcgtttaatatgcagatgcaatcacgaacgaagccaccgcctgcg

SEQ ID NO: 13817 - DNA, 267 bp, Oryza sativa
  Clone ID: PAT_MRT4530_19815C.1
atgaagacgaagaagaagcagaatgatgatgaaaacgaagacgtccttgagcagcggcataataggccaaccatgaaagcgaagactccatggatagcggcgaaggctagccggggtgaagacatagaggcccatcaacggtggtgtgaccaaccaatcgtgaatgcgatgacaccagtcggcggtgacggaggcaagccgacgttgaagatgtatgtgcccatcgatggcggtgtgaccaaccagccgtgtaggcgaaggtactag

SEQ ID NO: 13818 - DNA, 137 bp, Oryza sativa
  unsure (1)..(137): unsure at all n locations
  Clone ID: PAT_MRT4530_19816C.1
ctttaatccgctcaaccgacttgtaatcctttcagccaatcaattttaaaggtctaatttttgtttctggtgctatgtggctagggctatgtcatgaaataaaataatgctttgatacaaatnngttcatcacaaaa

SEQ ID NO: 13819 - DNA, 447 bp, Oryza sativa
  Clone ID: PAT_MRT4530_19817C.1
aaaaaacaaaatttgtccaacgaaactttaaatatggggcccttttttggttgattttttagccctccttaaaaacctactcttacttgacagcttgattttacaaaacaaccttccacccagaagggttttagaaaaaagccattttttgcgggttgaacctatcctccttattaaccccccaatttttttgctggtaaaaccaaaaaccccagcaaaacctaggatttgaaccctaccttcccctttgttttcccttttttggagctttacaaaataaaactccgaacagtttggaattcaactgtaagggaaatcaaatttcaaactagtttgagttttttttccaagggaacaagcatttttttgccttgcccctccaaaatcacggatccttgcagttgaataatcttgatgaccgatgtccaggttttaaatctccaaaaa

SEQ ID NO: 13820 - DNA, 366 bp, Oryza sativa
  Clone ID: PAT_MRT4530_19818C.1
atggccctggacagcaaaaaatctcaccctagcagtccacatctgaaagcagacggcttcagttgcgcctgctgctccaggttgaggaagatgatgaacttgagtatcttgaaggtcgccatgtgcctggaggaccatcttggcgggctgggggagcagcatcgcgagcagggggtgcctcttggcggagcggacgcatatcaggacgtgggcgatcatcccgtgaaccccaacggtcttgctcaggtgccacagcagcagcggcagcagcagcagccggtgcagctaccggctgagctggctgtgcaaccggagcagcatcaggagtgcgtgcaggctcagcagctccagctcctcttcccatga

SEQ ID NO: 13821 - DNA, 1059 bp, Oryza sativa
  Clone ID: PAT_MRT4530_19819C.1
agggcaatattccagtattactaacagcgccaaagtttggacaaacttaacgagtagcaatccagtgtgcaatggagtaactgcaacaacgaaataacatttgacataacttaggaaaggtgctattgccctgaagcaggtcctaactccaaaattttacgagcatttgatgcgcaaacagtcaaacattcaaccatgtttcacaggcttatctcagcaatggccctggacagcaaaaaatctcaccctagcagtccacatctgaaagcagacggcttcagttgcgcctgctgctccaggttgaggaagatgatgaacttgagtatcttgaaggtcgccatgtgcctggaggaccatcttggcgggctgggggagcagcatcgcgagcagggggtgcctcttggcggagcggacgcatatcaggacgtgggcgatcatcccgtgaaccccaacggtcttgctcaggtgccacagcaggtctctggccgccagcactactgccaccatcaccacctcgtttaaacttcgggacatacttaccagcagctggtgcagcagcggcagcagcagcagccggtgcagctaccggctgagctggctgtgcaaccggagcagcatcaggagtgcgtgcaggctcagcagctccagctcctcttcccatgagagcttccattctctgtttttccttcttctcttctagttccctctctctctgcagctgcttggctgcaattgcatccagcttagccttcctctcagtctcttccctctttctcctctcttcctcttcacgttttctagcttcctcttcctcacggagcctttggaggcgctgctcttctaagttaagatagtacattaacttccgcactgtatccctttcacgcttccttgatgatatcaattgactagtcctttcatccctctctttcttaagacgactaaactcagcttcacgacgttggacaattctttcctggaaaatgttcttatgctccaacattcgagaaagtctgttcttctcctgcaggtcacctgcatggtgttgcttgctgagca

SEQ ID NO: 13822 - DNA, 237 bp, Oryza sativa
  Clone ID: PAT_MRT4530_1981C.1
atggccgctcgagcagagaaatcactgatcgattttgttcttatctctgtcatagaaatttcaaatgcatccttgaggcgactagagacaagggtgactgagatgtgcgaattgatgaacaatcgaagcggtgtgtatggtggtattttagaggcaggtctggatttgtactttgtaaagattgcaacccacaaaaagcagggcgatgagccctcgatccaaaaagaatctaagtga

SEQ ID NO: 13823 - DNA, 760 bp, Oryza sativa
  Clone ID: PAT_MRT4530_19820C.1
gctgtctgaatattttaaataaaagattaggcactcaggcaaactgatatccttattatttccaaatggtgcaaaaagctgaagtttcaatggataatttattatcaactttccaactgttaaagcaaaatcatacatattctatgcatgctatgtcgcagcaaaacctgatcgcataaccatcctaattcttctttgggtattctcttgcaccaaatatagtcgatccaactctaacatttgtgcttcccatttcaatcgcttgctcaaaatcagcagacatgcccatagacagttcacactgctcctctggaattccaagctccttgcacacctctttccggcaattagccagtgcctggactaagactttaaggggttttcttcccaagtcagctaccacacgatcaaggcgattggcaatcttctgatcatcaacactctcgaccatgtcaagatttggtacaccagctaggagggctctggccttgttgctttgaaggttcccgatgaaatgccactcaatatcctctggaagctgggaggccttgtcgatgagctcctggacgtagttctccccgaagcagcggtggccggcgtcgtacacgccgcggatgacgcccaccggcttcgtcttgctcaccgccaccacgcgcacggactccggcgcccgccccgaccgcgccgccgcctgctgcgcgcgggacagcaccgaccggagcgccgccgccgcgccctccgccgcggcaaccgacgccat

SEQ ID NO: 13824 - DNA, 3461 bp, Oryza sativa
  Clone ID: PAT_MRT4530_19821C.1
ttttggtttttttttttttttttttttttttttttgacacaaagacaagggcaatattccagtattactaacagcgccaaagtttggacaaacttaacgagtagcaatccagtgtgcaatggagtaactgcaacaacgaaataacatttgacataacttaggaaaggggctattgccctgaagcaggtcctaactccaaaattttacgagcatttgatgcgcaaacagtcaaacattcaaccatgtttcacaggcttatctcagcaatggccctggacagcaaaaaatctcaccctagcagtccacatctgaaagcagacggcttcagttgcgcctgctgctccaggttgaggaagatgatgaacttgagtatcttgaaggtcgccatgtgcctggaggaccatcttggcgggctgggggagcagcatcgcgagcagggggtgcctcttggcggagcggacgcatatcatcacgtgggcgatcatcccgttaaccccaacggtcttgctcgagagcaacaaatcttctcttgccgccagccctatagcagctgatgctttagcggccgcagcctcctccgggttagctaacgattgatctacttgcacaaacttgccagtgtcaggagtccactcaggcaccgaagctcgagatcttctccccatggaaagcttgcatagtctgtgttttcttggtctcgcggacgccatatttaggacgtgggcgattagtccccatgtgcctccagaatggtcttcgttcaagtcgcctccagcaggttctctggccgccagcacgttttctaccttccatccacctcacttagcctttgcgggagctgctcttctaagttcagatagtaaatagacttaggaagtgtatccctttgacgcttccttgattgacatcaattgacaagtccttgcagccttctgtttcttaagacgactaaactcagcttcacgacgttggacaattctttcctggcaaaatgttcttatgctccaacattcgagaaagtctgttcttctcctgcaggtcacctgcatggtgttgcttgctgagctcaatctctctcagctgctcttgctcatgaaggattttctctacttcaaggcgtttttgaaaagcttgctcaattagaggtgcctcttcctgcctttttgccctctccaagtaatccatttgcttaccagtcttctgtagttttttctccatctcttggcgctccttaaactgctcattcatagccaattccatcacagcctccttagtaacttccccctgaaggacaggtttttttcctcctctctttgctatctcctttatctgtttctgaagcagttcttctgcctctatcttttctttttcaaccaattgtcgacggatcctctcctgttccctcaattttacatcattgagaagccttatcctttcatcttctgcagatttcttgagaacactcaatctctttttttcttcttccttttccttttccaatatttggcgctcaagatcttctttgcgtttttcaataattgatttcctcgcaagaagacgcttgtgctcattctccactactgcagcaagactcgttaagttttcaccaagcttggatggcttcttcacaggtggatggataaggctccttgctttatttagagaatcagccaaaacacttaggtgattactgagacaatcagattcaatgtccagattaccaaaaatgtctacgacagtgacacctagtttaaaatagggaaataaaacaataaaaaagtaaattccaccaataagaacactgagaaggctaaagtggccaacagacttgaggaatttcatagcaacaaaattgtgtttcacggcatcaacagagatcttctcaacaacagaaaagtcaaagaatgggatcattcttgagagcatatcaattttcacagactgaaatatctgggaagcctgttgcaacacccttaaagttgttaacttctccaaagcaggaaggtactgtgacagaaaaacttctggaaccaagggagctgatgaaagcttccctccaatctttgaaatcttagatagcagtggctgtgctttggatacgagatccagaggaagaaaatcgtgttccaaaaggttgtataaatctttgacatcttgtgaagcacaggcaatgacacctttggcagccagctcagaaaaaagagatgctcttgatggcacttctctattctcacgcttggagtcaagggagaagttgacgagattagctatccgcagattacgatctttctcattttcaagctcaagatgagatgcgccatatttatggtcatatggtgacacggcaagtgcagcaagcaaaacagaagaagctattaattgaaggtccttctgagacaagttcttattgtagcttttctgcaagtagaatagcttaagccatgcatatgcatgatacaagtggcaatcagatatccagaatatttcagtcaacttggcataatacacaaccaggacagatggttttggtgttttcttcaccatgctcatcaagccatggatgtcttccacagacctaaaggcctcctgccagagagagagctctgtagcaatttttagttgttcaactctagtgtccaggtatagctgtaagctttctggggcagtcagatcaggacgatctcgctggtcacggtatttgttcaagttagcaagatgatttcttattatctcgcacaacctacggaattcagtcgttctcttatactgcttacaaaattgaaaagccttgtgagcagtcatagcatataatgcttcaagctttgaattgtttctcaatatctcaagaactgttctgtatgtttcccagagaaacttgaaccatggtgtgacatgctctctgtctgatcggtccttccctttctccccgctgacatagctgagcatcaaatcctcaggccgcttgtctgcttccagatcttctacatccagggcatcttccagtgcttgcgcctggttccttgcttgctctgctttctcattggaaagctgcatgaagtgttttatcacctcctccaaggatgacacattcacttgctggcagacaatcctgtactgaataaggccatctttcgcaaacctgcccttcctcaggtctacacagagctccacatacttcatcataatcctttcgagtggcttttgccatgacctgtatctttttgaagtgatgagatcatgtaacgcctgtagcgctgcctgcttctgcccaacatgtatcaactcctccgctctcttgagcgcgttctcaggtttcgcgaaggtcgccatggccgcggttggatgtctccggaagcgatctacacctgtagatcgccggagacgtgcgcggtggacggcgccgtacggccgtccgaggcgaaggcggcggcggcgatctgggtggaggggatgggaatggg

SEQ ID NO: 13825 - DNA, 562 bp, Oryza sativa
  Clone ID: PAT_MRT4530_19822C.1
atggcaattaaggaccggttcgcgggatgccctggaagaatttatcgtacttaccacaagccagccgcatccaggcaagggtaggcgtgatggagcgggatgggccctgcgacggcctttggtacttccggattcacctaaacacgagaggggactgcccgctgccttgcaaggagtgggggtgaaacctgaggtatggtgtgtttggttagagggggttatgcgaagggtcctatcacggcctctttccagtatgccgtgttcaggtggtggtttgggcctgtcccaatgtggtgtagcgttgagcagtggctggtttaatattggctaattatcacaactgttttactgctttcaactactgtttataaatgctagctttatgcaaatgaactcctttagcctcctttggttatatcttgcatcatacctcctcttccggtatgacttgctgagtatagtgggtagtactcagtcttgctctctcttctccacaccagagctgaagttcttcccagttggagccatcccgaaaaagttggttttgtcgctgccatcaagg

SEQ ID NO: 13826 - DNA, 167 bp, Oryza sativa
  Clone ID: PAT_MRT4530_19823C.1
accagaacctggcaaccgggggccgggagtatatacgggattacacatgaaaattaaacaggattgggatttccaattgtccggaagttcgataataatccgggccggacaagggaaaagtcagaatgaggggtggggaaaaaaagccaaaagaaagaaacaaggaa

SEQ ID NO: 13827 - DNA, 366 bp, Oryza sativa
  Clone ID: PAT_MRT4530_19824C.1
cggactcgtgggcggacgcgtgggcggacgcgtgggaaatttgaagaaaaaaaaaaaaaaaaaaaaaaaaaaaaaaaaaaaaaaagaaaggcaatatgggggggccgttctctagtatcctatcttgggtacccgtgcctgcagctctattgttacgtaatctaaattcactggccttgtcttttcttcgtcgtttctgaactgaactgaggggtaacccatcttaatccccttgctttgtatactcgttgcccttccccattttatttgcttgagtaaaagcccgatggccctccccttccgttcttcccaacagtcggacaccgttactggctcttgagaggcgccttgctttaatcgcttatg

SEQ ID NO: 13828 - DNA, 363 bp, Oryza sativa
  Clone ID: PAT_MRT4530_19825C.1
atggcgacgaagacgacgcagtgcagttctacgactagggagtacccactcatcagccggacgaagaggagagcagctaacctagcacaagcacgaggagtccccattccttatcgaatcaccatttctgatccccttcctcatctggagtgcggaacaagcacgatgtacgactacgagtcccccattccaacgcgaatcaccatttcctcgatcgatcgcctccctcatccggaggccagaacaagcaccctcatccggaggccagagcaagcacgactagtcccgagtcctacgcgaatcaccattcctctcgacccccttccgcatctggaggccggactggtcaccgagctagcttag

SEQ ID NO: 13829 - DNA, 420 bp, Oryza sativa
  Clone ID: PAT_MRT4530_19826C.1
atgtcgcggttttattacacaagtttcgccagtggaaaacaaggaaaaagtacaccgaaggtccctcaacttgtcatcgagttacaaaatcgttctcaaaccgcaaaaccggatactaacgtatccctcaacttacagaaccagtgtaaagtaggtcccttggcggttttaactccggttttatctgacgtggcagctggctcagcgtgggtcccacgtgtcagcctcttcttccccctctccactagggctgtcaacgagccgagctcgagcgagcttacctacctaagctcgagctcggtacaggctcgagccgagctcgagccgagcccagcattaccttcgagcttgaaggtaggctcggttcgagcccgatcaaggctcggctcgactcgagctcaattcgtagaagctcgttaa

SEQ ID NO: 13830 - DNA, 174 bp, Oryza sativa
  Clone ID: PAT_MRT4530_19827C.1
attcaacttctaaaatattgaccaagtaattagtataatatgaattgaattttattgttgagaatattatcattggattgacatttgaatttactttcatatgattataattttgttgctataataaaccttattataggacatgagaaattataagccaatcgtatcaagttt

SEQ ID NO: 13831 - DNA, 1396 bp, Oryza sativa
  Clone ID: PAT_MRT4530_19828C.1
attccatttcatcccctcctctctctctcaaaaccctaattccccgacccgagcaagccctaggtcgccgccgcgccgcgaggttggaggagttggatttgggtctgatttgattcggattgggcgtggtggagatggcggagaaggaggtcgggaggatcttcgtgggcgggctgtcgtgggacaccacggagcgcacgctcgagcgcgccttcagcgagtacggcaaggtcatcgagacgcagatggtcgtattggaaagagacacaggccgctcccgtggatttgggtttgttacattctcagaacctcgggctgtggatgctgcaattcggggaatgcataatggagaactagatggcagaaccatttctgtgaacaaggctcaacctaggatgaacactgatgatggctatggctatggtggtggtggtggtggtggtggtacttactcatctggtgctagaggtggatatcgtggtggaggtgatgcagttccctctgcaaatgatgactgcttcaaatgtggccgtgcgggacattgggctcgtgaatgtccttattccagtggaggtgggggtggtagaactggaaggtactcacccccttccagatatggcagtggaactggtggtggacgtggtgaccgctttggaggatcagaccgttttgctaaccgctatgttgatgaccgatatgatggtgggcgctatgttgatgatcgctatggtggtggtggacgtgatcgatatgccactgatcgctatccaccaactgccgatcgttttacaggtgacagatatggtggttctgatcgttatgcatcaagtggatttaccagggaaagaagctatgaaagagatggaggacggtccggtggaagttactatcgtgatgaacctagaggctctggtggttatgacagaggtggcatgcgcatggggagtggtgacagatacgggaccggtggacctgctcgctttgctgggagttacagagataggcctgccccatatgatcgtcccagccgggcagcagcacgcacttatgatgaccgctactgatggaggttacttcggagcattgcagaagaccagaattacaaatatatgttccagttcgcagttcctactttatttgccttcctgtattagtacatcgactctttgagtgttgttcttccatgcagtttgtttaattactagtgagacaataaggcagttcttgaattgttagtatgttggcacattaagctccaggcagtgggtgattctgattccctgttatcgtggtactgtgtaattaccctccagtgtaataatcgtgttccgagtgtgctgtcttatataattttattctggatagcattgaaaattaaaaaaaaaaaaaaaaaaaa

SEQ ID NO: 13832 - DNA, 206 bp, Oryza sativa
  Clone ID: PAT_MRT4530_19829C.1
ctcctctacaagagagagaggcagacccaccaccatcaacaacatcaggaggagtagatagatgggcaactgcgggacgcgagaggagaatgccgtcgtcgcggcgcacgcccaaggtattcttcgcttcctcggattgatttcttgggggatttcccggtgattgttttcttaaggatgctggctgttgggactgggatctcggg

SEQ ID NO: 13833 - DNA, 4815 bp, Oryza sativa
  Clone ID: PAT_MRT4530_1982C.1
atggcaaaagaggacgaggataagacagcattcatcacgccgttcggggtattctgctacgttaagatgccattcggactaataaccacaggaaacactttccagcgcacggtccaaggtgcacttagtgaccagctcggaaacaatgtcgaggcttacgtcgatgacattgttgtcaagaccaagacaagcgactcattgattgacgatctgcgggaaacgttcgacaacctccgacgatatcgccttatgctcaatccagagaagtgcacgttcggagtaccatcgggcaagaccccccgagctctcctctacccgtcgcccccttcgccttcgcctctcgtcgtcggagaagccctagcgccgtgcgccctagctcagccgtcgccgccgtcgctccagccgtgcgccgccgccgttccagccgtcgccgtcgctcgggaaggccaccgttgggatcgccaagttgccgccgtcctcgtccgttgcttcgccgccgtcggagaccgccggagcaccatcgccgtcgtcgaaccgaagagctccgccgcttcttcttcgtcgccgccgccgtccgttgggtttccgccgtcgttttggtcgccgatgccgcgctacaagcctgagtacttgtttggtgttgagggttttgtccaggagttgcgtacaatgtcctttgtcattggatttgggactgcccctttttatgcccagattcctcatgatcgtcatgaagagaagtgccgagtcaaagtcaccttgaacagtaatagtgaagatatcccctcagtgatgttcgaagctggaggaagaaactacatccatgcaagtcaggaggtggcaaggatcgccataggagagctccgcgatcgttacagtgatcagttggccgatactgagtatcgctatcatcctcgtcaaccccagggaagtgaccgtggcagctaccttgagactgaaggaattgagaatgatgctaccacaaggcatttggttgagatgctgtgggctatggatgaaagtcgtgcggagactgtgttagcggctcaagatcgtgaagatcggaatcgtggtaagatttgcaagctagaagacaaggtggatcgtttggagaaggaactagccgcattgaagggagaagcaccaccgcagaaggccaggattcgtcttaccgcaaggaagagagctctatttgtccctcgctatcaattggcgccaaaggttcgtgtggtggagaaagaagttgccccaactctagcagatcctccggtcaacatcataagtgatgatgaggaagaagaatccaagcgcaaccattccaagattgagtgggtagcaactcaagatgatgaagatgagccgaaagagccttcaatcgacctccgatgctcggaagaactagacaagatggtgaatactcgcagcaatgggaatggccccaacaatcccaataataataacaatgaagggaacccaactcttgcccaagtcctggctcaacaggtgcaacttatgaacatgatgatgcagcaacttcagaatcagcagaaccaaggaaataaccatgcacctccgcagaacaggttaactgattttcttcgtgtgaggccacctaccttttctagcactaccaacccagtggaagcaggtgattggttgcatgccatagagaagaagttggatttgcttcaatgcactgatcaggagaaggtctcatttgcatcgcatcagttgcatggccctgcctctgaatggtgggatcatttccgccttaacagaactactgctgaacctatcacttggcttgaatttaccgctgctttccggaagacgcatataccatcgggagtggtgtctctcaagaagaaggaattcaggtcgctcacccagggatcacgctctgttacggagtatctgcacgagttcaatcgtcttgctcgttatgctccggaagatgtgcgcaatgacgaagagcgtcaggagaagttcttagaaggacttaatgatgagctttcttattcactcatgattggagattatcctgatttccagaagctagtggataaggctattcgccaggagaacaagtacaattgcatggagcagaagaaacgccggattgctcaattcaagacacaacaggggaataatcagaagccgcgtcttactttaggaccccagtccataccacatggaagttcttcgtccgttgttcgtccgcagcgtcagttcttcaacaacaatgctggcaacaacatacgtaatcaagttccgcgtcctgttgcagctccaacacagcaacaacctatcaagagggagcaaggcagcaagcccgcggtgtgtttcaactgtggagatccaggacattatgctgacaagtgtccgaagccccgacgcgtgaaggttgtccctgctcagaacaactctactgtaccagtatcaaaggcccgtgtcaatcatgttgctgctgcagaagctcaagatgctccagatgtgattttggacaagttcgtggtggtctttattgatgacattcttatctactcccgaactgaagaagagcatgaagaacatcttcgccttgcactagagaagctaagagaacatcggttgtatgctaagtttagcaagtgtgaattttggttgtctgaagtgaagttccttggtcacgtcatctcagcaggaggagttgccgtcgatcctagtaatgtggaatccgtaaccaattggaagcaaccaaagacagtttcagagattcgcagtttcctaggcctcgcaggatattatcgaagccgtgcgccgccgccgttccagccgtcaccgtcgctcgggaaggccaccgtcgggatcgccaagtcgccgccgtcctcgtccgttgcttcgccgccgtcggagaccgctggagcaccatcgccgtcgtcgaaccgaagagctccgccgcttcttcttcgtcgccgccgccgtccgttgggtttccgccgtcgttttggtcgccggttgagaagtggcggagataagcccacgggggtcgctggggagtccattacctctggttttgagggggagattatgatccaggaacggtgcactgtagtggattgtgttgtgcgagagaggaatagaagcaaatcccgagaagatcatggtaatcgagaacatgaggtcgcctacaagactcaaggaagtacagaagctaaccggatgcatggcagcactaagcaggaggccgaagaggcattcattgcattcaagcgctacctatcaaatccacatgtacttgttgcccctcaacctaatgaagaattatttctctatattgccgccacgccatattccgttagcactatcattgttgttgagagagagaaggtgcaactaccagtctactatgtcagcgaagctctccacgacgtaatgacaagatatccacagatccaaaaactgctctacgcagtaatcatgacatcaagaaagctatgccagtacttccaagcccacagggtcacagttgtctcctccttccctctcggtgaagtcatgagaaataaagatgttgtcagccgcattgccaaatgggtagtcgagctaagccaatttgatatccacttcgtgccacgaacagccatcaagtcccaggtactcgccgatttcgtagccgattggaccatgcccgataacaggtcagacaaccaaatcgacaatgaaacgtggaccatggcattcgacggcgcactcaacagcaagggagcaggggcaggattcatcttgacatcaccttcgggagatcaattcaagcatgcaattcacctcaacttcagggcaaccaataacacagccgaatatgaaggactactcgcggggataagagttgcagctgcgctcgtagtcaggaagctggagaaaaggttcgatgggatcgaggtccgacatgtataccgcaaagacaacatcgaaccagatgatctagcacgacgtgcgtccaggcgagagccactcgaacctggcacctttctggacgtcctaaccaggccatcagtgaaagaggcaagcggcgaagatagcccggtcgcccccgacatcagctcgggggctatagaggcagagcgcaccgttgccgatatcgagaccacggacgactggcgcaccccactcattaaattcataggcagcgaagagttgcccgaggacgacgcagaagtcgagaaaatatcccgtaaagcaaaagtctactgtatgatcggcaatgatctatacaagaaggcaccaaacggggtactcctaaaatgcatcttgtccgacgacggcagacacctcctcctcgacatacatgaagagatctgtgggtcacatgccgccggtcggacattagtcggaaaagctttccaacaagggtttttctggccaaacgccctcaaagacgcctgcgacatggttcaacagtgtgaagcctgtcaattccacagtaaacacacaaagctgccagcgcaagcactccagactatccctttcacttggccgttatcgtgctgggggctagatatactcaggccattcccacgaggacagggcggctacaggttcctattcgtggcgatcgacaaattcaccaagtggattgaagcgacacccacgggggaaatcaaggccgacaacgccatcaaattcatcaaagggatattctgcaaattcggattgccccaccgtatcataacagacaacggctcccagttcatcagtgccgatttccaggattactgcatcaggctgggagtcaagatctgcttcgcctcggtttctcaccctcagagcaattga

SEQ ID NO: 13834 - DNA, 223 bp, Oryza sativa
  Clone ID: PAT_MRT4530_19830C.1
aggtgaccgtggatcggaggaggattgccatgtcgccgacgatgcaaactcgtctttcagaagattcctagagaggaaatggtgtaggaagaaccatacatggcattatacgctcctaaatggagtatttttttatttctatgttacttttgtgagagtaactaaacatttcatagccaacttcaattctattgagtgtaaattttgtcaaaaaaaaaaaaaa

SEQ ID NO: 13835 - DNA, 247 bp, Oryza sativa
  unsure (1)..(247): unsure at all n locations
  Clone ID: PAT_MRT4530_19831C.1
agcgantccagcagcagaagcagcagcagcagctcagccgccgccgatgggtccacgatcatggncccaacctcccgcntcctcgccgccaagacccccttcctcggccatccncgnccctccaatgcccccntccgcnacatcgncgccgccgccaccggccgcntcancatnggcatggagctgtggtacggnacggatcgggtgaagtacntggggccattttcggcgaaagagagtcagtaac

SEQ ID NO: 13836 - DNA, 1503 bp, Oryza sativa
  Clone ID: PAT_MRT4530_19832C.1
atggaggagccgccgtcctcgttgtcatcgccggctctgccgctcgacatggtcgtggagatcgccgagcgctccgaccccatcacgctcctccgctgcgccgccgcgtgcaggcacctccgccgcgtcatctgcggcgccgccggcttctcccgcaacctccgcctccgcaacgccgacggcttcgtccctggcctcctccgcggcttcttcctccagcctcgccgcccctcccccgaccccgactaccagccgctacgtttcgtcgcggctggccatgccatcgtcggcggcggcggtggcgccgatcagatacggtccttcgtgtccagctccgaccacgtgtatggttctatccattggcgcatcgaacccgtggcggcgcgcggtggcttcgtcgtcctccggaccggcgactcctccggcaaagtgtgcaaccctatgacgggctacgtgcgctgcatcgacatgccgaggccgtggtcgtccgggtcctacctcctgctcaccggcgacgacgccggagtcacctccgagctccacccgtaccggcttctctccgtgagccttcacctgaccgggacggggcgcgagcggcggcggattcacgtagagatggaggccttatccccggacgctggctcgtggggcccaaccaccgcgatccctgtcgagatcgccggcggcggcgagtacggcagcccgcgcgccttgctgatccgcacgcccgccgtcgtcgacggcgtcgcctacttcctcggcggccacccatcgcttgtcttcgacctccaataccagcgccgccagttgccctacgactacttcatcctctgcgtcgacgtctccggcgaaaccgagatcgggagtgcaacatctccggcgacgatcacgcggttgccgaccgaactccggctgctatcgtcgtgcacgggcgaggcagacgtctcgccggggcagctcctgctggtgccgccgtcgtcgtgcggcggcggcgacaggaagtcgttggcgctgctcgtcggccggaggacgcaggtggagatctgggcgatgaacttcggcggcggctgcggcgccagcgccaggtcggccccgcgtctcttgtcggtgtcgtgcacgagggtcgtcgacttgacgacgacgggagtgcaccggagtccatgctccccgccgctgccggtgccggagtcggacgaggtgttcgtgtggtccggcgaggcgagcggcgccgtggtgctccggctcagggggacgctctgcttgctggaccggcggacgatggcggtccgtgcgctcggcgaggacttcagcgagttccgtgatgggcctaacggtgtgttcctgcccgacctcctattcttctttgacgccggcgagaccctagactccagcagaggaccctacggggacatggagtggtcgatcatgctcgcgcacgtggatccaatgatgacggcgggcgccctcgacccttctccttccctggccctccctctcgactga

SEQ ID NO: 13837 - DNA, 387 bp, Oryza sativa
  Clone ID: PAT_MRT4530_19833C.1
aattgccccccgcttaacaaatttccccctgccctggacggtttttttttttcacaagcaaaaaagtaaactcaggtccttttttttagctttgttccaacttacaagggggtggtttggaaaaaaaaatgcacctttttttcccaacttgctttaaaagagggggggggtccttataaaccccccccacttttttttttcaaaataaaaaaaacataccggtttttccggtttgggggccttggaatcccctgggaagcaaaaggatttttctgggttttggccatttgggggatcagggcaataacccggtttttttaaccccatttttttttttcccaggcaaaaagcttgaaaaatttttttttaaaaacaattccagccttg

SEQ ID NO: 13838 - DNA, 959 bp, Oryza sativa
  Clone ID: PAT_MRT4530_19834C.1
taaattgattgggcatggatgtacgagacgtggataactcatccggcgttcatgaaggaagcatcaaaatttactgatcaggcaaggcatatgccccgagggagaataagagggatatttttctgtccgtgctttgattgcaagaatcagaaaatgttgaaagatccgaagataattttgaagcacatagtgaagtgtggattaaggatgattacaagatatggacatatcacgaggaagttgccattcctaaagagactcttgatatatatttccttcgatggggcagaaaattttacaatagaggacatgtcccgtgatatggttgatgaatttggtggctcggatattgatgatttagatgctgattttgatttagaggatatgttatgccatgctgaaccagaggttctaactggtacaatgcaatggttagacaattgggaggtgttttataaatgagcgaaggatcttctttacgacgaatccaagacatgtgataaggattatatggtgctatgttatgtgctagagcttctcagattgaaagctagacacggatggtctaatactagtttcaacgatttgatgggtctattgagagttatggttcctaagcctaacttgttgccattcaacacgtatcaagcgaagaaactgattttccattatctctaggtgttcaaaaaaatccatgcatgtgttaatcactatactatactacaaggaatacactgacttggacatgtgcccaacttgtgggacgagtcggtacaaaagggtaacggggcctctgatagtgatgttgtcgacccagttttgttggtggatacaaagagaaagattttggccatggtgatgtggtacctgccaatgaaagatcgcatgaagcacatgttctcaaaccctatcaatgtcgagttaataagatggtatctaaagaatcagaagatagatag

SEQ ID NO: 13839 - DNA, 751 bp, Oryza sativa
  unsure (1)..(751): unsure at all n locations
  Clone ID: PAT_MRT4530_19835C.1
ccgacgctcgcgcgaccctcgccgcgctacacttatctaccccacctcactgccctctccctcctctcttctcaccccgtccggcgcatccgctcctctctccctctcgtctccctgcgcgcgcgcggtctcgtccccctgtctgcacgtccgctctcccgcccacgctaccgatcccccccgtcccgacctctcacctcaccacaccccactcttcgctcgctcggccccccgcgcgcccgtacgcctgtcactctctcgcccccctcccgccctcgtcgcgcccatccgcctgtctccacccacccacccctcgccctctgaccaccctcagcgccccgccgtcctagcaccagccgcccacccccccacgccgaacaccggagccccgacgctcctcggcgccacccgcccactcccctccgtacctctcctcctcaccccaccactctctcacctcgaccgcaccgccgactctctcctccccatacccactccttgcctcccaaccccctcgcatcccccctcaccactcctaggcgttcgacgtgtgcagggctcatctgtggcgccggcacctcttcgccgcccgcacataccgaattcgcagggtctctcgcctgacccatggccgcgagacgggcagaccgccnacgaggccctaaagaaaaaaaacggaaggaaaaaaagggaganggggaggggtggggagggaagggggccggccggggggcctcgccggcgccgttga

SEQ ID NO: 13840 - DNA, 786 bp, Oryza sativa
  Clone ID: PAT_MRT4530_19836C.1
atggccatggttgggagatcgctgctgctgctgctgctgcttgttactctcgccgccggccatggcgtcgtcgtcgtcgtcgcctttgaccccaaccctctccaggacttctgcgtcgccgacccgacgtccaaagtgcgggtgaacgggctgccgtgcaaggacccggcggcggtgacggcggacgacttcttcttctccggcgtcggcgagccggcggccgggggagggcgcggcgccacggcgagccggcggtacgggttcacggcgcggtcggtggacatcccggggctgaacacgctgggcgcgtcggccgcccgcgtcgacgtggcccccggcggcgttttcccgccgcactaccacccgagggcgtcggagacggcggtggtgctcgccggcgccgtctacttcggcttcgtcacgtcgtacccggacagccgcgtcgtggccaaggtgctccggcgaggcgacgtgttcgccgtgccgcagggcctcgtccacttcctccacaacaacggcagcgagccggcggcgctgtacgcgtcgctgagcagccagaaccccggcctggtgctcgtcgccgacgccctcctcgccgcgccgctccccgtcgacctcgtcgccaagacgctcctcaccgacgaggccaccgtcgacaagatcagggcaaacttcatcgtccaccgctcttgattttagataataaatcctttaattaattttctctctttgtggtaaatgtaatatttattaattttctaattaattgatatgtgacggaataat

SEQ ID NO: 13841 - DNA, 1722 bp, Oryza sativa
  Clone ID: PAT_MRT4530_19837C.1
ccacgcgtccgggcggccggccgccaccgtcagcgagcagctgccgcggcggcgctcacgcgtctcctccccccctatttatatccggcctcgtcccatctccaccctttcctcaggcaggcgcacatctagcccctgcccccctcctttccccaccctaataataatatttttttccaatccccgaattccccccccaagaactccctcgatccaaaaggcaccgccgattttggtaatctagaaggttctagacgggcgaggaggatgcgggtgctggaggacgacatgttcccgtcgacgccggggaaggtgaagatcgagagggcgacggcgatgaaccgccagctccaccgctgcttcgcgtcgaccagcaccatgttcctctgggcgctcttcctcgtcgccatgaccgcgtcgtacctcagcttccagtccttcgtcgacacctcgtccaagtacttcgccgcctcctggggcgggctgcactgggagcgccagatccgcgcgtccgccgcgccgaggcggccgcccgggtcggcggcgggcgcggggatgtcggtgctcgtgacgggcgccgccgggttcgtcggcacgcactgctccctcgcgctccgcaagcgcggcgacggcgtcgtcggcatcgacaacttcaactcctactacgacccctcgctcaagaaggcgcgcaggtcgctgctcgcctcgcacggggtgttcgtcatcgagggcgacatcaacgacggccgcctcctcgccaagctcttcgacgtcgtgcccttcacgcacgtgctccacctcgcggcgcaggcgggcgtgcgctacgccatggagaacccggcgtcctacgtgcactccaacatcgccggcctcgtcaccctcctcgaggcatgcaaggacgccgacccgcagccggccatcgtctgggcctcctcctcctccgtctacggcctcaacgacaaggtgcccttcacggagagcgaccgcactgaccagccggcgtcgctgtacgccgccaccaagaaggccggcgaggagatcacccacacgtacaaccacatctacggcctctccatcaccggactccgcttcttcaccgtgtacgggccatgggggcggccggacatggcctacttctccttcacccgcaacatcctgcaggggaagcccatcacggtgtaccgcggcaagaaccgcgtcgacctcgcccgcgacttcacctacatcgacgacatcgtcaagggctgcctcggctcgctcgacacggccgggaagagcaccggcaccgggggcaagaagcgcgggccggcgccctacaggatcttcaacctcggcaacacctcgccggtgacggtgcccaacctggtgtccatcctggagaagcacctccgcgtgaaggccaagaagaacgtggtcgagatgcccggcaatggcgacgtgccattcacgcacgccaacatctccctcgcgaggcagcagctcggctacaagccgaccaccaacctcgacgtcgggctcaagaagttcgtcaagtggtacctctcctactacggctacaccaggggatccaagaacttgtgactataatccgccctaattcttctgctaattcttttctttttctttcttctttttttcttcttattctctggccatccagtggtcgattccactccaggatcaaacattaacattcctatttcgacttttttttttgggggg

SEQ ID NO: 13842 - DNA, 250 bp, Oryza sativa
  Clone ID: PAT_MRT4530_19838C.1
tagatgcatttgccttgatccatctatatagcttggaagccttctacccacttatacctcaatcaggctagccagcctgacggggtgatacaatacatctcgacgggttgtggccggtctatccctgcccccgcggtgcttgaatcggccacaaagcaccttcctgggactcttaccgggtggccccggtttgggcctttccttcatatatggaaaatatactccctgggattgtttccctggggggggg

SEQ ID NO: 13843 - DNA, 1316 bp, Oryza sativa
  Clone ID: PAT_MRT4530_19839C.1
gctggagtaattctatcgcttgattcaattctcttctcatctcgttctggcatatttaggagtacagattacatcaagattctaagagaaaaggggaatggtggttatgtcctacaccaagtaattgaagctatcaacttatcatacaacaagtgtatatgacgatttctcatacaacaacacaacacgggaatctgaatatttgctcagaattcagacacgacagaatatccagatgaagtaggcgcatctgctaatcgcactcacaagtcctgaatcccatgggatggagaaaactgctagaaacagagttgctgtggttcgacaacctgatggcatcatttgcccaataaccggcgtccccgttggtttgcccctttaactctgaagttcagttcatcaacatcatcaccgaaagcatccagtgatttattttgcctttcaatttctgtgcccatatccaatgccatacccttcagctctcccaacatgttactcaagtctgagagcgcatcatcctgctttgctatctcaacctgaactttctcgattgcagttgcaggtgaacgatgtacttgatttggagatggctgacgtgttgaggaaatacctagcctctgcctctgttccatgtggttcgctgaacttgtgaaagaattattttgtgaaatcggtccttttatctgttggtttctctttggcttccatgtcttggaaaacagcccccctagacttcccaaaagcttctcactcatactaagatcgtgttcaatatccgcggctactcgatgagttcgggtgatctgttcaccttgacgatgcaaagtaaccagtgtttttgtagcatcttctctgattgcttcagcggctctgacacaatcatttactttgcgtgatgtttcttctactttatcaacagcatagtcctccagctcttgtatagattgatctgtgcgtcgcactgggacagattgtgcccttgacggtcttgagggcacttcagaatcagagtcagaatcgaagggatttgtcatgctgtcattcttccacatgagcttatccaacagcatacgaggtgtaagcaagacgagattgccaagaatttgccctaaatccgcaccaaccaaagccatggttgactccggcggaaggaagccggcagcgtcgccgcgtagcgcgcaggcgaccacggcggagaccccctcgctctccggtgacgaggactcggcggcggcggtggtggcgcgacgcggggaggaaggcgagcacgcggcgcgcggcggagtcagcgaggataatgtgaccgtgcctcgtgc

SEQ ID NO: 13844 - DNA, 1492 bp, Oryza sativa
  Clone ID: PAT_MRT4530_1983C.1
tttttttttttttttttactgacataattgtctgctgtctgccactttgtagattatattgaggattctgccgagtacaggacttgcctacgaaattcatacataaaaaaccggagggaaagcttacctaggaaattctgaatcctagatatccgatactataaaaaacacgtgcattctgaatccaaggaccacatattcgttcgctacccatcaaggtagtgcattcacaagcatcaaacctttcagttttgtacagataggctcgctacgtggcatgccttctacctgctacaaaaacctaaagtacacataattagcctactcgaagatggcgattctcccttgagcaccatggtccatggtcgcttcctctaatataagcagctgcaaaattagcaaaataatttctctgctgaatgactccagctactatttcttcagaaccaattcgagtagtcaaagtcgcggagcttcctaaagtgcttctccacatcttgcctcgactttgcccactcctctctttggatcacagtggtcgcatcatcccttttggtcttgtcaattattctgaatgattcccctccatctcgtatgagtagcaagtcatttctcctgtccctcttctttccttcagggacactaaccacaacttttgctctcgtgattgaccttgcttttgagtcaataacatatatctcttcaaaatcaaggaaaaaatctgggtcgttacaccgcctattcctgtaatgttttgttaagaaaaccttcatgatctccctttctgtcttgtataggggatcacgccaaatgctcaacaggcggctcactaacgtggtaacgaccaaaatttttcttcgtgcacctcacatacttttgcggcatcggagcaagaacccttgggatggagtagatgtcagtgtcaggcggcgtgacatacatctcccggaagtcgaagacgtcgtcgtcggggtcaggcaccttgcggataaaaaaatcgcagtgcagtaggcgaatcttgtggaattcgtcctcgttgacggagtagtcgaccacggtgtcggaggcggagtcctgcgtggagacgaagctctgggcggcgaccatggcgatgtccccctcctcctcctcgtcgccctccccggacagtgggcgcggcggcgccttgacgggggcgagcaggcggtcgtagtcgacgtcgtagtcctgctcgttgtcgaggtcttcgtcgtcccccacgccgtccccgtcgtcgaggtcgaagtccccgaagtcgtcgtccatgtcgtcgtcgccgtaggccgcggagacatcgcgccgcaggaggggcagtggggtggcgccgcgggagagaggggcggcgaggagaagggacctggaggaggaggggttagctagggttttggagagcggcgaggggaatggataggggaagccggaggcggagacgacgagagagagcgacacggtggccgccatgtctcccggccgg

SEQ ID NO: 13845 - DNA, 369 bp, Oryza sativa
  Clone ID: PAT_MRT4530_19840C.1
atgtcgctcctgctccgtatctccgccgcctcctccccatccccaccggccaccgtcgcttcctccacttttcccaagcacccccgcgccgccgcctcctcctcctcatctccaccgctaccgcgtctcctcctcataatctccacgcctctagtcgtgactcttaccagatctaggcggtgcggcaaggatgatagatgcaaggagggggcagaggaagacgagcagcacacggtcgctagccaaggagttttggaacagcggcagacaacgctgcatagagctcgaaggcagtggcggagctcagtgcacggctgcctctgcctgttcctgcgctgccgtacaaaaattctgagcacacgtatttag

SEQ ID NO: 13846 - DNA, 650 bp, Oryza sativa
  Clone ID: PAT_MRT4530_19841C.1
atctgttggtttctcttgggctcccatgtcttggaaaacagcccccctagacttcccaaaagcttctcactcatactaagatcgtgttcaatatccgcggctactcgatgagttcgggtgatctgttcaccttgacgatgcaaagtaaccagtgtttttgtagcatcttctctgattgcttcagcggctctgacacaatcatttactttgcgtgatgtttcttctactttatcaacagcatagtcctccagctcttgtatagattgatctgtgcgtcgcactgggacagattgtgcccttgacggtcttgagggcacttcagaatcagagtcagaatcgaagggatttgtcctgtagacaggggtgcctaacgaggtctgtttcttatccattaatatcggcactgcctttattcagaaactggagttgtttgcagcaatccttacccccaaggttgactccggcggaaggaagccggcagcgtcgccgcgtagcgcgcaggcgaccacggcggagaccccctcgctctccggtgacgaggactcggcggcggcggtggtggcgcgagggggaggaaggcgagcacgcggcgcgcggcggagtcagcgaggataatgtgaccgttggacctctcctgacctcccggccgg

SEQ ID NO: 13847 - DNA, 3458 bp, Oryza sativa
  Clone ID: PAT_MRT4530_19842C.1
atgacggcggggcggtttggagcggcgcgacgacacgggcgacaggcgcgggctggcgcggcacagggtgacggcagcggtgaccaggcgacggtcaagaccctaaggcagtcaagtgcatatgacggcagaccaagtgatgagtaccttgctggaatagatggttttcttctgtttgcatatagggaaaagagtcttgaagataagatccgatgtccatcaatcttgcaacaagcaattccaaatggtaagaatttacctggaacatttgctgaagctaagaagataataggaaagcttggacttaattatgtcaaaattcatgtttgtccaaataactgccagctttataggaaagctaaggcaaacgatgacttttgttcaaaatgtggtacttcaaggtggaaaaacaaagaagataaaactactttaacaaagaaggaaaggagaagggcaaccccaaggaaagtgttaaggtacttcccaattaagccaaggcttaagaggttatttatgcacaaggaaacagctatagcattaagatggcatgatgagggtcgtacaaaggatggtgtgttgcgtcatccagctgactcagaggcttggaagtccattgactctaggaatccccagtttgcatcggattctcgaaacatcaggtttgcaatggctagtgatggatttaatccttttgggacattgagttcaacttatagttgttggccagttgtcttgattccatataaccttcctccatggttatgcatgaaagcatcttctattatgcttgcactaataattcctggtccatcttaccctggaaaggattttcatttatttatggaaccagtttatgaagagttatttgatttatttgaggttggaactcctacatatgatgcatctcaaaatgagatgtttcagcttcgtgctacagtactgttcactattagtgactatcctgggattgggatctttgcgggatatagtgtcaatggtgaatttgcttgtattatgtgtcgtgaagaaacgtgctctaaacgtttgaaacatggacacaagtattgtttcatgggacatcgtcgatttcttcctctggaccatgaattacgatataatgaaaattcttttgatggaactgaagaacatagagtagaacctcttgcttattctgaaacatcagttttacaaaagatagagaaaattaatgattttgagaagtcaaaaacatggaaatgccgtagtggcttattttcgttgccttactgggacttgaatgtactccatcataatcttgatgtaatgcatattgagaagaatgtttgtgataacatatatgggacattgttaggactggaaggcaaatcaaaggataatttacaagcacgcttggacctacaagaaatgaatataaggccagatttgcatcccataagaaaagctaataataagtattatttgcctcctgcttcctatacaatgtctaaacgggagaaacatcaattttgcaaagttctccatgatattaaggttccagatggctatgcaggaaacatctcaaaatgtataaatgttagtcaagggaaaatttcaggtcttaaaagtcatgactgtcatattctaatgcaagaacttctcccagttgctttgcggggtgtgcttccttacaatgtcacttctgtcttatttgatctatgtggatattttagagaactgagttcaaaagtcctgtacattgatgtgcttgacaagttagaggaacaaattaaaatgacattatgtcgtttggagatgatatttccaccaggtttttttaccattatggtgcacttggttgttcatttagccactgaagcaaaattaggaggtcctgtgtgttaccgatatatgtattttgtggaaaggtatttgagtgtattaaagtcatatgtgcgtaataaggcacatcctgaaggatgtcttgcagaagcatatttggcagatgagtgtataacattttgttcaagatatcttgaaggttttgagacaaagcataaccagcctacacgaaatgatgataatgatgagtcagttgcatgttcagatgatgaatgcacaccatatctttttcctcatgttggaaaaccacttggcaagccgagaagttatgttattaggggcttgactaaaatgcaagcacatagatatgtgctcttcaactgtccagatgtcaacccataccttcgaactcatgctgatgagattagaagaacatatcggcaaggccgcatcaccccaaagattatcgagcgtatccaaaatgaaaaattccatgaatggttcagagctcatataatggatctagagaggaaaaatggcatatgcagtgtcaagaatgatcatagatggctggctcgtggtccgattggtccagcaaaaagatatcgtgctttcaatacccgtggcttccggtttaggcctaaacatttggatggagtgacacagaatagcggagttgtcctaagtgcaaaaacatccagttatactaaatcaagtgacacaaatccaatattgggtgatctaacatactatggtagagtcatcgatattattgagctaaattactctggacaattttcagtagtactgtttaaatgtgaatgggttgatgttgtttctggaaaaggagttaaaaaagataagtatggttacacactagttaacttctcacatctcatacatactggagaaaaagttgagcatgagccttttattttccccaatcaagcagatcaagtttattatgttgatgatccaatgaatcctgagtggtctgtggtaaggaagaacaaacctagagatatatatgacattggtgaggatgaatgggcaggtgacatagaaattgagccattccatgtttcacaccttggtggaatgtccagtaatgcaaacaattacaagcaatgggttagaacagatgttgaaggaacaacagtagatgttgataataatgctttgaataatgaaggataacagaggaaaatagttactctttcatgatttatttcattacttcaagtttcaggtccattattttgatgcagacgcagttacattggcaaggtggcatcggggtgttactgtttctttcggcaagcgaaagtgaacaagcagctgtcactaagcaacatatggcagttctagtccaagcaaacatgagtttaggccagtcttcagtagtcaataataattcccaatgtagtctatctgtatagattattttaaatttgttcgtgtgagcttttccttttctattgctatattgattagtcctgtaatcatgtctgggttatgtgatctctctagcatcttgttttttaccatattactgaaatgattattctttcatattgccgaaatgattattcttccattttttttctaagttcatgatgtaagacaaaaagattccgtgc

SEQ ID NO: 13848 - DNA, 1459 bp, Oryza sativa
  Clone ID: PAT_MRT4530_19843C.1
gcacgaggccgatcccaaaaccctcgccggcggcatgggcgacatcgtccggcaaatcctggggtggttccccggccatcccgcctccggaaacggcgccacgctttccgccgccgagggctacggcagcgaggaccgcgtcagcgcgctccccgacgaccttctccgcaacatcgtcgcccgcctccccgtcaaggacgcggctcgcaccgcggcgctcgcctcccgctggcggcgcgtctggagctccacgccgctcgtcctccgcgacgccgatctcctcttctccgccggcgaggccgcgggcgtcgcggccgtcggccgcgccctcgccggtcacccgggccccttccgcgtcgtccacatcgagcactgcatgttcgcgttccaccgtcccgagctcgccgagtgggcgcgcctcgtcgccgccaagggcgtggaggacctcgtcttcgtcaacattcccgtccactacttcgatgtgcccctccccgccgacatcctccgctgcgccgctctccgccgcctcttcatcggcaactggaatttcccggccacctctggcttcccccgcggcgccgacgtcttcccccacctcctggagctctacatttggaacaccgtcatgagcgccagggacctcaaccatctgctcgcctgcagcccagtgctgcagagcctcgcgctcgccctcaacagccatcccaaccgcgtccgcctctgcagccagagcctccaatgcgtgcttcttttcttgtctaaggcggaggaggtcgccgtggtggatgccccactgctgcagcgcctcgttctgtggaaaatatcaacttcttatgatacagatgatgagttgccagtaaagattaggcttgcttgtgcaccggagctacaggtcctgggctatctggagccaagagctcaccagctgcagattggcgaaaccatcatcaaggctgacacaaaggtgattccaagctccatggttccgagtatcaaggtattggccttgagggtgaatttttgtgtgcaagaggagatcgctatgctggtcagcttcctcagatgctttcccaatgttgaaacactgcacatcgagtctgatatagatgatgagttcactggccagccccatgccaagttctggcaggaggtctgtcctgttgaatgtatcaattcacacgtcaagaagattgtctttcatgattttcatggggacaaatgcgagcttgaattcatcgatttcatcgccaggacagcacaggagcttcaggctttactgcttatgttgaccagtaaaacgtatggtcctgttgttgatgtggatgaagtgaacagccaattgggcgtcctgtcatttgcatctgaagagtgcataacgtcgctgcttgggcctaaagtgcagatggttcacatattccacagatcattggatctttctgtggatgaccctttcctctga

SEQ ID NO: 13849 - DNA, 871 bp, Oryza sativa
  Clone ID: PAT_MRT4530_19844C.1
gagtctcctagagcgcgggccctctttttttttttttagcctttcacgtaatactctccatctaaacaaaacaaacagtataggagtacaatacaccatttttcacatgagcattcgactccatatatacttcccacacagtcactcgctcgatcaagcagggtcgtcggccctgacggtgccggcaagcaggaacgccttgaaggtgaccttgcggaccagcgacgcgccaccccactctttctccagccgcctcaccacgcgctcgtccagcaggtccacgccccgctgcctcgccgtcgccaccgccgaccacgacctcagcattcggacgaggcccgggaacgccatctcgtgctccatgtcgaagcccgccggctcgccctccttcccgaggccgacgccgtcgaacgggaacggcaggtcccggtacccgtcgatcacgtaccgagctctggagtcccagtagggcagggtggtgtggaggaagcgggacatcatgtcctccacggggctgacgcggtagttgtacccccagaccgcgatcacgccgccgggcttccgcaggagccgccgcgcggcgccgtagaacgccgggaggtcgaaccagtgcgccgcctcggccaccgtgatgaggtcgacgcagccctcgccgccgagcgccgcgacgaggtcgtcgtcgtcggcaccggcgtcgggggtgtggaggtaccggaccttcgggtgcggcacggcgcgccgcagctgctccgcgctcacgtccgtcgccaccacgctgtcgtagtgctccgcgaccttgcaaacagcaacccggatgggatgccggtaaatgtcaacgttaggtaggcacaggctttgtaaggaatcctag

SEQ ID NO: 13850 - DNA, 1411 bp, Oryza sativa
  Clone ID: PAT_MRT4530_19845C.1
atggcgaagaagcggaagcgctcctccgatgcggcggccgcggtggagaagcccgacgagttcgcgccgcagcgcccggagcgcaccctcttcggcttcaaggagaagcccgcggacgacgaggaagccgaggccgaggccgcctctgagggagaagaggatgccgccgccgccgccgccgcggcgccgttccgcaacaaggagaaggtgctcgtgacctgctcccgccgaatcaactaccggtatcggcatctgatgcagaacgtggtgtcgctgctgccgcacgccaagaaggacagcaaggtcgagtcgaagcagagcaagggcaatgcgctcaacgagctgctcgagctcaggaactgctccagctgcctcttcttcgagtgcagaaaacagaaggatctttacctttggatggttaagtcccctggaggaccatcagtgaaatttctagttaatgctgttcacaccatggaggagttgaagcttacagggaaccatctgaaagggtcacggcctcttataacattttctacaaattttgatgaacaacctcactggcagcttgtgaaagaaatgctaacccagctttcacatgttatgaactttatggagaactgggggaatgcaatccgtgatgaagttatacatgcttcttttctaatatttgctactccaaaagatcatcgaaaggcaaagccttttcatgaccatgtgtttgtcttctctatcgttgatgaccatgtttggtttagaaattatcagatttctgttccccacaatgagattgacaaggttgataaaggaggtctggacaagatgacacttgttgaggttggcccaaggttctgtttgaacccaatcaaaatatttggcggtagtttcggtggccctacattgtacgagaatccattctatgtgtctcccaatcagatccgtgcactagagaagcggaagaaggccggcaagtatgccaagaaggtcaaggctaaggtgaggaggaagatgcacgagatggagaacactctggagcctgatgaatttgctgaactttggaaaggggaggactagttcagctatagtgattgaaccatcaacccccgttaaactagttgctctcgctgtcacccgacacgagttttgtttactatatctcgtggaatttcttgtatgacaccatgagtctattatttacatgaataagattttagtgtcctatcctaactccatctcgtctcgtgcttaaaaatataattcgcattagtagacttatatgtgcttattgcttgttacgtttttttgttaccactgttttaccatgtttttggcacaatacaatttgaagggcctgtttgggggagcttaaaaaaaaaaaaaaaaaaaaaaaaaaaaaaactcgagggggggcccg

SEQ ID NO: 13851 - DNA, 1107 bp, Oryza sativa
  Clone ID: PAT_MRT4530_19846C.1
caaattccttttgtgatctttcggacgacgtaaaaaaacgaggggctgacttgggatgaatagcctttcacgtaatactctccatctaaacaaaacaaacagtataggagtacaatacaccatttttcacatgagcattcgactccatatatacttcccacacagtcactcgctcgatcaagcagggtcgtcggccctgacggtgccggcaagcaggaacgccttgaaggtgaccttgcggaccagcgacgcgccaccccactcttcctccagccgcctcaccacgcgctcgtccagcaggtccacgccccgctgcctcgccgtcgccaccgccgaccacgacctcagcattcggacgaggcccgggaacgccatctcgtgctccatgtcgaagcccgccggctcgccctccttcccgaggccgacgccgtcgaacgggaacggcaggtcccggtacccgtcgatcacgtacctgcaagagcagcatgtcaagctttcttttcgccatggatggtgcttgcttgcaattgcaagattgtaaaattgcaatgtgtgctgtgcccaagtggtaatgtaccgagctctggagtcccagtagggcagggtggtgtggaggaagcgggacatcatgtcctccacggggctgacgcggtagttgtacccccagaccgcgatcacgccgccgggcttccgcaggagccgccgcgcggcgccgtagaacgccgggaggtcgaaccagtgcgccgcctcggccaccgtgatgaggtcgacgcagccctcgccgccgagcgccgcgacgaggtcgtcgtcgtcggcaccggcgtcgggggtgtggaggtaccggaccttcgggtgcggcacggcgcgccgcagctgctccgcgctcacgtccgtcgccaccacgctgtcgtagtgctccgcgacgccgatggcggcctggccattgccggtgccgacgtcccaggcgacgcggtggtgggcggtgagcgacgcgagcttgacgaacaggtccttggggtagaccggccgcgccgcggcgtactcggcagcctgcctggtgaacagcccagccatccggtcttggatcttcgatctgggaccgagcat

SEQ ID NO: 13852 - DNA, 787 bp, Oryza sativa
  unsure (1)..(787): unsure at all n locations
  Clone ID: PAT_MRT4530_19847C.1
ttggtacccaggtttcccatccgcgttgtaaagccgcccaggaggcgcgtaaccactcccatagggcgattggggccgggcccccctcaaggnnattgggaccggggccccccctcgagtttttttttttttttttttttggaaatgaacaccaaactttgttttattcttccatttccaagttacaagcaagttcatccatcgcaataaccatcattttctcatcacttggattcactcgagatcagagagatactagcagagatcatacaagaagctgtgcctttggtttcaattggcggcgttgactacggcgtcgaccttgtcggcgaggtgggcctcgtcgtccccgaggcgcgccgccgcggcgccattctcccacctgatgagcgtggggacgccggtgagcctgaaccgcgggtcagccctccacgggtgcgccgggtccctccacgtcggcttgtcgccgacgtacgcgcgcagcagcaccacgtccttctccttccccttcgccgccgcctccaccctgtcgtagatcaccggctccgccacgttgcagtcggggcaccaggtttggttggaggaggcgtcgcggtcggcgaggaagaggagcagcttcaccttgccctcggcgtcgtccccggcggcgaagagcttgtcgaagtgggcgtcgaagtcggcgacggtcgcgtccaccttctccaccgtcatgtccgcccttcgtctcctcgctttcctcggcggtggcggtggcggcggcccgcgggcgagcagccctgcctcgtgc

SEQ ID NO: 13853 - DNA, 3362 bp, Oryza sativa
  Clone ID: PAT_MRT4530_19848C.1
atggggattcttgggagttttttggtgctgctcctgcttgctgcccctgcatttggccagctaccttcacaggacatccttgcgctccttgctttcaagaagggcatcactcatgaccctgctggattcatcaccgattcgtggaacgacgagtcgattgatttcaatggctgtccggcttcctggaacggcatcgtgtgcaatggcgcaaacgtggcaggggttgtgcttgatggccatggcatctccggtgtcgccgatctgtccgtgttcgtcaatctgactatgcttgtgaagctctctatggccaataacaatctgtctgggagcctgccgagcaatgtgggtagtctgaagagcctgaagttcatggatatctcaaacaaccggttctcggggccgattcctgataacataggcaatctccggagcctgcagaacctgtcgcttgccaggaacaacttctcagggccactgcctgactccatcgatgggcttgcgtcgcttcagtcactggatgtgagtggaaactctttgtctggtccattgccttcatctctgaaaggtctccgcagcatggttgctctgaacctctcatacaatgccttcacaaagggcatcccatctgggcttggccttcttgtgaatctccaatctttggatctaagctggaatcaattggaaggcggtgttgattggaaattcttgattgagtcaactgttgctcatgttgacttcagtgggaacttgctcaccagtaccacccccaaagagctcaagttcctggcagatatttcagagacagttctatatctcaacttgagcaacaataagttgactgggtcattgattgatggagttgagctctcgacatttgggagattgaaggtgcttgatctgagccataatcagttatctggagacttgccagggttcaattatgtctatgatcttgaagttttgcgactggcaaacaatgcattcacggggtttgtacctagtggacttctgaaaggggattctctggttctcagtgagctggacctgagtgcaaataatctgactggacacatcaatatgatcacatcgaccaccttgcaagttattaatctttcctccaatgctctctttggggatcttccaatgcttgctggaagctgcactgtgttagatctgtcaaataacaagtttaaaggaaatttgtcagttattgccaaatggagcaatgatttggagtatgttgatcttagccagaacaatctaactggaacaattcctgatgtgagctctcaattccttcgcttgaactacctgaatctttcccataattccctagctgacaccatccctgaagctgttgttcagtaccccaaactcactgtccttgatctcagctccaatcagttcagaggtcctattcctgctaatttactcacttcgtccatgctgcaagagctctacatccacgacaatatgcttagtggaggtctatcatttccaggatcatcgtcaaaaaatctgagtcttcaagttcttgatatttctggaaatcactttaatggcagcctccctgatgaaatagcatctttatctagcctccaagctcttgatatatctacaaacaatttctctggtcctttgccagcctctatcaccaagcttgcagcgctcactgctctcgacatatcaataaaccagttcactgggtcattgcctgatgcacttccagatacattgcaatcattcaatgcctcttataatgatctatctggtgttgttccagtgaacttgaggaagtttccagaatcttccttccatcctgggaactcgagactagactatcctgctagctcttctgggtctggcagttcctctggttcagctggtggcaggtcactcagtgcagcagctaaaatagcacttatagcagctagtatcgttgctcttgtcatccttatccttgttgccattgtttgccattacaagcaaatctcacggcagttccctagctcagaaaaggtttcagacaagaacctccacaagactagcaaagacatggccagtacaaaaggaaaggatgacaaaggtggtttggtggtctcagcagatgagcttggtgctcctcgaaagggctctacatctgaagcactaagccaagaagagaagctgtcaggtgtagggggattttccccatccaaaggtagccgcttctcttggtcaccagattctggagaggcatacacccaggaaggcctggcacggttggatgtcagatcacctgacaggttagcaggggagttgcacttcctggatgaaacaatcacactgacaccggaggaattgtcaagggcaccggctgaggttcttgggaggagcagccacgggacttcgtacagagcaacacttgagaatggtgtcttcctaacagtgaaatggctgagggaaggtgttgcaaggcccaagaaagagttctcgaaggaggccaagaagtttgcaaacattaggcatcccaatgttgttggcttgcgtggttactactggggtccaacagcacatgaaaaactgatcttgtcggattatgtttcaccaggaagtcttgcgagctttttgtacgatcgtccaggaaggagaggccctccactgacctgggcgcaacggctgaagatcgcagttgatgtcgcgcgtggcctgaactacctccattttgaccgagcgatgcctcatggaaacctcaaggctaccaacatcttgttggacggacttgacctcaatgcccgtgtcgctgactactgcctgcaccgcctgatgacccaggctggagttgttgagcagatcctcgacctgggcgtgctaggctaccgtgccccagagctagcagcgtccaagaagccatctccctcgttcaagtctgacgtgtacgccttcggtgtcgtgctgctggagctcctaactggcaggtgtgctggggatgttgtctcgggttctgaaggtggtgttgacctgactgattgggtccgtctgcgggtggctgaaggtcggggatcagattgctttgatccagccatggcttcagattctgagaaccaagtttctgtcaagggcatgaaggatgtgctgggcattgccttgagatgcatccggccggtctctgaaagacctgggatcaagtctgtgtatgaggatctttcatcaatctagtttagcctcattgtctctagcattagatggatactcttctgtgtgttgagttgagtgcattattttgactgaaaactctagtgtcgctgtagcaaatgcaagtgtatggttggcctcgccttgatgcctccaagttcatatggcatgtctcaattgctcaagtg

SEQ ID NO: 13854 - DNA, 570 bp, Oryza sativa
  Clone ID: PAT_MRT4530_19849C.1
atgtcgcacatcgccgtggagcgcaaccggcggcggcagatgaacgaccacctcaaggtgctccgctcgctcacgcccgcattctacatcaaacggggcgaccaggcgtcgatcatcggcggcgccatcgacttcatcaaggagctacagacgctactgcaatcgctggaggcccagaagaagcgcaggcagcagccgcaggcgcacctaatctcgccggcatcgatatcggcctccggcggcggcagccccagccccacgcccagcccgcgctccctcatcacctcctgctctcccactgccgccgccggcagcagcgccggcagctcatcctccatctcccccaaggacgaaaataagcagcagctgcagctggtagcagagctcgccgcctgctgcaactcccccatggccgacgtggaggctaggatctccggcgccaacgtgcttcttcgcacgctctctaggcgcgcccctcccgtcaggatcatcgcccttctcgagagcctccatctcgaggtgctccatctcaacatcaccaccatggacgacaccgtcctctactccttc

SEQ ID NO: 13855 - DNA, 327 bp, Oryza sativa
  Clone ID: PAT_MRT4530_1984C.1
atgccatcctctctctcttcttcctccgctcttcctcccttctctctttctttccctttctcttctctccccttcggccggccgcggggagcacgggctggagcggcggcgagcggcggcggcggcaagattggaagttcgggactcgctgctctggccaaggactacgacgccaccatcgagttatactgggcgcccatgctcgccgagtccaactctgacggtgccgctgtcctcgacgaccgcctcatccgcagtgcccccatgaacaagcactccaccttctggaagggcgccgacgtcctcgtcttcaactcccaccgctag

SEQ ID NO: 13856 - DNA, 2818 bp, Oryza sativa
  Clone ID: PAT_MRT4530_19850C.1
atgatgcagcaagacagcaagaggaagaggtccgtgctgccggagacggctacgttggccccgggaagcaagaggaggaggaggaaatctgtaccatcccgtcatgcggccgcgatgctacctgacgagttgctgacggaggtgtgcctgcggttgcccgtcaaatccatccttcgcttccgggctgcctgccgctcctgggacgcaatgctgtcttccgaggaatttggtcaactctacgcagcgagagccgaggagatgtcgtcagctcctaagctgctattcgtctcacctacggcaaatttcaactccaccgcggtgtacaagtgctcaccatcgaagcccaccgatgacctgctgctcacgcttgatgatgttcgcggaaactatgtggaggtgacacccgcaccatgccatggtctctccctcctgtatgatggtattgccccagcttactatgttatgaatgcaaccacacgggcagtcacacggttgccgcctttccgagatgtggcttttgccactgctggtcttgggtgcgatgcccggacgaagaagtacaaggtagtgaggctttttgaagggaacttgcttgagaaggaatttttgaagtgtgagatatacacacttgggggcgatgaaggggatatttggaggcctgccgctggtggagtacctttccggttctacagttttgctcgttctgctatttccaatgcggtgatgaacaaactgcagccacttttcttcaatggatatctgcactggttgatcaacccattgcatcacgttaaactaccaagagcttctattttatcattttctctcactgatgaaaccttcagatggatccgatcaccaccctttgtggcatctggagtgcatttggtggagcttgatggtaatctgtgtatggtccgagaccttcgtgataggtcaactgctgtttgcaagttggaaatttggaagcttaaggactataactctggtgattggtctttggatcatcgaattgatttaacagggcagttgcctagggatttacttgagccacagatagtgaaagttatcggttccgctggtagttgcagatcaggtacgaagataatcatcgccacatccaagcacaaagtttgttcctatgatcctgtttctagaactctggaaaccattacctcaatctcggagacctgcacatcctatcaaaatgagaaatctgatattagattcagtttatttaaagaatgccttaccccagtgcataaaacaagggaagagattgccttcgcaactcccttgtctaaggctactaaggagatcctactccgactcccggctgaatcagtcttgaagttcaaaccagtctgtaagcaatggcttgggctgataaagagtgaaagatttatccgtgcatactttgcacacaagaacatggacaagaggccaaaaatcatgcttgtgggtaagggctctggaaaatcacttttcaactttgttcccttaagtaaatggcttcaagaggcatccaatcaaggcacactgtttcttgacacaaaggtggtttgctccaagccttgccgtggattgaatttgatgagcttcgtggaggaggactatctgttcaacccgtgtacaggttaccacagggtctactggaacagagagtggcatcagcaccaaccatggaaaatgcctacgggttgccgtgaacaagaagacaatccttttgcagttggcaataagaatgttggtttggggttcagccaggtgattcaggatcatgttgttgtggggattttctatgaccggaaagactacaactctcgtgagtattctttaacatgttctctatggagctgtggttctggatacttcgagcaactcccgcagccacctctgcctgtgaatgacatgccacctgtctctgtggatggagtgctgtactggatgagcgaaccaaggttgggtcagagttatgaacgagccattgtgtcttttgacattgccgctaagatatttgaagtcatcccttgcccttcaagcattgcaatgtgggaccccagaagtcgctgccatgcatttgtggtggagcttctaggaaagttgtgtgctgttctttcaaattcagttgcagatgagttagatatatggaagtgggatcatggtctatggactagagcatacacaatcaatttaaaattctggccagattactcacttgcaacgaatgttgtagtgcctatggcagttgaccttacagatggaaggattctgctgaatactgggaggaagcttggtttatataatccatttgatcaaacaattgaaaacttgcttgcacttgatcaggtgtcacttgccacacctaaagtgcagcaacagcgcactggaggtcatcttaagtgccacattaccagatgcgaagatgttcctaggaagttttctccgtggaaactatctatggctccatgtgagaactttgctacacctccaagtgcctcatcagggaagaatctgttgtcctccagacaccaatatgtgaaggcactaaatagtgtgagcccaaaggttatgcctgtggttcctatgttgtatgaggagagcctaacttattatccctttgctgcccgagcgagagtgttgtttagttgaagtggtacctttgtcaaatctaccatttcatgtgtcagataggtcctccatgtttggccataccatgtcaccaagtttttataatgtaatattttgatgtttatgtcacgtagctgtcagaattatagttgtgttgcataatttatttgacaagtatttcaagcac

SEQ ID NO: 13857 - DNA, 687 bp, Oryza sativa
  Clone ID: PAT_MRT4530_19851C.1
atgtactctgcctcaaaaaaattgagtaaagctagttcaagtccgccggtgaacttgacgagctactacagcaccatcggtgggctgcgttatctggtgaacacgagcccggacattgctcacgccgccggctaccttagccggttcatggaggagccacacgaggatcatctagcggcggtgaagcatgtgttgcggtatattgccagaacacgacaccatggtgcgcactacgccaggggaaaaggaggattgctgaagctgcatggcttcagcgacagcgacatggccggtgatctggacacacgccggagcacgagcggcattctcttcttcctcacaacaagtctgatcacttggcaatcgacgaaacagaaggtggtggcgctgtcatcgtgcgaggcagagtacatcgctaccacggccgccgcctgccaagctgtctggcttgctcgactcttgagtgacttgctcgactcagagatcggagcgccggagatcaaggtggacaacaagtccagcattgcaatgaccaagaaccccgttttccatgaccggagcaagcacattgacactcgataccatttcatccgggagtgcgtggagaacgggaagatcgtcatcaactacgttcgcacggaggagcaactgaaggacgtactgacgaagccactcagccgtgtttga

SEQ ID NO: 13858 - DNA, 1452 bp, Oryza sativa
  Clone ID: PAT_MRT4530_19852C.1
gcgacgcccaatccgatcgatgcctccgtcgtctccgccgccgccgccgtcgcgggcggcgggggaggtggggatgggggagggggaggaggagggaaggagaaggagaagcaggtggtggctgcgccgctgcagccgccgatggccgtgcctgcaccggcggcggcggtgggggaggaggcgaggaaggtgaggaagccgtacaccatcaccaagtcgagggagagctggacggagcccgagcacgacaagttcctcgaggcgctgcagctgttcgatcgtgattggaaaaagattgaagcatacgttggctcaaaaactgtgatacagataaggagccatgcacaaaaatactttttgaaggttcagaaaaatggtacaggtgaacatctgcctccacccaggccaaagcggaaggcagctcatccatatccacagaaggcctctaaaaatgtttcgccagctgctatatcacaaccccctcctctgggggagcaaggttgtgttatgtccatggatacatctcctgtcatcagaaatacaaatgccagtgctgtagtaccctcctgggacaattctattgctcaacctttaagtgcaagtcgcacgcaaggtacaggtgctgttgctacaaataactgctctagtagcatagagagtccttctactacttggccaacttctgaagcagttgaacaagaaaatatgcttcgaccactacgtgctatgccagattttgcacaagtatacagctttctgggaagcatatttgatccagatactagtgggcatttgcagactttaaaggcgatggatccaattgatgttgaaacggtactactgctgatgagaaatctgtccatgaacttaactagccccaactttgcggcacatctgagcttgctgtcatcatgtaattctggtggggacccaattaagtctgaaggcatggaaaatcttggatctccacagagttgccatctcccgttcatggaaacaagtgagtgagggagaactgcttgtatgcggacgaagcttcagttgtttccacaagacgttcttgtgttctctttgtactggagttgtggacggctgatccggcagtttaccaacgctagcacgtgttgtggccgtggcatctgtatagcttccaataatgctctaaccctaggctagttttgctcatcaatcatgttcatgtagatagccagttttgtgtgctcagcaattctttttccctcggggtggggcatggctcgaaatgtttttgtatgtgtacatctttgtatacatgtatgtaaatatgtgtgatcatgtaatgcttaaagatactgttgactgatttgaggtaataatacaataaaccagtggggcactcgggtgtagtctctagggcgccccactgttgtgaaatgtgagctctgaagttgtggactatcttcgccgaattcc

SEQ ID NO: 13859 - DNA, 670 bp, Oryza sativa
  unsure (1)..(670): unsure at all n locations
  Clone ID: PAT_MRT4530_19853C.1
acgcactcacgctctgtttttccccatccctcaagaagatcgattcctcctccctggtcctctccccttcctccaatcctccccttatctgcgcaggatctcggaagcaggtaagtctcatcgatctctcccccctcactggattcttgatttctcttgtgatagagccggataaatctcaacccataaaccctagtagagtataaactttgttccattaactttgtttcattgattcattccctgcaagcttcgcttgtggtcctaatccggagttgtttggcgtcaaaatgctggtggtgatcttccagaccggaggagcagggcccgattcatatccatcatcggtatcgatggcgagaggcagagggggcaggacgaagggaggttcagtgggtcacagcggcaagaggggcaggcccagcgccatggcggaggagccggagggaggagcagcgcgcaagcggaggaagcaggatgacccaactaatgagagtggtgacactggacctgtntaaggagagggcgtgaggagatgtnncaattgggccaaatnatnaggctaagntaccagattgtacatttggnaagaaaaagagnagtgncgncgaggactctgctgatagtnnctnattnctttacctcggnagtgattggatcgaaaacaaaa

SEQ ID NO: 13860 - DNA, 889 bp, Oryza sativa
  Clone ID: PAT_MRT4530_19854C.1
tctactactgtcgtactcggtacatcagcaatttcagcagtgagctcacagcaaaatgttgctacgtgcagctgcgccgctgcagccgccgatggccgtgcctgcaccggcggcggcggtgggggaggaggcgaggaaggtgaggaagccgtacaccatcaccaagtcgagggagagctggacggagcccgagcacgacaagttcctcgaggcgctgcagctgttcgatcgtgattggaaaaagattgaagcatacgttggctcaaaaactgtgatacagataaggagccatgcacaaaaatactttttgaaggttcagaaaaatggtacaggtgaacatctgcctccacccaggccaaagcggaaggcagctcatccatatccacagaaggcctctaaaaatgcagaaatacaaatgccagtgctgtagtaccctcctgggacaattctattgctcaacctttaagtgcaagtcgcacgcaaggtatgtttacctactatgctcataaacctctgtccaaaattaatgagaaaaatccaacaaatgccattgacgaactaaatttggcaggtacaggtgctgttgctacaaataactgctctagtagcatagagagtccttctactacttggccaacttctgaagcagttgaacaagaaaatatgcttcgaccactacgtgctatgccagattttgcacaagtatacagctttctgggaagcatatttgatccagatactagtgggcatttgcagactttaaaggcgatggatccaattgatgttgaaacggtactactgctgatgagaaatctgtccatgaacttaactagccccaactttgcggcacatgtaagttgttctgtttttaaaatgctcattaaataga

SEQ ID NO: 13861 - DNA, 195 bp, Oryza sativa
  Clone ID: PAT_MRT4530_19855C.1
ctacctgctcgacgtacgggcggtgagtacatcatagtcgtacggaaggctacaccacctgcgcaggtggtgcagccgcgacaccaacgccaccaggtacatgcgaggtaagtatctgcgggcgtcaaaggtgtacaacaaagaacggagcttcaaagccatagagatggccggcgtgatcgggctattcgccat

SEQ ID NO: 13862 - DNA, 475 bp, Oryza sativa
  Clone ID: PAT_MRT4530_19856C.1
cccacgcgtccgcaaaagaggaaaaaactcatatacactgtttagtgattgtcagatcgatcatcaatggctagcaaggtcggcttcttagcggcggcgctcatggcgaccatggtggccatcttcgtcgctcagctgagcgagacgtagatcaggttcagggacaggcagagccagcgggaggtgcaggacagaccgctggacgcgtgccggcaggtgctcgaccgctacctcaccgtgcggaagaggttccagccgatgtctccgcctgccggtctcgctcggcctgcggatgcagtgctgccagcagctgcaggacgtgagccgctagtgccgctgcgcctccatccgccggatggtgaggagctacgacgagagcatgccgatgcccctggagcaaggttggccgccgtcgtcttctgagtactacggcggtgaggggtcatcgtcagaccaggggtactaccgggagggg

SEQ ID NO: 13863 - DNA, 343 bp, Oryza sativa
  unsure (1)..(343): unsure at all n locations
  Clone ID: PAT_MRT4530_19857C.1
gggaatgcctgtggccagattgtgtggggcaccatattgngctgtgnaatggctgtgattgctcacatagactgcggctcttgtgnctgggggggtgtttgntgacctgtgctgatgcaccccacccagtgaccgtgggtgacatgtgattgatgaggatgtggaaactgtgtgtgtgtgtgtgcctgggatgtgtaacaatgggtgtgcgtgtgtgtggacaatgatgtgaactgtgctgactgtgctgagggctgtggtgagcaacttgctatcctccttgggtatgcatataatccacactganganatcaatcacttgtcaaaaaaaaaaaaaaaaaaa

SEQ ID NO: 13864 - DNA, 223 bp, Oryza sativa
  Clone ID: PAT_MRT4530_19858C.1
ggggaattaacgatcgattttttggactgttttttttttgaacacacagtttgacctaggagtttttcggtcattgatcaagtacatttacgtggccagcgcgacaacaattggccgatttgatcgaaatcgataagacgattaccgagacacaaccgacacacgacacaacatgattcttccccagagacccattatcagggacacatgcactaacgatgca

SEQ ID NO: 13865 - DNA, 489 bp, Oryza sativa
  Clone ID: PAT_MRT4530_19859C.1
ccggccgggagagagctcacctccctctcgttatcaaagagagatatggaggaggaagacgacgagaaggttgtgaagaagagcagcgctagcggcggcctgcacggcgaagagcaggtcgatggcggacatgtcgtcacggcggagacggagatggcggcggcggctgcaccgtcgcggcagccgcagagcattctcatccgtgccttcgccggctgcctgctcgcgctgtgtggcggcggcggcggcgatccctccgatccgccgccgctgcgtccacggccacacggcgccaccgcggccgtcactgatactacttctgccgccgccgccgccgccgccgctcatcatcttcaacacgaggcagacggaggcagcaaacatgttgtaaccggtttcaatttggaaattagattttatgccggggatgaccgaaatttcagaaatttctggtcgaaattatttgaaaatttaactgaatttgaataa

SEQ ID NO: 13866 - DNA, 2271 bp, Oryza sativa
  Clone ID: PAT_MRT4530_1985C.1
atgtgcgttgactacagagctctcaatgaagtcaccatcaaaaacaagtaccctcttccccggatcgatgatctgttcgatcagcttaaaggtgccactgtattctccaagatggatcttcgttccggatatcaccaattacgtattcgcgaagaagatattccgaagaccgcattcaccacgcgatatggactgtatgaattcacggtgatgtcgttcggtttaaccaatgctcctgccttctttatgaacttaatgaacaaagtgttcatggaatacttggataagtttgtggtggttttcattgatgacattctgatatactcacaatcagaggaagaccatcagcaccatctccgtctggtattgggaaagctgcgggaacatcaattgtatgccaaacttagcaagtgtgagttctggttgtccgaagtcaaattcttagggcacatgatatctgctaaaggagttgctgtggaccccgaaacagtgaccgccgtcaccgattggaagcaacccaagacagtcactcaagttcgcagtttcttaggtttggcaggatactaccgaaggttcatcgagaacttctccaaaatcgctcgacccatgacacagttgttgaagaaagaagagaaatttgtgtggagcccgcaatgcgagaaggcgtttcaaactctcaaagaaaagctggtttcctcgccagtgttaatcttgccggatactcgcaaggatttcatggtgtattgtgatgcttcgcgccaaggattggggtgcgtgctcatgctggatggtcatgtggtagcctatgcctcacgccagctacggcctcatgaaggcagctaccctacccatgatttggagttggccgctgtgagaagatggttagaactcatcaaggattatgatgtgggaatccactatcaccctggtaaggccaacgtggtcgccgacgctctaagtcgaaaaagcagttgcaacactcttggcgtccgtggcattccaccagaacttcatcaacagatggaagccctgaacctaagcatagttggtcgtggattcttggctacgctggaagccaagcctagcttgctcgatcaaatccgcgaggctcagaagaatgatccagatatgcaagggatcctcaagaatatgaaacaagtcgtggaccgactaaccaaggtagctcggttcattctcgtgaagaccacctatggagggaacaaactagctgaactctacttcgctaggatcgtgagtctccatggcgttcctaagaaaattgtatctgatcggggaagccagttcacctctcatttctggaagaagctccaagaagagttgggtacccgcttaaatttcagcaccgcgtatcacccgcagacagatggacagaccgagcgtctaaatcagatcctagaagatatgcttcgcgcatgtgtcctagattttgggaagacatgggataagagtctcccctacgccgagttctcctacaataacagctaccaagctagcatacagatggcaccgtacgaagcgttgtatggccgcaaatgccggacaccactattgtgggaccaagttggggaaagccaagtgttcgggactgatatctcgagagaagctgaagcgaagttggagctgcccgcctccttgggcaacgtgcatgatgtgttccaagtgtcgcaactcaagaaataccttcgagtgccgtccgagcaggccgactcagagcagattgaagttcgcgaagacatgacctacgtggagaggccagtgaaaatcctggacgccatggagcgcaggaccaggaaccggcccatcccgatctcttcgccagttcttccgaatctcggggtcgagattccgtttaaggggggtagcttccgtcggctttgtcgcatcctcgccgacctcgtccacctctccgtttcggtcgccgacggccggagcgccgtcgaccccgtcgacccgagccgcgccgccgccttcctccgctccggccgcctttttcgtcgtcgccgtcgacctagggtgagccgtggaccgccgcctcttttcccccttcccttcccctctctcggccgccgctccgccgtgcctatggccgccgccggcgaccataggggcgcgggcgccgcctcccaccggccgcgccgagtggccgccttcgggcgcgccgagtgcgcccggtccaccgtggaccgtgaggctgccgcgtgggccccactcccgtggacccggtccgcgcgcccccttcccctcggctga

SEQ ID NO: 13867 - DNA, 300 bp, Oryza sativa
  Clone ID: PAT_MRT4530_19860C.1
atggtcgccgccggcgaccaacggcgcggcggagtggcacccgagagagaggagggaagggggaaggcgaacggcggtcttcggctcaccccgagacaacggcgacgacgagaacggcggacggagaggaagaagacggcggcgcggctcgggatgacgatggcgacggcgctccgacggatcctcttcgtcctcagattcagagacataagagctgatataataaacctttttcaatgctttcttggcttcttggaacctttgttcatgtgctgctattttctgagccaagtgggctaa

SEQ ID NO: 13868 - DNA, 258 bp, Oryza sativa
  Clone ID: PAT_MRT4530_19861C.1
gctcgcgacgtcgctctctctccgcagatacaattgccttccgaggagttgtcgatctcccacaagaagctagccgatctcccacaagtcgtcgaaggatagaaggcaagactaaaatcggctatgaagaatgtcgctgatttgaccaagtctctgaaagttaaccctggaaccgatgctcaagatgctcaagccattgaagaagtagaacaaattaggcgaaaagctatattggctatccagagctatctcaataac

SEQ ID NO: 13869 - DNA, 207 bp, Oryza sativa
  Clone ID: PAT_MRT4530_19862C.1
gcgcccacgcgtccggacactcgtccggccacgcgtgcgtttacaccaggatagtgttcacgccgaccctggtattgctaagtccaagaatttacggagaccggattactcatctgcagagctggttggttatacacaatcatcgcactgaaaagagatcgttctacttgttttcttcacaattgttttcaggccggttcacctgct

SEQ ID NO: 13870 - DNA, 367 bp, Oryza sativa
  Clone ID: PAT_MRT4530_19863C.1
ctttccgaccagtacgtttatccacctgcgactcatccgcgcgcgggaggaggttggatccggacgcccgcgtggcgagagcaggaccgagaaagtcaggaggagatcgacggtgtcgtcgacgacaacgcatcaaatctcgatcgggagacgaactgggggtcgacgacaccaagctgctgaggcgccaataaggccagaaggagatcaggatcctcagatccggacgaaacgcgctatgaagaaccaccatgctatacaagctcaagatgggacaaagcgacacgactatgcccaccatgaggctcaaagtcaaaacgggtgaagacaggaacatttgcttgaacctgggggatgttggtggtca

SEQ ID NO: 13871 - DNA, 330 bp, Oryza sativa
  Clone ID: PAT_MRT4530_19864C.1
atggagtcgaggcaggcggcgatcagatccaccgaccccatagtccactatcccctgagatcccaggaatctcttcgccgccacgcccccaccctccccgtgcgccggcgacgcggtagcgaggatgggaggggagacaccagccgtaaagaactcggtggggttgggggtgttcggcgctgccgctcgccggagatgccgccggtggtgtcggatgaatcgcggcggcggaggagacgagacgagacgacggcgagagagagaagagaagacgaaaggattagtaggcccgtttggagtatccggcccgacccatctgatttgggccca

SEQ ID NO: 13872 - DNA, 1587 bp, Oryza sativa
  Clone ID: PAT_MRT4530_19865C.1
atggcgaggtttctcctgggtgcggccgccattgcgctgctcgccggcgtgtcgtctctgctgctgatggtgccatttgcaattagagcgcggataaaaacaaatggagcgggcggtctagggaagaagaagttgaagaaggagaggaggacgctgaaaagaccaagcaacaagaagggagtctgtctttctctttgtgagtggagagagagagagagagagaggcatcggccatggcgaggtttctcctggggtgcggccgccattgcgctgctcgccggcgtgtcgtctctgctgctgatggtgccatttgcagaagcatatgatcctctcgatccaaatgggaatatcacaatcaagtgggacatcacacagtggaccccagatggctatgttgctgttgttaccatatacaacttccagaagtaccgtcatatccaagcgcctggttggagtcttgggtgggcttgggcaaagaaagagatcatttggtccatggctggtgggcaggccacagaacaaggtgattgctcggcattcaaagcaaatataccgcactgctgcaagagggatccgagagttgtcgacttagttcctggggcgccttacaacatgcagtttggaaattgttgcaaaggaggagtgcttacctcatgggtgcaggacccactaaacgcagtagcatcatttcagatcactgttggacatgctgggactagagctccaacttgttgtgtttcactttcatcgttttacaatgagacaatagttaactgcccgaaatgtgcgtgtggctgccagaataagaagccaggaagctgtgtggagggtaattcgccttatttggcgtctgtggtgaatggacctggcaagggcagcttgactcctctagttcaatgcacaccacacatgtgcccaataagagtgcattggcatgttaagctcaattacagggactattggagggttaaggtcacaatcacaaattggaattaccggatgaactactcgcagtggaacttagtagttcaacacccaaattttgaaaacgtctctactgttttcagcttcaactacaaatctttgaacccctatggagtaataagtgagtatttgcttcaacttctgaatgacactgcaatgatgtggggtgtcaagtactacaacgacctgcttatggtggctgggccagatggaaatgtccaatccgagcttctattccggaaggaccggtcaaccttcacctttgacaagggttgggcttttccaaggcgcatatacttcaatggcgaaagttgtgtcatgccttcaccagatctgtacccatggttacccccctcttctactcctagatttaggactgtattccttctcatgtcattcctggtttgtggaacattagcattcttgcacaaccacctagttttagacaaaaactgtggaaagtgctgaccacattgggcattggctgttgacatactgagtcttttggaagtttagggtgtgctcttgcatgaaaagctaattcgcgtttgatttaggttgtaagtttaggttcctcgaaatcattaaagtttgggttgtaca

SEQ ID NO: 13873 - DNA, 437 bp, Oryza sativa
  Clone ID: PAT_MRT4530_19866C.1
tatacgactatctatggggaaagctgacacgcctgcaggctccgatcctgtatagcctgcgcgacccacgcgttcgcccacgcgaacagagaacatctgtaagttatacatatatgttgataattctttgctcacactcttattcagatcgatcacatgcatatttcattgctcgatattccttacaagtagtctcatacatgctaatttctgtatggtgacgggctggctactacttacttacctaagtgacttgccaagatccatatatatctgctgatattaaatcttagttcgttatgatagcttaggctgttcaatgatattctagagtctacagaaacacacccagcgattttgcaactagctacacacgatgctgtgctagctgacctagattcgaagactcactccttataattattctatatcacatc

SEQ ID NO: 13874 - DNA, 378 bp, Oryza sativa
  Clone ID: PAT_MRT4530_19867C.1
atggcaagcttcggcgaagacaacagagcagcgacacagagggaggaggatccaaccttctatgaggcagccatcaaagatggcaatcgattgcagggatcgtcccagaacaaatatggaggaatttctccaaagaaacctctcattaataaggaccatgagcgtgcctatttcgattccgccgattgggcacttggcaagtgctacctatttctgcagcaaggcgcaagcaacagcacaaaaggcacaaccgagcccctgaaacccaagttgcaggtcgctgagactgtgagagtatggcagggcaatcacagggggggcatagagtttgatccaattattaattgggatgtaaatatggatattgtcagcatgtag

SEQ ID NO: 13875 - DNA, 393 bp, Oryza sativa
  Clone ID: PAT_MRT4530_19868C.1
aaagggaaatcgaaaagccttcacggatgctcacgtttccgaacatgcaaaaaatatacatgcccccccccacaacggggaacttgtcgtatgggtaggggacttgccaggaaacaggatgggggggtgggtttacttttggggcagggccccgggtataattttaaactttaggtattttatacaggccattttaactccttttttcaattaaaaattaatatgttccccccctgcgcaaaggggggaactaactttggtctacaaactacagggcaaaactgtggtttttaaaaaggaaaaagggccccgcgcgggggcccctccccccccggggggcgaggttgggggaactggatttccttgccacccttggctggagccccggggggc

SEQ ID NO: 13876 - DNA, 929 bp, Oryza sativa
  Clone ID: PAT_MRT4530_19869C.1
gcacgagggccctgcgtacgtacgtgatcgtgatatcgcgtccgtctctcctcctcttgtctgcctgcgtctcaccaacctcctctcctctcctctcctctcctatatcttgctcggtcgcgcgcggtcgagtggtcgacgcagataaacaaaacaccgatcgagtcttcgagctcgttcccgtgagttcttttattagtttgctccatcgatccccctgctctcttcctctgcttctgttgttagggttcagaggacgaacaacgccggtggttggactactctcgcgctcggggagatggcaagcttcggcgaagacaacagagcagcgacacagagggaggagggatcgtcccagaacaaatatggaggaatttctccaaagaaacctctcattaataaggaccatgagcgtgcctatttcgattccgccgattgggcacttggcaagcaaggcgcaagcaacagcacaaaaggcacaaccgagcccctgaaacccaagttgcagcgcacggcatatccccagcttcctccacgaaggcctgcgtgcacgtcaggcgcgacggaatagtgtgctccaatctcagcagtcagcactacatgtttacatttgtcgctgagactgtgagagtatggcagggcaatcacagggggggcatagagtttgatccaattattaattgggatgtaaatatggatattgtcagcatgtagctatgtgcaatggaatttacaacatttctgtgacactctcatcgtttcctctggttggttcagtaagttttctggatttatggtgagcagtgggctgaattgccgaaaatgtattcacgacaatccggcgaatgcaaagttgaggaataagttcactttaaaaaaaaaaaaaaaaaaaaaaaaactcgcctgtgccgaattcctgcagcccgggg

SEQ ID NO: 13877 - DNA, 1040 bp, Oryza sativa
  unsure (1)..(1040): unsure at all n locations
  Clone ID: PAT_MRT4530_1986C.1
gatcgcgagcggcccggacgcgtgggcggacgcgtgggttttttctcttcttcccctcccgcaaccctaattttttttccccatccgcgaaaccctagccgccacgcgaaaccaaatcccgccgcgcgggatccttttccgccggattccacccgcgaatcggggttccccttacgattcgcgggcggattagcgcgaggcgcgcctccccctacctctgtgtgatccgggggtgaggttaggccggacgccggggcatcagccatgtcgaggtgcttcccctacccgccgccggggtacgtgcgaaacccagtggtggccgtggccgcggccgaagcgcaggcgaccactaaggtttgttgaaccatcggatttacacacgcacgtgccggatcatttgctcttgcctgttggttttgatcggatctgttggttgtgcgtgtgtgatttggggatcgcacgtgcggngaagctaacctttgcatggataacttgagatttgtgaggccgcgcttcgaccagatcggtcgccaatcttttagtggctgaccgtggaaagaggatattactgaccttcggtttgctaattttggttgtgccgttgaatctgaaataaccagaatagtcatggggaaaaaagtctgatctggaaggttcgaattacatttctatatattgttgtgctcccagacgatggttgcaagaaatcactcatgctggataaaattgtggatgtaagagtctgcagtcgttaaaatctggaaacagcacattttgccgtagtaaatttgaatccatgttgctgtctcgttattggtgtgttacgagtaacctgtgtgttgttatctccgcttggactagattccaagtaatccagtgccttcatgacctgcaaattctatgcctatgaagtaacatgaacagtttgtatgtatgtattctgttgatgcatacttgcattatttgtgagatgtacatgttgtggtaaaattttgcattcaccatatagaaatagtaactgactatccttgtttagttcg

SEQ ID NO: 13878 - DNA, 553 bp, Oryza sativa
  Clone ID: PAT_MRT4530_19870C.1
ttatgggggctattaagcggggcaaaaagccaccaccttgtgttttggccaaatgcaaactggctaatttttcccaaactgggaggaatacacacaaccacaaaagtgccgtgggcaaaacaaatgctgcggcaggcctgggtgggggcacgcaacacacacaaattgtcgtgcaacttgtatgcctagggcactcatgtgaacacacatttgggtgtgcaaaggcgacactgaggcgctaaggcataggctttcagcaaacctgcccacacactcaagtgtttggggtggatcctgctgacctgtgtgatccaggatatgtctgggctgcatagctgcaagtctctggttgggctgttgtgaacagtgtgcacatgtctgagatgatggtatgtctgaccctgagggtgactgatgggtggcacactgagtgaccacttgacacaaaccacttgggcggtggtgcttggtgaatggagtgtgttgaaacaagtgatgtagtggttcggaattaaaaataactcaatatcatcacaaaaaaaaaaaaaaaaaa

SEQ ID NO: 13879 - DNA, 537 bp, Oryza sativa
  Clone ID: PAT_MRT4530_19871C.1
atggccgtggacacggccaccaacggtgccaagcggggggccgccacgagcaccgacggtgctgagcggcggggcgtcctgaggggcgactgcactgggcggcagggcgtcccaaggggcgacggcatcggacggcggaatggctccgaatcaacggcgagctcctccggggcagccgcccccttctactctccaagcggccagacccagctcggtggaggatcgaagaagctcggcgatggctcctctctcccctccggctcccgcgacggtcgctcccctctctcctccggtgcccgcggtggcctctcccctctcctttccggctcccgtggcggcctctcccttccggcgacggcgcaacgtccctttccgacgcagatcgacggaggcagttcgatgagcttttccgatgccagcctcacaatgttcggatccaatggaatcagccccgagacgagcagatccactggctacggatggcggcaggcttcgggtggcaacgggcttcggacagccgtgacagcttttgtgtag

SEQ ID NO: 13880 - DNA, 401 bp, Oryza sativa
  Clone ID: PAT_MRT4530_19872C.1
ggtcgtcctttttttttttgtttttttttttttttttttttttttttttaattccagttttttgttttttattgtattttaaatgttttacttttttttagttggttttcggggagaccccaaatttacaaaaattcaaccagaaggggacttaaattttggggggggaatgcaatacaggttgccgaatccaatggaccaaaaaaacactcgggtcggggggaggaacagccgaatgggcgctggggggggttcaaaaagggcccggggtttggtaaaaaggggcctccagggggttaccacccccctaaaaaatgatggggagggtggacccaaggtttcaagggaccggccgggggcgggggcccggggggggccgtatcatgaggcggggcagaccc

SEQ ID NO: 13881 - DNA, 4161 bp, Oryza sativa
  Clone ID: PAT_MRT4530_19873C.1
atggccaaaaacaaacatcctaccaggtgtcgtgtgccccaggctctagctcaaggtaccttggaggcccggacatggaaatggaatctcaaaaatcatggatatgtctttttaaagatcagagcacttcttgtcgtgaacgagttgattgcaggtgcaggagttgtatccaactggccttcagttcttctctcgtggtggttcttcagcttcttatccgaatcacttctcacttcgttgcatttgcttcacctcttcaactctgcaactgttgtcgatttcacttctcttcccttgtgcacattcatctgcctcgtggcagtaactatgagaccttccaaagcaaaccagcaagaccagaaccaaccgctgcttgtgagagaagacagtgatgacagtagcacagacaggttctccaactccgggtggtggagctgcctcacattccagtggttaaacccaatctttgagaagggacacaaggtgcgtcttgagctcgaccatatcccatctgttccacagtctgacacggcaaaccaatcttatgcattgcttcaagagacacttcacaagcagaaacctgagccaatgcctatgcggagagccattatttgtgctgtctggacacctttgatcgccaatggagtctttgcagggcttaacactattgcttcctatatggggccattcttgatcacctacttagtggagctactctctgacaagaatcctgacaagggccatggccatggctacatgctagcatgccttttctttgcctcaaagacagtggagtcactttcacagcggcaatggtattttggtgcccgcaggattggtttccgggtgcgtgcagcactgatggtatccatctatcagaaatccctgctgatgaagaactcaagcacagccagcgggaaaattgtgaacttcctcgatgtcgatgttgagaaggttagcgaattcttctggtacgtacatagaatttggctgctacccttgcaaatatccttggcacttgccattctctaccgtagccttggtgcaatggcctcgctgtctgcagtccttgcaacagttttggttatggtgagcaacacaccacttgcaaagtcacaggagaacctcaacatgaagatcatggaagcgaaggactcacggataaaggctatggctgaagcaatgaagagtatgaggatattgaagctgcatgcatgggagacagcttactttgacaagctactgaatctaagggatgtggagaggggatggctcaggaaatatctctacacatgttcagcaattgccttcctgttttgggcctcaccgaccttggtgtcggttgtcacatttggtgtatgtattcttgtggagatgccattatcagctggaacagtcttatccgccgttgccacgttcagaatcctccaagatccaatctacaacctcccagagctcgtttcaatggtcacacaaaccaaggtgtccctagatagaattgaagagttcatcaaagaagaacaccaggggaagccaagtcgttctgacaataacactaggactaaggacctgtctatgactggtgcaatggaaattgaaccaggggtatatggttgggaaattgacaatagcttgaagaagacaaaattcatgcttaagattgacagaaagctgagcatcagcaagggtcaaaaggttgcagtgtgcgggccagttggttctggtaaatcaagcctcctttacagcatcatgggggagatcccaaggattaatggtgcagaaacaacagtttttgggtcaagggcatatgttgcgcagagtgcatggattcagactgggacaattcaagacaatgtgctctttgggaaggatatggacagaagcttctatgaggaggtgctgcatggttgtgctttggatagagatttggagttatgggccaatggtgatatgactatggtaggggagaggggcatgaacctgagtggaggccagaagcagaggattcagcttgccagagcattgtatagtgattctgatgtttacctcttagatgatcccttcagtgccgtggatgcacacaccggagcacatctcttcaaggaatgtttactgaggctaatgtcctctaagacagtcatatatgttactcatcagctagagttcttgagagatgcagatcttgttctggtcatgaaagatggaaggattgttcaatccggaaaatatgatgatttggtagcagacaggaatggagaactctcaatgcaaatggctgcacataaccaatcccttagtcaggtcacacctgcaaaagcacatgtcttgactaaaaataagagtcacaagagaaggcagactgagctcacagaaatagaattagatcacaatgtaataggcagggaatgcgaggaggagcgcgaatctggaagagttaaatgggatatttatcgcaagtttgtcaactctgcatatggcggagctctcgttcctgttattcttgcatgccaagtccttttccagggattgcagatatgtagcaactattggattgcatgggcagctgagaggcaggaacaagtaagcagggagaagatgataggtatctttgtgctgttatcagctggaagttctgtgtttatattgggaagagctattgtcctttcaacgattgccattgaaactgctcatcagttcttcttaggcatgaccaggagtatttttcgagcaccaatcaacttctttgactccactccatcaagtagaatcctcaatagggcttcaacagatcaaagcacagttgacacagacattccctacaggcttgcagggcttatcttcgcattaattcagctcctcagtattattttcatcatgtctcaaattgcctggcctatattcattctattcataattataattgccatctctacttggtatcagagctattacatctgttcagctagagaactagcaaggatggttggcataagaaaagctccagtcctccaccatttttcagagactgtatcaggagcagcaactattagatgctttaatcagggagagaagttcttcaggaagagtcttgcgctaattgatgactactcccgcatcactttccacaattcagcaacaattgaatggttatgtgttcgcatcaacttcctcttcaaccttgtcttctttgtgacgctagtcatccttgtctcaatgcctcgaaatactattgatccaagcctcgcagggctggcagctacctatggccttaaccttaatgtgttacaagcatgggtcatatggaatctgtgcaacgttgagaacaaaatgatttcagtagaaagaattttgcagttctcaaacataacaagtgaggcccctttagtcattgaggactgtagaccaagagaatcatggccctggtgtggaaccattcagatcgattctctccaagtgaggtacaacccggacatgccaatggtgctcaaaggcataagctgcacaattcccggagaaaggaaaattggggtggtaggacggacagggagtgggaaatcgactctaattcacgccttgtttcggattgttgaaccatctgaaggacggatactcatagatgatgttgatatatcgcttttgggagtgcatgatctgcggtcaagattaagtgttataccacaagaaccgactcttttccaagggacagtcagaacaaacctggatcctctacagcagcatctggacactgaaatatgggaggttttgcataagtgccgccttgaggagattgtgagagaagacagtagattgttggatgcaccagttgttgaagatgggggaaactggagcgtaggacaaaggcaacttgtatgcttggccagggtattgctaatgaagaagaaaatacttgttctggatgaagccacagcatcggttgataccgcaacagataatatcatccaaaagactataaggcaagagacaaacaattgcacagttattacaattgcacataggattcctactgtgattgacagtgaccttgttcttgtcctaggtgaaggtaagatactagagtttgattctccagaaaatctcctcagagatgaatcatcagctttctcaaagctggtgatggaattcgtgggaagatcatcatag

SEQ ID NO: 13882 - DNA, 795 bp, Oryza sativa
  Clone ID: PAT_MRT4530_19874C.1
gtaaaaagaaagaaaatctcccgtctcctgccgccaagacgagtcgcggctgaacaggggaggggcggcgatctcatggtggctcatgaagaaagagcagtagtggcggatagagaagccaagaaagaggcgttcagaaagtacctcgagtccagtggtgtgcttgatactctcacgaaagttcttgttgcattatatgaggagaatgacaagccttcatctgcggtcgagtttgttcagcagaagctgggtggtccatcaatatccgactatgaaaagctcaaagctgagaagttggatttgcaattgaagtataatgagcttttagagacacacaaggaaacatgcagacagctggatgagcttaagaattcgaagaacgggagcggaaataacacgtgttgatattgtgaatgtgttgtcaagcatacttatgcatctgcatccatcatcaagtcgtatgaaatcgaaacaattgctggtttgaaccttgccatttgccaggttcacatccaccctccaatgtatcatatttttgctcgtcgcccttggcataccagagcacccatgagtctttcccatattcgtccagaagatcaaactccacactacctttcatgagcaaaagatgatcccacgcaacacgatttgaagagttgatcgacttgtggaaaacctgttgtgtggtaaatcaatagtatcatgtaaaatttgtcttatctcttcttttcttgtaacaacgaggttgtaatttcttctcttatttaatatagtataatctaccctgtctcagag

SEQ ID NO: 13883 - DNA, 1880 bp, Oryza sativa
  Clone ID: PAT_MRT4530_19875C.1
cacaagcatacttctaccgtttgacacaatttttcttgatggaaaggagagatatacatagtggtatacatgatccaagcttgttaattaggtacaggagatacaaaaaaaaatccaagcttgtgacatcagttgattaaataaattttacaatgatacaagagatatcggctgggaacaaaacgcagaaaagaaatgaagattctggggacctatactgatgacaaacttgcagcaaaacatgggtaaaatcaataacatggctgtcagcagctttcctcgcttgcgcgagatggaaccatgaagcctcgggagcccatccagcgagtgaatgttcgtctgagttgcctctgtaaacgccccctgggaggcttggactccaggaaatcaatcatttcttccagcaaccagaggtgtgaaaatcagatgagtctcaactcatattcaccagccattgtgatgtatcgaacccaaggaagggcctgatatccactcttttcgatgattttcagatagcgaacctgaatacccgacacggtaaaatatggtatctcaaatttcactcgtattggagccttcttttcaggcactgcttcttctgcagttatacttggaagactaaattcagctctgcacatatattccttgccaccaggaaatgattttattttccagaccattgcatctctctcaggtgcatatgccgcagagcccattgaagttcttatatttgggtttgtcgaatcctcaggcacaggtacttcaatttctacatttgttgctgtgctcctttctttgaactgacttcttgtcttcactgtgatctgtatccgacttcttgaatgtttctccacttgtgcttctacccagataagaggtttcacctgggtgctaagtctgtaagtcatcagatcaaatgatccatctggaggaatgaaggatatagtcctgtcattctcaaatctggccaaccgaacacactgatggaatttgatatcgtccaaatctattgcttttcctttagttgttcggccttgagcctccaagagaaccctatcattcaaccccagtttgcactcgggcattccacttagaaaggttcgcattttcagctcaccgatgacatcagacctcactatctgcccattgctgttaacgaggatattgacactctccaccacatccaagaacacacctccatcctgtacgcatccgtcttaatgaactcgctcaagattttcgcctccgtgtattgtgggtacccaaaatccatcatttcatcaagcaactcatacacaacgacaaagttatccctcagcgactcttcctccaactcttcgaaatagtgcttgaacacatcaacgacgcggtggaggaagaggaggatgctggcggcgttgcagttctggcgggaggcggttagtaggaacacgttgttgtgctggatgaacatgtaggtgaccccggcatcgtcgtagaccaccggcgagtgcgcctccgagtcgccctccttgtcgaggagcttggtgaagaagcgctcagcctggagggcggagacgtcgccgcggtagtcgcgccagacgaggacgcggcccttgatgtccagcaggaacagcgccgacaccgcgcccgccatcggcgcggggtgtatatgatcccgccccgccggatctggatctacccgcctatcgccctaccggcgacggccggcggccatccggcggtgatgcgggcgggcgggcgcgggattctcctcggcttctcgcctgcggagtcgcgccgcgccgcggtgccgtgctcgcgtagcgcggcggtgcgggtgtttgggtggatcggagacgggacgcggggagcgggcggccgcgtggggctccactagt

SEQ ID NO: 13884 - DNA, 773 bp, Oryza sativa
  unsure (1)..(773): unsure at all n locations
  Clone ID: PAT_MRT4530_19876C.1
ccacgcgtccgggtgtcggcgctgttcctgctcgaatcaagggccgcgtcctcgtctggcgcgactaccgcggcgacgtctccgcgctccaggccgagcgcttcttcaccaagctcctcgacaaggagagcgacgcggaggtgctctcccccgtcgtccacgatgacgccggcgtctcctacatgttcatccagcacaacaatgtgttcctcctcaccgcgtcccgtcagaactgcaacgccgccagcatactcctcttcctccaccgcgtcgtcgatgtgttcaagcattacttcgaggagctggaggaggaatcattgagggacaacttcgtcgttgtgtatgagttgcttgatgagatgatggatttcgggtacccacaatacacggaagcaatgatcctgagcgagttcattaaaacggacgcgtacaggatggaggtcactcagaggccgcccatggcagtgacaaatgctgtgtcatggaggagcgaggggattcggtacaagaagaatgaagtgttcttggatgtggtggagagtgtcaatatcctcgttaacagcaatgggcagatagtgaggtctgatgtcatcggtgagctgaaaatgcgaacctttctaagtggaatgcccgagtgcaaactggggttgaatgatagggttctcttggaggctcaaggccgaacaactaaaggaaaaagcatagatttggacgatatcaaattccatcagtgtgttncgtttgcccagatttgagaatgacaggactatatc

SEQ ID NO: 13885 - DNA, 2738 bp, Oryza sativa
  Clone ID: PAT_MRT4530_19877C.1
tcatggcgcatccccttcgtgtatctctaacacttcaaatgctttactgtatgcaacaaattagtataggcactaaaggccatgaaaatgaatacatcttttacggcaaattaagcgcacatgtccaagatagccagacattctacggaatatcactgtgcaagtacatggtcagacattgtgctaatcaatacactcaaatgagagccaaaactgtaacatcatgatcattgatacaagttctgaacaaacgcattttttagaagtatgaataacatccagtagtgtctgaaagcaagaaaatctttgttgattcctcatctagctcagatagcatctccctttgaatttggattatttgatttggagtcgagcaacttgtttgctatccagcttgaaaggaaggaaatcgattccacccatgtaaggctgcaatgcttttggaacttcgacaccattctccttctggaagttctccaaaatacagcaaagggtcctctcagtggcagtcaatgttgagttcaacatatgaacgaattgcttggattgctcatcattctttttctggccataacctataccaagtctccttgcttgaaaatctgtgcaatttgagcaggacactaattccctgtaggtttttgatgcagggccaccatgtcctcttaagcttacggcggaagtgggggcgctgatggctcaaggatcctcctgcgcctgcgcctcctctacggcgtcgtccgcgtccgccatctcgacgtcattgccgtcgtagtctagggcttcctcgtcgagcaccgcgtccaggacgctgtcccctccctccatgccggcgcgggatcctccaccaccaccaccaccacgatggggcgccccgctagggcacgaggtgacccacacacgctctcggtgaccgtctcctcccgtcctctcctcgccgccgggcgtagggcgaacaacgatggcgatgaaggagagcgcagcggaagcggcggcgatggatggaggggggaggaggcgcagcgcagagtttccaagctctgcttctaatttggttaggccttgtgggcctgctactgggctgctcgaccctgatatggactgattcaaggctgctcctgcagcctctccattggcccagcttatattttcctggcgttggtgagatctttcaaattccctgggtgaatgagcaaaagcccccgggttaatgagcaaagcacaaagatctctcattttccaatttttgcttccagcttgtttgctatccagcttgaaaggaaggaaatcgattccacccatgtaaggctgcaatgcttttggaacttcgacaccattctccttctggaagttctccaaaatacagcaaagggtcctctcagtggcagtcaatgttgagttcaacatatgaacgaattgcttggattgctcatcattctttttctggccataacctataccaagtctccttgcttgaaaatctgtgcaatttgagcaggacactaattccctataggtttttgatgcagggaaccatgcttctaaatcatacttcttagctgcagcatcattaagagcaccagacacaatggagacaagttggtacggtaggccaatctccttgtagaaatcttctgaatttttaatcatttcttcatgcatctcccaagattcattgtcatttggacttgtaacacagaattgctcaatcttttcgaattggtggactctgaagataccagccgtgtcccttccatgtgaaccagcttctttccggaagcaggtggaatatccagcatatctcataccactgaaattacacttgatcagactgaatgtatcatttccggactgcttaactataattattgccttgtaaagctcttcgtcaaattgggccaactgggcacattttcccatggtttcctttctcatgaaaaaaggagtttgcattggcttgaagcctcgctttctcagaaaagcgagtccaaaatttatcaatgccaagtttcagtaggacacctttcatcctttaaatagtaaccccttccacctgctacatcagcacctttctccaaagctactatgtcaagcatcttacaaagatccacgtgattcttcaaattaccctccagcctcctctctccccatgtccgtacaattaaattgttagcctcgtcatcgctgacagggacggattcatgcacaatgtttccaatcgtcacgagcttggcatcgagcgtgcccttggcctcctgcacctccgtctccttggcagccaacctcttcttaatctcttccgtgctctgaatcagagccgacgcgtcctcctttttagccttgagcttgccgatttccttgctggttttgttgagctcctgccggattttgtcgagctcgaattgcctctggcgccactggtcgtcgagggcgatgacctcgtcgacgagctcgacggaggcggagcggttgcgctgcgacctgcggatcagctccgggtcgccgcccttctccgtgcggaagaggttgatgtcgagcatcttcgaaggcgtgcggcggcggcggcggcggcgagcagagagggaagggtagacgaggagggttttgcagcttgtgcggctttctagggctgcacacggttttgacttttacgaggcggaggcgctcggagacggcggcgcgaggcgatggcgacggcgcgagggggaggaggcgggagagggatagggaacggcgcg

SEQ ID NO: 13886 - DNA, 1397 bp, Oryza sativa
  Clone ID: PAT_MRT4530_19878C.1
gcagaagaaggctaccggcgcgccacctccaccaaccgcacccgcacctccgtcgttgacagcctccacaagaactccacgactcctgcagcacgcgatccagatggccgcaacgaggtgctcggcgtggtggccgagatccaggagcggcacagcgcgcctccgcctccatatggtcgacgtcgactgtcgcccgccgcctccgtcgcctctccacacacggctccgcccccaccaccccgcgcatcctcgctcacctcgtcgtcgccggggtccacgccggtgacctcggggaccgcttccatgtcagtgtgagcgtccagtggtcgcggcgatggcggcgggcgtccgttggccaccggccgcgccgtgcgcctccagtctcctccagctgccgcccgtcttctcctcgaacatccgacccaggcgcagcggccagccattgtaatgtatctaacccaaggaagcgcctggtacccactcttttcaatgatcttcagatagcgaacctgaatacccgacacagtgaaatatggtatctcaaatttcactcgtattggtgccttcttttcaggagctgcttcttctgcagttatacttggaagactaaattcagctctgcacatgtaatccttgccaccaggaaatgattttactttccagaccattgcatctctctcaggtgcatatgcagcagagcccattgaagttcttatattagggttcgtagcatctgaaggaacaggcacttcaatttcaacatttgttgctgtgctcaaatatgtccgcatcttcagtgccccaacaacatctgatctcacaatctgcccattgctgttaacaagaatgttaacactctccacaacatccaagaacacttcattcttcttgtaccgaataccctcactccgccatgacacggcatttgtcactgccataggtggcctctgtgatacctccatcctgtacgcatccgtcttaatgaattcacttaagattttcgcctccgtgtattgtgggtacccaaaatccatcatttcatcaagcaactcatacacaacgacaaagttatccctcagcgactcttcctccaactcttcgaaatagtgcttgaacacatcaacgacgcggtggaggaagaggaggatgctggcggcgttgcagttctggcgggaggcggttagtaggaacacgttgttgtgctggatgaacatgtaggtgaccccggcatcgtcgtagaccaccggcgagtgcgcctccgagtcgccctccttgtcgaggagcttggtgaagaagcgctcagcctggagggcggagacgtcgccgcggtagtcgcgccagacgaggacgcggcccctgacgtccagaaggaacagcgccgacaccgcgcccgccat

SEQ ID NO: 13887 - DNA, 306 bp, Oryza sativa
  Clone ID: PAT_MRT4530_19879C.1
gttgaatcgaacgcttatgtaggtagtcgatattgtactgaactgcattttgtggatacgttccccggtctattgcttccgtggatgttatgcgagcgtacggtacatatggatttccttacatgacaacatatgtactggagaggaatctggacgactaaccagaggccgcaagccagctagaacaggggatcctattcagtgagtgcccaaccgcgtggttccgcttacatttacccgataagtttggatccaattcgggagctgtcttgggaagtttatgggagaaatgggcatgggaccatc

SEQ ID NO: 13888 - DNA, 5199 bp, Oryza sativa
  Clone ID: PAT_MRT4530_1987C.1
atgtcatccagcttcgtcgacaacagagtcaacaccaacctcaaccaaggagttcctgcttcaacaatgctggtgtggactcaagtcggcgaaatcgtcttcccggtttacaccacggtgccgatctcggctggtccatcaatgatcggaagcgagaacgcagtggcttcaacccaggacgactccatgtcgaaggatcctcccgccgaagcggagaacggaacgtcgacgatatccgagcccaagaaggatcctagtgcggccaaaccttgtcttttcgacaagaatcacggcccgacgaggataacttccgaggtgacaagctgcaaggtctttctcagcgccacgaagacgccgcctcctaaggtccagcagtcacgtatctctcttagagatgcagacaaggaacaaggagcgacactgatctcggatcgattcgttggggtaatcgacatcgatcctcacgagccgtcagttctacacttgctcgaagactatggctcatcgtcaacaagtacgccacgcgaggtattggctatcgacgggaccagcacgtcagcgcgcgctaatgcggaagcggaaaatcaagtgactacaccagcccagcacatcagggccgtcaacgcaatactgagggaaaccctctacgatcccattctgaacgacgatctcgcacggtggacagaacggctacgggaatcagtgaccaacctcagcaacgcgttcgaagaggccgccgctgcagcgcacccggaacagccaccaactggtggtgctaatggcgaaaaccctgaacagcgggaatcgcctcatcgagccacccctccacctcgcggcaccggcgatctccgcgatcacctgaatggccgccgagaggcgcgacgtgcacgagacaacaggaaccgttcccgacatcgcgtctcttcacgacgtcacaataacgaagaacgaggaggccgctcgagcgaagacgaagaccgcgataaccgccacaaccaccacgatcaaaacgatcgtgaacggcgggtgccgggccatgctagtcgaggacgccaccataatgacgacaacgatggagatcagcgccgggacaacaacggggggcgacgacaggattctcgagaacccggccgacgtcctcgtaatcgtacaccggaaccagatagacatccacggaggatgtacgatcgccgacaacccaccgccccctgcgctgggtgtagagctttcagtcgttcgctgcgcgatgtccgatggcctgagagattccgaccaggagcaatagagaagtacgatgggagtaccgacccagaagaattccttcaggtctactccatggtactctacgctgccggagcagacgacaacgcgttggtgaattatttgccaactgcattgaaaggctctacgcgttcatggctgatgcatctcccgccctactcgatttcttcgtgggcagacctgtggcagcagttcgtcgccaacttccaaggaacttacaagcgccacgcgatcgaagatgaccttcatgcgttgacacagaacccgggtgaatccttgagggattatgttcagcgctttaatgagtgtagaaatacaatccccgaaatcaccgacgcttctgcaatccgagctttcaagtccggtaacaacaagccgaagaccagaggagagaagaaaccagccaaggacgcacctgagtcaagcaagaagaacaatcgcaagaatgggaaaaggaaagctcaagcggaagttcttgcagcagaatacgcggaccctcccaagcgcccagacccacaaggtagcgacgcgaagaaagcatggtgccctatacacaagtcggacagacactctctggaagtttgcctcgtcttcaaaaagtcgctcgcaaaacacatggcatcggaaaaaggcaagcgagtacgtgtggtcgagaaggacactgaggcggctactcaggaatcggactcagcatacccagactccgatctccatgtctcgcacatcttcggaggttccacggcgtactcctcaaagcgagaatacaagaaagtggaacgtgaagtctgttcgacgtggcagggggctgcacccaagatgaagtggtctcaacagaagatagaattctcagaagaagaccatcccaagactgccgtcatcccagggcgatatccgatcgtggtcgaacccactattcggaatatcaatgccgccactttggacgcgatggggatcccacgaagcgatggagatcccaccgatcaacccttcaatagaatcactccccagtcatcgtccaaaccattggacaaaattacgttgcctgtgactttcggccaagcaaataacttccgaacggagcagatcacctttgatgtcgctgaattcgatacagcatacaatgccatcattgggagaactgcactcgcgaagttcatggccacatctcactacgcgtatcaagtcctcaagatgccaggaccgaagggaacaatcactattcaagggaacgctaagctagcagtgcaatgcgacaagcggagcctcgacatggtcgagcacacgcccagcccacccgccacagctgagccacccaagaaagtgagcaaaccaaacaagacgccgaaaccggacggcgcaatcaagatcgttccactctccagtgccaaccccgacaagaccgtcaagatcggggcatcactaggcgagaataggaactcacgctcatcaccttcctccgcgacaatgctaacgtgttcgcttggcagccgtccgacatgccgggggtcccttgggagagaggtactccatccagagtggctagccaatctagtcatggtgtggaaggccaacgggaaatggagaatgtgcgtcgatttcaccgacctcaacaaggcgtgtcccaaggatcacttcccccttcctcgaatagaccaactggtggactcaacagccggttgtgagttgttgagctttctcgacgcttactccggctaccaccaaatcagcatggtgaaagaggatgaggagaagacagcattcatcacgccgttcggggtattctgctacgttaagatgccgttcggactgataaccgcaggaaacaccttccagcgcacggtccagggctcaattagcgaccaacttggaaacaatgtcgaggcctacgtcgatgacattgttgtcaagaccaagacaagcgactcattgattgacaatctgcgggaaacgttcgacagcctccgaagatatcgcctcatgctcaatccagagaagtgcacgttcggagtaccattgggcaagctgctcggtttcctcgtctctggcagaggaatagaagcaaatcccgagaagatcaaggcaatcaacaacatgaagtcgcccacaagactcaaggaagtacagaagctaaccggaagcatggcggcactaagcaggttcgtcgctaggatgggagagcgaggacaaccattcttcgctctgctgaagaagcaagacaaatttgtatggacacaggaagccgaagaggcattcattgcactcaagcgctacctagcaaatccccctgtacttgttgctccccaacctaatgaagaattatttctctatattgccgccacgccatattccgttagcactgtcattgttgtcgagagagagaaggtgcaatggccagtctactacgtcagcgaagctctctacgacgcaaagacacgatatccacagatccaaaaactgctctacgcggtaatcatgacatcacgaaagctacgccactacttccaagcccacagggtcacagttgtctcctccttccctctcggtgaagtcgtgagaaacaaagacgttgtcggccatattgcgaaatgggtagtcgagctaagccagtttcatgtccactttgtgccacgaacaaccatcaagtcccaggtactcgccgacttcgtagccgattggactatgcctaataacagggcaaccaataacacagccgagtacgaaggactactcgccgggataagagctacagccgcacacggagtcaagcaactggtcgtgaaaggggattccgaactagtcgcgaagcaggtgcacaaagattacaagtgctctaaccccgagttatccaagtatctcgcagaggttaggaagctggaaaaaaggttcgatgggatcaagattaaattcataggcagcgaagagttgcccgaggacgacgcagaagccgagaaaataacccgtaaagcaaaaatctactatatgatcgacaacgatctatacaagaaagcgccaaacggggtacttcttaaatgcgtctcgtccgacgacggcagacatctcctcctcgacatacatgaagggatctgcggatcacatgcagccggtcgcacattggtcgaaaaagctttccgacaaggttttttctggccaaccgccctcaaagacgcttgcgacatggttcagcggtgtaaagcctgtcaatttcacagtaaacacacaaagctactagcgcaagcgctccagactatccctcttacttggccattctcgtgctgggggcttgacatgctcggaccattcccacgaggacagggcggctacaggttcctattcgtggcgatcgacaaattcactaagtggatcgaagcgacaccgacgggggaaatcaaggccgacaacgccatcaaattcatcaaagggatattttgcagatatggactgccacaccgcatcataaccgacaacggctcccagttcatcagcgccgacttccaggattactgtatcgggctgagagtcaagatctgcttcgcctcagtttctcaccctcaaagcaacggacaggtcgagagggcaaacggcatagtactacaaggaatcaagacccgcgtctacgacaggctcatgtcacatgacaagaagtgggtcgaagaactcccatcagtactatgggcagtgcgtaccacaccgacaacgtataacaaggaaacacccttcttcctcgtgtacggctcagaggccgtgctctccaccgagctaagacatcaaagtacacgagtacagaagtattccgatgaggatcaggaggagcagcgaaacgacgatgtgaatctactcgaggaacatcgcgaacgagttgccgtccgagcagccagctaccaacaggcccttcgccgttaccacgaaaagcacatctga

SEQ ID NO: 13889 - DNA, 284 bp, Oryza sativa
  Clone ID: PAT_MRT4530_19880C.1
tcactgagacctactaaaaagttgtttgaaaagattactggggaagactcatgctatatgtgaacagataatgagaggtaaccaacgccacttgcagacatgtatgaagaattcaagagcaccagttgcggatatatatgggtgtggaagacgaacgataggaggctatttagatgactggacctgcaccaataggatgcgattaacatgatgagacctgggtaaactgttgctggaacacatagagatagtatgccacgctggtgtttgaacatgcatgggtt

SEQ ID NO: 13890 - DNA, 529 bp, Oryza sativa
  Clone ID: PAT_MRT4530_19881C.1
taactgcccaaacatttcatttgagtcggtaaggcttcctatgttggtagacctgagactactaagttgtgaggggatcacgtctgcttccatggctgcaatagcttacagtcgtctgcttgaggcattacaacttgataactgcagtttgttgacatctgtgtctttggatctgccacatctcaagaacataagtcttgttcacctgcgcaagtttgctgagttgactttgcgaagtcctgttctttcttacattaaagtttccagatgctcagtacttcatcgtgttagcataacatcaaatgctcttcagaaattggtgttgcaaaagcaagagagcctatcaagtttgtcattgttatgcaacaacttgatcgatgtcgatcttagtgactgcgaatcattaacaaatgcagtttgcgaagttttcagtgatggaggtggttgcccattgctcagatcattgattcttgacaactgtgagagtctgagcactgttgaactgaatagtagtttcatggtcaatctc

SEQ ID NO: 13891 - DNA, 4406 bp, Oryza sativa
  Clone ID: PAT_MRT4530_19882C.1
gtaaaactttgttgacatttgccatcgttaccgggatgggtcatacttaaatctgtctggtgtcccacatgcagaattactggtgatggaagcgataacatgcttaaggcatctcaagacactaataatgggcaaagggcagctgggagaagcattttttcagttgttgtctgagtgcccattactgactactctgacagttagtgatgcatccctcgggagtggcattcaagaagtaactgttaatcacgatggattacgtgaacttcaaattttgaagtgtcgtgcacttcagaatatctgtcagatgttcccagcttcaaatactctcattgaggcgaactggcatgtgctcatgtgttactgatgagacactgcagatagctaattcatgtccgaatctctctgttcttgatgcatctaactgcccaaacatttcatttgagtcggtaaggctttatgttggtagacctgagactactaagttgtgaggggatcacgtctgcttccatggctgcaatagcttacagtcgtctgcttgaggcattacaacttgataactgcagtttgttgacatctgtgtctttggatctgccacatctcaagaacataagtcttgttcacctgcgccagttggttgagttgactttgcgaagtcctgttactttctgacattaaaatttccagctgctacagcttcatcgtgttagcataacatcaaatggcggaccgggggaggatgaagggggtggagggtggcgagggagggagtggtgccggggaaggggcggaggggagggacggggaggcacgggaggagctggagctcgcgctgtcgctggggcggcgagggtggcatttgccggcagcgcggcgcgagccgccgcccccgcccgcggctatgaggtggacgatgcctcctcattcatgggaccacgacgcagccgggagctcgcgggctgcgacacacgtccctccgcttaggtgtcgcgacatttggcacggagacaatgatgcagggggcgctatagagggcgcggaggagggagacgaggaggacgaggagggagatgaggatggagacagggatctgcagagtaaacggcccaaagtgcgcggcttcggcgaagaaagcccacaacattcaaccaggtaagcttcctttactggactgtgatgaacatctgtacgtctatcacatgtccaacgatgtcagcaggacccacgttgtagtacagatgagttaattgaatttatatcaattatcccatcgagttttcggcaccaaaatacatcggatatctgatggactggtttgaggttcagcttgagaataaatccttttgacgtcagaaacttggaacccctttctgacaaaattttcgggcagttgttaagacgattttcacgcgcctattccgggtttatgctcacattttctacacacatgctcagtagaatgagagcctcaaggatgaagcccagcttgacacctgagtcaactatgtcacatcgttcaccttgtagttcaaattgatcgagatgcctaagcttgctccaccttatcgtcccttcttgtgctcatcagaaattggtggtgcagaagccagtgagcctatcaagatatctcattgttctgctacttcttaatcgatgtctagggtactgactgctgtgcattaagagctgcggtcagcgatgtattaagtggccaagtaggtcgccctttgtccagagcattgattcttgacaactgtgagagtctgagcactgttgagctgattagtatttccatggtcgagctctctctagctgggtgacactccatgacattactatacctttcatgcccaaatctgcaaaatgtgaatcttgatggctgtgatcacctcgaaagggcgtcattttgtccagttggtcttgaatccctaaaccttggaatatgtccaaaattaagtgatcttcacattgaggccccaaagatgtctctattggagctgaagggttgtggtgttctttccgagggatcgataaattgccctcgcttgacatccttagatgcctcattctgcaggaaactaatggatgattcactgtctcaaacagcagaggcgtgcccgctaattgaaaatcttatcctgtcatcatgtgtatcaattgacctcaatggattgtcctctttgcattgccttcataagctggccttgcttgacctgtcatacacatttttgaccaacttgaagcctgtttttgacagttgcccacagttaaagatcttaaaactttcggcttgcaagtatctcagtgattcatcattagatgccctatacagagagggtgctcttcctatgttggttgagctagatctgtcctactcatccattgggcagactgcaatcgaggagcttctttcatgttgtacaaatttggttaatgtgaatctgaatggatgcacaaacctgcatcagttggtgtgtgggtcagatgactgcagttctggtgacatgcctgttgatgtttgtccacctgattcagcaccagtgaggagtgaagagatcagtgaaaggtctgatcgtctgcttgaagttctgaattgtactggttgtccaaatattaagaaagtcatcatcccttcaatgacaacctatctacgcctgtctaaaatcaatcttaatctgtccacaaatttaaaggaagtggatttgacatgctccaatctttatactttgaacctgagcaattgtagctccctggaggttctgaagcttgattgcccaagactgacaaatctccaacttctggcatgcaccatgttgcaagatgaggaactagaatctgcaatatcgcgctgcagtgcattggagattctcaatgtgcactcttgtccaaagataaatgtgctggactttagcagactgcgtgtggtttgtccaagcctcaagcgcatccaaagcagccttatcacataatttgaggctgcgattatttcgaggagagttattgaggcaatagtttgcatccgtgcggccccttccatggacgcgggtgattctagcttagattcagaaacaacaacaaaaaagaagcccttcatggcactcttgtacatactagtggcggcagcatcaccattatatttaatggcaacgtatattaggagccagggggtgacgcgagccgcttctcagttgattctcgtgcggtaataagtagtaccatctagctgaatcctggtgggtgttcgaacttgtaattgtttctgtttccttttcttacctcctgtattccgctcctatggagcgatcagatctgtattccggtttacatatgcgttaataatcatcttggttggatctgaactaaaaaatgcaaagcttgattaaatagtacaaaaatgatgaacaacaatcagcaatatcgcgctgcagtgcattggagattctcaatgtgcactcttgtccaaagataaatgtgctggactttagcagactgcgtgtggctagaaatagacaaactatccggtatccgatgtataccaggaaccagaagacattcaggccaaagaagaatgcaccatctggcaataagggtgtgcagctgaagaagcacattgatgcaaccttaggaagtggtaatttgagggatgcggtcaggctgcctcctggagaggatctcaatgaatggctagctgttaacactgttgatttcttcaaccaggtgaacatcctttacggcactctgatggagttctgcacgcctactacatgtccaacaatgtcagctggacctaagtttgagtacagatgggctgatggaattcagatcaagaaacccatcgaggtttcggcaccgaaatatgtcgagtatctgatggactggattgaggtccagcttgacgatgaatccatttttcctcagaaacttggaacccccttcccacaaaattttcgggaagtcgtgaagacgatattcaagcgccttttccgtgtttatgctcatatttaccacacacattttcagaagattgtgagcctcaaggaagaagcccaccttaacacctgcttcaagcatttcacattgttcacctgggagttcaaattgatcgataaggctgagcttgctccacttatcgacctaattgagtccattgtttccgtttgctgagatgccatcgacaagtgtgaagacctttttcttccttttcttttaatttatttttcgggtacagcaaagtgtgcagaaagagcgagttcatggctaaaagaaatggccaaataagtcaatttttttcttctgattttgtgttccttctcccttctattctctgaatttaagagatgctttgtctcatgaacactgggataaattcaatgggggaatagaggagattgttgttgttctatgct

SEQ ID NO: 13892 - DNA, 302 bp, Oryza sativa
  Clone ID: PAT_MRT4530_19883C.1
gcccgactcctacgatatgaacaccccgccgggccggataatcgatgatgctggagcagcgctcttcaacaacctgggcgtcgcgaatgcttgggaattaagagggtgtgaagccggcatggactccttatcgacgacttacgggtcggcccccaatacggaggcgctcatggaccaaaacaaggcgcaactcgctcaggcctgcgctcaagacgtccttgagactgttggaaacaagtgctctgccaagtgcgtgacaaagccagcatcaagctttgagcggaagctagagcagttgcata

SEQ ID NO: 13893 - DNA, 1965 bp, Oryza sativa
  unsure (1)..(1965): unsure at all n locations
  Clone ID: PAT_MRT4530_19884C.1
tcataactcgcgcgccacgcgcgggagcacgcgtcgagcacgggagagggcgagctgctcctccattcctccgccggcgacgccatataagccgaccagccgaccaaccttctctccctcttgcccttgtctcgtttcgcggaagaaccgaggcatctcgtctcgggttcgctgggaacggaggtgccatcttcggcgccggcgagagaagtcctcgacgccatcgacggtgagcttcatttccgttaaatatgcgttctgtaaccccctctcaatgccgtctctaacgccaccaagaacgcctcttttggtgcagccaatctccgggaacgcgaccgcgtcattactcggaacgccgccgcgctctgggcaccgtcgcatcgctgttgctcgtcgcccggcttccacagtccaccattggtcaggccatctcgccaacatcttcaccagcacccattgaccaagaaccccgaaggaatcggcacgaggtggaccacggtgggagatccccttcttcttccccaactccgaccgccgacgccatttctctcttcctctttctaatctggcaaaatcagcaaccttctttgctgccagagtgctagtgggagaggccctcctcggagaatggatgagagtaggaagacgtggaaagcccaatggaaaatcaatgcccatgaaccgtgcactcaaggtcctagggcagtatatatgagtggtttcgctgacgtggctgtttacacccaaatttggcacctcggccttgccgcattgtcctggacgcgcacctccctcggcctctcgctctgcgctgtacatgctccgcctctcgtcctcgaccaccctggcgtccccctcagtgatggggtggggatatacttcaacaaggagacactggccttccgcatccatctccggctcctctagcgaccgccgcatcgacctggcgtgggacctcacccgcacgcgcttctcgggctcgggttcgcccgagcctttctttgggttcttcatcgccgtcgtcgtcgacggcgagatggtcctcgccgtagagggatttgtcaagacgctgcctaccgcaagatacgggcgaggcgcgtggtgccgccgatgagcctcaggcttgggctcagcctcggtgtcgccggtggtgcagccgacgagccgccgccgcgccgtggtgccgccccgccgctgcagcagctgtgcggctggaatagcggcgtcggcctcttctcctcctcttcctcctccgatgagtatggatggacggactatgtcgacgtcgtgcgtgcatgcatgctgcaatcttagcgtctcagtttcgtgcatggatcttacaaaggtcgggggaggacagcgatgatggcgtgccacgacatcgagatgccgttcctgccgcggatcgacgtgaaccggccggcgccggtgaggggggccagctgcagcaaggaggacgaggagcccggcgcgacctcccccaacagcaagctctccagccgcagcgacgacgaggacttcggcggcagcgcacttgatgatgaagatgaggctgaggaggaggatgaggctgaagatgaggctgaggaggatgatgatgtgatgngaaaaattcaccgcgtggtgatcggggctgatgaaaatgtagccccgtcgtggttgacaggggcggggacagtgaagttttatcaccgcggtgacggggatgtggaggtgctagagtcgccgcaagcccagccgatccacgtcatcaaattttgcacaaaacccctcgttattttcgtatttctaattgagtccaccggcgacgcccatgtccgcttcgactggagcggcggcgccgatgctcccctccgcaagagctactatggtcttgtgctcgtggcccgcaatgcgatgaccagctccccgcgtgcctcgtcggctgctccgctcatcttcgctggatgtgggagcttgatctag

SEQ ID NO: 13894 - DNA, 859 bp, Oryza sativa
  unsure (1)..(859): unsure at all n locations
  Clone ID: PAT_MRT4530_19885C.1
ctgcaggggcgtggcccccgggctgcaggaattcggcacgaaggcgtcctccaccaagatccccttcctcctcctcgccgtcctcctcctcctttccgtcgccttcccagcggaggtgatggcaggagggcacgggcgcggcggaagcagcggcggcggcggaggggtggccggcggcgggaacctgaggccgtgggagtgctcgcccaagtgcgcgggccggtgctccaacacgcagtacaagaaggcgtgcctgacgttctgcaacaagtgctgcgccaagtgcctgtgcgtgccgcccggcacctacggcaacaagggcgcctgcccctgctacaacaactggaagaccaaggaaggcggccccaagtgcccctaagatgcatgctttttttcttttcttcttttttttttaccctatgattaatacctcctcctactagttctacattggtgtcactgcctcactgacactggtttagctcatggatccggttgattagttaaatggtggtggggtttattgctagatctgggcttataagtattagtttatcctgttctagtaaggttgttggttgggggaatgtgtgtgagagaggagagtgaggattcgtcaaagctggtcaaaaacttggatcccctctccctgtagtgattgattgatttgctactactggagtgtgctttgccggaatcatttggtgctctgctcacccagcattgaaatttgagacaatgcttttagtatacttaagtactggagtagtataatttcaaagaaataagtgangggnnaaatatnnaccaaaggagnnaatntttnngaggnnncctgagggggggcgggccccattcg

SEQ ID NO: 13895 - DNA, 216 bp, Oryza sativa
  Clone ID: PAT_MRT4530_19886C.1
gtgaatctaccgcctgcgaagttggagatgtcaccttcaaaaatgatttttcatagacctttgcataaaggcgcacgagaccacacggcgtcgcacggtgatagaccgctcgtcttgcacgatgaaactgcgacaccgaacaatggtgaaatcgaggacgtgcgtgacagcggcgtcagaccatgcggtctcgagcagccaaaccgcgagacctag

SEQ ID NO: 13896 - DNA, 353 bp, Oryza sativa
  Clone ID: PAT_MRT4530_19887C.1
cctccacctaaatgatagactaattatgattgcaaatgtgatatctgattccacacactgtcagtgtcacaagacgaactgacaacaacaacaagaacagagacaacttgaacatcgacaagtagccgatggattgcacgctcacgaatgaccaacaccagcggggggaacgcaattttaaagtgactttctagagacgaacagtagtagtttcattaattatttgttatttgttatcgaatgcacacccatacacattctctttgcaggttggatcattctcatggtcaagtcttttacatcaatggaacggagatcgcctacctcacctacccaagaggcacctgagagta

SEQ ID NO: 13897 - DNA, 1243 bp, Oryza sativa
  Clone ID: PAT_MRT4530_19888C.1
gaaaaaacttgacgcctcaattaagtcttcgccttcctataaaatccccgaattccccacgcccaaaaaccgaagcaaaagaatccccaaattccaacaagaacaccttcgatttcgatccaccaatctaacacaacatccaatatccatggccgattcaggcagcgacgccccgatcagcaaccgccccgaggaggaggtgacggtggagaagacgccggagatggaggcggcggcggaggaggagaggctgaggtatctggagttcgtgcagcaggcggcggcgcaggtgctggtgctggcggcggcggcgtacgcgtacgccaagcagggcgccggcccgctccgccccggcgtcgaccacgtcgagggcaccgtcaaggccgtcgtcggccccgtctacgaccgcttccatggcgtccccctcgacctcctcaagttcctcgaccgcaaggttggtgagtccgtccaggagctggaccgccgcgtgccgccggtggtgaaggaggcgccgggcctggcccgctcggcggcggcggaggtgcggcaggcggggctcgtcggcacggcgacggggctggccaagtcggcgatcgcccgcgccgagcccagggcgcgggacctctacacccggtacgagcccgtggcggagcgcaaggcggcggaggcgtgggcggcgctgaaccgcctcccgctcgtgccgtcggtgacccgcgccgtgctccccgccgccgcgagcctctcggcgaggtacaacacggcagtggccgacggcgccaagcgcggcagcgccgtcgccacctacctcccgctcgtccccaccgagcgcctctccagggtgttcggctacccgctcgccgacgccgccacctcgccggcgccggagatgcagcccatcccgtcgcagtaagcccaccccacacgtattcttcaccgtgtgggtggccaaaatactacttagaacttagctttggatgaattatggaattattattatcttgtactattagtaatgtgtgatcgccttgttgggtcttgttaattgctgcaaattggtcgtgtaatccttgtgttatgtgaacaaccatatgtgtatttggtactattccagttcgacccataatgtttcgttaaaaaaaagaaaatgttgaagtttgggaattttcaacatattcgatctgaagatgtttctgatcaaggaactgtttggtttgtgaatttgccaaaaaaaaaaaaaaaaaaa

SEQ ID NO: 13898 - DNA, 582 bp, Oryza sativa
  Clone ID: PAT_MRT4530_19889C.1
gccagcggtattttggtcttaaaatccctcaaagtggcaaaatatcctgaaagtaatatattgagtggcattttatcatttgcaatgtattgggtggcattttatctaaacccaccgaatggagtggcatattgtcctttttctcagctctgtactgcctaaatccaggatggttactttggttagaaacattttgggttaggaattgttcacagttgaatctaggatggttcatttgatttaggatttaggattagtttatttgaatccaggaatcaggaatggttcatggttgaacattttttttatttaggatttgaatccagccatccagggatggttcatggttcatggttgaacaattgaactttgaaacttgtgattcactgatttctgaagctttgtagcagagttagtatttatcagtgcacatatttagcagagttagcatggtcagtacttaaattggaagaccatattgtagtatttatcagtgcacatattttcaaaatatcaagaagcggaatgttcttttctgaattgtaagatttcttatcatttttccattttctatgctctata

SEQ ID NO: 13899 - DNA, 1653 bp, Oryza sativa
  Clone ID: PAT_MRT4530_1988C.1
atggccgtcgatcctatggaagccagtgattggttgcgcacagtcgagaagaagctagggttgattcagtgcaccgaccaggagcggcaaggagatttgaccgtcgcagagtacctgcacgagttctatcgtttggctcactatgcaccagaagatgtggaaacggacgaagacaaacaagagaagtttctccaggggttaaaagatgagctcgcagtgcaactacttctagaggattatgaagactttgagaaacttgtggacaaagccatgcaactcgaaagtgagcataatcggatgacgaattgcaagagaaggatggttaacaacccagtatttccaggtggtaaccaaagacagcgcactgagccacttcagatcaccggatcttctgttgtgtatccagagttcctgcctcaagaagatggacgcaatgcagacaacaacactagcaatactaataatgatgataccaccaacaaccatggttcttgccccattagtgaccactcgaataaagcgtgcaatgtcggtagcattcgccaagatgtcaacgatagtatcaatgttggaacccagaatgacaaccttagcaattttgacactgagaaagactccaatggtgatagcaacgatggtaccgctgatgccaatgttagcaaggagattgtccacagccgaagcgtaacctgcgccatcactccggccattatgcaagaagaagacagccgcctctcccgcctcgccggagcgtcgtccggccgcgccgtcgcctcctccagcgtcgccgccacctcctccaccccggcttgccctccgtttcgcgaggtgacccccggagctgccttcccgccgtcgccctcctcttttctccgagccggccacctccagccgcacctcccgcctcacctgtgcaccctccggctgcgccgccacctctcccggcgtcgcagctgccccctctccctcggtcagccctccgtttcgcggggaaagcaccggagacgcgtcctcgccggcgtccagtggcgtcgccaccacttctccgcctccggccgcctctgccacccctccacctcgtccactcctcggtttcgccggaacgccatcgccgcgaacctctacatccgcctcgccggagttgttcggccgcccgtccctcctcgcccgtgcaccggtcggccacacctccaccacctccggcatcgcagcggcaaggtcgtcctcggcatcatttcccctccatccaaacccctccgcggtccatcatcgtcgtctccgatcgttctcgtcgtcgacgtcccgtcggtcgcccggctcgtcgtctcgcggcgccgcctccgtcatcgtcatcgtagcggcgtgttccacgtcatcctcgccgccgtgcagccgctgccggctgccctcgtagcctcctcgccggccccggtcgtcgtcgtcctcgtcctctcgtcgttcccggtcgctgcagcccccgtcatcgtcttcgtcctcgcctccgcgtcgtcaagcctcgcgccggccgcgtctcgccttcgtccaaggatcgccgccgaagccgtcccctcgccgttcgtctccgttgcgcccgtctgtctccgccgcgcccgttcgtcgttgtcgttcccacgcctcgtcgcgtggtggtaa

SEQ ID NO: 13900 - DNA, 398 bp, Oryza sativa
  Clone ID: PAT_MRT4530_19890C.1
tctcgagcgcaacatctccctagcattgaaaaagctattgaatggagtgtcaaaggagggccactcaggaacaccgattctgcccgcgtttcgattccatctaccttgaaatacgacgaatcaagggaatgctacacatatcgaactcctctcgaggaaacagaaaaacaccggaaaggatggcatgaaggtccctctgaaaagctcttgccctggccagcgcaaaaggccccattattagctggaactgataggtcggacagagccttaacaatcggccaaacgcaaggaaaggcccaaacggcggcgggccgacacaccggacatgccatacaggaagacgtgcccgaagaacttgcatcgcacatactaaattccacaagccgcaacaaaacagg

SEQ ID NO: 13901 - DNA, 933 bp, Oryza sativa
  Clone ID: PAT_MRT4530_19891C.1
gcgcccacgcgtccgcccacgcgtccggcacagcactgcagtgaaatcgatcactagtcgtggtggtatcaactatcaagtgtgcaagaagaaatggcgggagcagtggcaactgtcagtgtggggctcgcgtggttgggtctcatggccgcagcggcgagcgcgacgcagttcagagtcggaggaggcagaggctggagcgtccccgacgccaacgccgagccgtacaactcgtgggccggcaggatgaggttccagatcggcgaccagctgctgttcgtgtacccgaaggagatggacgcggtggtggtggtggatcagggggcgtacgacgcgtgcaacacgtcgtcgtcggtggccggcggcggcggcggaaggtacgacgacggcaacacggtgttcacgttcgacaggtcggggcccttcttcttcatcagcggcaacgaggccaactgccgcgccggcgagaagctcgtcgtcgtcgtcatggcagaccgcggcggccgccacgcgcctccgccgtcgccgccggctgtgcctcctcccgtcgcgccggtgccgatgccgagcccggcgtcgtcgccaccgtcgcctgcgccagccgccgccaccccgagcttggcgccgtctccggtagctacgacgccgagcccatcgccgtcggtttcacctatggcgccggcgcctgctccgacgacgtcaacaccgagctcgccaccggcgccagcggccatggcaccgtcgccgtcaactacccctggaggcgtggcccagccgccgccgccgccggggaccgatggggcgaacgcgacgacgccggcggcgcccgcagccaacgaccggagtggcgccgccgccgctgctccggtggtggccggcgtcgtcgtcacgtcgctgggagcatacatcggctacgccatgctagctatctga

SEQ ID NO: 13902 - DNA, 283 bp, Oryza sativa
  Clone ID: PAT_MRT4530_19892C.1
atggttacccttatgaaaagggaaatttacatgggtacatagtgtaattgaggttcatgggctcctgatgggccgtcgggcgatcgtcggcccaatagcccctaggcttgatgggccgaaaaggcttcttcagccctcgcgggggcgagcttgctttggcaaagtcatctccctttggcatatactcttcgcgctgcatccttcgcccaagaggcctctggcttggcagagtacccgtgcgatccctcggctctcgctgtccttgttccatagtcttcgccat

SEQ ID NO: 13903 - DNA, 276 bp, Oryza sativa
  Clone ID: PAT_MRT4530_19893C.1
atgtcatcctcacctgccaccctgtccagcgtctaccatgccaagattttcgtcaatctctacatctaccccgttccctcctcccttcgcatggagctcaaggcgggcggtacgtaccgttttggagaggccgcgatacaagcgatcggcccgccgacgccgtcgttagtcgtcactgatgacgagcgcgccacgctcctgcagtctctgacaatgattgagccagcggctggaagcgccgttgttgctgacgagcattctaggaagggcggatga

SEQ ID NO: 13904 - DNA, 440 bp, Oryza sativa
  Clone ID: PAT_MRT4530_19894C.1
gcgttcggcccgcgtcctacagttggcctattgttgcgctcatttgtgttataacttgcgttcaacctagtcagaaaccaagtctggctgcaggtgcagctggtggacgtatcaggatatttatattgacattgacattgtgcaggccatacagctgcagctgctagttcatctgtactttgatcggtacttggatcgggctctggctctggctgatgttatggtggcttttaacgatgcattttactctgggttctatggtgcgccctatggcgttaccaccctcattaccacccttggctgagtcttgacatgattgtggacaggatgttggatcggaggttaaatatcatcttatgtgtcatgatatgactacatgtgatattattggtgatatagatggatttaatgttttatttaattttttaaaaaaataataa

SEQ ID NO: 13905 - DNA, 335 bp, Oryza sativa
  Clone ID: PAT_MRT4530_19895C.1
gctgaggcttatcacgagggtttgtttttcaaacgcttttttatttgttttctttaggggaaggcaatttttttttaattaggcgagacgcatttcgtaattttttttaattcgatctacacgtgaaaactctgtttttgcccgtaagggaaaggaccaaatgaatgctttgcggtcccaaacctaagtactttaaacaacgggttttggtttttgcaaggggcaacccaaaaaatggttccaaaaaattggggcaaaaaacggatttttttattttgtccaacaaatcctctttttcaaagaatggacgtcggcggccaattccttcctgtttt

SEQ ID NO: 13906 - DNA, 232 bp, Oryza sativa
  Clone ID: PAT_MRT4530_19896C.1
atgcaggcggcggcggcggcggcacggacggcgagagggcaaggcgagactcctgggcagtttttttccctgaggtttgaggcagacacaatcgcacacgtggccccgagggacgtcgggcccgagggtgatgcgttcgccctcctcttagtccccccgagggggtcgggccggacccccctcggccccgagggccgaggcaccccgacccctcgtgggttttttgctccgc

SEQ ID NO: 13907 - DNA, 884 bp, Oryza sativa
  unsure (1)..(884): unsure at all n locations
  Clone ID: PAT_MRT4530_19897C.1
caaccagcagcgcaaacaccacaacatcatcacactcctagctcgcatccgtcctgattcgatcatcacatcggctagcaaggtcgtcttcttcgcggcggcgctcatggcggccatggtggccatctccgcgcgcgcacgctccagccgcaactccccgcancaatccacgcgctctcccacgcggcaaaccacgcggcccaccgctcggcccccaccccccgcgcgcaaagcgctcgcccacccgcaacacgccccccgcctcggcaacgccgttgcccgggcaggctgcctccaccggcagctcaccgcgcccgcgcccacacgctctccacgccccgcactcgcttcccccgcccccggccccccgggggggggcgggcccggcccctcccgcgggcccccctcggccccgcgcaaacttgccccaccgcctcgcccctgggcccaaagcccaagccctcgccacggcaccgtgcacgcccccccacctgccgcctgcgcccggccatcccgccggcatggctgagcgacgctcacgcagcgcagcacgccactcgccccgcaattggccccccccctccgcgcaaacgccccacaagcggggcctttggggggttttttgggttttccgggtttccngccttccccgcctcccccccgcaaagccttacccccaacccgcgcccgcgcccgcacggcgccgtccgctcngtccgcgagccaccgcgctacctaccggcgcaggcggctccgtccgcgagcgcagngggcctaacctaacgcgggcgcaaagcccacgcccaagccaaaggccaaagcccccggcgcgggcaaattgaaccccccccgcccggtttggaaaggggcgtggaaacccaacg

SEQ ID NO: 13908 - DNA, 402 bp, Oryza sativa
  Clone ID: PAT_MRT4530_19898C.1
tcacacaaaggacggcgatgctgcagcggcatcggatgagtggagtggtgggagcgtggacggcaactcggcaagcaggagctcagtggtcgcacaggccctcgccaagttgagctcagaggaagcgtccctgtcaccctccctcgacggggacgtcggaagcgagtgcaggcccttacattggcagcgatgtgagcgcatgttctcgttggtgtgggatatcagtggttgcacgagctcgcccgcccacccgtcacctgtcggcctcaactcgtcgcatcccacgcccgcgcgtccatgtggtattctcatggcatcgcttgccatggccgcacgcattatcgacgatgcctcctcgccacccatcgacggcacaatgccctggattggagcttccaccat

SEQ ID NO: 13909 - DNA, 204 bp, Oryza sativa
  Clone ID: PAT_MRT4530_19899C.1
atggcggagatacccgtgcgtcgccctctagggaccggatccaccaacgaggacacccatggtcgaaggtggttctgggtgaccggatgcaccggtgaggagaccgactccgaccgcccccgagctagatctagcataatggagtggagatggcgagaagggagaagggggcggcaacggcttgcaaccgtcccatttccctag

SEQ ID NO: 13910 - DNA, 264 bp, Oryza sativa
  Clone ID: PAT_MRT4530_1989C.1
ttctgcttccctcaggatatccatcccgaaaacctgacgttctcccgtttgatcccacaaaagcggagtgcggcacttccgaccatacatgatgaaatccataccgatttcctcccacttccattcgggaatcttcaaaggctgcagcaaaccggcgggtttctgatgttctgccttgactcgctgacaaacatcacatactgctacgtgttccgcgatttcacgcttcatacttgcccaccaaaatctttccttaagatcctg

SEQ ID NO: 13911 - DNA, 543 bp, Oryza sativa
  Clone ID: PAT_MRT4530_198C.1
gccactgcagctagccaatggtcccctctccatctctcgctgctcctccaccaacagcagccgcgacccgtccgttccttgtcatccccaccgggggacacggcacccttgtggcctcgccaccgtcatcaagggaatcagcagccagggagcttctccgccatggacgccggcgagcccaagagggcgacaactgaggggaatcggcaaccggggagccgagggcgaagctcagcgggacgagcggcacgggggaaggagatcggtggcggcggcggcgagggttggggacggggcggtggccgggacctcgccgggggagcggacgacgacgacacaggcacagctcagcccgctggctccgagacgaggggatcgacaacgacgatgcaggcgcagcccggcccgccggctctgagacgaggtgctcaacaacgacgacgatgcagcgtagcccggcctgccggctccgagacgaggggctcgacgacgatgacacaggcacagcccggcccaccggttttgagatgaggcgcttgacga

SEQ ID NO: 13912 - DNA, 150 bp, Oryza sativa
  Clone ID: PAT_MRT4530_19900C.1
attagagccaaaatgaaccaaacagaggcaaaagaagaccacaggcagataacaaaacagacggggaggcaacgaaaacaacggtgcaatagcttttaccacaaacggaggagcgttgcaacgaacacggggacatgattgcactcaaga

SEQ ID NO: 13913 - DNA, 495 bp, Oryza sativa
  Clone ID: PAT_MRT4530_19901C.1
cggacgcgtgggttttcacattttttcatcgagccagcccgccccgcagcagtagcagagggctagctagctaacaaacaatggcggcggatcatgaattgcgagctgccctattggagatggtggtggcggcggcgctgggcatggtgtcgacgtcgccggcgcacgtgtccgcgggggcgatcaacacgacgtgcccgatcgcggaggacatcttgtacaaggagatgaccagcatcctcgccaagtcaccggagctcgccgggccggtgctgaggctcttttccgtggactgctgcgtgggcggttgcgaggggtacatcctgctggactcgaccgccggtgaacaaggctgacgaagactccccgttgaacaacggagcgaaagggtacgaggcggcggacgccatcaaggccaagctcgacgccgcctgccccggcatcgaatactgcgccgacaccctcgcccttgccgagccggaacgaatgatgcag

SEQ ID NO: 13914 - DNA, 1812 bp, Oryza sativa
  Clone ID: PAT_MRT4530_19902C.1
ctgcaggaggccgccgcgggccccggggcactcgctcgtctcgtctctccgctctcttccggacttccactagtcgcacactagcactcgccactcgccagtcgctacgactagtagctccacctctgtagcctaaagcccaccccccaacaccaccctctgtgaagtagcttgtcctcttcgccgaggccgaggtgacgcacatggcgctgcctcctcctctgctccgcttcttcatcgtcgccgtgctgctcagctcggtcgccgcatgggtggcggcggcgacgacgctgcacgagcgcgacgcggcggcgctcagggacgtccgggcggggctgcgggacctgccggggtcccggttcttcgaatcctgggatgacgccaccgacccgtgcgactatgccggcgtcgtgtgcgagcccgacgaggacgacccggccgcgctccgcgtgtccgtgctgacgctcggcaccggcctcaccgactctcccggcctggctggcacgctcccggcctcgcttgccagcctcactgcgctcacggacttcgtcctttatccaggacgcgtcgcgggagctattccgacggacattgggtcgggtctccggcgcctcaggctgctgtccatgtccggcaaccagctgaccgggcagatacccgagtccctcgccgggctgccagatctgcacacgctcgacctcggcaataaccacctcgacggctccattcccagcggcttgctgctgccgtcttcgcagagcctcaaggtgctcatcctagcgaacaatggcggcctctccgggcagattccagaccaattttccagctcacagcttttccatgtcgacctaagccggaattccatcactggctcgctcccaccgctggcgcagacagtccgctacttctccgtcgcggcgaactcaatgcaggggagcctcgacggcgcgttcggcaacggttcggctccgaccgacttggccttcctcgacctctcgatgaacaacttctcgggttcaatcccgcgggagttgttcgcgctcccgagcgcgtcgtcccttcttctgtcccgcaataacttcaccgggtccctcgccgtgccagcgttcgcatcggagcgtgccgcaacgccgccgtggtcggttgtggacgtcagccacaatggcatcacgggggaggtcccggaggagctagcggccgtggagagcctgtacgtgaacaacaaccggatgtacggcgaggtgccggaggcggtggcccgtagcgtgttcgccggccgcatgacgaccttctacgcgcagcacaacttcctgacgggcttcccggtgccgccgctgccgctgccggactccgcagcgctgtgcctctcttacaattgcatggagctaccgtccgcttctgccgccaacgggtgccccaccatcggcggcccaatggagtccaggcccgccgaccagtgccggagcagcaccgcagccaacgccggcagcagcggaggggacggctgagccgccaacattcctcaaggctgacaggtggggcccacctggttcagctcatcagctgggcacgggtgggggcgtgaggaagggacggccaggatagctaagcctggctcgcacattttcgttttgtccgtttgtttcgggtgtggttttcatgtgattgggtttgaattcatcggcatccgggcttgtcgtcgggcgcgcaacggttacacggctacaaggttagcgcgttcttgtgcgtgtgtgcaattactcgctctggtagtttgtacgctgcgtctgtgttactctgttcattgtgagt

SEQ ID NO: 13915 - DNA, 1050 bp, Oryza sativa
  Clone ID: PAT_MRT4530_19903C.1
atgttggacggcggcttcatcgagctgaagctccggtacgaggacctcgccgccggcgacttcgtccgctccgacgacatctacgccggcggccacacgtggcgtgtcctctgctaccctcgcggcggcggcgcgatgaacagcaatggccagcggatcggcggcgagtacctctccatcaagctcgacctcgtcacccggtccaccaatgtcagggccatcttcgccgcgttcctcgtccacctcgacggccacccgtccccggtccacgccaagagcttcgtcgccgtctaccctctcggcgccggcggccgcggcggcggcaaggccgccgccgggtggatgtacttcgcgtcgcggagcgagctcgagaagaagttcgtgtccggcgacggctgggtcaccgtcgtctgcggcgtcctgatcccgagcgacagcccacaggcgctgtccccgccgccgccgccgcctccgtcgtccggtggaggaggcgggcacatcggccgcctgctctacggcgccgccgacgacaccgcggacgtcgcgctcgtcgtcggcggcgagacgttccgcgcgcaccgcgccgtgctcgccgcgcgctcgccggtcttcaaggccgccctcttcggctccatggcggaggccaccgcgccgtcggtcgcgctccgggacatggacccggcggcgttccgcgcggtgctccacttcatctacacggacgcgctgcccgacgacatcgacgagctcgccggattctccccggtggacatgttccagcacctgctcgccgcggcggagcggtacgagctcggcgggctgaagctgctgtccaccaagaagctgctcgacaacgtcacgccggagaacgtcgccgggatcatcgtctgcgccgagacgtacggctgcccggagctgaagaagaagtgcctcgactacctcgcgcgcgaggacgaacacttcaggaaggcggcgacgacgcaggggtaccttcgattgttgcaggatttcccttccctcatggatgaaatacgagctgtgattgagagatga

SEQ ID NO: 13916 - DNA, 311 bp, Oryza sativa
  Clone ID: PAT_MRT4530_19904C.1
cgaattcgagctcggtacccggagatcctctagagtcgacctgcaggagtggtaacttgtatgaggttgactccgaagatatgaatcatgagaagttctggaacggaagcatcattaaactaccgcaacctagtctgagtcagctaaaaggtgcgccctggttcaagtcaggtgaagagaagattccatccgcaacaggaggtcgagccaagcagtccagagtggagaagttttgctaggcaagttcgttatagaagacgcgacggaagaagtcagacaagaggagaagaccgcccaacctatcttcatgc

SEQ ID NO: 13917 - DNA, 804 bp, Oryza sativa
  Clone ID: PAT_MRT4530_19905C.1
atgatgtcatcggacgacgaccttgagccgcagctcaaggcggtggagaattactacttcgttgacgacaacgatgtgccggtatccttcgatgtcctgccgttccagttcgatgcggccgagggggtcgcgtcgttcaagaaggatgtgtacctgcgggggttcaccgacggcggcctccagaaagtctacaagcaggtggttgcctggaagctagtcctagatggagactcgcctgagatcgcggtgctttcgacggagggcagttggattgccctgctgaagccgaggcctagctacgaggagaccatccggtctgtactgatcactgtcgaaatgcttcacttcgtccgaaggaggccaacggattccgagaaagacatgtgggatcacctctatggggtttttgagagatttgtggttaggcccttagaagatgactttgctaatcatcagaatttaataaaactctttgctcagagggacccagatttagcaaattcacaggttttgcaagtcttcatcaaagacaagattatggaaaagaccaatgaggttggttcaaataatctggataataaacgagagccagacattaaacaagagccagacattaaacaagagccggttgctgctggtgatgaaatggaggagatagttgaagaaggcattccagatgcaccaagcaatgatgatgatgatgatgaagaggatgaggaggatggagatttgtttgattcagtttgtgctatctgtgataatggaggggagctgttatggtatgcgctcttctactttccttaa

SEQ ID NO: 13918 - DNA, 754 bp, Oryza sativa
  Clone ID: PAT_MRT4530_19906C.1
atggaagggcctatgcaacggatgccgctccacaggccagagtacttgttcggtgttgagggttttgtccgggagttgcgaatggtggccttcgccataggattcaagactgcccctctttatgcccagattccccatgaccgtaacgaggagaaatgccgtgtcaaggtcaccttaacaagtgatctgtgaggatatcccatcggtgatgtttgaagctggacgaagaaggtgtgcacatgcttgtcagtaggtagcaagggtcaccattggagaatttcgcgatctctacattgaggagttggtcaatacggagtatcgctaccatccccgtaaaacccatgatcgagtccaagccagttacgtggatcctgaaggaattgaagacgatgctactttgtgccatgtggtggaggaagccgccccagttcgtgtggatcctcccgtcattattctaagcggtgatgaggaagaagacccaaaggagaaccacactcatttagaggttaagtggggtgctactcaagatgatgatggagagccttcaggaagtaggtccaacaacaatggagaaaacccaacacttgctcaagttctagcctagcagactcaactcatgaacaaaaccaagggaacaatcttgctcctccttagaacaagttagcataatttttacgtgtcaggccacccgatgtaggaaattgtaaaagcggatatcaggatatgggcactggatgataaaaggagtgaaaag

SEQ ID NO: 13919 - DNA, 339 bp, Oryza sativa
  Clone ID: PAT_MRT4530_19907C.1
atggtggaggatagtagtgaccacgttgctgaggaccagcttgcggaggaggaggagcactacatcgatgacgccaaccacctcgtccccaacagcgtccaagaggagggatccagtggtcgcgacatcgtcgtccccggcaaccacgatggtgaggaggactaccctgacaaccttgaccttgacatactcgtcgactgcgaagtcggccctatccccggtggccacctcaacgctgatgccgccgtctttgtccccaccaccggtgggcaccaggacctctacactgccagcgccaccgcttaccggcatacatcaccttgtttgcactcgtcgtag

SEQ ID NO: 13920 - DNA, 207 bp, Oryza sativa
  Clone ID: PAT_MRT4530_19908C.1
atggacagggaggagcgcctgacgcccagccatctgcccatgccggttgaacctgcgttcgtgagcccggtcctttcccttgaaggcctcaggccgggcgaaggggagggctccccagccccggtccgtcccaagatcgcccccgaggaggaagggaggaggctgccagcagcgccgacggcgtggagcggcgacggcgcgggctag

SEQ ID NO: 13921 - DNA, 518 bp, Oryza sativa
  unsure (1)..(518): unsure at all n locations
  Clone ID: PAT_MRT4530_19909C.1
atgccaaggggtcatcagnggtagtaccagcctggatggtcgggcgacgnngcgacgccgnatgcggcgtgctcactcgnnccccggcggnacgcncnntcggggcagggccgcgccaccctgcggcgnngccccgtcgtggnagggtcgacgaccgcgtacccgacagcaagggtcaagnaatcggcgagggcgctggnagnngcggcggcgaggggcggttctggggacccagcccgtngcgcgggtctcgacgtcggcggcgataangctccgcgngaggggcgagcgcgggcgccgggcgtcgtgccccggcgtgtcgtcgccgagcagggcgcagnngcggcggcggacgtcccaacgccggtgnccgctgcccgcccgtcggagggacacggcgatcaccatcggcgacgtcgctcgcggtnccgtctcgtgcagcatcngatcaacccgccgcgcncttctatttgcacntgttgatcttactcggccatggcctcctgcgcctcggttct

SEQ ID NO: 13922 - DNA, 201 bp, Oryza sativa
  Clone ID: PAT_MRT4530_1990C.1
gggatgatcaaaagtccatatttgacaagggtaacagctgccttatggcaaacataattcgtggggaaaggggagggacaccttacaaaaaccagggaccaagtttacccctcaagagacacaaaaaaattcaggtaaaaaaggggggaaaaaaaactccaaacacctaccccaggggtcccaccccaccaaaggggggaa

SEQ ID NO: 13923 - DNA, 189 bp, Oryza sativa
  Clone ID: PAT_MRT4530_19910C.1
gaaaattaaaagcctagagcctggggggcacaggttcttggcactatttagcaaagatttgaactataatctatacagacctttcaaaaagtatctggtcaagggaaatgccaaaatcaaatgcaagccagtatatacattgacaagccaaactttatgagggacataaaacctttttattcccttact

SEQ ID NO: 13924 - DNA, 257 bp, Oryza sativa
  Clone ID: PAT_MRT4530_19911C.1
aaaattgataaaaaaaaaaaacaacgaaaatagaaacaaaaaaaaacaggcaaacaaaaaaaaaaaaagaagaaaaaaaaaaaaaaaagggcacacacaaaaaaaaaaagggcagaagcaagaaagccaaataagctcgcccaatgcacctgcccggcggccgggcaccagggtccggcgagcaaacgctcaagcccatagagccaaacggaacggaaaacacccgacaggcaagagaagaacaccacgcccgcgac

SEQ ID NO: 13925 - DNA, 2124 bp, Oryza sativa
  Clone ID: PAT_MRT4530_19912C.1
tctcgcctgcctcctcctcctgctcctcctgctcactccttccggccccgatcctatagctcctccgctcgccgcggggatctgcttacgacgaggcccggcacccccgccgccgccggatcgtggtttggcgcttcagacccgtgcgtagcgtgtaggatcaattggcgctccacgttccccgatgttgccgaattttcagagtttgttgggtagattgacccccgctacctccactgtggagcaggcttcttctacaatctcaaacatggttgttgcaaatggtaatgtcgacacggaggaaggaactcttgagattgggatggagtacaggacagtctctggagttgctggtcctctagtcattcttgataaagtgaagggtcctaaataccaagaaattgtcaatatacgattaggagatggcacaactaggcgtggtcaagtgcttgaagtcgatggggagaaagctgttgttcaggttttcgaaggaacatctggtattgacaacaaatacacaactgtacaattcaccggtgaggttctaaaaactccagtgtcactggatatgcttggacgtgtcttcaatggttctgggaaacctatagataatggcccaccgattttaccagaggcttacttggatatttctgattttgacatcgggtttgctggtgcaggaagttctatcaatcccagtgaacgaacataccctgaagaaatgattcagactgggatatctacaattgatgttatgaattctattgcccgtggtcagaagatccctctgttttccgctgctggtctcccacacaatgaaattgctgctcagatttgccgtcaggctggtctggtaaagcgtttagagaagagtgacaatatcttggagagttccgaggatgaaaattttgcgattgtctttgctgctatgggagtaaacatggagacagcacaatttttcaagcgtgattttgaggaaaatggttcaatggagagagttaccttatttcttaatctggcaaatgatccaactatcgagcgtattatcaccccaagaattgctctcaccacagcagaatacttggcatatgagtgcgggaagcatgttcttgtcatcctgactgacatgagctcatatgccgatgcacttcgtgaagtttctgcagctcgagaggaagtacctggacggcgtggttatcctggttatatgtatactgatttggcaactatctatgagcgtgctggtcgcatagaaggaagaaaaggatcaattacgcagatacccattttaaccatgcctaatgatgatattacacatccaactcctgatcttactggttatatcactgagggacagatctacattgacaggcaactacataatcgacagatctatccaccgattaatgtccttccttcactctcccggctcatgaagagtgctattggtgaaggcatgactcgcagggatcattctgatgtctcgaaccagctgtatgccaattacgccataggcaaggacgtacaggcgatgaaggcagtggttggagaggaagcgctgtcatcagaggacctgctgtacctcgagtttcttgacaagttcgagcggaagttcgtgacacaaggagcatatgacacacgcaacatcttccagtcgcttgacctcgcctggtcactactgcgcatctttccccgagagctgcttcaccgtataccagcgaaaacccttgaccagtattatagccgtgatgcctcccactgatctgcaaagggtcgtgtgtaataagaaaaaaaaccatcccggactcccacttcttctctttcatttttgccaccaatgcattcattattttttgtgtaaaaaacacgaattatctagtgatgtgggcttccatcattgttgtcccaagcacaccatgtatcatatttatcttcttttttggaagaaaatgtattattttcttgccgtggaaaaatgaataagtgaggacgagtgagctagggatttggttaatgtaagaacacaatgaaataagccatttgcctcatggttttcgcctgtcaaaaaaaaaaaaaaaaaaaaaaaaaaaaagaaaaatcaagggcggccggggtagagtatcc

SEQ ID NO: 13926 - DNA, 621 bp, Oryza sativa
  Clone ID: PAT_MRT4530_19913C.1
atggcagtagtgtttagatatgttgacagctttggaattgtgaaagagaggtttgttggtttggtccatgtgaaggaaacaacttcctcctacctcaagactgtcattgattctttatttaccaaattcaagttgagcatgagccaagtaagaggacaaggatacgatggtgctagcaacatgcgatctgttgttagaaaacataaaggtgttagcaatttctttagcatgatttctaccttattaaatgttgtgggtggatcatcaaaaagaagagatatgattagagatatcaataatgaggaagtggctaagtctttaggatgtgggctaattcaaactgggagtggattaactcaagagcaatgccttaaaaggctcggagatactcgttggagttctcattacaaaacactaaaaagtttggttgacatgtttccgacaattgtcaaggtgctggaatatgcgtcaaatgatgaaagggatggttcacatagagatcaagcaaacggtcttctagtctattttcaatcatttgacttcgccttttatttgcatctcatgttgacaacattgatgatcacaaacacattgtcattagcaatgcaacggaaggattag

SEQ ID NO: 13927 - DNA, 174 bp, Oryza sativa
  Clone ID: PAT_MRT4530_19914C.1
atggcattactccttgtcgttgatgtcgtggctatccgagattggtcctggcacccggctttgtcagggaggagggtcatcgagatgcatcatgatgagtacggtgcggccgtcaagaaggagaaggtggagccggagattgatttggaggaagcagccgactgtggagcctag

SEQ ID NO: 13928 - DNA, 3414 bp, Oryza sativa
  Clone ID: PAT_MRT4530_19915C.1
atggccctcgccgccgccgccgccgccgcggcagccgccgcgctcccctctctcctctcttgcggtcgacgcagccgctccccctcacgcgatcgctccccgtcgccgccgccgccgccgccgccgcgctcgctcgctcgcttcttctctctccctccccgcgccggcggggcgcggttctccgagcccagctgtgcgtgtatcgtttgatgcccctaggaagcccccgctgagctcgacgggtagagatgaatttcctctaccggacttcgcagcctgttgcacatgcgcaccgcgccgccgccggacgtcctccaggccattgcgctggcggaggcggaggccaagaaggccaagaaggacccccgcaggagccacaagggcgccgccgcccttgccacccccgtcgccaatgccaaggtgagggagaggaaggccgcccccgcgacggcgccgcccaagttctccaaggccgcgaggagattctacaatgagaatatcaaggagcacgaaccgcagcggctcgccaaggtccttgccgcggcaggagtggcctcacgaaggacatgcgaggagctcatcttccaagggaaggtgaccgtcaatggttctgtctgcactgcaccccagaccaaagttgacatctcaaaggattctatctatgttaatggaaaccgcatttccaagaagcttcctccgaagttatattttgctgttaacaagccaaaagggtatatttgttcctgtggtgaaccaaagtccattatctccttatttgatgactatttgaagggttggaacaagattcaaccaggagtaccaaaaccgcgcttgtttactgtgggtcgtcttgatgttgctacaagtggtttgataataattacaaatgacggtgagtttgcccagaaactctcacacccttcgtcaaatataatgaaggaatatgtggtaactatagatggaccagtgcacagaaatcaccttatagctatcagtgaaggcacaaaaattgatggcgtcaaatgtatacctgatctagtggaaccattggatgtacaatccaatacaaaaaggacccggattagaatagcggttcatgaaggaagaaatcatgaagttcgtgaactcgtgcagaatgcaggcctagaggtttatgccttgaaacgtgttcggataggcaggttcaggcttccaccagatctcaggttgagggttagtgatagaggctacactttatcaatatatatggtggtggagatgggatattgtcaggttgagggacgggtagagatgaatttcctctaccggacttcgcagcctgttgcacccgagcttccgcggattccagagcaagatcagcaaagggatagcctacaaaagccagttacaactctggagggccttattgccgatgatccatatcacccctcccctgaagatgaagatactgataatggagatgtagatatcggtggggactctgcagatgcagattcaaaaaattcagttcctactggaaagcataccgatgttttggatgacgaaggatggatcacaattccgaacaaggagcttcctgataactggaatgacctttcagacatgttgcagttacagcctttggaccgccccttcctttttcctgaaaatggtgatagtaatgtaaagaatggagagaatggttcccaggttgttgaggatgacatgcaaagtgttgaactcaacagcgaaatgtctcctatgacacaagatgacatgcaaaatgttgagctcgacaacgaaatgtctccttcaaaacaagatgacatgcaaaatgttgaactcaacaacgaaatctctccttcaaaacaagatattttggagaccgaatctctccttcgattggaagatcacaagcaacaaattgaaagtatgcttcaaagattcaaaatgtccaatttttttgtccgaattgcagagtcagatgaacctctctggtccaataaaaaactagctgtatcaaaggtgccaaaagagcaatcatattcagacaaccaggaaaacaataagggttcaaggagtaatgcttataataccatttctgataaaggagtttttgatggtagcacatctggaggaatcgctcgtggtacagcaaggtgctatgctctgcaaaatggagacatcgtggttgttttgcaagtgaatgttggtgttaacaaaatggaagctccagtgctagaagttcttcaatttgagaaatcttcatcaagcaattatataaccaagaatctggtcaatggactttctagtgcctcctccactcaaccacccaacattaggccaccaccaatttctgaaagtcaagaatttgtgcctgaaaagcctgcgaaaacacctgatattataaatgatggacaactttcctttagaggagttccattggagcctgaacggtattccaatatttctccacagcatgtgaaagatatagttgtattggtagatgcaattacaattgtctttgaggaggcatccaaaggaggtgctcctttgtcactcccaattgccagtattgaggttgggcacgggcatagcttaccaaatcttgcactcaggagaggcgaggagcactcttttattctcaagccagcaactatgtcgtttagggaccggaggaccaacaatgatgcacctctgactttgtcactccctaagatgaatggaactgccacaaatgtttctttggctaaggttggcgagaccattggctctcttatggatcagtatgctgtacttgtatcatatcgctgcaattacacagaatcaaaacttttcttcaagcaggccaccagctggcgaccctgtgttgctagtgaccttatgatctctgtatcatcagaactgtctttgcgaaatcctatttcgagtgctcgagttcctcaactcccagtgcaggtcttaacccttgaggctactaatatgacatcagaaaaccttaccgtaacggttcttgctccagaagcgtctggttcttcttcagttgtatccttgaactcagctccaaccacaccaaatagttcgtatgacaatcttaatgagtctgtgagaagatctggcttgggtaaacatcgagctggttttcgaagaatgaattcagtccttgctggctcaccaaaagaaagtgacaatggaggaaatagaattagcacttctggaggctgtactcatctgtggttgcagagtgcggttcctttagggtgtattcctgcacgttcaagcaccaccgtcaagcttgagctacttccattaacggatgggatcattacactggatacacttcaaataacgataagggagaaaggtcttacatacataccagagcactccttggagatatatgcgtcagctgccaattcaacgggaagttcatag

SEQ ID NO: 13929 - DNA, 645 bp, Oryza sativa
  Clone ID: PAT_MRT4530_19916C.1
atggggctgcaagacgtggctgatgatggagaaggaggatggcacaagcaacggctgcacgacgcggtcggcggccagactggcgcatctgatggcggcagaggccagcgaggtagcatgcggtggtcagctgcgccatcagcaagggagctagggagctgcaggaggtggcatggacgtgcgggagaccgtggcagggctggctggcggtggggtgctggtgcggttgagtttgagttggcggaggttgtgcaagtggcggtgctcgggggtggcggtagcaggtgtggtgtggaggtttacagggtgtggtgcgaggagctgccagctctcgctggcggcgtgcatgttttcttttgtttttcctggttacaacctctcaaggcgccggcggcacgcagcggcctcttccacgcgcacaacggcctcctccacgctgcggcggtggaggcacgggatccgcgtcctcggccgacgacgacgacgagggcaggagcgatgtcctcggccaacgaggaggaggaggaggtggcgatagccgggagcggcagcgctgccgccgattttaggacccctaggtgcgtgagggccacccacctgctcgcgaaaaccggttttgaccgcacgcgaaaatctttctcgtag

SEQ ID NO: 13930 - DNA, 389 bp, Oryza sativa
  Clone ID: PAT_MRT4530_19917C.1
aaaaaaaaaaaaaaaaggaaaaaaaaaaggggggaaaagagaagataaaaattttaaaaagaaaaaggaggaaaaaaaaaaggggttaaaggaagaaatttgggaggggggcgggagggggaaaagggctgccaattgggggaaagaaaaaagcggggggaaatttggggaaaaaggggttctttggggaaaaggggaagggctgagaagtggataaaattgggggccggaaggaattggggtaaaacgaggagggcctaaaggggggggaaagttaaataaaaaagggggggggttcctgggggctgatcacccgtaaaaaatggtgggcgcgttctgcccagggttagggggcgtcacccgtggggtgggtggtgggtggtttgggg

SEQ ID NO: 13931 - DNA, 209 bp, Oryza sativa
  Clone ID: PAT_MRT4530_19918C.1
ttatttgcgtgaaatcccctttctcttgggtgggttaatataaaaaaggccgcgcccgatcgcctttccctaccatacctcatcctttatatggaaagggaaccccccctttcttgtgccataaaattcagcggggtgggggggttactcacaccgtgccctatcctttttcctggcccctacccccccctcctttcctttacttcctt

SEQ ID NO: 13932 - DNA, 2610 bp, Oryza sativa
  Clone ID: PAT_MRT4530_19919C.1
tcgccgccggcggcggcgtcggggactcgcctcctccacggcgacctcgacctcaccatccacgaggcgcgcggcctccccaacatggacttcctctccaccctcctccgccgcctctgcctctgcctccggccgccggcgagacggcccagccccggccagagccgcggctctgtcccggccgacgaagacggccgccgccagccgcacggccaccacctcctcccgacgtccgacccgtacgccgccgtcgtcgtcgccggcaacacgctcgcccgcacccacgtcgtccgcgactccgaggacccagagtggtccacccatgtcctgctccacctcgcccaccacgccaccggcgtcgccttccacgtcaaggacgccgaccccttcggctccgacctcatcggcgtcgccatcctccccgccgccgacgtcctcgccgcggccgccgcgcccatcgtcaggagggagctccccctgtaccgccccgacggccgcgggaggccgaagcccagctccgccatcgtcatcaccgcctcgttcgtccccgccggcgagcatcagagcatctacgacgcggaacacggcggcgtcccggcggcctacttcccggcgcggcgcgggtgcgaggtgaagctgtaccaggacgcgcacgtggccggcggcgagctggacggcgtgcggcggcgcggggtgttcgagccggggcggtgctgggaggacatgtgcctggcggtgctcggggcgcagcacctggtgtacgtggcggggtggtcggtgaacaccaaggtgcggctcgtgcgggaggcgatgtcgccggagatggcgggcatgtcgctgggcgcgctgctcaagtacaagtcgcaggagggcgtccgtgtctgcctcctcgtctgggacgacaagacctcgcacgacaccttcttcctcaagacaggcggcttgatgcaaacacatgacgaggagacgaagaagttcttcaaggactcgtcggtgatctgcttgctgtcgccgcgatacccaagcagcaagctcagcatggccaagcagaaggcaagatataattaattactcaccagcgtgcagattgtggggacgatgtacacgcagcaccagaagtgcctgctggtggacacgccggcgtcggggagcacgcggcggatcacggcgttcctcggcggcctcgacctcgccgcggggcgctacgacacgccgtcgcacaggctcttcgccgacctcggcaccgtcttctccggcgacgtctacaaccccgcgatcccgccggcggggaacaagggcggcgccggcgaggaggggccgcggcagccgtggcacgacatgcactgccgcgtcgacgggccggcggcgtacgacgtgctggagaacttcgagcagcggtggaggaaggcgacgaagctgttcagaagggccaaggcgcactggaaggacgacgccttgctcaagctcgagcgcatctcctggatcctcagcccctccgactccggcgccggcgacggcgacggcggcgacagccacctctacgccttgcccgatggtcaccccgattgctggaacgctcaggtgttccggtcagtggactctggatcagtgaaaggattgcctcgttgctgggagacaaaagaggcgaagcacctggtgtgcgacaagaacgtgacggtggagcagagcattcacacggcgtacgtccgggcgatccggtcggcgaagcgcttcatctacatcgagaaccagtacttcatcggatcatccttcgcatggccatcctacaagcaccaaggtgctggaaatctggtgccgatggagatcgcgctgaaggtggcgagcaagatcgccgccggcgagaggttcgccgtgtacatcgtgatcccgatgtggccggagggggttccaacctcgggccccatccaggagatcctcttctggcagaggcagacgatgcaggcgatgtacgaggtgatcgcggcggcgatcagggcggcggggatggagggcgcggcgcacccgcgggactacctcaacttctactgcctcggcaagcgggaggcggcggcggcggcggcggcgggctcgccggagcaggagcacaacccggcggccagcagcgcgcggcggcaccggcggttcatgatctacgtgcactccaaggggatgatcgtggacgacgagtacgtcatcgtcggctccgccaacatcaaccagcgctctctcgccggctcgcgcgacaccgagatcgccgtcggcgcctaccagcccaatctccgcgccggcgccggcgccggcgacggccaggtgttcggcttcaggatgttgctgtgggaggagcacctgggcagcagcgagtggcgggagctgaggtcgccggagtcgccggagtgcgtgaagcgggtgaacgagatagcggcggagaactggaggaggtacgccgccgacgacgacgatgtcgccatgcaggggcacctcatgaggtacccggtggacgtcggcgacgacggcaagatcagcgagttgcgcgggcacgagttcttccccgacgtcggcgggaggatccttggctccaccaacaacaactactgggattatctcaccatg

SEQ ID NO: 13933 - DNA, 3720 bp, Oryza sativa
  Clone ID: PAT_MRT4530_1991C.1
atgccgatctcagctgagccatcgatgaccagaaacgagaacgcagtggctataacccaagacgactccacgtcgaaaggtcctcctgccgaagcggagaacagaacatcgacgatatccgagctcgagaaggattctaatgcggccaaaccttgtcgttccgacaagaaacacaagccgacaagaataacttccgaagcgacagggtcctggtgccctatccacaaaaccaggaaacatactttgcaagcctgctgggttttcctcaacgcccgcgccgagattcgcgcatgcaaagagcgtggaattcagcgtgtttctccaactcgtggtgtctattgtcctattcacaagacaaagaatcatgacctctcaagctgtaaagtttttctcagcgtcacaaatatgtcatctcctaaggtattggctatcgacgggacaaacacatcagcacgcgctaacaccgaggcggaaaatcaaacgactacaccggctcagcacatcaggaccctcaatgcaatactgagggaaaccccttatgaccccgttctaaacgatgatctcgcacaatggacagaacgattatgggaatcagtgaccaacctcagcaacgcgttcgaagaggccgttgctgcatcccacccggaacaacaaccaactggtggtatcaacgtactctatgctgccggagcggacgacaacgcgttggcgaattatttgccaactgcgttaaaaggctctgcgcgttcatggttgatgcaccttccgccctactcgatttcttcgtgggcagacctatggcagcagttcgtcgccaacttccagggaacttacaagcgccacgcgatcgaagacgacttacacgcattgacacagaactcgggtgaatccttgagggaatatgttgggcactttaatgagtgcagaaatacaatccccgaaatcaccgacgcttctgtaattcgcgccttcaagtctagtgttagagatcgctacactacccaggagttagcaacgaggcacatcacaactactcggagactattcgagattgttgagcgatgcgcccacgttgacgatgcgcttagacgcaagaacgacaagccaaagaccgggggcgagaagaaaccagccacggagacacctgagtcaagcaaaaagaaaaatcgcaagaatgcgaaaaggaaagctcaagcagaagttctcgcagcagaatatgctaaccctcccaaacgcccagacccacaagcatataacgccatcatcgggagaactgcacttgcgaagttcatggccgcatctcactacgcggatcaagtgctcaagatgccgggaccaaagggaacaatcactattcaagggaacgcaaagctggcggtacaatgcgacaagcggagcctcgacatggtcgagcaaacaccaagtccacccgccacaactgagccacccaagaaaatgagcaagacaaacaagacgccgaaaccgaacggcgcgatcaagaccgttccactctctagtgccaaccccgacaagaccccgtccgacatgccgggggtccccagggaggtgatcgagcacaaactcatggtgcgacccgatgccaagccagtaaagcaaagactgcagagatttgcaccagaccgaagacaagccatacgagaagaactcgacaaacttctcaaggctggctttatcagagaagtacttcatccagagtggctagccaatccggtaatggtgcagaaggccaacgggaaatggagaatgtgtgtcgacttcactgacctcaacaaggcgtgtcccaaggatcacttccctcttcctcgaatagaccaactggtggactcaacagccggctgtgagctgttgagtttcctcgacgcttactccggctaccaccaaatcagcatggcgagagaagacgaagagaagacagcattcatcacgccgttcggggtattttgctatgttaagatgccattcggactcataaccgctgggaatactttccagcgcacggtccagggcgcacttagcaaccagcttggcaacaacgtcgaggcatacgtcgacgacattgttgtcaagaccaagaaaagcgactcattgattgacgatctacgggaaacgttcgacaacctccgacaatatcgcctcatgctcaacccacagaagtgcaccttcggagtaccgtcgggcaagttgctcggcttcctcgtctctggcagaggaatagaagcgaatcccgagaagattaaggcaatcgagaacatgaagtcgcccgcaagactcaaggaagaagccgaagaggaatttattgcactcaagcgctacctatcaaatccccatgtactcgtcgctccccaacctaatgaagaattatttctttatattgccgtcacgccatactccgtcagcactgtcattgttgtcgagagagagaaagtccaacgactagtctactatgtcagcgaagctctccatgacgcaaagaccagatatccacagttccaaaagctgctctacgcggtaatcatgacatcaagaacgctatgccactactttcaagcctacagagtcacagttgtctcctccttccctctcggtgaagtcgtgagaaataaagacgttgtcggccgcattgcaaaatgggtagtcgagctaagtcagtttgatgtccactttgtaccacgaacaaccatcaaatcccaggtactcgccgattttgtagccgactggactatgcctgataaccaatcaggcaaccagatcgacaacgaaacgtggataatggcgttcgatggtgcactcaacagccaaggagcagggacaggattcatcttgacatctccttctggagatcagttcaagcacgcaatccacctcaacttcagggcgaccaacaacacagccgagtacgaaggactactcgctgggataagagcagcagctgaacttggggtcaaacgactgatcgtgaaatgggactccgagctagtcgccaaccaggtacacaaagattataaatgctctaaccccgagttatccaagtacctcgtataccgcaagaacaacatcgagccagacgacctagcacgacatgcgtccaggcgagaacctcttgagcctggcacctttctggacatcctgacaaagccatcagtgaaagaggccatcagcgagattaacatagccgcccccgacatcagctcggaggtcacagaggcggaacgcgccaccgccgatatcgagaccacagatgactggcgcaccccactgatcaaattcatcaacagcgaagagttgcctgaggacgacgcagaggccgagaaaataacctgtaaagcaaaaatttactgtatgatcggcaacgatctatacaagaaagcgccaaacagagtacttctcaaatgcgtctcgtctgacgacggcagacacctcctcctcgatatacatgaaggaatctatgggtcacatgccgccggtcgcacattggtcgggaaagcttttcgacaagggtttttctggccaaccgccctcaaagacacatgcgacatggtccagcggtgtgaagcctgtcaattccatagcaagcacacaaagctacctgcacaagcgctccagaccgataaggccttgtcggattctgtagagacgaaagaccatgtcagacctggtcgtgtaagagttctccccttgcgtattaaccaagccgcgtaa

SEQ ID NO: 13934 - DNA, 545 bp, Oryza sativa
  Clone ID: PAT_MRT4530_19920C.1
gaggagttggcgtcgccgccagtgactcgccacccagccgcgcccgccgccgccgctcgcgccgcagcccacctcccgcccctgcacgcccctataggtatagatagatagatagatttggagaaaaaagtagatgagttctagttgaagctagtatgtatttgcatgtgaaaggatctgactagtaagatgtgcacctaaaacaaaagttattcttgcatagattgcaagatgaatctgtgatcgatcatctctccactttgaaggaaattattgttgatcttgaacctctagaggtgaagtatgatgaagaggatttaggcattattctattgtgttctttgcctacctcgtatgcaaatttcgaagatactatccttttatagccctgatattgtatctttgcaagaagtttacgatgctttgaatctaaggaaaagatgaaaaatatggttccttctgaagattgatgttcacaagcagaaagcttggttgtttagggaaaaataaaaagagttatatattatgatagtttattgagtgat

SEQ ID NO: 13935 - DNA, 401 bp, Oryza sativa
  Clone ID: PAT_MRT4530_19921C.1
aaataaaaaaccccaacaaaggctaaattttagattttcccaaataaatgttttgcttgacccccccggttccttacaaaaagcccagtttttcaaaactttttcaaaaggctttaaaaggggtaaacataaaattgggagccccccttttcagggttttttaaattgacaaaaacccaagggatttgctttttgtttaaacgggggggctttttttcccacctgaaacaaactgaacagtttttccttccttcacaaaggaaaaaaggggccccctgcgttaacttaaagggggccctaataccccccacaggggggctaaatgccacatcctgaaaagggccccccttttttccccccgggaaccctccaaaatctccccctttttttccctcgggcca

SEQ ID NO: 13936 - DNA, 440 bp, Oryza sativa
  Clone ID: PAT_MRT4530_19922C.1
ccgggctgcaggaattcggcacgaggagcagcagcaactgtattttcaaagtctcaaaaggaacaatcttttttttctagtacacgagaagacgaagaatttttacaagccatgaggctgctgaactgatcgagttaccatctcgagactgcaatttccaagatgtcagaactccctcggtccggtcctcctggtccgatcgacgatcctcctgccagtcactcgctagcacattcacttcaaagttaatgcgtccagtgaacgaacaatttaagtcggtcagtcgaaacttttctcccctgttcctccaagaattcaggcccgttttttttaacgtgtgcaccaattcaattgggtccgttgcaacaaaggaattcaacgagaattgaaccaatttcaacaaacgtactgttaaatataaatgtgattcgaattttaac

SEQ ID NO: 13937 - DNA, 226 bp, Oryza sativa
  unsure (1)..(226): unsure at all n locations
  Clone ID: PAT_MRT4530_19923C.1
aaaaaaaagggaaaggaaaggaaaggaaangggggggatggtgtggtggtggaaggacccttaccggcggcaaccggttccgatggccggtccaccgccgtttccgtcccaatttccggcaagcggcccccattacgcgcaccagttcctgaacacggggctctcccagcgcgggccctccgccctgccctacgcggaggacgtgaagtggcttgatccgcaacca

SEQ ID NO: 13938 - DNA, 1208 bp, Oryza sativa
  Clone ID: PAT_MRT4530_19924C.1
ccccccccaacctttttgcccctctcccccacccgttcttacgtaaatccccccctatgttcctctctttcaccccctctatatttccccctaaaatcaacaaattcttacgggtacctcgagccggccgggccgcccctgagccggaggccgacacgaggtaagaagcccagaagccctagcgccgccgcagcagcagcagccatgggtatcgacctcgttgccggcgggaggaacaagaagacgaagcgcaccgcgccgaggtcggacgatgtctacctcaagctcctcgtcaagctgtaccgtttcctggtgaggagaaccaagagtaacttcaatgccgtgatcctcaagaggctcttcatgagcaagaccaaccgcccgccgctctccctgcgccgcctcgccaagttcatggaaggcaaggaggagaacaacattgctgtgattgttggtacagtcactgatgacaagaggatccaagagattccgaaaatgaaggttactgccctgaggttcacggagacggctagggcaaggattgtcaatgctggcggcgagtgcctcaccttcgaccagcttgctctccgtgctccgcttggggagaacacggtcctcttgaggggtcccaagaatgcccgtgaggccgtcaggcactttggtaaggctcctggtgtgccgcacagccacacgaagccatatgtgcgctccaagggaaggaagttcgagaaggcccgtggcaggaggaacagccgtggattcaaggtctaagtcagctcctgtttgcaagtgttgcgatcggcattgtgcgaccgttctgtttgagcaatcgacagtaattagtagtcacttctctactgagactagcaaaacttaattgtgtcatttctgaaagatattttgaaggatcctttctacctacctacatgcgtttgtgggcaagaagacaatgttttttgtttcctctctattagagcttgaaaattttcgcctccaaaaaaaaaaaaaagaaagtaaaataatgggctcatggcttgctgtcatggtgaaatgatggttcagctcatggctgatgtgcctgattgtttgggtttcgccgcggggagcccggaagtccatgcctgtcgcctcgcaaacatcccttttccaactggcgaatacgaagagcccgaccgatgtctttccaaattggccaactgaagggcaag

SEQ ID NO: 13939 - DNA, 508 bp, Oryza sativa
  Clone ID: PAT_MRT4530_19925C.1
ccccccccccccccccccccccccccccccccccccccccccttccttttttttttttttttttttttttttttttttttttttttgggaaaatttggcggccacttggtaaaaacccttttcctccaaactaattggtttcaaaaacaaaagaattcaatacaaacccaaaaaataaaaaaaaaattggggggaaaaaagtaaaggaagcttttaaaaaggggcgggaaaaggaaccccagagagtaaaaaagaaattgagatcggcgagggttaaccgaaccaaaccccccccggggcccaaacccctgaagcccgaactggtcgttggttgaaattcccccgggggggccttttggaacccccccctttggtgggtgggcccttggcatggattaacaattgggtcaccccatgggcagcccaagggggtccggacaatctcctctccttgaaacggacttggccataagttgaggacaaggaaacttcaaaaatgggaaacccc

SEQ ID NO: 13940 - DNA, 944 bp, Oryza sativa
  Clone ID: PAT_MRT4530_19926C.1
atggcgttggacatgaagtcacatctatacgagtccttcgaggtcaccttggctcgtgccaacacatggctctatgcctcgcaggcctctggtgtccccatcaagttgatgagtgtgcagagtgatgatcttctcaccaagatatcgagagttggagacgccacatctgcaactgtcaattcagggttgttgcctgatctgtcaaatgcaaccttggaggattaccaaggctataacactgaggtggtgaaggcagcccgactttggtacagctccataggaggagaaatgccactggagatcactcctaaagtaggtgacacaaaactaggatttgcaatcagccgtactgaggagggttttatctacatatcttcagtgttgcaagatgacaatgacagcgagacaccgtcaacacggtcagggatgcacaatctgttcaaccgggcaagagaggcatcgaaattgctggtcatctcaagggtgtccaatgagaaggtcctgccctggatgatctctagttcaggggcaatccgctgctttgacactctctcgatcagccaaaagctttccttgagccgatacccattgtgctccttccagctgcatctactcatgtgggagaagcctattcatcctgccgagagaagcattcatcgcccaaaaatgcctttttttttttgaaagaagaaatgccttattcattgatactcgatccagaacctcatcaaattatacctagagtagatgctgaagagggcagagtggcgcacctgaaacacaggatgtcatcatcacttgttacaacttctccagaaatgaaagaaacataaaacaagatgctgcagaagtagatgtatttcaaaatttcagtttgcgtctgttgtttgtttttaagagtctaattaagttagatgcttcgctgatctaaaaaaaaaaaaaaa

SEQ ID NO: 13941 - DNA, 456 bp, Oryza sativa
  Clone ID: PAT_MRT4530_19927C.1
ggaacaattggaatacaaatacatattaaatgcatgattacaggaaaaatgagcatatgaaccagcaagtaagatgacgcgtttacttcacaaataaagaaagtaaaaaagtttgcttaggccatcacttaaacagttcaattttctgataaatggtcttctaaatgggcaattaggttggacacttcatctattggtgagatccgattgaaggtaccctgaatgttcactcatataaatgtgatccctattgaattacagatccagatatcatactactagttccacaataacattgtaggctcacctcaaatatgtccgcatcttcagtgccccaacaacatctgatctcacaatctgcccattgctgttaacaagaatgttaacactctccacaacatccaagaacacttcattcttcttgtaccgaataccctcactccgccatgacacggt

SEQ ID NO: 13942 - DNA, 371 bp, Oryza sativa
  unsure (1)..(371): unsure at all n locations
  Clone ID: PAT_MRT4530_19928C.1
ggaccaaaatgtattcagacttatttactatgatgcatgactcgcacaaagttggtttattttggcacttatagagtgcgtggcagtactccaattttgttctgacgcacacctattgcagcaaggataacagagtatgcactcgaccttgtcgaacaccgagccaatcaactcggggaggacgtcgcctgcgctaatgtcctgttggacgtggaacggatacggcggctccggtgctcgtgagtccagcagatcgntcgatggccagactgcgggcagaccttttcagaggactaatgggcgtgcacgtaccggccggatccgaacagcagtgatggacaagagatggcatttctcatggctcgttctat

SEQ ID NO: 13943 - DNA, 166 bp, Oryza sativa
  Clone ID: PAT_MRT4530_19929C.1
atccattccctatataaaaaaaaaaggggggggtctccccttgaaatttcttgttatttaagaagaaaagaggttggtttaagatcccctttcaacaattttttcggggtcaattcccgcaaacgggtttccaacggggtttcggaccttttccattccccttttg

SEQ ID NO: 13944 - DNA, 458 bp, Oryza sativa
  Clone ID: PAT_MRT4530_1992C.1
cccacgcgtccgcccacgcgtccgcgaatttataatttaatcgagtcgagtcgccgccggggcccgagacggaggcggctttttcgcacccctaatggcgagcctcaccctgccgccggcgcccaccaaccctcgccaggacgccatcgacctccacaaggccttcaaagggtttggctgtgatagtacaacagttataaatatacttactcatcgtgactcgatgcaacgcgcgctcattcaacaggaatacaggactatgtattctgaggatctctctcgccgtatatcatctgaactcagtggacaccacaagaaagcaatgctgctatggattcttgatcctgctggacgagatgcaactgttttgagagaagctctgagtggtgatactattgacctgagagcagccactgagataatatgttccaggacaccatcgcagctgcaaataatga

SEQ ID NO: 13945 - DNA, 1216 bp, Oryza sativa
  unsure (1)..(1216): unsure at all n locations
  Clone ID: PAT_MRT4530_19930C.1
ttncncnnttncnnnttgggnggggggcctttttggggggggcccncccccccttttttttcccggannaaaaaaacangnnaaaggcccttnccnggnttngggcnccngggggancccccccccccccgggngggcccaancnanaaaaaagganccttgnggnaaacnatntnggngggcctttnggnttnccctntnaaatncgggncccccanaccnttntttgggnccctttngggtcctttggggtttnggnnaaacaacggntttnaaccctttccccccccccggcttnggggggngggnaaatttgggttttttacccaactnnccccttnttngccctccccccccccaaangggttttgggcnccaaccccaaanggtnctccnttttgggtccttttccccccnccncnngaancccananggngggcnaaaggncccttnttncccctcnccccttgggnaaangncgggnaaannaagggtttttttggggccccttnggggttttcccccnttcccnnaataacccccccnggncccntttaaaaccctttttttcttngggggggggcccccananttcccntttggggnaaaaaaaanaatttcccctttnggggggcttgggngggntnnnantactttcggggccccttttttnnaanttcgggctttnggncaaattncttcnggggggggaaanggtaaaatttcccccccnaangggccccacatnaanaanngggcccccccctttggggnggnccccccccaacngggnaaaaananaggnttttnggggggggcccnaaantttcaaattttcccccntttaaancccctttnaaantttngggggccccttttaaacccccttttcccccaanagnggnnccccnaaacccccccccccccggggggggggaaaaagggtcccccaaanaanacccccccccttttnaaaanttttcggggggggggtttttntnttnaancccccccccccccncttnnnnncggggggnaaaaaanaaaaananccncngggggntttttgggggcccccaaaaanttttcggggnnaaaanaccccccccnggggggggggggnaaaaccccctttnggggggggggggnnaaaancccccccaacaaaaacgggggggggggggnaaaacngngctcaaaaanaaancccaccgg

SEQ ID NO: 13946 - DNA, 1764 bp, Oryza sativa
  Clone ID: PAT_MRT4530_19931C.1
ccggccgggactttggttccttcttcttccattccattgtgttgatgagttgagttagctcatctcatcgtcgccgtccttgaattgccgcctcccatcccacgaattccgcccctcccaccctcctgagatctctctctctcccccacctccgtatttaggtaggcggcgggcgcatcacgttctattgccctctcctgcccgccgccgccgccgcacagccggcgatcgagcggaattcccattcctttccgcccggtttccggcgctgccgcccccctcttaccatcccgggggggcccagaggccaggagctgtcgccggaggatttcaatttttcggagccatttgatgctaatgccacaccaccactcctgctaaagctgccctcattatgaactcgctggacaatgagtagcaattgcacattgctgatttccatctcctgcggttacattcgtacacgacagcatgggaaaacttgcagctgttgttcgcagtgtacttagattaacaaatgaaagcatgaggattgttatggtaacaattattggagtgctcttgggcttcttcattggaatttcattcccatcagtcagcataacaaagcttcactttccttctagctttgtatcatacatagaagacagaaactctgggctcacaacacaagctttgcttaatcacgcctggacttccgcccgaaatgcaagggaaaacagttctgaaccaagttcaaacactactttgaagatttatgtcccaacgaaccccaagggtgcagagagactagcaccagctattgttgtgccagaaactgacttccatttgcgcaggttatggggagaaccaagtgaggacctgcccttcaaaccaaagtaccttgttactttcactgttggatatgcacagaaagaaaatatcaacagagcagtgaagaagttctctgacaattttgctattctgttgttccattatgatggtcgggtgctcaattttgaaggatatcttctaaagatttatttatgcacatacatatacatcaaacttgtcaagaaataccatctggagatctctcaacctggtttagagcctgatcggggattgacatggcagatgacaaaaagaagaggtgaccgcgaggtccacaactttgttgaaataatggctccagtcttctctagagatgcatggagatgtgtatggcatatgattcagaatgacttggttcatggatggggccttgattttgctctcaggaaatgcgtggagcctgctcacgaaaagattggggttgttgattcacagtggattgttcaccaagtggttccatctctcgggaaccagggcaagtcagagaatggaagaccagcatgggaaggggtgagggcgcggtgcaggaaggaatgggggatgtttcagacgagaatggcggaggcggagaaggcgtactacaagatgatgggcatcacccctccgaactccacactggtgtagatctaagctaggctgattcttcatcttcatcttcactcccatctctgcctctgtctgaatgacgaggattctgatgtgttttacctgctgtacagacagttctgatgaactgatgagtgtgtaggtaggtggtcagatagagtgtggattggatggtgatgattgtagagcatacatttacacatgagggagggagggccatcgatcatgaggagggtgttatacataccatctataaaatcgattattttgtgtttttgtggtggt

SEQ ID NO: 13947 - DNA, 609 bp, Oryza sativa
  unsure (1)..(609): unsure at all n locations
  Clone ID: PAT_MRT4530_19932C.1
cccacgcgtccgtgatattgtggcagcttatgagtacatattcatctgggatgaggaccttggggtggagcatttcaatgcggaggaatacatcaaacttgtcaagaaataccatctggagatctctcaacctggtttagagcctgatcggggattgacatggcagatgacaaaaagaagaggtgaccgcgaggtccacaaggttacagaggagaggccgggctggtgttctgaccctcatcttccgccttgtgctgcctttgttgaaataatggctccagtcttctctagagatgcatggagatgtgtatggcatatgattcagaatgacttggttcatggatggggccttgattttgctctcaggaaatgcgtggagcctgctcacgaaaagattggggttgttgattcacagtggattgttcaccaagtggttccatctctcgggaaccagggcaagtcagagaatggaagaccagcatgggaaggggtgaaggcgcggtgcangaaggaatgggggatgtttcagacgagaatggcggaggcggagaaggcgtactacaagatgatgggcatcaccccttcgaactccacactggtgtagatcta

SEQ ID NO: 13948 - DNA, 292 bp, Oryza sativa
  Clone ID: PAT_MRT4530_19933C.1
cacttatgggggcgggtgatctcactttagtattaccttctcttgcaatgacccaaccaaagtttacctcattgtatcatacgtctcaagtcaagcttacaagaacattgtttctattgacctttctcacctcttcattttccaattatcatactccattcgtttcccataaccactgtccgtattctttcacacatactgcactttcaagatcccttacaagtatatccttaaaaattttaaggtaaacttatacttcatgcccttcattatcatcatcaaaccttacctc

SEQ ID NO: 13949 - DNA, 276 bp, Oryza sativa
  Clone ID: PAT_MRT4530_19934C.1
cggactcgtggctcataacccctcccataaatccgtatcaacagccatccatggcgtgggagtgaccaacttcggcctgtctacccctgcggctgcagcttcttccctcgttaggccggtcgccggagctggacgcgtggtgtttccccgtgttggccgcggcgggttcgcggcggtgagggcgagcgggccggcgactccgtctgacatctctgacaaaatgtctgagagcatctacaaggcgaatgaggcgtgcgcggaggacacggcgatcgg

SEQ ID NO: 13950 - DNA, 1326 bp, Oryza sativa
  Clone ID: PAT_MRT4530_19935C.1
gccgccgccgccgccgccgcttctgcctccgtctccgccgccgcccaccacccggggggagtgcgtgtacatccctaccatacgtcggcaggggtggtgaaggggaagctccacacccgcaaggccgcgacgacgtagtactaccacgtcagttcgaacaactccatccaggaggtcagtacttggttcgagcgagctgcgcgatgcagttcttggaattttccgcgattttcccccgtctttgtttgttttttggggagaagtttcgaaggattggttctaggcaatttcagaaatggtggagatagcccatgattaaggatacggtggaggggctcatcagcactggatggctggaactaatgaatggggctatgtgcatgcatgctgaggcggctgtgcactgctacattaacatgatatatataccgactatgaatctatgatttggcacaggttcatcaaggagtagttgggggtcagattccaaggattggttggcagattgatccaatttcgcactctgcaattcaggattactgcctaggtgctcatgcaggaattgatgattttttttctccgggttgattaccaagatagtgatacgcggaaagggaacagaagaactcgaggttgtgagaggggctccaagactctcggctcgtcagctgatttatttgctgatatcttcccaaaaatttatgaaccatctcctagtgagttttatttcgaagttgatgataattaccttgtcttccagctggatgccctctttttttgttataatgttgaacaatgggtgaacgactttgttgcagctctagcacaggtagcaaatattatgacgacaaaccatgccatgattacaatggatacagacttcaaaattcaattatgatttatcattatggataaagttggttcagaatgatggacaaactaattcattatgtcaatttaattggccatgccaatgctctctattccatgtcttccatttatactgatgcaaaatatgcttaaatgagccatggcctctcaagacaaatgatttctacctgtatgcggacaacccgaatgcctggactggttccttcacaagaagaccttccttaaaacaacagtccgtgctatgattggtggttttaccgcatcttggcttctggaattcttttaaggggaaagcaaattaaatctcacaacagatactttagctgatgctctagctcttgctcagcaccatgatgctgttacaggaacagagaagcaacatatcacaaatgactatgcgatgagattatcaattggctatacacaagtgagctc

SEQ ID NO: 13951 - DNA, 1621 bp, Oryza sativa
  Clone ID: PAT_MRT4530_19936C.1
cggcacgaggggaacactgggctggcttctctcttcctctgaagtctgaaccccaccccagcccgcacgaatccactcacccctcgcgttgcctcgccgcaccaatggcggcggcgtcgatcaagctctcctcctccgccaagcccctcgcccccgcgccggtctcccacctcctccccctccgcgcgcaccacgcgcggccgctccccgcgcgcctcccgccgccgccccgcgtcgccgtgcaacacaccgccgcgcgggcctccgatgcctccccccgcaccgcctccttcgacaaggtgctggagacgctgatcggcggtgaccacttctcggaggaggaggcggaggcgacgctgcggctgctgctggaggaggagaacgaggcgcgcatcgccgccttcctcgtgctcctcagggccaagggcgagacctacgaagagatcgtggggttggcgaaggcgatgataggctgctgcgtccgggtcgacgggctcgatgacgccgtcgacattgtcggcaccggcggggacggcgcggacaccgtcaacatctccaccggctccaccatcctcgccgccgcggcgggtgccaaagtcgccaagcaagggagcagagctagctcgtcggcctgcggcagcgccgatgtgctggaggcgtttggtgtcaacatcgagttgggacccgagggtattaaacgatgtgtcaatgaggtgggtgttggattcatgatgtctgcaaactatcatccagcaatgaaaatcgtgaaacctgtgaggaagaagctgaaaataaagacagttttcaatatccttggtcctctcttaaatccagcaagggtgccttatgctgttattggtgtttaccacgagaacatagttaccaagatggctaaggcagctcagaaatttggaatgaagagagcattggttgtccattcgaagggtttggatgaaataagcccacttgggcctggatatatccttgatgtcacaccaagaaagattgaaaaaatgctcttcgatccattggattttggtataccccgctgcacgctggaagatctaaaaggaggtgatccagcgttcaacgcaaaagttctccaggatgttcttgctggtcaaagaggttcaattgctgatgctctcgtgctgaatgctgcagcatctcttcttgtcagtggtaaagtaaatactttgcatgatggtgtagcgttagcacaggaaacacaacgctccggggaggccatcaacacacttgaatcctggataaagatttccaatagttgcagagactgatgttggttggcctcgataagatcctcaccaaagaaaaaaagggattcttcaataagacctgaggaatgatggcaaataaggattattttaggttatctttgtccatagtgatatatttatgtatgttcgttccaagtgccatctggggtgagattataaggttatggttgggattgtagccttcttttctagtctatttagagatagatgactcttgtttagagatcttggtagtgcccgttacattatgtgctagtgcaaggcgtggaaggaaaacggagctatacagtatatctgttcaatgttgcaaaaaaaaaaaaaaa

SEQ ID NO: 13952 - DNA, 482 bp, Oryza sativa
  Clone ID: PAT_MRT4530_19937C.1
ggggaaaagggccattttgttccataagcttctgaatttccaaaatttaaaagggggtttccgttttttttttgcccggcccgcccgggaaaaaaaaaaccgggggtttaacccggaaaaaaaatttttgggttccccaacaaccttttgccgaagaagtttttccaacgcccttttttttaatggggcccggctaattactggtttttccaaaaaccttgggcggcttttaaaatgccccccccccttggaagccccgggttttaaaaaaaaataccccgcttgttgggggggggggcttttttttggggaaaactactttttgtcctaggaaaaaaccaaagggggctgtttttttttttttttaaaagggttgggtcccaagggtttttccaggaggggttttttgccggggggaattttttcaacttttcccagggggcctccgggaaagaaaattttttatttttcggacccggggg

SEQ ID NO: 13953 - DNA, 429 bp, Oryza sativa
  Clone ID: PAT_MRT4530_19938C.1
atggagtggacgacggtggagctgggggaggcgaggtcagtcatcgctagggtcagcaatgcctacaactccggcgccagtagcagcaacagcaccggcgacacgaagcactgccgcattatgagggagctccaggcgaggttcccgtcgaggaccatggttgaggtaatcgacttgtacattaatctcacggtggagacgacggcgcagctgcaggacgccggcgccaccgccgccgccgtcgtgcaccctacttttggcctcgcgaacgacaatttgggcatgcccgttgtgaacaacaacaatggcatggtgtttggtggtgctcctatgaaggagggggtggtggcgatgaacagcggcgacggtgaggtggtgaaccaggacattggtttttgccactttgcccaggcacaaaaaacacagtag

SEQ ID NO: 13954 - DNA, 399 bp, Oryza sativa
  Clone ID: PAT_MRT4530_19939C.1
aaaaccccgggaacgggcccctgaattttaaaagatggggaattacaattcatttttacaacaacaaaaattgggggggggtactccggggtccaaattaagagatcaaaataccgggggttttttttttttggggggaaagacccccccccccgcgggaaaaaaaaaacttggaccttaattatcacccccccgggggggggggaaaaaaaacttttttaacctccccggggttccgggggagacccttaaccccccccattttaacaatgggggggggaaaccttgccatccaccccaccgggtggggggggttgcccccaaccatccccttggggtccccggggtttgtaaaggtttggcccaaaaaaaaaataacctcccgggggggcaattttt

SEQ ID NO: 13955 - DNA, 357 bp, Oryza sativa
  Clone ID: PAT_MRT4530_1993C.1
cgggagacgtcggtggcggcgtggacacaccatcagggcagagggtcgcaccagagtgaggagggtatggagatggaattggatcgggagcgcaccgtcgcgtggggaggtgccggcggcgcgcagatccgggtccgggtgggcgtcggcgtcggcgtcggcggcgcgcggatcgaggcggagatctggactctcttgcggcgcgtggctggccgtgagggttgctggatgggtcggcaccggcgggtgaagagacggcggctgctgcggttgcgggtggtggtggtggtggcggtggtggtcgccggcggcggcggcgagcgaggaggcaatggaggcgggcccgtggtgggttag

SEQ ID NO: 13956 - DNA, 1087 bp, Oryza sativa
  Clone ID: PAT_MRT4530_19940C.1
atggcgaggagccctcacgagtcatccttctccttctccaggaggcacttcaagtggccagttcttggcaagagcagcagccatggcgccagcaatgcaggggaggacgacttcatcaaggcagaggacgacgaggaggccaccatggccttctcctccacctgcccgtcgttccactccgaggacttcgtgtcccctccgccctgcaagccgctcaagcagcagcagcagcagcagccgcagcagcagcgcaggaagggacgcacggccgtgtcccgcctgcgcacggcgctggccgcggccctcgccggccggcaccgccaggtcgggctcggcgcccggctcaccggcacgctctacgggcaccgccgcggccacgtccacctcgcgttccaggtggacccgcgcgcgtgccccgcgctgctcctggagctggccgcgcccacggcgtcgctggtgcgcgagatggcctcgggcctcgtgcgcatcgcgctcgagtgcgagcgcgccaagggcggcggcgcctgcgcgttccccaccgccgccgcggccccctcctcctcctcctcctcctcctcctcctccagcgccggcggcaggaagctggtggaggagacggtgtggcgcgcgtactgcaacggcaggagctgcgggtacgcggtgcggcgcgagtgcggcgccgcggactggcgcgtgctgcgcgcgctggagcccgtgtccatgggcgcgggtgtcataccggcggcgtgcggcggcggggagggcgacgtcatgtacatgcgcgcgcggttcgagcgcgtcgttggctcccgcgactccgaggcgttctacatgatgaacccggactgcggcggcagcggcagcaacaacaatggcggcccggagctcagcgtctacctccttagagtttgatcactcgagcgtctcccattctcacgttttcttgtatcgtgtcagttcttgcatgctttgttgtttcctgttgtaggctagtagtactttagtaggtagtgtgacggtatgagtggttctggaataatatgcatatggaaactgggactgaaatggaattattttttctttcttt

SEQ ID NO: 13957 - DNA, 770 bp, Oryza sativa
  Clone ID: PAT_MRT4530_19941C.1
tccccaactccctctataaagcattaagcgatgaatatgttaataagctcaatatatagtatgttaactatgcacgaactgcatcgcaagaataaaagtggagtaatttttaagattaactttaaaaaagcttatgataaggttaaatggccttttgttcaacagactttgaggatgaaaggtttactcctaaatggtgtcagtggatagcttcttttatacaggggggtcatgtgggtattaaagttaatgatcaaattggtaataactttcaaactttaaaaggtcttaggcaaggggatcctttatctccaattctctttaatttagtagttgatatgcttgcattgctaattaagagagctaaagatgctagttttataaatggggtgattccttatttagtggatgatggtttatctattttgcaatatacggatgatactatcatttttctggagcatgatttacagcaagcaaagaatctgaaactgattttatctgtgtttgaaaagctatctggcttgaaaataaattttcacaaaaaaagcttagtaacaaagactggaaagttattgaagaaagaattgagaaaaaacttagtagttaaaaaagtaattttcagggcaacatattggctctgatactgggcgcaactacaaaagtttgaagaagacagagagtttataaaatttacatgttgcaagcttgagacgacaattatgcaactttttgtcaattatagttggagattcacaaatagacttcaa

SEQ ID NO: 13958 - DNA, 364 bp, Oryza sativa
  unsure (1)..(364): unsure at all n locations
  Clone ID: PAT_MRT4530_19942C.1
gggagaatgcatggcaaccaaggtgatgaaggaatcgagggagaaagaatgtgttcaacagctgctcantgcgaaaacagaagtttaatcaatcgatttnganncagcacaatcaatcgactttttattcaatggtcatgtttgatatccctggnncttcatcttctcaattggtccatggattagtgaaatcgcatttgttttccatggcaagaattgtggatgaagacatcataatgtacgcatgtggcaggttgcagtagaagagccgcgtgttggcgagggttgaagctnnatactatagatggccatgtgggccgcccggcacggcacggcccaaggctccgcgtgcctgggccgatgc

SEQ ID NO: 13959 - DNA, 138 bp, Oryza sativa
  Clone ID: PAT_MRT4530_19943C.1
tcccgctcctgccacaccgagaacgtgaacgagcgaacgaacgtgaacgtgaaatgcaattataggcaggtgaatgaacgtgaacgaacaaacgtagaaaagacgttgttggagtcgtccctcaagccggagtggtag

SEQ ID NO: 13960 - DNA, 858 bp, Oryza sativa
  Clone ID: PAT_MRT4530_19944C.1
atggcggtcgagagcggtggcagcggcggcttgcgaatcgcccggatccgcgtcccccaaacacatggaggtcggatccgcctcctctacagcgacgacggcagcggcggcgtgagccagaggtggcgcactcggcgacggccacgcgaggcagaggggaaggaagaggaggcagaggcggagctggcggcgcgagggggaggtagaggcggaggcggcggcgacgcgacggcaacggaggtggaggcggcggcgcgagggggaggcggaggtggcgctcggcggcttcggcgggagagggagagggaggggagggcgagacgggagcggggagggcacgcgggcaaaaaggaagataatggcgataagaagaccaaggagaacaagccaaagaacacattcaaggggaagaagatcaaggagactctcaagaaggcatttgatcaagtctatgctgcttttgagcctctaagcgatgtagatggagaaagtgaagatgaagataagggaaagaacatcttcggtgtttgcttcatggcacgtggtgaattggattcagagtgtgaagacaatgaggctttggtcgcgatgaaggagaacgtgtggatcgtggattccggttgttcgcggcacatgaccggtgataaaaattggttctccctcaaacaagcatccaagactgaattgattatctttggtgatgcttctactagtattgttctcgctacaggtttggtcaagggggaggatggttgtatttttgaagacgagagtgatgacgacaacgacgaggtcggctcggcggtcagactaggcgccaggtcggtcaggaggtgcggtcagaccggccagaattga

SEQ ID NO: 13961 - DNA, 178 bp, Oryza sativa
  Clone ID: PAT_MRT4530_19945C.1
atcgcggacgcaggccagcaagcggcaggcagcgagcagcgtctccgcgagatagtgatggcggcggcgacccctggacggctcatgcggcgtgtaggcgtggccggcgtcggggtgcatgtgcagtactggcaacaacagcatccaagctgcgcgcaacgaatcaaggcaagagcag

SEQ ID NO: 13962 - DNA, 686 bp, Oryza sativa
  Clone ID: PAT_MRT4530_19946C.1
ccggccggcatgaaacctcttgttgtccgttcgcggctgcggcactgccggcgccggcggcctgcggcctgcggcggcgaggggagccagccaaccgggccatgagcagtatccggcaagagctgtttggcgagccctgggaggagggaggaggttcatgagggctagctatcgaacatctggtggcgccgcgcgtggcggcctaacctgcatcgtgtattcgggtggtggtagttcgacgacacggcagaccacgagtatgtcctcttcatgacgagggattgagaaatatggggatggactgttcgtctgttcccgcttttgccgcgcgtgtgttactacggcgaggcgagatgcgaacagctcagggactgcctgaatggtgttcgacggaatgggtgaacgtggacgtgggtgtgaactcttatccaggagatgcgagcagcttgactgaaggatccatcccgaaggatgcgcgaggaggagggaaatgtattacggcggcttcgtcttgtcgatgtttttcgtggaggctctagaagagacttgatggattgcatctgtggaccattgagcggagccgtaacaggtactttatttccatcgttttgaacttgtatgcctatatatttgcttgccattcgttgaaaattcctctcttccaaaaaaaaaaaaaaaaagcggcc

SEQ ID NO: 13963 - DNA, 812 bp, Oryza sativa
  Clone ID: PAT_MRT4530_19947C.1
gcgataccgacgagatcgtagtcgagttggctcgactagatcacccagcgacttggctcatgtaggctctggcttcgtaggctgtggtggatgtgttggcggtaagattcgatgccttaggtcctcccggggggttccttttatatcgcgggttagtcgatctccaagtagaactcggagatatcggaccccacacgatatggtaacgacccagttcgcctgccagcgctccttgccttctccaccgccaccagaaaccctagttcgccaacccaggcttgttttccggcgatcttggcacagcaatggatctcggcaagtcgtcttccaccggcgcgacgttgaagaaccttcaggaggacggtgcccttcccggccgtgaagacatggagagagaagtaggaggtactgatcctcagcccctcttgggtcgcatggttgcgatcgaagattacgttttctgcggttttcttcctccatcttccgagtttcttctcctgatgttgaatttctatggtctttctcttctccatttgaatcctaattccatcccctttcttagtatatttgttcatctctgtgaggccgagccttttctcgatctcttctgtttctactatgaacctgtcttcgttgttcccgaggatcaaccggacaagattccggcctggaccgccaagccccctttgaccccctctcttcagtcgtttatcgacatcatcgatgatctccgagaacggggcttgtcgggatatgaagtcgctgcagacttcgtcggtaggcggatccagccgctccaggctcgggcccat

SEQ ID NO: 13964 - DNA, 802 bp, Oryza sativa
  Clone ID: PAT_MRT4530_19948C.1
tcaggcttgttttccggcgatcttggaacagcaatggatcttgacaagtcgtcttccaccggcacgacgttgaagaaccttcaggaggacggcgcccttcccagccgtggagacatggagagagaagtaggaggtactgatcctcagcccctcttgggtcgcatagttgcgatcgaagattacgttctctgcggttttcttcctccaccttccgagtttcttctcctggtgttgaatttctatggtctttctcttctccatttgaatcctaattccatcacctttcttagtatctttgttcatctctgttaggcctacattggggtagagccttttctcgatctcttccgtttctactatgaactgcgttggatggaatccaatagggtatctggttgcgtcaggttccgactttgtgatggcatgaagtcgcgttatatccccttccagtgtccttcttcccgtagtaagtggcggaacaggtggttctatcttgagatcaaggactcgaaccctgtcttcgttgttcccgaggatcaaccggacaagattccgacctggaaagccaaaccccctttgaccccctctcttcagtcatttattgacatcatcgatgatctccgagaacggggcttgtcgggatatgaagtcgctgcagacttcgtcggtaggcggatccagccgctccaggctcgggcccatccagcctataactatttcgggtcggatgacgcgacccgggtttctcctcggggtctgagcagcgaggctgtggagcagcgcgtcggtcaagtgatgatct

SEQ ID NO: 13965 - DNA, 288 bp, Oryza sativa
  Clone ID: PAT_MRT4530_19949C.1
atggcgcgaggcagcgaccggccagcggcggagggcggcggcgtcgcgggcggcgaccgaaggcgccggccatggcgaagctcaccggcgcgcggcgcggacggggttccggcgttgaatcccgacggaggaggggtggacgggacggcccgcacgacggcgcagacgacgacgtcgatggcgcggctcggcacggcggctagcagcggcggcggtagcggagacgagggcgacggcgctagggcgatagagggcacgggagctggcgattgcaaaacgaaaaagtga

SEQ ID NO: 13966 - DNA, 162 bp, Oryza sativa
  Clone ID: PAT_MRT4530_1994C.1
atggagaagatcgacacaaccaccaccatgcgtcgctgcctcctcctttctcatgcgccgctgccctatgccgtcgtgtgccaccttcagcaaggtgggaacctgttcgccatcgccattgaccgtagatgcgccgctgtctccgaccgatttcacccataa

SEQ ID NO: 13967 - DNA, 1369 bp, Oryza sativa
  Clone ID: PAT_MRT4530_19950C.1
ccggccgggccggggccaagctccgcttcaagtgagctagtctagccagcgtttagacaccatcaccagcaatggcgatcgctggcgttctcttcctcctcttcttggcacggcaagcctccgccgccgggtacggcgggtggcagagcgcccacgccacgttctacggcggcggcgatgcttccggcaccatgggcggggcttgcggttacggcaacctgtacagccaagggtatggcacgaacaccgcggcgctgagcacggcgctgttcaacgacggcgcggcgtgcgggtcgtgctacgagctgcggtgcgacaacgccgggagttcgtgcctgccgggctccatcaccgtgacggccaccaacttctgcccgcccaactacggcctccccagcgacgacggcggctggtgcaacccgccccgccctcacttcgacatggccgagccggcattcctccacatcgcccagtaccgcgccggcatcgtccccgtctccttccgcagggtgccgtgcgtgaagaagggtggggtcaggttcaccgtgaacgggcactcctacttcaacctggtgctggtgaccaacgtggccggcgccggcgacgtccgctccgtctccatcaaggggtcgcgcaccgggtggcagcccatgtcgcggaactggggccagaactggcagagcaacgcgttcctcgacggccagagcctctccttccaggtcaccgccagcgacggccgcaccgtcaccagcaacaacgtcgcccaccccggctggcagttcggccagaccttcgagggtggccagttctagccgccaccgacatcgccgtctccgacacccacatataatagcacggtgtccttcttcgtcttcgttctcgtcgtcgtctttcttccttgagagattatttattttgagcaagagagaaagaaaagcctcttcgttatagtggagaagaggttttgggctatgctgaggctgctaattagcacccgcttagacgttttccttctctggacttcgtccaataatgactggaccggtcccccatcatcaagtgtagtggtagtagtaaaggggagtactaagcttagtactacttgaagaaaaaatcaataataattgtattgattaaatttctacttttgagcgttttcttgtaccggagtgatggccttgcaacggaattaaaaaccgcgaggccgtgttttatttatcaaggggactattgatgttgtactttgtcgtagctagcggctgtagcttctctgttcctgtattgtttgggtgtaatggaggagtaatcaattaaggtgtacttattcctttgtgagggatttaattgatgcgtacttaatccccccggc

SEQ ID NO: 13968 - DNA, 641 bp, Oryza sativa
  Clone ID: PAT_MRT4530_19951C.1
gcaatggtgatcgctggcgttctcttcctcctcttcttggcacggcaagcctccgccgccgggtacggcgggtggcagagcgcccacgccacgttctacggcggcggcgatgcttccggcaccatgggtgagtagtagaatctcatgcgcagccggcgaatgcagcgtgttgctgtagctcaacggcgagaatgacgatcgaaatggtctttaatttgcaggcggggcttgcggttacggcaacctgtacagccaagggtatggcacgaacaccgcggcgctgagcacggcgctgttcaacgacggcgcggcgtgcgggtcgtgctacgagctgcggtgcgacaacgccgggagttcgtgcctgccgggctccatcaccgtgacggccaccaacttctgcccgcccaactacggcctccccagcgacgacggcggctggtgcaacccgccccgccctcacttcgacatggccgagccggcattcctccacatcgcccagtaccgcgccggcatcgtccccgtctccttccgcaggtcacattctcttcgccttcacagactctcagctggtttctaccgtagtagtagaatcgaacaagtttaaacaaccttgagaaaaaaaacacgttaaaacttaaaac

SEQ ID NO: 13969 - DNA, 288 bp, Oryza sativa
  Clone ID: PAT_MRT4530_19952C.1
atggggggggctaactgccgcgttccaaacggaaaaccggtgtgccaacgcataaaggaaaggccaaacccccgggagaggcggctctgcatagggaggcttatccgcttcctcgctcaagaaaacaagggcccggaggacgagtcggggggaccgataaaagctccccaaggcgcggaaaacggttttccaaaatcagggcgacacccggaaaacacgcggcccaaggcgccaaagaggcgcaacaccaaagagcgcgcggtgggggtaacaaagggccgcccccct

SEQ ID NO: 13970 - DNA, 180 bp, Oryza sativa
  Clone ID: PAT_MRT4530_19953C.1
atgaggcaaaggtcaccccgcttcaccaaattccctcttcacgccgacgtgatggtagtgtaccgagaagtcagcctccatgtcgcctcctcccacagacctacgcgccccgtggaggcccccgccgcactggagaggaggttgtgcccgtgggaaggcaatctcgcccggaggcggtag

SEQ ID NO: 13971 - DNA, 5054 bp, Oryza sativa
  Clone ID: PAT_MRT4530_19954C.1
atggaggacgacgcggagctcgaggagggggaggcctgcggggacgagacggccttcgtcgaccccgacgtcgcgctctcttacattgatgaaaaaatccaagatgtacttggccattttcagaaggactttgaaggagctgtatctgcagaaaatctagctccatctgtttcaaaacataatggttccatggtgccactttctgatgattcaagtaagaaggaagtacatcaaagcacaaaagttgaaagagcctctagcacccaagattcattgaatgggctatctaagtctagtgaccacaatagatttaaagttcggatcaaagttggttcggacaatggtttggcaagaaacaatgcagctatttacagtggtttgggtcttgatatttcttcaccttcatccatagaggatagccctgatggctgtgggagcctctctccagaatttaacaatgtgccaattgaatctcccaggaccattcttcagatcatgacatgcttttcagttcctggagggttcttgttatcccctctgcgagatgatcttgttcaactgacacaaaaggttgtgcctacatcaaagaaatgggaaacaaatgcaaacacagaaaatgtacaagaaagatatgaagggtatgcggctaaaagggtgaaatctgatgctaagaaaaagaaagctgtagatacgaagaggtcaaaaagcagaaatgatgtcagcgcagttatgaaaaatgagattgatatagaaacacctgctggtcaaaagatcgtattggaagctctcaacataccattgctgtctaatcccagaaccatggaggcaaaggacgggagccagtttgaagaggatcctatgcgagacaccttggtggaaaataaagatgcccgattgaaagaacggaccatcaacagtgacttaatggcaatcaaatatgaaaatgtcaaagccgaggcagcggaatgtttagagaacagtggtcctggcagttcaggaatggatttttcagcagtcaagggggaagtgaaattcaaggcagaaaaagcagagatccatgtagaagacaggaatactactagtgaaaaggacttccaatcggatagaaaacaagaaagaaaaataaaaacagagagtaagtgcaatgccacaggagttaactttgaaggtaacaaggttatgaatgaaagaacacctgttgtcggcaggagcataggaaaggtttctagtaaagaaacattacttaatgatattaatgaagaaaatgtctccaagagtgagtccagaagaagtcagaaagagcaaaacatgaatgcttcatcatcttctgatttcctggaagatgacaggggtgtcctttcttctggtgcagttaaggagaggaaaaatgattcgcaatccaaatctagccatccaggaaggaaacccaaagcaaaatcacatagagatgttagggagcacttacctgaaggatcttatggaggcaaggatgatacattggagaatggaagtgggctgggagagttacggccaaaaaaaatttggaagaatgatagtgagagggattctgatatgcctgggacatcaaaaagggaaatttcatctagtttgaagaatgataggcacacacctgctgaggagcagaggatgcatgtacctccatctgttagtgcacctactgcaaatgcagctcctatgcttcctgcccccgtcgtgatagaggaacattgggtatgctgtgacatatgccagaaatggcgtctcctgccatataagatgaatccttctctgctaccaaagaagtggaaatgtagcatgctacagtggctaccagggatgaatagatgtgaagttagtgaagatgagactaccaatgctctgaatgcactatatgtcagtccagcccctggcaatggcgttgcttcggttggacattctcatgttgcttcttcagggctaacaacatcaaacactttgaatgtaaatggacatgttgaacaaagtaggaaaaggaagaatactctgagtgacggaaatgtttcctttgatgtttctcagcaaatgcaaggttcggtttatccactgagcaaccaacatgctcctattagaagtaaaagtgctgctgatagtatccagtttcctgttgagagagattctaaatcagttgaccatttcgttgagaagaaaaggtccaagagcaagaatcatggtagctcttctgatggaggccatctcgtggaaagatccaagaagcattcaaaagtaaaaagcaagagagagatggatcatgatgaatacagaacttctaagaaaattaagaaagaggagcggcgccagcgccagtctggcatagattctaaccctggatatgatttagctagtggagacgttcctgatgaggccaaagctttgccttcaaaatcgatggccttacagggttcgagtgaaaggagtgatgttcctccatcaaagtataaaagtgtttctaagtataattcttcagaaaaatctaagagatctaaggatggggatgtttttcttcctgaagacaagaacaaggaacattcttacccctctgatgcacaaaaaccagatttgtctagtaagaagaggatagtgaaggaatgggaggagagtcagcacaattcaacacctccggtgagtaaaatgtctattgtaaaccaaagctcttcttccaaagaaacctgcaaggatcagaacttaaaggaaacaaagtcaaagttaacaaagtctgaagaaccgtttgccatgacagattcaaaatcaataaaagttgcacattctaatcaaacttcacgcaatctaaataatgagctatttgaggacagcacaccttttgctgttaaaagtggtatgtctgaaccacctgaaaatcgatcttctgaacaagctttggatttggctgaacctgcctccagtgatttggcctactttcagactacagctgtaacttcaagctcctcaaaggcttccggctctcagagaaggaaacaaaacttccacgttgcaaaaacttcaccaattgagtctgtctcttcatcaccacctagaatctctaacaatgacaaggtctcccatgacaaaatactgggaaaggatggatctacatgtgctaatacaaacaacatgcagagcttggtaaagaatactgaagttatagtagataatgttcggcaggccaggaagtcacatgagagcatgcttgctagtgaacctgttatgaatggtttttcacaagggaactctgataaagataatgaattgcctcagttaactcaaggccatgcttccaatgggattatttcgggaaggagtttggatgatgatctgcagcatgcatctgggaggaaagattcttctttgaaaagctccaatgcagctagaagtcataaccacttgcattatgctaataaaaataacttgcttactgatggctcttcaatccaacataggatggcagtcttggatactaaaggtgattccatggtacatgaaaacaagagaagtgttacttctctccaagacagaaatggatcaactcattacccaccagatggaaatccccaatcagaggtgtcattcggaaaagaaaagtcacatcccaagagcaacaagcatgatatgcagaattccaaagcccaaatgctcccctcacctctgaaagaaagtaaagtggaatcccactccgctccattaagatctaatgcatcaaaattgacagcacagttaaagcggggcaatgttgaaaatggagggcaacatggcattacaaaacaagcaatttctaatcctgcagacacttccagtccagttaggaaggataataactcaactggatatgctctcaaagaagcccgggatttgaagcacaaggctaatcgtttaaaggaagaaggaaaagaacaagaaagtacaagactttattttgagtcagccttaaaatatttgcatgttgcgtcaaccttggaacctcctccaagcattgatggctttaaacaatgtgatgcagctcagaacttgtattccgataccgcaaaactctgcaactttgttggtcatgcatatgagaagtccaagaaaatggccgctgctgctttagcatacaagtgtgtcgaagtagcctatctcaaggctgcatactataaataccctactgcaagcaaggatcgccagatgttgcaggcaattgtacagaatccaccaggtgaatcaccatcatcttctgcctcagacattgataatttaaataacaatggattatctaagggcccttcaagcaaggatgctaattcgccccaagttaccgggaacaatttgttactagctgctcgcaatcaaccacacttgacaaggttactagcctatacaaatgatgtcaactgtgccttcgatgcaactcggaaatcacagatggcaattgcttcggctgctagcaaccaagaaaatggaatagatggtctttcttcagtaaaaacagttttggattttaacttccaaagtgtgaatgatctactaaggctcgtgcggctttcaatggagtctatcagctgctgacatgttcagaatccaggaaaatgacatccctttacaaggtgctgttggatgtgcattccatatttgagtaatgtcccagacttgccagtagcatttggttgaaaagttcaactgtgcgaaattcataggtcttctcatttaagtgtgctggttaatttgtacatgaagcgtttgtcttatcttctattctggaggcctgtttttacccattgctagcatctagttggatggttttatccatgagggaggttgctgaagatgtgctttgcagattgcactgatcaacttgattttgggcaagactgcctagttacagactgcacttgataagcttatacacaatgctactggacagcagcttccttgtagataatcttctttcctccatgctgtaaatgatgtattttcgtcatgggagtgacctatggcgaatagtatcatatgttcccttgagaaggcaaaatggtggttccacttag

SEQ ID NO: 13972 - DNA, 406 bp, Oryza sativa
  Clone ID: PAT_MRT4530_19955C.1
cgccgacatgtgggacccacgggcagtggctcaaggggaggggagaggcaccggtccactgtggaccgggaccacgcgggtggtccaccgctggtccacgggaccaactgtccggatcggccgggaggccgatcggatggcgcgggcggcggcgcgcgcatgcgcagtcaccggcggtgaccggcggcgcggggagacagcggcgaccggcgcgaaggcggcggctgcggccgaagacgacggcgcacgcgcggagggcggcggcgctcgcgagagagaggaaaggaaggaggagaggggtttcctcaccgaggcgatgacgacgaccggcgcgggaagagacgagcggcggcggcgcttccaacaacggcggacggggtcgggcacaacctgggaaaggcgatga

SEQ ID NO: 13973 - DNA, 505 bp, Oryza sativa
  unsure (1)..(505): unsure at all n locations
  Clone ID: PAT_MRT4530_19956C.1
cccacgcgttcgcccacgcgtccgcccacgcgtncgatttcttctcaaactaaacacaatgtgtatgtcaccattcagtatacatccttgttcattattgaaattagtggcttatcctatcactatcaccaatctctttgtataaacactgaaaaatctggtgcaagtactccctttggttctctgaaaagcatgttccgctgaagtgatttatgcacttctcccgcagagaggtcttggattgaacaaagatgtaaagtaggcgagcaggttatcccattggcaagaaatttcaataatgtcaacacagatgttgaatctggaaaggtgccattggtgcgtaaggatgcttactctgcattcacaagcttgtgttattctatttttcagcttcctattgtttctggctgaattatcttttgccgtgtcacttactggcatttctcctttccattcttttatctacatgttggacacaggttggaaatacactggagatgaaatc

SEQ ID NO: 13974 - DNA, 1046 bp, Oryza sativa
  Clone ID: PAT_MRT4530_19957C.1
ggtgtttatcttccggcgccatccacgcagactgcctttaccgtactactggtggagctaatgctgggcatactatatataattcagagggaaagaagttttcattacatcttgttccatcaggtatcctcaatgagaagacaatgtgtgtagttggtaatggagcagtagttcatcttcctgggttcttcaaagaaattgatgggttagaatcaaatggaatttcctgtgaaggaagaattttagtatcagatcgtgcccatcttttgtttgactttcatcaaactgttgacgggctcagagagtgcaagacccttaaagaggaggttgagaagtacgaaaagtttgccgagcgtttaggaccttatattactgataccgtgcacttcatgaatcaatcaatcttgcagaataagaaaatattggttgaaggtggtcaagccaccatgttagacattgactttggtacttacccatttgttacttcctcgagtccctcagctggtggtatttgcactggccttggtattgctcctagaagtatcggtgatctcattggagtggtaaaagcttacacacccagggtaggtttgggcccattcccaacagagctgttgggtaagactggtgatttgctccgcgcttttggaatgaagtttgggacaacgacaggtcgaccgaggcgctgtggctggcttgatatagttgcactcaagtactgctgccaaataaacggtttctcatctttaaatctgaccaaactcgacgtgttaactggcctcaaggaagtaaagctgggaattgcatattgtactgaagatggtaaagaaattgaatcattccctgcagaccttgatcttctggagaaaattaaggtcaaatatgaggttctacctgggtgggaggacgacatttcctctgtacgaaactacagcgatctcccagagactgctcgtttgtacgtggagaggatagaagagctggttggtatcccagtccattacatcggcgtaggaccagggcgtgatgctctcatatacaaatag

SEQ ID NO: 13975 - DNA, 426 bp, Oryza sativa
  Clone ID: PAT_MRT4530_19958C.1
atggcatgcatgtccaggcgatgggccgagcgcggccgcggcgtctgcggtctgccggaggacaacaacaacgatccatcggcaatcctgtgcgcgcggccgtgcgtcaatggtgtcgagatgtctgcccgtgtcgccgttcggcgatatttgcccagcctcttccaccaccgagctcacggcgcacaacgaatcgacgatagaggttggctggagacggtggagggcagaggcggcgccggcgcgggggaggacgacggaggcggcaccggcgcggtggaggccggcggaggcggcaccggcagcggtggaggccgacggaggcggtggcggcagcggtggaggacgacagaggcggcgccggcgtggtggagacggaggccgagaggatggggatgcggcgcgatgggaatgggagattgggat

SEQ ID NO: 13976 - DNA, 367 bp, Oryza sativa
  Clone ID: PAT_MRT4530_19959C.1
gatgcggacgtcactagctcgcatacacgcaataatcctccaacggtcatttaaaaaccgataacgagagctcgcgcgcgacaattgaatttaaaagtgagctcgttcctatgttcttctttgtacgaatttgagaatatattgctaattaatgattttattgtgattaggaacaatggaggggacaaggagacacttggagaaggacttagagtcatggaggatcatcgaggacgtgcaagtccaagtggaggcccaaaccaagtcaattcggagtctagtactaatctacactaaaacggacgctcagatcatatacgtgcttggattggggcgttctttatacggatagaaatctaagaagata

SEQ ID NO: 13977 - DNA, 388 bp, Oryza sativa
  Clone ID: PAT_MRT4530_1995C.1
gaggagaagaactcgcgaacctattgcaactgcagaaagagcgagaccctacgtcacgcgcctggaacagtgggcgacatagcacatgacatatctattcacagtgacgtcaccagaaagaactgatgtccatggttacggcaccatgcttcttgagcttgcgactggccagtgtgccatggacttctgacgctgggaggtagaggacaatcttctattcctcgatcatgtaatgtagctacaatgcgaaagtcagttcggatccattgtggcccgaagcctgaaccagaattatgacgacgaggacgtttacatgatgatgcacattggattgctgtgcacacaggcatcgaccgaggatccgccatgcatgtcagaggtcgttcgg

SEQ ID NO: 13978 - DNA, 1470 bp, Oryza sativa
  Clone ID: PAT_MRT4530_19960C.1
atggaagccaggaggccgaaaggccggaggagtccaccggatctggtgcacgggtggataatcctcgaccgcttcgtccacagcagcgacggcgacgtcgacgccgccgacgtcgtgacggcgtcggagatcgccctcacctgcagcggccgccgcgtccgcgcctccctccgcgtcgccgacccgcccgccgtctcccgcctccgcatccaccgcctcgaccagccatggccggacgcctacatcctgcgccacgcccaggttgtcgccgcccaccgcggctccatcctcttctgggcccgcgtccccttcgccgacgacgagttcgtcgtgcccggatacttccccgtcgactacttcgtctacaccgccggcgccagcggcgccgcctcctcgtcgctgacgcggctgccgccttgcttcatcggcggcgccgcccccgacgacgaggaccactacttcaagccgtaccgcaagcagcaccagcggatcatgctggacgagaacgtcggattcctctccggcgacagcgacggcgagttcacggtggcggacatcacgatcgtcgactgcacttccctcacctatgcatcctcaaccaatcaccacgaacgctcgccgtcgccggtgcaatggaggatgcaccgtttggagatgcaagcagatgcgccgcaagctctccaaatgggtacatccctcatccctcttccggaagaggccatgatgcatggctgccgccattacgaggaggacgaccccgatccagctcgatgtgcctcggcaacctgcgccgggtcgataacgctcgtctgcatatacaatggcagcggcagaaagaagaacaagtctgcatctcctgcaactttcatcatcaagtcatggactctgattgatatccacaaatgtatatggctgcacgatttcaccatggaagccgatgagttctggagtatctgcgctcgagaaaacgagcgtcgtcttccactcgtgacgccgagtttccctgtggtgagcctggttgatctacatgccatctccttcctcctcaaggacggtgacaatggtctctactggttggttgaggttgacatgagaaacaaggccatgatttcaccggccgctctctacatcaatgaagaagaagaggaagatgctgcggtgacgacgagatctggaagccttttgatggccattacttcatccccagctggttcacctcttatttgcacgaggatcccatccagagttcaattagtagagcttttcatttgtcggcagttgagtcaaatgatgcagaagacaaaatatgagagaacaatgcataagattgcacggaaagttcgatgtgacagaaaatgggggacaaggcaaaatgacgcaggagaggaaacaagagagggcaacattgcccaagagatgaatggaggcagggttgacaattttgaaattggactttatgccgggggttag

SEQ ID NO: 13979 - DNA, 426 bp, Oryza sativa
  Clone ID: PAT_MRT4530_19961C.1
atggagaccgacgagccggcgaccaaggcggcaggaggtgagccgaaaccctcgccagcgaccaaggcggcgggagagcaagaggaggacgacgaggaggagagctccggcggtggtggcaccgagcctgagaatcgagttttcctttggacaaattttgaactagtcaaagagcacgcagctgtgtttgttgcttcaggagacagtggtccatccttcttccgtagaaaagacaccggtttcagagtattcagggagacagtggcccatccctcttccgtagaaaaggcaccggtttcagagtattcactattcaggatcaaattccaagcttcttacctcgggagtttgttcgcgtcgtcagccattgtgcgctgctttgatttgacgcgcgcgatttcttcgtgccatttgcgacgactatga

SEQ ID NO: 13980 - DNA, 399 bp, Oryza sativa
  Clone ID: PAT_MRT4530_19962C.1
atggcggcctccccggacggagcctcggcagcggcgggcgcggcagcggccgcgaaggggtcgagcatggcgctaaccacccacgacggacacggatgcaggcacatcgattgccaggaggagcatctcctgaagaaggaatattgccgcaccggtggtggcagacatcctcgtccccttccctcactttctacgattctactcggccatcaccggcagcaagccgggaagaagtcgctcgcggtcgcaccgcgccatggaagtcaagcagagtcagagaggatgacaggcagctgcggcctcccctcctccgatcccttccagttccagcacaccacccgcccctccctctccttctacaccccgcgctgcctcctccgccacaggccaccagcctaa

SEQ ID NO: 13981 - DNA, 573 bp, Oryza sativa
  Clone ID: PAT_MRT4530_19963C.1
ccacgcgtccggaatgattctctcacacctgggaggctcctccgtccagtgctcccctcgctgcgccgccatggctcgccggcgggcgccactggtgatcgtcctcgctctcctcctcctgctctccgtcgcggactcctccgcggtggccaaccaccgaccagcctgacgttgctgctctgaacgcgatgtgttgagcagcatgagcaacccgtccgaactgatgccctggaaagagagcggcggcgattcgggcgaggatgacgacgatggtgccggaatgaaaagcagcgaagcatatgtgacagagatctactagctggaatttggaccaaacatatatatgccagtacatgctttggtaacgctaacatagactcattttttatattatcttgagcaaatcactagctgtacctacgtagcagattgcacctgagaggcatgagacattacgactaagaatagccttgatcgaagatcgttcgcttcctcgatatctcagatgactgatctggaaacgctaaatcttggtaagaatcaattgagcgggcagttgacagatatgttttc

SEQ ID NO: 13982 - DNA, 1359 bp, Oryza sativa
  Clone ID: PAT_MRT4530_19964C.1
tcctcccccttctcatttccatttcgcaaatcattcgcgatgatgggggatgagatgacccctccaagctctcgccatcgccaagtcgccacctcgaaggctcaaagcaagatggcgcccgccaatgccacgagcgcggcgacgccggccgcgcgcgcggtcgtcgtggcgccggagttgtcggtcgtcggggtggcggtgggggagagcgacggcgagggtgtggccgcggtgggggcgggcgtcttggggctgatcggggagacggtcggcgccgtggtgggggcgaccgtcggggcggtggacggggtgggcgcgggcgccagcgccggcggaggcgtcgccgggggaggaggcgtggcgggaggaggcgccaggggcggggacgggggcggggtggcgggagcgggcgggggcgtcgccgggggagacggcggcggggtggcgggggccggaggaggctgcgacggcggcgacgggggtggcgtggtgggagcgggcgggggcgtcgccgggggagacggcggcggggtggtgggcgccgggggtggcgtggtcggtgccggaggcggcgtggtgggagccggaggaggggtggtcggcgccggcggtgcagggggaggcgtggtcggtgacgggggcgtcggcggcggggtattggacggcggcgcgttgggagccggcggcgactgcgtcggtggctgctgcgcggcggcggaggcgacgaggagcgcgaggaccagcgggaggagcgccatttcgccggtgtctgggaaggtcgatctctcgtctactcgagcagtgggaggaagcgagttctctcagagagtatgggctgaaattcaaaggtggaccgttctccagctaaatccccaaagctggggcaactgtgtctcggtggaggaatggtgcaaaaataaaggaataatcgataacatgggtaacagccagggcaagaagcctcgcagagctcaccgtttcaagagaggtcccccggtgtatttcctaaccgcaccaaaagtgcccaaggagtcattggaggtcctacacaagcagcgtaagcgtttcctctgggtgggatgtgtaaacctgacgggaggaaaatgcaaggtcaagtggacaagaacctgctcccccatcgctaacggcggcataggagcgctcgacttggaggagttcatatgtgcgttccatgtaagatggctctggcagggatggaagaccccaagaaaaccttggacggggcacgtgatgccgtgcatcgagaaggacaagcaactctttgcggcggccaccaccatttcagtgggagatgggtcagtagccccgcttctgggactcgccttggttgcaaggtag

SEQ ID NO: 13983 - DNA, 406 bp, Oryza sativa
  Clone ID: PAT_MRT4530_19965C.1
ggaaagctgactggtatggcttctcgtgttccaaccgtggatgtatctgacggtgatttcactgtcaggccggacaagcacccatcctatgaccagattactgctgctctcaaaggagagtctgaggcgaaactcaagggtgtcctgggccacgtcgaggaggaccttgttttcacagactgccacggtgacaacaggtcaagcatctgttatgcaaaggccaccattggtctgactgacatcttcgcctagcttgtctattgctttgacaacggatggagatgcatgctctcgcgttgttgaccttatccgtcacatgcacaacaccgattagaatatggcgactctttcatcaaaaatggacttcagcgctactgataataattaatgacctttcgcgagctac

SEQ ID NO: 13984 - DNA, 376 bp, Oryza sativa
  Clone ID: PAT_MRT4530_19966C.1
atttggattttcaaacacgggggttttacattcttttttctgtatttttagttttttggttttgaatttggatattttttcttttaaatttatgcaaatgatttttaaccatcatccgccgaaactgaaccacctaaagaaaaacaaagcttaatgttacaccaatggatgaatctcaggcatcaaaagagggccgatattctggcacaaatggcggaggaaccgacctaaattcaaacttggggctgaaggaccctgacggagacaacgatattgatactgaagaacaagagggggaaaaccacacacacacagaaaataggctgaagaggaaatttgtagctcctgaccttgcgatgagaacgttaccggctgc

SEQ ID NO: 13985 - DNA, 605 bp, Oryza sativa
  Clone ID: PAT_MRT4530_19967C.1
ttataaatttttggggaaaaccctcttgttgggggggcccacagggggagcacccaggccactcaggtgtgcacccggccctttgcccaacccggggccgtggtagggcccaccccccgggaaaccctcttggggctttgcccgggaacccccgtgttgctcttggcccccggtgcccggaaatggcccggcttgtgccctctggggccccctcctggtaaaaactcctgggggccccaccgggggttgtgccccttgtggcctctctcacaccgggccccccccggtgtaaccctgttggagaaaggaaaattgaaggaggtggctttcccatatagcccaaaccccttgcccgctttgctctgggaaataaacccatttaacccttggggatataaacctatgcacaataaggaaattcccgtgtctctaatgtgtgtggttggcctcttccggatgccggagtaaggattaataggaccattccggggccaattcgtaatttcataattccagaagttaaattctggaatttatggaaagccgaccaacctgccgaaaccatttcccaagaatggtttccattaaccaaaaaaaaaaaaaaa

SEQ ID NO: 13986 - DNA, 1470 bp, Oryza sativa
  Clone ID: PAT_MRT4530_19968C.1
atggcggcgtggacggcggcggcggggatgctggggtcggcggcgtacacgcggatgcgtgcagagaacccgtcggagttcatgccgaggagggtcctcctctcgcacgccggcctcgagaacgagatcgaccgcggcaacagcttctgggtcaaggcggcgctcgtctacgagtccgtcaccggcgaccacgtcgacgaccacaccaggcacctctcccgcgacctcctcctcaacctcgccgcctactgctgcccccacgtccaccccgacccttcaccacgtagaccgcaggccctttcagaaggtattgataataaacgaaagaaaacagtagtagttaaaagtataatattggaaagtttgtttgagaaggataagaagaaagcggaggatgatcagctggcgaagaggacgcagcatcccgacgaaggcacggaggagaacaagcaggtcatcgacgccatcttcctcgtcgtcggcttcctcccgcggctcaccaaggcggcggcgactggcggcggcaagggcgccgccgcggccgccgccaggcgtgacgccgtcgacgagagcttcaaggcgacgcacatgcaggacatcgtcacggacgtgatcaagctcgagaaccagctcccgatcaagcacctgctcgccgtggccgacctcgccgaggcggcggtccacgccgccgccggcgacatcccggggctcaaggacgacgtcgcgaaggcgctccgggaatacaagctcggattcgcgcgcgcgaatttcgacggcgtgatccgctcgttctgctcgtactactcgccgttcttctccaaggacgaacaggccaagaaacccgacgacgccgccatctccggcgagctcacgctcctggactgcctgcacgccagccttgttccgccgtcgtcggaagccggcggcggcgcgggaggggtgaaaggcggcaagacgtcgaggatcccgacggcgaaggagctccgccgctcgggcgtccgtctcgaggccggcgtggaggacggccgcgccgtggtccagttcaaggaggacgccgcgacgctgcggctgccggcgctggtgttcgacttcaagctggccacggtggcgaggaacctcctggcgcgggagctggaggagcagagcaagccggtgacccgctacttccaactgatgaacgagctcgtcgaggaggtcgccgacgtgaggatcctccgccgcgccggcgtcgtgcgcggcgggtccaggggcgccggcgaggtgcacgagctcatcaagaagatcgacgggtacgccacctacccgtcggtgttcatggccatggacgtgcaggtcgagaaggtgaaggtgttccacgagaagcggatgaacaacttcttcgtccgctaccgccccgccatcgtcgccgcctcgtcggtcgtcgccgcctccgtcgtcgccattgtcgccaccaggaagaagcgtgggtga

SEQ ID NO: 13987 - DNA, 296 bp, Oryza sativa
  unsure (1)..(296): unsure at all n locations
  Clone ID: PAT_MRT4530_19969C.1
gggaacgtatgactgctttccatagccattngggggtgtttgatgcatctgaaatttttcatcatcctttttttttcctcgggtgatgattggtgaacttactgtggttcattttgagacgatgaatgcgcaaatcctgcctaggcattcagtctgatgcacctgctggtaggatttccatgaagattttgataccgaaaatacgatagagaaatggccttgtgccgctcctaatgtctagtacttatttcttatgatgtgaatggatgatctttttgatgaaaaaaaaaaaaaaa

SEQ ID NO: 13988 - DNA, 331 bp, Oryza sativa
  Clone ID: PAT_MRT4530_1996C.1
gtcattaggcagcgacgttggtaatgccccaagagcggtcggcgaggtggaggcattcagggaagcggaagcagtccacgaggtggtcgatgaccatgcccgaggcctgcatgaaggagtagaccatgaccgggcccaccagggggaagccccgggggaccaaggccttgctcaccgcctcttacttgggcgtcccgaacgggaagtacttgtgggggttgtacctccccacccgcgggcggggggtgaactgcccccctatgtattcgctgaaagaaccaaacttctttggcaccttttgaaaggatttgggggtcttcaagaaggaccc

SEQ ID NO: 13989 - DNA, 546 bp, Oryza sativa
  Clone ID: PAT_MRT4530_19970C.1
atggtgatagagaatatcggcaccacagaaaatcagactgaagtaaagaatcatcttttcgaaattgatcttgtcgctatgaaagcagagttcaagttaagcttaaatgcttatttgtcagacttgctgtactccccagttcgttctcttgcagatgtcatagcattcaacaatgcacatcctgtggaggagaggcttaaagattttggacagagctttcttactgattcccaaaaaaccaatggcattggacccagggagaaaactgtactcaagatactcaaagagatatctactgatgtgttggagaaactgatgaagaagcaccagttggatgcgattgtcacacccaactctgacgcctccaccattttcgccatcggcggcatgccggcgatcgctgtaccagctgggtatgacaatcagggagtgccatttgctatctgcttcggtggattgaagggctacgagccgaggcttatcgaaatggcctatgcttttgagcaagctaccaaagttcgaaggatgccacgttacaagcactag

SEQ ID NO: 13990 - DNA, 561 bp, Oryza sativa
  Clone ID: PAT_MRT4530_19971C.1
tttggtttactcctggaactctggaaccactagtattacatttcaactgcattcagctaaataatcagaacatatgagctcatgcaaccatgcacaaacagattcaagaatagccttatacatatcacatatgcgagggcaaacatgcacctatgatatagcttaaacatttgtaacaaggtaccaggttcaagtaacaaacatcaattcatcatctcaagcacacattcctaatacttatataaaggtactagtgatcataagcggaggaaatcatgaataatctccaaggaaatgccaaaatagcagcagttctttggtggatctaagcgcagggccaaaccaaacaccttactcctccgctggagcaggagcagcagcagcctccgactcggacgcggccccctccgcgggcgccgccgctgccggagacggagcggcgcgggacttggcgagctcgaggaggcggcggctgacctccttggagtacgcctgcagcacctcgatcccgtcctcgacggaggccggggcggcggcggcggacgacgactcggtgacggc

SEQ ID NO: 13991 - DNA, 783 bp, Oryza sativa
  Clone ID: PAT_MRT4530_19972C.1
atgtggcgccgacccgggcagctccgcctccacctcgcggcggcggccggagccgctggccgcggcgccaggaggaggaacccgcttccccctgtccccaccgtgccctcctcctcctcctcctcctccgcctctaccaccaccacccgcgatctcgcagccttcgctcggggctcctcctcctcctcccggagcctctcggaccgggcagggggaggcgagtgctggagctgcggcgcgagcggcgcgttcctctcatgcgggtcctgcggcagcgtgcagcccgtcgaccccgccgtcgattatttccggatctttggcctagaaagggaatacaccataaaggataacaatttagaagggaaatacaaagactggcagaagaagttacatcctgacctagttcattctaaatctgaggtcgcgcccgcctttgctgctgagcaatcagcacttgtaattgatgcataccgcacactgagcaaacctttgtcaagggcattatacttgctccaactagaggggatacccattgatgaagaaaagactatcactgatcctgaacttcttatggagatgatggagatacgtgaagcagttaatgatgccaatgattctcaaaccctggagaagatacaatctcagattaagagaaagctggaaacctggtcccattccttccaggaagcatttgaaaggagggatttcgaccgtgcagtgaaagctacacagagaatgaggtattatgaacgcgcagtggaagaaaccataaagaagctctaa

SEQ ID NO: 13992 - DNA, 876 bp, Oryza sativa
  unsure (1)..(876): unsure at all n locations
  Clone ID: PAT_MRT4530_19973C.1
cccgggctgcaggaatcggcacgaggctcctcctctcagcactcctcctcctccttccactgcaaacatcctactntgcggtcgcccaacccaacaataaagcttcaaaaaagctctacattgcgtacttaggggaaaagcagcatgaagatcctcaaaaaacaacagcttcacaccaagatatgctcaccagaatccttggaagcaaagaggcagcacttgagtcgattatttacagctataagcatgccttctctgggttcgccgccatgctcactgaatcacaggcacaaacaattgcagagctacctgaggtacacagcataaaaccaagcagagtgcacccattacatacaactcatagccaggatttccttggattagactacaccaagccaactggtctactccatgatgcaaagtacggagacggcatcatcattggaataatcgacacaggtatctggcctgagtctgcaagctttagtgaccatggcctaagccctattccttccaaatggaaaggccaatgtcaagctggcgaagccttcaggtcaaaccagtgcaaccggaagattattggggctcgatggtatgacaaacatttgagcgcagaggatctgaaaggagaatataggtcggccagggacgcgcatggccatgggacacatgtggcatccactgcagctggtgccctggtaccaaacattagcttccatgggctagctgctggttatgccaggggcgtcgcaccccacgcacggcttgcagtctacaaggcgtgctggggactgggggcaagctgtcatgatgcgggcatcatcaaagcgttagacggtgccatgcgtgatggcgtcgatgtactatccctttcta

SEQ ID NO: 13993 - DNA, 657 bp, Oryza sativa
  Clone ID: PAT_MRT4530_19974C.1
atggactactcaggaggtgtgtaccaacagctgaaggcacccaaatcattgaaaaatgccatgcggcaccctaaggaggccactatggtgcattcctcacccaggcaaagatctgacagagtggattcttttggcctacaatgtatgaagacacaaatgagttcattcggagatgtgcaagataccagaagcatggagaaccttcaagtggaactttttgatgtatggagtattgactacatggaacctttcccaaagttcaagattgcgagagtacgtcctgccatggtggaagcaatgtcatgccatgccgccgatgccaagcatgcctgcaagatgttccatgaggtcatcttccctctttttgacataccatggatgataatttgtgtcccgttgttccaagttaacaatgcactcaggccatcccatgctaacggtggtgttgtgacccctgtggcagcgcccaatggaaatgagaacaacccctgtccgagtatggacacatcgtcctacttgctagatagccctccaccaaagcgaccactttgccctctgccgaagcgaccactttgcttcgtggaagcgagcacacccgttggacatgggaaggtgctcattccatccctgtccccctgcgagaagttgaaggtgtag

SEQ ID NO: 13994 - DNA, 1190 bp, Oryza sativa
  Clone ID: PAT_MRT4530_19975C.1
ctcgagtagtggtagcagcacgactgcacgacgctagtacccgggcgtcaccgtcgccgttgcgcgcgcgcgctgtacttgcaagcaaaagcccccctcgtcaattgaatgcgtgcgtcgcgcaacgcaacgcaagcacgcgccgggttttattttcttttcttcgtcgtctcccacactctccgcttccgttccgtctcgttgttgttgctgccgcagcagcgcaggtgaaaatctccggcatttaaggttgcgccgcgggggatcctcctcggccacaaacaaaaccaccctcgtcctccgcgcctctgctagcgagtactcctacatagactagccacgtctccccccaaatcttttcgcacttcctttcccctccctttcacccactgaatcactcgaagtcgtcgttctcgtccacggccctgctgtctcgtgcgctccggcagctttggcgggggtgggtgggggagcgcgcgccatggggagggcgccgtgttgcgacaagaaggggctcaagaagggggcgtggacgccggaggaggacaagctcctcgtcgactacatccaggtcaacggtcacggcagctggcgcctcctccccaagctcgcaggtaccggctggcttctctgttcttgcgaggcaatgctttgcttctgtcacgttttcgtgttcgcgtgccgcactagtgctgaactgctgatcagcacattctgagaatctgtcttgatgatttcggccttagatgctgcttatactcgattgcatctgcataccttcaagctgcaataatcacccacaagctcgattggggctaaaatacacaaattatttcatcgtatacaaagtaggagtactgattaagtcgtacactcggcgagtactaggctcactcgtactactccctgctgggttttccttgatcttcactccaggcatcagcattgcctccagctacgaacactcggtcactcactccagggctccaggctcctaccattaccatgcccatgttgtgctactctcttttcgtgcatgagaagtactcggtattattcacaggagctgagagactctagtccgttccatctggataacacttcgttttgcgttgcatgcagggctgaaccggtgcggcaagagctgccggctgcggtggacgaactacctccggcctcgtgccgaattc

SEQ ID NO: 13995 - DNA, 376 bp, Oryza sativa
  unsure (1)..(376): unsure at all n locations
  Clone ID: PAT_MRT4530_19976C.1
ctcctataacaacatgacatccatagggggcgcgaaagttttcttcacagtttgcttcttcctcttgtgcaatggctccctagcccaacagctattaggccatatcactactcaatggcaaagttctcactctagaaatccgagacgatatagatttgatacgtttcaagcattcgaggggggggggagtctaacgtctcaacctancacaactgacttcttcaatgtctctaatgagccgattcaatgtaccggaatatctcaagtcccccgagccatagaacctacaggcctactactaccccatcacactaacggtgcatccctactatatatcatcccaccgacacgaataacaagggcgactcacaaaggc

SEQ ID NO: 13996 - DNA, 1819 bp, Oryza sativa
  Clone ID: PAT_MRT4530_19977C.1
cggtccggattcccggtcgccaggcgtccgaaggatgaagcatttggctaaaacaattgctaattcatcttcaggaaacttgggcctgaaccagacggggtttggcaaagtgaagcggataagcctctcatcttatcttagacattctctgcacagtggaagtgactctgatgcacctagtccagcacccttgcctcaacaaggccatcacaatcatcatcaacatcaccatcaccaccaccaccaccatcaccaccaccatagtcatgaagaaaaaaggcatttgtgtccgtctcctgcacctgtacattctcctgttgaacaacccaaatatagatctccaccgtctgttcaaccacctctagatgtcgcatatattgaatgtcactgtgtgtagtggtcaaagccaaggaggtggcaggccccttctgttgttgcacaggtgaagctctgtccgtcttctcctgcgagtttctggcagcagtcttctgagtaaattttgtaccctgtgcgaaacgctcacctaattggtatccgttcatcatactaatggctgtctgtgcagaagcaggagaatcatagcttataaaaccgaagcatttactaagaccagttgctttgtctacaaaaactttagcactcagtactctaccaaaaccctgaaaggcaccggcaagatcttggtcgccaaattcttgagggatgtggtagataaataaattggctccaggaggaccaggatatgatcccggatactgcatactaggcacaggcgaataaggactgcctaactgcattgagttaaacgatctaggagcagaattaggtgaaagttcagaattgactccacgaatagagcttccttgattaacagactgaaccatattcgggaaggcagcttgattttgcataggagataaagggtactgcattagtccataggttccttgtggctggtagccataaccattatactgtggtacatatcccatctgcatagctccaaataatgaagactgttgcattgcatttggatttgacatattagatgggtgaaattgagccttttgtgcttttcgagcttgtctttccttctcagtgtcagcccatttaacaaccaaaggtacacttgaaccctctattttgtgtttcccatttagagcttcgatagctgccagcgcttgctcttttgtttcatacttcaaaaaggcacagccggcttgcttgtctgttgtgaacctctcaaaatttgcaaatccttgatgttcccatattgcgaaaataaatcagtcatttcagcatctgttacattttttggaagcattccaatgaaaagtttgtgctccagtctttccaactctccatcagcatatttcacttgcaatggacttgaagcccctggaagggtgcgcttgttgtgatatgcattcaccgccttgtcagcctcctcccttgatgggcagatcaaaaagcagcagcctcgggacgccttggtggccttgtcgcggatgagggtgacctcgtcgacgacggcaacggcggcgaacatggcggcgagctcgtcctccgtcatctgcttcggcacctgccccacgaacagcttcacgctctcctcccccctcccgttcccctgctcctcccctccccccacccccgccgccgcggctgccggtgccgccgcctcctcctgctgctgctgctggttctgctggtccctgtcgccgccgccgtcctccgccatatccatacaccaataagccaaagaatagaactcctgtagcaccagcagctgagccagtacctagtaaacacaataatc

SEQ ID NO: 13997 - DNA, 217 bp, Oryza sativa
  Clone ID: PAT_MRT4530_19978C.1
tgggcacgcgtgcgctgacgcgtagggagcaggctcggtccgttcgtactgtcgttgacaaagcagtttctattgttaagaacactcgttgcctagaagattttaagcgccaatatcaacacttacgtatccgactctaagctcgcgctcgagcactagagcatgcacacaagttgccgctccatgatcgacaagctggagaagaacctataactgt

SEQ ID NO: 13998 - DNA, 408 bp, Oryza sativa
  Clone ID: PAT_MRT4530_19979C.1
atggggagggcgccgctggggcaatttcgggcggggggtctgcctcggcacgtgggcctcacgatgcgtcgcggcggtcgttggggccttgagctagtttcgggccccttctggacacgcagggtgggtttcggggagtgtccgtgccggaggtcgcggccgcctgtttgcgaggatcggcgtgtgttcgcgcgctcgcgttggtgggcgattggggcggggggggcagtggtggcgttgggtaccgtgtgggtatttggttgttggcgtgggtctggcactcggtgcgtggcgttaatacggggcgtatgggcggcgcagcgactccgctatatcgacgcggtgggaggtcgtggtggggtagtggcagcggccgttgtgcgggctgccgcgccgccgttgtgtgtg

SEQ ID NO: 13999 - DNA, 1978 bp, Oryza sativa
  Clone ID: PAT_MRT4530_1997C.1
tttttttttttttttttttttttttttttttttttttttttttttttccacccagaaaacaccaagaaacttggcttcggttgatagatagacagatgatgcagttccggttacagcatcatcgatcttaaggttcacatcacatttctcactgcaacctaacacatgatttggcgcactaccctggtacaggctataggcatctctgtacattctttatatacacatacagaagggtacaagttttattaattgaattatcgggtaaacgacttcaaattctgatttgggatacctaatgtatgatgacaagattcagcacagggtgcacagctgaggcacagcgcgcccaacgtctgctttgtgttcctcacctcaacacagcgagtcaagatacgagtgattatacagacggccaaactggaggaggctgccgtatgttctatcccacacaccgacaaaaagcatgtcggtgtccgggctgaaagacatgccagatatctcaccaaagaagtccagctcttgccttctggtgtaatcactcccgacatcgaagacgtggacaaagtccgctggttctgccatcgacatgaactgcccatctgacgtgaagcggattgatcttatggctccaaggttacccctcaaaacatggagggatttagagagattccgcgcatcccaaatccggcatgtcttatcttggttgccagtagcaaatgttctgccatctgggctccaagctgatgcaaacgagtaatcaaagtgacctttcaaggaatgaagagtctttcctgaattggcgtcaattagtaaaccattaggatcatcccccacaataacagcaagctttctgtcaggactcaatgctgtatgattcactggccattcaaactgaaaatgcttgtagagctgaaacctctccatatcatagtctcttacaccagagtcattattcgatgccatgaagtgaacagcaccactggtagtattgaatatctcaacagcattagtaatagcgttttcatcatatgtagttcgacagcaaaagctaattccttctcgatcaaggtgcttgcagattagctctccttgaaacccaccagctaccagcaaattgtccttgactgacaaggtactaacttgggtcccagaaaaaccctcaagtaaacttccagggtgcttctccctgggtgccacatgtccttggacattcataagctcggtatcaagaccactcagtgccgaccaatgaagaacagagaaatgtgacattaaatagacatcgtgcttggatgtcgcccatactaaatttctcagctgaaaatgtagtatagttgattttactgatctagtatttcgcctaaattcataatacatcccgcctttttcagtcggtttgcattcctttgcggctgcttctccagaattaggcatgttctcataattcttgtactgatctaatctggtctgtctgtatttatcacgtgtgatcgctagcttctcccatggtattccttgaatatcctttccttttcttgcatcaactgatgaggtatctgggatcttatcattcgactggccatgctcttcatcctctgaatccgaatccctcatccctcgctcatagttctcttcgcccatgtcatcagcagtgtcgtccatgtcataatcatcctccatctcttcaatgtggtcttcgtgataattggacattgatcctcacgtgaagataaacgtcccccgccttcaattcgatccgcacggcgacggattcggggtgtaaggaggccggcccgcctcgcccctctcgcccggccgcgcgcgcgactacgccgacgacgcctcacaggggggaggaggctcgagcggaggcgaggggaaggggaggaggaggccgcccaccaccgtgccctcggggcgccctctcgccggcggcgcgggcgaagctgcagatcgatgggcggcgatggcacgc

SEQ ID NO: 14000 - DNA, 590 bp, Oryza sativa
  Clone ID: PAT_MRT4530_19980C.1
atgtgggccacccggcacggcgcggcccaggcctggccgtgcctgggccgaggcttgtcggccggcacggcccgaccgacgcaccaggccgtgccgtgccagcccactccctatactttgtgtgccgggcctggcctgccggcccatcgcgccgggccggcccgaccgtgccaggccagcctagcatgccggcagggaggcccaggcatagtggaaaattaccgccgggccggcacgggcccgacccaagtcaggccgggccaaaaagtcgtgccatgggccgggccttcgggcctcgggccttatggccatctatagtatagacacaatcatttatggtgtattattttaaaaaatatcatgacattaattattacatgttggctaaattatttaaaaataattatgacattaagtattatatgtcggcactatgtatttagcactataatataactattatatgtgatcaatattttatttaattaaaggaatacaacatattataagttagatatatatttcataaataatttaaaagatgaacatttaaagacaatttaaagacagttgatttgatacattatatt

SEQ ID NO: 14001 - DNA, 446 bp, Oryza sativa
  Clone ID: PAT_MRT4530_19981C.1
actatagatggccatgtgggccacccggcacggcgcggcccaggcctggccgtgcctgggccgaggcttgtcggccggcacggcccgaccgacgcaccaggccgtgccgtgccagcccacgtgccgcactcacggcccaggcacagcccaacacgcctcgggccgtgctgtgctggcctgaaggcacgatgggccatgtccctatactttgtgtgccgggcctggcctgccggcccatcgcgccgggccggcccgaccgtgccaggccagcctagcatgccggcagggaggcccaggcatagtggaaaattaccgccgggccggcacgggcccgacccaagtcaggccgggccaaaaagtcgtgccatgggccgggccttcgggcctcgggccttatggccatctatagtatagacacaatcatttatggtgttaatcagttcttc

SEQ ID NO: 14002 - DNA, 360 bp, Oryza sativa
  Clone ID: PAT_MRT4530_19982C.1
tttttcatggatgtgttctgcgggcatatactgccattttccgttaaccctacagttatcttaacagcaacgagaatgaataggggatgtgatcatttcgtatctgaagatgccttatcttccggagtaatacatctttattcacgctgggaattgcaaatgcaggccctggtggagatcttcgtgtttatgctggagaacctcacagtttgcagaagatgtccgagtgctaaaattggcaacattccaatttggccaacgcttttcatcacacagtagtgaatccacacttggagctttctatgcaccaaaatagtgtggctagcttactcttattttcccttgatggcgccaaagtgc

SEQ ID NO: 14003 - DNA, 5013 bp, Oryza sativa
  Clone ID: PAT_MRT4530_19983C.1
atgaaagaagatgaagtggaagacgacaatattctggattttgctcagtacattggatttgaaggaaatcaaacgggcgaggaggaaagggatgctgatggtaacgacgttgcggatgatcttggtcagatgttgcaggacgccaaggaggactgcgaaagtgaaaagggggcccataaattggacaagatgttagaggaccacagaatgtcgttgtacccgggttgcgagcaggggcacaaaaagttggataccactctagagttcttgcaatggaaggtaaaaaatggggttagtgacaaggcatttggcgatttattgaaactcgtcaagaacattcttccggaggaaaacaaattgcccgagacaacgtatgagactaagaagatagtctgcccgctaggactggaagttcagaagattcacacatgtccgaatgattgtatcctatatcgcggtgaggagtacgagaacctagaagcatgccctgtttgcaaagcactacgatacaagattagacgagacgatctaggagaagttgacgggcagctaacaaagaagagaattcctactaaggtgatgtggtatttccctataataccacggctaaggcgtttgttcaggaacaaggggaatgctagaatgatgcgatggcacgctgaagagcatcaacaggacgggatgctgagacaccccgccgatggttcgcagtggcgaaacatcgacagaaaatttaaagaatttgaaaaggacgcacgaaacatacggtttggccccaagcaacccggtaacgacatcgatgtgtacctaagaccactggtcgaagatcttaaactgttgtggaagaaggaaggtgtccccgtgtgggacgaggacaaacaggaggagtttaacctacgagcgctgctgttcgtaaccatcaacgattggcctgcacttagcaacctatccggacagtccaacaaggggtacaaggcttgcactcactgtatggatgaaacagaaagtatgtatcttaagcactgtaggcaggttgtatacatgggtcatagtcgattccttacagcaaaccacccggtacggaagaaaggcaagcacttcgaacataaggctgaccactgtacgaagcctaaacatcacatcgggaaaacagtgtttgctatggttaaagatcttaaagtagtgttcggaaaggggcctgaaagccagcctatagagagcgaagatggtcacgcggcgatgtggaaaaagaactctatattttgggagttaccctattgggaattcttggacgtccgccacgcaatcgacgtgatgcacctcactaagaacctttgtgtaaaccttcttggcttcctaggtgtatacggaaagtcaaaagatacactggaagcacgtaatgatctgaagcatatggaacaacgcggcgacctttacctggaaccaaaggagaaaggaagccaatacttgagtccagccagcactcttagcaaggcagagaaggaaagtatgtttgaatgcttggagagcatacaggtaccgtctggatactccacgaatatcaagcgaataataagcatgaaggagaagaagttcacaaacctaaagtctcatgactgtcacgtgttgatgacacaactgctaccagttgtaataaggggtatccttccagacaatgtccgggcaacaataacaaagctatgtgcattcaggaacgcaatttcgcacaaggtcatcgatctggatagattagaagcccttcagaatgatgtggtgcaatgtctcgtcagttttgagttgatatttccaccttcatttttcaatataatgacgcatctgctttgtcatcttgtcaaagagatcagtattctcgggcctgtgtacctacacaacatgtttcctttcgagaggtacatgggcgttctgaaaaagtatgttcgtaaccgtgctcgtccagaggcaagcatcgccaagggttatggaacagagagggtacctgaatcatgccatgaagggagactacggggaaagggaactctcagaaggaaagcaataatgacgggatatgagatcaatgggtacacattctacacgagagcccaagacatgaatagcacgaaccaaaacagcgttgttcgtgtcgataccatgggacacgatggaagaactggcacgtattacggtgccatcgagaacatatgggaacttgactatggtcctctcaaggtccctctgttccggtgccaatgggttaggttgactggtggaggcgtaatgattgatgatagtggaatgacaacggttgaccttaacaagatggctgatcgcgatgaggaacagatattgtacgatacaatcgcggagggaagcagccagtactggaacgaagaagaggggaacgaggatccaaaccagtatttgaacgaggaagggaacgtggagagagatacggaggggaaccaggaggggcacgtggaaagggatgtggaggggaaccaggaggaggaggctagtggaagtcaaccctccgttggacagaagagggcacgcgggcaacgaggtgtcgcgaagaagcttgagggtcagcacatcataacggaagtggacgaagacagccgacctagtgccccggcagaagacgccaagaactatgtgcgtcacagcggttgggttgtgcgggataacgtgcctatcagtacggtgtactggcgcagaacaagggcacgcggagatcatgagagctttgtcccatattcggagaaagagatgctatggaccacaatgctcgagacattcacccttcctgcgggtacagaggacaaagtgaaaaggtggactctgaagaaaatggcagaacagtttcagagcttcaagggagatctgtaccagaaatatatcctgaaggggcagacaccgaactttgacacattcccaaagctaagggatcactgggacgagttcgttacatataagacaggtgaacaagggcaggcgatgatggaaagaaacaaagaaaataccaccaagaagaagtaccatcaccacttggggtcaggtggctatagcgtcgcgatgccgaagtgggaggagatggaggctagcttacttgataggggtatcgaaccggccaccgctaattggccggaacgatcgaagttctggtactatgctcacggtagaacgctcaacccagctgatggctccctggtcttcggcgatcagatacgcgaggctgcgcgtcgactaacagacgcagtggaagcctcttctcagggcacgttccgaccggacaaagagaaggacgagctgtcactcgccctgcagactctagagcatccaggacgaacacgagggaaaggggtgattccttggaagattgggttcaaggaggacatccacacgtacaggagtcggatgaggagcaagagagataccgaggcgaagattgcagatctagagttcagggtatcgagctacgagctcagcatgcaagaggaggtggcaagaaaggttgatgaacgcatggccgcacatcggtcccatgatccccagccgaccattcctcctgcaatggtggcgtcgggcatggccatcccagcggacccttcaggtacttaccactgcaggccgattccagtaggatactccaaggtcgatgttgagttggtcgaaggcgcatacgaggaccttgagctggattaccctggaggagatggctcctccaccgtctcctcctcaggctccagcaccgtctcctcctcatgctccagcaccgtctccacctcaagctctagcaccgactcctccttaggctcctgcaccgattcctcctcaggctcctgcaccgattcctcctcaggctcctacaccgactcctccgcaagctcctcttccagcaccttccaagtcaagggcccccaagctctaccgcctgcccccacaagggcaatgaagaaggcgaaagttgacgccgccaagaacaaggacccagggggtatgtctgcacctgccaaggaggccataaagctatcggactatgagcgaacgctcaagaaagcatcttctggaaagtccaaaccagtccctcagcttggagagcaaccaaaccaggagatcaagctgttggtgaccggtgaagattttggaatacaagaatttattaatgacaccgggctaactacggatcaattgctaggagacgcaccagtcgaaaaggcggaagtgaaatacatgtacaaactcggtaaaccgcttgtcaagcctgagctgctgcagtctctacccacacaaatgtacaagttccatcagctgtacatggagatgagcgccaccggtagagagatgatcggagcgaggatcagggacacggacttcttgcaaggagatgacattctctggatcaatttcaagggaatctacgaactataccagctggacgccctcgacgtctctattatgagttgctggattttaatggagattcaaagggcctggcggtggggggttttcgatactggattcatcgaccctcagaaagtaaacatcgcaatgctcaaccaatatccgcaagccacaaaggacaatctcgtccatctcctgaaggcgcagcattacaagacgtttatactattgccgtacaacacagaattccactgggtgcttttactcttcgacctggaggcctgcaccgtcaatgtatatgacttagtggataaaaaagagtctacgtttgacgaggttttcgaacttatagacagggcttggtatcggttccgtcatttggtccgcggcaaatggagagaaagacttaggcggaagttcaaatttccttttattcgcatgagggataacctgatcacacacaaggaatttatcgcggcggttcaagaacaactcatgggattcatcaacgaacaaatccttgatcccaagggtgaattctactacgacggaaacacaattcataggtccttagcttctgagctagcgactactactacgtcgaaatcgtag

SEQ ID NO: 14004 - DNA, 1733 bp, Oryza sativa
  Clone ID: PAT_MRT4530_19984C.1
atgaagaggaagtacataatgatgccgattattattcaaggccccaagcaacctggtaacgacatcgatgtatacctaaggccactggtcaaagatcttaagatgttgtggaagaaggaaggtgtccccgtgtgcgacgaggacaaacaggaggagtttaacatacgagcactgctgttcgtaaccatcaacgattggcctgcacttagcaacctatccggacagtccaacaaggggtacaaggcttgcactcactgtatggatgaaacagaaagtacgtatcttaagcactgtaggaaggttgtatacatgggtcatcgtcgattccttgcagcaaaccacccggtacggaagaaaggcaagcacttcgaacataaggctgaccaccgtacgaagcctaaacatcgcaacgggaaaacagtgtttgctatggttaaagatctaaaagtagtgttcggaaaggggcctggaagccagtctatagagagcgaagatggtcacgcggcgatgtggaaaaagaactctatattttgggagttaccctattgggaattcttggacgtacgccacgcaatcgacgtgatgcacctcactaagaacctttgcgtaaaccttcttggcttcctaggtgtacacggaaagtcgaaagatacactggaagcacgtaatgatctgaagcatatggaacaacgcggcgaccttcacctggaaccaaaggagaaaggaagccattacttgagtccagccagctacactcttagcaaggcagagaaggaaaaggcaagcatcgccaagggttatgaaacagaggaggtcatcgaattttgtgtagaatttatcgaagatcttcgcccaatcggggtacctgaatcacgccatgaagggagactacagggaaagggaactctcggaaggaaagcaataatgacggtagacaacaatttattccgtaaagcccatttcacggttctgcaacaatcttcattggtagctccttacatcgaggagcacttggctctagttcgcgctaggaacattgatactttccccgcgtggatacgacaacatctcatgggtaacgagtcgatcaaccaacaacttgccttcctggcgaggggaccgtctaggtcgatcgcgacattccagggatatgagatcaatgggtacacattctacacgagagcccaagacatgaagagcacgaaccaaaacagcgctgttcgtgtcgatgccatgggacacgatggaacaactggcacgtattacggtgccatcgaggacatatgggaacttgactatggtcctctcaaggtccctctgttctggtgccaatgggttaagttgactggtggaggcgtaatgattgatgacagtgggatgacaacggttgaccttaacaacgttggatactcagacgaaccttttgtccttgccaatgatgtaacgcaagtctttttcgtgaaggacatgtatagcaaaggaaagaagggcagagggcctgacgagcctaagcgtcacgtggttctcccaggcaaaagaaaaatcgtcggagttgaggacaagactgacgaggattacgatcagttggatggacaaccccctttcacggtgacgattgaccctagcatcctcctatcaaatgaagacaccccttactcacgtagcgatcacaatgagggaacaatagtgaggagaaagtacgtgcggtcaaccgtcaccgccgatgtattgcc

SEQ ID NO: 14005 - DNA, 1518 bp, Oryza sativa
  Clone ID: PAT_MRT4530_19985C.1
atggctgaccgcgatgaggaacagatattgtacgatacaatcgcggagggaagcagtcagtactggaatgaagaagaggggaacgaggatccaaaccagtacttgaacgaggaagggaacgtggagagggatgcggaggggaaccagcaggggcacgtggaaagagatgtggaggggaaccaggaggaggaggctagtggtagtcaaccctccgttggacagaagagggcacgcgggcaacgagatcatgagagctttgtcccagattcggagaaagagatgctgtggaccacaatgctcgagacattcacccttcctgcgggtacagaggacaaagtgaaaaggtggactctgaagaaaatggcagaacagtttcagagcttcaagggagatctgtaccagaagtatatactgaaggggcagacaccgaacttcgacacattcccaaagctaagggatcactgggacgagttcgttgcatataagacaggtgaacaagggcaggcgatgatggaaagaaacaaagaaaatgccgccaagaagaagtaccatcaccacttggggtcaggaggctatagcgtcgcgatgccgaagtgggagcagatggaggctagcttgattgagaggggtatcgaaccggcaacagccaattggctggaacgatcgaagttctggtactatgctcacggtggaacgctcaacccagctgatggctcactgaacgctgaagaaagcatcttctggaaagtccaaaccagtccctcagcttggagagcaaccaaaccaggagatcgagccgttggtgaccggggaatctacgaactataccagctggacgccctcgacgtctctattatgagttgctggattttaatggagattcaaagggcccgacggcggagggttttcgatactggattcatcgaccctcggaaagtaaacgtcgcaatgctcgaccaatatccacaagaaacagaggacaatctcgtccatctcctgaaggcgcagcattacaagacgttcatactgttgccatacaacacagaattccactgggtgcttttactcatcgacctggaggcctgcaccgtcaacgtatatgactcaatggataaaaaagagtctacgtttgacaaggttttcgaacttatagacagggcttggtatcggttccgtcttttggtccgcggcaaatggagagaaagacttaggcggaagttcaaatttccttgcgcaaagcaaaagcagggaactaacttgtgcggctattacgtgtgcgagtattgccactgccttgcagaccaaatcatcaccacaagagagctcgattttattcgcatgagggataacctgaccacacacaaggaatttatcgcggcggttcaagaacaactcatgggattcatcaacgaagaaatccttgatcccaagggtaaattctactacgacggaaacacaattcaccggtccttagcttctgagctagcagcgagtactctacgtcgaaatcgtagctag

SEQ ID NO: 14006 - DNA, 2604 bp, Oryza sativa
  Clone ID: PAT_MRT4530_19986C.1
atggctgatcacgatgaggaacagatattgtacgatacaatcgcggagggaagcagccagtactggaacgaagaagaggggaacgaggacccaaaccagtatttgaatgaggaagggaacgtggagagggatgcggaggggaaccaggaggggcacgtggaaagggatgtggaggggaaccaggaggaggaggctagtggaagtcaaccctccgttggacagaagagggcacgtgggcaacgaggtgccacgaagaagcttgagggtcggcacatcataacggaagtggaagaagatggacgacctagtgccccggcagaagccaccaagaactatgtacgtcacagcggttgggttgtgcgggataacgtgcctgtcattacggtgtattggcgaagaacaagggcacgcggagatcatgagagctttgtcccagatttggagaaagagatgctgtggaccacaatgctcgagacattcacccttcccgcgggtacagaggacaaagtgaaaaggtggactctaaagaaaatggcagaacagtttcagagcttcaagggagatctgtaccagaaatatatcctgaaggggcagacaccgaacttcgacacattcccaaagctaagggatcactgggacgagttcgttgcatataagacaggtcaacaagggcaagcgatgatggaaagaaacaaagaaaatgccgccaagaagaagtaccatcaccactgggggtcaggcggctatagtgtcgcgatgccgaagtgggaggagatggaggcaagcttgcttgagaggggtatcgaaccggccaccgttaaatggccggatcgatcgaagttccggtactatgctcacggtggaacgctcaacccagttgatggctccctggtcttcagcgatcagatacgcgaggctgcgcgtcgactaacagacgcagtggaagcctcttctcagggcacgttccgtcccgacagagagaaggacgagctgtcactcgccctgcagactctagagcatccaggacgaacacgagggaaaggggtgattccttggaagattggattcaaggaggacatccacacgtataggagtcgaatgagtagcaagagagataccgatgcgaagattacagatcttgagtatagggtatcgagctacgagctcagcatgcaagaggaggtggcaaggaaggttgatgaacgcatggccgcacatcggtcccatgatccccagccgaccattcttcctgcaatggtgagcccttcaggcaatcgtagcagctgcgcctcaacggggcaggtggcgtcgggcatggccataccaacagaccctttaggtacttaccactgtaggccaattccagcaggatactccaaggtcgaagttgagttggtggaaggcgcgtacgaggacctcgagttggattaccctggaggagacgctcctcgtccggcaccttccaagtcaagggccccccaagctccaccgcctgcccccacaagggcaacgaagaaggcgaaagttgacgccgcaaaaaataaggacccggggtacgattgcacgcaaaaggagcttgacgcttatgtggcatcagaagtcaggagacaattgaagcctcgaagtctagaaaataagattcctatatactcgagtgccaggaacttattcaggtgtatgtttgcacctgccaaggaggccataaagctatcggactatgagcgaacacttaagaaagcatcttctggaaagtccaaaccagtccctcagcttggagagcaaccaaaccaagagatcgagtcgttggtgaccggtgtagattttggaatacaagaatttattaatgacaccgggctaactatggatcaattgctacgaggcgcaccaatcgaaaaggcggaagtgaaatacatgtacgaactcggtaaaccacttgtcaagcctgagcagctacagtccctacccacacaaatgtacaagttccatcaactgtacatggagatgagcgccaccggtagagaaatgatcggagcgaggatcagggacacggacttcttgcaaggagatgacattctctggatcaatttcaagggtatctacgaactgtaccagctggacgccctcgacgtctctattatgagttgctggattttaatggagattcaaagggcccgacggcggggggttttcgatactggattcattgacccttggaaagtaaacgtcgcaatgctcgtccagtatccgcaagccacagaggacaatctcgtccatctcctgaaggcgcagcattacaagacgttcatactattaccgtacaacacagaattccactggatccttttactcttcgacctggaggcctgcaccgtcaacgtatatgactcaatggataaaaaagaatctacgtttgacaagtttattcgcatgagggataacctgatcacacacaaggaatttatcgcggcggttcaagaacaactcatgggattcatcaacgaacaaatccttgatcccaagggtgaattctactacgacggaaatacaattcataggtccttagcttctgagataacgactactactacgtcgaatcgtagctag

SEQ ID NO: 14007 - DNA, 394 bp, Oryza sativa
  Clone ID: PAT_MRT4530_19987C.1
accaatagtggagtttgaaccaacaggtttaagaaaaaaaaaagttaagtaaacctacaacaacaggtgccttacagaacacacacataattaccacccccccccccccctaaaacaaaaatacaaccttttttagggtaacctaccacatgattgatttgggtagggcgatcgaacgacctaggctttgatgggcttgcagacgacgggggcgtgcttgaggatctggttgcttaactggccgggcttttcgggggggtccaccttggccatcccgggcgggggaaggaggttaaagcttttgacgaggcggccgagcgtgatcccaattatgggcagtgcgaggatgaacccggggcagctggggcggccgacccccaagggcacgaaacgg

SEQ ID NO: 14008 - DNA, 2358 bp, Oryza sativa
  Clone ID: PAT_MRT4530_19988C.1
ttttttttttttttttttttcttgaaacgtgtactcataaaaggtgtaacgatcaagaagtaacaagtggccgcatgggaagctgaagccatccggtctcgtttggtgatgtaaacagaaaatataaaggctatcgttcccatccaaatcttttgccagacaaataaataaaacacgaattttacaaaaagagaacggtcacacacgtttatgaataccgaccatttcaagggtcacaaacgaccagcgattttaatttacaacaccacgtctgtgaaacaaataataataaatcccagttaacctgcttcagacttgagcacaggttgtgcaacaatggcgtgctccggcctggcaacacgcagttggtgttttgagatttgagattatatggccacacttcttttcatcccaacagcggtctggtctggttagcatccctttgacgggtatagctgcaactttcaaacatggcagcggttcaaaattttctacctagaagtttctccctctgtattgttgcatctaaggtgcataataataaacaggacgagtctgccccatcatcatctgctgcccatactgcaactgtggcccagcaggatgcatgtaaccttggggcgaaggtccaggctgagcattgtacaccataggctgtccaccataggccggtggaaacattggaggtccaagaggtgctgtaggcatgttattagcatagtagtatggtccatcagatgctggaggttgtggaggcctcacagaagttgatggagtgaaactcttagcattagggttcagcttgaattccttagcattcgggttcaaagatgatttttctgagctaagagaacccattgaagagctcggggacaagcctggagcacatgcaactgagcttgcagcaatgcgctcagatgttgatgatgtagaactaccaggtccttgggaggaattcacatattcccccgaagaaggaacttttctagacaaagaagaatctgcaggtagactttctgaggatttctttgcttgaccagatgatgaaggctcagaagcgtgcgagcttgaagatggcacttccaagtcttcagaaatcgatgacctgccaccttcagatataatattctcagtttgcaaattgcttgtgtccctattaccactgctatctttggtcagtttgtcatccaacctgctttcatcaatgggcaaaagtttattcagctgggactgagatactaactggctaacattgttagtgacaggcaaatcagtgccaaataaatgggaagatgattcttcatccgcagttgataacaaagccttgggattagtgttgcctgccctggtgagtgaatcaacttgatttgtattgctcaagacatttgtagatgacttaaatttggtattgtctgtatctctgcgcaccgctgaatattttatctcttcatcatggtcaaagtcatcatccaaatataaacccctctcctcagcaagatgcatatcttttgtatcttctccctctatttctctagctattcttgaagcatgcttttcaagctctctcatgtgaggacctctctctagctttgtggtataaagttcttcattgaaagtactctttaccccaaacaaagctgcatttgtttcaaactggtcccagctcctgttcccctttctgtcatatttttccaattcgatgcactctgaatccccttcatccggtgcccagcgctcaagctccctctcctcaggataatgagagcgagaaatcgcagagtctatcattaagtccttccttttttcttgagaaggaccttttggcagctcatctccaccaagtgctacatccttggcaagaatttggacaagctcccttcctggtattatcatagtctcaggcttctttacaacatcagctgcacttttctgtcccctggcagaaccatcctttatcacctgtgccattttcatgataactcctaagtctttgtcagagtttgttgcatgtaggattccggagataatagagccatttttcacatgcacatccacatgttgtccaataagttgtgtcaaaacatatattagtcgatcccttgaagggcttccatgtcctagtttgcctccattttctgcaccactaaaaccaccagatgaagatctcagcaactgtgttttattgtcatgccttccactaccctccctgtcaagcttccgatggggaaatccattggcagaagccctaggaggcatagtttgctgtgggtgattcatagctccgtaacagaacaacatgccagtaaatgaattgcaacgcacactcttgggaaacacaaatatatactggagctccat

SEQ ID NO: 14009 - DNA, 4056 bp, Oryza sativa
  Clone ID: PAT_MRT4530_19989C.1
atgccaagttataattgttggacatcccacggagagcaaggtgttgaaatggaagaagatgaagtggaagacgacaatattccggactttgctcagtatgttggatttgaaggaaatcaaacgggcgaggaggaaatagctgctgatggtaacgacgttgcggatgatctttgtcagatgttgcaggacgccagggaggactgcgaaagtgaaaaggaggcccataaattggacaagatgttggaggaccacagaacttcgttgtacccaggttgcgagcaggggcacaaaaagttggataccactctggagttgttgcaatggaaggcaaaaaatggggttagtgacaaggcatttggcgatttattgaaactcgtcaagaacattcttccggggagaaacaaattgcccgagacaacgtacgaggctaagaagatagtctgcccgttaggactggaagttcataagattcacgcatgtccgaacgattgtatcctatatcgcggtgaggagtatgagaacctagaagcatgccctgtttgcaaagcactacgatacaagattagacgggacgatccaggagaagttgacgggcagctaacaaagaagagaattcctgctaaggtgatgtggtatttccctataataccacggctaaggcgtttgttcaggaacaaggggaatgctagaatgttgcgatggcacgctgaagagcgtcaacaggacgggatgctgagacaccccgccgatggttcgcagtggcgaaacatcgacagaaaatttaaagaatttggaaaggacgcacgaaacatacggtttggtttgagtacggatggcatgaatccttttggagagatgagcagcggccatagcacttggcccgttacgatgtgtatctacaacctccccccctggctatgcatgaagaggaagtacataatgatgccgattattattcaaggccccaagcaacctggtaacgacatcgacgtgtacctaagaccactggtcgaagatcttaaacagttatggaagaagggaggtgtccccgtgtgggacgaggacaaacaggaggagtttaacctacgagcgctgctgttcgtaaccatcaacgattggcctgcacttagcaacctatccggacagtccaacaaggggtacaaggcttgcactcactgtatggatgaaacagaaagtacgtatcttaagcactgtaggaaggttgtatacatgggtcatcatcgattccttgcagcaaaccacccggtacggaagaaaggcaagcacttcgaacataaggccgaccaccgtacgaagcctaaacatcgcagcgggaaaacagtgtttgctatggttaaagatcttaaagtagtgttcggaaaggggcctggaagccagcatatagaaagcgaagatggtcacgcggcgatgtggaaaaagaactctatattttgggagttaccatattgggaattcttggacgtacgccacgcaatcgacgtgatgcacctcactaagaacctttgctcgtcgccccggaccttctcccgcttcggcgccgccttcttcgggttcgccgcaacctcgccgacctcgtccacctctccgtttcggtcgccgaccgccggcccgtgccgcgccgccgccttcctctgctccggtcgccgttcccgtcgtcgccgtcgacccgggcgaccatcggggcgcgggtgcgccgcctcccgtcggctgtgccggcgtggccgccttcgggcgcgcccctcggctgccatgtggggcccggccgtcagccgcccgcgccctcgggtgcggctgacgcatgggacccacggcgccggccggtgtgagccgggtgtatacggaaagtcgaaagatacactggaagcacgtaatgatatgaagcatatggaacaacgcggcgaccttcacccggaaccaaaggagaaaggaagccattacttgagtccagccagctacactcttagcaaggcagagaaggaaagtatatttgaatgcttggagagcataaaggtactgtctggatactccacgaatatcaagcgaataataagcacgaaggagaagaagttcacaaacctaaagtctcatgactgtcacgtgttgatgacacaactgctaccagttgtaataaggggtatccttccagacaatgtccgggcaacaataacaaagatatgtgcattcatgaacgcaatttcgcagaaggtcatcgatccggatagattagaagcccttcagaatgaagtggtgcaatgtctcgtcagttttgagttgatatttccaccttcatttttcaatataatgacgcatctgctttgtcaccttgtgaaagagatccgtattctcgggcctatgtacctacacaacatgtttcctttcgagaggtacatgggcgttctgaagaagtatgttcgtaaccgtgctcgtccagaggcaagcatcgccaagggttatggaacagaggaggtcatcgaattttgcgtagaatttatcgaagaccttcgcccaatcggggtacctgaatcacgccatgaagggagactacggggaaagggaactctcggaaggaaagcaataacgacggtagacaacaatttattccgtaaagcccatttcactgttctgcaacactcttcattggtagctccttacatcgaggagcacttggctctagttcgcaccaggaacatcggtaagtccgatgcatggattacacggcatcacattgatactttccccgcatggctacgacaacatctcatgggtaacgagtcgatcaaccaacaacttgccttcctggagaggggaccgtctgggtcgatcgcgacattccagggatatgagatcaatgggtacacattctacacgagagcccaagacatgaagagcacgaaccagaacagcgctgttcgtgtcgatgccatgggacacgatggaacaactgccacgtattacggtgccatcgaggacatatgggaacttgactatggtcctctcaagttttctctgttccggtgccaatgggttaggttgactggtggaggcgtaatgattgatgacagtgggatgaaaactgttgaccttaacaaggttggatactcggacgaaccttttgtccttgccaatgatgtaacgcaagtctttttcgtgaaggacatgtctagcaaaggaaagaagggcagagggcctgatgagcctaagcgtcaagtggttctcccaggcaaaagaaaaatcatcggagttgaggacaagactgacgaggattacgatcagttggatgggcaaccccctttcacggtgacgattgaccctagcatcctcctatcaaatgaagacaccccttactcacgcagcgatcacaaggagggaacaataggcaaatccccgcgccgacgccgccgtatctcgccgtcgtctcgagctcgtcgtcctcgccgccgcctccgcctcctccgctgccgccgcatctctgggacgccgcgccacgacgacgacgcgccacgccgccgccttcgacgccgcgcaacgccgccgccgcatgccaacgccacgccgccgccgccgtcgccacgccgccgccgccatcgccgccgcgcgcgcaatgccgccgccgccacgccacgccgccgccgccacgccacgccacgccaccgccgccacgccacgccgccgccgccacggccccacaacgccacgccgccgccgccgtcgccacgccgccgcgccaaccgccgccccgatgccgccacaccgccgttaacgaacgagaacgagaacgatcgaacgaacgagagcgagaacgaacacgtcaacgtacgttgccgcgacaacgtgaacgagaacgagaacgatcgaacgaacgagagcgagaacgagaacgatcgaacgaagacaagcgagaacgagggaacgaacgtgaatgagaacgagcgaacgaacgtgaatgagaacgagcgaatgaacgtgaatgagaacgagcgaacgaacgtgaacgagctagggaacgtgaacgagcgaacgaacgaggacgaacgt

SEQ ID NO: 14010 - DNA, 912 bp, Oryza sativa
  Clone ID: PAT_MRT4530_1998C.1
aattgaaaaaggttttaaaatcctcttttggctttgggctgaaagtcggcccaaaaccctctctctttcctccccggcccaagccggcccgcaaccgagccaccgctctcctctctctctcccgctgacaggagggccccaccgctcctttccatctccggccgaatcgatagaggggaaatgatccccgcgatccactctatcttttcccttttggaatcgtcggctaatttcgtttggaaatcgccggatttgagatcgaaccggattcgattttcttccccgaaccctagactttccttcgcgccgccgaccgccgtgggccttcgccgccgccccctagccctcgccgccaccctcgcctttgcccgctgccgcctgtagcaccctagcctcgtgagcccgtgcgccgccgtcgccgccgttcgtccagccgtgcgccgccgtcgctccgctcgtcgtcaccgctcggggaggttaccgccgtggtcgccaagccgtcaccaatctcgtccgcccctccgtcatcgccggcagaccaccgtcgtcgtcaacccgaccgtcatcgccgcttcttcctcgtagccatcaccgtccggtcgccgtccgccgccgttcatgcctcggtaaggatcgccgcgtcgccctctacccgttggtgccctccgttcgcgccgccgcgccgtcgttcgccggcgagcatgtgccacccgagccgtcgccagtgatgacgtcatcgccgacgtcatcgtcgccgtgtctcgtggaccgccgtggtctggatcgatctcggccgttcgttgtggatagggttgatctagaccgtccgttccgtagaccgttcctgtgcacccggtccaccgtgaacccgagccgctgacgcaataatcctctttttcttttcaaaaataa

SEQ ID NO: 14011 - DNA, 6135 bp, Oryza sativa
  Clone ID: PAT_MRT4530_19990C.1
atggatcggcaatggatgtacgctgaccggcggtccgaaaagtttattgacggcgtgcattattttttgagagtggccgaagctaacaagcagaagggttttatttgttgtccatgcaataagtgtaaaaatcagaaggagtattctgcatccaggactattcatttccacttgtttgagtcggggttcatgccaagctataattgttggacatcccacggagagcaaggggttgaaatggaagaagatgaagtggaagacgacaatattccagactttgctcagtacgctggatttgaaggaaatcaaacgggcgaggaggacaaagatgctgattataacgacgttgcggatgatcttggtcagatgttgcaggatgccaaggaggactgcgaaagtgaaaagggggcccataaattggacaagatgttagaggaccacataacgtcgttgtacccaggttgcgagcaggggcacaaaaagttggataccactctggagttcttgcaatggaaggcaaaaaatggtgttagtgacaaggcattaggcgatttattgaaactcgtcaagaacattcttccggagggaaacaaattgcccgagacaacgtacgaggctaagaaaatagtctgtcctctaggactggaagttcagaagattcacgcatgtccgaatgattgtatcctatatcacggtgaggagtacgagaacgtagaagcatgccctgtttgtaaagcactacgatacaagattagacgagatgatccaggtgaggttgacgggcagctaacgaagaagagaattcctgctaaggtgatgtggtatttccctataataccacggctaaggcgtttgttcaggaacaaggggaatgctagaatgatgcgtaggcaggctgaagaacgtcaacaggacgggatgctgagacaccccgcagatggttcgcagtggcgaaacattgacagaaaatttaaagactttggaaaggacgcacgaaacatacggtttggtttaagtacggatggcatgaatccttttggagagatgagcagcggccatagcacttggcccgttacgatgtgtatctacaacctccccccttggctatgcatgaagaggaaatacataatgatgccgattattattcaaggccccaagcaacctggtaacgacaccgatgtgttcctaagaccactggtcgaagatcttaaactgttgtggaagaaggaaggtgtccccgtgtgggacgaggacaaacaggaggagtttaacctacgagcgctgctgttcgtaaccatcaacgattggcctgcacttaccaacaaggggtacaaggcttgcactcactgtatggatgaaacagaaagtacgtatcttaagcactgtaggaaggttgtgtatatgggtcatcgtcgattccttgcagcaaaccacccggtacggaagaaaggcaagcactttgaacatacggcggaccaccgtacgaagcctaaacatcgcagcgggaaaacagtgtttgctatggttaaagatcttaaagtagtgtttggaaaggggcctggcagccagcctatagagagcgaagatgttataataaggggtatcctcctagacaatgtccgggcaacaataacaaagctatgttctttcatgaacgcaatttcgcagaaggtcatcgatccggataggttagaagcccttcagaatgatgtggtgcaatgtcttgtcagctttgagttgatatttccaccttcatttttcaatataatgacgcatctgctttgtcacctagtgaaagagatcggtattctcgggcctgtgttcctacacaacatgtttcctttcgagaggtacatgggcgttctgaagaagtatgttcgtaaccatgctcgtccagaggcaagcatcgccaaggggtatggaacagaggaggtcattgaattctgcgtagaatttattgaagaccttcacccaatcggggtacctgaatcacgccatgaagggagactacggggaaaggggactctcggaaggaaagcaataatgacggtagacaacaatttattccgtaaagcccatttcacggttttacaacaatcttcattggtggctccttacatcgaggagcacttggctctagttcgcgccagaaacatcggtaagtccgatgcatggattacacggcatcacattgatactttccccgcatggctgcgacaacatctcatgggtaacgagacgattaaccagcaactggccttcctggcgaggggtccatctggctcgatcgcgacattccagggatatgagatcaatgggtacacattctacacaagagcccaagacatgaagagcacgaaccagaacagtgctgttcgtatcgatgccatgggacacgatggtacaactggcacgtattacggttccatcaaggagatatgggaacttgactatggacctctcaaggtccctctgttccggtgccaatgggttaggttgactggtggaggcgtaacgattgatgatagtgggatgacaacggttgaccttaacaaggttggatacttagacgaaccttttgtccttgccaatgatgtaacgcaagttttttacatgaaggacatgtctagcaaaggaaagaagggcaaagggcctgacgagccgaagcgccacgtggttctcccaggcaaaagaaaaatcatcggagtagaggacaagactgacgaggattacgatcagtttgatgggcaaccccctttcacggtgacggttgaccctagcatcctcctatcaaacgaaaacaccccttactcacgtagcgatcacaaggaaggaacaacagtgaggagaaaagaagacgtcgtcgtcgtcgtccctcaggccaaagtgatggctgatcgcgatgaggaacagatactgtacgatacaatcgcaccgggaagtagccagtactggaacgaagaagaggggaacgaggatccaaaccagtacttgaacgaggaggggaatgcagagagggatgcagaggggaacgaggaggggaacgtggagagggatgcggaggggaacgaggaggaggctagtggaagtcatccctccgctggacagaagagggcacacggacaacgaggtgccgcgaagaagatagagggtcggcacatcataactgaggtggacgcagacggccgacctagtgccccggcacaagcagccaagaattttgtacaccacagcggttgggttgtgagggataacgtgcctgtcagcaaggtgtactggcgtagaacaagggcacgcggggatgatgacagctttgtcccggaatcagagaaagagatgccgtggaccacaatgctcgagacgttcacgctccctgcgggtacaaagaagatagtgaaacagtggactcttaagaaaatggcagaacagttccagatcttcaagggagatctgtactggaaatacatcctgaaggggcagacaccgaacttcaacgtattcccgaagctaagggatcactgggacgagttcgttgcttacaagacaggtcaacaagggcaggcgatgatggaaagaaacaaagaaaatgccgccaagaagaagtaccatcaccacttggggtcaggcggctatagcgtcgcgatgccgaagtgggaggagatggaggcaagcttgcttgagaggggtatcgaaccggccaccgctaagtggcctgatcgatcgaagttctggtattatgctcacggtggaatactcaacccagttgatggctccttggtcttcagcgatcagatacgcgaggctgcgaatcgactaacgaacgcagtggaagcctcttctcagggcacgttccgagccgacagagagaaggacgagctgtcactcgccctacagactcccgagtatccaggacgaacacgagggaaaggcgtgattccctggaagatgggattcaaggaggacatccacacgtataggagtcggatgaggagcaagagagataccgaggcgaagattgcagatcttgagtacagggtatcgagctacgagctcagcatgcaagaggaggtggcccggaaggtggatgaacgcatggcagcacatcggtcaaacgatccccagccgtacatacctcctccaatggtcagcccatcaggcaatcgtagtagctacgcctcaacggggcaggtagtatcacatagcatggacgccatgcaaaccaaggacgaaaccacctgccccgttgatgagatcacgcatcggacaccatgtgagctgcatattcccttcaagaacttatcaatcaaggtggcgtcgggaatggccatcccaacggacatttcagggacttaccactgcaggccgattccagcgggatactcgagggtcgaagttgagctggtggaagccgtgtacgaggacctcgagttggactatccaggaggagacggtgagacgcatctacgagacacaagccacgctattatactatggcgcaagcggtacatcatcctccctgggcgacaagcggcgtctcgtgcaccatctcctccggctccgccgtctcctcctgcaccatctcctccggctcctccgccacctcctcctgcaccatctcctccggctcctccagctcctccgcctcctcctccaccgtgtccgcctgcacctcccaagacaaggtctcgccaagctccacctcctgccagcacaagggcaacgaagaaggccaaagttgagaccaccaaaaacaaggagccgccgtacggttgtagtcaagaggagcttgacgcttatgtggcaggagaagtgaagaggcaactcaagcctcggagtcctgaaaagaagatacctattgacccgagcgtgaagaatttcttcaagggaatgtccaccgcaaacaaggaggccttaaagctatcggattatgaccgaacacttaggaaagcctattacaagaagtccaaaccattggttggaggcgcaccaatcctgaaggcggaagtggcatacaagtttgaactcagtaaaccgcttgtcaggcctgagcagctgcagtccctaccgacacaaatgtacaaattccatgaacggtacatggaaatgagcgccaatggtagagagatgttcggagcgaggatcagaaaccccgacttcttgcaaggagaagatgttctatggatccatttcaacgatgtcttcgatctgtaccatcgggacgccctcgacgtctctcttctgagcgcatggattttaatggagattcaaagggcccgacggcggagggtttacaatactgggttcatcgaccctcggaaaatcaataccgaaatgctcgacaagtatgagaaagacacagaggacaatctcgtccatctcctaacgcagcagcattacaagacgttcatagtattgccgtacaacacagaggcttgggatcggttccgtcaattggtccgcgggacttggaaagaaaaacttagacggatgtttcattttccatatgcaaagcaggacaagggaactaacttatgcggctactacgtatgcgagtttgcccactgcctatcaaaccaaatatacaccacacgagagctcgatcgtattcacatgagggaaaaactcccacacaaggattttatcacggctgttcaagaacaactgatgaggttcatcaacgaagaagtccttaatcccgatggaagaacatcaattagagataaaaccatatacctagaaaacagtgcagtggaggttgaggtatttgtattgcctccgttggtgttgtctcctggagcgccgccgttccctctagctcctggtgcaggaccgttccctccagctcctggtgggccattgccagagaaagccatcgcgttgcagaagaacagatggatgcagaggaagcagtcgcaccgagatgctcccagaaaacttgatcgcccgcctacccgtgtaggtacgcaagcggacggagttctggaggcctgctcatcctgtcacccgtgcgcgcaggtggacagaaccggggaagcaatagctagcgcaagaacagaggaagatctgagtgcgagaggaggagagcagagactagagaattgtgttttcgtctgcctcggtggtagtcttttatag

SEQ ID NO: 14012 - DNA, 991 bp, Oryza sativa
  Clone ID: PAT_MRT4530_19991C.1
atggatcggcaatggatgtacgctgaccggcggtccaaagagtttattgacggcgtgcactattttttgagagtggccgaagctaacaggcaaaggggttttatttgttgtctatgcaataagtgtaagaatcagaaggagtattctgcatccaggactattcatttccacttgtttgagtcggggttcatgccaagctataattgttggacatcccacggagagcaaggtgttgaaatggaagaagatgaagtggaagacgacaatattccggactttgctcagtatgttggatttgaaggaaatcaaacgggcgaggaggaaatagctgctgatggtaacgacgttgcggatgatcttggtcagatgttgcaggacgccagggaagactgcgaaagtgaaaaggaggcccataaattggacaagatgttggaggaccacagaacttcgttgtacccaggttgcgagcaggggcacaaaaagttggataccactctggagttgttgcaatggaaggcaaaaaatggggttagtgacaaggcatttggcgatttattgaaactcgtcaagaacattcttccggggggaaacaaattgcccgagacaacgtacgaggctaagaagatagtctgcccgttaggactggaagttcataagattcacgcatgtccgaacgattgtatcctatatcgcggtgaggagtatgagaacctagaagcatgccctgtttgcaaagcactacgatacaagattagacgggacgatccaggagaagttgacgggcagctaacaaagaagagaattcctgctaaggtgatgtggtatttccctataataccacggctaaggcgtttgttcaggaacaaggggaatgctagaatgttgcgatggcacgctgaagagcgtcaacaaagtggtataatctttagtcccggttcttaaccctaaccgggtttaaaaagaatttcgaaatagcgggaaaagatattta

SEQ ID NO: 14013 - DNA, 3772 bp, Oryza sativa
  Clone ID: PAT_MRT4530_19992C.1
gatccaaacagatctagccgaacggatgcaacaacaaagtgaagagtttcaagctcaaaaacaattacaacaacaacagtttgagaagcaaagggacgcagttcagaaagcaggcaggaaacgccttcctacatctgcgccccgctaaaagctatcgctccaggtagaacagagacactcgacaacctcggcgggcgaaggggctccatggtacttggctcagcaaatctcattcaggccagaagatgcggagggagtgttgttcctacatcaagaccctctggtaatctcggccgaagtagctggcttcgaagtccggtggattttggttgacggaggaagttcagccgatgtcattttcgccgaagcttatgccagaatggggttgccaaccctagccctcacacaagcaccaacctcgtttcatggtttcggcagcgaagcagttcaagtcctaggccaagtacaactggcggtggctttcggcacaaacaagaacaggcgcgaagagcaaatactattcgacgtcgtcgacatcccatacaactacaacgccatttttggttgtgcaaccttgaacaagttcgaagccatctcccaccataactatctcaaactcatgatgcctggtccgacaggcgtgatcgttgtcaagaggcttcaaccttcggctgcatcgaagggcgatttggccgcaaccaacagagcagtgcacaatgttgaggcagaaccgcatgaccgtgcaaagcacatgctgaagcctgctccccatggcaaggtggtcaaggtgcagatcgacgatgccgatcccgcacatcctggaggtactcaagatgaacattgacatcttcgcttggagccccgacgaagtgggaggtgtttcaaccgacctcatcatgcatcacctggcagtcaagccgaatgccaagccaaggaagcagaaactgcgtaagatgtccgccgattgccaagagctgctaaaggccggggtgatccaagagatcgaccaccccgagtggttggcgaacccggtgttggtacggatgtcgaatgccaaatggcgcatgtgtgttgattttatagacctaaacaagctgtgcccgaaagaggacttcccccagccgaggatcgactagctcgttgattcgacagctgactgtgaactcatgagcttcttggatgcatactccggcaatcacaagatacacatgaatccggccgacatccccaagacagccttcatcatgctgttcggcactttctgccaccttaggatgcctttcggcctgagaaacgccagagcaaccttcgccaggctagtgtacaaggtcctttataagcaattggggcgaaatgtggaggcctatgtcgacgacatcgtcgtaaaaagccacaaagctttccaccatgcgtctgacttacaggagacttttgacaacttgcgcgtggcgggtatgaaacttaaccctgagaagtatgttttcggtgttcgcacgggcaagttgttgggttttcttgtttctaagaggggtatcgaagcgaaccccgagaaaatcgatgccattcagcaaatgaagcccccgtcgagtgtacgcgaagtacaaaacctcgtaggccgaattgcggcgctcggtcgattcctctcaaaggaagccgaaagaggttttcccttcttcaagacccttcagggcgcaggaaaattttgctggacgcccgaatgccaagctgcgtttgacgagcttaagcaatatctgcaaagcccgcccactttggacagcctagcaccgggaagcgaactgctactctacttagcagcttcgccggtggtggtcagcgcagccctcgtccaagagacagagtcaggccagaaaccagtgtatttcatttctaaagctttgcaaggggcgaagataagatatattgaaatggaaaagcttacctgcgccctagtgatggcttcgcgcaaactcaaacactactttcaagcccacaaagtcactttgccttcggagtatcctttgggcgaagtgctccggggcaaagaaattgctggccgcctgagcaagtgggcggcggagttatctccctttgacctgcattttgtcgcccgcactgccatcaagtcccaagttctagctgacttcgtggccgaatggacgctgctcgacacgatcaacaacacggcagagtacgaagctgtactgttgggcctaagaaaggtgaaaccattgggggttcgacacttgctcatccgaacagactccaaactggtggcaagttatgttgacaaatcttttgaggcaaaagaaggaatgaagaggtatctggaggctgttcgatctatggaaaagtgttttgccggcataatggtcgaacacttacctagaggccagtagaggccagaacgagaaagccgacgccctggtgaaatccgctgcttgtggaggcccacattcgctaggcatcttttttgaaatcttatatgcaccaagtgtgcccacagagagcctggacatcatggcaatcgaccaggcagaactgggcgaagacccagaggactggcgaacaccgttcgcgaagtacctcaagaatggttggcacccagaagacgaagcggaagcgagcgcctacagcttagagccacaagatacaagctggtttcagggcagctgtatcgctccagggtgctccaacccttgcttcgctgcatctcctttgccgaaggcgaggaaatggcgaaagaaatacaccaggggctatgcggtgtgcatcagaccacaagaacggttgcctccaaagtgtttcgccagggtgtatattggcccaccgtgctgaaagttggtgttgagcaagccaagaagtgtgaaagctgtcagcggcatggccgaagccaagcagcaccctgtacgagctgcaacctatcgcgccattctggcctttcgccagatgggggctagacatcattggccctttcccttggcgcgaaatgggtacaaatttgcaattgtagcgattgaatacttctcccgttggatcgaagccaaaccactcggtgcgatcacttcgcagcagtacaaaaatttgtatggaagaacattgtttgccgtttcggagtgccgaaggaattcatcactgacaatggcaagcaatttgattctgaccagttcagagagatgtgcgaggggctaaacctggaaatcaggttcgcttcggtcgcgcacccatagtcgaatggggcggccgaacgtacaaatggcaagatccttgcagcgctcaagaaaaggcttgaggggcggtgaagggtcagtggctagacgaaatgctatctgttctctgggccctttggacaacccccacaaggccaaccaagttcagcccattcatgcttctttatggtgacgaagcaatgaccccaacagagctaggggctaactcatcaagggtaatgttttctggaggcaaagatgggcgtgaggtgtcgctcaaactcctcgaggaggtgagagtcgaagcactagaacacatgcgcgaatacgccaagagcacttcggtgacttacaacagaaaggttcgagcgacagagctgttgcctggccatctcgtcctatggaagaaggcgaacccagtggcggtcggaaagcttgaatcaaaatgggaagggctgtacctcatcaaacacaggtccaggatgggatctttttgtttggcaacactggaaggcgaagagtttgaccactcctggaacgctgcttctcttaagcgtttctatgtc

SEQ ID NO: 14014 - DNA, 614 bp, Oryza sativa
  unsure (1)..(614): unsure at all n locations
  Clone ID: PAT_MRT4530_19993C.1
ccctctcaacgccgacgtgtacggcaacgccaaggactgggtcaagaagaacgtcaagcgcttcgacttcgacggcggcgtcaccatcaagtatgtggccgttggcaatgagcccttcttgaaagcatataatggttcgttcatcaacatcacattgccggcgctgcagaacgtccagaacgcgctgaacgacgccggcattggcgaccggatcaaggccaccgtccctctcaacatctaccccttcctcagcctgtacctggacgaacacttcccgatcaacttcgccttcttcgacggcggctcaacgccggtgaacgacggcggcatcatgtacaccaacgtgttcgacgccaacttcgacacgctggttgccgcgctcaaggccgtcgggcacggcgacatgccgatcatcgtcggcgaggtcggggtggccgacggacggcgacaagaacgccagggtggacctcgcgcagcggttctacgccgggctgctcaagcggctcgccgctaacgtcggcacaccggcgcggccgaaccagtacatcgagatgtacctngttcgggctggtcgacgaggacatgaaaagcgtcgcgccgggcagcttcgagcg

SEQ ID NO: 14015 - DNA, 4764 bp, Oryza sativa
  Clone ID: PAT_MRT4530_19994C.1
atgacaacgcccggcgcaaacccgccttccccaacacctgcgaggatacaggaagaagcaaacccagccacagagacagttaccgaaggtcatccctcgacaacggcggtcgaacaacccgaaattcatgaatcgccccaggaacaacatacgtcgatgtcgggcgggacaagtgcaagtaggtcgagtagaaatccccggtcacaaaatatatggccgaccacaatgcaagttataagagaggttgacgctagtggtaggcccacggcgccgaggactgtcattggaagatggtctaactgctgcgggctggcggcacgtgagaatttcaggatcctccataaagatatcggcaaggtcacagaagccgagaaagagcgagcttggacggcaatggagaaatggttcacatttccggctgaagcgaaggataggctgaagcggaaggcattccataagatgggcaaagcttggaagaattggaagtcgaagctcttcaccgagtttgtcaacccgcccggcaattatacgccattcgatgaataccctcaaataaccaaagcggtgtgggaggaattctgctctctcaagaacacccaagagtttagggaatcaagcgaggcacatcgcctactgcaacagcggaatgagcacccgcatcggctgggcaccgcaggtcgaccgacggagcttacacctcccaagtctaagctatcaattgaggctccccgtagaccggcattgtcagtacctcattctcctgatggagctaatatggacttggcagatatagctcaaagctgggctccaataaagaccacaagaaaggccgatagctccccaccacttgtcaagggccagaagcatgaacgcggcaaggggaaggtcggggagttggcaccggagccaaaaaggggcaaggctgcgatgtcgatgctggcgagcaaagcggggaaggtcgtgagggcgcaagcccaatttgagctaggcatgccattggtggaggacaatgtgttagccgtgatgggtatttcttgccgagagctacataagcaatacatggagctaagcaatgccaagcagaaaatgagggagtcatccatagttggacatcatgaccaccaaccgttcctatcgtcgcctgcctatataactgtgacgggcctttacttttggggtcatcacaggctagcggagaccaacacctctgacggccttatagtaacttgcccatcagagatggatcggcaatggatgtacgctgaccggcggtccaaagagtttatcgagggcgtgcattattttttgagagtggccgaagctaacaagcgtaacggttttatttgttgtccatgcaataagtgtaagaaccagaaggagtattttgcatccaagactattcatttccacttgtttgagtcggggttcataccaagctataattgttggacatcccacggtgagcaaggggttgaaatggaagaagatgaagcggaggacgagaacattcccgactgggctcagtacactggatttgaaggaaatcaaatgggtgaggtggacaaggatgctggcgataacgacgctgcggataatcttggtcagatgttgcaggacgcaaaggaggactatgaaagtgaaaaggaggcccataaattggagcagatgttagaggaccacggaacgtcgttgtacccaggttgcgagcaggggcacaaaaagttggataccactctggagtttttgcaatggaaggcaaaaaatggtgttagtgacaaggcatttggcgatttgttgaaactcgtcaagaacattcttccaaagggaaacaagttgcccgagacaacgtatgatgctaagaagatagtctgccctctaggactggaagttcagaagattcatgcatgttcgaattattgtatcctatatcgcggtgaggagtatgagaacctagaaacatgccctgtttgtaaagcactacgatacaagattagacgagaggatccaggtgaagttgacgggaacatggggaatgctagaatgatgtgttggcacgctgaagaacgtcaacaggacgggatgctgagacaccccgccgatggttcgcagtggcgaaacatcgacagaaaatttaaagactttggaaaggacgcacgaaacatacggtttggtttaagtacagatggcatgaatccttttggagagatgagcagcggccatagcacttggcccgttacgatgtgtatctacaacctccccccttggctatgcatgaagaggaagtacataatgatgccgattattattcaaggccccaagcaacctggtaatgacttcgatgtgtacctaagaccactggtcgaagatcttaaactattgtggaaaaaggaaggtgtccccatgtgggacgaggacaaacaggaagagtttaacctacgagtgctgctgttcataaccatcaacgattggcttgcacttagcaacctttccgggcagtccaacaaggggtacaaggcttgcactcactgtatggatgaaacaaaaagtacgtatcttaagcactgtaggaaggttgtgtacatgggtcatcgtcgattccttgctgcaaaccacccggtatggaagaaaggcaagcactttgaacataaggcggaccaccgtacgaagcctaaacatcgcagcgggaaaacaatgtttgctatggttaaagatcttaaagtagtgtttggaaaggggcctggaagccagcttatagagagcgaagatggtcacgcagcgatgtggaaaaataactatattttgggagttaccctattgggaattcttggacgtccgccacgcaatcgacgtgtatatggaaagtcgaaagatacactggaagcacgtaatgatctgaagcatatggaacaacgcggcgaccttctcccggaaccaaaggagaaaggaagccattacttgagtccagccagctacactcttagcaaggcagagaaggaaagtatgtttgaatgcttggagagcataaaggtaccgtttggatactccacgaatataaagcgaataataagcacgaaggagaagaagtttacaaacctaaagtctcatgactgtcacgtgttgatgacacaactactaccagttgtaataaggggtatccttccagacaatgtccgggcaacaataacaaagctatgtgctttcatgaacgcaatttcgcagaaggtcatcgttccggatagattagaagcccatcagaatgatgtggtgcaatgtctcgtcagttttgagttgatatttctaccttcatttttcaacataatgacgcatctgcttcgtcaccttgtcaaagagatcggtattctcgggcctgtgtacctacacaacatgtttcctttcgagaggtacatgggcattctgaagaagtatgttcgtaaccgtgctcgtccagaggcaaccatcgccaaggggtatggaatagaggaggtcatcgaattctgtgtagaatttattgaagaccttcgcccaatcggagtacccgaatcacaccatgaagggagactacgagaaaaggggactctgggaaggaaagcaataatgatggtagacaacaatttattccgtaaagtccatttcacggttctgcaacaatcttcattggtggctccttacatcgaggagcacttggctctagtttgcaccagaaacatcggttggatacaagtcttttacgtgaaggacatgtctagcaaaggaaagatgggcaaagggcctgacgagccgaagcaccatgtggttctcccaggcaaaagaaaaatcgttggagtagagaacaagactgacgaggattacgatcagttggatgggcaaccccctttcacggtgacgattgaccctagcatcctcctatcaaatgaagacaccccttactcacgtagcgatcacaaggaaggaacaatagtaaggagaaaaaaagatgtcgtcgtcgtccctcaagccagagtgatggctgatcgcgatgaggaacagatattgtacgatacaatcgcagagggaagcagccagtactggaacaaagaagaggggaacgaggatccaaaccagtacatgaatgaggaagggaacgtggagagggatgcggaggggaacgaggaggggaacgataacgtgcctgtcagtacggtgtactggcgcagaacaagggcacgcggagatcatgagagctttgtcccagattcggagaaagagatgctgtggaccacattgctcgagacattcacccttcccgcgggtacagagaacatagtgaaaaggtggactctaaagaaaatggtagaacagtttcagagcttcaagggagatctgtaccagaaatacatcctgaaggggcagacaccaaacttcaacacattcccgaagctaagggatcactgggacgagttcgttgcttacaagacaggtcaacaagggcaggcgatgatggaaagaaacaaagaaaatgccgccaagaagaagtaccatcaccacttggggtcaggcggctatagcgtcgcgatgccgaagtgggaggagatggaggcaagcttgattgagaggggtatcgaaccggccaccgctaaatggccggatcgatcgaagttctggtattatgctcacggtggaacgctcaacccagttgatggctccctggtcttcagcgatcagatacgcgaggttgctagtcgactaacggacgcagtggaagcctcttctcagggcatgttctga

SEQ ID NO: 14016 - DNA, 2691 bp, Oryza sativa
  Clone ID: PAT_MRT4530_19995C.1
atgacctatagacttagcaactatttcttgtatgaacagatggctgatcgcgatgaggaacagatattgtacgatacaatcgcggagggaagcagccagtactggaacgaagaagaggggaatgaggatccaaaccagtacttgaacgaggaagggaacgtgaagaaggatgcggaggggaaccaggaggggaacgtggagagggatgtggaggggaaccaggaggaggaggctagtggaagtcaacaagggcagacgatgatggaaagaaacaaagaaaatgctgccaagaagaagtaccatcaccacttggggtcaggcggctatagcgtcgcgatgccgaagtgggaggagatggaggcaagcttgcttgagaggggtatcgaaccggccaccgctaaatggccggatcgattgaagttctggtactacgctcacggtgaaacgcttaacccagttgatggctccctggtcttcagcgatcagatacgcgaggctgcgcgtcgactaacggatgcagtggaagcctcttctcaaggcacgttccgacccgacagagagaaggacgagctgtcactcgccctgcagactctagagcatccaggacgaacacgagggaaaggggtgattccttggaagattggattcaaggaggacatccacacgtacaggagtcggatgaggagcaagagagataccgagacgaagattgcagatcttgagtacagggtatcgagctacgagctcagcatgcaagaggaggtggcaaggaaggttgatgaacgcatggccacacatcggtcccatgatccccagccaaccattcctcctgcaatggtgagcccttcaggaagtcgtagcagctgcgcctcaacggggcaggtaggatcacagagcatggacgccatgcaaacccaggacgaaaccacttgccccgttgatgacatcactcagcggacaccatgtgagctgcatattcccttcaacaacttatcaataaaggtggcgtcgggcatggccatcccaatggacccttcaggtacttaccactgcaggccgattccagcaggatactccaaggtcgaagttgagttggtcgaaggtgcgtacgaggacctcgagttggattaccctggaggagacggtgagacgcatctacgagacacaagccacgccattatactatggcgcaagcggtatatcatcctccctgggcgacaagcggcatctcatgcaccatctcctccagctccgccatctcctcctcaggctcctgcaccgtctcctcctcatgctccagcaccgtctcctcctcaggctcctgcaccgactcctcctcaggctcctgcaccgactcctcctcaagctcctcgtctggcaccttccaagtcaagggccccccaagctccatcgcctgcccccacaagggcaacgaagaaggcgaaagttgacgccgccaagaacaaggacccggggtacgattgcacgcaagaggagcttgacgcttatgtggcatcggaagttaggagacaattgaagcctcgaagtccagaaaagaagattcctatagacccgagtgtcaggaacttcttcaggggtatgtctgcacgtgccaaggaggccataaagctatcggactatgagcgaacactcaagaaagcatcttctggaaagtccaaactagtccctcagcttggagagcaaccaaaccaggagatcgagccgttggtgactggtgaagattttggaatagaaaaatttattactgacaccgggctaactacggatcaattgctacgaggcgcaccaatcgaaaaggcggaagtgaaatacatgtacgaactcggtaaaccgcttgtcaagcttgagcagctgcagtccttacccacacaaatgtacaagttccatcaactgtacatggagatgagtgccaccggtagagagatgatcggagcgaggatcagggacacggacttcttgcaaggagatgacattctctggatcaatttcaagggtatctacgaactataccagctggacgccctcgatgcctctattatgagttgctggattttaatggagattcaaagggtccgacggcggggggttttcgatattggattcatcgaccctcggaaagtaaacgtcgcaatgctcgaccagtatctgcaagccacagaggacaatctcgtccatctcctaaaggcgcagcattacaagacgttcatactattgccatataacacagaattccactgggtccttttactcttcgacctggaggcctgcaccgtcaacgtatatgactcaatggataaaaaagagtctacgtttgacaaggttttcgaacttatagacagggcttggtatcggttccgtcatttggtccgcggcaaatggagagaaagacttaggcggaagttcaattttccttgcgcaaagcaaaagcagggaactaacttgtgcggctactacgtgtgtgagtattgccactgccttgcaaaccaaatcatcaccacaagagagctcgattttattcgcatgagggataacctgatcacacacaaggaatttatcgcggcggttcaagaacaactcatgggattcatcaacgaacaaatccttgatcccaagggtgaattctactacaacggaaatacaattcataggtccttagcgcttctgagataa

SEQ ID NO: 14017 - DNA, 279 bp, Oryza sativa
  Clone ID: PAT_MRT4530_19996C.1
atgtgggccccactgctctcgggacgtcagaggatcagtaatacttttggcttaggaggcttcagtggaaaccggattcacgaacagattgtgttgaggatgtgcttgggacatggcgtctttcctgctacccatatatgtgctgccaatcatgctcccgggtattctgatggctctagatgttcaagcactagggatggcaacggagcggggcagggccggattggacgaaaacagccctgcccccgaccccaaccccaactggagatgcaggggtag

SEQ ID NO: 14018 - DNA, 2377 bp, Oryza sativa
  Clone ID: PAT_MRT4530_19997C.1
gctaagcacgcttaacatcaaagttctttgaagatcagcttccagaagagtagttgaacagcaaaaaaaaaattctgattcctaaacttaatcaaccagaacagctcaaggactttcgacccattagtctctacaatgtaatctataaagtggtctcaaaatgcctagtgaacagatttcgaccgatcctaaaggacatcatttcaccaactcaaagtgcattcatcccatagagaatgatcactgataatgctttgattgcttttgaaggtattcatgcgattcaaaaaatgacaagtgccagaaaacagttttgtgcatataaattggacctcagtaaagcatatgaccgtggtgactgggaatttttggaaaaagctcttatcaagataggtttctgtgagcaatgggtgcattgggtgatgatctgcgtcactactgtccagtattctgtctactttaatggaacgctgctggaacccttctcgccttcccgtggcttgccacagggagatccgctttctccctacctctttctgtttgttgcgaaaggtttgtcctgcatcctgaaccacgagcgagtgcccactgtccagatgatactctagacgagataaaggctatcctgcagattcaaacctcgacttttgaagccaagtatctgggtttgccgactccggaaggaagaatgagtgctgacagatttaaatccatcagtgaacggctggcaaaacggatgaattcgtggtctgaaaaattcatgtcttctggggcgaaagaagtgctgattaaatcagtggcgcaggcgattcccacctatatgatgggcgtgtttaagttaccggcttctacctgcgatgtctacaccaaaatgatcagagatttttggtggggggatgacgagaacaaaaggaaagttcactggattgcttgggaaaacttggtccttcctaagggactgggtggtttgggcttcagagatctccggctgtttaatcaagcattgctgggaaggcaggcctggaggctgatccagtatctggagagtttgtgtgcaagaatcctgaaggctaagtactacccaaacagtgaactaatagatgcagttttccctgtggattcttccccgtcatggaagggtatcgagcacgggttacatctccttaagaagggtttagtctggcgaattggtgatggctccaaggttaatatctggagggatcagtggatcccaaaggaatcagctttcaaacctatgggaaggagtagatgccgcctccggtgggtatctcagctgatggtaccacgagaaaaatgctgggatgaagaactgatcaggcatgtttgttatccgcatgatgctgaagatattctgaaaataaaaatcatgcagttcccggtggaggatttcccagcgtggcactatgagcggactggtgtgtactccgttcggagtgcttatagaatcgcattgtcctgccaagctagctctacagcaggatcttcaagctcatcgcccagtggtgaacgaaggatttggcggaatatttggaatttacaagcccccccgaaagttaagatcttcgcttggcgccttgctcgagattgccttgcaactcagagaaatcgcaaatcgaggaagttagtaagtgacagtacttgcagaacctgtggtggagaggaggaggacggtttccatgcagtaatttcttgcaccagagctaaggcgttacggaaggaaatgagggagtactggagattaccagctgatgaagaattaaccaattatgggccagattggttattgctaatccttgaaaagctggggactgaggagagggcgcaatttgtgcttgttctgtggcgctcttggttcctccgtaatgatagtttgtttggctcaggcaaagcctcggtccgagcctcagtgatttttttgcaaaacttctgggacactctgttccagatcaaacacggaacaactgtagacatcaaaggaaaagctccgtgccagtcagaagctgatcaagctgtgtcctgcagagatggtattcgactcttggtggaatgggtgaaaatgccaatgattctcgaaacggactgtgctaacattggtcgggccatggtgaatactggagatgacagatcgatcccccctttggcaggtgattcgtgaagcccgggcggcgttatccctaatccctgagtatcgccttcaggtggctagaagagaggcaaacaaagctgcgcatgggctggcgcagtatgcaaggagaacaaatcaaactgttgtgtggcgggaacacgcccctgagtttggattacgcttacttcgctacgaactagtgattgatcttatctagtttacatgggaagg

SEQ ID NO: 14019 - DNA, 403 bp, Oryza sativa
  Clone ID: PAT_MRT4530_19998C.1
cgtcgttccgcccaccgccgcccacccctccgcccacagccgctcccgccgcccaccgccggccgccgctcccaccgcccaccacccgccacccgccatcgctccacccaccgcccgcaatcgctccgtccaccgcccgccgccgctgcgcccttgtcgctccgcccaccacccgctgccgcttcatttcacgctgctgctgctccgcttcctcccgccgcccgccgtcgctccgtccaccgcccactgccgcgccgcttcgctccgtcgccgctcgcccttctctcctggcaatctgacatatgggtcccattatttttattattttttcgagataaaattgccacgtaatcgctacgtcaatgccacgtgggacggagacctagtcaaaggctccacgtag

SEQ ID NO: 14020 - DNA, 945 bp, Oryza sativa
  Clone ID: PAT_MRT4530_19999C.1
agaggaatgggtctgacgaacatcagacattttctaaaagcaatggcagtttcttgtcgttggcaggactggaaacatccaaccaaaccgtgggtgtgtctagagacaccgtgtgatgaaaccgacaaactcctcttcgccgcagctaccaaaattacagtaggggacgggaacacggcacgattctgggactccgcctggctggatgggcaacgaccaaaaggcatcatgccgctagtctatgcaatctccaagaaaagaggcaagtcgctgcgcgaaggaattgaaaatgacacctggattgaagatcttaagctcaacgggaacactaccttcacagtggacgtaataagacaacttgtgtccttgtggagtgcaacccagggcatcctactaaatcaagatgaaccagatcacatcacctggaagctgtcgaaccatggagaatactcagcctcctcggcctacaaggcacaattgctaggaaatgtcggcaccaactacaattccttgatttggaaatcttgggcccctgcgaaatgcaaattttatttgtggcttgtgatacaaaacaaagtttggacatctgactggctagctgcaagaggatggcaaaataatggtctgtgccccttatgtcgggagacgaacgagacggcatgtcacctggtcgccttttgtagatacaccaggaggatttggagattaacggccagctgggtcgcctatcagcaattggatccgaaccattgggacccatgccaaagcatccaagagtggtgggacatgctaaacaacaaaaaggaagtgcctaagaaaggactgagatctttaaccctgctcattgtgtgggaaatctggaaggaaaggaatcaacggatctttgagcacaaggaaacaacggctcccaatcttatggcgaaaataaaggaagaggcaagaacc

SEQ ID NO: 14021 - DNA, 500 bp, Oryza sativa
  Clone ID: PAT_MRT4530_1999C.1
acgagggtttctctggtttgctatatagatttagacacagatggcgtgcttatccttgctctccggcgttcatcccctaccactactcctgctcattactctcttaggtactccttcgttctagaataagtttacttttcaaccctccagatttatcataaataaatttatttttagtcattattatattggagtttgtaaaattaggagatggatacattaagagtagataaagcaaaaaataattgtatcaggatttgataaagtgaagatattttagtcttttaggttttaattgatatgtggagaataggaaaattgaacttattgtaaaacggaggaagtagatcacatccatggcttttgtatattaaattagttccattaaaatctacaataaaatatgtctgatttatttgaaactgaaattgctagctatttttataaactctgttaaagagagagaataaaacctaagttcttttaatatgaaatggata

SEQ ID NO: 14022 - DNA, 1016 bp, Oryza sativa
  Clone ID: PAT_MRT4530_199C.1
ttaccggctgcattgctggcagaagcgctgctcctggccggcgacgacgaccaccggcgtcttggcgtgggcctcgcagaccttgtggcggcggtggtagtcgcggcaccggctgaggtccgaccggcacccgtcgaccgagcacgcctccgcgccgccgccgccgccgccgccgccgcccgaccctccgcgcgccctcctcgtcgccggcgccgccgccgccggcctggcgcggacggagaagtcgtgcagcgccgccgccgccgccgccgccgccgacgcggcggcgtcgggggaagacgacgacgacgacggcccggcgacggacagcctcttcaacggtggcggcggccgttcatctctgacccctctttcgaccgccagccggctacgctgcatgtcgtcgttgttgagcacctcgtctcagagccggcgggccgggctgcgcctgcatcgtcgttgtcgatcccctcgtctcggagccagcgggctgatctgtgccttgtgtcgtcgtcgtccgctcccccggcgaggtcccggccaccgcccccatgctgatcgccaccctgcccaccaccgcgtcgtcgtccccaaccctcgccgccgccgccaccgatctccttcccccgtgccgctcgtcccgctgagcttcgccctcggctccccggttgccgattcccctcagttgtcgccctcttgggctcgccggcgtccatttttttaagataatggaatataacatcccagcctttgctcaaaaagagctttgtagctgtgcccaaaaccgtagccagtgcgttacccattctgatggcggagaagctccctggctgctgattcccttgatgacggtggcgaggccacaagggtgccgtgtcccccggtggggatgacaaggaacggacgggtcgcggctgctgttggtggaggagcagcgagagatggagaggggaccattggctagctgcagtggcaaggaccaacgagtccgaggtgtagggctcaccggcgtccat

SEQ ID NO: 14023 - DNA, 446 bp, Oryza sativa
  Clone ID: PAT_MRT4530_19C.1
ggagtccagacacacatttttttttttttacataataggatacaacagatttctgagtacagttatttagctaaaataacaactttctttgtaggcctttgagcacctatattcactacatctcgaagaagatttaaatgaagttttatttgcaaccccaagtgaaagatgcctggataacaacaatatggatgaggctgtggccaaactgaaggccatgctgaaattcccagtgaatgtagaatcagatatgaagaagttgcagaagctgcagtagtcggctcagctgtaccaaaggcataggtacaccttccttcgtgttgtattgccaaattttgttcttgtcaaaccgtgccgcgatctgtatagagctacaataggcgagaagatgtctgtcagttttggtctccattgctgagagcctttctaaatcattgacaggggac

SEQ ID NO: 14024 - DNA, 1179 bp, Oryza sativa
  Clone ID: PAT_MRT4530_1C.1
atggggtcggcggcgagctcctgctgcggtggatcgaagaaggtggaacaagggtgcgtgagcgcgtcgatgagcagcaatacgtggaggatattcagctacaaggagctgcacgcggcgacgaacgggttcagcgaggagaacaagctcggcgagggcggcttcggcagcgtctactggggcaagacctccgacggcctccagatcgcggtgaagaagctgaaggcgacgaacacctccaaggcggagatggagttcgcggtggaggtggaggtgctcgccagggtgcgccacaagaacctccttggcctccgcggctactgcgccggcggcgccgccggcgaccagcggatgatcgtctacgactacatgccgaacctcagcctcctctcccacctccacggccagttcgctgccgacgtccggctcgactgggcgcgccgcatggccgtcgccgtcggcgccgccgagggcctcgtccacctccaccacgaggcgaccccccacatcatccaccgcgacatcaaggccagcaacgtcctcctcgactccggcttcgcgccgctcgtcgccgacttcggggtgaagggcaccctggggtacctcgcgccggagtacgccatgtgggggaaggtctccggcgcctgcgacgtctacagcttcggcatcctcctcctcgagctcgtctccggcaggaagcccatcgagcgcctcccctcgggggccaagcgcaccgtcaccgagtgggcggagccgctcatcgcccgcggccgcctcgcggacctcgtcgacccgcgcctccgcggcgcgttcgacgccgcgcagctcgcccgcgccgtcgaggccgccgcgctctgcgtccaggccgagcccgagcgccgccccgacatgcgcgccgtcgtccgcatcctccgcggcgacgccgacgccaagccggtgaggatgaagagcatcaagtacgcggatcacctcatggagatggacaagagcagcgtgtactacggcgaggacggcggcggcgacggcgaggaagacatggacgacgaggaggtggaggagtactcgctgatggaggacaagagcagcgtgaacttcggggtgttcggcgccatgccggtgcagaccatgcacgatccctacgtcaggaggtttggaggaggagatggtatcaagatctga

SEQ ID NO: 14025 - DNA, 460 bp, Oryza sativa
  Clone ID: PAT_MRT4530_20000C.1
tctcctgacagaagtgtggaattgctggacaaaggggacggcactgcagctggctgatcaatcacttgatggatattccgacagcaaagtgctacgatgcatccacattggtcttctttgtgtccaagagagccccattgacaggccaagcatatcttcagtgattctaatgttaaccagacgcagaataaaactccagcaaccgcggcaaccggcattcttctttggaggggacttcagttcagtttatcaacaacaacacagacatcgcaactacatgtatgataagagtggcgtgattgttgaggataaattctctgtaaatgatgtcaccaatactgatccctatcctagatgatctgaaactcagaatgtgactgccagaatagattggtgttcattatttgtacgaattctttcataatggaaaatttcacttgtatgaaaaaaaaaaaaaaaa

SEQ ID NO: 14026 - DNA, 401 bp, Oryza sativa
  Clone ID: PAT_MRT4530_20001C.1
ctcagctatctcggccaccacatgcgcactccgacaaaggctgccatctctatcctttccatcacatctcatcgtcacgtgacggccaccggaggcgaggacctgcgctgctccttcatggccaggttcgactgtgcccctaccatcgagaactccccaaacaaatgcagtcgtagctccatctaccacagcatgccatcccaccacggttcttaatcgatccccaccaccaatgcctctctcctgacaagacagaaagcaccaatcaaaaacaacgaggtggatcaatcaaaagagcaagagtaggggaatagacgaaggagaaggagaagagcggcgacgtgcctgcccagccggcccctgcatcaaggggagggataagaaagagagaggcttgggaa

SEQ ID NO: 14027 - DNA, 362 bp, Oryza sativa
  Clone ID: PAT_MRT4530_20002C.1
tggtaatggagtcattgtcagattgagttgacgtgcttcatgatgattgccacgtacggatcccataatctctagcctgcgtcttgattgccaataagggtttcatcggggtttcagctgattttatgatatcggaccaccagccgatgtatgctttaaccttcagatcagtgcttattatatcttgtttctagccaattggtttctactcgactatattgttattacatcatcaacagccgattgcatttatatcattatctacattggacatatagccgattgcttaaaccctatcactatcggctggtatcggcgtcggctggaatcactacatcggcttgtcagccgatcggctgttt

SEQ ID NO: 14028 - DNA, 354 bp, Oryza sativa
  Clone ID: PAT_MRT4530_20003C.1
tccacacgtccgcccacgcgaacgctcggcgtaatcgcgatcgacgtcgttgcgaacgctcgggactcgtgccaatcacctgctgctcgaccaccgacacctggagcgaatacgaagggctcgatcgatggcagctgcggcagagaagaatatgatcaccctgaagagctcccacggggaggagttacaggtggacgaagcagcggcgacggatgcgcagacaacccgacacatgatcgaagacgactgtgccagctactgtatacggttatccaacgctgactccaagatgctctcgcaggtcatggtgtactggaacaaggacttgctccccgtgcacgctatagaagatcc

SEQ ID NO: 14029 - DNA, 519 bp, Oryza sativa
  Clone ID: PAT_MRT4530_20004C.1
atgcgtcctagtactgtactgcagatgctcgagcaaaaaaaagccggggaagcagggcatgttgcccattgtctagtcaaaaaccaggcgcaggtcggcgctgggagcggcggccgggagctactccacagattaccgccgctacccgatgaggcgtcgctgccttgctcctcgctcgacgaggtggcggcggcggcggggacgagcattctcatcaagagaactcgcggcggcgatgatcaaccgagtggcgctccgcgtcgggagcctggcaatggcggtaggctccgtgtgcttgggtgcaggttcctgaccatggtgctcgtcgtcaacatcgtgcagctcaagcttgtccgcctcggctgctcgcggggcgccggtggtgggtcgccgtcgtgccggtcgtcgatcacgctggtacccaccgccatgctgatctacatcggcatctgtacttttctacacctccacccactacatcaacaagcacagcattgctgccgacacggcgacatgtag

SEQ ID NO: 14030 - DNA, 386 bp, Oryza sativa
  Clone ID: PAT_MRT4530_20005C.1
aattgaacaaaaggaacactccattcgtttacattctaaaggcgtgcattccaagggtttttctatttaaaccaaaaaagaacaaatggaacattctaaggaccttatactcaacaagaatgcaggactgatcactaaagaacaggccatggcctcaaacattggaagaactacatatgctatcgatgtcagagccataaacacctgctagtaaacagctactagcacattgctcatggccggaacgcctacgtagtccgaaatttacatcgagtctcccttgagcagcaaggtggagctctagatgtcacctcccattctcgaaaggaggtactacttcctcatcgctacctcgattgacagcttgttccccaaccataaaacct

SEQ ID NO: 14031 - DNA, 453 bp, Oryza sativa
  Clone ID: PAT_MRT4530_20006C.1
atggccgcgcgacgagaggaatttacggtcgttgagaaagtatctagaggaatatggtcgttgagaaagtatcttgcggcggtgcctgcggcggcgggaggagaggcggcagcggcgggtggcgacgggaagagagacggcagcgacggaaggagtgcagcaacggcgggcggcgccctcccctccgccaggtctagcggcagaggaggttgcgtcggcggcccggcggtggaagtggatgcggcggcggcgggtcggtggcgggaggggaggcggcggtggtccgacggcccggtggcggcgccctcccctccaccagatctagcgggagggatggtggtggcggcggctcggtgttggctcagcggcggatggtggcaacagcggcttcctcggcagcggcagcatagtggcggcgccctcctcctctccatccagcaatggcggtggtga

SEQ ID NO: 14032 - DNA, 171 bp, Oryza sativa
  Clone ID: PAT_MRT4530_20007C.1
ggggctaatgcatgcgcagggttacagaaacaaaacacccgcctcccaaaggcccaaactaacagttcccttaacgtacaaccgaaccataactatgaaacaggtttgattatccccagctactaaaacctaaaccgttacttccgggtccgaaaccacgaccacatggac

SEQ ID NO: 14033 - DNA, 518 bp, Oryza sativa
  Clone ID: PAT_MRT4530_20008C.1
atgccgagtcgcgccgtcgacgccgtcgcgttcgccgtcgtgtggatcatcccgtccacccctcctccgtcggaatccaccgccggaacccactccgcaccgtgcgccggtggttccggagctcgtcccgctgtcgtcatcgtcctccgtcgctcgccgtcgtcaatcgccgtcggtgaggcacctcctcccctttctccctctctcccgcgccgcttagccgccgcgccgccgcctagccgcttagccgccgctatcaccatccgcgtcgccgcgacgccgccgccctccgccgccagccggtcgccgccttgcaccgccgctatgtcgagtcgagccgccgtgcgccatggccaccaagccggcatgagccgcccgtgcgcgccggccacgcgctcccgtcgcgagggtagatcggggccatccaatcccgccgcccgcgtggctgccatgtggccgccacgtgtgcgccgcgtcggcgccacgtgtgcaccacatggtgcgccgtcccttacccg

SEQ ID NO: 14034 - DNA, 219 bp, Oryza sativa
  Clone ID: PAT_MRT4530_20009C.1
agaaaaaagaaaaaggaaaaaatttaaatgggtcctatttgtcagtcaaaataatgccacgtcatgtccgtgtagcatgtcccacatctaacgccatgtatgatcctgaagtggtcgtggcgatttgggacctagatgacacactatgacaagttctaggacttggatatatattttgagagtttagggacctagaatgaacacacccctacaagttta

SEQ ID NO: 14035 - DNA, 489 bp, Oryza sativa
  Clone ID: PAT_MRT4530_2000C.1
gccgaggcacagtttggatacattaaccaaaagaactctcctcttggacttcccatgggtacaagtagaagcaagtacaagacataccaaatcatactttgggttattgctacattaatattgatttctgggttcaccattggattcatattggtactgaaagggttcaatgccagcgaacactgttcttggtgccattacctgagctgtgtacctacttcaaagtggagttgcaacacgccaagcaactattgcatgtcttcgcagcttggaaatcaattaaatctgacatgcgaaagcaatggaaagactgaggcatatactctcaacaacccaaatagcacggaagcaattaaacacctgtgtgttcacctttgcagttaacgatgaatgcttgtactttgatgacaagtacttctcacgcaatgcacattttctggaagagagaaagagaagccaatgtggttacaatgagatgctctggtaatg

SEQ ID NO: 14036 - DNA, 523 bp, Oryza sativa
  Clone ID: PAT_MRT4530_20010C.1
ttgtttttgttttgaaatctattttgttggggatgaagtgctatgtatgagtttgtgcgggtctcggcgtttgtttaagaggttgttataaaaacgacccgacgctttcggcgagcaaaaataaaagctaacagcagcaggcaaaaaaagccagagaagatatttaggactgggaaacgggattgtgctgaaaaaaaaacatgacctgtcttgtgtaggcgagccccaccaacggggtctagcagagaagtgcaggatcctcctcctgtgggaagacgaccctaagcactcaacctcgggggggctgagagaaagcttgagcgtgaggtgcatgctgcgggggagggaacaggcatacaaaagctaaagccgtgggccttcaggaaaaaccagatttcccataacaaaaaccctcccgcacgagggggacaagaaaaaaaaaaaacgctcgcggcgctgggccatgaagaaaatgacatagggggaggcgcacggcaaaagtcctgctggacagacccccaaa

SEQ ID NO: 14037 - DNA, 534 bp, Oryza sativa
  unsure (1)..(534): unsure at all n locations
  Clone ID: PAT_MRT4530_20011C.1
atggctncgagaccggcccgccagtgtgcctggaaaaggggtctatnctatnctaccaggaaaatcccactcaagaaggagggagatgggaaggggcctctctgggtggtggtgctccagcatgcaacggtgcccagcggcggcacacctagtagccggatcgaggcggcggtcaaggcggtggagtgcggatccaaggccacgcgagctctgccatccacaacgacctcgacctacatccacatccggcagcggcttcagctccaccccatccctatgccccgcagcggccgacccctccccatctccctccctctggaccctctccctctcccagatttggctggaggggagtggtcggtgaagacaaaggaagggggaggaggtgatgacgcggtggaggaagaggatgaagggaaggcacggtggaggaaagggaggagagctctggatccgtcgggcggcggcgaccttctagatcccctagtcaacaactctgaaactggccagcaggctgcggaacagaagccctga

SEQ ID NO: 14038 - DNA, 732 bp, Oryza sativa
  unsure (1)..(732): unsure at all n locations
  Clone ID: PAT_MRT4530_20012C.1
atggaggacttgccgatacaggacatgaacgagccaccgccggatccgccatttgcctcccgcaaccgagctccgctgctcgcacatcacaccgccgccgcccgacggatccagagctctcctccctttcctccaccgtgccttcccttcatcctcttcctccaccgcgtcatcacctcctcccccttcctttgtcttcaccgaccactcccctccagccaaatctgggagagggagagggtccagagggagggagatggggaggggtcggccgctgcggggcatagggatggggtggagctgaagccgctgccggatgtggatgtaggtcgaggtcgttgtggatggcagagctcgcgtggccttggatccgcactccaccgccttgacctatcgtcgctgcgagccctcgcctctgatctaaccgccgccgagcatggcagccgcctcgatccgcctgcgcaccgccgcctcgatccggctactaggtgtgccgccgctgggcaccgttgcatgctggagcaccaccacccagagctgggagaggtgggaggagggatcgagaatggagagagagagagagagctaggagaggacggccccctctacatctccctccctcttgagtgggagaggtgggaggagggatcgagagtggagagagtgagctgggagaggacaggccccttcccatctccctccttcttgagtgggattttcctggtagnatag

SEQ ID NO: 14039 - DNA, 168 bp, Oryza sativa
  Clone ID: PAT_MRT4530_20013C.1
atggagctcagcgagcacggcgagcagaatgggatgggggcgatgtgggttttgcttgcgagagccgagaagcggagagacgaggcggtacggacggccgagatggagcgggggagctgcggccttgcctcgcatgagggcggagattttgggacgtgctgcgcgtaa

SEQ ID NO: 14040 - DNA, 162 bp, Oryza sativa
  Clone ID: PAT_MRT4530_20014C.1
atggacgtctacaacttgggcaagaacaacggggagacaaaatgtgagtgccacctgatcctcatcgccagatacgccaggcttcaaaatgattatgttgcactccagcatgaagtatttgaactgatctgctctatctgcccaaaatgcctctctgcttaa

SEQ ID NO: 14041 - DNA, 721 bp, Oryza sativa
  Clone ID: PAT_MRT4530_20015C.1
cacgaggctccttacggcacgaggggcgacggcgacggcgacgggcaacgcgctgccgccggagccgaagccggcgcggtggccggacgtcttccacgcgaggctgttcacgaacctgaccaaccactccgccgcgtcgacggggccaccgctgcgtgtcgccgacctctactacgactggtcgcggcggcgcaacctcaacctgatccgctaccagctcgccgccgccgacgacccgctctacgacgtcgagtgggacaacggcaccaccttctacttcgactcccgctcctgccgcaccgagcgcttccccgtcggcgtgctccgcccgggctggctcgccgacggcggcggcgtcgtctacctcggccggtggcgcaccggcgggatcgagtgcgacgtgtgggacaagctggggttcgtcgtctactaccaggaggtcgccaccgggcgccccgtccgctggaacttcctcgacaagacagggatacagcaattcgtgatgagcttcgaggtcggcgtgaccctggaggacgattcccagtggcaggcgcccgcacactgcttccctgccgccgccgcagacgaagatgaagaggaagaggaagatgaagaacaggatgagatgatcaagagcagctatgatcacattgagggtgtggatgacgggctcgacgccgccaggttactcaggatgctcgcaggagctgcggcgttttag

SEQ ID NO: 14042 - DNA, 230 bp, Oryza sativa
  Clone ID: PAT_MRT4530_20016C.1
atggggcaattcagtgtatggagagctatctctcgagcacagattgaggttcgtcctcgatgggaaaatagagcacccaacaacgcatcttcacagaccaagaactacgagatcatgttggggaagaagaaagagatgatgacatgtggggccacatgtcaacaccgccatgtcagcgccacgtcagcgaaaccgccctccaaaaccaccaaaggagtcaaattgcaccg

SEQ ID NO: 14043 - DNA, 312 bp, Oryza sativa
  Clone ID: PAT_MRT4530_20017C.1
atggatgaggcgggccgggagctggagactgaactcgctagtgcatggaggagaaggtgctcaggaaggttgcgggctaggaagccggagctcgagctcactggcgcatggaggtggaggcattgggagaggcggagttcgatattgccgacgtcgctgatgggctctggggtaatggccgggcggcttcggtttctccgtcatgtttggggcaagctccgcattctcatcaatggcgggaggaaagaggaagaagtgggagaggggcggtctggtggcttcggctccacggtcttgttcgtcacgggatag

SEQ ID NO: 14044 - DNA, 2578 bp, Oryza sativa
  Clone ID: PAT_MRT4530_20018C.1
gagggaaaataaaccttttttaataccgatgaactatacagattttcagaattttcgacctaagaaaaagggctgaccaggccacctgacagtaactacaaactactcttcaattcttcagcattgccagcaacagcaatatgtacagactacatagtaccctgctcacatactactaccacactactactcgtagccaaggttcacagttcatcaaacctttggtatgggttaccgtcacccgcagtttgacggttaccatggtaaccacgtggttatcgtgaaaaccacatggtcacgtgataacccagtaaccgtacggttttgtaaacatagcagggtttacagtatgatctgcaatttcttttccacgtgtgtagtaaaaatgtctcgtcatttttttacctctcgctcagtccctcgctgcgtgcttcgttctacaggccactgagctgagctgctctgcacttgccctgcacttgctctgcttccccctcgacgtcgacgacgacgacgacgacctgctccctctcccgaacacggccagcctcgcgaagatgcgcaggatcctactcgcgcaccgccgctgcgatccccaccgcatggagccaatgcagctgctggaggacaccggcgctcgccgcctgaccgccgccgccgccgccggcgtggccgccgtgtccatcctgaagctcgcctccttccgggacgagctcttcttcacggtgttgtgccgctgcagcgtctgcttcagggagaggatctcctgctccagcgcctggatcctaaagctcgccgtctcgtagcccgacgccgcgtcgtcgtcgtcgtcgccggcgcgggcgcggaccagcttcctgccgtcccgcgtggcgtgggcggtgtccgtgtacgggctgctggtgctgagcggctggctggtggggacggcggtggtgcacccggggctcggggtgtacgcggtggcggcggcggcgccgccggagacggggacgaggagctcccccgagtgcatgcaccggaacgagtcggagcactcggtgaaggcgcggtgcgtgtgcagctgctgcacgaacagcgcctgcacgatcagccggagcggcatccggtcgttctgcaccgcctggatgcacgcctcgtgcgacagcttccggcattcgaggtggccgcacagcgacgccttctcgtcgccggacaagccgggatgctccacgatgtatgtgtcgattgcttcgtagagatggtcgtgggatttccggtcgccggccggaacgacgccgatgagctcggccagccggtccggccggagcttcgggtcaccgacgatctgggcgatgtaccgatcccagagctccgcgacggcctccgcgcctcttctttgcattgagacatggctcgcgacgatgctctccatcgccctcacctccgggctgccggcgatggattggccgccggcgtcttgctctggctccggcagcgggaggtcgtccacgcgggcgaattgcaggttggacgcgaccagttcgcgcagcctcgtctggctctcgtcgctgagctcgagggtgatcgaccgcgccagcagcgcgaagtagaacgacaccgggatggcgccgccggtcgccgccgacgactcgagtgggaggaggtcgatcacgccctgcaggatcgcggtggccctcctgttggcgtcggtctcgccgtcgccggtgtccgtgctcgccatgaacttgtgcgtcttcttggagagcacccacttgttggcgtagaagagcacgacggggctgacgtacttctccttcatgccctgacgccgcagcgccagcacgatccgcctgaagaactcgaaggggagggcgacgaggtccttgatccagaggtcgcgcgcggcgagctccttgacgagctcggcgtcccaccggcgcccggcgaggccgcgcgccgcggcggcggcgaggaggcccggctggtcgcgctcgcgccgctgctcgtcgccgtcggggtcgaggatctccatgcacgccatgaacgccagcgactcgacgcagcggctgacgacgaggagctcctcggcgacggggagcagcggctggcatcgctgcaggacgatgagggcgtcgtcccagctctgcagcaccacctggttgatgtacaggtcgcagcgcgcgccgaggccggacacgtcgaggaactccgccgcgcaccgcaccgccgccacgttgaacgggtcgagcgccaccgcgtcgccgtagcagtacagcccgatcacctcgaacgcctcgctgccgccggggaagctcgccggcagctcgacgacctcgccgtcgccgtcgccgcaccggagaatcgcctgcctcaagtacccgcacctggacaccagaggatccttgtgcaggttgaagctcctgtcgccgacgtggacgctcaccgtcgccggcgaaccggtctccttggcccatgaaacgaccctcctctgcaggagcaacgccgtgctcgggctcgagtaagggctaaacacggcggccttcgccgccgccggcgacatctccacctccacctccacctccatctccggctccat

SEQ ID NO: 14045 - DNA, 215 bp, Oryza sativa
  Clone ID: PAT_MRT4530_20019C.1
agactagggaatcacctgagagaccgaccaagctggcgccgccgggaggaggacgcccgcgcggcagccgccgcagcagcagagacgcggcggtggccggcgaggaagacggggagttggggacattcaagaatgttcagcgacaccgagtcaacattgagaagttcaggttctcgtcggcgacagtagatcagagttcacagacggcgcactag

SEQ ID NO: 14046 - DNA, 351 bp, Oryza sativa
  Clone ID: PAT_MRT4530_2001C.1
ttcaatcactatatgataagttgcaaaatatgcctcaagttggtgtgatacatatggcacttcaaaacgattcaactggctcaatattgagctggcagaatgatgtgtttgtagttgcggaaccaggggaacttgcagacaggtttctccagtgtgtgaaaactagcttgtcagccatgttgcatggatgtaagagaaagggtgcatattccttgtcaaagatttcatgtttgtctgagttggttgcagagtggccgtcgtttgaaattggtgggattcaccaccgctatatagggcgccaaacacaagtaatggaagataatcaagaaattggtgcctatatgttcagga

SEQ ID NO: 14047 - DNA, 213 bp, Oryza sativa
  Clone ID: PAT_MRT4530_20020C.1
gaaggtaacatggtttgtgcaagtaaaaagccggaagatatatgcccaaataagaagtgcccgacccaagatgcaaaatggcctagctccaaatggagaggctttaaattcaaagagcacgctaacatctactcaagaatgtgttaagagggttggttgattgggtctgttctcagctggcggattctagccacccaaactgtgctgtcccta

SEQ ID NO: 14048 - DNA, 3313 bp, Oryza sativa
  Clone ID: PAT_MRT4530_20021C.1
ccggccggggagctcccacgggtggagaggcagccaaggatacgatagcaaggaagagagagcgttgaagatgctgctgaccaccccgttcgtgtcgtcccctgtgagggtccagggcaatgggggcagcggcgcctcgccgtgggcgggcgcggcgacggcgctgaggatccaggcggcgaagcagctgacggggcgtgtggtgacgacgaaggcggacaagacggtgggggtggaggtggtgcggctggctcctcacccaaagtacaagcggcgggagcgcatcaagaagaagtaccaggcgcacgacccggacaaccagttcaaggtcggcgacgtcgtcgagctccgccgatcccgccccatcttcaagaccaagcacttcctcgccgtgcccatccccccgtgcgtcattcgccgcaagtcccagctcctcccgcatctccagtcccagtccctggcccaagacccgatccagtaacctccgcctccagcgcctacagcatcccaatggtcgtgaacaatttgataaaatcctcgtaggttgtttaaggaggggctgggatactaacaaaagagtgcaggaggcggcgtgttcggcatttgcaacgcttgaagaggaggctgctgaagagttagtaccacacttgggaattattttgcagcaccttatgtgtgcctatggaaaataccagagacgaaaccttcgaatactctatgatgctctcggcactcttgctgatgctgttggagctgagcttaaccaggcaaaatatctagatatatttatgccaccactaatcacaaaatggcagcaacttgccaactctgataaagatttattcccactgctcgaatgctttacatcggaccaggattttcatgctgagccagtatttcagagatgcattgttttgtgtctattctttactatacgttgggagaagcaaagagaagaaagctcatcgtgcagcgccagggtgatttttatgatgtgatggattcgttagttttgtatgctccactgctagtgatatattggttcgacaggctgctgtctgagagcatcatgtgcgttgtcctcagcacaagtgagtggtaagaaagaattaccacgacagacagaatgaaggctagtaccttcccttttggtttattgagtcgattgggtcgaagagctgtgcttgattgtaggttctattgtactggtcagttcagtggactcggttatgtttttttgtcactccactggcactggcactggcaccccagcagcaacatagagttgttggaaaggttttgtagcgtgtattttatgggtccaagagtttaggtgtagggtcttctctcttttattttattttttttccttttgtgctcgacagggttgtattgattcattccccaataaaaaaaaagtattgaacaaaaaaaaaaaaaaaagacattgtggccccccacatggaccatttcatgcaagcctggtgcaatgccttgtgcatgatacgagatgattgtgacaaacgtcgtcgagctccgccgctcccgccccatctccaagaccaagcacttcctcgccgtccccctccccccgcgcgacacccgccgcaagtcccagctcctcccgccttccattgatttttatttgctctggatttcgaacttccccagcattggcagctgtaattccatccaatcttttagttagcaaggatgttccaggaaataacatcaagttcacattacgaagttgtttcttctcattatcttcaatgggtttgaaaccaaatcctgacacccatgtattaaccaactctgggatggcagaaaggaccaatgtctcaacatggaatgatctaagcatcatttcaatggtgtccataagtcttcggcacattccttggcggcgataatccacagaagtagcaataaatggaagctcagctgctttggtcccatgtactctgatagatgctacacataaaatctcatcacctttctccaggattactgtatagaacccctggtaatctaagcgagcgaagtttgatctggtattgtacaagacatgcggtatcatgtctacaccagttctaggatccaccatgcgaacaaaacattcctccaatatagtaagagccacagctaattttgtattgcattctgtcatatgcgcaatcttcttggaagaatgtagcttctgcccatcagtgttgcacttcaatatgctccatgaaagctcgttgtcaagaaaattctctattccaacgtgattgtgtaatccaataaatatctctttacagtatctcccacaaaaccatatgttggattgtttatccccacaggggagcatctcctggtcaatgcaagtatcatggtatgaatctccacactgcaaacatttcaagatagccgagaatgttgaaacctccttttcactaagtggattcccacaactccggcatgtgcagttatggcagtaccaactgccttctggaagttcctggtcagacaaacaagtttgatgatatgttgatgggcaattgtcgcagcaaagtaattcaccaccatctccacagaaaccacacgtatcatcattttcatccatcgcctcaacttttctaccagatgcatcacatttcctacttagaaattcagcagaccaagcttctacctggcatagagtgtacgatttgccagactgtagaaagaggcccaatgaggactttggtaaactgcaaccgccatgaaccttgaagtctgatatagaaaaggtcttggtgcaacaattgcacagaatgccttcccaggtaacctgcccatccttaacaacttcgttgctcttcagattctggtactgtataacatcttttacggtcagaaagccagtggcaatcaaccagcagagaactgttttccgtgccaaacttactctcttcccacccaacagatttgatcctccttttccggacattcgagcaagtagcctgccacatttctttgagctcttaaactttgtaaacttctttgcatagccaagatccctatttttcaccatagctgtgatcaaaagatcatcgtcattgatacgtaacacacggggccttttcttggcatacttctcccaagcttgaggttttcttttagcagcaactgccttttgcgcctggcgtaccaaaattctgacagaggttgtcaagttggacaaagtgagcagaagcagtagagtcgcgggacaggtgaggcagaagcgtagtatcatagactgtgttgctgtagagtgagaagtggtctggtcctgtgacagacagat

SEQ ID NO: 14049 - DNA, 123 bp, Oryza sativa
  Clone ID: PAT_MRT4530_20022C.1
atgatgaggtgttgcgggcaacaaggaggaccagcagttcagcggagagaaagaggcgttgtgggtgaggaggaggctagcggccgcggtggagaggacgaggtgccaacaaggaagggttag

SEQ ID NO: 14050 - DNA, 3709 bp, Oryza sativa
  Clone ID: PAT_MRT4530_20023C.1
atggcggcggcggcggcgctgtggcagccgcaggaggagggcctccgcgagatctgcaccctcctcgacgcgcacatctcccccaactccgaccaggctcgcatctggcagcagctccagcactacagccagttccctgacttcaacaactacttggttttcctcctcgcccgcggagagggaaaatcttttgaagccaggcaagctgctggacttctgctgaaaaacaacctccgagctactttcagctccatgcctcctgcttcccagcagtacgtaaagtctgagttgttgccatgtataggggcaaccaataaggcaatcagatccacagtcggaacagtcatcagtgtactctttcaaattgttcgagttgctggatggatcgagttgtttcaagctctacatcaatgcttggacagtaatgatctggatcatatggaaggtgctatggatgctatatacaagatctgtgaggatgttcctgaggagcttgatgttgatgttcctggtttgcctgaacggccaatcaatgtattcatgccaagattactgcagtttttccaatcaacacatgcaatccttagaaagctagctctgggctgtattaatcagtacatcgtggtcatgccagcagctttgtacatgtcgatggatcagtatcttcagggtttattcaaccttgcaaaggatccgtcagcagatgttcggaaactggtttgctcagcctgggttcagcttattgaagtaaggccatcaattttggagatttttcaattgcttatatcttgtgttatgctggatctaacattggatagtaaactgcagcctcatttgaaaaatgttaccgaattgatgctgcaagctaataaagattcagatgatgaagttgctctcgaggcttgtgaattctggtcggcatactgtgatgtcagcatgcctcctgaggggttgagagagttcttgccacgcttaatcccaacactcttatcaaacatgagctattctgatgatgacgaatcacttgctgatgctgaggtggaggacgaatcgtttccagacagggatcaggacttgaagccccggttccatgcctctcgactacatggatctgaaaccggagaagacgatgatgatgatgatgctgtaaatgtttggaatttgaggaaatgtagtgctgctggcctggatgtcctttctaatgttttcggtgatgacattcttcctactttaatgcctttgatacagcaaaatctggctcgaactgacgatgatgcgtggaaggagagggaagctgctgttttgtctattggtgctatagcggagggatgcattactgggctatatccccatcttccgcagattgttgcttttcttattccacttcttgacgataaatttcctcttatacggagtattacttgttggaccctctcccgatatagtaaattcattgtacagagcctagagcatcccaatggtcgtgaacaatttgataaaatcctcttaggtttattaaggagggttttggatactaacaaaagagtgcaggaggcggcgtgttcggcatttgcaacgcttgaagaggaggctgctgaagagttagtaccacacttgggaattattttgcagcaccttatgtgtgcctatggaaaataccagagacgaaaccttcgaatactctatgatgctctcggcactcttgctgatgctgttggagctgagcttaaccaggcaaaatatctagatatatttatgccaccactaatcacaaaatggcagcaacttgccaactctgataaagatttattcccactgctcgaatgctttacatctatcgctcaggccctgggaccaggattttcacagtttgctgagccagtatttcagagatgcatcaatcttatccaatctcagcacctggcaaaggttgatcctgctgcagctggtgcattatatgataaggaattcattgtgtgtgcattggatctgttgtcaggacttgcagaaggacttggcgctggtattgaaagcctggtttcacaaagcagtttgagagatattcttttgcaatgttgtatggatgaagcagcggatgttcgacagagtgctctcgccctcctgggggacctttctagggtttgccctatacatctgcatccccgccttcaagaattccttaatgttgctgcgaagcaactgaacccgcaatgtgtgaaggaggctgtgtcagtggctaacaacgcctgttgggcaattggagaattagcaatcaagattggcaaagaaatttcacctgtggttatcactgttgtttcttgcttggtgcctattttaaaatctcctgagggcttgaataagtcacttctcgaaaatagcgcaatcactcttgggaggctttgctgggtctgtccagacattgtggccccccacatggaccatttcatgcaagcctggtgcaatgccttgtgcatgatacgagatgattttgagaaagaggatgcattccatggtctatgtgcaatggtagcagcaaacccaactggagctgtgggttcactaacttttatctgccaggcctgtgcaagttggaacgagataaagagtgaaggactgctgtctgagagcatcatgtgcgttgtcctcagcacaagtgagtgtagccagcccattatgctgggttgtccgaccggaaaccttatcccctacccgtccatcaggctcagcttcttcttgagcttccacgggtggagaggcagccaaggatacgatagcaaggaagagagagcgttgaagatgctgctgaccaccccgttcgtgtcgtcccctgtgagggtccagggcaatgggggcagcggcgcctcgccgtgggcgggcgcggcgacggcgctgaggatccaggcggcgaagcagctgacggggcgtgtggtgacgacgaaggcggacaagacggtgggggtggaggtggtgcggctggctcctcacccaaagtacaagcggcgggagcgcatcaagaagaagtaccaggcgcacgacccggacaaccagttcaaggtcggcgacgtcgtcgagctccgccgctcccgccccatctccaagaccaagcacttcctcgccgtccccctccccccgcgcgacacccgccgcaagtcccagctcctcccgcctctccagtcccagtcccagtcccaagaccaggaccagccacccacgcctcctccttcctccgattgatggatttttcttctcccgtaatcgtaaattcgtaatgtaataatctgtgctgtactatgtactccattgatttttatttgctctggatttcgaacttccccagcagcaatgctatgttcccttttcatttcatctgctcatatgcatgttgttactcagtgaaaccatactaccaatataatgctactagagtagaatgtgcttgtgtaattaaaaaaaaaaaaaaaacatcccatcgaagaaattatttagggcttctatagcatcgaaagactaaaagaactcaataaccttcgactagtgatacaacacctccgaactacgttcccggtcttcagcaagcttcccggtttcattgtgatggttcctaatatgattcgagaatttcaatttgatatttgttttaaaccatccgggaaacttgtttatacatgatactggtagaattctactaaaaaaaaaaaaaaaaaaaaaa

SEQ ID NO: 14051 - DNA, 469 bp, Oryza sativa
  Clone ID: PAT_MRT4530_20024C.1
cccagtttcccctttccgacgagcacctacccgccaccgccgccgccggagtcagcctcatcgcagtatccaccaccactgccaagatcggcgccatgctgcgatcgctcggtggaccgtgcgctgccgtcgtacatgtcgccgcgtccgccgccgcccggcgcgccgtgctaccccccgccggcggcgtggttgccggatcaagaagcggcgggagcgccgtacagcttgtacccccaacccgggactcgctacttgtagatgatgaattctgctaaattgatttgagctttgcgtatatcacaaattcacaagttgaattgaattctgcttttcatcaaaagaaaaggaaagagttggattcgatctgtaaattaactgtgaatgctttaatcgccaggacgggaacaatgaattgatcttgtggatttgtgagcatgtcgggttgtcccgacccagatcaattgtg

SEQ ID NO: 14052 - DNA, 3264 bp, Oryza sativa
  Clone ID: PAT_MRT4530_20025C.1
atggcggcggcggcggccctgtggcagccgcaggaggagggcctccgcgagatctgcaccctcctcgacgcgcacatctcccccaactccgaccaggctcgcatctggcagcagctccagcactacagccagttccctgacttcaacaactacttggttttcctcctcgcccgcggagagggaaaatcttttgaagccaggcaagctgctggacttctgctgaaaaacaacctccgagctactttcagctccatgcctcctgcttcccagcagtacgtaaagtctgagttgttgccatgtataggggcaaccaataaggcaatcagatccacagtcggaacagtcatcagtgtactctttcaaattgttcgagttgctggatggatcgagttgtttcaagctctacatcaatgcttggacagtaatgatctggatcatatggaaggtgctatggatgctatatacaagatctgtgaggatgttcctgaggagcttgatgttgatgttcctggtttgcctgaacggccaatcaatgtattcatgccaagattactgcagtttttccaatcaacacatgcaatccttagaaagctagctctgggctgtattaatcagtacatcgtggtcatgccagcagctttgtacatgtcgatggatcagtatcttcagggtttattcaaccttgcaaaggatccgtcagcagatgttcggaaactggtttgctcagcctgggttcagcttattgaagtaaggccatcaattttggagatttttcaattgcttatatcttgtgttatgctggatctaacattggatagtaaactgcagcctcatttgaaaaatgttaccgaattgatgctgcaagctaataaagattcagatgatgaagttgctctcgaggcttgtgaattctggtcggcatactgtgatgtcagcatgcctcctgaggggttgagagagttcttgccacgcttaatcccaacactcttatcaaacatgagctattctgatgatgacgaatcacttgctgatgctgaggtggaggacgaatcgtttccagacagggatcaggacttgaagccccggttccatgcctctcgactacatggatctgaaaccggagaagacgatgatgatgatgatgctgtaaatgtttggaatttgaggaaatgtagtgctgctggcctggatgtcctttctaatgttttcggtgatgacattcttcctactttaatgcctttgatacagcaaaatctggctcgaactgacgatgatgcgtggaaggagagggaagctgctgttttgtctattggtgctatagcggagggatgcattactgggctatatccccatcttccgcagattgttgcttttcttattccacttcttgacgataaatttcctcttatacggagtattacttgttggaccctctcccgatatagtaaattcattgtacagagcctagagcatcccaatggtcgtgaacaatttgataaaatcctcttaggtttattaaggagggttttggatactaacaaaagagtgcaggaggcggcgtgttcggcatttgcaacgcttgaagaggaggctgctgaagagttagtaccacacttgggaattattttgcagcaccttatgtgtgcctatggaaaataccagagacgaaaccttcgaatactctatgatgctctcggcactcttgctgatgctgttggagctgagcttaaccaggcaaaatatctagatatatttatgccaccactaatcacaaaatggcagcaacttgccaactctgataaagatttattcccactgctcgaatgctttacatctatcgctcaggccctgggaccaggattttcacagtttgctgagccagtatttcagagatgcatcaatcttatccaatctcagcacctggcaaaggttgatcctgctgcagctggtgcattatatgataaggaattcattgtgtgtgcattggatctgttgtcaggacttgcagaaggacttggcgctggtattgaaagcctggtttcacaaagcagtttgagagatattcttttgcaatgttgtatggatgaagcagcggatgttcgacagagtgctctcgccctcctgggggacctttctagggtttgccctatacatctgcatccccgccttcaagaattccttaatgttgctgcgaagcaactgaacccgcaatgtgtgaaggaggctgtgtcagtggctaacaacgcctgttgggcaattggagaattagcaatcaagattggcaaagaaatttcacctgtggttatcactgttgtttcttgcttggtgcctattttaaaatctcctgagggcttgaataagtcacttctcgaaaatagcgcaatcactcttgggaggctttgctgggtctgtccagacattgtggccccccacatggaccatttcatgcaagcctggtgcaatgccttgtgcatgatacgagatgattttgagaaagaggatgcattccatggtctatgtgcaatggtagcagcaaacccaactggagctgtgggttcactaacttttatctgccaggcctgtgcaagttggaacgagataaagagtgaaggtttacacaatgaagtgtgccagattttgaatggatacaagcaggactgctgtctgagagcatcatgtgcgttgtcctcagcacaacccattatgctgggttgtccgaccggaaaccttatcccctacccgtccatcaggctcagcttcttcttgagcttccacgggtggagaggcagccaaggatacgatagcaaggaagagagagcgttgaagatgctgctgaccaccccgttcgtgtcgtcccctgtgagggtccagggcaatggggccagcggcgcctcgccgtgggcgggcgcggcgacggcgctgaggatccaggcggcgaagcagctgacggggcgtgtggtgacgacgaaggcggacaagacggtgggggtggaggtggtgcggctggctcctcacccaaagtacaagcggcgggagcgcatcaagaagaagtaccaggcgcacgacccggacaaccagttcaaggtcggcgacgtcgtcgagctccgccgctcccgccccatctccaagaccaagcacttcctcgccgtccccctccccccgcgcgacacccgccgcaagtcccagctcctcccgcctctccagtcccagtcccagtcccaagaccaggaccagccacccacgcctcctccttcctccgattga

SEQ ID NO: 14053 - DNA, 261 bp, Oryza sativa
  Clone ID: PAT_MRT4530_20026C.1
tctcccaatttaatcttctccgtcgccccctctcgctttttccccatttcgccgacctctcccgagcctcccatcgctcccgcgccgtgcaacctcttgccgccgctgtttccgctactccggccgccattagccgccgctagggtcgccgccgcaccacgccgtcttcgccgtcgggttcgcaaggctaagctccaccccggccgccccttccccgtcgagtttcgtcgccgaaattcgcctcccctcgcgctccggtga

SEQ ID NO: 14054 - DNA, 230 bp, Oryza sativa
  Clone ID: PAT_MRT4530_20027C.1
tccacccgtcctgccgccacgccgcaccggatccagtggaagcagcgcccagtgtcacggcctccacgctgcgttgccgcaattatgcgtcaccgcgtggggcccactcggcagtgagaccatgcaggctccgctgctgctgtcatcgcgagaaagcgattagcgggaggaggagtaacatcgaaggaaacccactaatcccggattattttgagcaattaccgctctaa

SEQ ID NO: 14055 - DNA, 713 bp, Oryza sativa
  Clone ID: PAT_MRT4530_20028C.1
ccggccgggccctgcatcccccacccgaaccgaattcccgcaagagcacgaggcatcgcggcggcggcggcggcggcggcggcatctccgtcgatctccggcgaacacttgtgcgcagtcgataggggttcatcctgtcctgtccggggtgaggcggggcgccggtgaaccacgaggccgacgacggtcctccatctacacctctgccgtcgccggcgagcttcgcgatgggatacaaccggagacgcggccgtggatcctcctcctcctcgtcgtcgcgccgcaccaagcaggaagccgcgtgggatgatggtcccgggacatcacttccaaggcaggaagacactgaagaagaaccaaaaggtccaaaaattcagcttgctatgtgggactttggccaatgtgatgttaaaagatgcactggtcgtaagctttcaagatttgggctattaaaggagttgcgagtgaccaatggttttggggtggtgttgttctcagccctgttggaacacagtgtgtttccaaggaagatcgtcatatcgtgcaaagaaaaggacttgctgttgttgattgttcgtgggcgcgattaagtgatgtcccttttgtgaaactccgttgtggcgctcctcgtctcttgccatgggtggttgcggcaaaccctgtcaattatggtcgtccatgtgaattgtcttgtgtggaagctttatcagcag

SEQ ID NO: 14056 - DNA, 1926 bp, Oryza sativa
  Clone ID: PAT_MRT4530_20029C.1
atggcgctccacctcacccgtcccttcctccggccgtcgccgccgccgccgcggccgactcgtcggagctcccgggctcattgcctcgccccttctgccagcgcgcggggcccgagcttcaggaggccctacacgtccgtcctggtggtccccaccggagtcggcgccgccgtcgggggtttcgccggcgatgcgcttcccgtggcgcgcgcgctcggtgccgtcgccgactgcgtcatctcccaccccaatgtgctgaacgctgcgatgctctactggccgatgcccaacacgctctacgttgagggatacgcccttgacaggttcgctgaaggatcctgggctctccaaccagttcaccagaacaaggtaggtttggtgttggattctggaatcgaggaggagcttcgactccgtcacttgcaggttgcggatgccgcgagggcttctcttgggctccctgtagtcgagtacattgtgactgatactcctttggagatcaagacatggtttgatccaaaatgtgggaagtctacagggagtgttgggaactctgattctctcctgagggcagttgaggccctggtgaaccgctctgatgtgaatgctgtggcggttgttgcgcgctttccagatgatgatccagaagattcagattgttatcgggaaggaaagggagttgatctgttggcaggagttgaagcgattatcagtcatctaattgtgaagaaattcaaaatcccagctgcccatgctcctgcagttttacccccagttctcagtctgtcagtgtccccaagatctgctgctgaagagattggacatacctttctaccttgtgtgcttgccgggttaagcaatgcccctcaatatgtgatgaggaggaatggaaacatggataatggttgcatagtggctagtgatgttgatagtgtgattcttccaaaagatgcttgcggaggagatggtactattgcctttgctagaactgctacaaagaacaagcccttaatcattacggttcaagaaaatgaaacagttcttgatgatacccctgacaagttcaatatagaggcgctaaatgtccagaactattgggaagccattggagtaatcgcagctcacaaggcagcaaatgctcgggcatatgcatctactgtgctagttcagttagcacctgacttgctgttaatttactgtagtttcctgtcgggtgcgcctcttgagattagcatttctcgcatgcttacttaccagctggtttgggtgaaaaattcgggcaaaatagtttttgggtacctgaaatttcagaaatttgaagctggcatatggaatcctcaccgtatcgctctatgcagtattcgtattttggttttctctgcaagtctgcaggtgtcatcgcagcctccaccacggctcatctccgagcacttgccggccggtgatccgccgtcgccgcttagccggagcagaaagaggaggagcttctccgaggaagaggacgagctcctcctcaagctgcacgctttgctcggcaaccgttggtccctcatcgctgggaggctaccggggaggacagacaaagaggtcatgaaccactggaactccaagctgatggatagtactatagagcatccaccctcgctacatgatgatgaacaccgtcgacggcgtcgccgtctgcgaagcgaagctcacgacgaacgtggtgcaaagcatccgggccacaattcatcttcttcctccaaggacgtcaatggcgatgaatgtacagtcgccgacgacgcaagtagctgtaaccaccaagatgataaccgggctgttgcagaattgaacctagagcttaccctctctacgccttgcatctacttgttacttggacaggatcgtgaggatggatcgaagagcaaccagggtttaatttga

SEQ ID NO: 14057 - DNA, 144 bp, Oryza sativa
  Clone ID: PAT_MRT4530_2002C.1
cacctcaacggcgcaagtactgcggcccggtcagcagcgcgcaccgtgaccggtggagtcatacgcgggatctacgacttcaaccaacaatacgcagtacccggtgctaaccgagcaccccgcggggactcgttcgcaaactag

SEQ ID NO: 14058 - DNA, 178 bp, Oryza sativa
  unsure (1)..(178): unsure at all n locations
  Clone ID: PAT_MRT4530_20030C.1
aaagctggccagccaggcgtaccgatcctcaacaaccgggtcgacccatgcttgcgtcatcatcgactngtacttcagcagctgattgaattatcataatcaaattagacctgatctgattcagctgcattaagtaaattagacttgaacgatcagagctttgcctgtaagtgggact

SEQ ID NO: 14059 - DNA, 153 bp, Oryza sativa
  Clone ID: PAT_MRT4530_20031C.1
atggatgctagtagtatttctgcttgctttttgctcatggaaattattaaaggactaggcaactgggcatttaaggagtggcaactgacaaagctaattattccctccgagaaatctcagttatcattcaagattgaccctgaggaccactag

SEQ ID NO: 14060 - DNA, 729 bp, Oryza sativa
  unsure (1)..(729): unsure at all n locations
  Clone ID: PAT_MRT4530_20032C.1
agaagctcaagtaatatatatgtgtagtatatatgtattttatttacatctcacacctccaaaatcttattctactacagtaaactgggtacagaagctcaagtaatatatatgtgtagtatatatgtattttatttacatctcacacctccaaaatcttattctactacagtaaactgggtacagagatataataatactcatacaaatatgtacaacaacaagcacaccacacactgatcaacttttccttggattttttgctctgcagcaaaacaccaaggcaaaagcttatcactgctcatatgtatctcatcatactgaattatactaagtagtagtagtaactacatggctgtatagctatatgcagaccaaatctcgtcaaaattaaaatcctaaaatccaagaagaaaacaagaaggagtaacaaatcgaatgaaggtgtgcagtgcaggtaggaggaaggtatcaacggtgacccaaacacaccaagagcaagaaggatgacgaccaggaggagctagctcgagctcgagccttgatccacttgacgctgcggcgcaccgagtcctggaccttgccttccacgtcgtacgccttgtaggcgaccagccgcttccgccgctggagctcggcgtcgtcgacgacggcgccggcgaagctgcccgtcggcgacacctgcttcgttggccgggatcgccgctcgaaccggntcntgcacccaag

SEQ ID NO: 14061 - DNA, 257 bp, Oryza sativa
  Clone ID: PAT_MRT4530_20033C.1
cccgccggacgcggaccggaacggaagggccgacccaagccacccgttcgttcggacgagcagccggacgactgccagcacgggctgatcaagatgacgccggcgatcaagctctgcatcagctagggcaaggaggagctcatggagccggccagggatcagcagagtgtcgcacggctacaacgcacagacgcccatcaagctctgcgagtgctgcaccgcctgctccgggacggtcgagtacaacatcatgggcc

SEQ ID NO: 14062 - DNA, 781 bp, Oryza sativa
  Clone ID: PAT_MRT4530_20034C.1
ggtgcttctatcgtccgtaaaaaaaaccgggtgaaaaaaaaccgggcagaaaaaaccaagtttgtccgatcaaaaaaccggacgaaaaaaaaagtccgatccaaaaaaaaagtgaaaaaaaaaaaaaaaaaccgagcgaaaaaaaaagaaaagtccgataaaaaaacctggggaaaaaaaaccgggcggaaaaaaaacaaatatgtccgacaaaaaaaaaggaaaaaaaaggaaaaaataccgaaacgaatccgactacatcgacgcggtaaaaagagtttaaaaaaataaaaagaaaacggtcttattccaaagaaaaatgaattatatgtatcgtggtaaaaaaatcgaccgggcgaaaaaagaaaaaaatagtccgatccgaaaaaaacaggagaaaaaaaaatgggcgaaaaaaaaatttgtccgataaaagaaaaggaaaaagctgaaaagaatctgactccatcgatgcggtaaaaaaaggcgaaaaaaaactttccgataaagaaaaaggaattatatgtgacacggtaaaaaaaataaaaaaaccaggcgaaaaaaaagataaaagtccgataaaaaaacggggcgaaaaaaaaacaaatcggtcctatccaaaaaaagccaaaaaggggaaaaatcaaaacgaatccgactccgtcgacgtggtgaaaacagggcgaaaaaattccaaagtaaagggagaaaaaaaaaaaaaaaattaaaaagacggaaaaaagcgcggaggaaaaaagtcaaatttatattcgtcgttttt

SEQ ID NO: 14063 - DNA, 782 bp, Oryza sativa
  Clone ID: PAT_MRT4530_20035C.1
aaaaccaagtttgtccgataaaaaaaccggacgaaaaaaaaagtccgatcaaaaaaaaagtgaaaaaaaaaccgggcgaaaaaaacacccgtccctggcaaaaaaaacacccgatcccttaaaaagggaaaaaaaaaaaaaaaccgagcgaaaaaaaaagaaaagtccgataaaaaaacctggcgaaaaaaaaccgggcggaaaaaaaacaaatatgtccgacaaaaaagaaagcaaaaaaaggaaaaaaatcgaaacgaatccgactacatcgacgcggtaaaaagagtttaaaaaaataaaaagaaaactgtcctattccaaagaaaaaggaattatatatatcgtggtaaaaaaatcgaccgggcgaaaaaagaaaaaaatagtccgatccgaaaaaaacaggagaaaaaaaaatgggcgaaaaaaaaatttgtccgataaaagaaaaggaaaaagctgaaaagaatctgactccatcgacgcggtaaaaaaaggcgaaaaaaaactttccgataaagaaaaaggaattatatgtgacgcggtaaaaaaaataaaaaaaccaggcgaaaaaaaagataaaagtccgataaaaaaacggggcgaaaaaaaaacaaatctgtcctatacaaaaaaagccaaaaaggggaaaaataaaaacgaatccgactccgtcgacgtggtgaaaacagggcgaaaaaattccaaaaaaaaaaattaaaaggacggaaaaaagcgcggaggaaaaaagtcaaatttatattcgtcgttttttagtccat

SEQ ID NO: 14064 - DNA, 862 bp, Oryza sativa
  Clone ID: PAT_MRT4530_20036C.1
aaaaccaagtttgtccgataaaaaaaccggacgaaaaaaaaagtccgatccaaaaaaaagtgaaattctctaggtgcttctgtcgtccgtcaaaaaaccgggcgaaaaaagaaaaaaaccgagcgaaaaaaaaagaaaagtccgataaaaaaacctggcgaaaaaaaaccgggcggaaaaaaaacaaatatgtccgacaaaaaaaaaggaaaaaaggggaaaaaataccgaaacgaatccgactacatcgacgcggtaaaaagagtttaaaaaaataaaaagaaaactgtcctattccaaagaaaaatgaattatatgtatcgtggagcaaaaaaaaaaagaagaaaagtccgataaaaaaacctgggcggaaaaaaaccgggtggaaaaaaaacaaatctgtccgacaaaaaagaaagcaaaaaaaggaaaaaaatcgaaaaaaaaaatcgaccgggcgaaaaaaagaaaaaaatagtccgatccgaaaaaaacaggagaaaaaaaaatgggcgaaaaaaaaatttgtccgataaaagaaaaggaaaaagctgaaaagaatctgactccatcgacgcggtaaaaaaaggcgaaaaaaaactttccgataaagaaaaaggaattatatgtgacgcggtaaaaaaaaataaaaaaaccaggcgaaaaaaaagataaaagtccgataaaaaaacggggcgaaaaaaaaaacaaatctgtcctatccaaaaaaagccaaaaaggggaaaaatcaaaacgaatccgactccgtcgacgtggtgaaaacagggcgaaaaaattccaaagtaaagggagaaaaaaaaatcaaaacgaatccgactccgtcgacgcggtaaaaaaaggg

SEQ ID NO: 14065 - DNA, 270 bp, Oryza sativa
  Clone ID: PAT_MRT4530_20037C.1
atggcaagagggaggagacccgggaggggagggagggcgtcgccggtccctaaccatcttgccaccggatccgcacccgtcgccatcgccatcgccgccacgaccgccgttgtctggaggggaggggaaggcaagtccgccggggtcgccgccgtcgccgtcgctggtccgccgttgtcacgcgcccgtctcgcggccggatccatcgtctgcgaccctgcagtagtcggatccaccgttcccgcgcccatctcgggcggggattcatag

SEQ ID NO: 14066 - DNA, 817 bp, Oryza sativa
  Clone ID: PAT_MRT4530_20038C.1
ggtgcttctgtcgtccgtcaaaaaacgggagaaaaaaaccgagcgaaaaaaaaagaaaagtccgataaaaaaacctggcgaaaaaaaaccgggcggaaaaaaaacaaatatgtccgacaaaaaaaaagggaaaaaaaaggaaaaaataccgaaacgaatccgactacatcgacgcggtaaaaagagtttaaaaaaataaaaagaaaactgtcctattccaaagaaaaatgaattatatgtatcgtggagcaaaaaaaaaaagaaaagtccgataaaaaaacctgggcggaaaaaaaccgggtggaaaaaaaacaaatctgtccgacaaaaaagaaagcaaaaaaaggaaaaaaatcgaaacgaatccgactacatcgacgcggtaaaaagagtttaaaaaaataaaaagaaaactgtcctattccaaagaaaaaggaattatatatatcgtggtaaaaaaatcgaccgggcgaaaaaagaaaaaaatagtccgatccgaaaaaaacaggagaaaaaaaaatgggcgaaaaaaaaatttgtccgataaaagaaaaggaaaaagctgaaaagaatctgactccatcgacgcggtaaaaaaaggcgaaaaaaaactttccgataaagaaaaaggaattatatgtgacgcggtaaaaaaaataaaaaaaccaggcgaaaaaaaagataaaagtccgataaaaaaacggggcgaaaaaaaaacaaatctgtcctatccaaaaaaagccaaaaaggggaaaaatcaaaacgaatccgactccgtcgacgtggtgaaaacagggcgaaaaaattccaaagtaaa

SEQ ID NO: 14067 - DNA, 555 bp, Oryza sativa
  Clone ID: PAT_MRT4530_20039C.1
atgacccgctgcaatgacaagcttggggcgacgatgacaagacgccgactagggacggcgaggaggaggcggcgacttggcaccggctgtcggggggacgcggtgctggtgccccggtggagccccaccccgagcggctccctcccgctatcctccatcgacaacgacgacaagaccactgccgttcgcgtctccatcaacttcatccaagtattcccctctgtctccgctgaagccgtcgaggaccaggccgcatcggtcgtccactacaaccctgtcgccggccgaatcacgaagccagtcgtcggggagcctgagatcgacagtaccggcgaaggggtgtggttcatcggggccgaggtgagctacactgcctgcgtggactccgtgctcaccaccgacggcaccgtcgagattgagggcgagcgcctccccttctctcctccaaccccctcttcacttcctcctccccttgccccgcctcgacctcaccagccgccgccgttgcccccactgccggcatactccgcccgatgcgctccgctcctcctctag

SEQ ID NO: 14068 - DNA, 363 bp, Oryza sativa
  unsure (1)..(363): unsure at all n locations
  Clone ID: PAT_MRT4530_2003C.1
caatgcaagcttcaaaacccgtgatgaggcccaatgggtatagcatntactatcatatactctactatcatattataaaacccacataaaaatgtcgctccttactctatcccaattatttacctaatgcattttcaacccaacatctaccttaaactacagatcctaaggctccaacctcccaaaaggccaaaaaaaccaactgcatttcaacctataccaaacaaatcatgcccatgcatcctcatgccaagaccttgtcttaaactctcacttctcatagaccaaattatataattacgcccaaccatttttattaaccagattccaacacttgttcgatattataattaggaaccccat

SEQ ID NO: 14069 - DNA, 782 bp, Oryza sativa
  Clone ID: PAT_MRT4530_20040C.1
tccgatcaaaaaaaccggacgaaaaaaaaagtccgatccaaaaaaaaagtgaaaaaaaaaccgggcgaaaaaaacacccgtccctggcaaaaaaacacccgatcccttaaaaagggaaaaaaaagtccgagagacaaaccgtttaatgaataaaaaaagcgaaaaaaaaagaaaaaaaaccgagcgaaaaaaaaagaaaagtccgataaaaaaacctggcgaaaaaaaaccgggcggaaaaaaaacaaatatgtccgacaaaaaaaaggaaaaaaaaggaaacaaaaaaaaaaaaaaaagaaaagtccgataaaaaaacctgggcggaaaaaaaccgggtggaaaaaaaacaaatctgtccgacaaaaaagaaagcaaaaaaaggaaaaaaatcgaaacgaatccgactacatcgacgcggtaaaaagagtttaaaaaaaataaaaagaaaactgtcctattccaaagaaaaaggaattatatatatcgtggtaaaaaaatcgaccgggcgaaaaaagaaaaaaatagtccgatccgaaaaaaacaggagaaaaaaaatgggcaaaaaaaaaatttgtccgataaaagaaaaggaaaaagctgaaaagaatctgactccatcgacgcggtaaaaaaaggcgaaaaaaaactttccgataaaaaaaaggaattatatgtgacgcggtaaaaaaaataaaaaaaccaggcgaaaaaaaagataaaagtccgataaaaaaacggggcgaaaaaaaaacaaatatgtcctatccaaaaaaagccaa

SEQ ID NO: 14070 - DNA, 1223 bp, Oryza sativa
  unsure (1)..(1223): unsure at all n locations
  Clone ID: PAT_MRT4530_20041C.1
tgctcccttcgcggctctccttcttcttcttcaatcttcgccctcctcctcctcctcgtacgcgcccacgntntnctctttctgccccctcgatcgatttgagcagggaacggaagggggaggtttttggaggaggccatggtgccgtcggagaggggggacgtcgccaccgccatcagacccgccgctgccgacaagctcgtccatgggcctatctctgacaagaagtgccggaagaaggtcccgaggaaggttcacaaatctgagagggagaagcttaaacgcgggcatctcaatgatctgttcggcgagctgggtaatatgctagcatctgatcaaatacaacaaccttctgcagaagcggataggcagagtaatgggaaggcatgcatactaactgacaccacccggatcttaagagatctgctttctcaagtaaaatctctccggcaagaaaacagcaccctccagaatgaatctaattatgttacgatggaaaggaatgagttgcaggatgaaaatggtgcgctacgcagcgaaatctctgacctccaaaacgagctgaggatgcgtgcgacagggagtccaggttggggccatggcgcgactggatcacctctccccgttcctccctctccaggcacggttttcccatcgcagcagccaatgcagccatctcccatgacaacaagcacagtgttccccttgcagcagccactgccacaaccaacagtcattgagccctctgcaagacagccactggaactgaagctcttcctagaagcaccccccgccgaagaccctgaaccatcagaagaccaggaggctccgaacaatgtggcacgaccgcagccgaggtacccaacagaggcatcttcttggcctattagcctgggacttccaagaatggaagatgagcaaatgtagtggtagcacgatagatgatagcacaggtagagattgagagggtctgtttttaatgcatgcaggaattccacacgaaaacacttctgtccttgcatgaaaactggaaaatttcctgcattccaagtaagacctgagtagatcagctccaaccaatcagaaactcactttgagcctagaggatatactactgaatgatgtgcatgtaaatatttcaaatctcccttttgtttctgtaaactctagtgagaatagaacccgctttatccccttgcaaaaaaaaaaaaaaaaaaaaaaaa

SEQ ID NO: 14071 - DNA, 780 bp, Oryza sativa
  Clone ID: PAT_MRT4530_20042C.1
tccgatcaaaaaaaccggacgaaaaaaaagtccgatccaaaaaaaaaagtgaaaaaaaaaccgggcgaaaaaaacacccgtccctggcaaaaaaacacccgatcccttaaaaagggaaaaaaaagtccgagagacaaaccgtttaatgaataaaaaaagcgaaaaaaaagaaaaaaacgggagaaaaaaaccgagcgaaaaaaaaaagaaaagtccgataaaaaaacctggcgaaaaaaaaccgggcggaaaaaaaacaaatatgtccgacaaaaaaaaggaaaaaaaaggaaaaaataccgaaaaaaaaaaaaaaagaaaagtccgataaaaaaacttgggcggaaaaaaaccgggtggaaaaaaaacaaatctgtccgacaaaaaagaaagcaaaaaaaggaaaaaaatcgaaaaaaaaaatcgaccgggcgaaaaaagaaaaaaatagtccgatccgaaaaaaacaggagaaaaaaaaaatgggcgaaaaaaaaatttgtccgataaaagaaaaggaaaaagctgaaaagaatctgactccatcgacgcggtaaaaaaaggcgaaaaaaaactttccgataaagaaaaaggaattatatgtgacgcggtaaaaaaaataaaaaaatcaggcgaaaaaaaagataaaagtccgataaaaaaacggggcgaaaaaaaaacaaatctgtcctatccaaaaaaagccaaaaaggggaaaaatcaaaacgaatccgactccgtcgacgtggtgaaaacagggcgaaaaaattccaaagtaaa

SEQ ID NO: 14072 - DNA, 805 bp, Oryza sativa
  Clone ID: PAT_MRT4530_20043C.1
cttccatcgtccgtcaaaaaaaccgggtggaaaaaaaccgggcagaaaaaaccaagtttgtccgatcaaaaaaaccggacgaaaaaaaaagtccgatccaaaaaaaaagtgaaaaaaaaaaccgggcgaaaaaaacacccgtccctggcaaaaaaacacccgatcccttaaaaagagaaaaaaaagtccgagagacaaaccgtttaatgaataaaaaaagcgaaaaaaaaagaaaaaaaaccgagcgaaaaaaaaagaaaagtccgataaaaaaacctggcgaaaaaaaaccgggcggaaaaaaaacaaatatgtccgacaaaaaaaaaggaaaaaaaaggaaaaaataccgaaacgaatccgactacatcgacgcggtaaaaagagtttaaaaagataaaaagaaaactgtcctattccaaagaaaaatgaattatatgtatcgtggagaaaaaaaaaagaaaagtccgataaaaaaacctgggcggaaaaaaaccgggtggaaaaaaaacaaatctgtccgacaaaaaagaaagcaaaaaaaggaaaaaaatcgaaacgaatccgactacatcgacgcggtaaaaagagtttaaaaaaataaaaagaaaactatcatattccaaagaaaaaggaattatatatatcgtggtaaaaaaatcgaccgggcgaaaaaagaaaaaaatagtccgatccgaaaaaaacaggagaaaaaaaatgggcgaaaaaaaaatttgtctgataaaagaaaaggaaaaagctgaaaagaatctgactccatcgacgctctaattttctgattgtt

SEQ ID NO: 14073 - DNA, 780 bp, Oryza sativa
  Clone ID: PAT_MRT4530_20044C.1
aaccaagtttgtctgatcaaaaaaaccggacgaaaaaaaaagtctgatccaaaaaaaaagtgaaaaaaaaaaccgggcgaaaaaaacacccgtccctggcaaaaaaacacccgatcccttaaaaaggaaaaaaaagtccgagagacaaaccgtttaatgaataaaaaaagcgaaaaaaagaaaaaaaaccgagcgaaaaaaaaagaaaagtccgataaaaaaacctggcgaaaaaaaaccgggcggaaaaaaaacaaatatgtccgacaaaaaaaaagggaaaaaaggaaaaaataccgaaacaaaaaaaaaaagaaaagtccgataaaaaaacctgggcggaaaaaaaccgggtggaaaaaaaacaaatctgtccgacaaaaaagaaagcaaaaaaaggaaaaaaatcgaaaaaaaaggaattatatatatcgtggtaaaaaaatcgaccgggcgaaaaaagaaaaaaatagtccgatccgaaaaaaacaggagaaaaaaaatgggcgaaaaaaaaaatttgtccgataaaagaaaaggaaaaagctgaaaagaatctgactccatcgacgcggtaaaaaaaggcgaaaaaaaactttccgataaagaaaaaggaattatatgtgacgcggtaaaaaaaataaaaaaaccaggcgaaaaaaaagataaaagtccgataaaaaaacggggcgaaaaaaaaacaaatctgtcctatcaaaaaaagccaaaaaggggaaaaatcaaaacgaatccgactccgtcgacgtggtgaaaacaggg

SEQ ID NO: 14074 - DNA, 880 bp, Oryza sativa
  Clone ID: PAT_MRT4530_20045C.1
attttggtttgttgcaaaaaacaaaagaagaagaagaagaagaagaagaagaagaagaagaagaagaagaagaagaattctctaggtgcttctgtcgtccgtcaaaaaacgggagaaaaaaaccgagcgaaaaaaaaaagaaaagtccgataaaaaaacctggcgaaaaaaaaccgggcggaaaaaaaacaaatatgtccgacaaaaaaaaaaaggaaaaaaaaggaaaaaataccgaaacgaatccgactacatcgacgcggtaaaaagagtttaaaaaaataaaaagaaaactgtcctattccaaagaaaaatgaattatatgtatcgtggagcaaaaaaaaaaagaaaagtccgataaaaaaacctgggcggaaaaaaaccgggtggaaaaaaaacaaatctgtccgacaaaaaagaaagcaaaaaaaggaaaaaaatcgaaagaaatcgaccgggcgaaaaaagaaaaaaatagtccgatccgaaaaaaacaggagaaaaaaaaatgggcgaaaaaaaaatttgtccgataaaagaaaaggaaaaagctgaaaagaatctgactccatcgacgcggtaaaaaaaggcgaaaaaaaactttccgataaagaaaaaggaattatatgtgacgcggtaaaaaaaataaaaaaaccaggcgaaaaaaaagataaaagtccgataaaaaaacggggcgaaaaaaaaacaaatctgtcctatccaaaaaaagccaaaaaggggaaaaatcaaaacgaatccgactccgtcgacgtggtgaaaacagggcgaaaaaattccaaagtaaaaaaaaaaaattaaaaggacggaaaaaagcgcggaggaaaaaagtcaaatttatattcgtcgttttttagtccat

SEQ ID NO: 14075 - DNA, 919 bp, Oryza sativa
  Clone ID: PAT_MRT4530_20046C.1
cgcgtatatatttcccgccacccctgcctcgccttccctacgacatcgagggcgtcatcgagtgagtagtgtgagagctgagctgagcttagcttagcttgcgataccaagcccgtataaggcgcaggtgaacgtgtcggtgtggagggacgacgactacaggaggatggtgatggcgtgcttgatagaggcggtgtacctgctggagctggagaggcaggagaggagggacgcggcggcggtggcgcagcagtggtggaagccgttcaggtacaggctggcgcacgagctggtcgacgagagggacggctccgtgttcggcgccatcttcgagcgggaccaccagccggcggccgcggtcgacggcgaggcgccgcgggcggtgatcgcgttccgcggcacgctgctgcgggggccgaccatccggcgcgacgtcgaggacgagctccgcctgctggcgcgcaacagcctccgcggctcggcgcggctcgccggcgcgctccaggcgctcagggcgaccatcgagaggttcgggtcggagaacgtctgcctctgcggccactccctcggcgccggcttcgcccgccaggtcgccaggatgctcgcctcctcctccgcgtcgctcgagttccacctcttcaacgcgccctacctgtcgctgcccatgggcgtcaggagcgtcgtcaagacggccgactgcctgctcaaggcggtgcgcaccggcgtcgccgccgtcggccggtggcacggcaaggcgctcaagaacgtggcctacgccaactgcatcctcggctacacgatttaaaaacggagggagtactgtatacggtcatcaacaagctcgatcattccaaatccgcccaaaggttggaggcgccaaatctaacgattggtgacacaatgatgccaaatcaggtga

SEQ ID NO: 14076 - DNA, 474 bp, Oryza sativa
  Clone ID: PAT_MRT4530_20047C.1
gcacgaggctccttcttttttgttgtacggtatttttagtgtaaatccatcttccccgtatggaggggagcagcgggtattgcatggccatgaatttcggatggatttctgatatccttttaggcaccatgtctttgtattcgacgatgatgtcgcgtccttcactctcttcagttggatctttcacaactaatgccgcaacttcagatgttgggggcttgtctctgtcacttattagccgtagcgtgacatcatggtagtcttcttctttgaacctatcccttgccattctgaatgattttgccaggatgttgttctcatcgatcatattttgtaggtctgtgacgatgctagggtcaactggtgtcttgtcgctgcatcctgacacacttattctattagccacctcattttcagtatcatagatgtacaactgtgcaaagcgaggtttgttggcttcttcaggtagaagag

SEQ ID NO: 14077 - DNA, 440 bp, Oryza sativa
  Clone ID: PAT_MRT4530_20048C.1
cccacgcgtccgcccaagtagtcctagccgtaaacgatggatcctaggtgctgacgcaactgcgaccgcgcagggctgtagctaacgcgttaagagtactgtcagggactccaggcctcagtgaactcaccagcatccgctgcctcctagaagcccaggctcacaaggcaggagctgctacgtctgcccgcgaaggtagaggcaagacgacaacgtggccgttgtcaccgcgaaggccgcccacggacggccgtactactggagtgaccgctactaccgtgcgctggtgggggggcagtactgcaggtcgaacgacctgctcaactgacaaaatacttttgtattacccaacggatacggtgtgcatgtgtgcctgaatcttgattaatgcagattggctttgcgaaagcctcctgcaactgtgtattctgaatcgaatt

SEQ ID NO: 14078 - DNA, 168 bp, Oryza sativa
  Clone ID: PAT_MRT4530_20049C.1
atggcggtggccgacgagcggtggccagcgacggttgaggtgaaggcactgctttgggcctcgctgccggacgctgggcagcaccttaaccagcaaggagatgatggatggttgctactgcgcaacgtcgagctcatctctataccacactgctacatccttccatga

SEQ ID NO: 14079 - DNA, 263 bp, Oryza sativa
  Clone ID: PAT_MRT4530_2004C.1
atggcgtatatttataggcatagctagagagatggattgatcgatgcatgggtcagggtgaaaacagtcggaatcagtagcatctcttcagaaacgatgctcgatcggtcggtaattgaacatatttatcatttaaactactcaatatcgacattaatacgacacagaaagaaattagaaaaaacaaaattttaaaatagccaaaaacgttatggtcggaaacggtaccccttaaacagaaacagcgcccggtcgattgggaa

SEQ ID NO: 14080 - DNA, 878 bp, Oryza sativa
  Clone ID: PAT_MRT4530_20050C.1
ctactcactgctccccgactttaacccgtccgctccgctgtgggagctcgggacgtcgggcagctccacctggggctcctcacgaaagttgtcctcactgtgttgggtgccaaggtggccatcggtggcgaggtggatcaccgggcaactactcggaggcggtgaagacacgtcaagcagctcctgcgtgctgtcgtagcttatttcgccaaaagtttgcattgctatgccattgccacacggaaaaccactactgccacgtcttcctcgctgcgaaccagaacctccgtcgagcctccttagcttatcatcgtcgaccacaaactccaccatgatgccatcaatgactgtcttgtcgcagccacgccaccactcgccaactctgccaacaccaccgccatcgccaccaagacctatggcatcgtcgcggcctcccctctcctcaggccgacaagtgggtccccaacccccagccaactcgagccagagcagccgcccgccatggccgcccactccaccgccacgagcccacgtcgccaccccatgtcgccggtcgttgccgcccaaaattcgtcccatcccggccgtatcaaagctccccgagccgtcgcacctccctccgccgcccgccggcgcgttccaaccgcctgtcaccgccgccccgagccaccgccgcctcccgccggcgagcgtcgcctcgcccggccatgtcgccgccacccacagcgccgccacgccccaccgcaccccgtccactctccggccgaccccgcactgcgtcgtcgcctcccttggttctgcaaggacgaggagaccctcggccaccgcccagctcgcgtcccaaccactggaatccatacttggaatccatttcccct

SEQ ID NO: 14081 - DNA, 398 bp, Oryza sativa
  Clone ID: PAT_MRT4530_20051C.1
ctaaagggaaccaaagaaatacatgaatgcacaaccattgagaactccagcatggcataaaggcacacaaaacccacctggaaacagtctggaggccacaaaacccatttgcccaaccccaagaccacgaactcgctgggccccaaggcctccaaccacaaataaccacgggttagctaccggcccccattttatgagccggggaccaaatcggaggcctcccccccggcgagcgtgtagacgaagaacttgaggaggaccggaacagacacaagggggccctttgcgatctagaagggcgggacgaagccaccgaccacgggtaacacggcgggggggtcgcacttggcatccatcacctggagacacccgaaaccctcggggacctcctcaagggc

SEQ ID NO: 14082 - DNA, 1235 bp, Oryza sativa
  Clone ID: PAT_MRT4530_20052C.1
taaataaaaagaaaaacaaatttaattctccttcgttccccttgggccattttcggtccaagccctcctccctcttcccggccaggccgctcgcctacttctctcgggctggcccagctcgcttcccgccacctccaagtttgttccccctccctcaaaccggcctcccctctcctcaggccgacaagtgggtccccaacccccagccaactcgagccagagcagccgcccgccatggccgcccactccactgcaaaatccgccacctcctgtccctcgcgctcgcgtctaacccccgtgcccggaaaccaccccgctaccgtcgcacctccctccgccgcccgccggcgcgttccaaccgcctgtcaccgccgccctaaccctcgccgcattgtgacgccaccaccaccggcttcaccgccggagggcaagaccggccaccacttcccctccccaaaccgccgctgaaaccccgccgccaccaccaacccgagccaccgccgcctcccgccggcgagcgtcgcctcgcccggccatgtcgccgccacccacagcgccgccacgccccaccgcaccccgtccactgctcctcttccccaatccatttccgaaacgccgccaccacgttcaccatctctctccgccaccatcgccaactacagccgcaccgcgccacctctccggccgaccccgcactgcgtcgtcgcctcccttggttctgcaaggacgaggagaccctcggccaccgcccagctcgcctcgtccagatcggccgccgagagcgagggcctcgcctcgcctcgctgccgcccccctcgattcgtcgtcgcctcgccacccatcgttcctccccgcgcccacgccaaaaacgcgcctcacgtctcgctttgctcccgcactccgtcacccttttttttggggggggcgggcccccccccccccccccccccccccccccccccccgccccccccccgcaccccccccccccccccgccccagccccccgaccccccacccccccggggggggcgggggggcggcggggcgcgcgggggcgccgcggccgccggggccggcccgcgccgggcgcggcgcgcgggggcgggggccgcgcgggggcggcggcggccgcgccgccggccgccggggcgcgcggcgggcgccggggcgggcgggtggcggccgggcccccggccccccgcgcgcggccgcgcggcgcgcgcgcggtcgcgc

SEQ ID NO: 14083 - DNA, 238 bp, Oryza sativa
  Clone ID: PAT_MRT4530_20053C.1
actccacgagtccgctagatctgtgagtcagctgactatagggagtggattttggaacatatataaatgggttgagcacaccaaccaggatatgggagtggacacgctagatgctgagttcacaaggccattgtgggtatttggtatcagctcttatggttatcttagggaaagcagatcacattgttttcagctacaggcttttattgcactgagatacttctgacgatgaaaatat

SEQ ID NO: 14084 - DNA, 1060 bp, Oryza sativa
  Clone ID: PAT_MRT4530_20054C.1
atggcggagcggcaggtggcggagctgggggccggcgcggcgtgcgtaggctggaaccactgcggccgccgcctcgccgccggcgccgtcgacggcttcgtctccgtctacgactcccagtcccagccgtcgccttcctccaagtggcagagtcgtgaggttgaattggtgattgttctggaaattatcaggagatgttgtactgaaggaaatggaacggcccacaagcatgcgatcctgaatatcgtgtggcttcctccggactatggggatgctatagcttgtgtttgtgctgatgggacgctatctttgtgggaggaggttactgcatactcagatggccaagtgaaggtttatgagctcttggactcgttggaattagacaagtggcagcttcaggcggagttccagaacattacagatcctgtttcccgatctgggaagccagcatgtacttctgcatcaattgcatggagtccaagaagaggtgaaagtcagcaggctagttttgctattggtttcaattcagactctccaaatttcaactcttgtaagatttgggagttcgaagaagctcaccagcgttggctcccccttgttgagcttggctcacctcaggataagggggatatagtgcatgctgtagcatgggctcctaacatcggcagaccatatgagatcatagcagttgcgacatgtaaaggaatcgcaatctggcatataggcttaagcgctgaatctgacggcagcctgtcaactgagaatgtggctgtactttctggccatgatggggaggtcctgcaactggaatgggacatgggcggtatgacactcgcatcgaccggaggtgatggcatggttaagctatggcaggctaacctgaatggagtttggcatgaacaagctgtgcttgactgcaatgtgtctcactagggttgcatatcttttttttctggttggaactggggccttgggggattcccagctcccaagttgtgcaaacaagcatttaagtggattgcttatcaatgttaaagaaaaaaaaaaaaaaaaaaaaaaa

SEQ ID NO: 14085 - DNA, 462 bp, Oryza sativa
  Clone ID: PAT_MRT4530_20055C.1
atggccgccggaggaggaggaggagatgcagccatgcggggaggcgtggcggtggcagctggaggaggaggacgtccgccgtgcgctgctcccctcggtagtggcggcggcacaggggccctaggagtcgccgaggatgccgaggtcgacgtcgacgtcgtccgcggccacggccatggcttccccgtccgcatccggcgtgcaccacagaagcggtggcatggggagcggcgccgcagctacggtggcggcggcgtcaatggggggaaggggaagcggaagctcctcgctccgaacgttgttcgactgatctctgagttttggatggccatcgcacttcgcaacggaatggaggatacacatttgcctcttactaccattttacgtgttgtaacccaagcgaataatgctatgcctgcatttaaacttcttcagaaagaggctgacaaactcgcgacataa

SEQ ID NO: 14086 - DNA, 261 bp, Oryza sativa
  Clone ID: PAT_MRT4530_20056C.1
atgggtgaggcactccagaaacataacttcattctcactggagcgaacaatagtcaacagttctgcatagagcttctcagcctccacccctaccacgcaagcacgccacctgatgacgcagatgctgcacctgaggggaacacgatcagctggaccaaggttaacctgcacccccacaatatgcagtccagtggaactatgcctcccagtaatagtcggtgggcaaaatttgctacaggacactcaaagaacgtgtattag

SEQ ID NO: 14087 - DNA, 390 bp, Oryza sativa
  Clone ID: PAT_MRT4530_20057C.1
acgtggccaaagattgtttcgtctacaagcaggccgggcccacttacatctggtagcttttataggtcatagactgccctcacagaccaacacaagtctttctgcaaactttgtcctcactcgtgcgcacccgggaagattttcccggtcggtcacccatcccaaattgctccaggccaagtacgcttaacctcagagttctttagagatcggcttccagaaaagaagttgcaacttgttgatatgagtattctattaatcctattaagccctgggttaggatgtcacacctccgcttctatctggtagctatgtctcgtgctgccatggcgccatcatccccttgctccccagccctttgcagacgtttgaattacctcatctattcct

SEQ ID NO: 14088 - DNA, 275 bp, Oryza sativa
  Clone ID: PAT_MRT4530_20058C.1
gggaagcacaggtagattatattaagaagcctggcacgcatgaggagatggagcaggagtacatgatgagatcaccatgatgatagatgatccatccaagctaggttgggatccatgcaacattgatggacacacgcacacactgacaaggcacgacgacggctataactagcgcgtcagagcaaaaggcaaggcgcttgcctacattatgaagctgggtatctaagtgcaaggcaaaattaagggccttcgatcaaaggctctgaatcgacagt

SEQ ID NO: 14089 - DNA, 552 bp, Oryza sativa
  Clone ID: PAT_MRT4530_20059C.1
atggcggccgccacgcacgctcagccgtccggcgtcgacggccgcgacgagccgaacgtggcggcggccaaccggaggaacggcgcgcacgccgtcctcgccgcggcgtccgccctcgtcggcctcccgcccgagtacgccaaggcgcgcgccgtcctcctcttgcttctcctgcttctcggctgcgccaccgtccacctctccatgggcggcaaccgccaccgccactggctccgcgccgtggcgccctcgccggccgcgcgcgtcgtcgaccgctcgcgggcgcggctacggtggacggggttccacgcgctgctcttcctggccggctcccgcctgctcctcggccccagaacggctgcgccgccgtcgccgtcgcagcttctcggcgcgaacgccctgctcgtgacgggcgccatcctcgtgctggtctccaccgcctacgacggcgtcccgcgctccgtgcgcccggcggcggccgcggcggcgagggggctcgacgggctcctcttcggcgggcgcttcgctccggcgtccgacgccgacgactga

SEQ ID NO: 14090 - DNA, 612 bp, Oryza sativa
  Clone ID: PAT_MRT4530_20060C.1
gagttgtgcatttcatcatcagctacaaaattgaccacaggtcttctttcagctttgagtaacctgaggaaattgaagtatctcaagctgattgcagatcaacttgaggagttcattattaaggataatgcattgccaagcctgctaagcctatgttttgtgctgaaccgtcctacattcccggtaatcaaaggaaatgctttgaggtttctcaaatcactccagcttctctgtaaaaatctagttggcctttcagagatcaacattaattgtctcaaacgccttgaggaagtcgttcttcatccatgtgtgaacaaagcaactaaagttacatgggaaagggcagctaaggaacatcccaataggccaaaagttttggtgcttgaaaaggttgatctagcagatggccatgaagaagattcagattcgaccccaactgaaattgtgacaaataaggaatctactgttgcaggaaatggagcagatattgacaaacagaactatattgacaaacagaactatcctaccagtaatatgtcacgtgcaatggtttcccctgctttgactgagccatgcagcgctgggaatggtgtggagtcctcttgtgcctga

SEQ ID NO: 14091 - DNA, 199 bp, Oryza sativa
  Clone ID: PAT_MRT4530_20061C.1
aaccaacctaccaactcaagcttgcagaaggctcagtgcttaaaagtgcaacacaatccccaatttcaccatggtcatcccaaaatggaatcaggaacatgcgcacgcgcatgtatttttcatgtccaatgatcttaatcctaataccaatggaccaaaacatgggcgacagagtttaacgggagcaatactcaatatg

SEQ ID NO: 14092 - DNA, 515 bp, Oryza sativa
  Clone ID: PAT_MRT4530_20062C.1
cgaggagatataaagctgaaggaggttgcagtgcatgtacaacaatcaggtctactgcagggcagcagcaagcaagaacagttgatgcaagttctgaatccccagctcatcagcaagtagaaagcgtaaccgagtcactgcctaatatcaaatacaacatcaacctgcatcataactgtgttcttgtgcaaaccatcagaagttacaggtcttaatcgatcgcgccgaatcgcgctgagaattcgctcgacggaagcgcggtaatcgcgttattaagctagcttaagcatcatctgattcatctctaacaagacaaagagatgcatatcacatcacatcagccctgcataatctccagaggtgatgatctgatacccacattgctagtagtatatacacatggagtaattatcacaagcacaagtaaaggtttgcttggcattcttggcaatggcggccatggctgcacatccatgagagagcaaaagcagtagagtgggcataccgaaccatgg

SEQ ID NO: 14093 - DNA, 324 bp, Oryza sativa
  Clone ID: PAT_MRT4530_20063C.1
tccccgcgtccgattgagcgctacgacagataggggctgatgctttttcatgtgtaaaaggaggctaacatgtgctacacggccggccatcgttctccattgtccatttttcttctgcgtttagacatcacagtagtccagaaggttgtttgtgttgttttactgtaacgctgtaaagaaaagtgggcggggatgtgctatgcttgatttctctctcaaaaaaaaaaaacactaaatcaaacaaagaaaatataataccattgcctgctggtgataacacataacagactccaataatagctaggggccccccttttaccatat

SEQ ID NO: 14094 - DNA, 276 bp, Oryza sativa
  Clone ID: PAT_MRT4530_20064C.1
atgaccgtgggcacggctgttcgaataaggttcgcgacaaagcctttcccaagccgacccagggttacctcatgccacatagaaggatcaaatcctcacgaacccggtttgtccgaccccgccccggcattcccaactattggcatgcgaggggcgattgatcaaagggtgacttgccttgctcaaggtcttcacgaagcttcacgaatcttcgagaaaacccgcgatcgacgaaaatccgataaccgcaactatagcaaacaatcgaaaacctaa

SEQ ID NO: 14095 - DNA, 1178 bp, Oryza sativa
  Clone ID: PAT_MRT4530_20065C.1
attaattttgcttaattattcgttctaccaggatgttcagatcaacagcgctacgcctactcagggagaccaagagagcggttggcccatggatgacgacgatgacgtcgacttcgcctgaaagtctaatcgccggtggattctccacggcggcgagctcccaccagaggttggccggcaaggtggccgtcatcaccggcgccgccagcggcatcggcaaggcgaccgccgcggagttcatcaggaacggcgccaaggtgatcatcaccgacgtcaacgacgacctcggccacgccgcggcggcggagctcggcccggacgccacgtacgcgcgctgcgacgtcgccgacgaggcgcaggtcgccgccgccgtcgacctcgccgtggcgcgccacggccgcctcgacgtcatgcacaacaacgccgccatcccggggaggttcccgcaggacgacatggcgtccgtcgacctcgccgacttcgacgccatgatggcggtgaacgcccgcgcgtcgctcgccggcatcaagcacgccgcgcgcgtcatggcgccccgccgcgccggcgtcatcctctgcacggccagcgccgtcggcgtcctcccgctcccggcggtcgccacgcactccatcaccaaggccaccatcatcgccatcgtgcgcgcagcggcggagcccctggcgcgccacggcctgcgggtgaacgccatctcgccgggcgccgtcaggacgccggtcctgcagggcaaggtgtcggtgatgtcggcgtcgtctcctaccatgagcgacgagctgaagcagatgatcgacgtcgacgcgaacgacatgatgatggggccggaggaggtggccatggcggcggtgtacctcgcctccgacgaggccaggtacgtgaccggccacaacctcgtcgtcgacggcgggtacaccgtgcacaaaggagctgacacaccggcggcgcgttgaacgcagccagacatatttaaaattaatcaacttagtacgaaatatagtatatctagatttgtaggatccaaatgtgtcattagtttattttaaaaatgagttatttagtaggtagccttaggtgtccttccaagcattaggtccccaacccccatccatggttgaaataaagaaaaggttgtgaaaaaattttccaagaccaaatttaggttt

SEQ ID NO: 14096 - DNA, 1143 bp, Oryza sativa
  Clone ID: PAT_MRT4530_20066C.1
atgagagcctgcgtcgccaaggcgctccggtacgcgcggcggctgtgcgggtatagcaggcgcgccatggtcgacctcggcgcctgccgcgtcagctaccacgacgtcggacgcgtggagctggagatacaagcttcattagccgttcgcatcttcgacgagcgtgagaatggcgagacggtagaaggagaagagcccaggccaatcggctgccataggtgggaggttcagttcaggcgatatactgatactccgtataatgttggagactggagagtgcggactgataaatatgcagatacagaaatcaatgttggatctgatctttattcctcaaccgtaaaaccaggcgaggctttcccatgccgctacccgatctcaccgtcgccctgcgtggtggagggcaaagggcggggatcccctttcgcctacctccgcttcgatggcatgttgctcaggcaagagcgcgagtatgacgacgccgtcgaacaaggcatggaggacgccatcaaccaaggtgccacccctattgtcacaccccaatccggcaccgccgtacaatgccgcctgacaggagcgtgtcgtaggaataacggcgcgaaccgcttcctacgaaaccgcgatctcactcaggacagcctgagaatacaaccgaagacacagacgaggaaacaccagcaacagcagcagcagcggaaccaatggctgattctggtaacgattcccacaccacaacaacttttcacaaagcacaggcaatcaaatctacgcaacgggaaccacctcacatccgcccatgaccacactggccggtgtcagaggctcgcgacaaagcctttcccaagccgacccagggttacctcatgccacatagaaggatcaaatcctcacgaacccggtttgtccgaccccgccccggcgttcccaactattggcatgcgaggcttcacaaacccatttcccaagttttcgacaatcaacggtgtatgtgggatatttggtatgcgcgctcagagagcacggataccgaagtaccacaagggtggagcaacaaggaatcagggagcaattgatcaaagggtgacttgccttgctcaaagtcttcacgaagcttcacgaatcttcgagaaaacccgcggttga

SEQ ID NO: 14097 - DNA, 734 bp, Oryza sativa
  Clone ID: PAT_MRT4530_20067C.1
aattcgatgaagatcggtctgaccaaggttgactcgccggtctgaccgtgcctgtgccactggtatgactggtgtagatcgcccggtctaaccgtctcgaagttgcctctgcttgtcgacgcctccgccggtctgaccgccgctcctccattggtctgaccggtccgattgcgtcggtctgacgctccccctctatttatacatgaggtaggcagcctaaagccacgaaccaaactcatactagaagccctaaaccacctaggaaaccttctcgtataagaaacaaactttacataaccaatcatatcaaatttggactccttccaaattcgactccgcatcccatacgcacacaatacctccatcgtatgccatatggaatcttcaccaaccacgtgcatcaactctagcctaagtatatcccgaggcatcgagtcacctacacatgaatcaaacaaagaaatcatatttcgagaccaagctatcaccaaaacccgaaaccgaaaccgacacaaatatcaaaatcaataatcacagataccaattattcatcacagaataagaatcaaaaacacactttgatcttacatatacatgttggttggtcttaggttcgatatgatttatttgatggtgcttgatttgtttttttattttttttcatcagtcatcctcttccctgcatatgtctcggtggggaagaacctaggagaggtcatcaatgtctgtcccct

SEQ ID NO: 14098 - DNA, 390 bp, Oryza sativa
  Clone ID: PAT_MRT4530_20068C.1
aaaacgagccataaccgccgaagtaccaaaatttttttgccaaacaaagcttttttaatgtccttcagttatggcacaggaccaaagcctcacaggttcttttaagcttttttttttccatgtacttttagatatggagcctacaaaaggcacaattttacgagggtggaaaacctcctaagcttttagggaggcaggcagcctccgatctgggggagcagggggttaatctcgcccccgtttttcatttggagctcgacaggggtttgctccccccggagcctacgaccattaaatgggaaggcaatagcattcatttccacagactggcggggcaaaataggcgttcatcagtttcttcaactgcggaaaactttggaggcgggaaaa

SEQ ID NO: 14099 - DNA, 163 bp, Oryza sativa
  Clone ID: PAT_MRT4530_20069C.1
atatagagaaagcccgcggtagcgcatattggattcacttaggccgcaccacacgagattttatgggggcatataccacggttacatgaaggtagagagggagcatgcttagcaaaaacaatagcggagggcgggcggttgaatgaaaagacgttgaacgaat

SEQ ID NO: 14100 - DNA, 228 bp, Oryza sativa
  Clone ID: PAT_MRT4530_2006C.1
actgggaagacgatctgtcgcaggacgatagatggcacatgagggtagagaagatgaggagctccgtgatgcagggagagcgccctgaagattcaaagacatatctccaaactcacgatagtcgatcacctgctgttcactttgtcgaagcatgccagccagactatctcatatagtcactagtatatgctatgaccactgttctttattatcttgcatatattctga

SEQ ID NO: 14101 - DNA, 711 bp, Oryza sativa
  Clone ID: PAT_MRT4530_20070C.1
atgaggcacatctctgatttctttcttcgtctgccaatgcttatgttcttgcagcgacggccgataggtggccggaaacaagagagagatgaaaattccggtgcatgtagaggacaaaatgtaaaattcctagtgccgccgccggcggccggaggagctcggtccggccagcgacctccggccgtttcgcgttcccggcgatccccgtctcttccccttctctaccacctagctcgatgcacgatgaacagaagcgaaatgcagcatgctgttgatcaagtaaaatttacctggattgcgaccgagaaatccagaaacggggcggaagaattcagggaggggagaacgcagcgccaatcctcgccccctgccgctccgctcgccgccggcgctcggcggcggctaacgggccagaggaaaagccatggattattatggcgagatggcgatggaaatgttgtcttcgccgtcgccggcggcggccgagcggcccaatataacagcctagttggaaggccgaagatgcctttgcctgctcatccacgtacgggagcggatcaacccggtggcgccgccgacctccggcgagccgccggcgatggcaccgccgacaaccgcgccaccgtggtgaccttaccgccgccggattcagtggctaccccggtagcacctacacgaaggttactcttttctctgaactgtatttttcat

SEQ ID NO: 14102 - DNA, 399 bp, Oryza sativa
  Clone ID: PAT_MRT4530_20071C.1
gaaaaaacagcaattgtaaagaacattccaaacattttcagggcgcacaaagcccaattggggggggacgatcaacttttctttttaggaacaattaagcttttctaccacctgtcacgaataaaatttttgaattcctaacacgaccccaatcaaaacacatccccactagtacggggaatgtcactctttgaacattgaacaaagttagtttttgggcaaccttttttaaagttttctaaaaatcatcctttttctctttgttttttggtactttttgggggtgcaccaaaagaggcagccttttaaacttgatctgaactatccaagggcaaaagcattatttatttctttgccatggaacttttgggccgagttgccatttagaaccggaaatca

SEQ ID NO: 14103 - DNA, 425 bp, Oryza sativa
  Clone ID: PAT_MRT4530_20072C.1
ccaaacttgggcccaacctactccacttgccattcgttttccatccgcgggacctaccaccttccattcacttttcctctgttcgggagcaacgtggccgagggggagagccgatggtcgagccgcattggtggcctccgcgccggtggtcaaggcggtgccaagatctctggaagcggtggcaccttgcagtacaagctggtgaagaagcaactccgccacggaccactggtgttgtcctttggcccagcatcgccgtcgcccttgccaacgtgagcaagaaggcccacaccacccgtccacctgaatcctcaccgctgcctccatgcgatctccgtccctacgtggatttgaccgacggcgtggattcgggagttgcgcggtctccgccttcattcgacgggtcgtcgtcgaggtcgttgtag

SEQ ID NO: 14104 - DNA, 277 bp, Oryza sativa
  Clone ID: PAT_MRT4530_20073C.1
aaggattaagagaggctttatcagtattacttgaaggagtgggcagttcatagcagcaaaacaactgcttgcaatttacaaatcagagccagacaccaccaacggccggcctacgaggattctgacgcattataaacgtcttggtagctcttgtatcggattggagtgaatgcaccgaactcatctcctatattatgcttgagcctttgagcctattctcttgagatgcgatatgcatttgctagaacatcatttgggagagcacggaagatggaac

SEQ ID NO: 14105 - DNA, 437 bp, Oryza sativa
  Clone ID: PAT_MRT4530_20074C.1
gaaaaaaaacgggggaaaaaaaaaaaggggcagctaacccaatggcccttttttaaaaaaaccaaggaagcggaacaagggggttaacccggggcactccatcgaaaccggaccaatttggggcgttggctacaccaaaaatcctggaatccaccccggaaaagggcttttttggggggcggccggaaacgggccaaacgggaaaatcccaagtaaaggggggccccggccccgggggttcattaggaccggcaacggaccccttttcaaaacggagggggcccaagggggcaggggagccacccccagggcccatttttccatccaaaaataagcaaacaaccgcccaaccatcgatttgggaggggggaaattgggtttcccctccccgagggggtgcctcaacaggggattttgcaccctttgaccgggtgggg

SEQ ID NO: 14106 - DNA, 363 bp, Oryza sativa
  Clone ID: PAT_MRT4530_20075C.1
aagaggcctttaaaaataaaaaaatttttaaattaaaaggtatttacacatcccataacaggatctttaaaaggaatatggccgcaaaaaaaaaaaattaattttctctaaactccatttatttaaatagggccccctagagaaacccattttttaattttccccaatttcaaggtggaaaaagaaaataaattgtgaatcttattgtgaaacaaagaaaagttgatatttggcacctttatgctttttaattgcaagttgagaggaacaaattgtcattcttcacaaatttcttgaaaaaatttttccttttttgggggcccatcccacttattgttaaaaaatttacggggggttaaatac

SEQ ID NO: 14107 - DNA, 501 bp, Oryza sativa
  Clone ID: PAT_MRT4530_20076C.1
gaacttcacatagaaatggtattgaaatagggacataaatatatccaatattcatcctgagcattcaattttgtttttcatctaccatcagcataactctcctactttgtattattatttcgaagaaaacatccaatcttcctagctaagacaaataaaatgcagagaccaatatatctaatctactaccgcagcatgcctattacagatgtaatacatttttcctggtagctaacaggagggattgaagactgacacaggggtggatttaaaccaattctttacaaaatatcagctggggtttcggggccagtcgagcaaacgatttgagctacgtgcaactgcaactcatgcacatcatgagatcacagacctgatgtcagatacccgtggcgtatcctgcttgaaaacgtcagtatttccttgcctctgtcaacacattggatctcatgggcttcaatggaacttccagtcattattctgtgacattagcatttggga

SEQ ID NO: 14108 - DNA, 525 bp, Oryza sativa
  Clone ID: PAT_MRT4530_20077C.1
aacatccatctaataccctttgtataaatatatataggccggagctttcataaatttcattcacatttgcctcacccaacaacatttagtcgtagcaaataccacttttacatcaagtcaaaaaaagatcaggggaaacaaaaacaaaagcagagcccggccggtaaaatcaaaagacgatgaacaaactggtaacacacaaaacaaggggggagacatcttcgaatcaaaaatgaacaattaaacgaggctttttttgacaatgacgggttatttgccaccaaactccttgaaacccgggggcttgtaggcaaaaaaactgatgaactgcacctgcctaacgttgtcaaagccgatgatacggacaaatgcatcaggggacccctttttggcctcctcaagctccttgagcacctggggggggtcggggcacccaaacatgggcagcttccacatgggccaatacctgccgtcgtagtatccaggggacctggggttctcacgggaaacaaatccctcgtgcca

SEQ ID NO: 14109 - DNA, 587 bp, Oryza sativa
  Clone ID: PAT_MRT4530_20078C.1
aaagtatatagccggagctttcatagatttcattgacatatgcctcacccaacaacatataggcggagcaaataccactcttacatcaagtcagaaagagatcaggggaaacaaaaacaaaagcagagcacgggcggtaaaatcaaaagacgatgaacaaactgggaacacaccaaacaaggggggagacatcatcgaatcagagatgaacaattaaacgagggtttttatgacgatgacgggttaattgccaccaaactcctcgcaacccgggggcttgtaggcgaagaaactgatgaactgcacctgcctaacgttgtcgaagccgatgatacggaccaatgcatcaggggacccctttttggcctcctcgagctccttgagcacctggggggggtgggggcaccccaacatgggcaggttccacatgggccagtacctgccgtcgtagtatccaggggacctgggggtctcacgggagacaaatccgaccttgctgaactcgaggcagggcacccacttggaacggaacagggactcaatctgctttaggagggcctccaccgtgaacgggggccggtaggaga

SEQ ID NO: 14110 - DNA, 519 bp, Oryza sativa
  Clone ID: PAT_MRT4530_20079C.1
atgtggttccatatggggctccaaggttcataccaagaatcccacaacattcctaaaacctgcatatgggaaagaccaaagccgttctcaccgatcatgctcactaaccaccttgagctcactggtggccctactcatgcagcagccgccgccacgtgccttcttctccttaccatcgccacatgcctacttctgcttcgtgagctcagtgctggagagatcgagctcgagctccaccaccctctccttgagtgcctccaaaaatctgactccagtgacagtcgaaggccgttctcaccgatcatgctcactaaccaccttgagctcactggtggccctactcatgcagcagccgccgccacgtgccttcttctccttaccatcgccacatgcctacttctgcttcgtgagctcagtgctggagagatcgagctcgagctccaccaccctctccttgagtgcctccaaaaatctgactccagtgacagtcgaagggtagcaatgagacttggaagttga

SEQ ID NO: 14111 - DNA, 2542 bp, Oryza sativa
  unsure (1)..(2542): unsure at all n locations
  Clone ID: PAT_MRT4530_2007C.1
caggaattcggcacgagggcttgaactagaagaaaagctgatcagttgctacggttaatgagtttaatctccgtggaaactaaatggtttttatccaccangaatgagttcagatgtacagtttgtccattttaccnctaaagtagatatccatcaatcaatagagcagatcttacaataactttgccagtaatccagtatagtaccacctggcaccataaaaagttgagtaaaccagaacttgcacaccaccttttttttctttcaaggttggcaacaatccacggtttcaggacgaacaggtgaaaagacaaaaattaaaccggtatatattccatgcctatttccctttgatttgttcatacaagggaattcctcaacctgaacggtaataatttttccattcctgtatcatcattacactgatattacatgttctacaactgtaccagcaaagaaaagaaaggttatgtgactgcttctggagctgagttgcagtagggagtgtgcaagcaaatgaatctggtcgacatcaggcatacagaggcaaaggcgaaacctatcaaaagcccacagatgctcttccgcatgtccaaccttagcgagcgtttgaagactcggccaaagcttggaatcaaagcaccacaggcaatgaccatccagtagtctagtccactgtagtcaatcttcgcgaggattgcactgatggcagcgcttggccctgcaaagccggtcaaagcagcggctgccaaggctgcccgccaactatcagtggcaccatatatgcagctcgcaacagcagcacctcgtggtagaccatgaagggaaactggaagaaccatgtagcgccctagaccataagccttgcgcgcagccacaccaagttgaagaccttcagcatatgcgtgaaggaagacagaaccgcaagcaaggagcgattgcagtgtgaggacactaagtgagaggcctgaggatgatgtaattacattaacagaagatttcttgcggttaactagctgaaggatgtttgatgtggcgacatggtaaatgagagaacctccaattaggaggaataaggtggtaaatagacccatcttcgatgacattagaagttgtaaaggtctccatgctgcgagacggaaggctatgcctgatgctacaccagtcaaaagagggtgtggcatgctgaaagtaagagagaatgcaacaagtacaattcctccaaaaagaggacctagtccaaatacaagtgataccaaaaagcctgctgtatcttctgagttgtggccatcagtaaatccctgaagcactgtacccaatgtttccatgaaagcaacagcaagcgttccggcagaagcaacttgagatggagcagcttccttaaaagcatcaggaagaacctcagcaattacaatccatatcatgcatccagcagcaaaaccagtacaaaagggaagcaccttttgaaatgcatcggcacaaaggaatgcagggacagcaacaattggctgtggtaaagatgttatgatactccatatcattgccttttgtggggatacacccctggatgatagcaacatgcttacagctaagccttcaggtatgttgtgtacagcaatggctatagtaactaaaagaccttgagagaatccttttgagccagcaaaggaaacacccacaccagagccctccccaaaagaatggagtgtcattattccgacaacaagaataactttacttgcatctgcaccttttatatcgagcatgcttacttctccatattgctcaagaaacttcttgcaaagccagatgaaaaaccctccgctcaaaatcccaaacacaacccagctcccactgccatacatttgcccttcctgcacaagatcaaagctcgccgctaacatcacccctgccgcgagtccattgcaaagtcccgcccactgggcctctagctccaggaaaaagaatggcagagcacccaaaccggtggcagcggccattgcaagcgtcgaccacgcgaccgtagacaccggcaccttcccgctcttgaacccatcctgcccgcctgcgccctcaagcttcctatcaggcgcttcctgcacgacgcgcacaacgccaacctctgtctcagcgaccgctgagacatcgcggacaaggacaaagagcaggaagaataggaccactccaactcttgcaattaggaaggaatacaacagaggacgcaagccagaaccagagattcgcatagcccggtccaatcaatgcaacacggtcagcatcggcaagaatcatgaagcaaagcaatcgtctcggtccagcaaaacagaccagcagttcacaattcctgcatggagagctgctccagcacatggcggcggagttcactgggtggtggagaggagaggcggcgcggtgggagaagctgcgccggcgaggtggggaagaagagcggcggccgacgtgggggaagacggcggcgcgctagctagtggatgcggcggcgcgccagccgggcgccggcgtcgtcgccatctattttcct

SEQ ID NO: 14112 - DNA, 498 bp, Oryza sativa
  unsure (1)..(498): unsure at all n locations
  Clone ID: PAT_MRT4530_20080C.1
cacgagctcgtnccgnattcngnggnatcggcaantnanacaatcggggataaccttcatcntcgagagggaaactgncggatcnccacctnangcccccnaattacctctcagttatntnggangtgggggttgncaagacagccagtgatgtttncctatanacnnccacccttnananaatncctaatacctcactgttcgancccccttgcgntnaanattaanggggctaaaccatctncctgaagctgtgggatctcnaaatgcatcggtaggggancgttccnccttatacggaaaccaccgcnaaagcgggggtccactaaacggnggccacaatgtccgcttcantcaccaaaacattggtganaatcccatgccccnaaaacccnangtttcctccacnaggttccnccncggatggtgatctggcctctatcagcgaagctctcatggacanagtcanatactntctaccctgtgtacgaggacgan

SEQ ID NO: 14113 - DNA, 812 bp, Oryza sativa
  Clone ID: PAT_MRT4530_20081C.1
tcatccggcgtaccgccgctccgccgcccggggatcgtcgtcaccgttggtcatagcggcggtgatggcgtcgtctaggccgagcggcgacgcggcggcaacaccaccaccggcggcacctccaccgtcctcagccgccgcctccgcgccgccgccctcagcccccacctccgccaccgccgcccaccgaccgtccgcccccgcgcaccgccgccgcccgtccacccccgcgcaccgctgctcgccgccaaccgcgcccgccaccgcccgcgcccgccgccgctcgccgccagccgcgcccgccgttcctgctcgccccgtcgcccctctcaggtaatggcgtctcaagcatttccgtcgtgctgccccgttgccgccaacgtgggtgccggcgctcaccgcatcccgccgccggaactgctgcaccggccaccgctcgagcgcatggtagtcctcgccggcgacgagcaccaccccacgcttcctcttccatccgtcgtcggggagaagctgaagaacagcggcgcgcggtcgtcgccgttcgacgccgcccggcgcctccattgccagtgccgcccggaacacggccaccgcgcctgccacacgacgccgctgacgaacgtcgccggcggcgccagaatccggccatccgcgacggcagccccgccgtctgcggcggcggtggcggcaccggcgccggctgatgacgccgcggccgcgtgtgcagcgtggagacagggtgctgagatgaagttgaacgagaggttggggatgagaaggaagaggataagatggggaaaggtgggccccat

SEQ ID NO: 14114 - DNA, 328 bp, Oryza sativa
  Clone ID: PAT_MRT4530_20082C.1
ttggatatgatgtattgaccgctacggatcatttgattagaatgaaatttgaaacgggtatacttgacgatgatgatatgaatcacatgaaaaataaacgtattcgtttggttgcagatatgccacaccatcaatttggacgggctcttgatcgtttacaacatgcggttcaaataactatccatggagtattcatacatcaatcaaaactgattccacactttggtaactccaacttcaaccttgattttattaataatacttacgagaccttctttggtacatatcccttatctcaagttttttgttctcccaatccatatctcat

SEQ ID NO: 14115 - DNA, 504 bp, Oryza sativa
  Clone ID: PAT_MRT4530_20083C.1
atttatcctggccttttctagaaccagtagagggtgtcattcttaccatacctgattattttgatattataaaaaatcctatggatcttggaactattaaacaaaatctggaatctggaagttatactactgtaaatcaatggattgcggatgttaggcttgtatggagtaatgccatgttatataatcctcctggaaatgaatttaacacaatggcaaaaactttatccgatacatttgagaaaaaacttgctcagatggttcataaactaagttattcctcttcacagaaaagagatcagctacgtagtactctagagacgttagtagcacaatataagaattatgagtcagaattgggaatgctcacaaaacaggcagaggatgaagctagagagcatcctgatttgtctccccccatcaaaccaagttctgcactactcaggtcacctttgaattttaatgagaagatgaaattatatcataatatcaactcgctggata

SEQ ID NO: 14116 - DNA, 182 bp, Oryza sativa
  Clone ID: PAT_MRT4530_20084C.1
tcgtgaagtttgtgaagtcatccatcaggtactgcaccgcagcaggttttctaccgtatgattcagtttagccactcatagatgcgcgtgttcacacgcaaagatatactcactgtgtgttatgtaagagacccgcaaagatatattcactgtgtgttatgtaaaaaaaaaaaaaaaaaaaa

SEQ ID NO: 14117 - DNA, 114 bp, Oryza sativa
  Clone ID: PAT_MRT4530_20085C.1
atgccgagatgggcaagtgctgactgggattggctgattgagagcagcgggccaagcccttccacccgccgttctgaccatctccctgtaccggccggcaccttcttcgagtga

SEQ ID NO: 14118 - DNA, 561 bp, Oryza sativa
  Clone ID: PAT_MRT4530_20086C.1
atgaaaacattagagttattacatttttttttttcaaataaaaaattagggcaaattgcgcctaacgcagaacaattgcaacatatgtttaaagccgcattacgtgcgcctgatcacggtaaattgaagccttatcattttgtggtgattgaaaaacagagtatgtcaatgttaaaagcgtgtttggtggatgcggccattgagtttgagatggacgaaaaaaatgcgcttaaagcggataaaattgctgagcaagcaccgcttatgattggcattgtggcaaaaatagatcatcaatctgaaaaagtgcctgcttgggagcaaatgatcagtgcaggctgtgcaacttatgcaatgcaattagctgcgaatgcgttagggtttgatactgtttggattagtaatcagtgggtagaaggcaaaatgttgcgacaggcttttggttgtcaaacaggagataaaataatagggttattgttagttggatcgcctaaggaagcaagagatggtatttcattagcacgtgaaacagaaaatacagagggttttgtcagttatttg

SEQ ID NO: 14119 - DNA, 493 bp, Oryza sativa
  Clone ID: PAT_MRT4530_20087C.1
ccccgcgtccgccccgcgtccgccccgcgtccgcggacgcgtgggtttgttttggaaaaaaaacaaaaaaaaaaaacaaaagacggccgatgtaaaggaggcaagattatgaacacgtccttgctggggggtcgtttttggggttgcgagctttcgttcccttgctttcgccgtcgttgttcttctttttggttgcttaaatcctgttgtctgcccccttttttacctcgtagtgcctggtgattccctggggtggcccactttaatcgcggtgcggcccatccgcctttctccacatggggtcatcccgaatggggcctggcgggcggccttttgcaacgctttatgaaccgcagtggtggtggggacgccccctgtggcggctccttttgcccggggcgtgtggggggctcccccagcttgttcccttcactttttagcccccttatgccgcgttcctttggcttgcttctcttcgttggttgcccctttg

SEQ ID NO: 14120 - DNA, 418 bp, Oryza sativa
  Clone ID: PAT_MRT4530_20088C.1
atgaaggcgctagatctgtttggagtaagtgttgttttcggagaggcagtggctggcggcgtggaggcgaggccgccggcgggcgaggagccaaggccggtggccggtgggggcggagacggctgcggcagcgggcgaggacgagccgaggccggaagcgagcgggcggctggcgtgcgggcggagggtgaggagacgagggcggaggccggcgggcggctagcgcgggcacggctgcaggcagtgggcaaggagctacccgaggtcggaggcgagcgggcggctggtgcgggcgcggcagcgggcggcgggagaggaaccgaggccggaagcgggcgggcgcaggcgcggatgcgggccggaggcgaggagccacagccgaaagccgctgcttgctgctggggtggcacctacgcct

SEQ ID NO: 14121 - DNA, 384 bp, Oryza sativa
  Clone ID: PAT_MRT4530_20089C.1
atggcactctgcgcgggcgggcacagctccgcctctgtggccgatgctgacgcggacggcgcagacgcgctcggcagggccctcgcctccttgcgcagacgacgtgctcgccgctgctgccgacgcgctcggcagggccctcgcctccttgcacggacgccgtgctcgccgccgccggctcgacttcactgttggagtaagaagatgggagaaggaaagaagacggaaaatgaaggaatagatggaaatgtgacgatctcgtcgagacctagcaaaatgctctatgctgaaacagcgaccggagctgtcactaccgtaaaagctccctatcgtggcggattagctgtctgggttttgggatgtatcaagctccctgctaattaa

SEQ ID NO: 14122 - DNA, 610 bp, Oryza sativa
  unsure (1)..(610): unsure at all n locations
  Clone ID: PAT_MRT4530_2008C.1
gtccttacccccacacccaaaatccgtgtgcgccgccccgcacggccgcgccccccgtcctcgcccccgtcgccgcctatatcaccgacgaccctgctttgctttcctnctnctncttcttcttatccgcgagttagatctccacaggagagaatcccaatcgggcccctcctccgcccctctccctctcccccctcaccgtcggcctgccggcgacggtatatcgaatcgagtgctggagcagctctccatgcaggaatcgtgaactgctggtctgttttgctggaccgagacgattgctttgcttcatgattcttgccgatgctgaccgtgttgcattgattggaccggggcatgggaatctctgaatctgaatgagtgccttccattagagtgaacatggactcaagagttggagtggtcctattcttcctgctctttgtccttgtccgcgatgtctcagcggtcgctgagacagaggctggccgttgagcgcgtcgtgcaggaagcgcctgataggaagcttgagggcgcaggcgggcaggatgggttcaagagcgggaaggggccggtgtctaccgtcgcgtggtcgacgcttgcaatggccgct

SEQ ID NO: 14123 - DNA, 1287 bp, Oryza sativa
  Clone ID: PAT_MRT4530_20090C.1
cccctgctcctcctcctcgcttctctcctcctcgtcgcagcgcggcgagccctcggcctcggcctcggccagtggcagcccggccacgcccccacgcgtccgccaatggcgccacccctgctcctcctcctcgcttctctcctcctcgtcgcagcgcggcgagccctcggcctcggcctcggccagtggcagcccggccacgccacgttctacggcggcggcgacgcctccggcacgatgggtggcgcgtgcgggtacgggaacctgtacagccaggggtacggcacgagcacggcggcgctgagcacggcgctgttcaacaggggcctgagctgcggctcctgctacgagctccggtgcgcgggcgaccaccgccggtcgtgcctccccggcggcgccaccgtgacggtgacggcgaccaacttctgccccccgaactacgcgctcccgagcgacggcggcggctggtgcaacccaccgcggcggcacttcgacctcgccgagccggcgttcctccgcatcgcgcggcacgccgccgggatcgtcccggtctccttccgccgcgtggcgtgcgccaggaagggcggcgtcaggttcaccgtcaacggccacgcctacttcaacctggtgctcgtcaccaacgtcggcggcgccggcgacgtgcgctccctcgccgtgaaggggtcggggtccgggtcgcgcgtgggggggcggtggcagccgatgtcgcgcaactgggggcagaactggcagagcaacgcgtacctcgacggcaaggcgctctccttccgcgtcaccgccggcgacggccgctccctcacctgcgccgacgtggcgcccgccggctggcagttcggccagaccttcgagggcaggcagttctagattagtttagccaagaggattattatctcttaattcttactagtatcttttgagtttaattgcacacccaatcggtgtttagtgaggtctagtcgtctagtagatgctgaggttgctgtggctcctgcaagagaaggcaaggcatttcgcgcccgcgtgtcagaggccggatggtttgcagtttgctgctctgctcttagttcagatttgtacagggcatgtggcatgagtaaatgagttgattagttaggtccagagagtggctggctatagtgcgagcggtgatcggtgagccagcctctctgaaaaagagtgagctgtctgtacaaatgcagttgcttgtttgctactcactccatttaaaatatagcaatttatattatttctaaaaaaaaaaaaaaa

SEQ ID NO: 14124 - DNA, 990 bp, Oryza sativa
  Clone ID: PAT_MRT4530_20091C.1
atggcagcgggattccgccgacggctcaccgcgctcaccatccccaaggcatcgtcctacctccgccggacgaggcacaagaagttatcgtactcccgcgcccgctccgctagcctccccggccgcttccacccggtcgtcaccggcctgcacgagtcggcgagtgctctcctcgggtggactgatgaggcgccggcgcaggctggcacgcagtggatcggcgaaggggtcggccacctggcgcggctcttggcgggcttgacggagctgctccaccacccgcaggcgcaggacccgctccggccgccgcgcaaggcggcgccgtggacggagcggctgctcgacgacctcctcctcctcgccgacgcgcacgggtgcttccgcgaggcgctcctggcgctcaagcagctcctcgccgaggcccacgccgcgctccgccgccgcgacgcgacccgcctcgccgccgcgctgcgcgcgcgccgccgctcggaccgcgacctctcccgcctcgcctccacattgcgtgacctctcctaccgctcctcttccgccgcagcgacgtccgactccggcgaggccgcgctagccgaggccgtcggggccgccacgtgcgcggcggcggccgcgtccgcctccttcttcgcgggcctcgcgtccgcctccgcctcctctgcctcgcggtcgttggcgtccccgaccgcagcctctcccgcaaaggtagcggtcgcgccggtgtggtgggtggccgacctcctgcggtggcggcggcgcacggtgtcggtcgctgcctgcgagtccggcgcaggcgcaaaggagacgccattggacgaatgcatcgatgaggaagaggaggaaaggaaggcggccatggatcggctgctcaggctggaggagtgcgtcgtggcggcggaagacggctgcgagcaggtgtaccgggcgctcgtgaacgcgagggtgtcactgctcaacgtactgacgccgtgcttttga

SEQ ID NO: 14125 - DNA, 573 bp, Oryza sativa
  Clone ID: PAT_MRT4530_20092C.1
atgccgcggcccaagatcctaaacgggttcgacatcattgcatcgtcgccgagcttcgacatgtccgggctgttccaggagcgtggcgagaggatgcgcttcgtgtccggcgcgtcggtggccgacatcatcgccaagctagaggagatcgccggcatggtgagcttcatggcgtggaccaaggactgccaggtgagcatcgaggcgacgcggaacggacagaagagcgcgctcgccatctccgccaaggtgttcgagctcacatgtgagctcgtcatggtccagctgtccatgcgtcgaggaggcagcggtgctcggatgtccggcaggcgcgcgcgccctgaaccagtggcggcgcctggctgtccggcggtcagaggcggtggggtagggcgtacacccggagccacctacggcgctcggatgtccggcgggaggtggtggctgcgggctggagcgcgtgaggaatcgatgagcggttgcggactggcgcagggaagcgtgggaaggaaggaggggacaaagagaagagagatgggagagttgacacatggagagagatgggagagctga

SEQ ID NO: 14126 - DNA, 414 bp, Oryza sativa
  unsure (1)..(414): unsure at all n locations
  Clone ID: PAT_MRT4530_20093C.1
atggcctcgcggattctgcccggcttcttccgccgccgccgctcttccgccgtcgtcccggcggcgactaaggaggagatgctggagctggagaggcggctgtgggacatcgcccctgcggcggcgtacgagctgcaaaaacggcggcaatggacgccggagcaggtggcgagggaggccgagaagcagcggtggatcgccgaggagaagcgccgcatcgagaaggagaccaaacggcaccagcagagaggaagtccggcttcgccggtcgtcgtcgtcgtcgatcttgacaaggagcttggcaaggagttcgaaaggacccggttctacgaggagctccggctgcaacaagccgaggctcgccgtgcgncggcgtcccaaggtcgtgacgacgacggaggaggaagacgatga

SEQ ID NO: 14127 - DNA, 528 bp, Oryza sativa
  Clone ID: PAT_MRT4530_20094C.1
gatgatctgccgtgatattcggttggagccttcgagggggctggctgttgccgatgctgtaagcgggtgctgtgatgtctccagcaccgctttttgctgatggattggtcgtcgccttcggctttgccgatgggctgcgcgcaatatggctgtggacatcgatctaatcgccgccatcgatgccgatggatcacgacgctgctggcgacctgcatgctggcttataccttgatcgatcaggaatatcccaatggtgcaaaagctgctcatgtcgatggaatcacgccgccggcaggtggacaaactgcatcgacgtctcgacgatggattcgatgccaccagcgcacagacttgctgatggatttctgctactcgccgccgtggcctgagacgccctcgccgatggatcgcatcgccgtcgccgtcgcctccaaattgcccgtatatcgcactctcacctttggaccgatctgttgatttatagttcggtttagcacaatttgaaattcgatcgagttgatcatccat

SEQ ID NO: 14128 - DNA, 378 bp, Oryza sativa
  Clone ID: PAT_MRT4530_20095C.1
atgccgatggatcacgacgctgctggcgacctgcatgctggcttataccttgatcgatctgcaacaaaaagaaagagagatcaatccttgatcaatctgcaagaaatacagaacgagagaaaaacgggaatcaatcaccaggaatatcccaatggtgcaaaagctgctcatgtcgatggaatcacgccgccggcaggtggacaaactgcatcgacgtctcgacgatggattcgatgccaccagcgcacagacttgctgatggatttctgctactcgccgccgtggcctgagacgccctcgccgatggatcgcatcgccgtcgccgtcgcctccaaattgcccgtatatcgcactctcacctttggaccgatctgttga

SEQ ID NO: 14129 - DNA, 1096 bp, Oryza sativa
  Clone ID: PAT_MRT4530_20096C.1
ctctgaaatcatgcatatcaataagaacaggagttacaggcagcttacatgcagctctccaagtcccagaagctaaaaatacttaatttacttaagtactactagtgctaattacctagccagggagagggatcttagtacggatcaactacggacgtaggcagctagtaggtaattaattcttttttaccatagtaaacagtagctagctcgctctcgcgcagtagtgtggccggatcgtcgtcgtcgtcgtcgaccacgcgcgcgaactcatgcaagcgcggcggtgaagtcacaagccggcgggcgcaaggctgagctggaggtcaagccccaggcaggtgtcctccggcacggtggccaccggctccgccaccaccatcgccggaccgggatatctcgcaaggctggccgccgagctcgcgtggatcctccgcccgtggtgctcgtccgtcgtcacgtagggtgccgaggccgcggcgacggcggcggcagacgtcgccggagtgtacgagaacacagccggcgaggcggcggcgacggcggcagggccggcgccgcgggcggggaagacgcagccgtgggacacgtggaactgctggccttgcgccccgccggccaccgcggcggcgcgcggggagaagtagacccagctggtgggccccgcctcgccgccgccgaggaggtggggggtcggagcgaaggcggagaccatcgggttggcgcgcgggtagagcgcggcggcgccgcccgcgacacggccggcggccgcggccgccgcctgcagctgcgcccgcttgagctgctgccgctccttcttgtgcgcgttctggtggccgccgagcgcctgcgagttggcgaactcgcggcagcagtactggcactcgtacctccgcccgtcgccgccggccgtggccgtcgtggtggtcgtagtagacgacgaggacgagtccgagccgccgcctccgccgccaccgttgcccccgcagaccggcgcgctctccggctcagccgagtactgctcctcgtgctccgccgtctcctcctcggagacgtcgaagccgaagagctttagcctggggctcgtcatgctcat

SEQ ID NO: 14130 - DNA, 680 bp, Oryza sativa
  unsure (1)..(680): unsure at all n locations
  Clone ID: PAT_MRT4530_20097C.1
ccgcccggcccgcccttcccccagtgcggggttcgttcgttgtttccatggccccttctcggggangggggatttggttattagggttttgtcctgttgcgtcgcaacatctgggcccatgcttacagcgacgaggaggaggttgtcacatacgtgccccaagatgatctggtcatcgcagtctccaacttcttcgacgggatacagtgtgtcctttcaggtgtggcctagagggtgtggatggcaaaaaattggagcttgtgtaaaccttggcgcctactatatcgttggcatcccttcagcttacctcatagcttttgtcttacaggccgcggaatgggtctatggctaggcatcatctgcggcctcttggtgcaagtcctgctactaatgccaataacacctatgcaccaattgggataaagaggcggctaatgcgaaggacagggtcttcagttcttctcttccttcagatctcgcaaccactgaagttagaggtgatagttgtgaaagcgtgcttgcagactacatgctattactaatcagcccgcattgatctagtttctcttggttgggtgtcgatcgtaaaatttagtatactgatctggaagcttaaaaccacttgtgtatattccccctctttatatatatgctgcccttgtgaaaaaaaaaaaaaaaaa

SEQ ID NO: 14131 - DNA, 114 bp, Oryza sativa
  Clone ID: PAT_MRT4530_20098C.1
atgcctagagcggataatgtcttgttagactctgagagccgaacgaccatgaaagttccattcagcgttgtcgagggctccgtgtctctacggttctacaccgggatcgactaa

SEQ ID NO: 14132 - DNA, 564 bp, Oryza sativa
  Clone ID: PAT_MRT4530_20099C.1
atgaagataactactggtgacaggaaagaaaaacggaatgttggattcaagattcctaagaagaaatttaggttttgtgttcgtgatgagtatggcacgaaggcattggctgagcaagttatggttaaatccacgtcactgtggcgcgagattgagcttcgtaccgagacaaggatgattacagcatttttttaccatgggtgcggccttcgcacatggtcagcgtacaggcagaacatccctatttttaataaattgcatgccgcattaaacaatatactcagaaggtacaagagtcgtcgtgtggaaattggcctattttatctgcaatcaaatatgaaatgttttcagtttacagtccggagtcctttggacaacaacaacgagtttctgaaaaagttacggaaaattaaagcacacgaatgcaacatgagagaagataatgcggagaaaactggaagcctttcccctataattatggggacattgagattagttagcaagaggcatgtacttggctttatgtttgtgatatttttatcttgtgtaataatctttctatga

SEQ ID NO: 14133 - DNA, 413 bp, Oryza sativa
  Clone ID: PAT_MRT4530_2009C.1
agaaaaaaatggggggtttgggtttaaaagcgggagaaaaggtttgtaatgtttgtgccaaaaccggtggggcaaaagggaaaccggggcggggaataattggttttttttaacccacagggggattcttaatttatttccggggataaaaaagttttttgtcaagccccctggaaaaaactaccctttttccccccggaaaatttcggggggggggggtgggtttttttaaaaaaatttataaaactggggtttttctttaaaaaagaatttgttcgcttcaaatggggggggggccttaaggaataaaaatttttttttttaataaaaaggggaatttaaaatttgccctttataaaaccagttggaaaaacctcccttttgtccgacgaaaaaaggaaaatcccccccaa

SEQ ID NO: 14134 - DNA, 216 bp, Oryza sativa
  Clone ID: PAT_MRT4530_200C.1
atggcggcgaagtgccccggcctcgccagtcttcggtggcttcctgctattggatccactaccaccagctaccaactcctagtgctactgccaccgctgcctcgctgtccacctgagtctaccgccgggtcctccgtcaccaacaagcctcgagataagggtttttttaacccggcttctacatccaaccagctatatgtagcatttttaaattag

SEQ ID NO: 14135 - DNA, 990 bp, Oryza sativa
  Clone ID: PAT_MRT4530_20100C.1
atggcggtgatccggggggagacctcgtcgaggacgctcacgctgggcggcctcatctgcgagttcgaggggttgaaggagaagttccccgaggcgtacgggacgttccagctcgcgcaaacggcggctcacctcacggcgccgtggctccgcccgctgctgcgcccacaggacggacgctgggacatcctgcagaggccagcttgggcgctggcgttggtgcagtcgctgaggaacatactgcaagaggaggaggatgcgccgtcggcgggcatgtcggcgtacgcgatgctcatcgacaacacgtggaaagacaccctcccgccatcggcgctggccttcatcatcctggagaaggtggtcatgccggagctggtcgccgacgtggtggacagagccagccagcgtctgggtgagcccgtggatccagccagcgtctgggtgagcccgtggatccctcacctcggcgtcgaccgcctacacggggtatacctcgacatagcgggggagctcgggaggtggatgaaggggcgggacgtcacgcgatgcgcctacggcaaagtgtcgcagtggaagggcgtgttcgacccggagacgtgggacgagtttgtgactgtgcagcggcacgtcgtgccggtggtgagcaggagccttcgggatccgacgatctcgccgacgaggacatggggtgggagcaacacattccctctggtgatgaggtgggcgctcctagttccggcgaggtacatggtgccggttctggagtcggagttctttgccaaatggaggtacgcggtgtacccgtttgtgacggaagtgaggcccatcccggggaaggccgccgtgtggtatcagtcgtggaaggatctcttcacgccggagctgctcgccgacgagcgcgtgctcctccagctcgagactggcctgggcatgataaaccgcgcggcgcagggtcagcagataagttggcctgagcattctgatgtttaa

SEQ ID NO: 14136 - DNA, 138 bp, Oryza sativa
  Clone ID: PAT_MRT4530_20101C.1
atgggccccgagagttcagaactgccctatgggcccatgaagttctgggctgcccatcgagtaacgaacaatgatcatgaggaggatgcttgtgaagatcctgttgacccgttagagtgggacagctatggtttctag

SEQ ID NO: 14137 - DNA, 123 bp, Oryza sativa
  unsure (1)..(123): unsure at all n locations
  Clone ID: PAT_MRT4530_20102C.1
tttttaatttcctaaaggatganggcccccgcacggaaaagacctaccaactccgtggaccccgaaaacaataacgatcatgagctcggttgaatttaagaccgcgacaaaagggaaaaggcc

SEQ ID NO: 14138 - DNA, 408 bp, Oryza sativa
  Clone ID: PAT_MRT4530_20103C.1
atgagaacagccgcggtgcttctcatggcgctcgcgctcaccctcgccgcggccgggaccgggaccggggccgagctcgagacggcggccattagaaggaggcagagcaggttcctggcgagcgcgaagaactcgccgccgctgtcgtactacgactgcaagaggaagccgccgtcggtgtgcctggagccggggagccccggggcgacgtgctgcaagggcgcctgcgtcgacaccggctccagcttcgcgcactgcggcagctgcaaccacgtctgcaagtacggcgagacctgctgcggcggccactgcgtcgacctcctcagcgaccgcaagaactgcggcgactgcttcgtccgctgccccagcaagaagtgcagcttcggcctgtgcgactacgccggctaa

SEQ ID NO: 14139 - DNA, 162 bp, Oryza sativa
  Clone ID: PAT_MRT4530_20104C.1
ccgaatcgacccacgcctgcgacagtaaggcacaaagacaagagggcgatgggatggcattggtcacacagcctggcttctgcagggctcggactgcactttctattgtgctcgaagttgctgatgaacgacgtgttgatactgcaccaattcttcggggcc

SEQ ID NO: 14140 - DNA, 314 bp, Oryza sativa
  unsure (1)..(314): unsure at all n locations
  Clone ID: PAT_MRT4530_20105C.1
cgacgtccnttttgatgagtttctccttcgcacccagctattacaaatggacactattagtccagctagagtgcaatctgttgaaagaaagggaattcgaagtgataatggtggtgagtttaaaaatgcttcatttgaacaattttgcaacgaaagagacgagagcgacgacaacgaccgctacaagttcgctaggcccggcaaacaagcgccagcccgtcagactgctgaccggctcacggttaaggacccctctaagtgtggcaatcccgttgtggtttttgtaccaaaattgncaacctatccggaaaggg

SEQ ID NO: 14141 - DNA, 611 bp, Oryza sativa
  Clone ID: PAT_MRT4530_20106C.1
gggatatgtctgcggccgcgtcggcgttcgatatgatggacgacgaggcggcggcggcggcggcggcgtcatcagcgcgcggcgaaacggacgcggacgcggagctggagctcgagatcatgcgctcccggttctacagcggcggcttctggcgcagcccttcctccggctccagcccctgcgcctcctcccttcgccggtagcatcgccaccaccgccgccgactcgccgccgcgccgcctcgccgcacgtgctgatcacccaaggtgatctgccgcacgcacgtgtgcaagtgcaacgcaggattagttttgtcatgtgagctcgatgcgattttggcatcaaactttagcttaggattggatttgcaagcggaagcgggagaaatcttgtgcagtgctccgctcgattgcttggtcgattgaccattgcgcgcgtgcgtgcgtgcgatttggggggtggaccacttctgagccttcgtccagattgccccccaggtttcgcctctgtctttttctgtactagcagcaaacgctgaaactcccggcaatgctttggattcaaaaaaaaaaaaaaaaaaactcgagactagttctctctctccctcgtgc

SEQ ID NO: 14142 - DNA, 824 bp, Oryza sativa
  Clone ID: PAT_MRT4530_20107C.1
aacgaacgtattgttgtgcctactgctttggatactaatattttgcaggcatatgagaacaaccaaggtaatgaggaagagaggaaagacgaagaggaaaaagacctatctatagctccattcttgcttgaagaatgttcaattgaccaagcgcctataatttctgaagatgagaaaaaaatgtaatgataatggtgctacagcaactcaaggtatggatatttatgatatgtcaactatgtctactacttatactacattagagcaacccatagtggaaacaattgctgaaatatatttctcacaaaacaatttgtttgatgtttcttgtgataaagaacagttctgcgatgcttcatttatatccatgccacaactagtgaatggacatgttagttctatagtagagccactatgtattcagtttaaacatgttattcgcattgctagggagaatgaagagtttaaattgttatcttctttaaatacttgggcttatattcaatttgatgatttttgcctactcaacaatttagacaagaaattatttgctagattgttaaatgagttataggttggtttgcaagaaggggagtgttgcggtttttcgactacaaagatttcaggatccaaccaaatggccatcaagaaatatcctcacctaatggtgtgatagataaagataaattccataggctccatgacaaggtgaaaccgaggacggtttctaatcaagaagagaaggatgatgaggacacaactagctcgaatataactatgactaccatatgttctatattagatttacttgttatatatttgaa

SEQ ID NO: 14143 - DNA, 975 bp, Oryza sativa
  Clone ID: PAT_MRT4530_20108C.1
atgaggattgagctttgtcaagagcagaagaagtcatgtttagctttaggaaaaagcatgcctctcgcttcgattcagatgacattgagcaacaagaagcaaagatccaagagctcagagctgcacttgggccgttgtcttcctctggtacggtttcttgtatatacgttggagaatgcaatcctcagcttgcctgaagatcaagagaaaatggtttggttgatagatttcacaggatggaccttggcaaatgcgacacccataaagactgccagagaatgtgcaaatatcctgcaaaatcattaccctgagaggttggctatcgggatcctgtttaatccccccaaagtatttgaggctttttggaaggttgtcaaacatttccttgacccaaaatcaatccagaaggtgaattttgtatacctgaagaacgaggagagcatgaagatcctgcacaagtacattgatccagaagtccttcctgtagagtttggaggaaagaacaatgtggtgtacagccatgaggagtactccaagttgatggtgaaagatgacattaaaatggcaagcttttgggcatcggatacaaaaactgaccatgttaacaaagtcattaacgagcactccgtccccgaggttacgcaacagtcgtcgctggtggctgcgaaagcgagctgaggagtatcaatctgccatgatgggggttataaaccaaaacaaattctaaaagacgatgtagaggactattggtatgttcatgataaataaatggaactgcagaataatttacctgggatgttacagctccatgtattactgctaaaaatctttagctaaagaccagtctacaaaaaatctttagctaaccgacctgagctacagattcagagattatagcgagttcattacaaactatcaccagtaaaaggaaataacagactttaatttgcccggtaacaaaaaaaaaaaaaaaaa

SEQ ID NO: 14144 - DNA, 890 bp, Oryza sativa
  Clone ID: PAT_MRT4530_20109C.1
tctctttcctttctttattattctcccgctcccgagacgacaggaggaggtggagggggagagccatttcttcctcttcttctctcgccggcggcaaccctgcgagcctgcagtgacgccgccgccgccgctgcgtcggttctgagtttgcttcgtctccgggctcgctggattgagctttgtcaagagcagaagaagtcatgtttagctttaggaaaaagcatgcctctcgcttcgattcagatgacattgagcaacaagaagcaaagatccaagagctcagagctgcacttgggccgttgtcttcctctggtaagaaatattgtactgaagcatgcttgagaagatatctagaggcccgcaactggaatgtcgataagtccagaaaaatgttggaagaaagtcttaagtggagaacagcttacaggccagaagacattcgttggcccgagatttctgttgaatcagaaacaggtaaaatgtacagagcaagttttgtagatagagaggggagaactgtcgtcattatgagacccgcaaagcagaacacatcgtcccatgaagggcaggtacggtttcttgtatatacgttggagaatgcaatcctcagcttgcctgaagatcaagagaaaatggtttggttgatagatttcacaggatggaccttggcaaatgcgacacccataaagactgccagagaatgtgcaaatatcctgcaaaatcattaccctgagaggttggctatcgggatcctgtttaatccccccaaagtatttgaggctttttggaaggttgtcaaacattttcttgacccaaaatcaatccagaagggtgaattctgtatacctgaaagacgaggagagcatgaagatcctgcacaagtacattga

SEQ ID NO: 14145 - DNA, 333 bp, Oryza sativa
  Clone ID: PAT_MRT4530_2010C.1
atggaagaactaaaggagctgactctagaattcgacaggaagggctatttagataagcatgaaagcttctttcttgaatatcaagaaccttgctctcttaaggtatcttcagagtctgccacattttgtgccacgagcacattgaaccaccttaaggtcctcaccggaaaaatgtttaaaagctacaacttcaacgatgaatcaacaattgatggtgaagctagggactacatcaccaatggtggctgcaacgttaagattaaaaagaatgatggtcatgcgatgcccaagaacgcgggagatacgtcaattgtagcacctccatgcttttga

SEQ ID NO: 14146 - DNA, 401 bp, Oryza sativa
  unsure (1)..(401): unsure at all n locations
  Clone ID: PAT_MRT4530_20110C.1
cgaagccaagtccgctagcataggccgctatacatcaaccgggattcaagagagccccagagcgccatccgtncagcacactccgaccagagcgggattggaccgcaaagttactcagagaacctccaggtactgcgaggaagcacaacaagaacatggtcgaggctgagtcccaggagtaaggggaaggatgcttttgcttatgaatgcttcttgtatcactggaccgacagatatgaacctatttgactgttgtgtatgggcaaaggagatcactatgtcacttaggatttatcatgaggcgtttggatctgtgcaacccagatccatgctgttggatagcacctggaatattatcttctatgagaattggntatccatttccggaagaacctcgagct

SEQ ID NO: 14147 - DNA, 323 bp, Oryza sativa
  unsure (1)..(323): unsure at all n locations
  Clone ID: PAT_MRT4530_20111C.1
aaggtacangggaagacggccgagnnagcgcaagacaacccgatcgaggcccgaagcgacctagccaaggagaccacagggaaaatctttcccgttctgaaaatgcaccaaagatgacgatgacgatgccgnatagaagttattccgccgatacgataacgtacctaggagtaaagaggatattaaatcaataccggttcctgaaaaattggtttcccccacaaaaatgagaaatcagaacaaggacccattcctncccaaattaaaccattaattgagcgagataaataataactaaattttgttataaaaaaaaaaaaaaa

SEQ ID NO: 14148 - DNA, 306 bp, Oryza sativa
  Clone ID: PAT_MRT4530_20112C.1
tcacctaacctatacacgcggcgcaaaacccacaaggggtcggggcgcctcggccctcggggccgaaacgggagcggtccgatccctcggggagacaaagagaggggcggcctcatcaccttcgggcccgacccccccgagggggtcaggccacgtggtagcccccggcgttatgccagggcgatcaccctcctcgagggaagcgttgggcagaaacccaacggtcgcaaatcacgcacatcggcaatggtaactcgactgtcaataatgagcggcctcttcaagactgccacattactcgagtag

SEQ ID NO: 14149 - DNA, 422 bp, Oryza sativa
  Clone ID: PAT_MRT4530_20113C.1
ttcttgtcaaaaaaaggactagtatctacccataggtataaatatgtacacccgtggtcattataaactctctcacagattaatacaattactctcgccgcttcgccactctcttttccgaggtttttacttatcacctgcggaacttggcacctgatgcagggctgcatcggctttcgatcttcggcgaaggggtaagtcctatgtttcgccggtcctggcaattatatcggctatattggtgttgttgaaggctgcatcgattcgacctcttggatcgctctgattcggttagtatatttgtctacttatttatcatatatcttagttaacctaatttaacatcttaatttgatcatatcggctgagattcgttttagggtttatgctggtatcggctaaattatcttgctagattatat

SEQ ID NO: 14150 - DNA, 407 bp, Oryza sativa
  unsure (1)..(407): unsure at all n locations
  Clone ID: PAT_MRT4530_20114C.1
tggcccaggccatctccgtctagataatttggacatcttggcactagtgaggatgaagatgctttattggattgcttggaaggaactgctgatgcctgccgaaggcacctgctgacctgatgagaatgacccattgctgcatgcaattgcatgtgcgcactacaacaccggatggtagagctggaatntacacagaggctgctgaagtatactttagcttctttatatggttctatagtatacttagaataagtgaaagagtaaagtaggagaagtcggaggaattccggagttatcggtaatcctctccttattcttgtactttattgattactcagttcaatagaaatatcattatgaaaaattaagatttgcttagtgagaattaaaaaaaaaaaaaaaaaaaa

SEQ ID NO: 14151 - DNA, 366 bp, Oryza sativa
  Clone ID: PAT_MRT4530_20115C.1
aaaaaaaaaaaaaaaacttttttttttttttttttccccaaaagttcaaaagggaaaattgggggatttcgggcttttttttaaactcccaaccccttttttggtaaaaactatttacaaaacccccccagggggggaaagggtccgggggccccaatatcccctgggggaaaccccattttaaaagggcccttaaaaaccaaaaaaattttggctttgacccaatttccgttaaaggggaaatcccccaacctgtgggaatgtgaatctttgccctttggccaaaaaaaattaaaattcctaaatagaaaaattttgccccccccgccgaaacttttgccaaaattgttttttttttatttaaaa

SEQ ID NO: 14152 - DNA, 353 bp, Oryza sativa
  Clone ID: PAT_MRT4530_20116C.1
agacggtcgttggtgtacgtctacttccgctgcttcgacggttgctttcaccattgacgcctcgctcaccatggacatgggcgactacaatggtaaaggtggacgcctggtacgacaacgagtggtgctacagccaacgcttggtctatctggcgcatttgattgcgagcaagaggaccggcgcggttgttcatgtctatcgacgatccacttggaggactttttgatggacaactaggatacctgatgagtgcaaattgttcgaaaactaagaccattgatcaagtacggacttgcgtaagagcagaaatataatactttatataatgtaacgaaatacacacattaactga

SEQ ID NO: 14153 - DNA, 483 bp, Oryza sativa
  Clone ID: PAT_MRT4530_20117C.1
atggtgatttcaagctggttttataacaagtggtatcagaatttgccggagattcatgggagacgaccagacgtggtgctcgggttgatgttggcaaaagtgattgatgatccaattggtgcaattggatactttggacgggtgactcgaaatttctggaaggaaagtccccaaggaaaggacaacgacgcttgggtacaagatttgacccttgaagcaaacccacctatcatagtcaacctcattgaccacctagtagccttgtgggaagtggttcggggtgtacacctggatgacaaagaatcaaaccagattgattggaagttcacaagcaacggacgttacacggcctcctcggcctactgcgcgcagtgttgcgggcgcctagcacaagcttcaactcttgatttggaaagcttgggtgccagggaaatgcaaattccatgctgggcttatcattcagaacagggtctggacatctaa

SEQ ID NO: 14154 - DNA, 264 bp, Oryza sativa
  Clone ID: PAT_MRT4530_20118C.1
atacagtggatatggacatagacgatatgctatgacgtttcagaagcccacacgtcaagcgcataagccatgagctggaccaggattagcaccatacagaaggcccacagccgatgacttcactatcaccaagagagcaatgtaacgcgaaattttgaagctcaaatagatgggaaacagataacattgtctttttgcccacaaacgcatgtaggaagggagaaaggatcctttcaaaatatctttcagaaatgacacaattaa

SEQ ID NO: 14155 - DNA, 320 bp, Oryza sativa
  unsure (1)..(320): unsure at all n locations
  Clone ID: PAT_MRT4530_20119C.1
gcgctgttaaaaataacgcagctatatatactgctcatcttttaggcatataaatatatctacacgttcatacagctcatctctttatgtatccaacgccaaatcaaagtatatatacttatacatatacgtgcagacaaatcaaaacacggtgcggggggaggatttgccggtgtggcagcaaattgaacagtcaggagccacacgagaatgatttaatttgatggtgatcgatgaccatgacgacgacgacgacgacgtttttaaattaacctgtgaaaagggaaaggagaaagagaaggacgncgncgatgacggcg

SEQ ID NO: 14156 - DNA, 762 bp, Oryza sativa
  Clone ID: PAT_MRT4530_2011C.1
ctaagccaagcccggccataaaaaccccatccttctctgcctttttccagtcatgcattccatcgaacaccttgcgatcaccctctcaccaccgctagagatcaccattgtgaggctccccagccggagctggaggttggagggagtggaggaatagtcttgctgccgccgtcgccattggggaagccgggtagccgaggagcacacgtcgaacacctgcgaacgtcgccgaccgctagccacctctgcttcgtccgcaccgcaccacgcgtcttcgcccttcgtcgtccgtccgttccatggtaaatcctcgcgccctgagaaacctcttgtagcatagaactcgccggccccttcaatttgggatgtgcaccgtcgtagctgtgccgccccggccgccgttccgccgccggcgggatcatcgtggacagaccaccccagaggctccccttcccatccatcaatttggaaggaacctagctctaccgccctatccccttgcaaccgagatcggccatggcgttgccctgccgcactgctcgccctcgctccgtcacgcgccgccgccgcagacggtggatcgccggagttcctccgcgccttccctggccgccgccgtgccgccccagccccgtacccgccgcgccctgcggagccgcaccgcctcgttgctgcctggccggaggtagaagacgatggggaaacgaacgagagagagaaagagagcagccgagccactgacaagccgggcccactccccat

SEQ ID NO: 14157 - DNA, 138 bp, Oryza sativa
  Clone ID: PAT_MRT4530_20120C.1
atgtcgacgaagaccgatcatcaactcacacacgtgaacaagcataaccccgtttttcagtccaaggttccaagcccatcagattacgcaatctgcggcacagtcattcaaatcaaaaccaacaatggaataagacag

SEQ ID NO: 14158 - DNA, 141 bp, Oryza sativa
  Clone ID: PAT_MRT4530_20121C.1
atgccaccgtcgctatcaaaaccaatttggcccaggggtggtatcaagcacggctctatgagtgtccctattgctatccatagggatgagaactgccatgaccgttcgacgatgatggcaaagcaatgggaggtaaagtag

SEQ ID NO: 14159 - DNA, 322 bp, Oryza sativa
  unsure (1)..(322): unsure at all n locations
  Clone ID: PAT_MRT4530_20122C.1
caatggcgtcggttggtttcggcaccacggtggcgccggcggtggccgccgggnagacgcctganccaccgtcgggcggcggcncccgccgntcccngcacgcttggcgcggccntcggcnacgaagagnntcacggcggcgatgncgacggaggagaagggcctcttcaacgccatcttcggcgcgctgtacaaggaggagcagctgctggagaccgacccaatcctcaacaaggtcgaggagaaggcccccgtcgccgcntccagggccaccaaggcagcggggctccggccaagaaggcggccggcnacggcaaacggc

SEQ ID NO: 14160 - DNA, 242 bp, Oryza sativa
  unsure (1)..(242): unsure at all n locations
  Clone ID: PAT_MRT4530_20123C.1
gtcactcgctcctcctcctcccctcttccccttcctcctctagaacacgccgccctctcctcctcctcctcttcctcctccacccctcgccgcgcagggcaccgaccgtctccgcgccaccgctcgtctcggtctcacctccacctgacctgacctctcccaacgcccccctcacctaatgcgggggtcctcncatcgccctcggtcaaggggtgccagaatcccaggggggagtgggtggg

SEQ ID NO: 14161 - DNA, 849 bp, Oryza sativa
  Clone ID: PAT_MRT4530_20124C.1
atggccgccgtcgcgttccgctcgctgctacaccccgccgccgcggccctcaccgagcgtgtgccactgcctcccgctcacctacggctccagggccttcaccgccaccgcgtcggcgtcctcaacctcttcgtcgcctccggtcatcgccgccgcattctgcttcccctcgccgccgccggtggagagttctcttcggaagaggaggagtacgccaacgaggaggaagaagagggggaggagtacataatctatgacaaggtcaccgaccggagccgcggcttcgccttcgtcaccatggccaccgccgaggaggctgccaccgccatccagatgttcaatggggccctgcttggagggaggactgcaagggtgaactacccggaggtgccgcggggaggggagagggcggtgggatcggcggcggccacaagggagaacaggcgcgatgacggcacattcaagatctatgccgggaacctggggtggggtgtgcgtgccgatgctctgagggcggcgttcgaggggcagcccggcttgcttgatgctagggtcatcttcgagcgcgactccggtcggtccaggggtttcggattcgtctccttcaggactgcagaggatgcacaggctgcattggaggcattggatggagtggaactggaaggaaggccactgaggctcagtatggcggaacagaacccaacagctggttctcctagcacagtgcagtcacaggaggaagaaactgcttcagaatcatctgatgcagagacagagcagagcattacctcagaaccttctgaagctgaaacggaagagagcaacttgcagacagctgccagttattag

SEQ ID NO: 14162 - DNA, 1480 bp, Oryza sativa
  Clone ID: PAT_MRT4530_20125C.1
cccacgcgtccgcccacgcgtccggaagccgcgaagggcaaagaagatgatgactaataccaagctcttccctctcgtcgctgccatctgcatttccttcctgtccgtagcgtgcgcgtccaactccacctcgtcgcaccccagctccagttctagcctcctcaccaaaccgccgcaatggcgggaacacctcctccttgccgactcgtcctcacacgtcggcctcggcctgaacaccgtcgccgcatggctactctccttcctggccgcgtccgtgtcgagcgccggcggcgtggggggcggatcgctgttcctccccatcctgaacctcgtggcggggctcagcctcaagcgggccaccgcctactcgtccttcatggtcaccggcggggccgcctccaacgtgctctacaacctcctctgcacgggctgcgggcggcgcgccgcggcggtgatcgactacgacatcgccctgctcttccagccgtgcctgctcctgggcgtcagcatcggggtggtgtgcaacgtcatgttcccggagtggctcatcaccgcgctcttcgcgctgttcctcgccttctgcaccaccaagacgttgcgtgccgggctcaggatatggagctcggagagccgcggcgccaccctcgcagtcgcagccgccaccgcgcacggccgcgaggagcccctgctgctgccgcacggcaccgatgccggcaatggcggtggtgcccgcggcgacgcggggttcccgtggaaggacgtgtcagtgcttgtcatggtctggctctgcttcttcgtgctccatgtcttcattggcgataagcatggaaagggtatgatcaggataaaaccctgtggagttgcatactggttgatcaccctgtcccaggttcctttcgccgtggctttcacagcttatattatatacgcgaagaggaagaaacaagttctgcataatcaagaagatggcaaggcaaatccggagagcactaaaatggataccttgcccacgcttctattcccactggctgcttttgtcaccggtgctctgagcggcctctttggcattgggggaggcctacttctgaaccctgttcttcttcagattggaataccaccgcagactgcagcagcgacgtcttcgtttatggtccttttctgcgcatccatgtcgatggttcagttcatcctgctaggcatgcaaggcatcggagaagcttctgtttacgcagggatctgctttgttgcttcggttgttggagcggtggtgattgagcgagctatcaggaagtccgggagggtgtcgctgatcgtgttcttggtaactggcatcatggcggtcagcaccgtgatcatcaccttcttcggagcattggatgtatgggcgcagtatactagtggagcttacatgggtttcaagttaccttgctgacattgtcagtaagctaaatatgtgcacacagttacacacacaaaaaaa

SEQ ID NO: 14163 - DNA, 519 bp, Oryza sativa
  unsure (1)..(519): unsure at all n locations
  Clone ID: PAT_MRT4530_20126C.1
ccggccgggacaccgctgctccactcctcgcttctcccgccatcttctcctcctccacggacatggccgccgtcgcgttccgctcgctgctacaccccgccgccgcggccctcaccgagcgtgtgccactgcctcccgctcacctacggctccagggccttcaccgccaccgcgtcggcgtcctcaacctcttcgtcgcctccggtcatcgccgccgcattctgcttcccctcgccgccgccggtggagagttctcttcggaagaggaggagtacgccaacgaggaggaagaagagggggaggagtacgtggaggaggaagaggaagatggggagggaggaggaggcgnncgncgntggcggcgcctcgcggatactacccgcctcttcgtcgggaacctcccctacaccatgaactccggngagatctcccagagcttctccgaggtcggcagggtcgaccacgtccagataatctatgacaaggtcaccgaccggagccgcggtttcgccttcgtca

SEQ ID NO: 14164 - DNA, 676 bp, Oryza sativa
  Clone ID: PAT_MRT4530_20127C.1
cgccgccgatcccaccgccctctcccctccccgcggcacctccgggtagttcacccttgcagtcctccctccaagcagggccccattgaacatctggatggcggtggcagcctcctcggcggtggccatggtgacgaaggcgaagccgcggctccggtcggtgaccttgtcatagattatctggacgttgtcgaccctgccggcctcggagaaggtctgggagatctcgccggaggtcatggtgtaggggaggttgccgacgaagaggcggccgggctcttgcccgagcgccggccggcttctcggcgggtagtatccgcgaggcgccgccaccgccgccgcctcctcctcctccccatcttcctcttcctcctccacgtactcctccccctcttcttcctcctcgttggcgtactcctcctcttccgaagagaactctccaccggcggcggcgaggggaagcagaatgcggcggcgatgaccggaggcgacgaagaggttgaggacgccgacgcggtggcggtgaaggccctggagccgtaggtgagcgggaggcagtggcacacgctcggtgagggccgcggcggcggggtgtagcagcgagcggaacgcgacggcggccatggccgtggaggaggagaagatggcgggagaagcgagcctgcagcccggggat

SEQ ID NO: 14165 - DNA, 416 bp, Oryza sativa
  Clone ID: PAT_MRT4530_20128C.1
tcccctaaaataaacgatcttgctgaagttaatactccctccattttaaaaatataggatatatgtttcgttgcgattagattttaaccagtaaaatattgatgttattagattcgtcttcaaagtcatacgattatactttatcatataaataatatattaatgaagcaatcattatttaaattgtttaaatgcttgtcctaacaaaacaaaatgtcatatattttaaaacagagggagcatatgacaagaagtagttaactccatgtattttattaagattcccaaattaagcagatacccttgggccatgtttagttcattctcaactacctcaaacttccaactttccatcacatcacatcacatctaaaactttcctacacacgtaaacttctaacttttttttttcaaac

SEQ ID NO: 14166 - DNA, 549 bp, Oryza sativa
  Clone ID: PAT_MRT4530_20129C.1
ggtacaccttaatgaatccaatattttacttcatattacacagagaacatattaactgaataaatataggaagcaaaacagttgcactttagatttctgcacaatatattacagcaataactgaaactcggagcacctctatgtctaataatattctattggctatggctcatatcccattttagcatctcttgtgtcaaaattttcaattggacaagtacaatttagattggaatgccgaatggcagaataagtaaatcagtgcaaccatcaattagatactaataactggcagctgtctgcaagttgctctcttccgtttcagcttcagaaggttctgaggtaatgctctgctctgtctctgcatcagatgattctgaagcagtttcttcctcctgtgactgcactgtgctaggagaaccagctgttgggttctgttccgccatactgagcctcagtggccttccttccagttccactccatccaatgcctccaatgcagcctgtgcatcctctgcagtcctgcccacgcgtccgcggacgcgtggg

SEQ ID NO: 14167 - DNA, 301 bp, Oryza sativa
  unsure (1)..(301): unsure at all n locations
  Clone ID: PAT_MRT4530_2012C.1
ccgcgcgaaggccggtgaacttcgtcgccgtgatgcttcgtcttcccactctcctccccctaaaaccctcgcctcccaccaccggcttaaaccccatccacggccgccgcccatggccaccaccccagccgcctcctcgcctcctccgcccgcgccgcaccaccacggctnccaagccgagcccgtaccagcacgagaacctaggcgcgcaccccntttcccacaacaagcccgaagnggcggggcgcgnagcaggcgcgcggtgngacttgtcgtggcgctcagagtttcgttcatcggg

SEQ ID NO: 14168 - DNA, 328 bp, Oryza sativa
  Clone ID: PAT_MRT4530_20130C.1
tcgccagagctaggtggacatgcacgacctgcacgcatggagcctgtcgtcctctgcgctgactcgggaggcacccgccaacgacaccgatatgggcctcataaccatacccaagtcaccgtccagagcgaggagggagagctccacacgcccctgtgcgcgatcactgtgcctgcttaagctgtttgcgatatggagcggaaaggagagaggagttgctcgtatagttcccttccacatgcaggtggtacaccacagttctgagcgctgccctttctacgaggattgcaaaccgcgattcatttgtggcggtgcggtaggagtacat

SEQ ID NO: 14169 - DNA, 590 bp, Oryza sativa
  Clone ID: PAT_MRT4530_20131C.1
atcggctcggaacagaaagcttcccccagaaaatcccatctcacggcgatggcccccgccgccgccgcgaagctctccgtctccggcgccgccctcgcggcgctgctcgcctgctgcggctcggccgacggcgactccgacgggctcctcttcggcgtggctagccgcgcagccgcggctcccccgtccttctacgacgacgacgacgacgaccaggcccgcgcctcctcgggcccctccctctccatctccgtcgtggggcacgcctcggtcgcgcagccttcctccctcgccgatccgctcggccgcttcaccaggtcgtcctactcccccgacccctccgccgcgatcggcttcttctcctcctcccgccgccgctcgccgctgcgcccctccatgcgcgaggccgccctcgcgcgctccctctcgaagaccctggtgcccgcccacccgctcgtcttcctcctcgtggcaccatcctcctccgccgctggcctctccgttcactcgttcgactaccgtgcgttcctcctcgttgactcccgcctcgtgccggcctccctcagcgtcgtcaacgctgggcccggatt

SEQ ID NO: 14170 - DNA, 710 bp, Oryza sativa
  Clone ID: PAT_MRT4530_20132C.1
tcaaacaaagtcaaagccggcgccaccaatctcaagaaaggtggccccataaccgtcgtcgggttggatgaagacctccatcgttattgccacacaaggataggagtcctgaaaagggcaattgtatctattaattaggacattttctagttttccttagagatagtttggtaatggtccacctgaaggactcatttgtattttgaattatgttagagataagagtcgtgtccagcaaggacctgtcatgtacttcgggtataaatatggcccgaccccatgtaatcaagggacgacagttcaatacacttcggcgcatcgccaccctttttacccttatttttgatgacttttttgctttcgagttgggctgcatcaggttcgatcttcgacgaagagcatgtcctatcggacggattatgtatcgctaacatctacagccgatcgggtacaccgaacaatctccaagtttttatctgcccttgccgatctaactcaagttacattggcatggcctcggacgatatgtcatcggcaatcttgccgattggctatcgtcgatgggtttaactatttgttgcaattagaacccgaaggcaattcttttggaactgcactagagctaagcagatttcccaggccgctgcgtgttgatttttcgcgtcaacagttggcctccctccaccaccaccccccgttccccgcacgcc

SEQ ID NO: 14171 - DNA, 762 bp, Oryza sativa
  Clone ID: PAT_MRT4530_20133C.1
ccttgtcgttccccgggctgcagccgagatccccccccacttgcctcccacgtctctcctatggcgactactgctgccaccgcgccggatctgtcactccacataagcccgccttcgccgccggacatggccgccggcggcgagacgatggagcagttggctgagccaaagctgtgcctagggtttggcacggcggcggcggcggcggcggagcagtacaacaatggcggctgcaacctccagcagcagcagcggctgcaccaacctagccagatccagagattcaagaagagcgccagcggcggcagccctgtgtgctccggcggcgccaccggcaccggcggcgttgcggcggcgagatccgggaatggcggtggaggtgggaagaggagctctagggcgccgaggatgcgatggacgacggctctccatgcgcactttgtgcaagccgtcgagcttcttggaggccatgaaagagcgacaccaaagtcagtattggagttgatgaacgtgaaagatctcacgctggctcatgtgaagagtcacctgcaggcaacttatttgcttgacctggtgcagatgtatagaacagtgaagggaaccacagacagaacatgtgctgaaggccatgggcagatgagagatatgggctttctgaggagaggaggtggtggagtggatggctttgacgtgcttggtaacacctcttcaattgcaatcgccaatattagggccttcaatctcaaggatgcaaatatataa

SEQ ID NO: 14172 - DNA, 333 bp, Oryza sativa
  Clone ID: PAT_MRT4530_20134C.1
atggatgatggtttacgtcataagtcacatgaggaaaatgaaaatgacgtaaattatgttgatggattacgtctcaacaagaacgatcaagcatatcatggtccaattacgcgcagccgtgctaggaaaatacaacaagagtttacgcccgaggacatcatcactacggcaagaaggatgggttacgttgaggacgataagggttacgtcgaggaggaaccagcccatgccaaaccagtagctgtctacgctaacaagaagatggtttacgctgcaaaaggatcaacttccaaggcttgtgcgacccaaccagtcaactttctccatgcttaa

SEQ ID NO: 14173 - DNA, 984 bp, Oryza sativa
  Clone ID: PAT_MRT4530_20135C.1
tcgctcgcatgataggctcgtagccctcgccgtcggcgtcttcctcctcctcctcctcgcgccgcggagaggattccatcctcctccctctccccgccgccgccgtcaatcccgaatcccgagggctcgggtggtcgtcgtcggtccgggatggcgggaggaagcggaaggcggaggcggctcgggcggcggaggaggaggccgaccgggcgctctacggcgccttccgcggcgccgtcaactctctctcgcagctatacacgctcgtctgtgcccatcagttttcaaacctgctgaaaataacggagctgtagctccaccacctcgtatgagtgaggccttgggcatctcatcgcagcaacttccagaccaaaaaagagttgtgccaacaaacattcctcctccagcacctgcccctagtatttctgctgtaccacctcctccaccggtattcaacctgcctcctcccccacctccacctcctcttacctaatccttcatataaatcagaagcaatgccgaatagccgaagataaatctaagcgcttcttttacagaacggcctgtctattagtcctagcaacttaatgaagctccaaaatctcatataaagcgaggtctttctttccaagaagaactggcacttcgcttggcaaaaggcaaggattacaaacagtttcaaactattcacgaagaagaacatgaatagccatctcggatctaatagcctgagaagccaagaccatcagagcctaggatgataccaataatccagcctcaaccaccagtcatccaaccacctccacagcctcaaagaaatgagccaggaccacgtgaatcagtgagctacaaagaaattgtcaaccttacctccaatagatttggataacctaaggcaggactattttaatagtaataagatcaagaagttgctattttcggtaagtccaagcccaaaaaaaaaaaaaaaaaaaaacaacaaaa

SEQ ID NO: 14174 - DNA, 666 bp, Oryza sativa
  Clone ID: PAT_MRT4530_20136C.1
atggcgacgggtttgaggagggcaccgggccaccgatgcggctattgggcgtcggcggcgcgggagcagggcggtggcggcgcgcagggccacagggagcggagcgtcgggacgcaagcggcgccgtggaggagggcgtcgtcggcgtcgggcgcccttgatctggtcggccgccagcttccggaagcgaacgtgccaaaatgttcgctcacatcacacacgctgcagcatgacaaacaaatgttcgctctacacacttacgaaccaccggatttcggcggcggctgctacggcgacggagtgcagattcatcaccctgacgaggctgctaccgtcctcgccgtacctgatgaggtggccgtacatccgcagccagtggtcggaggcctcgtcgacggtgcggtaggtccagatgtgtggtctgagccagaggcagtcgacgtgctcaccccacgtgcctcgtcttccatgctgatagtggctgcgggggggtcttcgtccggtgctccagccgcgggcgaggctgacgcagccgcagccgcagccggcacacgacgccatcgaagatcgaattgccacgtcagcgccacgtcagataaagaccaagtcaaaatagccacgccacagaaaaattttcatatttttgagaaacttctaatagaataa

SEQ ID NO: 14175 - DNA, 323 bp, Oryza sativa
  Clone ID: PAT_MRT4530_20137C.1
gcggccacattactgaattgaatgtccctgagggtggtggccatgctgccattactatactgcctctgctcttgaagacatccactgtatgacacgcatgacacaatgaggacattcaggctctgaccaagaagacacaggatggtgggacggaacatggtgtatcacatgctctaaagcgttctgcaacaatgcctactgcatatgctggagcggaatttcagatgcgtgcatgaatgtgcttaacggagtacatgatcatgaatagcgctcttctgcgcaatcgacagtgacagaactaacattctttgactaaaacgtaa

SEQ ID NO: 14176 - DNA, 471 bp, Oryza sativa
  Clone ID: PAT_MRT4530_20138C.1
atggagccacaggtgttcaaatccttgctcactttcatttacactgactcgttgcctgagttggaggacgaagaggaaactgaatccgatcgagatgaagaagaagatcaggagagtgaagcagatggagtacacggagaagattacgatgacgatgacgatgatgatgatgatgacaatggtggtgatgagatgtggtcaccattgctcgtagcggcagataggtacgatctccagaggctgaagctgatatgcgcgaagaagctgtgcgagcggatcgatgcgagcacggtggccgataatcttgggctcgctgagaagcagcattgccgtctgctgaaggaggcgtgcttggagttcctcaaagctccggcgaatttgaaggttgtactggcgagtgacggcttggatcacataactgcaacctgcccctctgttctgaaggagctccttgctaagtttgcatcttaa

SEQ ID NO: 14177 - DNA, 798 bp, Oryza sativa
  Clone ID: PAT_MRT4530_20139C.1
tcaccatctgcggccccgccaccgtttccaccgtcctccacgccgctcactgacctcgacggcgtcctcgctatgggtggtggcgggcgagctcccgcttctctccacctgcttccccgccgccgctgtcgaagacgacgacgccgatggcgacgggtttgaggagggcaccgggccaccgatgcggctattgggcgtcggcggcgcgggagcagggcggtggcggcgcgcagggccacagggtgcaagcggcggtggcgtcaaggagggcgtcggcggcgcgcggggccccagggcgcaagcggtagtgactagtgactggcggcggtggcgcaggagcggagcgtcgggacgcaagcggcgccgtggaggagggcgtcgtcggcgtcgggcgcccttgatctggtcggccgccagcttccggaagcgaacggtgagcacgtcgccattttctccttctcccctctccacgacttcacagggattggaaactgcttggaaccaccggatttcggcggcggctgctacggcgacggagtgcagattcatcaccctgacgaggctgctaccgtcctcgccgtacctgatgaggtggccgtacatccgcagccagtggtcggaggcctcgtcgacggtgcggtaggtccagatgtgtggtctgagccagaggcagtcgacgtgctcaccccacgtgcctcgtcttccatgctgatagtggctgcgggggggtcttcgtccggtgctccagccgcgggcgaggctgacgcagccgcagccgcagccggcacacgacgccat

SEQ ID NO: 14178 - DNA, 951 bp, Oryza sativa
  Clone ID: PAT_MRT4530_20140C.1
ataagaagcggcgcacgggcgccggccggagggaggaaaggagcgcgcgcatgcgcaggaggcggccggcgaccggtgagaaaggagcggcgtcctccgctaggagaaggacgcacacctcaccatcgcggcccccgccaccgtttccaccgtcctccgcgccgctcaccgacctcgacggcgtcctcgctatgggcggtggcgggcgagctcccgcttctctccacctacttccccgccgccgctatcgaagacgacgacactgatggcgacgggtttgaggagggcaccgggccaccgatgcggcgattgggcgtcggcggcgcgggagcagtgcagtggcggcgcgcggggccacagggtgcaagcggcggcggcgtcaaggagggccagggcgcaagcgcatgacaaacaaatgttcgatctacacacttacgaaccaccggatttcggcggcggctactgcggcgtcgtagtgcagattcatcaccctgacgaggctgctaccgtcctcgccgtacctgatgaggtggccgtacatccgcagccagtggtcggaagcctcgtcgacggtgtggtaggtccagatgtgtggtctcagccagaggcagtcgatgaggtcaccccacgcgcctcgttttccatgctgatagtggctctggtgctccagtcgcgggcgaggccgacgcagccgcagccgcagccggcacacgacaccattgaaggtctactagtacagagtaaatctcagtattaacgtgacgcgcctgtcgtcggaccggatatcggcgacgccgaggccgggcaagcactcgacgaggtcagccgccgaagcaggtagaggggctggagatcatcgaagtggccaccggtgagcggttgtcccgctggcttcgtgcgccgccgctccggccaccgtcgccccactccgcccgccgccctagtccacat

SEQ ID NO: 14179 - DNA, 410 bp, Oryza sativa
  unsure (1)..(410): unsure at all n locations
  Clone ID: PAT_MRT4530_20141C.1
accgncagaggggagggggaggggagggcacggcggaggagggggccgcaggggacggcgggggagggggaggggagggcgcggctgaggagtgcggcagaagggctgagggggccgaggccgcagaggggagggcgcagataagtgaccacggtggaccggtgacggcggcgacaacggtggactacgaggggcgtgggccgtggatcctcggccaggaggggcgcaggcgtggtggattcggccgccacagggccacgggtggtaaatcctatcgtcagagggccacgtctcgaggttcactcgaagacagcggacgcagcagcgacggcgatggcgacgggtggcagatccggtggtgcgatggttgtataccggctataccctccctctcccatatttggccgtag

SEQ ID NO: 14180 - DNA, 208 bp, Oryza sativa
  Clone ID: PAT_MRT4530_20142C.1
tgagctccgtcgccgctggctccctcgtcgcttgcccgcgaggagacgagaaggcgagaatgatacgcgaagccgagacggagtgtcggtttcgagaaaaataaggagaatatatatgggagattgggagtgcgacaacgaggccgccggggacgatgcacgcgcgacgccgaggggggtcgctaatcggcgcctgggcgcgcgctag

SEQ ID NO: 14181 - DNA, 612 bp, Oryza sativa
  Clone ID: PAT_MRT4530_20143C.1
atgtctgacgagagacaggaggctgttgttgttgcggaagaagccgagcagacgaaggagatggagcgcgtgcgaggtaatagcagcagcagtaagcgctcagagcctgtggatcttgtcaaggaggaggaggaggatggggaggactggttcgatgcgttgttgagaaaactcggccaccccttcaccgtcgacgagaagggcagacctgtggatgatgctgatgacagggaaaagggcatctggaatgcttctatggtttacatgagagctcaaaacatgtcgtcagagtatgatatggttccaaacaacttggtcttgtatcctatgatgtttgagaagcgccgttggtatcactgtaacatcttgggatgtaaacgtttaaacgattctacgggggaacactccacacaacaacggttttttgttgagcttatcattaatggtggattcatctaccatgtgctttcttgcaccaaagttgatggtgacatcgacaacaatctatgtatagcttgtccgcccaacagtggcatagtgcatccacctgcaggtggatttatttgtggggtttcgaaagatcagaagatattcaaggtccccttctattaa

SEQ ID NO: 14182 - DNA, 260 bp, Oryza sativa
  unsure (1)..(260): unsure at all n locations
  Clone ID: PAT_MRT4530_20144C.1
gcgcccagatctnctnctctcttccttgctcagctggtcttggtcctcttgctaggtgaaacactttcttggattgctgagaccatgttgagatcaagaaaatccagggtaatggtgatgctagttactgctgctcttctactgacggatatggccgccgttagctatatgcgcaggctcatatcggacctctatgtcatgtgggtggtgtcggcggctcgccgccggcgaaaggcgggtacatgtcaaggttgcaggtt

SEQ ID NO: 14183 - DNA, 1792 bp, Oryza sativa
  Clone ID: PAT_MRT4530_20145C.1
acaccaatatattcttataggtgtcaaatgttacgtagaaacgacacctttgacaactatcacgcccagaaattcactagtaatttccgaaccaatttgtgcataaaatcctcgtccaggaatcagccaaggcccaaccttcctgaataaccatacccggctgtacagatctatctccaaaccagggatgtgtcattccaaaccaggagctaaattaattaccatcaattaccacattattatttttgtcttctggaacacttccgacacactcgcgaaccttcacaatgacggaaacgacaagctaacacgcaaaacgaggaaaaagactaagaaactccaaataaacaatacatataaagtaaacaaacattgacgcaataaagaattatttttgaaaaggaaaatagatttattgcatcatcaaagacggtccatggtaaaccgggttcacagaagcggtccacggaaccaacggccaagatctaattgacctaaaattgactgaatcgaacggccgagatcgatccggtctaccacgggtctacggctgacaaagtgctaacatcagcgatgatgtcatctccggcggcggctcggcacctcgtgctcgccggcgaacgacggcacggcggcgcaaacggagggcaccaacgcgtagagctcggctcagcgaactcaccagtggcttggacgacggcaaacgacgatggatgacgacggcggtcttcgggtcggcggtgacggcggtgcttcggtgggaaacggcggcaacgaaggggtggacgaggtgctgctcctcctcgtgatcccgacggtggcgacgacgaccgaaggcggtggctgcaacggtggcacggcacggctggaccgacggcgacggtggagagcttcgggtcgacagtgtcggctgcgcttcggtgatctgcggcggaaacggaagacgggacgaggacggcgatgacctcgcgatgctgatgaaggagacggcgtccgacgacgacaatcgaagggacggcggcgcccgactggacacccgccggcggcgacgacgcaaagagccacacagaggcggcgctgtcagcaaaaggaagagaggagggaggggcgcggcggtctgggccggcttgggccgggcgcgagcaggccgaacaagaaggactgcagtgatctcaagggctgtcaccacctctacaccaacttctaacgaactctccaccgtcattaggaggctatctagatcgtccacgtggaagaagatggcgaacagcaccaatgtcggttcgaccaaaccatggctggcccatttgacccagccttttctccaacggcgcttctcaaacatcataggatacaagaccaagttgtttggaaccatatcatactctgacgacatgttttgagctctcatgtaaaccatagaagcattccagatgcccttttccctgtcatcagcatcatccacaggtatctgtccgagaatgaaagcgaacatatcgacgtcgggggtgtttctcctatcaacatagagcacgtgtctgggatctccgtgggcgtagggacaccagtcgggatctgggacggacctgcccttctcgtcgacggtgaaggggtggccgagttttctcaacaacgcatcgaaccagtcctccccatcctcctcctcctccttgacaagatccacaggctctgagcgcttactgctgctgctattacctcgcacgcgctccatctccttcgtctgctcggcttcttccgcaacaacaacagcctcctgtctctcgtcagacat

SEQ ID NO: 14184 - DNA, 391 bp, Oryza sativa
  Clone ID: PAT_MRT4530_20146C.1
aacatacggaacagctatcgaaggtatgatggagaattacatctcgcgacattacgcctggatgctcctagtactgaatgcaatcacaccactacgagcaacatatatggctaaatgatcaaaacaggtgtacggacatcccagagcaccagctgacgaacagttgactatcatcgtgcgccatcatggacaataaagatgcatgcattatactgcctctcatcgacttaagaaactggcattggacatccactgactatatgtgattgggccactgctaataaacctccgatgagaggcgggcttgagcacgagagtcttaagatgctagcatgctcgtgagcatgcctccttctacagcgctaacgactcatcacactgcgatagggcc

SEQ ID NO: 14185 - DNA, 1242 bp, Oryza sativa
  Clone ID: PAT_MRT4530_20147C.1
atgccaccgccgccgcagcaagccccggagccggccgggctgcaactgctgctgcagccggaggtggtggcgccgaaccacccgccgcccgctccaccggcgccggcggcggtgcccgcgccgccgcagccgcagggggaggcgaggtaccgtaggccgctggtgcggctgcaggccgtccccaacgaggaccacgtccccgacaactacggcgacggccccgacgagctcgggatcacgccggcggtgtaccaggcgctggagcgccacctgccgccggatctcgccggcgcccccgccgaggtgaagcgctacttcatgcgcagcgtcctccgcaactacgtcccctcgccgtcgcagcggatcaggacgcagaatcagagggagtacagggaaaggatcttgtccgcataccagattttttttttcttattggatattttcaagccattacatccggagctgtacacaaatgatccatcaactttcatcctaccggcatttcttcaagccataaatggcaacaccgaagaaagcatcacaagcataatgatggagccagcaccgggagtgtttgcatttcctatgctgaagccctcattctgccagatgttaatgtcagaggtgaacaattttttgaggtgggcacaatcagcgaatcaaaggataatgagaccaacatccttagataggcatgggagaggtgctgccctctctgattttggcttgcaagagatgttagacaatctgatgaaggatttcatctcaccaatgtctacagttcttttccctgaagttggcggcaatacactggactcccaccatacattcgttcttgagtatggtgaggctgatggtgctagaggtttccatgtggatgatagtgaggtaacactaaatatctgccttggcaaacacttcactggcgctgacatgtacttccgtggtatacgttgtggaaatcatgttaattcaggaacacatgatgaggagtattttgtacatcccaacgtgcccggacaagtcctgctgcatcatggtagtcacaggcatggtgtcttctcagtaacatctggacggagggttaacatggtcatgtggtgcaaaagctcagtgttcagggagatgaagaaattcatgactgatttttctgggttttgttgcgagtgccagtttcagaggacggcaagacaggctcgtatctctatcagcggacaggagtcagaagacgaaactccttaa

SEQ ID NO: 14186 - DNA, 503 bp, Oryza sativa
  Clone ID: PAT_MRT4530_20148C.1
gcacgagggtcagttgcggtcagggtccctgtcacctccaggcgtccaggacatacacacacatcaggtagtggtggccatggccgcgatggccgcgtgcaggtgcagcagccgcctctccctgcagctgcctcctccgtgcttgctcatcgtcctcgtcgccgcggcggcgatggtggcggcggcggcgacaggggcgagggcggcgtgggtggactacccgtcgggggtgccgtgcggggagacgatcccggtggagcagtgcgacccgggcgacgcggcggcgaacagcgcgtgcatggacgtgtgccactacggcggatgccggcgcggcggcgagtgcgtctccctcggcttcggccgcggccggggatgccactgcaagtgctagcagctgaactgagctgagctgatctctgatctgaactgaactgatatgctaatcaggttgagcaaagcagtagaagcagtaattaggagagaataaattaatgagcgctaag

SEQ ID NO: 14187 - DNA, 463 bp, Oryza sativa
  unsure (1)..(463): unsure at all n locations
  Clone ID: PAT_MRT4530_20149C.1
gctatgagacggatcgttgattccctgatgcatcagtccntgggagagggtgctttggaccgtgcaataaattcttctttccttgtttcggcagacatggctcatgccctgcacccaaattatccagacaagcatgaagagcaccacagacccgagctacagaaaggactagttatcaagcacaatgccaaccaacgttacgctactagtgctgtgacagcttttctattcaaagaaatagcaagacatcataatcttcctgttcttnnttttnttgtaaggaatgatatgggttgtggttcaactatnggccccatacntgcttctggtgtnggcntacggactgttgactgtggtattcctcagctctcatgcacagcgtgcgagaaatgtgtggcanagaagacgtagatacaacatacaggcacttcaaagctttctccgagatgttctctgacattga

SEQ ID NO: 14188 - DNA, 792 bp, Oryza sativa
  Clone ID: PAT_MRT4530_2014C.1
gccaaaggggggttaagcagggggaccctatctcaccacttatgtttgtgctagctgctgacctccttcaatcaatgatcaagaaggcacataaaggaattttcactatgccgataacaaaaccagatggtaaatttccagtgattcaatatgtagatgaaaaagacaatccaaaaggaaatcttttgtcagaaagggatcttacaatcttttgcccaatcaacaggtcttaaaataaactatcacaaatcttacatgatacccatcaatgttcctaaggaagataaggaaattttagcaggaacatttggctgtaaaactggttctatgcctttcacttacctgggactcccagtgggaacaaccaaacctagaattgctgagtttgcccctcttattgatcgagtggaaagaaaactaccttgcgttaattacaatgttcttaaaccatggtcagaggttaagcttggttagctatgtactctcctctatgccaacaaactatatgtgctcacttaagctacccgaaaaggttattgaacatatcgatagaggcgtgagacataatttatgaaggtaatcttctaatttaaatgtgggacctcagtccttagcagcatgggacatggtatgcaaacccaaaaacaaaggaggtttaggcatcatcaatttggaataccaaaatattgctcttctaatgaagcattgtgacaaattttacgataagaaggacctttccttagttgagactgatctggaacaagtattatcatagtggtgaaccccaccagg

SEQ ID NO: 14189 - DNA, 647 bp, Oryza sativa
  unsure (1)..(647): unsure at all n locations
  Clone ID: PAT_MRT4530_20150C.1
cgagcttccccgcggcggggtttcggccaccgcgcctaggaggaggaggaggagccggtgatggcgcccgccgttcagccgccgccgtccccgcccccgccgcggcggccccgctcgggccctccaccggggctgaagaatctcggcaacacctgctacctcaacagcgtgctacagtgcctcgcgtcgacccctcccctcgctaccttctgcctctccttccggcactccaatctgtgcaagaaggtgttgccgaacaaggacaaggagtgtgtgttctgtgtggtggaacggcagatctcgcggctgcttcggaccgaagcaggggcgctagactcgccagcgaagatcatacgctgcctgccgctctttgccgagcatttccggtggggccgccaagaggatgcgcacgagttcctgcgctatattatagacgcttgtcacaccgctggtctgcgcatacgcaagcggctacctgcgtcaaacgccaatggggacgctggcgaggagggaggtccggtgcaagggccatatatggtgatgaaagagacatttggcggtgcgctgctcagccaagtgaagtgcctcacctgcangggagagtcaaacangaccgacgagantatggatatcagcctcgacctgcc

SEQ ID NO: 14190 - DNA, 1290 bp, Oryza sativa
  Clone ID: PAT_MRT4530_20151C.1
atgtcccatcaatcagacacatcttcaagctcaaatgattccgaagatagcaacatcatccacccagccagcatatactctatggaagaattcattgctgagcaaagcatcgtggacaattttcttcagcggatcattgtgaagattgaggccaagattgaagctcagaaagctagtacatctcaccctcgaagtggtgaacggaaatatgtaaagaggaaccgcgaagagggccatcgacgactcgtggaagattacttctctaaagatccaatctacagtgataaacagttccgtgcaaggagagatgccattaatcgtcaagggctctcacctttgcaaaaatgcacaatagccattcgtgcattagcatgtggcaccctcggagacgccattgatgaatacgtagatactggtatcagcacagcactggagtgtttggattggtttgtggaaggggtgattgacaattttggtgaagaatatttgcgaagccccactagtgaggatatgcaacatatactacaaatgaatgaggcacggggcttccctggcatgttaggaagtattggctgtatgcactgggagtggaaagattgcccaggtatatgtacttctctcaagatccaatctacagtgattgacagtacaatgattcttgaagcggttgcttcaaatgacagctggatatggcatgctttctttggtgccattggatcgaacaatgagatcaccattctcggccaaccacagttgttcaccgaattgttgaaaggccaagctgctcatgtgcaattttctgtcaacaggaggcaatacaatacaggctactatcttgctgatggaatatacccagaaggcaatgtctttgttaaaacagtaaccctccctcagagcgaaaaggatcaattgtttgcacggcatcaagaaggagcaaggaaggacgtccaggaagcctttggacttctacaatctcgttttgccattgtgcgtggtcccactcgtttctttcaacaagagactcttgtcaaaattatgcaagcttgcattatacttcacaacatgacagttgaggatgagaaagatatgggaagctcttgttttgactcggatgaaatcttagggacactggctgttcttttatcagatatcaacactgtgcctgctggctgttatgctgaagtggtacggagaaatgcttctgtttgtgctcaaccaacacatgcacaacttagaagggacttaatggagcatatttggcagcgttttggtccatttggcaacaagtaa

SEQ ID NO: 14191 - DNA, 2529 bp, Oryza sativa
  Clone ID: PAT_MRT4530_20152C.1
gtcgtcgaccccgcccccgccgcggcggccccgttcgggccctccaccggggctgaagaatctcggcaacacctgctacctcaacagcgtgctacagtgcctcgcgtcgacccctcccctcgctaccttctgcctctccttccggcaatgcgatcggatgaggtgttggcgacggcggcggcgctgcgtggtggtggagaggaggaggaggaggagggcgtcgagcttccccgcggcggggaagctgatatgttcgcctgttggcatgcaggcaagaaggtgttgccgaacaaggacaaggagcgcgtgttctgtgtggtggaacggcagatctcgcggctgcttcggaccgaagcaggggcgctagactcgccagcgaagatcatacgctgcctgccgctctttgccgagcatttccggtggggccgccaagaggatgcgcacgagttcctgcgctatattatagacgcttgtcacaccgctggtctgcgcatacgcaagcggctacctgcgtcaaacgccaatggggacgctggcgaggaggaggtccgggtgcaagggccatatatggtgatgaaggagacatttggcggtgcgctgctcagccaagtgaagtgcctcacctgcaagggagagtcaaacaagaccgacgagataatggatatcagcctcgacctgcctggaagcaattctgttgctgatgcgcttgcccgtttttttcagcctgagatattggagggttcaaacaagtacagctgcgaaagatgcaagaagctcacctcagcacggaagcaattgtttgtccttagggcacctaaggtgctcgtcatacaactcaagagatttgagggaataaatggtgggaagatcaacaggaacatagaattcaaagagactctctttctttctgacttcatgtataataaaaaccaggattcactgccagtatataatctttttggcagtattgttcactcagggttctctccagattctggtcactactatgcgtatgttaaggatgctattggtcgctggtattgttgtaatgattcccatatctccccctcaagctctcaggatgttctatctgagaaggtctacatcctattctatattctgagtaccaaaactcaaaagcctagtacaaatggttactcttctagtgcagctaaatcttccaacagcaatggaaatggcatatcaaatgccacatctaatgagcccctgaagataccactagtaaaacagaatggactatgttctagtaaaggtattgcaccgccacccctgaagaatggcaagattgcaccaggtatgcacctcaagccaatccacttgaagaataatggaacggggaaagtttcttcaaatggcaaggcaagcatcattccgggcaataagctagaagttagtgagggtttaacactgccagcagtgaatggccgtgactctggaaaatatgcagaacccggtaaaatgaatgctaatggtagtgtttcttgcaataagacggatgttaattcacagagagtgttgcccaatacgaatggaaatggaaatccaattcacttttctgatcttcaagagaccattgatgctaaggctacatgtgctgagcaatattctgaaaagtcatctattgccagtttggaggattctaaaaatcctgtttcatgccatgaaatgtctgcagtcatagtaaaggatgtggtatcttcgggtaaggacagttcttccttgaagcaccatcttgaagaagggaagtttaaggaaatgcttgctgaatcggcatcttctgagcttcacttgtctggttgggtggatgatgtccgtaatttcatgcacactataaagagacgccgtctacaaaatacaggcacgcctcaagatagtgacacaatgagaaaggagctgataagcgaatctggaagaatatttaggtcaaaaattccagaatcgctgagggagcatctcattcaagccctgcggtcatattaccaggacaaattttcactgggaggataaattttgtgcggcggttcattagaaacttaagaaaatgtatctgtatttaccattttgtagaatggcaaattgatggtggatgtatgttccatgtggtatatgtttgctctggttcaacggaatcctgttggtcaactaccagctccttgtgcggcttatttttgaggcatttttgttatccaaatgaggttgagacgtagagtggccaaattacatgtaaaatattgtcttctttttgctgttgctcctgattctataggcttaaacaacaccaacaacccccattccttcccttctgtctagaatgtagaaattgttttttcccttctgtacaataatagttcgcagattagcagtgtatggggtttttgacctttactgaaggaaaagcccgtttgtggcttcagtactgggtttgttctgaattagtgtccattgcatagaattgctggtcaaatcatctctatataactcccccaaaagcaaaaaaaaaaaaaaaaa

SEQ ID NO: 14192 - DNA, 282 bp, Oryza sativa
  Clone ID: PAT_MRT4530_20153C.1
atggccgacgcatctggctttgcgactgaggtcaccggcgacgagccggtgagattccagtacggccgcgcgcctgatctgcccgttcgtttcagcgcccagagatcaggagaggagatctcggcgcccgatcccagtgacgccaacgagaggagatcaggtcaggaaacaggtaaacggatggcacgacacggcagggaccggagcatctcgcagatcgccgggtcgcttcatacaggagacgagaaggacagagaggcgcacaggggcgcgcgcccatga

SEQ ID NO: 14193 - DNA, 375 bp, Oryza sativa
  Clone ID: PAT_MRT4530_20154C.1
gcacaggacaactacacctgtctggagttgcatgtattgtggattctcgattacagtcacagcaacaaggcttattatatggaaccttacgacctggggtcagtcgcaatacttagcaacaccaccagatcaccacacctgagcagcttcactgatggcggaagctattccaagaaactaatacggaacctattcgtcaaggtctacatgaactatcaactgttggtgtacacactaatagcctctgtgtagctttacttgaatctgagaacaaactgcttcaggcccttattgccggtgtccaccaccctctactacttatccccaatggctgaaccaaacacgtagtcaatagcccgtgctttggaggacaac

SEQ ID NO: 14194 - DNA, 2052 bp, Oryza sativa
  unsure (1)..(2052): unsure at all n locations
  Clone ID: PAT_MRT4530_20155C.1
atgggaggcggcggcggcggcggcgggaggaaggaccgcggcgaggggctcggccgcgcgctgacccggcagcggaacaaggccgcggcggcggccaaggagaggggccacgcgctcgccctcgcccgccgcgcgcgccagccgctcgagtccgtcatcgaggtcagcgacatcgacgccgtgctccagcgcgccgcagaggaatacctcctcctcggtggtggtggcggcgacgtgttcgacgaaatgtctctgaagcgggttgctcattcgggcgcgggcgcgggcgctcctttgcgatgcagggatgggacggtggagacggaggaggagaggcggtggctgcgggaggagcaggaggcccttcacgcgggcagcctcaaggtgccccgccgaccgccatggactccccagatgacggtggaggagctcgacgccaacgagaagcgggccttcctggagtggcggaggaacctcgcaagattggaagagaacgaaaaacttgtccttaccccttttgagaagaacattgatatctggagacagctctggagagtacttgaacgcagtgatctgctggtcatggtagttgatgctcgagatcccttgttctaccgctgccctgatcttgaggtatacgcacaggaaattgatgagcacaagagaacactgcttcttgtaaacaaggctgatcttttaccactgaatgtcagacagagatgggcagaatactttaagcaacacgatatcctttatctgttctggtctgccaaagctgctactgctgatttagagggaaagaagttgagcagctattcnatngaaaactggaatacagcagatcttgacaccaagatatatggccgggatganctcttggtgagattgcagggtgaagctgagtatattgtgaaccaaaagggagcattaagagctgaagagggtcatgaatctagtcgttcagattctgtctcaacacgacccaagcatgtggttgttggatttgtaggctatccaaatgttgggaagagttcaaccatcaatgctttggtaggccagaagagaactggtgtaacctctacacctggcaagaccaagcattttcagacattggtaatctcagaagaactcattctctgtgattgtccaggtctggtcttcccttccttttcaagctcaaggcatgagatggtagcctgtggtgtcttgccaattgataggatgacaaagcataggggcgctattcaagtggtggcaaatcgtgtgccaagaaatgttctagaacagatttataaaatcaccctgccaaagcccaaggcatatgaacaactgtcccgaccaccaactgccgctgagttgctgcgggcgtactgcacatctcgagggcatgtcagtcatgctgggctgcctgatgagactagggctgctagacagattctgaaggattacttagatggaaagatcccacactttgagcttccccctggtgatacagattctgaaactgacccagaggaaaccactgaccttgaaggctcagatactgcagtaggtgccacagcagatcattgtgcttctgatgaacaagatgaggaaatcagtcaagctgatccaaacattagtcatgtactaagtgaccttgaatctttcgacctggccagtgaagtgtccaagaactctacaaagaagaagaaagaggcatcctataagcatcacaagaaaccccagaggaagaaggatcgttcatggagggttggaaatgatggcgctgatggatctgctgttgttcgggtgttccagaaacctgccgtcaattttgctaccgttacaggttaatgtttttttgcggcactctgtgcgacttcattctcttttttagcttacggtaattgaagatgtcgttgaaagtcaaactacattttatccattttgtttcatcttctgctgtttgttatggccatctgtaattctgtattgggaaatttggatggtacgcaatgtggctatttttcgatgctagctttcatagaaaaaaaaaaaaaaaaagggggg

SEQ ID NO: 14195 - DNA, 522 bp, Oryza sativa
  Clone ID: PAT_MRT4530_20156C.1
atggcgcgcggcagcataggggcatcttctcccatcggcagcacaggggcattttctcccattggcagcacctccttcgacgatgacggcggtgctgacgacgacggcactaccagcaacagaggcgcaaggaatggaggagccggggacggcggttgtcgcggcgccaggcccgacgatcggggcggagagggggacggctgttggggcggcgccggggacggctgtcgctttggggacgacgggcggagatgtagcgcggcggccggcagagatgcggcgcggcggcggagatgcggtggccggcggaggagatacggtgcggcgatcggcagagatgcggcgctgcggcgggcagagatgcagcgcggcggcgggtggagatgcagcgcggcggccggcggagatgcagcggcgggcggagatgcggcgcggtggtggcgtggcggcattggcgctagccctaggaagggctcgaagagccgattgactgggcgctcgaagagaggattgactggttag

SEQ ID NO: 14196 - DNA, 846 bp, Oryza sativa
  unsure (1)..(846): unsure at all n locations
  Clone ID: PAT_MRT4530_20157C.1
tttttttttttttttttttttttttttagccgggtaagttcacttgtactacacaatcatggatctgaaacagaaactntataccaagggaagaagggagaattggtgtttccttganacttccttccggngacatgtcccaaagctttcagagctcaaaccatcatatatatgtgccttgctctgtcttgatctctccactctttcagggtaaaagccatcaactacgctattgctctcgtctagttatcttattcttcacaatatgtcagctcatgaagcatgtaataattagttttgcattgcagagcacacacaggttcctaagagcgctatgaactagtactactagtaaaataggctgcacaagtctgcaaaagcagagtgcatactctgttcttccaaccttatacttgctcatccttcatgatatttaccatgtgagaaccaactctcatacaaatccttagtcctcgctcaggttagcaaactttgtcatcgccataaggccacccaatctatcacataaagggagggtatgctagggcgatgagatgaggtcaagtgtctcctcaaagctcggtgcctgctgcggcattctcatcgagattgctctcctcattgtactggggctttggctccaaatcaataaattgatttgagttactggccaaatgtgatatgctcaccctcccttgtttcctgatgtaatctgcgacagccttcatctcctcagtagatatgtatatgaacttcccacgatcatccatgacaccagatagcctatccatgccttcaagtgtaatgatccggttgatacagtcctgtgttctcatcctgaactct

SEQ ID NO: 14197 - DNA, 123 bp, Oryza sativa
  Clone ID: PAT_MRT4530_20158C.1
atgtcgcttctcctttctcttaacgacaagcatctatgggtgatgatgcagcaggggccaaaacctgtgagagctggtgctgaaataagccgttcgctcagcgtcatcgaggtttgcgctgag

SEQ ID NO: 14198 - DNA, 495 bp, Oryza sativa
  Clone ID: PAT_MRT4530_20159C.1
aaagaagtggcccaaaagttcaggtagtttttcttgacacctctaccatggaattgagctgtacttgtaaaaaatttgagacaacaggcatactttgttcgcatgcaataaatgcacttgatctcaagaattttgatagaattcctgaaaggtatgttttaaaacggtggaaaaagtatgttaggaaaggaacatatctatttccatctgatgagtttgtgggacaagattgcacagaacctgggcttgcatttcgtaacaaagcaatgcgatttgtgtatgatctgttgatgaagagcaaaggtcatcaggatacgaggaaacttattcctgatgtgtttgaaaaatggaaaaaaattagtagaaagcctatgtgaactcaagagattgaatgcccatgcctctggaagagagaaagaatggagtaaggttgaaaagcggaagaaaaaatcagccaagcaagaaaaaagcttaagatatgttaaacaagcagtt

SEQ ID NO: 14199 - DNA, 333 bp, Oryza sativa
  Clone ID: PAT_MRT4530_2015C.1
tttgattccacccacacatcccccccccccgggggccttgtcgtcgagctcgccgggcggccggcgagagggcgtgcgcggcgatggggcagggcgccagctgcgggcggcccagcgaggaggtggacttcttcggcgcggcgcagtcggacgacctcgcccgactcgccgccgacgttcgctcacgcccttctctccttggccgcaccacgctcttcgaccgtctatccgtactgcacatcgacgccggccacgggcaccttcagggggggataatggcggtggacctttgaaggcacccggacgttgttaaccagcccaagcagacttagc

SEQ ID NO: 14200 - DNA, 1764 bp, Oryza sativa
  Clone ID: PAT_MRT4530_20160C.1
ccggccgggcacacaaacgcaagctcaacgcaaacgcagcaagcgacgccaccccccacccacctcttcctcgagaagaaaagaaaactggaggaaaaaaaaaaagggggaagaaaaagagaagaagaggcaggcagcggcggagggacggcgacggggtgtcctccgatctggagtcgcgtcaaacccccccgattcctatcgagaattccataaccatccattgttcatttgaagtgttctgtgcatgaaacttctcgaaaaagaggttctgtatctggctggattcctgctggagaagtgaggaagtatcttaacgagaaggtgagatcatgttctcatgattcctgcaaatttgttggaacctacgagcagctgcgtgaacacgctagaaccgcccatttgcttgcaaagcctgcacatgtggatctttcgaggaaaaggacttgggatcagccttgagcgtgaacaggaggttggtgatgtcataagtgcaattaggtcacagaatcctggggcaataatagttggtgactatgttattgagactagagatgcgatgtctcctgaaggaaaccactggagatgaaagcaacgatgagtggtggcgcgactcaatagaatcacctgataacaggtataactcccctaggctcttgccgaatgaagctccagaatcatcaataatctgggcagatgaaaggcatggactgccaaggtttcagcctcagaataacagagtgttgccccggttttcgttcaccaataggagcagctcacggtcagattggcaccgtatccgacggccgagtagacagagcctagcgcgtcgaggcttgttgaatcgaccctacaggaacaacagcgactatcatggctttcgtccccagctatttgatcagccgaatggtagtagccatcgttcaggtatcaacaggagccttgatgacccatcatttgtgcccagacggcagcgtttgagatacacccacaggagccatcatatccgtgattgatctaaagcagcattgctcttgctgtataaattaatttggcaaacagccaaagctatccttgtaaatagtaatgccaaactcaaatttatttttctttagttggtctacgctatatatcaatgtatattatccagcagtctagtctagatgcaaaactttgctccttaaatatcatcttcggtaccgtcactttcgaatgcaaaaaaaaaaaggcttgaaaaaaaaaaaaaaaaaaaaaaaaaaaagaaaaactacagactacagccttggtgaacaggagatcagcccgtggcctaccatcttcacgtgttgctccagatctggtctaaagctccaaggaaaaagtacatcggagccccacatgtcaatgactacttcctctccctcaccacctctcttcctctcttctcctatcctccccttcgaggagcacggctggccctggaggagttgggtgtcgccgatgacggcgtcatcgagctcgaccgaccgtccccatcttcttgatgacggccaatggggaggagggacggcgtcgcgggcgcggccggcggtcggcagggaaggagcatggcggtctcccggccactcctacccccgcgagctcaccgtggtcgaatgcggcctcgagctcaaggtcgtcattgagctcccgattcatgggctcggtgacgccgccatcgatgcccacctcctctttgctgacagctgctctttcccaatgccgtgctatcgccacacaacctag

SEQ ID NO: 14201 - DNA, 523 bp, Oryza sativa
  Clone ID: PAT_MRT4530_20161C.1
acatgcacaaatcgtcaaattaaagcatgcagctagatagctagctagtgatccagcatatattcattcaggcgatcgatctccatatccatcatcagcctgatcgcatgatggaatctatacttctttccaagtcaaacgagataatacggacatcacttcttcggatacacacaacaatcctccaccggtcatttaaggatcgataacaagagctcgcgcgctacaattgaatttagaggtaagctcgttcctatgttcttctttgtacgaatttgaaaatagatttctacctaatgattatattgtgattagaaataatgaagaggacaaggagacacttggagaagtaactagagtcatggaggatcatcgaggacgtccaagtcaaggtggagacccaaactaagtcaacttcaagtgcaatttggagtccaggaccaatctgcactaaaacagacgcccaggtcgcatacgtgctcggattgggacgttctttatatgatagaaagctaagaagata

SEQ ID NO: 14202 - DNA, 345 bp, Oryza sativa
  Clone ID: PAT_MRT4530_20162C.1
atgcctcaccccaagccgttgccccgcgtcgttgttgctcctaccccgagaagaagatggagagggagaggagagtcgccgtcggggagggaagaagagaggagaggccgcgatgccgccgaggaggagagctcgagcagagggaagagggtggaggagctcggcggagctcgaatgaaaacactactacaagaatacaagatcagattcaagaacaccaagaaaacgccgacaccggaaggggagggtgtcgtcgtcgctgctgaaccgccaccgccgtcgcagggatgtcggatgtcgggccgccaccacattgttttgagagaggggggaggggaaatgttt

SEQ ID NO: 14203 - DNA, 374 bp, Oryza sativa
  unsure (1)..(374): unsure at all n locations
  Clone ID: PAT_MRT4530_20163C.1
ggcgttggtctgatcgggccggtggcctgtcatccggctaggaggatcgagggcgggcgagagctgatgccgtctctgccgtgagccgtntccgagcccggaggagccgtacttgatgggagaaggaccactttgtgaacggcctttatgagaagatcgtgatggtgtgatcatgcctgccgctcatatagatgagggggctcatgctaccacagatcgctatgttatgaagatgcctgacgcaagcgctattaggatgcgcactactgatttgtcttaaacgcattcagctgatctcaaccccatgatcaggatcggacatgaacccattgagtcgctcaccgctctacttgatacaaccttacagacgtatg

SEQ ID NO: 14204 - DNA, 691 bp, Oryza sativa
  Clone ID: PAT_MRT4530_20164C.1
tgtcgtcgttcgaccaccgccgccgcgtccacctccaccgccgccacctccgcctcccccttgtgccgtcgccgtcgccgtcgtcgagagcagccttgtccgcctccgccaccaccgtcaacgtcgcctctgtgcgatctctgtcggttggagctcaagctgagtttcttcaccgcgcgcgcggctgccatctacaccagatcggtggcggatcgggcaaacgggttccattacagcagggggatctactggcggcgcaaacaagctccagatacggcagcggctgcgtcttcaaggcgacggtgccttgaagctcctcctgcccctcgtcttcctgctcggtctccatcgccccgcagggcatggatcggaggagcacgatgcggttgtcattagcactgcattggggtttagctagcacaagcatctggatgggaggatgaagcacaagctactgaagtgcctgactgttgcacctccaccgacttcttccaccgcggagccgggccaccgaggcgctgccgacgggtatcaaatccagctcactgatagataaagttggaaggatgctggtgtgagcaaaatttcaggtgaactgcaacaaattccattgtatgagtcaaaactgagcctgtttctgttccgtttattttttcaggccttacattgttgctttgctttcatcctagct

SEQ ID NO: 14205 - DNA, 369 bp, Oryza sativa
  Clone ID: PAT_MRT4530_20165C.1
cgggctgaggaatcggcacgaggctcttctcttctcttcccccacactctctcactagcttagcttagctaaaaaaaagaagaataaataaactaaaatgggagcttgaatccctcccaaatccgcaccattacgcgcaatccgtacacctgctcgacccgcacatggacctttcttctccgattcgaccgctctgagcaaccgggatccgtttctgctgcccattttttgttctgtttttgtttttggtttcttgggggtggaaatcttggccatctttcttgcgactgtaatggcgggggttttagcttggtgagacactgtagatctcgtcgtcttttttgatttgggtttttcggatggtgacgg

SEQ ID NO: 14206 - DNA, 452 bp, Oryza sativa
  Clone ID: PAT_MRT4530_20166C.1
cagacataacatagttccttctttcaaaactcacaacaacatacaagagggtaaaaaaactgatggaaatgcaaaagaaaaatatggcacgacatacccacaaccgtgcacaagaaaaatacgaaacacaccaccaaccaagatctaagatacagtattcttttcttggaaaaaaattatgtacatagaagtagcatgcacagctggaggacagcaaataagaaatgacttaccgaagtcagagggaaaggggaatgtgcaatcaggcctgcaactcaacttgcttcctggattggttagaagcatttgcccgtggttttggatcagacttggcactggtggatctggaaatcgagttgctgttggtcgcgccctttgctgttcccccaccaacatagttggcagagataaccacttcttgactggagtatcgtttgacaagcttggttttt

SEQ ID NO: 14207 - DNA, 1701 bp, Oryza sativa
  Clone ID: PAT_MRT4530_20167C.1
gatcatgcaaacaaaaagtcaaagctttcagatgaagctttggaagaagtcagctcccagccaacagatcttgcgtctttgtccacatgccaaccaaaagccaagcttgtgcaagcgaatactccagtcaagaagtggttatctctgccaactaatgttggtgggggagcagcaaagggcgcgaccaacagcaactcgatttgcagatccaccagtgccaagtctatggacacggtgcgggtcatgcttccataaatgacttacctggtcattgaactatataaaaaggttgtttgtcatgggtatttcatcgaagtggtttaaatcactggttggtataagaaagcaagaaaaggcccggaatgcagaaaaacaagaaaaggcacaaaatgcagagagctgcgaaacaagcacccctgctgctcagttgcttcacaaacggaaacattctttggatactgaacgtgcaatcttagtagaagaacttgcagtgcaaagtgaaccattgactgatgacaccaacacgcagacagtttcagattccatttcttcagacagtacattgcttggagtacatatttctcaaaccgaagagcataaaactaaagaggatgtggctgcaacactcattcagtctgcgtttcgagcattcctggctagacgggctttacgggcattgaaaggaatagttatactgcaggcccttgtaaggggtcatatcataagaaagcagacatcagaaacacttcagtgtatgcaagctctagtaagagctcaagctcgtgtcagagcaagacaagttcgtgtttctttagagaaccaagttgcacggaagaaggtccctgaacaagatgatcatgagaatcatgttcgagaaattgaggaacgctggtgtggcagtattggttctgttgaagaactgcaagctaaagtattgaaaaggcaggaagctgctgctaagcgtgagagagcaatggcatatgctttgactcatcagcgacaagcaggttccaggcaacagaaacctacaactccgcaaggacttgaacttgatgacagccactggggatcaaactggttagagaggtggatggctgtacgtccatgggagaacaggttgcttgacagtaacaccaaagaaactatgccactgtgtgatgataagcaggatatggaaacaaagtctcagatcacaccaaaggggaaagttcaagtttcaagtgccctttctaatggttctaacaagaagaaaggcataaaccgtaaaaaatcatcaagatcacaacgtgaaatgcttctaaccaatccaggaagcaagttgagttgcaggcctgattgcacattcccctttccctctgacttcggtaagtcatttcttatttgctgtcctccagctgtgcatgctacttctatgtacataatttttttccaagaaaagaatactgtatcttagatcttggttggtggtgtgtttcgtatttttcttgtgcacggttgtgggtatgtcgtgccatatttttcttttgcatttccatcagtttttttaccctcttgtatgttgttgtgagttttgaaagaaggaactatgttatgtctgaaaagtgtggtcctgtgcagcattgcagctgtctttctttccttataaattcaaatctgccccttttcacattcccctttccctctgacttcggtcaaagatga

SEQ ID NO: 14208 - DNA, 513 bp, Oryza sativa
  Clone ID: PAT_MRT4530_20168C.1
ctccttataagggaagatgctttcctagccacttgaggcatgtgaagtggagagaataggtggaacacacgtacgtgctcgctcgcctggcctggaaattcggatttgtttttcggaaacactccgaatattccggtacgtgaaacgacgtggagtccggatatgttacgcggtagtacggttacgtggagtggagattgtgcatgcgtcctgatatctctatataagttgagccgccgcctccacgcaacacacgtgaaatcaatctagggtttgcctcctcctctgtactgcgatcgggagagcaggtctccggaaccttcgccttcgatgtcctacaccgggagaaggcagcaataatgtttttgggaagtgctttacacgaccgctccttgttcatccacaacggctcctcttcctcttcgctcacgggttgcgcaccatcgttaacgcacggtaccacgagtccttcccgctgagcagccggttttgcaaatcccttggtacgccttc

SEQ ID NO: 14209 - DNA, 813 bp, Oryza sativa
  Clone ID: PAT_MRT4530_20169C.1
atgacgcagataaacaatgcaaggcatgtaataatgtgcttactcttgtgttttggcgttggtggtggcagcgaggctggctgcggtgctggacttggaacaatagcattcgacgccgacgacccggagctccacgcgattcctaccacatatcaggtgatacttgcgaagtatcatgtaaaacctgttaggtatcaggcgattcctaccacgtatcaggtgaaacttgtcaggtatcaggaaccgggcatcgccggtggtcccaccgtccacgtctcatgccgaagcttgtcaggcggcggcatcctccacggtacatgccacgtcggagctcatcgccggcggctgcgtcctccgtcatccactcctcacgctggagctagtcgccagcgtgccgcatcctccaccatccacatcacgtcggagctcatcactagcggtcgcgtggcctgcgtcctccgtcatctacgcctcacgctggagctagtcaccagcggcagcatcctccaccccacgccgaagctcgttgcggtagtcgcgtcctccgtcatccatgccccacaccggagctcgtcgcagacggccgcatcctcctctgtccacgccaagtcggagctcgtcagcggtggccgtgtcctccttgctccacgtttatccactccggcgacagctccattcccgactgtcgcgacaacccacgtccatcagctccgatgccgagctcgcgctgctcctcaacgcggcacctctcttcgattctgcgacggcggtcaagccccgcgcgtcgccgctatcctcaactggcacgagtag

SEQ ID NO: 14210 - DNA, 534 bp, Oryza sativa
  Clone ID: PAT_MRT4530_2016C.1
atggcgatctccccttgttctcaaccggttctgcttagatttgcggtgtacccagagcgatgccaaccacttccaatgttcacgaatgacacaacaatatcgtacgcttatgaagattttgaatggccagaagatctgaggatagatgacttgaacaatgagttctacctagagcataaaaagaatttcatatctgccatctcacccttcatccttcccactggtgtatcacaatgccgatttactcagaactcatatgagttctatcacccaatgtccacccctaggatcaaccatttttcatcaatccctccatcagtccaggatgatggtcagcctccatcaaacataagcaaaagtggtcagtccattgcatatgccgatgctacaactcttgtggaaaatgaattaactctagccccatcaattatcggccaaaatgctccatcggctgaatccctgctccaagaccagactgtggtagaaattgcaccagctgcccccaagccaaaacaaaccacgaagaaaacatag

SEQ ID NO: 14211 - DNA, 687 bp, Oryza sativa
  Clone ID: PAT_MRT4530_20170C.1
atggcgttgactgattttagtaacttttgtggcttagtgaaattttatggtgaatcattaactgccggcttaaagccaattattggtgctgatatttatgttcgttctgatccaactagtgaagatatttttgaactgacactattagcaaaaaataatcaaggctttcacaatatcactgttctactttctcgtgcttatcagcaagggtatgttgagtttcctattgtcgaaaaagcgtggctagctgaattaaatgagggaatcattgtactttcaggcggacgttcaggtgatgtgggcaaagctttacttaaagaaaatgaacaagaagccgccacattagtggctttttatcaacaatatttcgcggatcactattatctttctctttgtcgaacagggcgctcagatgaggaacgttaccttcagcaagcggttcaatttgccaaaaaatatcaattacctttagtcgcagtcaatgacgtagtcttcttgaaagaagatgattttgatgcacacgaaattcgggttgccattcacgatagttatacactcgacgatcccaaacgccctcaaaaatactctccgcaacaatattttcgttcagaagaagaaatgtgcgccttatttgccgacttaccacaagcgttgatgaatagcattcaaattgcaatgcgttgtaat

SEQ ID NO: 14212 - DNA, 609 bp, Oryza sativa
  Clone ID: PAT_MRT4530_20171C.1
atggcggcggttcgggagcccagggaggaggcggcggtgggggagggggagggggaggaggagggcaggtggggcgggctgctgccggagctcgtggaggaggtggtgcggcgcgtggaggcgtcggggggcgagcggtggcccgcgcggaaggacctcgtgtcgtgcgcgtgcgtctgccgccggtggcgcgaggccgcggcggccgtcgtgcggccgctccccgagtccggcagaatcaccttcccgtcatcgctcaagcagccaggccctaaggacttcccaatccagtgcttcgtcaagcgaaacaagaagaaatctatgttctatctttacctaggcttgttgaatgttgcatccgtgaagaatttccagcttgtggccacagctgaccccagccatccagatagcgttggagacgaggaaacagttatcctgcagtttgggaaagttgacagcaatatcttcactatggattaccgccaacctctctcggcgtttcaggctttcgccatctgccttagcagcttcggcactcgtcgggccaacgcaaggacgtgcgcggttgatgcgtcgtccaccgacccgcccgccaaccggcggagttag

SEQ ID NO: 14213 - DNA, 552 bp, Oryza sativa
  Clone ID: PAT_MRT4530_20172C.1
atgaggaggagggatccgaggccagctcctccggcgaggaggaaaaggggcggcggtgggaaaggaggattgggtactacggagcacgccgcccaccgccgttgcgacctcccccaagtcgggcatgtcatcgcaaggcaccgtgtggagaggaagcggaacaaattttgggtctccgtccttgccaactttgttgaggagctcctctatgttccggtcgataggatcccgcacgctgagtgggtgtccctttttatgcggaatttcctccacagattactcaataagcctaacgcctactgtgttttgccttgtgatcatcgtagaacggaactagaggcagaccgcatcggcctcatgctgcaggctgcggcaggatatgacccacgtgcaaacccgaacttctgggaggcactcatgaagtttggaaatggggagggtactacacatccaccgttgcagaggcgcgcggcggaagttaggcaggagaaagtgatgggggaggcattggaggtgttccgtgaagccgtacaacgacatgtgcatgcatag

SEQ ID NO: 14214 - DNA, 4463 bp, Oryza sativa
  Clone ID: PAT_MRT4530_20173C.1
atgaacaacttccacgtctacgaggccatcggccgcggcaagcactcgacggtgtacaaggggcggaagaagaagagcatcgagtacttcgccgtcaagagcgtcgacaagtcgcagcggtccaaggtcctcaatgaggtccgaatgcttcattccttagatcatccgaatgttctgaaattttactcatggtacgaaacctcagctcatttttggttaatactggagtactgcgttggtggagacctaaagggcttgcttgagcaggataagaagctgcctgaaaattctatacatgacttggcttatgatcttgtgaaagctcttcagttcttgcattcacaaggaattatatattgtgatctgaaaccatcaaatgttttacttgatgaatctgggtgcatgaagctgtgcgattttggattagcaaggcgtttgaaagacatagagaagaccaatcctggagatgtgccgcaacctttgaaggggactccatgttatatggctcctgagttgttccaagagggaggagtgcattcatatgcttcagatttctgggcacttggttgtgtattgtatgaatgctattcaggaaggcccccttttgtggctaatgaatttacccagctagtcaaatctataatttcagatcctacaccacctttgcctgataacccctcaagatcctttcaaaatctgatcaattgcttactcatgaaagatcctgctgaaagattacagtggtctgaactatgcgagcatcacttttggaggagcagaatgtcaattattcctttacctcctcagcctgcctttgacaacatggtcgacctttctgctacaccatatttagttgagagaaatggtgataaaccttctagacagtccacaccacccaagccccgtgatggcctacggaagaaggacgaaaattctgctaaggtgttcacccctgttaagaatatgctaagtggtaagaaaaacaatgcaaaaccttcctgtaaggctgatggattgaagggtgtaaatatcctcaggatgtctcgtgtagctaagaggaatttgcagagagaaaaagacaaggagaactacaggcgacaccctacagaagcttctgagaatgatacagaagttaagattgaaaacaatgatatggaacttgattttggtgaaaatccagaaggtgatgcacctgatgacaatgatggatcagacaatcctggatccgcagaagatgaaaaactttccactcaaggcactgatggtaatgaagagaactgcatgagtaatcagatggatatgctcacagatgaaggcccagttaaggctgaaaccatgataaaaactgaacataattgttcagaaaatcttgatgtggtggccactccaccaagtatttgtatgaggaaagcacaacgagcaaagacaacttcaggtgccgcagctggttccgagccatctgacatctctgcagcattctggcatccaacagatcttgctgttaaaccagttatgcctggtaggaaaggagataaagctgtagagacagtccctatgcttccgtttgaagctcttcctgctgttgattatattaagttgccacgggaacaaatgaatgcattcaatagtcagatacttcagagtttaagtggtacttttcaggtttcagagaaacagaatatcatcaaatacctggagatgttaagcatcaattctgatgctgcaaatataatcacaaatggtccaattatgctgttgcttataaaaatgctccgtctgtcaaaaacttcagtattgcgtgtccaaattgcttcacttatgggattgttgatacgctactccactatccttgatatagagctggcaagttcagggatttttaatgcactatcagatggtctaagggacaagcatgataaactcaggcgattctgtatggcaacactaggagaattactgttctacatttctactcaatctgatcaagataccaaagaaatcaatgcccaagaatcccctttgaaggataacagggccacagcttcttggcaggttccaagttctgtaattgcgctggtgtcatcaatcttgcgtaaaggtgaagatgatctagcccagctttatgctttacgaaccattgataacatctgtagccaagggacagattggacttcacgtttcgcttcccaagatgtaatcagtcacctgtgctacatctatagagcaactggtaagcaggagaatacaagacttattgcaggatcttgtttggcacgcttagctcgcttcagctcatcttgtattcatttaatactggagaggctggccttcaaggatatcgcatgcacactcattaaaggcaattcacgtgagcagcagatcagtttgaatcttctgaattcagcactagttaacagccaaatcataccaaccatgaaccgctacattcagtcgttaacagaagagaagcagttggttcctggactcatctctcttattgaacagggaactgatgttctgcgtggcaaaacccttctatttgttgctcttctttgcaagaacagtcgaagatggcttcctcatttcttttgcaatgcaaaactactatcagcagttgatagattgggaaaggagaaggaaggcttcattcatcaatgcacagaagcatttgtgcagttggttgcttcattggtcccaggcatccttgacactgtctctagtgatatacaacaggttatgggaggcaagcgtcatggagctgctactgctttaactggacgagctcatccaaagagcataattcatttgtttcctgttatccttcatcttcttgggagtgtttcattcaatcacagagttgtgacgagccatgtattgcttcagttggcaaatcttatgaaaattttggaagcaccatttcaggctcgggatgattttcaaatgacactattgagggttcttgaggcagccacggaggagccttctgttatacttaatgaacacaaaatattcacaagtcgaatccttccaagcttatccgtcttgtacaagggcaataaagatggtgatgccagattcctatgtttaaagatactgtccgatgtgatgattgtgatcttcagtgactcttcattgacgtctaatgagcaaacagtatctgacctggaaaagatctctcagaagtattttctccccatgtatccatcatttgcagaggatgaagatccaatacctatatatgcccagaaacttctggtaatgctgatggagcatgattatgttaaggtttctgatattctcaatgaagcaacagtatcccggtgctttgaatttttgctaggagatttgtctaatgcaaatgtaagtaatgtcaagctttgctttgcattggcatctgctcccgatatggacaccgacattctttctcagcttcaagttgtcagaagaatagggaacctgctggagtttgtgactgcaaaagatatggatgattttctagaaccaaccttggaactttgcagagcattcattatccggggcatcagcagtgacaaaattgtggccctttccaaagagcccgcactccttgttgatagtgccttcagcatgagcattgctgtcgatcaacaatcatgcgtcatggatatatgcgactttggtggcaacatgggcattttcctcgacctagttggaagttcagatccacatataagcgatttggcatcagactgcttggtgctgttactcaaagcagcacctcgggaggctacggtgggcttgctgaccaatcttcctaaactgagcgttgttctggacctgctgaagcatggcacctgcctaaggctgactcgcctgctgtattgcctggccttctcctgcaggcaatatctagcgcaaggaatgatcgtgtcgatatctttgtcagccttgatgcgagtagaagcactcgtgtcggcattcaagggttcacatgatggctgccttgctgacgccgcctcatatttgggcgctgaactgcagcgtttacctcgctgtggttgagccgaagtttggtcaggtgctggcttggttggcattgtgcaagtgatgttcatagggatcataagagagggcctcagccttgtatttcttcaccgtttcttgcaccaagctatgatcatgggttctcaccatccgaagtgatgactgatgaaccatccgattggctgtgtgatcatttatctatatgcaacgtggagctgctgttctttcagtataccatttctggccaaatctggagaggcagcttgtggccaaaacccttcctgtatttcccctgtgccaattttggttggcgtttcatcggttttcagtttctcaccatgtaatgctgtagagtttcatagcccttaaaatcatgtatatttgtacactcccttttactttaccaagcaacggggtggaaaaaaaaaaaaaaaaaaaaa

SEQ ID NO: 14215 - DNA, 380 bp, Oryza sativa
  Clone ID: PAT_MRT4530_20174C.1
acatggttgaaaataggttaaggcactagttacaaggtaattaaacccagaaaagtgaacggaaaaacaccccacctgaaaaaccgggggaaaaaaaaagggaaggcaaattttccgggggaataaaatacaacggcggtaggggcgcccccaaaaaaacagaagaccctagtaaaaaccgcaaaagaaaccaaggggttgggccggagaaaaaaaaggccccctttttgagcgctaaaaaaaaaaggagtcaaaggcagaagggggtgggccccctccggggggaaaaaaaaaaaaagggggtgcccccgggcatcacccccggggggccgaaaaggagccaagggggcccggaaaccccaaaaaggggcccccccccc

SEQ ID NO: 14216 - DNA, 725 bp, Oryza sativa
  Clone ID: PAT_MRT4530_20175C.1
aaccgctcaagtcaatcccgcattcaataaagtacagcgtcaggtatatatatgcatacgctatttaaacatcaaataaacaccaagacgactactagtactagtactaaactgcagctttgctacaggctacaactacgagtgtacgcgaaaaaaaaccacggtacagtccgttcggctgtctccacaaggagatgtacggcttggctacacgccttgggcgtcaatcgtacctaagtccctaagtaaatacagtaaccgtgctacgatcttcctaagtcaaatgaagctgtacaagaagggggcagcatactgcggattagcaccagggctgacagtcagaaggcataaccacattccacttccatgagattgcttaaactccgttgtactagaatcgtcagtgctgcttcggctgctggagtattgtgtggtgtggtgtgaatggatcaacgtcagctgatgaattggagggcaactgcaaagctgtgacctcgccctgctatagcacctgatttgccatcttttcttggcaaatctttgacaacgcttctacatgaaaattttgtaactcttccaggactttgacatctaagcctcttagatcctcgcccttcaatctgggaacaatgccttccaactctttgcagcgccttctttgaacattgtatgccgcttttgcttcttcataagtgctgacactgacaccatcccagtttctatta

SEQ ID NO: 14217 - DNA, 525 bp, Oryza sativa
  Clone ID: PAT_MRT4530_20176C.1
atggcgaagtgtgcgttaggtccatccttgaaagtgccttccgggacatgcacagtaatcatcccgagatctaactcacttgctctcaagtaccagtcatgcatcaacctcattggccatgggagttcacacataaagttgtacggcaagaacggcttgccatattcatactcctttggcacttcatcggaggcttcacaggtagttggctgctccttggatgtatctggcttaggaggtggcacatgttcgtcaaggggtggagcaagatacgactgtggagcaggagacggctatcgaggtaggagagttggggagttaggtgcggcttgttgtggaggtggagaaggacctctaagtggtgatatttgtggtagtggagatccgggtggggtagtgcagatcggaggggacgacggtgcaggaggtgcagccatatttggcaccgatggagctggggtcatcaacgttgtattttctaccgacccgacagagcttgggatctgcgtcgactgcgatccctaa

SEQ ID NO: 14218 - DNA, 297 bp, Oryza sativa
  unsure (1)..(297): unsure at all n locations
  Clone ID: PAT_MRT4530_20177C.1
agcaagcacttacgtatgattcaatcttgagttgttgttgaaaaaaaaaaaaaaaaaaaaaaaaataaaaaataaaaattaaatattaaaaaaaaaaaaaatataaaaaaaaaaaaaaaaaaaaaaaaaaaaaaaaaaaaataaaaaataaaagggggcgcccgttttaaagaaccaaatttaattttcccngctctgcaacttaaatttttttttatgtggccccaaaattaaaattcattgcccgtatttttaaaacgtgggaagtggaaaaacttgtgctttcccaatttaatt

SEQ ID NO: 14219 - DNA, 207 bp, Oryza sativa
  Clone ID: PAT_MRT4530_20178C.1
ggagtacacatttggtgtctaagaggaagacccctccccggaatctgttggtttggttctggtgggagcgtctatcatttcaccatgcgggaacagtgtgtgccaaggtccccactatgagaggcgaggctcttctcacagctggacctggacccttggagagattgtttcgacccacagttgtgagtttcgatgtggttgccatct

SEQ ID NO: 14220 - DNA, 672 bp, Oryza sativa
  Clone ID: PAT_MRT4530_20179C.1
atgcggagcaccaccttcctgcgactcggcttccgccaggtctcctccctcctgttccatggcccctcgtcgcctgcccccaccgtgggtctcgccctcggcgtgggccggggcgcgctggtccgcctccggtgctcggcggctgaggccggcgacgacgggggcaggaaggtgtcggcgcgcctggcgctgacccagcaggtgcttcgcgacgccgaggagcgcgccgcttcggccggctccgaccccgcccccaagatcactttggatcatgttactcttaactttgcaagaagtgggggggctggtggtcagaatgtcaataaagttaacacaaaggtcgacatgcggttcaatgtaaaagaggctcagtggcttggtgagagaatcaaagaacggatattacaaacggaaaagaaccggataaataaagatggggagcttgtgatatcttctacaaaaactaggacacaaaagggaaacattgaagatgctttgcagaaaatacaggcaatcattgatgctgcatcctatgtacctccacccccttcagaagagcaaaagaagaaggttgaaaaaattgctgcagccgctgaaaggaagagacttcagaagaagaaagtgctttcgcagaaaaaggaatttaggaggaacaggactagctgggattga

SEQ ID NO: 14221 - DNA, 511 bp, Oryza sativa
  Clone ID: PAT_MRT4530_2017C.1
gtagctatggagaaattaaggtcggagttaatactactggtgctagcgggactagctgaagcgtagtctgcaccgtaggttggtcacggccggtggacgggtggagcactgcaaaagatcgtggatggaacagtataggagtagtaggtttaaaattaactgcaggaaaggaacggcgactagctagtctctgtggagcgagggcagctcaacagtaatgaagggcacacaccagacgtgtaggagtcctgtgacacgcgctgtaggagtcctacgacacggggggaggcacaccgtgtgcactcacccgtttttttgacaaattggtccttgtagaaaacttatttcgaaactagtccttaccaaaaactatatccaaaaataggccatcggctcagcgccaggcgctgaggttgttcttatctgcgccaacgggactggtgctaacatcatgccagcgtggcgggcgaggcgcgacgtggcagggcctcagcgccaatgcacttggcgc

SEQ ID NO: 14222 - DNA, 2055 bp, Oryza sativa
  Clone ID: PAT_MRT4530_20180C.1
atgtcgggcaagacagctccggtgggcacagaaccgacggtcaataaacctaacgggcaggacagctccgtcggacatagaaccgatgtcactaacaagccccaacacgaagaagatgccgggaaggtaccggcgtcgagcggggaatcgtggcgcacaccgagcgacccgtttgagctagaactagcgcaattgcagtatgaaagacctgaggatgaccccgattatattcctattgagcaggcgatggcaacccgtcgtcggtcaaaacgaagtgccgtcagggttgaacctgattcggacacagcgacctcgggaccaccgcgaacggacacgacaacgagtgggggagcttgtccaaagaaaaaacgtggcgagaagggcaggaacctcatgccgaaggagacgtactacattgctgctctcgacaatgacggcaaacccgtcgagccggaacatgtaagggcgaagtttagcaccacatgcggcgcgctggcaaggcttcatgggcctctcaacgtggacaaatggaagcacattagcattcacatcaagaacttaatgtgggaaggtctgcaggagcaccttatttatccgcctgggtcggatgcacttggccggaaatttgcactacaaacaattgcccatcggtggcgacagtggaagtcggacatgaacaccaattatgttaagaagaataagattccatttgaagaatggggcaccgtttcagcagctgagtgggacaagttcgtgcccaagatgacaacgcctcaagctctagaaaggaggaagaagatgtcggacctggcgaagaagaacatatatccacacagaacttcgggggaagtgacagaagagggtgagatgttggtggactgtccggacatccagaacgtgacaacgtctctccagcagatcgtccagaaggagaagaccggtgagttcgtccctcgacggcaacatgatgagctgaccgaagctttgggaactgctgaacacttcggtagggaagcccaaagttacaagaagcgcgacgcctacaaggccaagatgcgccaggaaatcacagatgaagtcacacaacaagtcacccaacagttctacagtcttgccgcacaacatcctcaagccttccctgacctacttcctcatggttcgcagtcgacacagatcccaagctctgtcgggtcggtagaaaatacaacctacccgggtcgaaggggtccgctaaagccagttggacctgatcagtattcggacgcacagaagagcgttgtaggtcttgctaacaaaatgcaatcttggacctccgatgaagtgcctaaggagtatgaatatggcaagtcgtttttgccgttcaacttaatgtgtgaactcccatggcaaatgaggttgatgcatgagtggtacttgagggcaagtgagttaggtctcgggataattactgtgcatgtcctggaaggcgctttcaaggatggacctaatgcaaacttcgccttcagtttcaaggacctccacgtattctttaagatggataaaatggatatcaatctcgtcgccgcgtggtacctcgaacactacatacaattcctcgtctatccaacggaccaaaccgtcgtagttcttgatccggcggactatgacaaggacgcgtacatggagttcctatgcttgctgaacttagcacacgaccgttataagaaacatggcgggtatgttaagaatccaagtagagagaaactgtacataagaggacactggccgtgttataagcaacctagcttgacgaacctatgcggttattacttgtgcgagatgctcagggtcaatgggagatacagaactgagtttacagatctcctgagtatcccttatagcgcaagccggttcgatcagaaaacgcttatcaacttgtgcacggacttgtgccggtacattcgtcgtgacatctgtaatcatctaggagagttccatgatcctcatagcgaacttgctacggaccccaaatttaagaatctaagagagtgggagaggcaacatgctgtggactaa

SEQ ID NO: 14223 - DNA, 2502 bp, Oryza sativa
  Clone ID: PAT_MRT4530_20181C.1
atggcaatggaccactggcgttggttcccgaaagataccttcgaggtttcttctacatgcgtccgtaaagttttaaattgttccattgtaagaacgcgcatcgaagatgtcgggcaagacagctccggcaggcacagaaccgatggcactaacaatcccccacacgaagaagctgccgggaaggtaccagcgtcgagcgaggaatcgtggcgcacaccgagagatccgtttgagctagagctagcgcaattgcagtatgaaagacctgaggatgacccagattatattcctatcgggcaggcgggaccacagcaaacggagacaacgacgagtgggggagcttgtccaaagaaaaaacgtggcgagaagggcaggaacctgatgctgaaggagacgtactacattgctgctctcaacaatgacggcaaacccgtcgagccgcaacatgtgagggcgaagtttagcaccgcatgcggcacgctggcaaggcttcatgggcctatcaacatggacgactggaagcacgttagcatacacatcaagaacttaatgtgggaaggtctgcaggagcaccttatttatccgcctgggtcagaggcacttggcaggaaatttgcactgcaaacaattgctcattactggcgacagtggaagtcggacatgaacacccattatgttcagaagaataagactacatttgaagaatggggcaccatttcggcagtcgagtgggacaagtttgtggccaagatgacaacgcctgaagctctagaaagaagtaagaagatgtcggacctggcgaagaagaacatatatccacacaggttagggtcaagtggatacgccggtcacgagaagaaatggcgagctacggaggaaaagtttgcggctgaaggcaaacctttgattgtgcaccccctaaacaagcgaacaagaaattgggtgtgggaaagaacttcggggcaagtgacagaagagggtgagatgctgttggactgtccggacatccagaacgtgaccacgtctctccaacagatcgtccagaaggagaacaccagggagttcgtccctcgacagcagcatgatgagctaaccgaagctttggaaactgcagaacactccggtagggtcagaggacaatcgtgcaggacggattggatggtcgcacgtgttaatggcgaccagatgtcgttggagattgacatcgcaacaccagaggggattgaacttctcggggatgcggttaaccagttcatactctggcatcgtcgtgacatcatcctcactggacagttcacgttgacgacaccatctccatcggtgccaaatacggctgcacctcctgcaccgctgtcccctctgatctgcactaccctacccggatctccactcccacagatatcaccacttagaggtccttctcctcctccacaacaagccgcacctaactccccaactcccctacctcggcagccgtctcttgctcctcagtcgtatcttgctccaccccttgacgaacgtgtgccacctccccagccagatacatcaaaggagcagccaaatacctgtgaagctcggaagctcatacttgttatggtttccacgtacaacaaggagaaaatggcagagtatgagacgcggatggttttgcagtctttcaagggtcgagggggtccgctaaagccagttggacctaatcagtattcggccgcacagaagagcgttgtaggtcttgctgacaaaatgcaatcttggacctccgatgaagtgcctaaggagtatgaatatggcaagccgttcttgccgttcaacttgatgtgtgaattcccatggccaatgaggttgatgcatgagtggtacttgagggcaagtgagttaggtctcgggatgattactgtgcatgtcccggaagacgctttcaaggatggacctaacgcaaacttcaccttcactttcaaggacctccacgcattctttaagatggataaaatggatatcaatctcgtcggcgcgtggtgcctcgagcactacatactattcctcgtctatccaatggaccaaaccatcatagttcttgatccggcagactatgacaaggacgcgcacatggagttcctatgcttgctgaacatagcacacggccgttataagaaacgtggtgggtacgtaaagaatccaagtagagagaaactgtacataaggggacgctggccgtgttataagcgacctagcttgacgaacctatgcagttattacgtgtgcaagatgctcagggtcaatgggagatacagaactgagtttacagatctcccgagcatcctttatagcgcaagccggttcgatcagaaaacgcttatcaacttgtgcgcggacttgtgccggttcattcgtcgcgacatctgcaatcatctaggagagttccatgatcctcatagcgaacttgctacggaccccaaattcaagaacctaagagagtgggagagggaacatgctgtggactaa

SEQ ID NO: 14224 - DNA, 339 bp, Oryza sativa
  Clone ID: PAT_MRT4530_20182C.1
gcaaacaaggagagagcttggtgagctgcagagatggccccctacgtgatggcggcatcggtcaccaccgtcgctcccttacaggggctcaagttcaccggcggcatgcccgtcgaccgccgttccggcaacttcagcttcggcaacgtcagcaatggccgcaggatcaagtgcatgcaagtgtggccgattgagggcattaagaaattcgagaccctctcctacctgacaccgctcaccgtggaagaccttctgaagcagatctagtacttgctacggtcgaagtgggcgccctggctcgagttcaacaaggtatgcttagattaccgggagaaccac

SEQ ID NO: 14225 - DNA, 130 bp, Oryza sativa
  Clone ID: PAT_MRT4530_20183C.1
aaatatataggcccggaacgccaatttaacaaattaccatactcgaaaccgaacaacgttttgccctttcgcttgccaccataaaagcaggtttcacagcgaacaggggaagcactaacaagggccaagc

SEQ ID NO: 14226 - DNA, 1824 bp, Oryza sativa
  Clone ID: PAT_MRT4530_20184C.1
atggctagccgtcatcgatcgaaacgaaatgccatcagggctgaacgtgagtcggacacagcgacctcgggaccacagccaatggacacgacgacgagtaggggagcatgtccaaagaaaaaacgtggcgagaggagcaagaacttgatgccgaaggagacgtactacattgctgctctcaacaatgacggcaaactcgtcgagccgcaaaatgtgagggcgaagtttagcaccgcatgcggcacgctggcaagacttcatgctcctctcaacgtggacgactggaaaaatgttagcatacacatcaagaacttaatgtgggaagtcgagtgggacaagttcgtggccaagatgacaacgcctaaagctctagaaaagaggaagaagatgtcggacctggcgaagaagaacatatatcaacataggttagggtcaagtggatacgcctgtcacgagaagaaatggcgagctacggaggaaaagtttgcggctgaaggcaaacctttgattgtgcagcccctaaataagcgaactagaaattggccgtctcctgctccacagtcgtatcttgctccaccccttgacgaacatgtgccacctcctaagccagatacatccaaggagcagccaactacctgtgaagcctgcaagctcatacctgttatggtttccacgtacaacaaggagaaaatggtagagtatgagatgcggatggttttgcagtctttcaacggtcgagggggtccgctaaagccagttggacctgatcagtattcggacgcacagaagagcgttgtagctcttgctaacaaaatgcaatcttggacctccgatgaagtgccaaaggagtatgaatatggcaagccgttcttgccgtacaactttatgtgtgaactcccatggccaatgaggttgatgcatgactggtacttgagagcaagtgagttagatctcgggatgattactgtgcatgtcccggaaggcactttcaaggatggacctaacgcacacttcgccatcagtttcaatgacctccacgcattctttaagatggataaaatggatatcaatctcgtcggcacgtggtgcctgtcacaatgggtagacgctcaaagaacggaggcctcaatcggttacgtaaatccaacgatggtttgcgagacggcccacactgtgcggatatcggaggatagtgcggtactaaagaataagacacatcaggagaaaaaagattacatcgagcgtctgcataagagaaagatggccgaggtgggaaattacttggccacctcatttcgcgcgcactccgacaaacgagtcatcatgatcccctaccactttggcgaccactacatactattcctcgtctatccaacggaccaaaccgtcgtagttcttgatccagcagactatgacaaggacgcgtacatggagttcctatgcttcctgaacttagcacacggccgttataagaaacgtggcgggtacgtaaagaatccaagtagagagaaactatacgtaaggggacgctggccgtgttataagcaacctagcttgacgaacctatgtgattattgcgtgtgcgagatgcccagggtcagtgggagatacgaaactgagtttacagatctcccgagcatcacttataacgcaagccggttcgatcagaaaacgcttatcaacttgtgcacggacttgcgccggttcattcatcgcgacatctgcaatcatctaggagagttccacgatcctcatagcgaacttgctacggaccccaaattcaagaacctaagagagtgggagagggaacatgctgtggactaa

SEQ ID NO: 14227 - DNA, 466 bp, Oryza sativa
  unsure (1)..(466): unsure at all n locations
  Clone ID: PAT_MRT4530_20185C.1
ggaaggattgaaaatggttcaagcgttagctgctcccagagggagcttgggatatgtcagatgtttccaataggtggttctctctatacacatgatgtgatccacgaaagagggaatgctttagatagtaaattacacatctgattcgttatgcagaagtgcaatggggtaacagatagaactgctgatgggaacgaatttgtgtatccacaattcagcagatggctgtccaaaattctgtagtccatattaatgcaagcttcaatgtagatcaatcatagcttggacaatatgtggctgcaggtggtcccatgtgaatantctccattgatcgcatgctgaacatttgtcaatcttagtactgttttctagagtacagaatttacaggaccaggttgcatatttggccttcgtggttttaggtttagctgcgctacaaactttacagattggtgccagagctgat

SEQ ID NO: 14228 - DNA, 784 bp, Oryza sativa
  unsure (1)..(784): unsure at all n locations
  Clone ID: PAT_MRT4530_20186C.1
attcggctcgagctatctttacgaatcttcttcattacatggcttcttcattcccatctcttctcgccactacacttacaacagaaaacaaaaatctctaggccttctctgcactaatttcttgagcttgtacaaccgagacaccgttcacttgattggcctagacgatgctgccacccgattaggtgttgagagacggcggatctatgacattgtgaatgtcctggagagtatcggggtactctcaaggaaagcaaaaaatcaatacacatggagagggtttgccgcaatccctctcactctacaggatctcaaggaagaggggttgaaggagaattctaattccctacgtgggcctggaaaccatgataaagtttccgacgacgaagatgacgaggaaacacagtccaatcccgccgctactggaagtcaaagtgacaagttgaaccctaattctactcttcctaaacctctgaaaaatgaaaatcgaagagaaaaatctctggctctgcttacccagaattttgtcaagctctttgtctgctctaatgtggaattgatctcccttgacgaggctgcaaaattgctacttggggatgcccataatacgtctgtaatgagaactaaagttagacgcctatatgacatcgcaaatgtgctatcctncatgaaccttattgagaagacccatacaatggatacacgaaaaccagcattcaggtggctcggntctgaagggaagacatgggatgagacacttcacatatcaaacctaaacgactct

SEQ ID NO: 14229 - DNA, 1973 bp, Oryza sativa
  Clone ID: PAT_MRT4530_20187C.1
agccgaaacatcaaattaaatcatattacataggaggtgtggtgtttattacaagcatccctcgcgacaaatacatccatttagtccacagcatgttgcctctcccactctcttagattcttgaatttggggtccgtagcaagtacgctatgaggatcatggaactctcctagatgattgcagatgttgcgacgaatgaaccggcacaagtccgcgcacaagttgataagcgttctctgatcgaaccaacttgcactataagggatactcgggagatatgtaaactcagttctgtatctcccattgaccctgagcatctcgcacacgtaataaccgcataggtttgtcaagctaggttgcggccagtgtccccttatgtacaatttctctctacttggattctttacgtacccgccatgtttcttataacggccgtgtgctaagttcaacaagcataggaactccatgtacgcgtccttgtcatggtccgctggatcaagaactacgacggtttggtctgttggatagacgaagaatagtatgtagtgttcgccaaagtggtaggggaccatgatgacttgtttgtcggagtgtgcgagagatgaggtggccaagtaatttcccacctcggccatctttctcttatgcagacgctcgatgtaatctttttcctcctgaggtgtcttattctttagtaccgcactatcctccgatatccgcacagtgtgggccgtctcgcaaaccatcgttggatttacgtaaccgattgaggcccccgttttttgagcgtctacccattgtgacaggcaccacgcgccgacgagattgatatccattttatccatcttaaggaatgcgtggaggtccttgaaactgaaggcgaagtttgcattaggtccatccttgaaagcgcctcccgggacatgcacagtaatcatcccgagacctaactcacttgccctcaagtaccactcatgcatcaacctcattggccatgggagttcacacatcaagttgaacggcaaaaacggcttgccatattcatactccttaggcacttcatcggaggtccaagattgcattttgtcagcaagacctacaacgctcttctgtgcgtccgaatactgatcaggtccaactggctttagcggaccccctcgacccttgaaagattgcaaaaccatccgtgtctcatactctgccattttctccttagtgtacgtggatactataacgggtatgagcttgcgggcttcacaggtttttggctgctcctttgatgtatctggctgtggaggtggcacatgttcgtcaaggggtgggacaagataggactgaggagcaggagacggctgccgaggtagggtagttggggagttaggtgctacttgttgtggaggtggagagggacctctaactggtgatatctgtgggagtggagatccgggtggggtagtgcagatcggaggggacggtggtgcaggaggtgcagccgtaattggcaccaatggagctggtgtcatcaacgtgaactgtccagtgaggatgatgtcacgacgatgccagagtatgaactggttaaccgcatccccgagaagttcaatcccctctggtgttgggatgtcaagctccaacgacatctggtcgccatgaacacgtgcgacctgaacccttgcatagtccaccagaattgagctattatggaactgtctccccgatatagccaatccagacgcaacctcctttgtttttcccgctctccctatcggaacgacaaggttgcacggtgtcggaccagttatactatctaccgggtaggttgtattttcaaccgactcgacagagcttgggatctgtgtcgactgcgaaccatgaggaaccaggtcagggaaggcttgaggatgttgtgcggcaagactgtagaactgttgggtgacttgttgtgtgacttgatctgtgatttcctggcgcat

SEQ ID NO: 14230 - DNA, 1499 bp, Oryza sativa
  Clone ID: PAT_MRT4530_20188C.1
cacagcatgttccctctcccactctcttaggttcttgaatttggggtccgtagcaagtttgctatgaggatcatagaactctcctggatgattgcagatgtcgcgacgaatgaaccggcacaagtccgcgcacaagttgataagtgttttctgatcgaactggcttccgctataagggatgtgacttacatctgtaaactcagttttgtatctcccattgaccctgagcatctcgcacatgtaataaccgcataggttcgtcaagctaggttgcttataacatggccagcgtccccttatgtacagtttctctctacttggattctttacgtacccgccacgtttcttataacggccgtgtgctaagtttagcaagcataggaactccatgtacgcgtccttgccatagtctgccggatcaagaactacgatggtttggtccgttggatagacgaggaataatatgtagtgctcgccaaagtggtaggggaccatgatgactcatttgtcggagtgtgcgagaaatgaggtggccaagtaatttcctacctcggccatctttctcttatgcagacgctcgatgtaatcttttttctcccgatgtgtcttattctttagtaccgcactatcctccgatattcgcatagtgtgggccgtctcgcaaaccatcgttggatttacgtaaccgattgaggcccccgttctttgagcgtcatggaatgcttacaggcaccacgcgccgacaagattgatatccattttatccatcttaaagaatgcgtggaggtccttgaaagtgaaggcgaagtttgcgttaggtccgtccttgaaagcatcttccgggacatgcacagtaatcatcccgagacctaactcacttgccctcaagtacgactgatgcatcaacctcattggccatggaagttcacacatcaagttgaacggtaagaacggcttgccatattcatactccttaggcacttcatcggagctccaagattgcattttgttagcaagacctacaacgcttttctatgcattcgaatactgatcaggtccaactggctttactggaccccctcgacccttgaaagactgcaaaaccatccgcgtctcatactctgccattttctccttgttgtacgtggaaaccataatgggtatgagcttgcgggcttcacaggtatttggctgcccctttgatgtatctggctggggaggtggcacatgttcgtcaaggggtggagtaagatacgactgaggagtaggagacggctgctaaggtaggggagttggggagttaggtgtggcttgttgtggaggtggagaaggacctctaagtggtgatatttgtgggagtggagatccgggtggggtagtgcagatcggaggggacggcagtggcagcggtagtggaggcggcggcggtggaggaagcgaggcggcagcggcagcgaggcagggggcggacgttggcgccatgtgcatgccacgcagga

SEQ ID NO: 14231 - DNA, 161 bp, Oryza sativa
  Clone ID: PAT_MRT4530_20189C.1
tcgatcagataacgcttatcaacttgtgcacggacttgtgccggtacattcgtcgtgacatctgtaatcatctaggagagttccatgatcctcatagcgaacttgctacggaccccaaatttaagaatctaagagagtgggagaggcaacatgctgtggac

SEQ ID NO: 14232 - DNA, 754 bp, Oryza sativa
  unsure (1)..(754): unsure at all n locations
  Clone ID: PAT_MRT4530_2018C.1
tctgtntgntggccatncgcatatttgtgttggcattcatccgtcattcctttctcgcaatccgatctgagcgacgcatccagccaaggcgctactaaaatgaagggaaaagcaaggatggattcgatttanacattgaatcggacaaataaccacaataaaatccacttggagggaaccaggagattgcaatccaatgaaatcgatcaatcacctggtactttgcatcggcactgggcatcgttcccctaccggatttctgatcacgacatgcatgctcacgcacaccatgaggtgtctgacctcgtggcgcgcgacagctgccacctgctcgtcgcccacgcctcctccatgccgctccggcccccatgtcctcgtcgtcgaagcgtgccacacacgacatcacgagcagtggcganactcgccatcagancacctacctcagtcgtcgctgctgccgccacaccacgcgtcgtccgcactggtgtntctggctcaaatgttcaggcatgcanatctaaaacaantnttgcttaagctttgttttctccgaatganatcaaattgatcaaagctttgggtcngatangatcctccatttttccatctcctatatggcttccatgaatatattcncttgttttggaaaatcctaacattntntctgtttnccattttccnactacccnaacanttttnctnattcctnggttgcttntcctttnnaantnacnntnnaaantnnccttttttt

SEQ ID NO: 14233 - DNA, 765 bp, Oryza sativa
  Clone ID: PAT_MRT4530_20190C.1
atgtccgtcgctgacgagcggctgcgggatgcggagcggcggggagactggagaggagtggatacgatgcgggtgcggcggacggcgcgggtgggtggcggagcaggcgagcgagccgggtgggcgagctccggcggcggtggctcggcgtgtgccgcggcggggatgaggaggccggcggcggggtggccttggccgggtgccttggtggacttggtgggtggcgcggtggccggacctggggtggtgggcgccgcggcgggggccggggtggcgggggtggtcggcgcggcggcgggcatcttcttggaggagaccggcgacgtggtggtcggcgccgccacgggggtgggcggagatggcggatttgggcgggaggaggtcgccggcgacggcgaggtcaatggaggagccggttgcatgttcaacgtcgtgccggggctcgacgggaagcccggctccgtctcgctcgagctcgggagcaagcctgggtgcttcttggtcgccggcgccagcacgaaggtgcaggttggttgcaggagccgcggcagcgacggaaagagtatatacctcttgatgcagttgagtatactggaggagaccggcgacggcgaggtcaatggaggaggcggtggcatgggcaccgacgcccagctcatctccgccgggcgccgcagccagggccacagccgccggagccgttccaccgtcgctagagaggagaggggagagagagttgaagagagggagatggggagagaatga

SEQ ID NO: 14234 - DNA, 461 bp, Oryza sativa
  Clone ID: PAT_MRT4530_20191C.1
ccggccgggaaaaaaatcatccttaacacaattcaaaccttatggttgcagcatagtattagaatcctacaaaaatgaacatctttttcggatttgctcttcttggtattgttgcatgcaacggttctgcacagtttgatgctcttaggcacagttctacacgatatcaactacgatccgatctcctgctacagcaacaagcgctcagcccatggagtgagctcgtaaggcgacagcatagcatactggcaacccccttctggcgaccagctacgtttcaattgataaacaaccaattcatgaaacaacagtgttgccgacagctcaggctgctagcacaacaatctcactaccagagaattaatatcattcaggagattgtgcagcaactacagctgcagcaaggcggaggtggctactttgatcggactccagctcaaagctcaagatttgctgggctt

SEQ ID NO: 14235 - DNA, 627 bp, Oryza sativa
  Clone ID: PAT_MRT4530_20192C.1
atggaggctgaccttactcgcaaagataagataacgcggacggcgcaggtgggcggtggagcaggcgagcgaggcaggtgggcgagctccggcggcggcggctcggcgtgcgccgcggcggggatgaggaggccggcggcggggtggccttggccgggtgccttggtggacttggcgggtggcgcggtggccggacctggggtggtgggcgccgcggcgggggccggggtggagggggtggtcggcgcggcggcgagcgtcttcttggaggagaccggcggcgtggtggtcgccgccgccgcgggggtgggcggagatggcggatttgggcgggaggcccgatttgggcgggaggtcgccggcgacggtgaggtcaatggaggaggcggtggcatgttcaacgtcgtgccggggctcgacgggaagcccggctccgtctcgctcgagctcgggagcaagcctgggtgcttcttggtcgccggcgccggcgcgaaggtgcaggttggttgcaggagccgcggcagcgacggaaagagtatatacctcttgatgcagttgagtatactggaggagaccggcgacggcgaggtcaatggaggaggcggtggcatgggcaccgacgcctag

SEQ ID NO: 14236 - DNA, 775 bp, Oryza sativa
  unsure (1)..(775): unsure at all n locations
  Clone ID: PAT_MRT4530_20193C.1
actcctataggggcgatngggatcantcgagccggccgggctctccccacctcgcgttccctcccctctcccctccggccatggcgtccaagcggatcctcaaggagctcaaggacctgcagaaggatcccccaacctcctgcagcgctggccctgtgggagaagatatgttccactggcaagctacgattatgggtccagcagatagtccatatgcaggtggcgtcttcttggtttctattcacttccctccagactatccgttcaaaccgcccaaggttgcatttaagacaaaggttttccacccaaacatcaacagtaacggaagcatctgccttgatatcctgaaggaacagtggagccctgcattgacagtgtcaaaggtactcctctcaatttgttctctactgacggacccaaacccagacgacccgctagttccggagattgcgcacatgtacaagactgatcgggccaaatatgaatcaactgcgaggggctggacccagaaatatgcaatgggctgaacgacgtaggccgatagtgttctctagcgatatatgttatcttgttgatctagtgttcatgtcctgctacatgcctacatggggtgtaatttcttctgtcactgaatttatgtcaaattctcgattgatggtagaagttattgagaaaaatttcaattacctgcaataaaaaaaaaattctcaggaaaaaaaaaaaaaaaaaaaaaaaaaaaaaaaaaaaaaaaataaataaatcggcagcaaatggt

SEQ ID NO: 14237 - DNA, 1156 bp, Oryza sativa
  Clone ID: PAT_MRT4530_20194C.1
cagaaacgaaacaaaaagccccaccacctaaacctcctcgatccgaccgagactcctccatttcagcggcgcacgcggagagcacgcgacgcgagttcgtcgacgaacaaggctagtgcagtagttgttgctgcggagatggcggcgaacctggaggacgtgccgtcgatggagctgatgacggagctgctccgccgcatgaagtgcagctccaagcccgacaagcgcgtcatcctcgtcggtccacctggctgcggaaagggaacacagtcaccgctgattaaggatgaattttgcttgtgccatttagccactggtgatatgttgagggctgcagtggctgctaaaactccacttgggattaaggctaaagaagctatggacaagggagagcttgtttctgatgacttggttgttgggattattgatgaagccatgaagaaaacttcatgccagaaaggttttatccttgatggtttccctagaactgttgttcaagcacagaagcttgatgaaatgttggccaaacaaggtactaagattgacaaggttctaaattttgcaattgatgatgcaatactggaagaacgaattaccggtcgttggatccacccatcaagtggtagatcttatcatacaaaatttgctcctcctaagactcctggacttgatgatgttactggagaacccttaattcaaaggaaagatgacacagctgcagtattgaagtcaaggcttgaagccttccacgtacaaactaagcctgtgattgactactacaccaagaagggcatagtcgcaaatctgcatgccgaaaaaccaccaaaggaagtgactgttgaggtccagaaagccctatcataaactgccagttcttcagcctataaacatgacatgtgccgaaaaccccttacactgggttttctagatgtttaaactgctgccaacaccatgtggttttcattttgatttgctgtatggcgcaattgctccattttatcacagttttcgcttcacagtctgaaatttgtcaaaataatttgttggaatgaggaaagaagttttgtataccaacaccgatataattacatcaagtcaatcttgacagggtattccttctgttcatcttaattttgaaattgatgcctttgtggtg

SEQ ID NO: 14238 - DNA, 139 bp, Oryza sativa
  Clone ID: PAT_MRT4530_20195C.1
agatgcgatgacgttacaggaggctagcattatccaatctgctgctttgactgcatggcgtgctttatacgacaactgcagatcggctgcaatgcctcccgtcaaggagttgaggaagagccacagcaacacctcctaa

SEQ ID NO: 14239 - DNA, 550 bp, Oryza sativa
  Clone ID: PAT_MRT4530_20196C.1
aaaaaaatagcagggtttatccatacccatacgtatgcccgtcacatcctaatcaacatcagcttgggaaattaaccttgcccagccctttagatcccattatcaaataatcctagggtttatacaatttttgcagggaccccaatgctttcgtacaaaatcaaggggtagggtaggggcccagtaattgatatcccccctaaatactctgcttaattaccccctaattgcaaattaagggggaattaatccctcaaagctaaggccgggagcatgtaatcccttcagctggaccagctctggagcttggacaccaaactggaggcggcaaaggcggtggaaccaccgacaacccaggcgaacgcgaccaccgcctggacggggacctcccatgggtacccccccgggaccaggtaaaccaccggggggcccggggggagcaacaacaacgcgacccccaacaacgcgcccggggtgccccggtcggttgcccccaacagcacctccagttcctccgccttggacaacaggcccaaccgtttcaccccca

SEQ ID NO: 14240 - DNA, 286 bp, Oryza sativa
  Clone ID: PAT_MRT4530_20197C.1
cggcacgaggctctctccgccccagcctcatcttcatatctagatagacctcatcttctccagccaccaccgcctccctccccaccggtggtggcggcgggaagacagcggctcggctgagcccggcgggtagggcaacgatttagtatgggaggagcagcggcgacttctctacacgacggcgttcggaggcggatctagcagcggcgactccatccagcggtggatccgccgcctcctagtcctagctctctctcccccgctcctccctcctccccttcccccg

SEQ ID NO: 14241 - DNA, 548 bp, Oryza sativa
  unsure (1)..(548): unsure at all n locations
  Clone ID: PAT_MRT4530_20198C.1
attacaacttgcttggaaaaggaggttttggaaaagtttacaagggagttttggagggtggcatagaagttgctgtcaagaggcttagcaagggttcagggcaaggtgttgaggagttcagaaatgaagtggttctgattgctaaattacaacacagaaacttggttaggcttcttggttgctgcattcatgaagacgaaaagttactcatctacgaatacttaccaaacagaagcttggatgccttcctttttgatgctaacagaaaaaatacgcttgactggccgacaaggttcaagataattaaaggagtagcaagaggtcttctttatcttcaccaggattcaagattaacaataatccatagagatctaaagacaagcaacattttgttggacacagaaatgagtcctaaaatatcagattttcgcatggcaaggatctttggtggaaatgagcaacaagctaataccaaccnggttgtcggcacatatggttacatgtctcctgaatatgctttttgatggctattttccgcaagtctgaca

SEQ ID NO: 14242 - DNA, 2520 bp, Oryza sativa
  Clone ID: PAT_MRT4530_20199C.1
atggcggcttaccttgcagtgtttgtgttcctgcttcttgtttgttcgtcatgcagagctgatgacaagcttacacctgcaaggccgctctcccccggcgacgagctcatctccagtggcggcgtcttcgctctcggcttcttctccctgacgaactcaacctcggacttgtacgtcggcgtatggtacaaccagatccccgtgcacacctacgtgtgggtcgccaaccgcaacaccccgatcaagaagagctcctccgtgaagctggtcttgaccaacgattccgacctcgtgctgtccgactccaatggtggcggcggcggcggcgccgtctggacgacggcgaattcgaacaacgtcgccgccgccggtggtggtgctggagcgacggctgtgctgctcgactccggcaacttcgtcgtgcggctgccgaacgggtctgaggtatggcggagcttcgatcacccgacggacaccatcgtgcccaacgtgagtttctcgctgagctacatggccaacagcttagaccgcatcgtcgcgtggagggggcccaacgacccgtccgccggcgacttcaccatgggcggcgactccagctcggacctccagatcgtcgtctggaacgggacgaggccgtactggcgacgagcggcgtggaccggcgcgtccatcttcggcgtgatccagaccaacaccagcttcaagctgtatcagacgatcgacggcgacatggccgacggctactccttcaagctgaccgtcgccgacggctcgccgccgatgcgcatgacgctggactacaccggcgagctcaccttccagagctgggacggcaacacgtcgtcgtggaccgtcttctcccggttccccaccggctgtgacaagtacgcctcgtgcgggcccttcggctactgcgacggcatcggcgccacggcgacttccgacgtgcaagtgcctcgacggcttcgtccccgtcgacagcagccacgacgtctcgagaggttgccggaggaaggaggaggaggtggaatgcgtcgcaggcggcggcggcgatggcttcttgaccatgccgagcatgaggacaccggacaagttcttgtacctaataacaagacgaaaagtactgttctgaagattgtactgccggttgcggctggtcttctgctgatacttggaggcatatgtcttgtacgcaaatcaagagaagcgttcctttcaggcaatcaaccaagcaagaaagttcagagcaaatatccatttcaacacatgaatgattcaaacgaagttgggagcgaaaatgtagaactttcttctgttgacttggattctgtcctcactgcaacaaacaatttctccgattacaacttgcttggaaaaggaggttttggaaaagtttacaagggagttttggagggtggcatagaagttgctgtcaagaggcttagcaagggttcagggcaaggtgttgaggagttcagaaatgaagtggttctgattgctaaattacaacacagaaacttggttaggcttcttggttgctgcattcatgaagacgaaaagttactcatctacgaatacttaccaaacagaagcttggatgccttcctttttgggatattgatgatgtctgacaataaatttcattccacattgatcttggaagatgctaacagaaaaaacacgcttgactggccgacaaggttcaagataattaaaggagtagcaagaggtcttctttatcttcaccaggattcaagattaacaataatccatagagatctaaagacaagcaacattttgttggacacagaaatgagtcctaaaatatcagatttcggcatggcaaggatctttggtggaaatgagcaacaagctaataccaccagggttgtcggcacatatggttacatgtctcctgaatatgctttggatggctatttttccgtcaagtctgacacctatagttttggtgtcatactgttggaagttgtgagtggcttaaagatcagttcagcccatctcaaagtggactgttcaaaccttatagcctatgcatggagtttatggaaagatggaaatgcaagggatttcgtagactcatccattgtggagagctgtccacttcatgaagttctacgatgtatacatttaggactcctttgcattcaagatcaaccaagtgctaggccactgatgtcatccattgtgttcatgctggagaacgaaactgccgtgcttcctgctccaaaggagcctatatatttcacaaggagggagtacgggacagacgaagacacgagagatagcatgagatcaagatctctgaaccacatgagtaaaacagcagaagatgggcgttaaatggttaattccgctgtacagatccccattttttaaaactgttattcccattgaacaataccattacattgtttgatttaaaaaggttctactggatactacattattcaaaaaaaaaaaaaaaaaaaaaaaaaaaaaaaggagggcctgcagcccggg

SEQ ID NO: 14243 - DNA, 1373 bp, Oryza sativa
  Clone ID: PAT_MRT4530_2019C.1
gctgtagccaagcggcggccgaggcggcagccgtggcggatgcagcagccaaggcggcggcggcggcagcggctgaggactccgctgcggcgacgcggacccagcttgggcggctcgccttggtggtggtgggcttcgcgttcgcgctcggcgcggtgtggctggccagcgcgttcaggatcgccagcgccgtggaccactgcctcgcggtgaaggtccactggttggccgaccccatgtgccgcgacacggtggtgttcgcggctcccctggccgtcgcctcgctgatcctcatggccgcggccgtgcaccgacaggtcaaggccgaggcggaggccggcgcccagatccgcgaggctgctggtgtaacccacgacgtcctccctgatcccgagctgcagccgccactgccgccgccaccgcagccggcggttgcgctggcctctggactagagcggcgcctcctcctgtgtggttcagatgaagtagtcatgctcaccatcatctccatttatctatgctgtgtcaccttcattcttgtgggtatgctgctccgaatgtttggcgctctcttccttgtgtactacccaggtgatgagctcgagattgctcttctcatgggggttggttcaggattcaagaacgttggctacttgtggctggctgtggggcatttctttctcatcattccttacgctgtgctcaggctgaggaggttcctcaaccagttcgtgtcgatcttcgtgatgcacgttgccaacagagtattggatcagcggcagtatcggatcgctgatctaaatgctgccgcattccagtttgtcaggcttctggtcattctgagtagctgccgatgctgccatcgccactgcctcctcctcgcggattcccccgcgtactgtgcctgcgccaagagcaactgcacgatagccgtcgccttcctggccatgctgggcatggccgtgtgcgcggaggtcaaggccgacgcggaggaagaagcccagatcatccgcgtggctgcgggtttatgccgccccgacgtcgccctgcccgccggaccagaccacctcggccgccgtggttgcgatgcagcagtcgtgttcttcatcagcgctatgtacccgtactgcgtcgcattcattctgatgggtaagcttcttcgaacgattggcgttttcggccgtgtcccaggtggtggtggtgatgaggggattactcgtctcatgaaccttggttcggacttcgagaacatgggctacctgtggctggctctcgggcatttctttcttgtcgctccttacgcggcgctcagactgaggaggtttatcaaggaggaggagctggttaccatgcatgaagttgagcagctgtag

SEQ ID NO: 14244 - DNA, 246 bp, Oryza sativa
  Clone ID: PAT_MRT4530_201C.1
atggcggtggtccagttgggtcggggtgagacctgtcgggaggtgggcccggataggcggtggcagaggccggaagtccggaacgccatcaagacgttgcatgggttgaagccgtttccacagctgaacggctgggttgtgaagcacagctcaaacagctgtgaaaacgggctaccgaacatgccctttatctacctccgtggtcgtgtgtccccgagcattagaggccggcgtgctgccttttga

SEQ ID NO: 14245 - DNA, 405 bp, Oryza sativa
  Clone ID: PAT_MRT4530_20200C.1
atggtggtggaggggaatggccgcgccgactcgatcaccattggcgtctgcgtcatggagaagaaggtgttctgctctcctatggagcagattcttgagaggctccgtgcatttggagaattcgagattataatatttggggataaagttattctcgaggatcctattgagatgtatgtaatgacaactcaggttattgataacttaatcattgttcttttcaagtataggtttatccacactacttctgtagtatttttttatggcataaatgtagtgcatgcttggctttggccaaaatgcgattgcttgattgccttctattcatctggtttccctcttaaaaaagctgaggcttatgctgctttacgaagtataccagatatctcactggacatgagttga

SEQ ID NO: 14246 - DNA, 1068 bp, Oryza sativa
  unsure (1)..(1068): unsure at all n locations
  Clone ID: PAT_MRT4530_20201C.1
atgtgcgtgcagggcgactccggcctggtcctcaccaccgaccccaagccgcggctccggtggacggtggagctccacgagcgcttcgtcgacgccgtcacccagctcggcggccccgacaaggcgacgcccaagacgatcatgagggtgatgggagtgaagggcctcaccctctaccacctcaagagccatctccagaaattcaggttagggaagcaaccgcacaaggagttcagcgagcactcagttaaggaagccgcggcaatggagatgcaaagaaacgcagcatcttcttcaggcataatgggcagaagcatgaaccatgaccgcaacgtgaacgatgccatcagaatgcagatggaggtgcaaagaaggctacatgagcaactagaggtgcagaagcatctgcagatgaggatcgaagcgcaggggaagtacatgcagtccatcctggagaaagcctatcagacgctcgccgccggcgatgtcgcggcggcggtggcgtgcggcccggcggggtacaaatccctaggcaaccaccaggcggcggtgctcgacgtgtgctccatgggcttcccttccctgcaagacctccacatgtacggcggcgccggcggcggccacctcgacctgcagcagcagcagccgccggcgtcgacgatggagagcttcttcgcctgcggcgacggcggcggctcgctggggaagacggcggcgaagacgaggcattacggcggcgccgggaagagcccgatgatgtggggcgtcgacgacgacgacgacgacgacgacccggccgggaagtgcggcggcggcggccatcatcagctgcagatgncncccccgccgatgatggacggcggcatcgacgtcatggactccctcgccgccgacgtctacgagacgaagccgatcatgtccggcgactcgacggggagcaagggcggcggctacgacgtcgcggcggcggcgtcgaagctggagaggccgtcgccgcggcggccgccgcagctggggagcccgtcggtgatggccggagctcagacgaggaacctatcctacgggtaa

SEQ ID NO: 14247 - DNA, 449 bp, Oryza sativa
  Clone ID: PAT_MRT4530_20202C.1
tatatggagtgacagaaggggacattggaaaatattttttttaactcacgagcaaatgtatcttttgatataattactgacaaaaataaacttatgtataatgtttaaaagtattattcataccttgatttgtttatatatgtagattttgcaatccatgggatgatatacaatgacataatttatattttcaaccttttccataatcttcatgactatttagaaggcatgcaaataatcaacaataatgtttcatttccatttctcataatttgaaggaaaattacaaagtaaataatgaattcagtcgaggaacgtcatggaaattgcatgtaaattaattagggtgtataagaaaaatgtcatattaataaaagaaatggcctggccattattctaacagttatcttatatagattgtagtatcgtgaccactcaacgttaaatca

SEQ ID NO: 14248 - DNA, 1773 bp, Oryza sativa
  Clone ID: PAT_MRT4530_20203C.1
atggcgacccgagagcacgagctccgtcccgagcaagagcggctcggagaggatagggaggagtacgaggatggggaggaggaggaggaggagggggaggaggggtgggatgactgggagtcggacggcgacgacgcgggcggcggcggcggcggcggcgggctcctctgcctgttctgcagcgcgcggttcgactccgagagctcgctcttctcgcactgcgcctccgagcaccggtttgatttctacagggtcgtgaaggagacggggatggatttctacgggtgcatcaagctcatcaacttcgttcggtccaaggtggcggagaataaatgttggagctgtgggcaagttttctctagcaacagcgaactatgcggccatttgcatgcattagagattccccaactagagggaaaggttccatggggtgatgatgtatacttaaaaccattcttggaggatgattctcttttgcacagtttgtccgtctttgatgatgatgacgaggacgactgtggaatgccaatggaaaagggagggtgttcagcaggcaatgggagtttagctgaaacatgtgagagcaatctgaaatctattatcaatgatggttctgatgtcattgatagatttgagagaacatgtactattgagagtacagatggggagtgcagtgggtctcttgctcaggagccaagtgacaagcagttaaaaattgcacgtgctagtgctgctgctaggggaattaaaagtgtggatgagagctacttcgggtcgtatagttcatttggcatccatagagagatgcttggtgacaaagtaagaacagaagcttacagagatgcccttttaggcaatcctagcctcatgaatggtgcaactgtgctcgatgttggttgtggcacgggaattctaagtctttttgcagctaaggctggtgcttctagagttattgctgttgacgggagtgcaaagatggtttctgtcgctactgaagttgcaaaaagtaatggttttctgtacgatgaaaatatggagatgcaacaaaagcgagatactcaagtgataactgttgttcataccaaggctgaagagctaaaccataaaatacaagttccatcgaataaatttgatgttttggtgagcgaatggatgggatattgcctactctatgaatccatgctcagttcagttctatatgcacgcgatcattttctaaaacctggaggtgctattctcccagatactgcaacaatttttggtgctggatttgggaaaggtggaacaagcttgccattttgggaaaatgtgtatggctttgatatgtcatgtattggcaaagaagtgacagggaattcagctagatttcctgttgttgatatattggcttctgaagatattgtgacagagacagctgttctcaattcctttgatctggcaactatgaaggaaaatgaaatggattttacttcaagctttgagctgaggctcagtgaaagtggtgtatcacaatctggagtaacctggtgctatggcattatattatggtttgacactggctttacgaaccgattctgcaaggagaagccagtcaacctctccacctctcctttctccacaccgactcactggtctcaaactatcttcacctttgaagagcccatcgcaatggcaaaggaggaatcagccgttgtctcatctgcgtcagttggcacagatgagtgccccagctgtgatgatcagatcccgcatcagcattgtgagggcctctga

SEQ ID NO: 14249 - DNA, 464 bp, Oryza sativa
  Clone ID: PAT_MRT4530_20204C.1
aagtctagcgttgctgatatgcttaacaccggtagtccctggtggtccaattacgctggactatttctgaacagtttgttgatgagaaagtgcagtggatgcacgttgacatggctggccggtttggaactacaaaagcaagaagccaccggattcggcgtgtccacattggtggagtgggtcctcatcaactcgtcttagaacaaattcttgcccagtctgtttccatcatcatacaagctagggtagtgaaaagcacgccgattagtgtatttggcataagccaggttatgtcgtattgtagctttctgtttgtcaagcggaataacaccgttggagttgtggaccaattcatattgtaaaagctggccttttttcaaaaactcatgcgtgctttgttcttagtctgtggcgagcacagactactaataacacatatgtttcttgcacaaaaaaaaaaaaaa

SEQ ID NO: 14250 - DNA, 187 bp, Oryza sativa
  Clone ID: PAT_MRT4530_20205C.1
cgtcttcagctcagaagctctacacttctgaaaagggggaacaatagcaaggctgagtataaccaccatactcagcaaactacacaaacgatgcagacgtgcaaggggatacaaggatgtcttgtggctatttgcataaaggcggttgtaaaacattttattgagcaaaacagtaaaaactattgag

SEQ ID NO: 14251 - DNA, 1362 bp, Oryza sativa
  Clone ID: PAT_MRT4530_20206C.1
atgcggggggtttcggtggtgctcgtgctgatagcttgttggctgtgtggctgtccggtggccggcgaggcagccttcgccggcgacatccgtgtcgacctgacgcatgtcgacgccgggaaggagctgccgaagcgcgagctgatccggcgagccatgcagcggagcaaggcgagggcggcggcgctgtccgtggtgaggaacggcggcgggttctacggcagcatcgcgcaggcgagggagcgggagcgggagcctggcatggcggtgcgcgcgtcgggcgacctcgagtacgtgctcgacctcgccgtcggcacgccgccgcagcccatcacggcgctgctggacaccggcagcgacctcatctggacgcagtgcgacacgtgcacggcctgcctccggcagcccgacccgctcttctccccccggatgtcgtcgtcgtacgagcccatgcggtgcgccggccagctctgcggcgacatcctgcaccacagctgcgtgaggcccgacacctgcacctaccggtacagctacggcgacggcacgacgacgctggggtactatgccaccgagcggttcaccttcgcgtcgtcgtccggcgagacgcagtccgtgccgctcgggttcggctgcggcacgatgaacgtcggcagcctgaacaacgcctccgggatcgtcggcttcggccgcgacccgctgtcgctcgtgtcgcagctctccatccggcgattctcctactgcctcacgccgtacgccagcagcaggaagagcaccctccagttcgggtccctcgccgacgtcggcctctacgacgacgccacgggccccgtccagaccacgccgatcctgcagagcgcccagaacccgaccttctactacgtcgcgttcaccggcgtcacggtcggcgcgaggcggctgcggatcccggcgtcggcgttcgcgctgcgccccgacggctccggcggggtgatcatcgactccggcacggcgctcacgctgttcccggtggcggtgctcgccgaggtggtgcgcgccttccggtcgcagctgaggctgccgttcgccaacgggagcagccccgacgacggcgtgtgcttcgcggcgccggccgtggcggcgggcggcgggaggatggcgcggcaggtggcggtgccgaggatggtgttccacttccagggcgccgacctcgacctgccgcgggagaactacgtcctggaggatcaccggagggggcacctgtgcgtcctcctcggcgactccggcgacgacggcgcgacgatcggcaacttcgtgcagcaggacatgcgcgtggtgtacgacctggagcgggagacgttgtcgttcgccccggtggagtgctga

SEQ ID NO: 14252 - DNA, 380 bp, Oryza sativa
  Clone ID: PAT_MRT4530_20207C.1
ggctggaggagggagacgggcccgactggtgggccccacctgtcggcgaccccgagagaggacgcagcggggcggcctggctgggcctcggcctgcggccggcccagcagggagggggagaaagaaaggagggaatgggccggcggcccattcgaaaaaaaaaggaaaaagagaggaaaaagaaaaagaaaaagaaaaaggattttccctggaattaaaaatattgcttgctcaattttaattgttctagctgataagcaacttctccccttcgttccaaaattttgtatggtcccacgaagcgtggtgccagcttgcctttctgcctccagatcttcaaagcatgaaccactgctgccaattccaagtcatgagttgga

SEQ ID NO: 14253 - DNA, 642 bp, Oryza sativa
  Clone ID: PAT_MRT4530_20208C.1
ggcacgagggttaagtactccacgtaaagtagttatatgtaaacacattacaacaagttatttctaaaggtagcccatgagtccgaggcaaaaggctcatcacataggaggctgcacatttgaggaacatgagaacaatattctcgcggaaatcatttgtttagaatgtgatgaacataattgtatattcaattaaaaacgttagaaaagtggcttaaagttgtcatttcacattgattggttatgaaaataatggtatatataaatctttgtgccgatatcattgtttgccaacaatcaacgaacttgatagttacttttggtgttccttttggtatgtagcaaattggctacatattttacaacttactgtatcctttgctgagatgcacttgctttattttctctgtatacttgattgtctcattgtttattaatggatgccttcggtccacgtgacacaatatatatttcaaataaaaagccttctcgagtctaaattgattttgcagcgtaggagatagtttattgtttcgtgtagagtgtgtgagactccatgtagcttagcaggaacataaatttttcattgcgaaaaataactccgcatgtgtgattattatgtagtgtggtatgattgttgtc

SEQ ID NO: 14254 - DNA, 171 bp, Oryza sativa
  Clone ID: PAT_MRT4530_20209C.1
ggggcttcgcttcgctttgccccggaagagccgcaggatttcctgcgtaatccaagggaggaccggccgctggctgctaccgtgctcgctatgacctactccagctactcccaggctacaggccatgccatggacgagtgcccggaccggacgacagcgagcggcagctag

SEQ ID NO: 14255 - DNA, 2553 bp, Oryza sativa
  Clone ID: PAT_MRT4530_2020C.1
gggaacattaatgctatagtgcttggaaatatcaccaaataacaataacttccgtagtttctgtcactacagtttaggataactgctgaattgagggaaccataccctagttggtgcagttattcaataattatgcaaatttctgttgctcaaacacacggtgatgaagaaagcacattatgtaatgcacattcccctagtaagttcaattagcacattaacatcctatcgaccttcaagtatagtaactgttgcactgtcgaatatgctgcagtctggcttgcttgatgatgtgtctgtttccattagaattcttctagctgcaaagccaggctgtttaggagttggcaatgtggtagcatctgtcgtagctaacatcagaagcacctgagacatcaatggacggtcatctgggttctcttgcacacataggagtcccactctgatgcatttgagtacttcatctgagtcgaacgagccattcattgtttcatctgctaactccaagctttttccttcattccataagctccatgcatgtcccagaagatttaggtggtttgaatatgaataaacccctctgttcctcctgccactaattatttccagtagtaaaactccaaaactaaatacatctgatttgacagaaaagactccgtccattgcatattctggagacatatagccatatgtgccgaccacttttctggtattgatttctgtctcttcacttccaaacattcttgccatgccaaagtcagaaattttgggagtcatctccttgtcaagaagaacattacttgccttcaggtctctgtggatgattctgtatcttgaatcctcattcttgaattcgtcgagaccctgtacggatgttttggacaacgttttaactgctatttcttgtccatcctcgagcttacccttgtatactggtccgaagccaccctcaccgagcttgttgttgattgagaaaccatcagtagcagctgcaattgtccccagatcaaagattggaagttccagatcatcatcgtgatgactgcttccttcatagcggcgaccagtactgcgggaaccaccgctccatttgcttgatccggtttttcttgctctcttcttctttcttgtccagacgagaaaaccagcgagaactgacagaaacgtcaccgatgagatgctgacaacgatggcgattattacacgtgccttgttagatttgcttgttaaaccgagatctgcggcggcgaggcggacgaagaggtcctggccgaactccgggtacacgcgcaggtcggtgagcccggtcgtccacatgacgcagccggtgccggcgccgtggccgcggccgccaccgctcacgttggcgctcgcgtacgccgtgcaggagcagttcatgaggcacgccttccggcactgctccaggctgaggcccaggtccacgacgctccgctccgtgtcgggcaccttggcgtgctccacggcgacgaacccgtcggtgccgttctggcagtcgagcggcgtcgaccgcacgcaccccgcgcggccgtcacgcagcgcccacgcctcgggcgacttgggcgtgaagccgcggaggcaggagcagacgggcaggttgtttgtgtcgcacacgccgttggccccgcacggggacacctcgtcgcactggtccttgggcgcgtaccagtacaggttccacgtccccgccgcctccacccacgtcgaccgctgcagcagcccgtagctccccgtgctgttcagccccagcctcgatatgatcgacacgttgtgcacctggaagctgtacgtgacttccttggcgttgttgatgaagctgaaggtgaagccggagtaggtgacggtgtccgggacgccggtgaactggacgccgtcccaggggccggagcgccagaccttctcggcgccgttccagatgaacacctgggggtcgccggacgtgtccatggccatcacgacggggcccggcgaggggtcggaggggctcttccacgccgtcagcgtcctgttcctccccttcacgtagtcgacgcccagcctcatctccgggagcagcgtgtcggtcgggtagtcgaacccctgccacgccacgccaccgccagcgccgtccgcgatcaccaggtttccgctgtccatgatccgggccgtggggctcgccagcttggccgccggcgtgaccgaccacacaacggtcgagttccccgctacaatggcgagcgtgcccgtgggcgacacggagagcgtggcgtcggggttgtccgcgacgtcgccggggagcgggtcctcgcggttggcgacccagacgacggtgcggaccgagaccttgttgtaccagacgccgacgtaggtgctgttggcgcccggcggggtgaagaagccgagcacgaagttggcgtcgccgcccgagaccagcgtctcgttcgcggcgagcgggcggccgggcacgactgtgtccctggcacggcagctgcccgtgagcaccacgacgacgacgaagagcagcaggtagcagcagagcggggaggaggaggccat

SEQ ID NO: 14256 - DNA, 303 bp, Oryza sativa
  Clone ID: PAT_MRT4530_20210C.1
tcagagacgtcggtcgccggtgacacatctacctgttgccgcgacgtccttgcctcgccggccacaacctctatcccacgacgtctttacctggcgatgtgatgtcgccgagacgttggacgtcgtcaccttgccggtcgcagcctccctcggtgcccgcaaggcgtcactagctccagctacgtcgcaagccatctcgtcagagttgccggggacgtcgtcgagccgccgccttccagccgtccgatcgaccgaagccctataaatcgagtcatccagcgaggcctcctcttccgccgccat

SEQ ID NO: 14257 - DNA, 570 bp, Oryza sativa
  Clone ID: PAT_MRT4530_20211C.1
atgaagttaagcatgaaacgacccccgtacaaccgtacttctcgaatggacttctctttcccgggagcgccagaactcctctcactgctagaaacatggacgcctagagtgcatgaggatttaagttcatggagcgggtactgccaatgcgaggttatcgaaaagctttgtcgtgacgcgtctcatgtgttgggacgaggctgatatgttgggcagtcgcggagtgcgggtaaagtgtacatccactgcaatattttttttatgctgatggagccacttcctaagaggagggaaggtggacgtcctcagaaaaccatgacgactcaatggcgggaagctatccttgggatcacaatggatgaggtaggagttgaagcttcggaggatccctacgcttactaccaggagggtgatgaagacgatggcgctcaagaaggatcacagaggtggccgccagccaaaattgggctggattgggccggccccaggttcggccgaacctccctcatcgccgctggatgcagggtttcttctggacggtgtggattagcttccaatgatggttggagg

SEQ ID NO: 14258 - DNA, 2404 bp, Oryza sativa
  Clone ID: PAT_MRT4530_20212C.1
cccgggctgcaggaattcggcacgaggctcctttttcgtaactggctctctcctcctctgctccactgcgcccccgcctctgcgcccccggcccccctgcctccctgcctgcctgcctcctgctgctcctccccggatcgaaatcgatctctcctcttcctcctcctcctcctcttctccatctctccagattccacaagccacgcgggatatgctgctctgattgatctctctccacgtcgggtcaggtcttcacccttgagggaattgttttcattatcttatcaaaatggagaaaatgcaaaagacgcaatcaaggaaatccagctcatggtggtgggatagccatattagtccaaaaagttctaagtggctctccgataacttagaagtgatggagacacagataaaagaaacgctggagcttattgaggaaggagaaccctctgcagaaaaggctggggttcttattactcacgtacagaactttcagcagatgtatcgtgttcttgccaagcgatatggcaatgtgactggagaattgcgcaaaaatatcccatcatctctgcaatcatctgtctcctttggcatctcagaatcagattctgaggcacagtctccttcatcaccagagcgtgacttgcaagagaagatgtcacaaaagcaaaaaccgcgatcagattgctttgatgtttctattggctctggtatgagttctgacgtatccaagaaggggagtgatgggtcttcatcatcttcagaatctgatttagagcttgatgaggctaaagaagaaaatggcaatagcattttttatgccctaagtcaaaaaattattgagcttgaggatgagcttcatgaagtaaggggtaaacttgatgcttccgaggaaaagaacatgcgttgccattgtaattttggtgctaactcagaactgtctgaacatgaggaaaagcaacaggtttcagatgtggaaaccagtagccttcagaaggatcttgatgaagtcaaaagtgaaaaggaagcattggaagctgttgtattggtgaacaaagatgaaattgataggctgaaggaatcaatggtatcggcagccaagcagtttgaagttgaacttgcgcatcgtgatactgaaattgataagtgcaaacaggagcttgaggtactttcggagaagtatctgcatgatatatctgctcttgaggctgaaattggaaagctccagggagtcatcaaaacctttgaagacgactttgcaaaaatatcacaggagaaattgatgctcgaatctcgggttgaagagcttgagcagtcagttaacagctcaaattattcggtttctgagatggttaatctgcaagaactaatgaaggatacacaagcagaattagaaaaggtttcacaggagaaagaagtgctcagagaacgtgttcttgaatttgagcaacttttgggggactttgagaattcaggcatggaggttgcaaagctaccagaaaccatcaagaacttgggagcccagatagagggaacactacaggagaaatcagtactccaggacaggattaaggagctggagcaggctgtccatgattcattgcagaaccattcactggagaagtcctctctgagtgctgagctttcaaaattatctgaagccaatgcttctcttgaagccaagttggcatccgtggaggcagagctcaaacaagtttacgacgaaaaggctaatgaatccctcaacagcgagaaggaaatctccaggctgaatcaagaactggccaatgtcaaaaccgatctggaattgctgttatccgagaaatccctggtggacaacaaagtaaccactctactaaccgacatcacaactcgcgatgaaaagatgaagcagatggatgatcaactgaatcagcttcagcttgagcattccaagctaatggcacaggccgatcttgcccgcaagtccctgtcagaactgcatgctcgggtatgcgagctcgagaaagaggtagagatgcagaagcttgtgatctctgagagcgccgaggggaagcgcgaggcgatcaggcaactgtgcttctcactcgagcactaccgcagcggctaccaggagctgcggcagctgctgcatgaccagaagagaccactggtgatggcaacatgaaccaaagctagtgatcctgatgccatccttctcggatgctttgtggatgttttctgtcaatggcaatgcatgctttcctgtgtctctctctctctctcttctaccagtagcttgctgctgctctataacttgtgcactgttgcttctccggctactaagaattctgtgttgtgtcttgcaatgtgatgggataatcaatatcggttcttgtgtactctaaaaaaaaaaaaaaacaaaaaa

SEQ ID NO: 14259 - DNA, 656 bp, Oryza sativa
  Clone ID: PAT_MRT4530_20213C.1
cccgtcagcggcgcgcgcgcggggagaggccggatgggccgcggggagaggagagggagggggagggagatgggccgagccggcccaagtgggagaggcagggaaaggggactttttagacggaggcagtatccctgcatagatggttcaccccgagtgaggcaggtgcgctacggtgggacagcgtgaagtaaggcgaaggcgtgccctacatcggtgtcgccattggtaggactgccatgagtgtatgagagagagaatttaacttgaaccataatttaatatgtgtgtgagacttctctttcccgggagcgccagaactcctctcactgctagaaacatggacgcctagagtgcatgaggatttaagttcatggagcgggtactgccaatgcgaggttatcgaaaagctttgccgtgacgcgtctcatgtgttgggacgaggctcatgtgttgggcagtcgcggagtgcgggtaaagtgtacatccactgcagtatccagggattggtacggataaacacagaagatttccgatttccgaaatcgggggtctacagcttgcgaggacggagggcggacggggtcgcccttgaccttcaaaaggagaagagggagttagggaggggaggaccgatgcggggtgactggaaatga

SEQ ID NO: 14260 - DNA, 407 bp, Oryza sativa
  unsure (1)..(407): unsure at all n locations
  Clone ID: PAT_MRT4530_20214C.1
cccaggttaagggaaaaaggggcttccccgatgggcgccgtcgcagccgnaagtccggggcttctttcgtggggcattcaacaaggggcccacggtcggtcaccaagcgccgagctggccggccttcgccccgtcccgaccgcaagggggaaaatccaccaagaagggtgaccttttgtcaggaactttgatcagggaggttgctgggatttgctccctatgagaagcgtatcacttgagcttctcaaagttggcaaggacaagcgtgcacttgaaggtgggcaaagagaaaagcttggcacccacaagagggcccaagaaagaagagagaggagatgggctgggtgtcctcaggaagatgagggtctgggtgggcgggtcacgcttcacacccgagaagaagaaaa

SEQ ID NO: 14261 - DNA, 811 bp, Oryza sativa
  Clone ID: PAT_MRT4530_20215C.1
atgaagttaagcatgaaacgacccccgtacaaccgcacttctcgtatggagtgcatgaggatgtaaagttcatggagcgggtactgccaatgcgaggttatcgaaaagctttgccgtgacacgtctcatgtgttgagacgaggctcatctgttgggcagtcacggagtgcgggtaaagtgtacatccactgcagtgagagtgttgaagagaagcccttgtcgggattggtacggataaacacagatgatttccgatttccaaaatcgggggtccacacatcagttcccgccgacgtccaccacctcggcgtcggcgagctcgccgatctccggcgggatgcacccgtcaaggcggttgttgaggagcaggagctcgttgagcgtccccttcatccgcccgacgctgcgcgggatgcagccgacgaagtggttgttggcgagcaccaccaccgtcgccgtcgagccgccgatctcggcggtggaggtacccggcgatgtcgccgccgttgaggtcgacgccggcgacgacggtgacggccgggtcgtcgagcgccgccgcgcacgtaatgccgaagtaggagcagacatcggcgccgacccagccgcgaaggtgacgtcgacgtggatgtcgaactcgaagtcgtcggggagctcgccgttgccgccgccctccttgagggacagcagctgccgccccgcgcatgtacgacgcctcggcgtggagagcgccgcggcggtgaccacggtcaccgggatgcagggcgacggcggcggcggccacggcgaggcggcgcgcggcggcggcggcggc

SEQ ID NO: 14262 - DNA, 604 bp, Oryza sativa
  Clone ID: PAT_MRT4530_20216C.1
atgaagttaagcatgaaacgaccccccgtacaaccgtacttctcgaatggacttctctttccccgggagcgccagaactcctctcactgctagaaacatggacgcctagagtgcatgaggatttaagttcatggagcgggtactgccaatgcgaggttatcgaaaagctttgccgtgacgtgtctcatgtgttgggacgaggctcatgtgttgggtagtcgcggagtgcgggtaaagtgtacatccactgcagtgtgagtaaaccaaatctaccacttcctaagaggcgggaatgtggacgtcctcagaaaaccataacgactcaatggcgggaagctatccttgggatcacaatggatggtggacagaactgtcgttgtctaatgtgaacattgaggtaggagttgaagcttcggaggatccctacgcttactaccaggagggtgatgaagtcgatggcgctcaagaaggatcacagaggtggccgccagccaaaattgggctggattgggccggccccaggttcggccgaacctccctcatcgccgctggatgcagggtttcttctggacggtgtggattagcttccaatgatggttggagg

SEQ ID NO: 14263 - DNA, 412 bp, Oryza sativa
  unsure (1)..(412): unsure at all n locations
  Clone ID: PAT_MRT4530_20217C.1
gagaaagaccctctgggggggtggccttagccttcaaaacgggttttataagaaacttttacaggccatagcagcagcggaggggggggcaatttatttatttatttatttaggtattctttatccgctttgccaacttaagagggttccgccccattataaaccccttgggggcccttggtttggggggggggggatgccccgaacccatcccccctggtttgccggggcccctgagccccttctcttgggatgcgatatgcatttgcttgaacatnaggggggagagcccgggaaaaggaaccctctcctgcaaggggggtccccctaaagttaagggttggcttggctgccatgggaacccatccttttctttgggccttcttttccactccctaggggggggggccaa

SEQ ID NO: 14264 - DNA, 2124 bp, Oryza sativa
  Clone ID: PAT_MRT4530_20218C.1
cgtgtggggggttttttttttgacccaaaaatgccgctttcatgtcttcttacaattacatcgtgttaaccacatttcctctttgtacacattgcacacactcctcttctccagggtacacatatatacatgcatttatacttgtaaatgcattttgtacctctttctttcatgggagtacgtgagattgtgagaaaaaagaggaaggcattgctaatgatcactgctgctgcaccttgtcgttgtcatggatgtgccgccggtgttgtcacgataacttaatatccttcaaattggggcggcggcggtgatgcataggagtgacttaagatcggcggtagaatgattagctcctcaggggctggaggaggcaacgatggtgccggtggcggaggcgatgggacgactggtggcggtggggataagacgggtggtggtggggaatgtactggtggaggcggtgagatcattggagaaggaggtgggggtgaatgtactggtggaggtggagaacttacaggcgccggtgggggaggagactttacaggaggaggcggtgagcttactggtgcaggtggtggtggggattccataggtggaggtggagaatggtaccggtggcagcgggaatttgaccggtggaggtgagctcttaggaggctctatgtatggtgatggtgacggtgtctcctcctttgggctgatcaacggcggaggcgccagagtgggcggcgtgggtgtaatcttcttcggagccggcttcgacgacgacggcagcgccgagcaggtgttcgtccggcagtcgatggggcgcttgagcaggggcgcgcactcgagcgacgtcttctgctccggtcgcccgccgccgaggcagttgcccttgtcgtcgagctcgaccatggcggtctccgccgggacgcacgctggcggctccacgctgaagtagttgtacgcgaagctgaagttggcgagcgacgggagcttgcagacgggctccggcacggcgccggcgagcaggttcctcgacacgtcgagctgctcgagcttgcccatcttggcgagctcctccggcagcaagccgacgagcatgttcccgccgacgtccaccacctcggcgtcggcgagctcgccgatctccggcgggatgcacccgtcaaggcggttgttgaggagcaggagctcgttgagcgtccccttcatccgcccgacgctgcgcgggatgcagccgacgaagtggttgttggcgagcaccaccaccgtcgccgtcgagccgccgatgctgtccgggatgcgtccgacgaagcggttgctgttgaggaagatggcgtcgaggcccttgtcgaacagctgcggcggcagctcgccctcgaagtcgttgaacctgatgtcgaggtacttgagcacggccatgtcgagcaccacctccgggaacccgccgacgagggctctgttgctgacgtcgagctcgtgcagcagcgccaccgcgagaagctcttggggatgacgccgcagaagcggttggagttgacgtggaacagcgcgaggtcggtcatgaggccgagctcggcggtggaggtacccggcgatgtcgccgccgttgaggtcgacgccggcgacgacggtgacggccgggtcgtcgagcgccgccgcgcacgtaatgccgaagtaggagcagacatcggcgccgacccagccgccggtgaagttcttggggtcggagtagatcgcctgccggagcgcctgcaggccgacgtaggcgcggcggaggcggtcgttggcgaaggtgacgtcgacgtggatgtcgaactcgaagtcgtcggggagctcgccgttgccgccgccctccttgagggacagcagctgccgccccgcgcatgtacgacgcctcggcgtggagagcgccgcggcggtgaccacggtcaccgggatgcagggcgacggcggcggcggccacggcgaggcggcgcgcggcggcggcggcggcctccatggctggaggtgggggaggagagggccggggggtgggggaggaggcacgaggtgggccaccaccggcgacggtgcctgcctgcctatatggagggtggtgagagaggggagatatagggcagcggcggtggccat

SEQ ID NO: 14265 - DNA, 1387 bp, Oryza sativa
  Clone ID: PAT_MRT4530_20219C.1
ggtccccgggcggcggggtttcgccgcgtgcgccgcggccgccgcgccggcgcgggcggcctgcctcctcgtggctcggcccggaccccttgcccccgcccgccggcgccgccgcctccccgctcgtccgtcgcctccgatctccctctcgcacatgcgtggttcggtggttgggccggcatctgatgccgccgttgaggaagcgcggtttcccggggtcagagcggctcatccgtcgctacaagcgcccggcgcttccctggaagattaatgatatgcgtgtcacagaaacagggtcctttcagtatttactggagtatcttgattacccagacgaagagaaaacatggactgaagtctttgaaaagaacccagcgtatggcaaaaggaactcaaatgtggttagagaaagagaatgcatgcttcgtccttcctatcctgagttgtattggggggatcaagttcccgagcaatttccaaagagtaatgtgatagtatctgtttgtgataccccgaaagtaggtgatctggttgagtggttgtctgaaggttcttactggactgcgaaagttactaagttacttagtgaagatatggttaaggtacagctgttgaaacctcctataggtgaaggggggagttatactgcttactgcaaggacatcaggcctgctcttgattggtgcctggagaaaggttggactgtacctctttcacaggcaaatggacggtgctggcatgctgctcgtctgattcatcataaatctggtacagctgatcttttgtggattcaatatggctacacagagatgagtggttcagatgaagagtcgacatctgatgacgatgaagaggaagcgcagaaatccttgaaaagagcatcaaattcgtctcaagaagctccaggctcaaacctggaaattacatcagatacaacctccagttctaggattaacagtcagacagctaccattgccacaaccaaggggatttcgagatccagcccggtgatagacatgtccaatagcacaaatgtttcagagctggataggatctcaaacagtactatagccgctgagtctcttccaaagatctgaactggctaccccctcaaccatttgtggagaaggatccatcacgagacacaacactatataaatataagaaatataatgatgttggagtcttggagatacatcagcattcagccagtacttcatcccatgaaatggatatatgctttacacgttgttgttttcatgactgaagtgctacgttggcaggctgcaatgtttgcacgttgccgctacttttagggacagttcatttgactgatcaatgagatttatacagctctgaaatttcagacaaaaaaaaaaaaaaaaaa

SEQ ID NO: 14266 - DNA, 303 bp, Oryza sativa
  Clone ID: PAT_MRT4530_2021C.1
cagtgatgagctagctagcgaaataggcgtgttcggggcgtggctggcaacgcaggtgcgaccatttccgtagcggcgggagctactgggcgagatcaaccctggcctccaggtggacgccaccaccggtgacgtcgttggccgcgccgactggcataacgggcgccggtcgcccctgggcaatgctgtgaacgacaggcgcgagccctacgatgacgtgcgggtggccggccaccaaaactacgtgtgctgggcccgcagggggcatggcgcctcccgtactcccctggtcccgacgtacaa

SEQ ID NO: 14267 - DNA, 370 bp, Oryza sativa
  Clone ID: PAT_MRT4530_20220C.1
atgaagttaagcatgaaacgacccccgtacaaccatacttctcgaatggacttctctttcctgggagcgctagaactcctctcactgctagaaacatggacacctagagtgcatgaggatgaaagttcatggagcgggtactgccaatgcaaggttatcgaaatgctttgccgtgacgcgtctcatgtgttgggacgaggctcatgtgttgggtagtcgcggagtgcgggtaaagtgtacatccactgcagttcaagggctgtgggggaagagacctttcgccacacccacacccttcgccacaataccaataaggtacggcgtcaagggctgggggcgaataggtttcgccacacccaggcccttcgcc

SEQ ID NO: 14268 - DNA, 656 bp, Oryza sativa
  Clone ID: PAT_MRT4530_20221C.1
atgaagttaagcatgaaacgacccccgtacaaccgcacttctcgtgtgagtcttcccttcccggctgcgccagaactcctctcactactagaaaccgtgtacacctagagtgcatgagcatgtaaagttcatggagcgggtactgccaatgcgaggttatcgaaaagctttgccgtgacgcgcctcatgtgttgggacgaggctcatgtgttgggcagttgcggagtgcgggtaaagtgtacatccactgcagtgtgagtgcgacacagccacctgtcccggagatggtgcacactccactgatccctacaccttctccgcagctgggttccagtttggagactccgatccaggtcgactccgagacagaggggaccgacaccgagccagagatcgagccagacatcactgatccttcagaggatgagacccctgttccccgcatcaccttcatcggaggccctcacaccctcagcattgcccgcaagagcacccgatccccgggcaagaagcccaagccagatccagaggccactacctccaagccgtggggactcagcttcgatctcgcttcatatgtcgattgcatcacgatttatgtactatttgtggaactctgtgatgttatttatgatattattgctgttgtgttgtaa

SEQ ID NO: 14269 - DNA, 1622 bp, Oryza sativa
  Clone ID: PAT_MRT4530_20222C.1
agctttagcgttggcaaggagagagagagaagagagagagagagagagagagagagagtaattaaggctgggaggataggcagcagcagcagcgagagggaaacgagcgagcgagcttagctggtgcttgcctataggtagctaagcaaaatggggcagaggaggaggtcggggccgcggcgtcagagccagagcgtggtggtggtggtggtcgccgtgttgctggcgacggcgtcctgcgcggcggcgcagctgagccagagctactacgcgtcgacgtgccccaacgtggagacgctcgtccgcggcgccgtcacgcagaagctcaaggagaccttcaacgccgcgcctgggacgctccgcctcttcttccacgactgcttcgtcagggggtgcgacgcgtcggtgctgatcgcggggccggacgacgagcacagcgcgggcgcggacacgacgctgtcgccggacgcgctggacctcatcacccgcgccaaggccgccgtcgacgccgacgcccagtgcgccaacaaggtctcctgcgccgacatcctcgccctcgccgcccgcgacgtcgtctcccaggcaggaggaccctactaccaggtggagctggggcggcttgacggcaaggtcgggacgcgcgccgtggtgaagcacagcctccccggcgccgccttcgacctcgaccagctcaacaagctcttcgccaccaacggcctcacccagaccgacatgatcgccctctcaggagggcacacgataggggtgacgcactgcgacaagttcgtgcggcggctgtaccagttcaagggggcggcgccgcagtacagcccgccgatgaacctggcgttcctgcggcagatgaggcagacgtgcccgctcagctacagcccgaccaccgtcgccatgctcgacgccgtctcgcccaacaagttcgacaatggctacttccagacgctgcagcagctcaagggcctcctcgcctccgaccaggtgctcttcgccgaccgccgctcgcgcgccaccgtcaactacttcgccgccaaccagaccgccttcttcgacgccttcgtcgccgccatcaccaagctcggccgcgtcggcgtcaagacggccgccggctccgacgccgagatccggcgagtctgcaccaaggtcaactaataacgtagagcagtatagctcacatttgggtggtagagagggtaaattggtgaattcttctctgtgtctctcttcttcttcttcctcttcttctccatgatgatcttcgattctcactgtccatgttcacaagtccaccgcgcacagttgttgtatttgttcccgccaattcttttcttgattcttataatcataaaaagtgtcatacattaattaggatatattttcagggcccctacccatgtgatatgatagaaggtacacttacaatgatgtaaactagcgtggtggcccacgcagattgcgcggctaacattattatattttctctcttcatttaaagaactttattattggccaaaaaaaaaaaaaaaacaaaaaaaaaaaggccgccccctaaaaagaatccaaccttaggacgggggccaatccacgctcgaaagtacttctatagtgtc

SEQ ID NO: 14270 - DNA, 322 bp, Oryza sativa
  Clone ID: PAT_MRT4530_20223C.1
atgaagctaagcatgaaacgacccccgtacgatcgcacttctcgtatgggtctttccttcccgggtgcgccagaactcctctcactgctagaaaccgtgtacgcctagagtgcatgaggatgtaaagttcatggagcgggtactgccaatgcgaggttatcgaaaagctttgccgtgacgtgtctcatgtgttgggacgaggctcatgtgttgggcagtcgcggagtgcgggtaaagtgtacatccactgcagtgagagtgttgaagagaagcccttgtcggtacgcttgcgtatccaacaagatgatcggagtgcggtctt

SEQ ID NO: 14271 - DNA, 661 bp, Oryza sativa
  Clone ID: PAT_MRT4530_20224C.1
cccacgcgtccgagaagatctgctgggatgctctaggagtacctttttcccatcccatcttcctcattttttacgcgcacactttttaaactgctagtgctttgaaaaaaaattctatacaaaagttacttaaaaaaatcaaagtaatctatttttgaaaaaaattagctaatacttaattaatcatgtgctaatgaatcgttccgttttccgtgcttgccggttaagaacatggcatgtcaaacacaagagtatgccatatattattatttggtactacctcgtcccattagaaaaccaaaaaatgccatgggacgaccattgatccataaagcactcagaccgtaaaaccattgatactttttttccttagagcaagtttcaccgtatagtgaactactggttctaaattgtctatagtcaatctaataaatcattcttacaatgtttacctataagtatatactacaccactaagggcccctttgattcaaaagaaattcatagaaattttagaggatttcattcctataggattttttttcctatatagccctttgaataccaggaatggatcctatagattcctatgaaattcatatggattgtcttttcccatgtaagttttgcagcccatttaacatccggtccaccctggttg

SEQ ID NO: 14272 - DNA, 1253 bp, Oryza sativa
  Clone ID: PAT_MRT4530_20225C.1
ctcctcttccgtttcctcctttttttcctgaatttttccctagccctagagccgctgccacgctcggcttctctctcctttgccggcagctgctccagccacgtcgcgccgcctcttcggtcgtccccgacctacgccgtcgccacccacgggatcgcaggagcgaggtgaagaccgtccgcccctcatttgctgtctcccctcaccgaaacgccatcatcaccgtggacagagccatgccgccatctcaatctcgtagccggccatctcccgtcgtcgtccgtggtcgtgccgcccttgggtgagttcgtctcgtcgtcctcttcgcgttagtgctctcggatagcccggccgagcctcatagcacctgcgaccttgcagtccagtccttttgtatagcatggttcattatggggtgccagactaagaagcggcgagaagtccgtgggagtcgctggggagttaatgcctctggtttttgaggggctgattatgatccaggaatggtgcactgtggtgagttgtgttgtacaaggggtattgtcacagttcctttccgaggtaccgtggtggtattgaggcgcatggtgacatgtcgtggaactatgtcttatgggtacagtggtacatctctggccagagtaaaactattcgaatagctgagcctgcggttatgggcgggcgtgacatctacgctgacattaccatcatcggcatcatcaactgtactgtgctaaccattgccaccaacaacatcatcatcatcaacgggttctactgcatgcacttcttcttcttcttgagctactacaatgacatcctcgtcccagctcaacacttcgtcgcgtactgtagcctgaccgagcgggagcagcaggggagacgcggcgcgcgcagcaaggccggccgagggcgacccgacggtgaccaggggagggagcggcaagactccggtgtcctcctgccggcagtcacggcacaggacggcgcgggggcgagaggcgccgcatggccgccatggccgggcacggaaaaatcgaagggagagcccccgggatggcatgtccacggtgacctccttgggcggagcttcggagctcgggcttaggaataggaggagtaacaggagtgaggacttaccgagggacggcggaacgacgaagttccgcggcggcggtggagccgggaagaagcagctcatggccaaccgggctagatgctgggctagaggcggttagggcataggcgcacat

SEQ ID NO: 14273 - DNA, 1143 bp, Oryza sativa
  Clone ID: PAT_MRT4530_20226C.1
gcacgaggctctctctcgtcttctccgatcgcggcggaatggacggcggcgcggccacgaacgcatctggagtcgccgcggcggcagcggcggcggggaacggcgtgcaggcggggggcgggggcgagagggcggaggacgcgtcgaagcagaacctggcgctgatgatggcctcgatccagaggacgctggggctcctccaccagctcaacctcaacgtctcctccttcagctccgcctcccagctacccctcctccagcgcctgaactcgctggtggcggagctcgacacgatgcagaagcacgccgagggatgcaacatccaggtccccatggaggtcgtcaatttgatcgatgacgggaagaatcctgacgagttcacccgagacgtgctcaacagctgcatcgcaaagaaccaggtcactaagggcaagaccgatgctttcaagagcctgcggaagcatcttcttgaggagctggagcaagcttttcctgaggatgtagaagcatacagggagatacgcgctactgctgctgctgaatcaaaacagctggctcagtcccaaagcgccttgcctaatggtgatgttaaagtgaaaccggagcattgagaggacccaactgcaaaggtacttaaatcgtttggtgatttctcctaaagtgacgtggatactatgatggtgagctactgagctaccatggaatttgctatggtctaatggaacttaaggggacggaagatatattatgaatacaagactgcattaaattagaagtaaaccttgatcttgacatcagcctggaatattatgtatataagcatatatgagatgcagagtatctttaggacgtaacagtgacttgtagcgagcgatcgtatgatgtagtccatatgtttattttgaaagatatgtgagaataatttgagatcattttctcatatttcttctttgatggctgtactaccctcagtctttggattgttccaagcatgggagctttttaaattaacgagtcacgcctgcccagataagtcccaaaagctatgtatccaaatcatttagtccaaatcatttagtcgttgtgcatcagtaatcaagtcaaagatgctattggtttcaaactcccagtacaacgcgtcca

SEQ ID NO: 14274 - DNA, 5573 bp, Oryza sativa
  Clone ID: PAT_MRT4530_20227C.1
atgaagttaagcatgaaacgacccccgtacaaccgtacttctcgtgtgagtctttccttcccgggtgcgccagaactcctctcactgctagaaaccgtgtacgcctagagtgcatgaggatgtaaagttcatggagcgggtactgccaatgcgaggttatcgaaaagctttgccgtgacgcgtctcatgtgttgggacgaggctcatgtgttgggcagtcgcggagtgcgggtaaagtgtacatccactgcagtgagagtgttgaagagaagcccttgtcgggattggtacggataaacacagaagatttccgatttccaaaatcgggggtctacagccgcctacccgccgagcctcggaagaggcccacgagccaccttcgccaagcgaccgacgggagagggggagtggaggccgaccgagtgaggggagatgaggccgacaggagagggggtgaggatgtcggccgcgtcggcgggagggggaaagaggcatctgtcgccgccgccgctctccggatcgacgggaacgccatcgtgtcatcgccggccttggagcgcgctctgcgcgtcgccgcctcgacgtcgtcaccgttccgggtgcagtggatcgttgtaggccgagccaccacgccatcagcttcacctcgacctcctctccatttacccccaagtaccctatccagtcgcgcagcgatcttagagatcggcatcatctttctccaactccggtcgccgaggtccatcttcgatttctccctctccggatgccacgtcagcgaaaccagtctgttggatgtaaatctaaagggcaagcgggacttaactactgaagcggaagagcccaagggcgccatggacgccgcggcggcttcctcctccaccccggcgtcgtcgccccgtcccgccgagtcctccgggggcgtcgagatgatgaccacccacggcacgacgctgtctggggcaccgcaggtgggggtgcccacggccatggactgcgcctccgcgacctcggcgtcgtcctcggcggcggccgagcacggcgcagatggtgataaactctcctctccgcacgacaagatggccagcgacatcatcaacaagtcctcgtgctccaagtttgacaaggagaagcccgatcaggaggtggtggaactaggaaggaggtggaggattgggactggagtcaggcgtaatgggctgtggtacatcaatcaagaggagatgggattggctgtagtagtgggagatactgagaaggagattattttgcttcattgtcaattaggacatccatctttcgagagtttgagtaagctgtatcctgacctctttaccaaagtggacaagagtagacttgtttgtgatgcttgtgagtttggcaaacatacacggtctacatatgctggaattggtcttcgtagttgtgaaccttttatattaatacattctgatgtttggggaccatgcccagttacttctgtgagtggattcaaatggtttgttacctttattgattgttatactcgtatgacttggatttacatgcttagacataagaatgaggtccttcgttgctttcaagacttccacaaattggttaccaatcagtttgatgcaagggttcggattattcgaactgacaatgggacggagtatattaatagtgagtttgtgtcatatgtctcagatcatggaattattcatcaaaccacttgtcctggagccccccctcaaaatggtgtagctgagaggaagaatcggcatttgctagaggtggctcggtcattaatgtttcaaatgaacgtacctaagtatctgtggagtgaggcagtgatgacagccgcataccttatcaaccgcatgccatccaggatacttggtatgaaatcaccagctgaacttttacttgggaagcgagaatttaaagttcccccaaaggtatttggttgtgtttgttttgtgagagatcatcgaccttttgttggcaagttggatcctcatgcagtaaaatgtgtctttgttggctatgcatctaaccagaaaggttataagtgttgggaccctattgggaagaggttatttgttagtatggatgtaacatttcgagagtttgaaccttattacaggagtcgaggagaccttgatcaatttctagaggagttctcaactgtcatcgagatcgacagtcgagagggggagatagttgaggttgatgcacataagcaaggtgatgaggatgtggttattgggtcaattccgagttttgttggtgatactattgagaaggttgtggacattggtgagaaggtagtagacattagttgtgacaaggatgagggggtagttgtcgggacaatcccatgtcctctggagcgtgtggaagtacaacaaactgaaatgagagtatatcaaagaaggaacaagaaccaagttgataaggtgacagggaaggagcaagtgcaccagaggagccaaattcagaatcagggggagagaagtggtgagcctatgcaagagcaagacaaggagtcacaacagctgcaacagtttgagtacgcagtcccagattcctcctctagcctctctccaacaagttcctccctccttgagacaagtggtaacatttctcctacctttgaacaaagatgtgcaaaacaagatccaagatggaaggatgcaatgaaggaggagttgcgtgcccttgaaaagaataagacatgggaacttgtgaaactaccaatggggaaaagagcagtgggatgtaaatgggtatttacagtgaagcaaacccctgaagggaaagtggatagatataaagcaagattagttgcaaaaggttatagtcaaacatatggaattgactatgatgaaacatttgcacctgtggctaagatgagtacggtgaggattttgatatcatgtgcagttaactttggatggcctcttcatcagttagatgtcaagaatgcttttctacatggtgatttacaagaggaggtatatatggagattccccctggatttggaaatagccagactgttgggaaggtatgtaggctcaagaagtccttgtacggtttgaaacaatccccacgtgcatggtttgacaggtttaggcgtgcattgtgcaatatgggatattcacaatgtaatggagatcacacagttttctatagacataggggggcacacatcactatcttggctgtttatgttgatgatatagtgatcactggagatgatgtagaagagatcaaatgcttaaagcagcgattaggagaggcctttgaggtgaaggatcttggacctcttcgatactttcttgggattgaggttgctcgatcatcaaaggggatagttctctctcaaagaaagtatgtccttaatttgttaaaagaaaccggaatgcttggatgtcgtacaagtgctactcccattgataggaatcaccaattgagtgcacagtcaggtgatccagttgatagggaaacttatcagaggttggttggacgtttgatatatctatgccacactagaccagatatctcttatgcggtgagtgtggttagtaggtatatgcatgatcctagaacaactcatctagaggtggttcataggatcttgaggtacttgaaaggaactcctggtaaggggttgtggtttagaaagaaccaacacttggatgtggaaggatattgtgatgctgattgggcaagcagtgtggatgatagaagatctacatcaggatattgtgtatttgtgggtggcaatgttgtctgttggcgaagcaagaagcaggcggtagtggctcgatctaccgcggaagctgagtatagagccatggcattgagtttaagtgagatgttgtgggtgaagaatctattgttggagctacggttgttcagaaataatactgtggtgcttcattgtgacaacaaatctgctatcaacattgcaaacaatccagttcaacatgaccgcaccaaacatatcgaaattgataggttcttcatcaaagagaagatcgatagtggggctcttagactacaatacattaaatcttctgagcagctagctgattgtttaaccaagggattaggtcctagtgagagaaacaaaatgactaattcttttgatggtttattttgtttttctgctaagacacttttgtttctccaggaccagcaatcaggatctctgctcatctatcctggctacaaaacaaatgagtgttcccagaacagctttggaaagatggaatcaacctcatcattttttgctgcttatgatgacagatgtgaagaggaaatccgtactgtgtgccatgaaaaagtagaagaaagcttgagaaatgatcccctgcccctattagtccgagctgactctgattcaagaccaacattccaagaaagttgttcttctgataggccacgtgaaaaacaggtattattcagtgttgattcgctgaaagaggttctagacgagaaagaataccttgtccacgagttggaatgtgctagacagcagctggatgaggtcaggtcaatgaatagtgaaattctgagagaaaacaggaaattgaaaaggtcgctccgtactagagatgttgaaggaatttcaaggaacgttctagagaagcttggatactgtcatgacatctttttatgccctaatgaggttgatgttgagaaattgcaagaactcctgtgtagatctgagtgcaagcttctatacacagttaagatacctggtgccacaacagatcattcttggaaagtagatacgttggctaaaatgtcaccattttgtaaggtggtatttcttggcatgattgaggatgtctacaggctgcatcggtccggtttatgtctgaatggaaagttctccttgaaagatttttgttggactttgagtcaaaaggtgaagtttagtgctgaactgaagaggtctgtgttacggaggaaacttaaaagaatgagactggattaccaaaaactttgcgaaatcatgatagaagtgctggaggagtgtaaagttaaaatccccgcagatttggaatatttgttggaccttatgagagatgacccagtgaaacatcagttcttgataagatataatttctgtctcatggatgacatcttgaaaagagaggagactttaaccatgttcactcaatatgagcagctcaatagagaggacagagaaaagcacggaaagacaaccagagagtatagaacagagattgctgttagctttatcaccctccctcgtaacatagggagtgcaatgcttgctaacaagtttgtcgcaaagatctttgaaagatggagagtcgaaaccggattttatagtttggatacaagaagaaagttaattgaactcataaggcattgcatggttcaccttccagagaaggcatttgatgaagaaaaaaggacacattacacagatgctaacgttgttgatatggttcaagtgggtgctccacaggttttctgtcagttccagagaggcatgagtgaaattaaggagcttagctatccacatttggttcgagttatgaagagttga

SEQ ID NO: 14275 - DNA, 567 bp, Oryza sativa
  Clone ID: PAT_MRT4530_20228C.1
atggcacccgtcaagatcaacaagtttatcgctgctactttcttcatggttcttgtgatcatgtcctgcgccctcacatccacacttgcttgccggggtgggacggagtgcaccgttgaaacgccacactgcacgatggattcgtgcaatgcaaaatgcaaggcagaggccaccagccgcaagtgcaacaggctgactgctagttgccacaaatatgctacacttgagaagtgctgctgcacttttcacgcaaatgaagtgggaaccaaagtcccccgtcctcggttatttgggcacatgagggcccgccaccgctatgatgaggcccgccacgaagcgaccaccgattgcctcaagcgaaggcactccttcgtcatccgccacatcgggccggcagtggcactcctggggggccaatggatcaaggatgtggccaacctagtgggtgtcactcactgccaaattgctgtgcggaacccctgctccggctccatgtcgacgtcccatgtggcgccgagagttgcacagtcgcccattctatcaaaattaatttatgagaagacataa

SEQ ID NO: 14276 - DNA, 642 bp, Oryza sativa
  Clone ID: PAT_MRT4530_20229C.1
atggggttggaaggggcggttggaggaagggcggcgttccagtggtggcggcggacccggcgacgtgcggttgccgcggaggacgttgatgacggcggctgcggagggctagaagggaggggaggcagcaggacggatgtgaacctcgccgttccggcgccggcacggtgcagcacccgtcagcaggggaaggggggatgcggggcggtggggggcgggcgcgttacgcgcgtaggaggcggcggcggcgatgcggcccgcttcctcggcaacgacgacggctccggcgggaggcggcggccacaggcgatccgaggcagcggcgggtttggtggcaatgataagatatggtttgcagaccaggggcctggtatgccgcagcttacgcgctgcgaatacagttgtctgaagaatgtgcacattacagggtacaaaggggcgagatgccagattgagtttcttctgcacatagtggaaaacgcccctacactggaggcattgaccgtagacacaactcaggtactatatgaagattattatggcgccagaattggcagcaagttctccgagtgttttgctgtagtttctagggattttctccgtagaaagctcccgacaaaggtgaagctccacgtcatgtaa

SEQ ID NO: 14277 - DNA, 504 bp, Oryza sativa
  Clone ID: PAT_MRT4530_2022C.1
agggtcacgttgatttgattaacgatcagaatctctgtataatttccagagtaatagatacagagaatggattacctgagtacagcaacaacgctttcactatgcaggctgcagctgactagctgcaaaagctcgcagcacggggaagtactgagaaaaagaatgggtattgaatggttcaattgcctctacctttgcaaaatgcggacttctagttgagtttcctcctgtacaatggcctcaaaacccatagattgtacaaaggaaaacgaatgtagataccagagtatacaggtgaagaactactgctttgggtccttggctatctagaccctctgtaatatacaattgcattaacgacgtgtaactgggtaacacataacaggcatggtaatatggaagtcaacgcctgttcctggagggggcatagcaaacctttgttgagacggtcagcttctgaaataatcaatgaaattattcgtgtactatgatacagtgccaggc

SEQ ID NO: 14278 - DNA, 378 bp, Oryza sativa
  Clone ID: PAT_MRT4530_20230C.1
tccccgggctgcaggaattcggcacgaggctcattcttctgaatttttacctcacgttccagaccacacatctctctcgtcccagcgggctagccgccgtacgagtatggcgacttcaccttcaccttcgcctcctctctctgtagacttgcagcatatatatggcaccattgtcatcttgctcacgcatactctgcacttccccttccattccttcccaaaccagctcttgcagacctcatctgcatcagcctttcaaactgtgcagtcccaaactatcaaaaagatactatcatcaatcactggctcagctgcgcagatgcatagccatcgcgctccctcttcctcctcgccgccacattcgtcgcaagctgcgtc

SEQ ID NO: 14279 - DNA, 3696 bp, Oryza sativa
  Clone ID: PAT_MRT4530_20231C.1
tcacattgtggatgcccttagagtatctccatccagttgcttcagattttgaagagtccagctacaggtatcctgttttctatacagaaagtttgaccaagtagacactcagtgtgcatccattcaaatgctgaccactctgtgtcacctgctgcatacagttttaggcaggattttgagaagtagctttctggcatagtgcctgtagaaggatcagcagcaaacgggcaagtagatatagctttctgtgtgaataaatggtagcaactcggtcaacatgcggaggaggacatcaatgttccaacgctcttgctctcctaaaacacggagatgagagtctattgcaccttcaacccctgaaacgggcggacagccctcagcgtatgcaaggtctagagcctccaggattctcaacaagttctgtagtttcgccacaaaccgtacacctacacttacagcaggatgaactgcaacatccacagcaccccgtgctgcgtagaagacatatgctaacacacgatcctgctcaatataatatctagtaggtggggcgctcgttagcttaaatatcatgtcatttttaaaatgctgagcaacagctccaaatgcttctatactagcatattttaccgtcaagttttgatcagaaccaagggttataagtgctggcaaaacatgagttgatgctactttcacactgatgtagggtacaagtgctttcagtagagctgcagcattggtttttaggttggcatcagagatcacaaccatctcccacacaatattaaatacagcaacatggtgctcctcaaacatgctacataatgataataagtgagacacattaacatagagcatatcaacaacatcgtgacactggcaaaggaaccgaactgcgtcaatgatctcagcagtgtgatgcatagaaaatgaaccatccttcgtgttctggataagtaattttctcaaatattcttctaattgttgacgttttgaaggataacccaaaataccagataacaacaatggaaggacacacacaattccaagtttttcggcaatagaagtttttggacgcaaaccacgaactctagactgggttgccagaggaaaataggtgaaatcactgctgtcaatatcccccgctgctacaagaaatacaggtagcataacgtgttccagataatctatgccataacgtcccgatacatccaataggtacttcctgatcaccgttcttaagttatcctctttagcaggcaacaggcaagcaagcttgatcaaatccggtagacactcagtgtgcatccattcaaatgctgaccactctgtgtcacctgctgcatacagttttaggcaggattttgagaagtagctttctggcatagtgcctgtagaaggatcagcagcaaacgggcaagtagatatagctttctggtgaataaatggtagcaactcggtcaacatgcggaggaggacatcaatgttccaacgctcttgctctcctaaaacacggagatgagagtctattgcaccttcaacccctgaaacgggcggacagcgctgaagcataacaattgtgtcagaacacatgtggcacttcaaagaaactataaggttcccaaaatttacaaacatgtatacctgagcggatgccaggatatgtgccagtaagattctcaatatctgatccagtttatctccccatcttacaacagcaggaacaagttccttgagagcaacattcacaacagcccccgaagggtcacagaccaactggaacattagctcctcaaccttataatatttatccagatttggaaacagaggaagcagcaatgtgaggttatgtgttgcagcttcccttacaaccgttgcagaatcttcaacaagttgttgcacaatggataagataagggaatcacgtatctcaggacgaacatatactgctaattctccacaggactgggcaacaagcaacctacgctcctcatattggtgatttatctgttcccaacattgtggaagtaactcagtttctgtcctcatctcacctacactcttagcaagctccacacaagcatccattatgatgcgtctctgttgtccatcaggacgtttgattagattgaacaacgtatgagttaaggaatcacgtacatcactatctggatgtttttctatggcacagatgatcaacggaagaagctcctcacgatggtttataagcacataaggaacaatctttggaagagcatccgaaactattttgatagtctccaaagccatcttatctgatgatttttgtttataaggactctctactttctcggtatgaactttatcgtcagttagataaacagatatgctatctgaatccccctggctattaccagatccatgcagattgccattgacagataaatcttcaaagcaagtgtttgtgccagatttatcttctcctgaagtgccatagccactgttctcagcagttgagcaggaaacttctgcttctggacctggggaaccttcaaggctactttccatattttcatgatctttctttttaccctcagctagactcacctccgatgctagcttacttgttatggattcggatccttttagattgtcatgttcactgctcagcactactatttcttccatagaattggcaggaattaaaccatcagtatctccagaagataatcgtttacttgacctagtcccttcaatatgcatcttaagggacgtaatttcagctctacaatcattcaactccttcctctggacatccaatgattgcttcaagtcttgaaccgttttctccttctcttttatgtccttgtgtgcagcttccaaagactttcttaaagcagcaatctgactattagccacttccctgctctttatcaaagcatctttttcagcaccaagactttcattgtccttcagtagcgtctcattttcgcggagaatagaaatcttttcctctgcagcctctgtggtagatgaaagatactgatagtagtaacgacgaagggcatcaggcacacaagctgaactgttaatccaaacatcaaggtcctgatcaggaacctcctcaatgaaagtcatggctgcaagtcgatacccagccaaaagcaagtattctttgacagcacagttcagatctttccgttcattatccttaagaggacctaatgttgaaattttggcatcccttttgtcatgatggctagatccttcatttgtcaaagcatcggtagcatttgagccatcaggagaagattctttctgcttttgtaactcaagcttcaacctggaaagatcttctctggctagccggagatcataatcagtgagggccaacttttcttctgccgctattttctcttccagcaagctctgtggatcagcaccaaccaaatcgtctgtagaatgtaagtcgagcaccaaggcacatacaccgggcggcgcggaggacgcgcgggcgacgaggtcgggcgggaacagcgcggggtcggagaagaaggagcggaggcggagcgcgtgcgcgtggcggccgtcctcctgcagctcctgcaacagctcgagcgccgtgaggtggtacctctcctccagcaggaagttcaccacgcagttgcacagcgacgcccaccgctcctcccccgcccccgcccccgtcgcctccat

SEQ ID NO: 14280 - DNA, 757 bp, Oryza sativa
  Clone ID: PAT_MRT4530_20232C.1
atgacttcttttaaggtttatctaatctcaaaaatgacttcttttaagggggaggaaattacggtggcgccagaggaaccagtactggtcgacaacaaccaccaggaggacaacagttcgcacccactgaatctactggctgatacatcagagtggttccggaacatggatgatgatgatgagtcacccctgtggctgaacgtactgctgagaaccgcattctggaggaagtgtgacgtgcatgagcagcttgagaatgcacatagggctgaggaaagcatcttctgcaccaactgcctcaagacaatatgcccacactgcacacatgatcaaccgagccaccaactcctcaaggtccgccgctacatcttccgcagcgtcgtccgcgtcaaggacatgcagaattttgggattgacatgtcttacatacaggcattccttagataaatgcaatgggcacaaggtagtgcacctaaggcccataaagaggtcagaacatcatagacctaaagctggaacacctcattgcacgagttgccactgctggctacacaatgcacccagccttacctgttcacttagctgcaagaaaaaggcaggcatatcctcagatgacttctcagggcctgaagcttcaactcgagtttctcgttcacgaaatcatgcatcaaatgtcaatcagaaacatccaaccaatacgaagctgcgtaaaaagcctcgcaagcaagcaaaccctgaaagggctccattcttctga

SEQ ID NO: 14281 - DNA, 1209 bp, Oryza sativa
  Clone ID: PAT_MRT4530_20233C.1
gcacgagggcgagttgtccgttggcccccccgccggcgagctcgcgcacggccgccgcggcagtacgggatggcggaggcgggagtggcggccgcctcgctcttcggcgccgaccgccgcctctgctccgccgacatcctccctcccgccgaggtgcgggcgaggatcgaggtggcggtgctcaacttcctcgcggcgctcaccgacccggccgcaccggccatctccgccctcccgctgatcagccggggcgccgccaaccgcggcctgcggcgcgcgctgctgcgcgacgacgtctcgtcggtgtacctctcctacgcctcctgcaagagatccctcacgagggccaacgacgccaaggcattcgttagagccaaaaaaagtgtgtttgattcgttctcatttgctcttgagacagtgtggaaggtgatggagatgtgctacaagattttgggggaggggaagctggtcaccctgagggagctgttctacacgctcctctctgaatcgcccacctacttcacctgccagcggcatgtcaaccagactgttcaagatgtcgtctcgttgctccggtgtacgaggcagagcctggggatcatggcgtcgagtagaggggcactgattgggcggcttgtggtgcaggggccggaggaagaacatgttgactgctccattcttggaccttctgggcatgcgatcactggagatctcaatgtattgagcaaattaatcttttcttcagatgcgcggtatatcattgtagtggagaaggatgccatatttcagaggctggctgaagatcgcatatatagtcaccttccgtgtatcctgattactgcaaaaggatatcctgatcttgccacaaggaacccagcagggcttgctatactatgcacttacaagtatggaagcatttcaatgggtttggaatcatacagatatgcttgcaatgtaaaatggcttggcctaagaggagatgatctgcagcttatacctcagagcgcatatcaagaactgaagccacgtgatctgcagattgccaaaagcttgctgtcatctaagtttctgcaggacaagcacagagctgagctgacactgatgttggagacaggcaagcgtgccgagatcgaagctctctactcacatgggtttgatttcctggggaaatatgttgcaaggaagattgtacagggtgattacatttga

SEQ ID NO: 14282 - DNA, 639 bp, Oryza sativa
  Clone ID: PAT_MRT4530_20234C.1
atggcgcaaattgcaactactacctggcaacaatttgaaatagctgaattaatatgcaaatttgaccggaacaacagaacaaaaacattaggaagcttccaaagctgctcatcaatcgagcacttatttcgattagttgttgctctcactgcaattttgggtgatgatatatgcgacgcacgggtggcaattgagtgctcagcttatagatgcaatccacagttagccattggagcaagggatgaagaaattagtatggcaccagaggaaccagtactggtagacaacaacaaccaagaggaaaacagtttgcaacaattgaatctactggctgatacatcagagtggttcaagaacatggatgatgatgatgagtcacccctatggctaaacgtactgctgagaaccgcattctggaggaagtgtgacgtgcatgatcagcttgaaaatacacatagggctgaggaaagcatcttctgcaccaactgcctcaagacaatatgcccacactgcaaacatgatcaaccgagccaccaactcctcaaggtccgccgctacatcttccgcagcgtcgtccatgtcaaggacatgcagaattttggtattgacatgtcttacatacaggtattacttagataa

SEQ ID NO: 14283 - DNA, 228 bp, Oryza sativa
  Clone ID: PAT_MRT4530_20235C.1
atggggagcggcgtcattggtgagggaagcaggagggggagcggcgtcgttggtggagggagagggatggcgtcgccggctgagaggagcgcgtgcggaagagataaggaaataagcgggcggtggagattggagaaggaaagggaaaggataagagcggggcggaagaatcgaggaattcgaggcgccgctctctcgggctctcggctcggcaaagcagatgaataa

SEQ ID NO: 14284 - DNA, 1337 bp, Oryza sativa
  Clone ID: PAT_MRT4530_20236C.1
gtcctatattgaggcctgatttattaaggcagctgttgctggagtcccttttgttgatgttcttaccactatgcttgatccaactatcccgttgactacatcggagtgggaggagtggggtgatccaaggaaagaagaatactactactatatgaaatcatattctcccgttgataacttaaaagcacaagggtaccctaacatccttgtcactgctggcttaaatgatcctcgtgtgatgtactcggaaccggcgaaatatgtcgcaaagctaagggaactgaaaacggatgacaatcttctgttattcaagtgcgaacttggtgctgggcacttctcaaaatcgggaaggtttgagaaactacgagaagatgcgtttacttatgcgtttatcctcaaggcactgggaatggctccaaaggcagcgttgtaaaagaaagcccttctgttccgggttaagatggtggcggttctcaagcattgattggctgattgtagtaaaacttaacttgagtcgatcggttgtgttgtgttgtgttgacatattcgactaaggccctgtttagatttcaacttttttctttaaacttccaactttccgtcacatcgaacttttctacacacacaaactttcaacttttctgtcacatcgtttcaatttcttcaaacttacaattttggcgtggaactaaacacagcctaattgatgcaagtcagtcagacattagctatgactattgactttttcataggaacataggatgatatatccttgcacactttctaatatttcttaaaatataatggtctgcaatgtttttttgtgagattcagatataatacaatccgactcaacacatcagtaatagcagtgctaaggctccttacatgctgctgaccctcacatagataaaaataggcaaaactgaaggtagaaacaatggattgtcatgtgtgacagcaataattgtaaatcattaatgctttctaaaagtctaggcctgtagattgtaccgatcagatgagaccttttttcatgaaggcacttaaattgtagtgctaaaaatgctttttctttgggaatgtatttcaaaccacccgcagacctagatgctacctagctggctatcccaaaagctaaatgtaaaggttattcttcaattttagaaggcacactgaattatatgaactcaagcagtttgaattatttttggcataccaaccctctagatgactcagaggagacgatgatgcgagcataaacaacagatgtacacactacagctgacacgaaaaaaaaaatggagaggtactatagatcataagcggacgcgtgg

SEQ ID NO: 14285 - DNA, 395 bp, Oryza sativa
  Clone ID: PAT_MRT4530_20237C.1
cgacccacgcgtccgacagctttcaagaacagagaaagatgaagccttcgtcttcctccgtcggcgtctgtaccctgctggtggcggtggcctccctgcagctcctcctcgtcgtcgccgtcgccgcctcggcgaagactgcaccggcgatgccagacgaggagttcttgggccgtctctgcgaccagcagcagggggccacgcggcggcggctcccgtggtgccagcagctgcacgcgaggcggcgccacggcggtggcggcggcggcgtcggcgtcggcaagcggcggcgggtgccgatgccgccgcccagccgcgccggcgaggagatcgacgcgcgctacgacgtgtccaagcgggtcgtgccgagcggaccgaacccgctgcacaactag

SEQ ID NO: 14286 - DNA, 2409 bp, Oryza sativa
  Clone ID: PAT_MRT4530_20238C.1
ctgtccgccttcgccatggccgccacgccgccggtggccaggaaggtgccgcgggaactcgcccagcacggcgacgtccgcgtggacaactactactggctccgcgacgactcccgctcccaccccgacgtcctcgcccacctccgtgccgagaatctctacaccgccaccatcatgtctgatgtcaagaacctcgaggatgaaatatatgctgaaattagagcaagaatcaaggaagatgatataggagcgcctcttcgcaaaggccagtattactactataacagaacactgactggcaaggagtatgtgcaacactgcaggcgtctcgtgccaactgatgctcctgttacagtctatgatgtcatgcccacaggacccaatgctcctcatgagcatattattttggatgagaatgtaaaggccgagggccatgactactatagcattggggctttcaaggtcagtcctaatggtaagctagttgcttatgcacaagacactaaaggtgatgaaatttacactgtttatgttattgatgcggagagtggaaaatttgttggccaaccacttgaaggaattacttctgacattgagtgggctggtgatgaccaccttgtttacataacaatggacaccattctccgcccagataaagtatggttgcacatgttagagtctaatcagtcagatgatatttgtttgtatcatgaaaaagatgacatgttttcacttggcctccaaacttctgaaagcaagcagtatttgtttgttgaatctggaagcaaaaacacaagctttatattctacttggatatatccaaacaaagcaaggagcttgtggttttaactccttgtgtttatggtattgatacaacagccagtcatcgtggaaaccatttctatattaagaggagaagtgaggaattctacaactctgagttgattgcttgcccattggataatgtagctgagaccactgtcttgctaccacacagagaaagtgtgaaaatacagagtttccagctctttgagaatcatattgctgtatatgaacgtcaaaatggtctaccgaaagttactgcgtatcgcctaccagccactggagagccaattgggcaacttcagggaggtcgggagattgattttgttgatccagcatatgacgtggaacctgagcaatcacagtttggttcatctgttgttcggttccattatagctcaatgaggaccccaccctcggttttcgactatgacatggattcaggagtgtctgtgctgaagaagattgatactatggatgccattaacagtgtgaagtcctgctgcagtgaggctcagagtcttcatggtgtggctgccttgattgagggcaagggcagagtgttcgtcatgctcgaggacgggcacctcgcagctgccgtgcttcaggatgagggcatcatggctggtggcagacgatgcagcgagtcggctaggaggacggttttaggtggatttgatgcatcaaactatgtaacagaaagaaaatgggctgccgcttctgatggcactcaaatacccatgaccattctatacagaaaagatcgggtgaatcttgatggctcagacccaatgctgctatatggctatggctcctacgagatatgtatagatccgagttttgggagatcgagattctctctagttgataggggctttatatatgtgatagctcatattcgtggaggtggtgaaatgggacgtaagtggtatgaggatgggaagctgttgaataagagaaacacattcactgatttcattgcttgtgctgagcacttgatagaaaacaagtactgttccaaggaaaagctttgcatcaacggaagaagtgcaggtggcctattgatgggtgctgtcctaaatatgaggcctgatttattcaaggcagctgttgctggagtcccttttgttgatgttcttaccactatgcttgatccaactatcccgttgactacatcggagtgggagtcagaaggatggggtcaaccaagattgcttggaatgcaggagtggggtgatccaaggaaagaagaatactactactatatgaaatcatattctcccgttgataacatttactggattaagcttatatatgctatttacggtggatgttttggtgctgagtatatcaagaaattaggacatttgtacgaaccagatcctcgtgtgatgtactcggaaccggcgaaatatgtcgcaaagctaagggaactgaaaacggatgacaatcttctgttattcaagtgcgaacttggtgctgggcacttctcaaaatcgggaaggtttgagaaactacgagaagatgcgtttacttatgcgtttatcctcaaggcactgggaatggctccaaaggcagcgttgtaa

SEQ ID NO: 14287 - DNA, 420 bp, Oryza sativa
  Clone ID: PAT_MRT4530_20239C.1
ggcccgaaaaggatgggttttttattcaaggggtcttatttctaagggtggccccccatagtttgccacccctttttactaggggccctggacccaacgttgggtcaacacccccccccggaagagagttggaagttgaccggggccctgttgcccatgtttgggatttgcatcgccatcttaataatttgctggggcccgagtccagcacaaaaaacttggggcatgccctgcataatctggcaacgggggccacaggggccctgaggcatcatgccttggagctgcatgcaacattggtgctgcaggagcgccattggctgggacatgaacatgggtggggagctccccctgcccaacgtttgcatcatgtactgcctacccggatccatggggcccatggctaatgttggggggaaa

SEQ ID NO: 14288 - DNA, 585 bp, Oryza sativa
  Clone ID: PAT_MRT4530_2023C.1
cccgggctgcaggaattcggcacgaggatcaagaacgcgagaatccacccacccaccccgccgacgcccggcgatgggcgccgtcgcggcggcgctgctggccctcctgctggccgcgatggccgcgcccccggcggaggcggcggtcggggtgaactggggcaccctgtcgtcccaccgcgtcccgccgccggtggtggtggacctgctccgcgccaaccggatcgggaaggtcaagctcttcgacgccgacccggccgtgctgcgcgcgctcgccggcagcggcctccaggtcatggtcggcgtcaccaacgccgagctcgccgccgtcgcgggatcccccgccgccgccgacgcctgggtcgcgcagaacgtctcgcgctacgtcggccgcggcggcgtcgacatccgatacattgccgtgggaaatgagccgttcttgacgagctaccagggtcaattccagtcatatgttattccagcaatgacaaacattcagcaatcgctggtgaaggctaatcttgctagctatgtgaagcttgttgtcccatgcaatgctgatgcttatcagagtgcttctctccc

SEQ ID NO: 14289 - DNA, 543 bp, Oryza sativa
  Clone ID: PAT_MRT4530_20240C.1
atgtggactggggtggcggcgtgcggaacggagcagcagcacgcgaagccgacgtggcagcgggcggagtggcgcgacggtggctggagcagcggcgcgcggaatggcggcaatccgctgggcctcatgggcggaggagcgaggccactgccaacgccatgggcccctctccgcggcgttcaggtcgtcgttggcggtggcgctgtccgcgatgggttgcggtgggacgaggtccccgcgcagttgcggcgcgaggggagcggccacgacaacgacctgaacgccacggagggagggggcccgtggcgtggcggtggccacgcttctccgcccgtgaggcccgccttcgccaaggggaaaccggtggcggcggtagtagaggaggagacagcgctacagctgctggcgcgtggccatggtgcgcggagctcgagcgcgacgaggcacgtggaggaggatccgcgagttgtggaggcagtggcaggggtagccgccggagcaggagcacctccgctggccgtggcctggggctgccgccgctag

SEQ ID NO: 14290 - DNA, 575 bp, Oryza sativa
  Clone ID: PAT_MRT4530_20241C.1
tttcccaaattttccttttagcaatcctaacattagaagtagcacgtttcgtgattaaatcgcgaattaccactgcacaggggcttaggtcaacacttatatattagccagtcatcaattggaagcggcttttagatagccctgattctttcttggattttaatacacttagccgtgtacgtatcttggctaaactcgaacctatagttgatttaatactgatgtactcggtaaagaatcaaaaagctttcgatacacagaaggaaagccatcccaacctagagatgaagccaacaaaccactatctatattttatgccgaccaacctcgctaacccgcgggacacgaacttacatgtttccaggcagaatagacaatgtgtcaatggattagctgactttactatgttcctgtcttcaagtataaggttgatgacagctacaaccatcctccctgttttttctaaccagctcactatccgaattccgttgcttgttctttcgaatgggagactgaaacacctgaaacggggactacccgagctaatgatagaggcaagaacactttccggccaa

SEQ ID NO: 14291 - DNA, 1050 bp, Oryza sativa
  unsure (1)..(1050): unsure at all n locations
  Clone ID: PAT_MRT4530_20242C.1
ggaagcagctagcttccacgcgtcccattactaccagcttcttcttccaatcttcttctccgacgagcagctagccagctagcggcgccggccggcaatggcggacgaggtggtgctcctggacttgtgggtgagcccgttcgggcagcgttgccggatcgcgcttgcggagaagggcgtggagtacgagtacagcgagcagagcctcgccgacaagagcgacctcctcctccgctccaaccccgtccacaagaaggtccccgtcctcctccacgccggccgccccgtctgcgagtccctcgtcatcctcgagtacatcgacgagacatggccgccggagccggagaagaagaaggagtcgccgcgtctcctccccagcgacccctacgcccgcgcgcgtgccaggttctgggcggactacgtcgacaagaagctgttcgactgccagacacgcctctggaagctcagggccggcgacgccgcgcacgagcaggccaagagggacatggcggaggcgctggggacgctggaggcggagctcggggagggggactacttcggcggcgaggcgttcggctacctcgacgtcgtgctcgtgccgttcgtggcgtggttccacgcctacgagaggctcgcgggattcgccgtggcggagatctgcccgcggctggtggcgtggggggaacgatgcaaggggagggacagcgtcgccaagacgcttactgatcctgagaaggtgtacgagttcgcgctctacctcaaggccaagtttggcgccaagtagagtgagaattccagatttggtttggttaacaatcgcagcgtatgatctatatctattgttactgtatttggttatcgcgttgtgattttgctcctacctatcacctgtatgtatgtgcttgagcttcacgaataaattagaaaagtgcagttgtgtagtgcagttgtgtaaaaaaaaaaaaaaaaaaaacataatcaaaacaatttaatgnacttgtttttatgggtcgtcgtcnaaaaaaaaaaaaaaaaaaaaaaaaaaaaaaa

SEQ ID NO: 14292 - DNA, 272 bp, Oryza sativa
  Clone ID: PAT_MRT4530_20243C.1
gctgcaggaattcggcacgagggcgccgggcggccgctgttcggcggcgccatctccagtaccttccccgtccggttccagtgtactccctcgcctcccccaccatcctccttgcgaggctggcggcttctcgttccttcacgctgtactgcgcttacccccccccccccccccccccgttttcctttggttttttatattagggtcaggatgtgagcaacatcaggcaagtccccgaccatcaggttcgtgcacctctcgctttggatccc

SEQ ID NO: 14293 - DNA, 387 bp, Oryza sativa
  Clone ID: PAT_MRT4530_20244C.1
cctttttgtccatttccacgatacctacgggcggtcgctttcaaagatcctcatctctctccagatgggtgagagcgctgcggactattggcgtgagtgcctaggagggtgcccaccactccaaaggtgcatcggcccttgagaagacggacgacggggggtacatgccgaacgggctggggatcagcaccaatgacgccctgtgctaggtgatgaccttcggcaagctcatctagcaccatctgacacgccaggaggcatgcatggcagctctcgttgggtgaagccagggtgctactgccaacaaatggaacactgtgatgcgcacttacagggaactgagcagcataaccagagatgggtgctaaacatacaatcttatcacat

SEQ ID NO: 14294 - DNA, 320 bp, Oryza sativa
  unsure (1)..(320): unsure at all n locations
  Clone ID: PAT_MRT4530_20245C.1
ccgccgcggcccccgtcctcgccgngctcgcctcgctccagacctactcctccgcgctctccgnattcacctccgcatggcgggctctctactccgacgccaccgcgctcgactcaaccctcgcgtcccgcctcgagggcttctccgagctcgacctgntgtgctccgccatggacgggccaggnctccgcgcgtacctcaccgagcacagggacgcgctgnaggactcgtccctnangnacctngacgangncctnntggtggnccccnaccngggnngactngtgntatcngnggcggcgagnttntnctgngngcng

SEQ ID NO: 14295 - DNA, 298 bp, Oryza sativa
  Clone ID: PAT_MRT4530_20246C.1
ttctcgcgagcgagaagcattctagccgcgtgtggcgacgtgtgcccccggattccgaggcagacctcgccgccaacgccgacatgaccaccaccatcactacaatctcctcatcctcatactactacccttactcctaccctcccccgcctcgccctcgccatcggcaccaccgccgcgccgaccgcaggacccacccggtggaggccgaggcggccgaggagagccggcgcggcgcgcagggggaggctgcttggccgcggcggacgaacccggtggtggaggccgaggacgagcc

SEQ ID NO: 14296 - DNA, 363 bp, Oryza sativa
  Clone ID: PAT_MRT4530_20247C.1
actgaaaccaaaaaacattcacactataaaggtgtaagttttttaattcgaaggacctccatcccaaagtcacaaacatttattaaatgtactgctgctaccacataacattcatttcaacactactttgtaccacttaattttcatttactttaccatttcattttatggtgaggaacgggcgctcgccgttgaagtttcccggggggtcttagttgcaagttattaacactcctcggttcttcgctcacactactcagtcgcattctattcgcaccgactttctccacatcacctgtgttgtaatttccctacacctttcctcgttttcacatatttttatcttaattttaattttttttt

SEQ ID NO: 14297 - DNA, 348 bp, Oryza sativa
  Clone ID: PAT_MRT4530_20248C.1
atggcgcaatgcagcgagagcagcaatgctgcgaggtgggaagaattaacagaagctacatttgcacctgctcccgtgctcactgcactcttcaggaacaccatgtccacatcgcccgccttagctgacgacgccaccacgagacctagcaccaacaccatagctgcccggctcagccattcgccggacgaagcagccattctgcaaagacaacgttcttcccttcctatcaaacatcccaagaagcagaaagagacacacggcagaatagatcagcaggatgcagggaagaacacatacgcgagcgtactggagaagaagacggagaatatgactgagagaaggtga

SEQ ID NO: 14298 - DNA, 529 bp, Oryza sativa
  Clone ID: PAT_MRT4530_20249C.1
ctcgtagccgccggcaatgcagccgctgtcctccatgcgggcgccgctgaacagggccgtcgccgccataggcgtcggccagggagaagacctggacctcgccgtcgtcgttgaagcgcagggcgatgtggagcgtctcgaggttgtgctccctctcggagacgaagacgaggccggtgatgcggccggaatcgatgtcgccctcgacggcgtcgccgcgggacacgccgaggcgctccacgaccgtcttgagcgccgccggtgggatgggctggcagttgtagttgtaggagtcgccgtccgtcaggtgcagctcgtccttcgggctagacggtggagctgggcagcagaatatgtccagagccaccggtggcctgtagctcgcgaagaaggcaatgctgcctctgctctcacccattattcttcttgcgatcgaaatggatgcttcctggtacagcctgttaatggtgagattgcaagcgagaggaaatggcgctttggaatggcagaacagcagggtgttttatag

SEQ ID NO: 14299 - DNA, 3350 bp, Oryza sativa
  unsure (1)..(3350): unsure at all n locations
  Clone ID: PAT_MRT4530_2024C.1
attttaggacatcaattgcatattatgtatttttttgaaaccaaaccaattgcattgttataggtgtacacgtgtgtgttttcaagaatgcaaagcaggtgaagtttttctataagtaattttgcaggaagcagtaccgttcgcataggagtcctacaaatgtcatctgtatttcggaatagggattaatgtgccactgaataggcacatctttattatacaatgcatgtttgaatttacatgttagcaaacttgtcatgaaaattgtcattttaatgccatcttcagctgtctggggtagttagcgcatacttccctttttgtaagcaaagttttggatgtcctggatcttatttacccatttctttttaaaaaactggntcatgcagttcctctcgctctccgccgccgccgcctcctcgccggcggccgccgtcctcccaccgaagccattcaaacccctctcctccgcggcccccttccgtcgcccctccccgcctccgccgcctccgtccccggtgccctcacccgcgccaccgccaccgccgcatcgcccttctccttctcctcccccgaaccccctctcctccaagctatggctgtccagcaagctctccccgccgccccccgagacactagagcagccagagccttctactactactactactaccccgccgccgccggaaccggaggcggaggcggaggcgcggcggcaggaggaattccggcacaaggggaaggtcttcgtcgggaaccttccgctgtgggccaggaaggcggagatcgccgagttcttccgccagtttgggcccctggagaaggtcgagctcgtgcgcggccacgacgatcccgagcgcaacgtgggcttctgcttcctctactacggaggcgacgacgcggacgccgcggcggagcgtgcggtggaggttgacggggttgacttccgtgggaggtcgctcaccgtgaggcttgacgacggcaggaaagggagggccagggctgagcagcgggcgcgctgggtgaacgacggccggaggcgcgagccacggtcgccgtggcacgagggcagggacgaggcgtgccgtgagttccgcagggtggtggaatcacggcccgacaactggcaggccgtcgtctctgcattcgagaggatacccaagccatcaaggagagaattcggtctgatgattgtttattatgccaagcgaggtgataagcatcatgctcgtgcaacatttgagaacatgagagcaagaggaatagagcccaatgcatttgtttttacaagccttgttcacgcttatgcagttgctagagatatgcgtggagctctgtcttgcgttgaggaaatgaaatctgagggtcttgagctgacaattgttacctacagtatccttatttcaggattcgccaaaattaatgattcccaatctgcagataacttgttcaaagaggctaagaccaagcttagcagtctcaatggaatcatatatagtaacatcatacatgctcactgtcaatctggcaatatggaacgggctgaagaactggtgtgtgaaatggaagaggatgggatagatgctcctatagatgtatatcacagtatgatgcatggatataccatcattcagaacgaaaataaatgtctagttgtctttgaacggcttaaggagtgtggctttaaaccatcaataatctcttatgggtgccttcttaatttgtatgtcaagataggtaaggttgccaaagcattatctattagcaaagaaatggagtcttgtggcatcaaacataataataaaacatactctatgcttatcaatggatttatccatttgcacgactttgcaaatgctttcgccatatttgaggaaatgctaagatcaggtctacaacctgatcgtgccatatacaatttgcttatagaggcattttgtaagatgggaaacatggatcgtgctatttgcattttggaaaaaatgcagaaggaacgaatgcaaccatcaaatagagcattcaggcctatcatagagggatatgcagttgctggtgatatgaaaagtgctttggatactcttgatctgatgcggcgaagtggttgtgttcccactgtaatgacttacaatgctctcattcacgggctagttagaaagcacaaggttcaaagagctgtctctgtgcttgataagatgtccatcgctggcattacaccaaatgagcatacatacacaatcattatgagaggttatgctgccagtggagatattgggaaggcttttgaatacttcaccaaaataaaagagagtggtctaaaactcgatgtgtacatttatgaaacattgctcagagcctgttgcaaatctgggaggatgcagagtgccttagcagtcactcgtgagatgagcttccaaaagataccaaggaatacatttatatataatattttgattgatggatgggctcggagaggtgatgtttgggaagcagaggacttgatgaagcagatgaaagaagatggtgtccctcctaacatccatacttatacctcctatataaatgcatgctgcaaggcaggagacatgcagagagcagaaaaggtgattgaagaaatggtagatgttggactaaaacctaatgtcaagacatatactaccttgattaaaggttgggcaagagtgtcacttccagacagggcattgaaatgctttgaggagatgaaacttgctgggttgaaacctgatgaggcttcttatcattgcttggtgacttcacttctgtcaagggcaactgtaatggagggaagtacctacacaggaatcattagtgtctgtagagaaatgtctgagaatgatttgactgttgatcttcgcactgctgttcactggtctagatggcttcacaagattgagaggactggaggggcactaacagaagcgcttcagagaatatttcctcctgattggaattcattagaatttttaggagagccatccagttctataagcatgggggagtctgatgattacagtgattcagattttagcggtgatgaagatgaggatcataatattgatgatagctgaaaaactctagattccagagcctgtttttcttgttctgtgccctcactttttgtcctttggttctgccagagtggatgaccgaacaagcaatgtctttgatcaaactgtgccctcacattcagacaccagtggcttgtggactatccaagagcgtttggaatcttatagtgcaataagcgtgagctggctggcctctgctgcgtttcttcaagagcaacagtcagtaacagttctactgggactgaagacacaggctgtcaatgc

SEQ ID NO: 14300 - DNA, 390 bp, Oryza sativa
  Clone ID: PAT_MRT4530_20250C.1
atgggacgcccggagcctgtggttttgtttgcacagacgatcctccactcccagctggatgagtatgtagacgaggtgttattttctgaacctgtcgtgatcactgcttgcgagtttcttgagcagaatgcctctccttctacaccaaacatatcccttgtaggggctacatccccaccttcatttgctctggaagtctttgttcactgtgatggggagtcccgatttaggcgcctttgccagcctttcttgtattcacactcttcatccaatgtgctagaagttgagttcaatggaccctactccagttcggaagcaacagctattgcagcattttcaatgtttgtgttattttaccaagtaaagttcatttctttgcaacaacagtga

SEQ ID NO: 14301 - DNA, 2573 bp, Oryza sativa
  unsure (1)..(2573): unsure at all n locations
  Clone ID: PAT_MRT4530_20251C.1
gagcctcacattatgccagttgatgaataaaacacatggatatacaaaatatcgtgcctaaacccacaaaacagagaattagcaccgaaggcaattagaacaaggctctacaagattgcgcaacctcccgccgataccactgtcgtctaaagatagaaacgcaaccactgttgcaggcgacttccttctgttttcttgagtctaagggcagaatattcatggaaccgaattgtcacctttatgtgatcccagacttgcaaactggacatagtttcttccttcttagccattcgtctatgcactggattactgactgaggcaaattattgatctggctttctgaagcaccagcatgctggtggttattttcatctaatgcaagcagtgcatcataatcatttagatcaatattaggttgaatatgtgcagcagggtatctggaaagagctctctggtaaattattcttctgttgtttgagtcatatcgaaccctattagcatgctgaggaacagttgaacgcaatacccttggacctcttgtagtgctttggaaccgcctcgcagttctagatgtcggctgcgcattatcttcatgttgaagtgacattgctatgatcgcatcaatctcttctgtgggaacaacatgaggagtttcattgtaaagctgctcctgaagttggcgagccaataactcatcagactccaactgttctcttatgttgggatccactgaggtccgattgctgctaccaatcccactcaaactaggccttacttcaggagagcatatgtcatcaatatctactacaggaatatgatgacggtgagtggtatgatttctagcagctgttgagtctgatgatgcaactctaggttgatcaacatcaacagagctagagctttcaccaggatggtaagaacttgcgatgcgcttcctctttctgctactgatccttattgttctattaacaaaactagcagtctgcaatgtttttgctccaccaattgagttattgttgtctcctccctcaattgagttattgctgtctcctgctgcagatgctcgatccagattagactgttcagaagatccagattctcttccacaactattggtcatcttaccttgctcagaacctataccggtgtgatcattgtttgcaacggaagaagaatctcccatggatcttggacaaaccctcctcatataagcctctccagactgcttagcacccacgacatcatgggaaatttcttttcctttattcttgttaccttcagaaaaaatactgttcacttgatttgcagccagtggaattaccgtctccccagctctgcctattgccgactttctccctgaccttttttccatgtcagttgcagtgtttccctgccttcttattataggtgaactatcagtaagatctatcacatttcccttcccagaagcatcaacctgagtatctggatagtgtaagagtccacttgtagagcatatttctcgcttttcatcaaccttcagacttcttttggctatgttggagggagaaatacaaccattccgcaccagctttctttggcccacatgcctttgaggaacaatgcttggtgtagagcttgaaattcctgttgtgcccttgtcagtgatctcttcccctttgccctctctaggactcgatactgaacagacattagcacctactacttccttcggcttcttaaaggtgatagtccccattctgtttcgtggttttcccaccgtagtagtaggaagacctgatcctaaacagagaaagtcagcattgcagctattggcatcccgtgcactaatatccccttttctgatttggcaactacggtccctttctccagagcccctgcaatttatattgtttgaaatattcatgctctgatccaaaccagatttttttggcaccttttcattctcaacagatgtctctatcgtccgacctgattttagcaaggatgatcttgcttcaggatcttctgccactggcagcaatcgtgccaactcggcttgtttaaaaatatcgccagcatctaaaggtgcaggcgacacactacttgcattgcctctacttgattgaccctggatggagttatttgtgatcttaaatttaattcttcgcgatggtaatggagttccagctgcttttgcaatacctctcctagcagctgggctagatacagggcatgttgactgctgtattcggtcaggggtgtccggaacctcaaagatgtgatcagggtttatgtcaaccatggtatcccaccgaaactatttcagttacagatagcttgcctcctctcctttacatgtcaatttatgattaaaattctccaacacttcctgggcggagcacgatctggaggcgacggcgggtcgcggtctcgcggaggatggatggatggtggcggtcgagatcgcctcaagctcgttgcatctctctctcgctggttcgtctgttttttttttcccgtctttttccggacggtttggggtcgccccgggagattttccggnaccgtggtancctgcaggggcggtacca

SEQ ID NO: 14302 - DNA, 562 bp, Oryza sativa
  Clone ID: PAT_MRT4530_20252C.1
ggctgataagcaatcaatcgataatgaccttttatgccagttgatgaataaaacacatggatatacaaaatatcgggcctaaacccacaaaacagagaattagcaccgaaggcaattaaaacaaggctttacaagattgcgcaacctcccgccgataccactgtcgtctaaagatagaaacgcaaccactgttgcaggcgacttccttctgttttcttgagtctaagggcagaatattcatggaaccgaattgtcacctttatgtgatcccaaacttgcaaactggacatagtttcttcctttttagccattcgtctatgcattctttatggaacatgtgaaagcatggcaagcgggggatcgtatcaccaatagagggattatcaaggcaaactgcacacgggttttcaatatttgactggattactgactgaggcaaattattgatctggctttctgaagcaccagcatgctggggggtattttcatctaatgcaagcagggcatcataatcattttaatcaatattaggttgaatatgtgcagcagggtatctggaaag

SEQ ID NO: 14303 - DNA, 990 bp, Oryza sativa
  Clone ID: PAT_MRT4530_20253C.1
caaacataattctttacagtttcacctaaccttttattttttccatctagcatcccacatgcctatccatgctgccaaggagtaccgatgttcaatcaaaattcaagacagattcaccaaaccttttattttttccatctagcatctcacatgcttaaccataggccatattgtaccagaaaaggagtgaactacgcccacaacacaggtacatgatcaagaaggagaatgtcacacagttgctgcagattctaaaacacaaaaacggaagggaaacatgaggcttaggtagggagttgcatatagtgattgccacggctactgtcagtttgtcatgcatgagtgctgcgcaagatcccatggatgtaaccaccgaccatgaccaaggagacgagggaaacgacaccagctgggaatatcttcccggacttcttgaagcgagatcccatgaccgacaagagggcagcagatatacctaaaccaatagatgatgcaaagacaggtctcactgggagttgagtgtggacgaagtacaggaccagggctgatatgcctcctgcggctaaggatttctggcttccactcttcatgtaccccatcgctccaccggctccgacgagagcggcgtaggcgagggtgatcttctgcgacatggagagcccctgccccatcttctcctcctccccttccccctcctcgtcgcccccaccaccccgcggcttctcgctgtccccgccgccgccgctcccagagccgtcgcctgcgcctccgcctcccgatccgccgagctcgggctccctggccgcgacggcgacgaggaggcgcgcggaggggcggagcgagagggcggccggggcgcgggggcgcagcaggaggagcgagcactgggagatcggggaggatggcggcgcgagggcgagtggcgcgagtggtaaggtcgtcgtcgcgatggccatggatgagctcgagctcacgcgtggggtgctcgag

SEQ ID NO: 14304 - DNA, 478 bp, Oryza sativa
  Clone ID: PAT_MRT4530_20254C.1
aatcgtgcaactcggcttgttaaaaatatcccagcatctaaggtgcagacgacgcactacttgcattgcctctacttgattgaccctggatggagttatttgtgatcttaaatttaattcttcgcgatggtaatggagttccagctgcttttgcaatacctctcctagcagctgggctagatacagggcatgttgactgctgtattcggtcaggggtgtccggaacctcaaagatgtgatcagggtttatgtcaaccatggtatcccaccgaaactatttcagttacagatagcttgcctcctctcctttacatgtcaatttatgattaaaattctccaacacttccctagatggatcatggatctcccttccgctccacgcgagatcaggggaggggcctccgcctatcgagaaccgccgctgcggcgggaggggactgccacaagcgagattgggccgaaaatccccaaataacag

SEQ ID NO: 14305 - DNA, 1907 bp, Oryza sativa
  Clone ID: PAT_MRT4530_20255C.1
ttcgctttccctttttctgtcacttttgcattgttcaccgcttctggatcaacacttcatgtcgtaacctcccgggcgagtactggttgggctcctccccggagtaaggctagcccttccgcagctccgagggcgggctgcgtgcgacagggccatgcggggggaagagcccgtctgtggagggggtgccctccccttccccgggccttgaagtcgtattcatgcgtccgttgggcatcctcgatgcggcgtccgggcccctgggctaggcctctctccccctgccgctccaggaactcgcctcccgccactcgttttctgtgttcttggttggaaagcatcaaccggatgatcagcccttgtcagaaaaataagttgttattacacgttgcagccaaccacacgtacatgccgtttttcgcttgtgcaaccagccaccaaacacagtgttcggctgatcatctaataaggcgagattagacatcagggggcgtcacatctccagggatttgaggattatcaagcctagtttcactatacaattaaaaccaaaacaaagcacccggaaatgatcattcatcacgttctagctgtgagtaaagacagttcattcttttttcgcgaatatgcaaaagatcacgctgagatgatcgaggtctatatgatgcagacgccatgtcatttaggtcctgcaacggcgtcaggtgcttgacaacttcatccattgtcggacgagacttggtgtcacggctgaggcagtggtagcagatctgagcaaccttctgcacccctcttactgaatagttcagccccaagcgaggatctacgagctggtagagccttcgccgatcacttagatacggcctcgcccatgccactaggttctgctccccagtaggccgcttcttgtccattgatcgtctaccggttaacatctcgagtaacactactccgaagctatatacatcgctcttggatgtcaagtgtcctgtcattacatactcgggtgcagcataaccataggtaccgacaacccgtgtagagacatgagttttatcgccttgaggaccagctttcgctaacccaaaatctgaaagttttgcattgtactccgcatcaagaagaatatttgatgtcttaaaatccctgtaaattactggtttgggacctccatggagaaaggctagccctttagcagcaccgagagcgatcttcattctacagggccaaggtaggggaagagcccttctgaaaagatggttttcaagacttccccgggccatgaattcatatacaagcaacctttggtcatcctcgatacagtatccaatcagcttaacaaggtgtttgtgatgcagctgtcccagaaagtcaacttccgccacccattctctgtgaccttgaagtgcatcctgcttcaaacttttgacagcaactgtaagaccagtaccgggttttgcaggagatgtgctgtttggatcaatccatcctttgaatacatacccaaacccaccttctccaagaatactatctggcctaaagttaacagtggcagatttcaactcttggaaagtaaaccgaagaagtttcttttcagttgatgcatttacaccattttcatcatcaaggtttgtctgaaaatgatcaccaagctctcgattgctagcatttagatatctggtctctgctgttatagagaaaaacaaaatgcttgagcacctcacccaaaaacaaccagctgcgtcgtggacgtggctccccttggcggagccccccgccgcgcccttctcgtcggcccccgacgccgccgccgccacccccgccggccggaagcatgccccacgtagcccccgcgccaccgccgcccagcacccgcacccgcgctcctccctccgccgggaaggcat

SEQ ID NO: 14306 - DNA, 311 bp, Oryza sativa
  Clone ID: PAT_MRT4530_20256C.1
gcacgagggtgccgcctctactcgcacgctcgctcctcctctcctctcctctcctcccaaagttgaatgtgcatctttctctttcgctttgccgtgtcaacgcgaacaaaaagagccacgcctccctccatttcctccctcacgaaccttccctccatctccccctccgcctcctataaagcccgccacctcggtgtgctttgggtgttcgtccgtggtcttgcctttcttggagcttgccaggcatggctgctgcggtagtggcgaggtgtggtggtgccaagaagcggaagggcgaggggctcggggag

SEQ ID NO: 14307 - DNA, 1272 bp, Oryza sativa
  Clone ID: PAT_MRT4530_20257C.1
atggcgtcgatctcgcggatggagactcctcagcttcgcgtgctaaggcttctgaaccgtgctgatgtggcgacgacgctagtcaagtggctcggcaggattcgcactctatacatggccatcaggcccgaggcccgacggcccggcccacagcacagtattttggccgaccctaccactgggccgtgcctgggcctccccaccggcatgttgggtcggcccggcatgaccgacccggcacggcacgatgggtcgctggatggaacaattgtagccccaaccagtgctaaagcttgggattctggtttgcttcaatggattgagtttacaaaactaaatggagtatcaattcaaggcaatggcatcataaatggtagaggacaacaatggtggacctattcagacacagatgacgacgaaaatgatgacacacagtacgatgtggagtttgaaaggatgccacaagttaaacctacagcactgagattctatggtagtttcaacgttgtagtagctggtatcactattgtcaacagctcgcagtgtcatctcaagtttgacagctgtcaaggagtgatggtccatgacgtaacaatatcctccccagaaaacagcctcaacactgatggaatacacctgcagaactctaaagatgtcagcattcatcataccaacctggcttgtggtgatgactgcgtctccattcaaacaggatgcagcaatataaatatacacaatgtgaattgtggacctggccatggaatcagcattggaggcctaggccgggacaacacaaaagcatgtgtctccaatgttactgtaagagatgtcaacatgttcagaaccatgactggtgtcagaatcaagacctggcagggtggcttaggcttggttcaagatgtacggttctcgaacatccaagtctcagaagtccaaacaccaatcatcatagaccagttttactgtgacgaaagaacatgctcaaatcaaacatcagcagtggcagtatcaggcgttcagtatgagaacatcagaggaacatttactatcaagcctgttcattttgcatgcagtgacagctcaccttgttcagggataactcttactggagtacaactcaggcctgtccaaatatcccactaccgcctaaacaaccctttctgctggcaagcttttggggagctctacactccaacagtccctccaattgcttgcttgcaccttggaaaacctgctgggaacaacttacagtcatatcacgacttatgttga

SEQ ID NO: 14308 - DNA, 480 bp, Oryza sativa
  Clone ID: PAT_MRT4530_20258C.1
atggctgtgaggcggtgctgcggcgcgaggagaagcacccgaagacggccacaaccttcgtgctgtcgggccgcctgccgcgagtgtgcgaggaaggggaggaaggcgagctggttccatggctggaagaaaggagaggagatagaattgccatggaaaaagactgaaagacatggccctgctagtgtgtgcagcatcaagaaaaagaatagatcactacagcaggccatcaggaacggtcaatgcctccttgaccccgacctactgaccggtgttggctggacaactaagatgatcacccaaattgtacaactcatagagagtgaagaggacagaattacctggaagcttacaaaccacagtgagtacaagacgacgtcgatctacaatgcacaattcttgcctcaacaaaatcggactttgacgtactcatctggaaaccctgagcgccatgaaagtgcaagatctttacttggctag

SEQ ID NO: 14309 - DNA, 270 bp, Oryza sativa
  Clone ID: PAT_MRT4530_20259C.1
atgcaaatcaggtttgctgttccgaggcaggcagctggacgtgatggaggaagaactgacgccattttgccacacaacagtattatctttaggctagctgctgctgatgacactgacggtttcagattcgtggttcaaaaattttacaaattcggtcggaagaacctcctacttggagccaccggtaaacacgaaattttggagatccagaaccgaaattttgttgctacacaagtcaattcatttcggccacgtactaacattgacagt

SEQ ID NO: 14310 - DNA, 717 bp, Oryza sativa
  Clone ID: PAT_MRT4530_2025C.1
ggaaaaaaaaggtttaactgggttctctgcacccatcgattacacaggtatccagaaaaaaaaatgaagttttaaaccgaatatgctaacaaaaaattaagaacctctagtttgaaaaaagaaatcgttaaaaaaatactactccacaatctgcaagatggtttgcatccacaatctgtcaaaaaatacttctccacaatctagaaggagtatgaattaatctgcaagaactagaaagaacaaagaaaggtgtttgtatccaccaaggtggcctgtagtcatgtgtgtatttatccagattgaccctgggctcattctaatggcaaagcttctcgaaccacctcagctttgggagacacaaaatcgttggctccttcatcagatccgctattgcaaaagcttgtgcatcaggctccctgcaacagatccactggcgctggagactataggcttgcgcctccgccggcgtagccgagcagcacctacacgttgcgttcgccttctcctgcatcacaatcgcaagcccctacctctgccgccgtgctgctagtgcctcatccgagccatctcaatccgccggggccggcgccgctcccgccgacctgtcacatccatgacatcacgggaggtcgcagggagggagagatggatggagcgtggagggaggggaagcgactcatcgccgtcgagggatgggtgaaggtcgcggacgcgtgg

SEQ ID NO: 14311 - DNA, 196 bp, Oryza sativa
  Clone ID: PAT_MRT4530_20260C.1
agggaaaacaatatttatgagatttggggaagggggggaaaggggtaatgggaggctaactatgttacaatgagggtatgcggatttgtccagaaccaccgccatgactatgatgctaatgtatacaaaagactaggagggattatcgactcagtagctgggccagccaagcaccacccaaggacggggcttgctg

SEQ ID NO: 14312 - DNA, 504 bp, Oryza sativa
  Clone ID: PAT_MRT4530_20261C.1
atggcgatgctggccgacctgatggtggagcgtcggcggacagggttagggagaggaagcggtggaggtgggggccgcgtcagggagaggaagggcagcgacggcggggtggccggacgcgaggaggcaatggtccaatgcaagcggcagcggcggcgatgcggaaaatttggtatcgagctttacattttgtttcccctttgcaacccgagctcctgctccatcatcagcagctctactcacaatcgcacgcggcgttcttctgcgcccacccatcattcgacttggcttcgtgctcaccttgaagccaaatacggaggcggcgaacgacatggtggtcgcaacgctggaaaagctttcatggcggcggtgctggccgagacacccccacatccattcgagaaggtgatggtattggtgaagaagatgatggctgccgttggcagccctcactctagggcggcggagaacatgctgatgcaggccagcagccagtgtggttag

SEQ ID NO: 14313 - DNA, 441 bp, Oryza sativa
  Clone ID: PAT_MRT4530_20262C.1
atgggaggggagaacgtggctgggagaacccccgattttcccagcgacgtgggaaggagacagagggagggcaggggattcaaaatgaatctcgcccatttcatgcgcttacgtggggcgggagacgcgggggagagggcggcgacgcgggcacgacgcggagtggggcgcgggagagacgggaaaggcggtggcgtgggcggttgccggcgtgggcgcgggtggctggaggttggggacgacccgacaggtggggcccatctatcggcgtcccgaaaggaggaggagggggcgcgggccggcccaagaaggagtggggcgtgcgcgggcgacggggtggactgggctgatggcccaagaatagggaaaaaggaggaaaagaaaaagaaaaagaagaaaggatttttcctgggattctttattgcggttaatgaattttaa

SEQ ID NO: 14314 - DNA, 277 bp, Oryza sativa
  Clone ID: PAT_MRT4530_20263C.1
ccacgcgttcggccacgcgttcgggcttgttgcaacagctacaaacgcccacattacacgcaggaattcggattaacaggcaggcatggggttcacgctgaccaacgttgggctgtctaccccgggggggggggggtcgtcccttgttagggcggtcgccggagctggacgcgtggtgttttcccgtgttggccgcggcgggttcccggcggtgagggccagcgggcccgctacccccccggacattttggacaagatgtcggagagcattcacaag

SEQ ID NO: 14315 - DNA, 1792 bp, Oryza sativa
  Clone ID: PAT_MRT4530_20265C.1
cccgcgtccggatccgcagcgcacgcacgcacggacggacgccatggacgaagccctggtgggcaggctggaggccgcggtgtcccggctcgaagctctcaatggcgccgccggtgccacggcgagaggcggctacggcggccaggtcgaccacgcgtcggcgcatgacccagcgatcctggcgttcgacgagctcgtcgccggcgccgtcgggagggtgtcggcggcggccggcaagatcggggcggaggtcgcggaggtgaccagggtgctggagaaggcgttcttggttgggaaggaccttcttgtcaggaccaagcaaactcagaagccaaccgtggattccatcgcagtattcatggggcctctgaatgaaacaatattggaggcaaattcattggcagaggggacaagatcgagccatggcaaccatctgaaagcagccgccggtagcctggccgctctggcgtggattgggtacaccggcaaaggttgcggtatgccccttcctattgctcatgtagaagagagttggcaaatggcagagttctacagcaataaggtgcttgtggagtacaaaagcaaggaccctgatcatgtagagtgggcaaaagctctaaaagagctcttcgtgcctagtttgcgtgactatgtgaagacattctaccctttgggccctgtgtggcaacctcctgggagttcaacaagcaaagcaccttctgctccctgccctccttctgcatctcttttcagttcttcagctcaatcatcacaaccaaaaaccggaatgtccgcagtcttcgctgaaatcagctctgggaaatcaatgacacaaggtcttaggacggtgacagctgacatgaagagcaagaatagaacggatagaactggtgttgtagctgctgaaggaaaagaagctcataagaaaccctcctctagttcaaccaaattaccttctaaattggagctccaaatgggtcgcaaatggattgttgaacatcatgttggcaacaagaacttagtaattgaagattgtgataccaagcaatccatatatgtatttggatgcaaggattctgtgctacaggtcaaaggaaaagtgaacaacataactattgataagtgtagcaaaatgggattattgttcaagggtgttgtcgctgcttgtgaaattgtgaactgcaacagtatagaggtccaatgtgagggctctgtaccaactatatcgattgataacacttctggctgccaactttatttaagcaaggaatctttagagacatctataacaactgctaaatctagtgaaatcaatgctcttgttccagatgcaaacagcgacggcgattgggccgagcattccttaccccagcagttcattcatgctttcaaagatgggcaatttacaacattaccagcatgtcattcaggcggctgacctacttcaccatcaacgcctttcattattggagttcgttttcttttaattgtttaaattaactaaccagttacccttccatcctggtttgtacatagagcaagccagtcctgttcatttggctcaggtactgcacattttcctctaccacaacgtattaatcctacagttccaactaggaagaataatcttctgtcaggctgtatgcaattcagtaattttgtaactgttctactgaatgtaatagtactctcaagtctcaattctccaacaaataaaatggcatcaattcacttttacacgggtgcaacaacaaaaaataaaaatctttgcgacaaaaaaaaaaaaaaagga

SEQ ID NO: 14316 - DNA, 775 bp, Oryza sativa
  Clone ID: PAT_MRT4530_20266C.1
gggcggcgtcgcccgcacccggtgggaggcgcgcgtcactgtctcctagctcccggaggctgtccggggaaggtagcagcaagaagaaggtcggggtgttggtggctggtatctccaagatgacggatttgacgaatgggtcggctgttaagccggggaggaagagctgggacaatacctcaatcgcagcagcggctggctctgtgatgaaatcgaaggtcaaggtggataagagtactattctgaggacacaggaagcaatggcaagacgactgagtgatgttacaacagaactatccagtaacgatgatgattcatctgtagatgagaagccaaagccacggaagaagatagagtcacctgcagtaaagacgaaagcaatggctccaaaaattatgcttcatgatcctaaatggaccgatggaagcattccattggatggagtttctgatgtgctttcaaagatgggaaaggaagccactgaacgaagagacgcagcagcaattgctgcagctgatgctctccaggaggcattaatcactgaatccgtaatcaggaacctaagtaaattttctgaacttacttcagcatcgaagacctccaatccccttccaacagttgatatcttccttgctgtctatgaggatactctcaaatggaagaaaattgctgagtctatatgcaccaatagaactgaaactgcatcatgggagaattcagctactcattgggttgaagcagcattggcaactgatcttgaagtcctaaagttgat

SEQ ID NO: 14317 - DNA, 477 bp, Oryza sativa
  Clone ID: PAT_MRT4530_20267C.1
atggagaccaaggagggtgcgacgacgaccctgatgcccgcggctaaagctttcgccggggccggaggaggtggagacaacgtcgagaagaagcctcctgtagtgagcaagaaggtgccgatgccgcaggtcttgctcgactacatcctctcatggacgaggatgggaccatggccgagctccgacgaccactcggagttcctcctctcgccggagcatcgcaaccaggacgacgacgatggcttcgccgcgttcgaggccaaggtccgtgcgcagcgcgaggagctgtccgccttcctcgacaagaaggacgatgagttcgccgtgttccaggccaaggtccgtgacgaggtcgacgagaacggctgctacatggtcgatggcacctacttcgccgatctggaagcagcccaggctctctccaatgaactatttgccaagctgaacatgagtggcatcctgttcgaggaggactga

SEQ ID NO: 14318 - DNA, 2322 bp, Oryza sativa
  Clone ID: PAT_MRT4530_20268C.1
atggccacggtcacgccgggggtgctgctcaagctgctccaggcgatgcacaccgacgaccgcgtcgccggcgaccaccgctcccccgtcctccaggtcaccgccgtcgtccccgcccttaccgcctccaccggcgactccctctggccctccaacggcttcctcctccagctctccgacggcctccactccacctacgtccagccctcctccgccgacgccgacgccctcgtctccgcgcgcccgcaactcgtcggccacctcgtccacctcgaccgcctccgcttcgcccgcccggtgccccgcgccgtcgggatccgccccgtcccgtcctcccgcagcgtctccttcgtcggcaacccggagccgctcgtcgcccgccccgccgcgtgctcccgcggctacgtcatccagcccgggtcccactccgacgccgcgccgccgctcatgccatccagttccggcaatgcggcgcagtccgatgcaacgaatgccatcaataggacggttctcgcgcacaagaacgtccccgaggccgcgccgccgcccgccgtttcagccgccaagaggcggttctcgtctccggcgccgtccaagcagcgagatccgtcgccttcggtcaagggcggcgcgtcacggccttcgtcgccctcggtgaagggcgcctcccgagcgtcctcacctgcggtcaggggcacgcccagggcgacgtcaccagcgccgtccaaatgcgtggtgcccagccttgttgcggccaaggaggagaatcgccgcacggcgagggagccggcgattatcgtgccatcaaggtacaggcagccgtcaccagtaggagggaggagaggggcggggtcgcccgcacccggtgggaggcgcgcgtcactgtcgcctagctcccggaggctgtccggggaaggtagcagcaagaagaaggtcggggtgttggtggctggtatctccaagatgacggatttgacgaatgggtcggctgttaagccggggaggaagagctgggacaatacctcaatcgcagcagcggctggctctgtgatgaaatcgaaggtcaaggtggataagagtactattctgaggacacaggaagcaatggcaagacgactgagtgatgttacaacagaactatccagtaacgatgatgattcatctgtagatgagaagccaaagccacggaagaagatagagtcacctgcagtaaagacgaaagcaatggctccaaaaattatgcttcatgatcctaaatggaccgatggaagcattccattggatggagtttctgatgtgctttcaaagatgggaaaggaagccactgaacgaagagacgcagcagcaattgctgcagctgatgctctgcaggaggcattaatcactgaatccgtaatcaggaacctaagcacaaaagtggtttttcctaacactcagcttgctattgtccacagtaaattttctgaactaacttcagcatcgaagacctccaatccccttccaacagttgatatcttccttgctgtctatgaggatactctcaaatggaagaaaattgctgagtctatatccaccaatagaactgaaactgcatcatgggagaattcagttactcattgggttgaagcagcattggcaactgatcttgaagtcctaaagttgatgaataaggcacctgaatcgctctctcggaaaaggggtgctgataagccaaaggctcccttggtggtagaagctccaagaacaaccatatccaagaggcaatcacatgggacttctgcaaaggtccagtcaaaggtcttaccgacctcttcagcgagctgcgcatggaacaaaactcagggcgtgaatgagacggctgagcttgccacgaccttgtgctgtgagatgcatacgtggttcctgaaatttgtggacgaggcaatggatttgggtttccacctttttgaagatcagaatgttgcaagtaggggaaagcagagcagccacataacaatggtactgtcccagttcaagaagatcagtgactggttggatggagtaggcaagattgcagaagaggctacaactaaggataaggttgagcagttgaagtgcaagatttatgggttcgtcatcaatcacatgggatctgcatttgatagctcggtctcgatttcatcaaggaattgaggaatgcttaaagtaagcctttaagtttcttctcttttatttttgttcattggggatgggatcaaagctacataattctatgacgagaggtctgctacagtttgtagaagctactccttcagttattacctttggttttgccttgtgaat

SEQ ID NO: 14319 - DNA, 347 bp, Oryza sativa
  unsure (1)..(347): unsure at all n locations
  Clone ID: PAT_MRT4530_20269C.1
gttcttggcaagagaaggcaaggcaagaaaggtggcaggttcttgtcaatctccaaattttcccattaaatttgcgatttcttccccactcctccccgtcagaaccgaggttttaccaggagtgcttcagatttggggtgtggagttattgcaaagaacctcgattcctgcaccggttcctcgatttgatgctgaagaaattgagcaaagtggtcttcgttttggtaaaacccccagctttctcagggcggaacagtagaagaaaaagattggaggagaggagaggagaggaagggttggttttnggaggatgattcagctgctgttcttggtngtgtttgcggagc

SEQ ID NO: 14320 - DNA, 371 bp, Oryza sativa
  Clone ID: PAT_MRT4530_2026C.1
aacaaaacaacaacacaggagaagccagcgcctccttacccaaaaaaaaattggggcaaaacgggctaaaatttacaaaggccggcacatcttttttacggggccggggggaatttggccttaaaagaggtaaaaaggtaaggaaaaaggtaaggaaataagggggaggtttggggttgcctgggggcccttttttcaacagaaatggtaaaagggggaaatgtgataacaccggggatgctggggcgcatgggggagggaacttggggtcacaccaaggacccgttgacgaaccaggaggcgaggcagggaaaaccgttgctggtcggggcacctaccaggttacagtttgctcaaaagaaacagggggc

SEQ ID NO: 14321 - DNA, 1419 bp, Oryza sativa
  Clone ID: PAT_MRT4530_20270C.1
atggcggcggcggcggcggcgaccaacggcggcttcgacgtgatcgtggtgggcggcggcatcatgggcagctgcgcggcgtacgccgcggcgtcgtcgtcggcgtcccgctgcggcggcgcgcgcgtgctgctcctggagaggttcgacctgctccaccaccgcggctcgtcgcacggcgagtcccgcggcatccgcgccacgtacccgcaggcgcggtacccgcccatggtgcgcctcgccgcgcggctctggggcaacgccgaggccgaggcgggctaccgcgtgctcaccccgacgccgcacctcgacatgggcccgcgcgccgacccggccctccgcgccgccatccagaacggcggcgccgccgaggtcgtcggcgcctcggacgattcggcggcgtcgtggctgtggtccgcggtgttccgcctgcccgaggggtggacggcggcgagcagcgagctcggcggcgtcatcaaggccaccaaggcggttgccatgttccagtcgctcgccgccaagaacggcgccgtgctcagggacaggacggaggtgatcgacatcgccaagcaaggagatggatcgatcttggtgaagacgtcgagcggggaggagttccacggcgccaagtgcatcatcacagtgggcgcgtgggcgagcaagcttgtcaagtcggtcgccggcgtcgacctgccagtgcagccgctgcacacgctcatctgctactggaaggcccgccccggccgcgagcatgagctcacgccggagtccggcttcccgacgttcgccagctacggtgacacctgcatctactccacgccgtccatggagttcccaggcctgatcaaggtgtgcgcgcacggcggtgcgccgtgcgacccggataggcgggactggtgcgctggcggcgacgccctggcggacccggtggcgcggtggatcgacgagctcatgcccggccacgtcgacaccgccggtgggccggtcatccggcagtcgtgcatgtactccatgacccctgatgaggatttcatcatcgacttcgttggtggggagtttggaaaggatgtggttgtcggcgccgggttctccggccatggcttcaagatgggacctgcagtcgggaggatcctcgccgagatggccatggacggcgaggccaagacggcggcggaggccggagtggagcttgggtatttcaggattggacgtttcgagggtaacccggagggaaatcgtgctgaaaataaggtgaaaatttgagtcctcgcgtaggcatggccacctgtaagagctagatctgtaaggtgatgtcggtgtgcgattgtgagatgtttgctagtactgtaatatgtcaaacattgcatttctgaacttatactccctccgtttcgaaatgtttgacaccattgacttttt

SEQ ID NO: 14322 - DNA, 249 bp, Oryza sativa
  Clone ID: PAT_MRT4530_20271C.1
agccagaggggattcctgggaacaattccacagcccatgaactcaaagaccaagacttgcttgtcttttagagagaaggtagaggagaggaggagaggggaaagggatggagaaataatggaggaaggaatgcagacggaagggaggagattttacaaggccgggtgcggagacgggaataagatagaaattgagggtgctctagaatataatatagaatatgagacccaacattattccagggactaa

SEQ ID NO: 14323 - DNA, 126 bp, Oryza sativa
  Clone ID: PAT_MRT4530_20272C.1
caagatacaactgaaatttcgctattgccaatctcctgaccaagacaatctggaaaacccgaaagacctacattcttactgactgctacttcattggagctacaagctatatatgcaacaatgctt

SEQ ID NO: 14324 - DNA, 192 bp, Oryza sativa
  Clone ID: PAT_MRT4530_20273C.1
atggtgatgaaggagaaggcaaacaaagctgctggatctggagccctatttggtagccgacgtggtggtgaagccgtcgtgctcctctcatcggcgttgtgtgcagtcgagaaggatgtggttcgtcgtctcaagctcctgagcacaaaaaggataagtcaagtggccatcgatgccacgcttctggactag

SEQ ID NO: 14325 - DNA, 605 bp, Oryza sativa
  Clone ID: PAT_MRT4530_20274C.1
cccgggctgcaggaattcggcacgaggcttagagcgtggtgtctatgtgtctgggctacgggaggaaattgtgaacagtgccgagcaagtgtttaagctcttggagcttggagaagcaaataggcattttggggagacaaatatgaatgtgcggagcagcagatcacatactattttcagaatggtcattgaaagcagcgcaaagaaccacatggattctggagatgctatccgtgtatctgtcttgaatttggtggatttagctggttcagaaagaattgccaagaccggagctggaggtgtgcgtctcaaggagggaaagcatattaacaaaagcttgatgattcttgggaatgtcatcaataagttgagtgagaatggaaagcaaagagggcacatcccctatcgtgatagtaagttgacgcgcattttacaacctgcacttggaggcaatgcaaaaacatcaatcatttgcactgctgctcctgaggagattcatgttgaggaaaccagaggaactcttcaatttgcaagtagagcaaaatgtgtcagcaactgtgctcaagtgaatgagattttaacagatgcagctctgctgaagaggc

SEQ ID NO: 14326 - DNA, 258 bp, Oryza sativa
  Clone ID: PAT_MRT4530_20275C.1
cgacgagctcctctgcagcaaccgccgagtcgtcgtggctacttaagcacaacaacaggggcagtgaaaaaacagtattaggcaacaattaattagatcatatctttagtttgatgccaccttgatgttgcttagctcttcgttgtttatgtgtattgttcttccttgggccgccgtgtcatttgtgatatgtacctcattcatatctccttttctatatatgcgttttcaactttcctagtaaaaaaaaaaaaaaaa

SEQ ID NO: 14327 - DNA, 403 bp, Oryza sativa
  Clone ID: PAT_MRT4530_20276C.1
aaataccgcccccacatggggcaaaattttattttagggcagaaaagctaaaatcgatcaattgtggcaccacaggaaaaataataaaggaccattatttgttacacatggaatcgttttttgccaacgataaaaacatcaccttttgatcaaacccagggtatttgtttttggaatattaccaacaaaacaagcgctggtttttttttttttttttcttctaaaggaaggccatgatctccttttgccgttaaagagtctcctgcaaggcctttttggccgttgaaagttcctcctccaatgcactaacacggttgacggaagtttttagcatctcctttttataagctggcatttttgcaggctgggggaaaatcgaaatgaccttttcccggacgcgggg

SEQ ID NO: 14328 - DNA, 189 bp, Oryza sativa
  Clone ID: PAT_MRT4530_20277C.1
aaggaaaaccccgatgcccccaaaaaaaacattcagcgcctcggtaggggaggtaacacaagaaaaaggccacagaacctacacaaccttcatgcaggcatccttgcatggggccgaccaccaacaaaccaggcatgtattacccacaaaagaagggcgggggggaaccgtggtatcgtgccatgcagg

SEQ ID NO: 14329 - DNA, 1284 bp, Oryza sativa
  Clone ID: PAT_MRT4530_20278C.1
gaatggaaagaggagatggcgctatacccttccgcgccaccaacatcgccgccgccgccggcacgcccacctctgcttcggcgtcggcctccgttacggacctgtcgtccgccggccggtcgcctctccccgccgccgcgctctcccccgtccgcccgagcgcccgccgctcccccgccgtgtcgcgccccgatccggcgccatccatcgcccgcacgatatggccttcctcctcctcctctaacagtggcaacacgagcactaggaaggcgtcgccgtcgccctcgtcccctgcgccagccgcgtcaaccccctcctcctcctcgtctgtggccaccacgctcgccgaccacctcgccgaagactcctcctcccgtccacgaggccagccggcgtcacactcaccccgggccgcgtcgcgccgtccgacctccgcaggctcgacgccggcgccgacgtcgccagctccgggtcggagtgcagcgacgcctccaggggcggcggcggctccacaccgaggacgacgacgaagctgcccaagccgccgccctcgccgccgcggccactccgccctagccctcccgccgccaccagacctcacctaccgccgtcacccataggaggcggcagacctccggctcctcctcgcccgccgccctcgactcccgtctcctcgcctgccgccggcgccgatctccatcctgctagcagaggtggcgccggcgttctcctgctcccgccacatcatcgctaatccatcccatccggcctcggccaccccactgcttctacgagttccatacccagaccgccgccgccgccgccgccgccattggtgaagcccgtcgccatcgccgtcgccgcttccacgcaagtccgtagcagcggattcctgcagcgccccccgaaacatcccgaatccccagccatggcggccggagcagcagcagccacccgccgcagtctctccgcgctccttctctcctcccgcgctctgcaacgccgcttcgccccgctcgccgccgccgcctcctcagcctacctcgccccgtgggcgccgccgtcacgcggagcgaagaccgcgtcgtcgggtgggtctgggtactcgccgctgaacgacccgtccccaaactggagcaatcggccgcccaattcccgaccgatcccaagccctccgaggaagatatggtcgccgcatatgttaagaccctcgccgccgtcgtgggaaggtatatgctcttcttctccaactatatttgagaaactccccttgaactgaagcag

SEQ ID NO: 14330 - DNA, 857 bp, Oryza sativa
  Clone ID: PAT_MRT4530_20279C.1
cccacgcgtccgcccacgcgtccgcccacgcgtccgcccgcccggctcgcccgccgccctcgactcccgtctcctcgcctgccgccggcgccgatctccatcctgctagcagaggtggcgccggcgttctcctgctcccgccacatcatcgctaatccatcccatccggcctcggccaccccactgcttctacgagttccatacccagaccgccgccgccgccgccgccgccattggtgaagcccgtcgccatcgccgtcgccgcttccacgcaagtccgtagcagcggattcctgcagcgccccccgaaacatcccgaatccccagccatggcggccggagcagcagcagccacccgccgcagtctctccgcgctccttctctcctcccgcgctctgcaacgccgcttcgccccgctcgccgccgccgcctcctcagcctacctcgccccgtgggcgccgccgtcacgcggagcgaagaccgcgtcgtcgggtgggtctgggtactcgccgctgaacgacccgtccccaaactggagcaatcggccgcccaaggagactatcctgttggacggctgcgactacgagcactggctcatcgtcatggagttcccgaccgatcccaagccctccgaggaagatatggtcgccgcatatgttaagaccctcgccgccgtcgtgggaagcgaggaggaagccaagaagaaaatctactctgtctgcactacaacttatactgggtttggcgcattgatttcggaggagttatcatacaaggttaaaggattgcctggagttctttgggtattgcctgactcatatttggatgtgccgaacaaggattatggaggattataa

SEQ ID NO: 14331 - DNA, 299 bp, Oryza sativa
  Clone ID: PAT_MRT4530_2027C.1
ggggggccaaaaatcaaattgcattaaatatttaaaaaaacgggagggcgtacatgtcaataaggactttatacataactcctggctttccacaacgaataacgtacgtacgtacgttcgtacttacttacgtgcatacccacacacaaacatgtgtgtatatttaagttcgtggtttaaccacgtttttaacaatgcttgatatgcctatgaaaagtcccgggctggaacaagcaggggagcatcaaggggccggttgtacaatgcaaccgtagcccactaagtgcaaaagccaaccc

SEQ ID NO: 14332 - DNA, 254 bp, Oryza sativa
  Clone ID: PAT_MRT4530_20280C.1
gggggaaagtccaatcagggcatgatttactacacccttggtagcatgggggacattggttaattacccgatttatcatgggaatgaagcccacttggaatttatctcgaacctgcatttaaaactatttatttctcaagaatgtttgtttaccagggatgggggtaatgctttcactggaagggatttcatttatttacttgaaaagaacaagccattttttgagggggatgaaaaaagttcaaagcattttt

SEQ ID NO: 14333 - DNA, 1825 bp, Oryza sativa
  Clone ID: PAT_MRT4530_20281C.1
cccgcttcagttggcagctgccctgtttctgcttcatgtcctgcccaaaatgccctcctcctaccctccacgcggctgtgtatacaaagagaacgcatccccccattgctcacttgccccctcctcctctttcacacctcacctcccaccaagataaagagcaagaacagcaagagcaagaagaggaggagggagaccacacaatctatcacaagcttagcaagatttatcagcaaggaaatggcagctctgacgagctacgagatggcggcctccatcttgctctgcgccgaggacagcagcagcgtcctcggcttcggcggcgaggaagaggaagaggaggaggacgtcgtggctgggaagagggccaggtgcgctggtccgccgccgccgccgtgcgtggacgtcgctggcgtggatttcgccgtgccgtcggaggaatgcgtcgcccgcctggtggagacggaggcggaccacatgccgagggaggactacgccgagaggctgcgcgccggcggcggcgacggcgacctggatcttcgcgtcaggatggatgccatcgattggatttggaaggttcactcctactacagcttcgctcctcttactgcctgcttggccgtcaactacttggaccgcttcctctcactctaccagcttccggatggcaaggattggatgacgcagctgctagcagtagcgtgcttgtcgcttgctgccaagatggaggaaaccgatgtgcctcaatcgctggacctgcaggtcggggaagaacggtacgtgttcgaggcgaagacgatccagaggatggagctgctggtcctgagcaccctcaaatggaggatgcaggccgtcactcccttctcctacgtcgactacttcctccgcgagctcaacggcggcgatccgccgtcgggacgctcggcgctgctgtcttcagagctcatcttgtgcatagctagaggaacagaatgcttgggattcaggccgtcggagatcgccgccgcggtcgccgccgccgtggtcggagaagaacacgccgctttctcccatgtaaataaggagaggatgtcgcattgccaggaagtgattcaggccatggagttgatacatccaaaaccttcaagccccagcagagtcttcgtctcctcctccattccacggagccctactggcgtgttggatgcagcaggctgcctcagctacaggagtgacgattcagctgttgcctcacactacgcagcaagcagctggggatatgaacatgatagctccccggttagcagcaagaggaggaagattagcagatgatgcagccaatgatggatcaattaaaagtctgtttatatgtgttgcgaaactgatcgtgcatctctctttcttgggaaagtcaaatggttttgattgcaaatgactgtggagcctttcgatgccgtatgggagctagagcctgaaaggcgatgaaggaccaaaagcaaggcattttcgacatggcaacagagcaaagatactgatggataaagagagtctgaggtagacatgtgctccaatattttcatgtgctttagcgttagttgctaggaggcaggcagccacaaaagagtagaggatttgtgggaagagagccgggcgagatgaaaatgagatgaccaaaataaaggcagagacgaggtgacagtggcacaaggcaaagcgagctaggcactgacactccagatgtcctgcgtgtgtttcagttttgcgttgttctgtaatttcccctgcttaattcctttgtgaagaaaaatcataaaaaaggagagaaacaaacaattttggtgtcaaa

SEQ ID NO: 14334 - DNA, 857 bp, Oryza sativa
  Clone ID: PAT_MRT4530_20282C.1
gcacgaggggcgccatggccgcgcgcctcctcgccgctgggttcgcggtgaccgcgtacgcgcggacgccggccaaggcggaggccctagtcgctgccggcgcgagcctcgcgggctccccggctgccgtggccgcggcgtgcgacgtggtgttcaccatggtgggaaaccccggcgacgtccgcgccgtcgtcctcgacgcggcctccggtgtcctcgctggcctccgccccggcggcgtcctcgtggactgtactagctcctccccttccctcgcccgcgaggtcgcggcggcggcgcgcgcggctgggtgctacgccgtcgactccccggtctccggcggcgacgtcggcgcgcgcgacggcgcgctcgccctcctcgccggtggcgacgaggcggtggtgagctggctcgcgccgctcttcgcccacctcggcaggccgacctacatgggcccgcccggcagcggccagagcagcaagatcgcgaaccagatcgcggtggccggggcggtggtcggtgccagcgaggcgctggcgttcgccaacgcggcggggctcgacgcgccgctgttcctcgacgcggtgtccaagggcgcggcgggttcgcgcgtcatggacatcttcggcgagcgcatgctgcgccgtgagttcgcgtccggtggctccgtgaagtacatcatcaaggaccttggcatggcgctggagaccgaggaggggccggagggggccaaggcgctgccaggggcggcgatgttccggcagatgttctccgcgatggcggcgaacggcgacggcgacctgagcctccagggattgatcaccgtagtcgaacgcctgaacggcattcgcaagtaa

SEQ ID NO: 14335 - DNA, 495 bp, Oryza sativa
  Clone ID: PAT_MRT4530_20283C.1
atgctgcgccacctgaagtcggccgcggcgaggagccccatgcgctcgccgccgccgcatcctccctccgcaccggcgccgagggacgaggggttcgaggaggaggaggaggaggaggagagcgcgagggccatcgccgtctccgaccagaggaccatctacctggtccgccccgccttcactcgccccctcaccccctctccgatctccacggtcgatctcatctggtggtgctccaccttcggggtgaacatgttcatagcgaacacggtggagttcctcaactcgttcgcggcgcaatgcaatgacaagctttccctcctccacaggaaaatagtgaaactagactcatctctcaaccttctggaagcaaaactacgcagtattgatgacactaatgcatttggacattcaacaaaccaaaaggcacatggattattcacacaagatggaagatttgaacctacaaatttattgggtgaatcctctaggtga

SEQ ID NO: 14336 - DNA, 417 bp, Oryza sativa
  Clone ID: PAT_MRT4530_20284C.1
acaaccgggggacccttcgccaaagctttcctggggaaaaacgggtttggacccacctaaaaaaagacccgggggtttaacagggccggaaaaccattatcccctttttttagggaaataaccccgcaaaaaaaaaaaaacccagggggcccaaggcaaacaaaaacaaaaggttttttactagggcaaaaagaaccccccgggtttacagacccaccaaccaaaataatggccaacggccgatcttttttagggggggggcaaaaaagctgccccaaccccgggaaggccccataaagcccggggaaccaaagccaaaaattccgggggggggaaaccccggccccgggggcccctcgcttgacccggaaaaaaccaaaagggaaaaaacccccctggggcgggggatgggccccc

SEQ ID NO: 14337 - DNA, 246 bp, Oryza sativa
  Clone ID: PAT_MRT4530_20285C.1
atgcatcggaaggagatcatcaatcatggcaacgagatagatggtgacaacgaggatgttgtggaggcgaagcttgtgatcaaaccagggatggcagaacgtgattggaagatgaggctggacatggccggcgaagctgacgaacgtgatgcggtgcggtggatgtgcagggcagaggacgatgaggtcgtggatggtggacacgagggctgcgactgcgaccagaccgagctaggtcagagctag

SEQ ID NO: 14338 - DNA, 1314 bp, Oryza sativa
  Clone ID: PAT_MRT4530_20286C.1
atggagtacggcacgccgcagcatttcatgtgcccgatctcgctgcagccgatgcaggatcccgtcacctcccccaccggcatctcctacgaccgccgcgccatccaccgctggctcgccgccggccactcctcctgccccgtcaccggccaccccctctccctctccgacctcacccccaacctcaccctccgccgcctcatccactcttggcaccactccactactacgccatttcccgtcgagcgttcgacgccgtcgccgccgccgcttcgggaggttgacgacgacgacgtcgtggagaggctggtgatggagatggagggtggtggtggtggttcttggtgccccccgtcgtgtgacttgctccgcgaggcggcggcggtcgcggcggggagcggcgtcgcgcggaggcgcatggtgggcgccggcgtgctccgccgcgtgctgcgtttggtggtgtggtgtggcgggagggggtcgtcgtcgggtgaggcggcggtgatggtggagatgtttgatgcgtgcctcgctctcttccacgcgctcgacgtctccgccgacgagctccgcccgctcgtcgccgacggccacgacctcgtcgacgcggtgacgcgcgtgatggcgacactcgaggccggcgacgcgaacgcgacgagggcgagggagagcgcggtgcggctgctggaggccgtgacggaggccgccgacgcgccggtcctggagcggctgagcccggagttcttctccgccgcgacggccgtggtgcgcgaccgcggcgccgtgtccccgggcgcggcgcgcgcggcggtgcgggcgctggcgaacgcgtgccgcgcccgcgcgagcggcgcctgcaggaaccgcgcgctcgccgtggacgccggggcggcgcgcgaggccatcgagctggagctcgacgcgtggtcgtcgccgcaggccccgggggggcggcgcgccacggaggccgtgatggcgctgctggcggagctgtgcgcttgcgcggaggggcgcgcggcggtggcgtcgcacccggcggggatcacggtggtggcgaggcgggtgctgcgcgtgtcggccgccgccgacgcgtgcgccgtgcgcgtgctggcggccgtggcggggcgggcggcgtcgccggaggtgcttcgcgagatggcgcgcgtcggcgccgtcgggaagctgtgctgcgtgctgcaggcagagtgcgacgccggcgtgaaggaggcggcgagggcggtgctgaggatgcactccggcgtgtggagcggatcgccatgtgtcagcgcttacctgctgtctcgctacctctaa

SEQ ID NO: 14339 - DNA, 230 bp, Oryza sativa
  Clone ID: PAT_MRT4530_20287C.1
gcacgaggttcatactcgttggaagagtttaattacaaaatggacccctcaagtttcacaaaaggttactttggtccatcaagtttaaaagaagccactttagaccctgcttgggtgagcttcagatttatctgaagctgatatcaaacaaacccaactaatcctgtaaggatgatttacttaacatgccatccaagaccggtccaaattgttcacacaatatctgccgc

SEQ ID NO: 14340 - DNA, 902 bp, Oryza sativa
  Clone ID: PAT_MRT4530_20288C.1
attctacacgtacgctgaaatccagcagcctttctctctctcgcgcgcgcgcgttcttcctctcccctttcttcttcgaatttcagagcagttgatggcgccgcagcagaaggtgatcttgaaggtttcttctatgagtgatacgaaaatggagcagaaagcaatggaaactgttgcagatatctatggtatcgactccatagccgccgatcataaagatcaaaagatgactgtaataggtgaagttgacaccgtcgagatcgccaagaagttgaagaaattcgggaaggtcgatatcatatcggttgggcccgccaaagaagagaagaaggatgataagaaaggggacaaaaagtgatcagacttctttagtttcaggccttcagatgaatatactgtgttcttctgatggcgtgtacacttgggctatgtataaattgaggagggggttagattcaagggtgtaaagttttggcatgtcgcatcggatattatatagggtgtcatatggtgtgttcagacactaataaaaagctaattacagaatccgtcagtaaaccacgggataaatttattaagcctgattaatctgtcattagtaaatgtctacggtagcaccatattgtcgaatcatggagcaattaggcttcaaagattcgtctcgcaaattagtcgtaatctgtccaattagtttctttagcctatgtttcagactttatgcagaagttctagcattagatgttacagggtgaaaaatattgtggtggaatgtaagcagggtttgagtgatttgagtatatgtattgtaattatatgcagatgtattagtacaatttgagaggtggtgccttctccgctgtagcaacggacccggaaatacaaaaatctgttttttttaaccc

SEQ ID NO: 14341 - DNA, 671 bp, Oryza sativa
  Clone ID: PAT_MRT4530_20289C.1
attctacacgtacgctgaaatccagcagcctttctctctctcgcgcgcgcgcgttcttcctctcccctttcttcttcgaatttcagagcagttggtgatggcgccgcagaaagtgatcttgaaggtttcttctatgagtgatacgaaaatgaagcagaaagcaatggaaactgttgcagatatctatggtaagctgctactaacttgatgccctcctcttcagattctgtcgatatgttcggcctgcatgtcttgatagctcgttgctactttggaagtaatcagtaatcacggtttctccgttcttatgttgaacatatatgctaaatttatatcaaattgagtccatcttaatttgacttgattttgtaatctgaaacaggtatcgactccatagccgccgatcataaagatcaaaagatgactgtaataggtgaagttgacaccgtcgagatcgccaagaagttgaagaaattcgggaaggtcgatatcatatcggttgggcccgcccaagaagagaagaaggatgataagaaaggggacaaaaagtgatcagacttctttagtttcaggccttcagatgaatatactgtgttcttctgatggcgtgtacacttgggctatgtataaattgaggagggggttagattcaagggtgtaaagttttggtt

SEQ ID NO: 14342 - DNA, 1023 bp, Oryza sativa
  Clone ID: PAT_MRT4530_2028C.1
atggcggggctccgcttcgccgaattcgaggcgctccacgccgagcttgccggcctgggtggtcgtcaggcggtggcggcggcggaggcggaggaggagaaggaggcggacatgagggaggcgttcggggtgttcgacgaggacggcgacgggtacatctccgcggcggagctgcaggccgtgctgtcgcggatggggctcccggaggccgcgtgcatggcgcgggtgcgcgacatgatcgccgccgccgaccgggacagcgacggccgtgtcgactacgaggaattcaatggggagggaatgatggccgctggcgaggagcacgggtcgctgctggagaagatcaacgacaagatccatgagttcaagaagggatcgtcgtcatcctcgtcctcggactccgacgacgacaagaagcaccaccacaagtccaagtccaagaagaagcggctcttcggccggacgaacccgctacatcacgtcctaggaggaggcaaagctgctgatcttgtgctgtggagggacaagcagacgtccgggagcatcctggcgggagtgaccgaaacctggttgctgttcgaggggatcggttacgaactcctcaccttcttctgccactcgctcatggtcttcctcaccgtctgcttcgtctgggccaatgccgactccttcatcaacaggggtcctccaaagttcccagatgcaattctgtctgaagtccaatgcctgaagattgctcatattctgaggaaagaaatcaatgaggccttcttaacattacgccatgtcgcctccggaaaagacctcacaacatatcttatgatttcactgcaaattactacttcctccgtttcacaatttttcctgatggcatacacactgccaatgctgtatgagaaatacgaagatgaagtcgatgtcgtgggcgagaaggccctaatcgagctcaagaagcaatatgcagtgcttgatcacaagcttctctcaaagatcccaatgttagctgagaagaaacagcactaa

SEQ ID NO: 14343 - DNA, 2072 bp, Oryza sativa
  unsure (1)..(2072): unsure at all n locations
  Clone ID: PAT_MRT4530_20290C.1
cgcacactcgagattggtggggtggatttgggggaggaggaggtggggtggggtggggtggttgctgaggaggaggtggtggtgagagaatcgggcggcgggttgccgccggaggaggtagagggatcctcgggggagggcggttcttgggtcgggggacccccccatggcgtgaggagagggtgccctccgggagatcttgcggggcgggtgtgtggtgttgctagctgaggctgttgggtgggtacccccgagcggccggggaatctcctcccttctcgagcgaccgcccgcgtcgctccgccatggccggcagcgacgaggtcaaccgcaacgagtgcaagacggtggtgccgctccacacatgggtgctcatctccaacttcaagctgtcgtacaacattctgcggcgggcggacgggacgttcgagcgggacctcggggagtacctggacaggagggtgccggcgaacgcgcggccgctggagggggtgtcgtcgttcgaccacatcatcgaccagtcggtggggctggaggtgcgcatctaccgggcggcggcggagggtgacgcggaggagggggcggcggcggtgacgcggcccatccttgagttcctgacggacgcgccagcggcggagccgttcccggtgatcatattcttccacggcggcagcttcgtgcactcgtcggccagctcgaccatctacgacagtctgtgccgccggttcgtgaagctgagcaagggcgtcgtggtgtccgtcaactaccggcgcgcgccggagcaccgctacccgtgcgcgtacgacgacgggtggaccgcgctcaagtgggtcatgtcgcagccgttcatgcgcagcggcggcgacgcgcaggcccgcgtgttcctctccggcgacagctccggcggcaacatcgcccaccacgtcgccgtccgcgccgccgacgagggcgtcaaggtctgcggcaacatcctgctcaacgccatgttcggcggcaccgagcgcacggagtcggagcggcggctcgacggcaagtacttcgtgacgctccaggacagggactggtactggaaggcgtacctgccggaggacgccgaccgggaccatccggcgtgcaacccgttcggcccgaacggccggcggctcgggggcctccccttcgccaagagcctcatcatcgtgtcgggcctggacctcacctgcgaccggcagctcgcctacgccgacgccctccgggaggacggccaccacgtcaaggttgtccaatgcgagaacgccacggtggggttctacctgttgcccaacaccgtccactaccacgaggtcatggaggagatctccgacttcctcaacgctaacctctactactagtacatatacagcccctctccctctccctctcccccctcgctgatcgtcgtctccaacacaaatactccttatagggaagatggtaattcagcttgactttgttatagtacctactactactactactactacctcctatactactgctgctgcttgggatcgcaatgccgtcgtctgctcttgtgtggcgaaggagaagctagctccatgctgtctgatcagctctaatcaaatggtgactcggttgcgtcgaggaagaagaagaaagtcgtccgtcgtcgtcgtccttgttccactaatcatcgttcatccttttctttttttgtggtttggatcgttctttgatccatgttttccatgttttgcctggggtcagtgtagtcaagacaagttgagggtagttccatgtctgtcatgcatgcctccattagtactactactgttgtgactttggttgatggagagaagaagcatgttttttttttcttttaatctcgcattccatccatcttctccatgtactccaaagagaggaaagttgctatctaacgttatgtgtacagtgatcgatcaacaaggagatttgaggaggcatgccccttttgttgctgttgatgttctagttttancttctttcttgttaacaggattggatggtgctctcttgctcactctcaaaaaaaaaaaaaaaaaaaaaaaaaa

SEQ ID NO: 14344 - DNA, 354 bp, Oryza sativa
  Clone ID: PAT_MRT4530_20291C.1
atgaagaccaattcgcaaggtaaactggagtcgagaacaagagatcttaggcagagcttgccaagtcggacactcgagtccgagtcggactccgacacctgtgtccgtgtcccgagaggaagagggaggagcggaaggttgacccggacgacgctcatgctcgccggcggcgggtggcgagcgcactggggcgggctgcgacgggcggacagggggaggaagacggcgacggcgatggggaaggaagacgccggcgatgggggaggaagacgccggcgaagagggaggaagacggcggcggcgatgggggaggagggcttaccggcgtcttcttcctctcctcgtcgccgctag

SEQ ID NO: 14345 - DNA, 346 bp, Oryza sativa
  Clone ID: PAT_MRT4530_20292C.1
aggacgctgagggcgtacactgggtacgataacacagctgtctgtctccgataggatcggaatgatgaatggacggactcaccggatactctaccgctttggcctacaaatcgagcgtgaatgcgcagcgccgtcaaaacacgcacaaacggctctccgtggagagctgcgagttgtacactatcgtcggcccaggacacatggctcatactatgactgatgcggccaatacgcaatacagggagctggagctggcctctatgctggtatcctcggaggggacggcaccacacgccgctatcggcgacatcgcttgagatgacaccaagcactgagctcaaggagc

SEQ ID NO: 14346 - DNA, 477 bp, Oryza sativa
  Clone ID: PAT_MRT4530_20293C.1
atggtgagtggtgtggaggaggagaaagtgagaggggaggaggaggaagaggaccggccacagctgagcgcggcggcagtggaggcgctaccggagttcctgctggagcaacggcgggacggaggggaggaaggcagcgacggggtggagccggtggcggaggactggcggttgagccagttctggtacgatgagcacacggagcgggagctcgccgggaaggtcgtccgccccgtctccctctccggcccagcctcctccgccaccgctgctgcggtggcctgcgtggcatgcccaacgctctacgcctacctcaagacgagcaacccgaaaggcgttggtgacaacggcggagttcggggcaccgtcaggagcggcgcggtggaagaggcaaccggccgaggtggagggtcgaagacggcctccagatcgggggggacccagcggcggtccggccggcggtggataggcatctaa

SEQ ID NO: 14347 - DNA, 369 bp, Oryza sativa
  Clone ID: PAT_MRT4530_20294C.1
atggaggacgtcgccggcgtcgttgatgcagcggaggatgtcgtcaagccggcggcggcgaggcagccgatcagaaggcaagggagcctgcggctgcgcgccctcgcgccgggatccatcgacgtgcgagccggcggcgccggcgacgggagcgccgcgtcggagtactgccacgacgccgtcgccgccgccgccgaggtaatcccgctgctcacgccgctccatgccgtccctgcggcgccggcggcgtccgatcaggtgtccggcggccgtactgcgcgccatctgacggaggtggtcgccggcggcgggcgagaaatcctaaaatatagtaataattttctgatgatgtatatggagaaaaggtaa

SEQ ID NO: 14348 - DNA, 498 bp, Oryza sativa
  Clone ID: PAT_MRT4530_20295C.1
ggtgatggatgaatgggaccgcgggatatgagggtgtaatgggcgatacggagcaggagaggttaaaaaaaaattgaatggcaatgggtgctggtggttaaaaaaagaaacggaatcttattaggtggtatcaaagcatgccccaaaattttggtggtaagactaaaagggaaatatttcgggtggtatgaaaccaattttccctttcaagttaaggattaaggttacataagtggcttcccactagccgtttgagatgaactttctgctgaaaatctgtggtcagagaactgttgaaagtaggatctactcccacatagagcctgtatattacaagggctttagctctctttccttgagaagtgtttctagcttatctggcatacaatgccctcagaaaatcaggaacttgtcttgtaatcacaaactatgcttaagatgttactcattggaaagagacaaacatatgccagaattatgcacactgcaacaacctac

SEQ ID NO: 14349 - DNA, 586 bp, Oryza sativa
  Clone ID: PAT_MRT4530_20296C.1
atgcgtctatgtgataccgatattgagcattatttagatcaagatctcattaacattagccctcgcccaactaatgataaaatttctggtgcgaccgttgatgtgcgactaggaaattcattccgtgtttttcgtgagcacgccacaccttatattgatttaagtgggcctggtgaacaagtcagcgcacaacttgaaaaaatcatgagtgatgaaattattttagcagaaggtgaagcttttttccttcatccaggcgaattagccttggccactaccctagagtcagtgaaattaccggataatattgttggttggctagatgaacgttcttcattggctcgcttaggattaatggtacatgttaccgctcatcgcattgatccaaggttggcacggcaaaattgtattagaattctttaatgctggtaaactaccattagccttgcgtcttaatatggcgattggtgcattaagctttgaagtattgagtggagcagcggctaagccttataacgcccgtgaagatgcaaaatataaaaatcaacaaagtgcgatttcaagtcgtatcaatgaagataaataa

SEQ ID NO: 14350 - DNA, 447 bp, Oryza sativa
  Clone ID: PAT_MRT4530_20297C.1
atggccgacggcgcgggacgtgatcgctccggcctcgggccggggaagaggaggaagacgtgcgcccggagtccacgtcacgcgtcctcgctcgtgccgactcctccgacacgcgcgacgacgaacggcgacggcgaacagggcagggctgcaatggcgcggcggctaacagggcagggctgcaatggcgcggcggctcggagcgaaacagggggatcgagcaagagggggaggggcggcttttatggggtggttatgcgccacgacggaacgggcgctgcacatcgcgccgtcgaccttctctacggcgggagggctcgggcgtctccgcctccctcaccgatgatgttaccgatgccacggatggggtcaaagatggcggcggtggccgatatggtcgaagacaaaggtggcaatggcggtggctcccaagccctcccgccatga

SEQ ID NO: 14351 - DNA, 429 bp, Oryza sativa
  Clone ID: PAT_MRT4530_20298C.1
ttttatatttccccctatttttatttttttttatttttgttttttttaatttttttaagcgtctacacaaaacatctacaacatccaagaaacaaccattgtccaaaacataacaacataccaacaaaagctcaaagcagcacaacaaggaaacaccaacctcaaaaaaaaaacaaccctaaaccctacagacaaaggcaaaacctagacctccaacaacgaaaaaatcccaacaaaaatcctatggagtcacctaaggttcaaacccacaccccgtaataaacaacggataatatcactcaagaagctaaagcaaccgcaaaaacaaaaccaatcctcaccaccataaactgcttccccgcatacacctgaaggccctccaacacccaacaaaacgagcgtgcacagcccctcgaaaaacataccaac

SEQ ID NO: 14352 - DNA, 793 bp, Oryza sativa
  Clone ID: PAT_MRT4530_20299C.1
acatgttgccagcccgtgcttcccgcctctttgcaagggcaaaagcactcggtatgatgactaaagggtatgtctggattgtcacagatagcattggtattgtccttgatgtgcttccccaacattccattgaaagcatggagggaattgttggtttccggccatatattgcagaatctacaaggatcactgatttcagctctcgatttaccaccttattcagaactaaaaaacccactatctttcaattatgggcttatgatgtggcatgggcagtcgcaacagcaactgagaaggttcataggaccagatctttgaacccaacttttcatcctccgggaaacataggcaagaacttagtagatgatctcccagcattgcctgctggtccagaactcctcaattccattttgcaaggagagtttgatggattggctggacaattcaggcttatcgatagacatctgcaggttcccacatatgagattgtcaatgttattggagagaaaactagagttatcgggttttatagtcctgattctggactcacaatgtctgtgaactctagaattatccatggtgatgctaaatttagcacaagttcttctgatctggaaaatatcgtttggcctggagattcaacaacagtgcccaaaggctgggacttcccagtgaatgctaagatactccagattggtgtgccagtgagacgtgattttaaacttttgtgaatgttgagactaatccgaacacgaatagatcaactgtcagtggctacagcattgatatgttt

SEQ ID NO: 14353 - DNA, 223 bp, Oryza sativa
  Clone ID: PAT_MRT4530_2029C.1
gcgctattacctgctccctgaggcgaggagaggcgctatgtttgttgggtactggtcggaggacgactaccactacttctctaaggcggtccttatcggctacttcggggtctgctaagtcaaccttatctaccgctttacccgcaacgagtccagtctggagtccatgttcaccatgggcgttgagtttgccacccgctacctccaggtcgacggaaaggtc

SEQ ID NO: 14354 - DNA, 1114 bp, Oryza sativa
  Clone ID: PAT_MRT4530_202C.1
gcacgaggtgattcctcacagagactccacaagcctccattagaattattccctctgccgctacgttaccctgccggatgattgccctaccctcatctcatcatctcctccacctataaagctacccagctgatgcttccgatacgatcgagccgaagattatctgtgtctagtagctgatgctaagctcatcgtcgagcgggcatgatagctagtgcatcatcagctgcaagaagaacagccaagaacaagaagctgctgagctcaacaagctgtgtgcatgcgagtcgatagggagatggagagaggggacgaggcgtcggtgaacagggggtggcttgagctcaggctaggcgtgaacggcggcggcggcgttgagacggtgccggtcacggcggcggactcctccgcgtcctcggaggccggcgaggcggacacggtgacgccgtcgcagcagcagcagcagcagcagcagggttctccttcttctccggcggcgtcgtcggcgccgaacaaggtgttctcgtgcaacttctgcatgcgcaagttcttcagctcgcaggcgctgggcgggcaccagaacgcgcacaagcgggagcgcagcgccgccaagcggacgccgtcgtcgtcgccgtaccacctccaccaccacaggatgatgatggccggcgccggcctgccgctcgaggcgcacgccgcgttcatgcgcgccgccctccgcgtcaacccggcgggctcggcgatccacaagcagcagcagcagcaccagccgccgccgccgatcacccaggacgccacggcgccgaggttccacgacggcgcagccgtggcggcggcggcggcggtcacgccgtgggcgcccgtcgccccactcgcctacgacgaggtgctcagctcgtcggcgtcgtcgtggcccgggagcttcaggttcagaacgcagcctgagcctcctcccagctcggagcaggagccgccatcagagcagaatgtgaaattcagcaagtacatctctgcggatgttcttagtttgaaatccaggataatcatgttgaaattatgtcataacagaggatatgacaataaaggatgtaattctgcaatctgcactgcctaa

SEQ ID NO: 14355 - DNA, 3146 bp, Oryza sativa
  Clone ID: PAT_MRT4530_20300C.1
atggagcctagaggcttatttggctccaggagggaagcagcctcctctgctgctacctgcagccgtcgtcgtagtctcaatgtcgtcttcttcttcttcttcccgctgctcattgtcgcggcggcggccggcaacacaacggcggcggcggccgcggcggcggcgagggtggcggtggacgtcggggtgatactggacctggcgacggcgctggggaagaagagcatgctgagcatggagatggcgctggaggacgtgtacgcggcgcacccggagttcgccacccgcgtcgcgctgcgcgccagggactcccgcggcgacgtcgtcgccgccgcgtctgcagcaatagatctcatcaggaatgaaaatgttgccattgttattggtcctcagagcactttacaagcagaatttgtgacctacctagcgaacaagaccaaggttcctgtcatcactttctctgcaaccggtgatgcagtcactcggtaccatgtcccgtacttcattcgtgcttgttccaaggactcctatcaggtggcctccattgctgcattcgtcaaagcctatgaatggagaaatgttgttcttgtctatgaagacaacaattatggtgttggcatcctcccttccattaccgatgctcttcaaggtgtcggggttaatgtcattaaccgttctgccttccctgcttattcccccaataaccatatagatgtggaactatacaagctcatgaccatgcagacgcgtgtcttcattgtccacatgttgccagcccgtgcttcccgcctctttgcaagggcaaaagcactcggtatgatgactaaagggtatgtctggattgtcacagatagcattggtattgtccttgatgtgcttccccaacattccattgaaagcatggagggaattgttggtttccggccatatattgcagaatctacaaggatcactgatttcagctctcgatttaccaccttattcagaactaagtaccatccaaatactgatattaggatggcaaaacccactatctttcaattatgggcttatgatgtggcatgggcagtcgcaacagcaactgagaaggttcataggaccagatctttgaacccaacttttcatcctccgggaaacataggcaagaacttagtagatgatctcccagcattgcctgctggtccagaactcctcaattccattttgcaaggagagtttgatggattggctggacaattcaggcttatcgatagacatctgcaggttcccacatatgagattgtcaatgttattggagagaaaactagagttatcgggttttatagtcctgattctggactcacaatgtctgtgaactctagaattatccatggtgatgctaaatttagcacaagttcttctgatctggaaaatatcgtttggcctggagattcaacaacagtgcccaaaggctgggacttcccagtgaatgctaagatactccagattggtgtgccagtgagacgtgattttaaaacttttgtgaatgttgagactaatccgaacacgaatagatcaactgtcagtggctacagcattgatatgtttgaggcagctgtcaagaaattaccgtatgctctacgctacgagtacattccctatgattgtgctgtttcatatgacctgctagtatcccaggtcttttacaagaagtttgatgcagcagtcggtgatgtgacaattattgctaaccgaactagatatgtagatttcacaatgccatacacagagtctggtgtttcgatgcttgttctatctaagagtgacgatgaaccaaccacatggatcttcctacagccactagcaaaggacctatggattgccactatgatctttatcttcttcacaggcctagttgtatgggtgattgaaagacctataaatcgcgatttccaagggtcaaaatggaaacagtgcatcactgctttctactttgcattctccactttgactttttcacatggtcaaaagatccaaagcattcagtcaaaaattgttgtgagctatacagcaagtttgtcatcaatgctaacggcagagaggctccaaccttcagtgactgatctaaaacaacttttggccaatggtgattctgttggacaccaaagtggatcatttgtgcaatcaattctgaagaagcttaaatttgatgaccacaagataaaggtttatagcacgcaggaggaatatgcaaaagcattaaggatgggatcaaagcatggaggggtttcggctatcttcgatgagataccctatctaaattctttctgctcgaaatacgggagggagttccagatggttggccccattgacagaacaagtggatttggttttgttttacctaaaggctctccattggtaccagacctttcagaggccatcttgagcttaacggaagaacctgaaaggttgaagattgaaaagacatggttcatggattcgtccttggattattatggcagtcacagcaaaggctcatcacgtatcagttttcagagcttccaaggtcttttcatcattgtcgggtgccttttaggtgctgtgctgttgataaactttagcaagtttctatatgacaaatgcaaagagatgagaggcttcggttcagaccgtgtccatagtggcgagagagttgtttgttacggtgaagctcaaccacaaccaccgcagattgtcatggtcgatcgacgatcctgtgcctgctgataccctccagattaggactgaaaacaaataaagagtgtgaacagttatctgcaccaactatcccaactcccaaggcactagaatggctctgaagctagaaaaaagttcacttgttttggcctgcttgttgcatggccttgcttaactgtgtaagcctcttctgttggttttaattagtcaattgaaagctattctaaaactctagatttgcaataattgtaatgataattgtaatgtagcacaaacatgctgaacgatgttcagttgatgtttttcttttcttgggacaaaactcaattgtaagctattctaaaagaactctagattgacaatgattgtaatatagcacaaacacgacgaacgaagtttttcttgggcaagagtcaactgtaagctattct

SEQ ID NO: 14356 - DNA, 1332 bp, Oryza sativa
  Clone ID: PAT_MRT4530_20301C.1
atggggtgcaccaactccacggaggcgcggcgggaaatggtcttggccgacgccggccggcgcgcgacacggagcttctcgctgcccaccgtcgatcggcagcggctacggtggaaggccgtgtcgatgctgagctcgctcggcatctcccagggccggcgctccggcgcgttcaagtacgcgaccacgtcggtggaggggatgatgaagagcgagaatgaccacgccgggcaggcgttgctccatgtccaggaggcggcggcgaagcgggctgtgatcaagccctgcacaccgacgctgactccgcccaacgagccagaggtgatcaatgcgtgggagctcatggccgggctcgaggacgatccgccgacgccgccgtgcgcgtcgcatgaaccaccggcggtgacgccgcagtggatgcaggctgatacggacatccccatcgtcgccttggacttcgatccggagatactgtccggcttccgggaggctcttgcggacacgtcgccgtcggagccaacgtcttgctcggtgacggaggaagaagaacaaccggcgcaaccggagaagcacgccgacgcctgcgacgcgccaacctcgctggccaccggcgacatgccggagaagcgcgccgatgcctgcgacgcgccagtatcgctggccaccggtgacatgccggagaagcgcgccgacgcctgcgacaagacaatctcgctggccaccggcgacatgccggagctctcaggcattgtccgcgcccgcatcaacgcgttccaagaaaagatagagcggaggtcgagcaagggcgcccgcgacgcgaaggtggcgcacctgcggccgccgggaggcgacaagaaggcggtcgtctacttcaccagcctccgcggcgtccgcaagacgttcgtcgactgctgctccgtgcgcagcatcctgcgcagctacggcgtgcgcctggacgagcgcgacgtgtccatgcacgccgtcttcagggccgagctcgcggagctcctcggccccggcggcttcgcgtgcgccgcgctcccgcgggtgttcgtcgacgggcgctacctcggcggcgccgaggacgtccacgcgctgcacgaggcggccgagctcgcgcgcatgctggaagggtgcgaggccgcgccggtgcgcaagctcgggtacatggaggcgtgcgccgcatgcggcgacgtccggttcgtcccgtgcgagacgtgctacggcagctgcaagatattcgtcgacgacgatgtcgacgccggcgagttccggcgatgccccgattgcaacgagaatggccttatcagatgccctgtctgctgctgctga

SEQ ID NO: 14357 - DNA, 221 bp, Oryza sativa
  Clone ID: PAT_MRT4530_20302C.1
atgcgtggggtacgtgctagcggagctgcgcgcgggtgtccgaggcgtttgacaccatacggccttcggttgtcccggccaagctgcgaacgcttgctgcagccgactggcgacgaccgcttggtgactggccgtaagtggaacagggtggtggaacaggcaggagaggaggtccagcggtcggtgacgagcaacgccatatctgagtaagtggaacgggg

SEQ ID NO: 14358 - DNA, 501 bp, Oryza sativa
  unsure (1)..(501): unsure at all n locations
  Clone ID: PAT_MRT4530_20303C.1
taactatatggtaaccccgtgcgtgcccttggtgcccgacaaccccaggccaagtgctacgcatcatttatgtggaccttcttcaagggaagccacaagaaccnntcgccaagttgagacgatgtagaacctgtgagatttaggagcccatagtgtaccagtcacccagttaagataggacccgtcgccccttttgatgatttctgtagttgataattcgccatttacatcttttggacccctgacccccacgtggatgatcgaagatcgtaatctgctggtgtgcgccacgcggaagaagaagaaaaactgtgagatctcccccccgttccccactttaaaagctttccctggattccaggggtgtaatgtgtcggagttaatatcgttttagttttgccgctctttggacagaagagggatgaaatagtttacgatatatgtgcttattgttcgggaaacccgcctgctcttttgaacccgatgaaaaaaaaaaaaaaa

SEQ ID NO: 14359 - DNA, 297 bp, Oryza sativa
  Clone ID: PAT_MRT4530_20304C.1
ggccgtgtatttggcgccctttccggccagagccaactcggcctgctgtttgttgccccagaggaggacaacatggagacgatcgtcgcgcaggatgcgcttgtaatcacgtggaactcgtcgccagacaccgcagatcttgcccgtggcattctgatagacactgagagtgcccgccaaggtggtgtacatggacttcatttcctcacccttgaggaaataggaggagctggtgaatgggattacaatttcccgcaggatttggcggattctattgggatctgggtgggtgtccgg

SEQ ID NO: 14360 - DNA, 765 bp, Oryza sativa
  Clone ID: PAT_MRT4530_20305C.1
atgaggcctcaagctctcgtgctcgccaacttcctggccgccgcgctgctgcacccgttgctgtgccaaggcgccgccgccgcctcgcctgcctccatcgccgggaagctcgccatggacggaatggccatcgaccaagggatcgatcacttgctcgtactcgcggcgatcttcgtcatgtgcctatatggcgttgctcgtcaccgaccgctggacctcctctcctgcctgttccaccaccctgttccacttactcagacgacaatgagaaaagtgagagatagaggagaagagagagaaaaggagaaagagatcaagaggacgcgggtggttgaatgggctgaatcactatgcaacgtacgcaacgtgccgtatgccgcctcacgttacgtacccagcatcgctgcgacgcgctcctctgcgcaccggccagtcaccaagcggtcgtcgccagtcggctgcagcaagcgttcgcagcttggccgggacaaccgaaggccgtatggtgtcaaacgcctcggacacccgcgcgcagctccgctagcacgtaccccacgcatgagtgaaccaccacccggtcgtccgtgttatgccaaacgcaagaggcagccgcacgtccgcacccctcgccgcgagaaccgatcgatcgatcgatgccaagcacttgccgtttcttcgaaggagcgctcaaaaggcagcaggcgatgcgccccgcccggtttgcgccatctacgccatgccagattgccgatgcgcgtgtattaa

SEQ ID NO: 14361 - DNA, 272 bp, Oryza sativa
  Clone ID: PAT_MRT4530_20306C.1
gaggacaacatggagacgatcgtcgcgcaggatgcgcttgtaatcacgtggaactcgtcgccagacaccgcagatcttgcccgtggcattctgatagacactgagagtgcccgccaaggggaaacgggcggtggccaccacattctgcggattgtaggtggtgtacatggacttcatttcctcacccttgaggaaataggaggagctggtgaatgggattacaatttcccgcaggatttggcggattctattgggatctgggtgggtgtccg

SEQ ID NO: 14362 - DNA, 266 bp, Oryza sativa
  Clone ID: PAT_MRT4530_20307C.1
attgtttatcagtagtttagtacttgcatatgttaaacacattaaatttatggccaattctgcttatatcagttatacattatataactattagttagaactatatgaaattatagatatcaattgtgaggcttagtgatgaattcagtcttacctctttctatttcgaatacccaaccttaaaatcctaggcccgctatcgtctattgggcgtggcacggatttggggatccattgggcacgaattttgggacccaatgagtcct

SEQ ID NO: 14363 - DNA, 144 bp, Oryza sativa
  Clone ID: PAT_MRT4530_20308C.1
atgtcaattgctaattgggaccgcattttctatacatgcaaggagaagaatgagagctataaggagatatatgcgacgtgttgtgatgtggagggggctgcgagcaaaagtgttgcctacgtggcatgccacgttggcggttaa

SEQ ID NO: 14364 - DNA, 425 bp, Oryza sativa
  unsure (1)..(425): unsure at all n locations
  Clone ID: PAT_MRT4530_20309C.1
atttgggttactgataaacttgcaaaatcattaacgtcagcgtccaaacaacgaccagatcagagtaaccattgccatcaaagttgtttgtaagaagcttaggcacgcaatcgcttgttgtcgacatccttactccactgccaagatttgttagctaagtattcatatatgcacacagaaactaacagagatataaaattatgaaattcacattggctagccatttggaagtttcaatgtggagtatctagttttcttctggatgaatgcatcacaggggtagctttcatgattattgattttacaggatcattacttgaagttccagagaccatatattttttatggcatctctttctattcgtattcctggggtattatttgngtacttnctctttgctttttaagncattccaagggaaccg

SEQ ID NO: 14365 - DNA, 175 bp, Oryza sativa
  Clone ID: PAT_MRT4530_2030C.1
aaagaagaaatggaggcttcacgcaaggtgttctcggccatgcttctcatggtgctgctgcttgcgcactggtgagaatgggcgggcggtgatggtggcggaggctcggacggccgtgtcagcgcctcgcggcggctccccctgcagtgagagctcctccggcacacaagcactt

SEQ ID NO: 14366 - DNA, 175 bp, Oryza sativa
  Clone ID: PAT_MRT4530_20310C.1
atgccccatgtggcgtcgacaatgagggctgagctccacgtggcgtcaatgatggcggacacgcggacacggccgagctgcggcgtcaacgccggcagctacgcggatgcagtggagctcggcacggcgtcgacgcagatgtggttgcaaaccggccagtcgagtagaggaagag

SEQ ID NO: 14367 - DNA, 718 bp, Oryza sativa
  Clone ID: PAT_MRT4530_20311C.1
agatagcatgatttatttagagatattattagaagcacaacacctcctaatattctgagcgcctaattgtgtccacgtaggacacgcgtacccatgttcttatggacaaggcactattgacagtcgttatcaatcagtttcgactatcaatattacctaaatagagaagaactagtgatgcttgcaatgcataaatatgttagaataataatattccactagtattaggtttactaaccttttacagagaataaacattaagtaaaggagaatcggcatcaactcaaacgataaatcaatcggacgatgtcgagaatcaaacttatgcatgaatgggccaagaattcaaagttgacattctggattgggccaaaattcataagtctgcaaaggagaacaacgaaggaggccgccagccgaaattgggctggattgggccggtccctggttcggccgaacccaccatgccaccgttggatgcaggttttgactggacggttgagatgaagccccaatgacagttggagggtattaccgaccattgtaaccatcacaaccgtcatagttcagctataaaaggagctcctcttcttacttcactcacacacttcaagcaagagctctcttatattctctcaagttagtttagtgttcttaaactagtggaataggaatagagtagaaataaggagtttggaagtcttctgaagagatcggg

SEQ ID NO: 14368 - DNA, 209 bp, Oryza sativa
  Clone ID: PAT_MRT4530_20312C.1
atggttgattttgtgaagtgtacagtttcggttgaccctggcggtcagaccggtcgtgtgccgccagtcagactgcagagtgttgccggtaatagatcggagtcaacttgggagaagttgatgtccagggatcaagagatcatgcgggatactaaaggaaggcggttcgaccggcggcgactggacttcgtcatcgacttcgttcaagg

SEQ ID NO: 14369 - DNA, 631 bp, Oryza sativa
  Clone ID: PAT_MRT4530_20313C.1
atccttcctttggttcctcagaaaataataataaatgcacgctgactttattacctctgcttacggtcactgtcacacttccttcgcagccatataaactgcgaccactatttcacaacaatgacataaatttgtcgacctttgttgcttgccattgtgcccaatttgtaaccacaaaaaaaaaaaacacaaatgtagtacgaagtaattaagcttgtctcaattattgttgcaaggacacagtgcctgccaccatgtcgcatctgtggaataagcctacgaacacgtggcgcacgaggcaaaccacctcgccgtcgccggcgttcgctcgatcacgatcacttacgcggcggcgccggcgatgaaccgcctgatgacctcgacgagctcgccggtggccgccgacattggcttcacgccgaagaacgcgtgctcctcgccggcgaacaccaccagctccacgtccttccccatcgccttcatccgctccgcgtactcgacgttcttgtccctgaggagggtccgccgtcggaggagaacaaccaagcacagcggggcgaggtccggcggctccaaggacccgggctccgccggggcccggaaaagggggtttaaccaaacgggggagtgg

SEQ ID NO: 14370 - DNA, 567 bp, Oryza sativa
  Clone ID: PAT_MRT4530_20314C.1
gtccgcgggcttttttttttttttttttgtaaactttgttactctctactacttcataaagtttactcggtatcaggtacaaaacgttccaggcagcaaaatgtattttgtttctttcaaatgaaagaaatggggaattgtactcaacaacaaggtcctacagagattgctttacgaaatcatcaggaacggagaagtggagccgtctctgcgatgtttgacgccaccctcaactcctgcgaattcttgccttagtgctcaaatcagccggatccgacgatgatgttgttgatggggatgaagatgagcttgacgaagaagccgacgaagcccatgacgacgaacccgatcgccgtcctcgccgccaccttggtgaactccttgcggtcgggcttgtggcagcgcttgacgaggcggacgctgtccttggcgaactcgcgcagcgggtcgaccaccgagtcgacggcgtccatggcggcggcggcggcggccggagatctcacgggggcttcgccttcgcaaggttggagagatcgggtttgcgcgtggcgtgcgcatcccggccgg

SEQ ID NO: 14371 - DNA, 326 bp, Oryza sativa
  Clone ID: PAT_MRT4530_20315C.1
atgcgcgcgctcgctcgcctggcctggcagggcagggcaggctgcgcgcgtgcacgacatacgcgtcgaatgactactccatcccgctcgccagcatgcatcggcgatcgggagagcaggtctccggaacctctgccttcgacgtcctgcaccgggagaaggcggcaataaggtttttgggaagcgcttcgtgcgactgctccctgttcgtccgcgacggctcgcctttctctccgctcgcgtgcttcgcgccttcgtcgacgctcgcaaccgcgagtagttcctgccgagcaaccggtctttccgtccctcggtacgcgttcgat

SEQ ID NO: 14372 - DNA, 2448 bp, Oryza sativa
  Clone ID: PAT_MRT4530_20316C.1
atggcgcagccgagagtcatccgggtgcgcgcccacgacgggcgctccaccaccgtcacgatcgccgcctccgccaccgtcagcgacctcaggacggcgctccgttcctccttcgctcccgcgctggtttcccccgacttccacctcttcctcaagggcaccaagctcatcgccgacgccaaggtcggcaacctccccgtcggccccggcgagtccatctctttcatcccggtcaacgccaagtcagcgccgccgcaccctccgtcgtcgagcgcgccgaatccatggaggaaacgcaagttttcttggcacgacggcggcggcgaagacatctacgccaagaagccgacgaacccagcgccgccgaggccgctctcctgccatggcacccaacctctcgaccctacccaaatggtggagcatctcaggcaagggctcgggaaggccggacagatcacccatgtcgaggagatcccgggaagggaggcgacgttcgccgaactccccggccacctctcgtcctccatgagggacgcgctgagaagcatcggcgtcaccaagctgtacgcccaccaggcgcaggccgtgcaatccgccgtctccggcgagcacgtcgtggtgtccacctcgacgtcgagcggcaagtcgctgtgctacaacatccccgtcctcgagtccatctcccagagctccgcgccatgcgcgctctacatcttccccaccaaggctctggcccaagaccagctcaagacactgctcgagatgaagccggcgttccgctcagacttcgacgtcagcatctacgacggcgacaccgccatgaaagaccggacaaggatcaggaacaccgcgaggctgctgatcaccaaccctgacatgctccacatgtcgatcttgccatgccatgctcagttcaagagggtcctcttcaacctcaagtacattgtcatcgacgaggcgcattcctacaagggcgcatttggctgccacgctgcgttgattctgagaagattaaagcgcatctgttcatatgtttatggaagcaatccaacattcatattctgcaccgcgacattggccaatccgagggagcatgtcatggagctggcaaatcttgatcgagtcgtgctggttgataatgacacgagtccttgcggctcaaagaacttcctcctgtggaatccgccattgcaattggcgaaagcagaagacagaagaccaaacccagtactagaggtttcctatctgttcgccgagatggttcagcatgggcttcgtgccatcgccttctgcaagacgaggaagatgtgtgagcaggtgctaatgcagacgcgtcagattcttaaggagacagctgcagaattggtgaattctatctgtgtctaccgtggtggctatgttgcgagtgacaggaggaagatcgaggctgatctcttcggtggaattcttcgcggcgtcgcggctaccaatgctcttgagctggggatcgatgtcgggcacatcgatgcgacgctgcacctgggatttcctggaagcatggctagcttctggcagcaggcagggagatcagggagaagagcaaagcagtccatagctgtttatgtagcctttgagggtgctcttgaccagtacttcatgagatcaccacacaagctgtttggcaagcccattgagcactgccaggttgattcacaaaaccgcaaggttcttgaacagcatctcgcttgcgccgcttctgaatatccactgcgtcaggaacatgacgagagctactttggttttagcatgaacagtgttttgatgacactgaaagataagggctgtctcatgaacaatccatctggaggagattcaggcgtgtggaagtatattggacctgataaaaaaccttctcatagtgtaagcatacgggcaattgagcatcacaggtacaaggtgtatgatggtgctgtctacatgcaccaaggtgtcagctacttggttgataagcttgatctgacatcaaggatagcttactgcaaggtgtttgatctgaactactacaccaaagttcaggactacactgaaatcagtttcattggaggtgatgttgatgaacatcctgcgaacagaattctgttgtacgacaaacatcccggtggcatcggcttagcatcacaggccaagctgctctttggtgagcttctggttgctgctttagagcttgtttcatcatgcagctgcaccaactctgatggggagctcttcgacactgttttcatgctcacatgctggttcatctggaaagagcgtaacgggaggattttcgagcacagatcaagagcacctgaacagctagtgcatgacataaaggaggaactaatgatctggaagatggcgggagttttctcgcttgttagtagggaggctctacctcactgccgctgcgacagggttctgtcgttgtaa

SEQ ID NO: 14373 - DNA, 2433 bp, Oryza sativa
  Clone ID: PAT_MRT4530_20317C.1
atggcgcagccgagagtcatccgggtgcgcgcccacgacgggcgctccaccaccgtcacgatcgccgcctccgccaccgtcagcgacctcaggacggcgctccgttcctccttcgctcccgcgctggtttcccccgacttccacctcttcctcaagggcaccaagctcatcgccgacgccaaggtcggcaacctccccgtcggccccggcgagtccatctctttcatcccggtcaacgccaagtcagcgccgccgcaccctccgtcgtcgagcgcgccgaatccatggaggaaacgcaagttttcttggcacgacggcggcggcgaagacatctacgccaagaagccgacgaacccagcgccgccgaggccgctctcctgccatggcacccaacctctcgaccctacccaaatggtggagcatctcaggcaagggctcgggaaggccggacagatcacccatgtcgaggagatcccgggaagggaggcgacgttcgccgaactccccggccacctctcgtcctccatgagggacgcgctgagaagcatcggcgtcaccaagctgtacgcccaccaggcgcaggccgtgcaatccgccgtctccggcgagcacgtcgtggtgtccacctcgacgtcgagcggcaagtcgctgtgctacaacatccccgtcctcgagtccatctcccagagctccgcgccatgcgcgctctacatcttccccaccaaggctctggcccaagaccagctcaagacactgctcgagatgaagccggcgttccgctcagacttcgacgtcagcatctacgacggcgacaccgccatgaaagaccggacaaggatcaggaacaccgcgaggctgctgatcaccaaccctgacatgctccacatgtcgatcttgccatgccatgctcagttcaagagggtcctcttcaacctcaagtacattgtcatcgacgaggcgcattcctacaagggcgcatttggctgccacgctgcgttgattctgagaagattaaagcgcatctgttcatatgtttatggaagcaatccaacattcatattctgcaccgcgacattggccaatccgagggagcatgtcatggagctggcaaatcttgatcgagtcgtgctggttgataatgacacgagtccttgcggctcaaagaacttcctcctgtggaatccgccattgcaattggcgaaagcagaagacagaagaccaaacccagtactagaggtttcctatctgttcgccgagatggttcagcatgggcttcgtgccatcgccttctgcaagacgaggaagatgaggaagatcgaggctgatctcttcggtggaattcttcgcggcgtcgcggctaccaatgctcttgagctggggatcgatgtcgggcacatcgatgcgacgctgcacctgggatttcctggaagcatggctagcttctggcagcaggcagggagatcagggagaagagcaaagcagtccatagctgtttatgtagcctttgagggtgctcttgaccagtacttcatgagatcaccacacaagctgtttggcaagcccattgagcactgccaggttgattcacaaaaccgcaaggttcttgaacagcatctcgcttgcgccgcttctgaatatccactgcgtcaggaacatgacgagagctactttggttttagcatgaacagtgttttgatgacactgaaagataagggctgtctcatgaacaatccatctggaggagattcaggcgtgtggaagtatattggacctgataaaaaaccttctcatagtgtaagcatacgggcaattgagcatcacaggtacaaggtgatcgacaggagaagcaatcgagttcttgaagagattgaggaaagcaaggctttctttcaggtgtatgatggtgctgtctacatgcaccaaggtgtcagctacttggttgataagcttgatctgacatcaaggatagcttactgcaaggtgtttgatctgaactactacaccaaagttcaggactacactgaaatcagtttcattggaggtgatgttgatgaacatcctgcgaagcctcaagaaaattctgaaactgcagacagaattctgttgtacgacaaacatcccggtggcatcggcttagcatcacaggccaagctgctctttggtgagcttctggttgctgctttagagcttgtttcatcatgcagctgcaccaactctgatggggagctcttcgacactgttttcatgctcacatgctggttcatctggaaagagcgtaacgggaggattttcgagcacagatcaagagcacctgaacagctagtgcatgacataaaggaggaactaatgatctggaagatggcgggagttttctcgcttgttagtagggaggctctacctcactgccgctgcgacagggttctgtcgttgtaa

SEQ ID NO: 14374 - DNA, 250 bp, Oryza sativa
  Clone ID: PAT_MRT4530_20318C.1
aatggaggccgatgatcaaacaatgaccatgcggaaaataaatgcaaaccgaaaccacaatctgaggtacttaaataaacgtatacccggaaggcgggtttacaaaacgttttcgaaaacgtttttagccgaaaattcgtttaagaaacattgggatctgcttagttggacagattcaaacaagataatgacgatatttgaataaccgttggcacagccttttgcaatccaacagtgaacacattctata

SEQ ID NO: 14375 - DNA, 432 bp, Oryza sativa
  Clone ID: PAT_MRT4530_20319C.1
tgttaaattacgttttccaaagctactatgacactgaaatcttatcttgggtaagattttggagtaaactgaaacaaacctttaaaaaatcactattaattaacataattagaccaatttctcgccaccatgtctatatttttatgcgtaatgtattatatatctccgttattcttttttctgttgagttaacattgtggaggaacactacttaggaaatacatgatttgcttatctttatattaagacgagtaaattgcatattgggacatatatctttaccattgttccacattgaaccactcaacattttcacttaacaccagatctttttaccaaagttgcccacttattagtgcctacatctctctacatctctccacctgcattactatgagattagagtccttcgattagagtccttcgcaggag

SEQ ID NO: 14376 - DNA, 165 bp, Oryza sativa
  Clone ID: PAT_MRT4530_2031C.1
taatagcggagccaacacggagttcccacgaagcaggggaggctatataatatgcatgcagatcgaccacactcgacacctcgtcttgtgcagagagctcgcaggatcggcgcggcagttgggcggcgacaaacgggttggagtggccacctccggcgatcatct

SEQ ID NO: 14377 - DNA, 326 bp, Oryza sativa
  Clone ID: PAT_MRT4530_20320C.1
ttatttgctacctgttgctacctctctctcacggggggaaactgtacatccatgggggcaatatcaatgctaattctttagctatgccaccaattaaatcattcggatctggttaaagcgtactaactcctcgcatctctcgctctgatactaccgaaaatgcttccaatgcgaaaacatagactccacttgagccatatccggagtcagagtacctgctccgatgtttacgacccactctaacggacgtgactctacgtgcttaccgatccaccgacactacacggtgctacatatactatcatacctaactctcgactctttct

SEQ ID NO: 14378 - DNA, 351 bp, Oryza sativa
  Clone ID: PAT_MRT4530_20321C.1
atgaaggcggtgatgagctcgtcgtcgtctcctagcatgacacacggacaacagctgcgaagaagccgccaccaccttctcagcctagactgtcgttgtcgcatctcgcactcgtgctggcatctcgctcttgagaaagccgcaaatctcatctcctcctcggcctccgccgcaaggagcctgcagatctcaaactcaaggaggcagccgctgtcacgcttctcttcctcggcctacacctcgacgagacggtacgtaggatgctatcggggctccttctgtgtgggcaagcagcaccgcggcagtgtgtttgctgtgaggaggacgaggcctgatagggccagccactaa

SEQ ID NO: 14379 - DNA, 647 bp, Oryza sativa
  Clone ID: PAT_MRT4530_20322C.1
aagatattccccccctctcgccctcgccttctccgagtttccagcatatgcgcacccgcattctccttcatatttgcctaggttttctccctcgctcttgactcgcgatctcccgatctggttccaaagatcgcaccctttgctctctgtgttttttaatctatctctcccccgagcggccctgactcagatcacccaggaggcgggcgggtgcagcggcggtgtcgtcagcggatgggattctttgtgtgatctcgcgtggtgaggatctcgtctgtgcggattcgcgggctgcttggatcggacaagggggagctgctggcctctacttcctagcccgcgctgccgtgcggtgctcgtatgcttcgctgcgggcgcgcgcgcacaccgttggaggctgtactatcccgtcgctatgctgccgggcgacgccgccaaccagcgcaggtgctggctctagccttggcctaccgaatgttgctccggtaggtcttctgcatcgtcacgacattcttctttgcatagggaacgtctttactgctaaaggcggacgataggcttctccctatgtcgaattcgtatcagcagtgtcaccgtatttttcttcatagcctgcaacttgtccgacttgtctttgttatatacga

SEQ ID NO: 14380 - DNA, 1479 bp, Oryza sativa
  Clone ID: PAT_MRT4530_20323C.1
atgggccgcgggaataagttcacacggcggcgactgccagtggttgtggagaagggcgtcggcggcatcggcgggagcatctcctccggtcacgcctcattccccttctacgccaagattgagccactgcgaaagaaggcacacctacttgaccaggagaacaaggctctccttgccaaggtcaagctcaataacaagccatccgccacctccccgtcctcccagaaaaggctcctcggcgtcaaggtggccgcggtggagacggcctcctgctatcgcccgccacggcctcccacggcggagacgaccactgagaagcaagaggagagctacgaggcgatggtggaggcgcaggcggcagcggcggaggtggcgagggtggtggtggaggtggagttggtagcggcagttgcggcggagtcgtgggacgaaacctctcactctttcctcctctcctctctctctcaccgacgggagctgtgcggcgtggcgggctcggcggcgacccgctcggcaccggcggcggccttcgttccccgacctcccatgcgcggcggtggcctcccttccccgacggcggcgggcggcgggctcggcgacggcctgtggcggcggatccggcggcgccgtccttgggagggccggatccgccgccctaccgaggagctcggcacgcggcgggcacggagacggccggcggcggcgaccctcccccctcctcaatgccgcagccacatccccgatccacgccgcagcagccgcatcaccggcctgccctccatcgatggctggaggaggcgaggtcgggccttctcttcgggggcagcagggaggtccggaggtagtgcgtccgcgtcgcagtcccctgccgcatcggtgactcagcggcggcgtcgcggcgagccgctgggcaggaagatatgaagtggcttcccgtggagcgccgtgtcacgacccaaatccgttggcgaagctcaccggagttgagggaccgatcgattgcttggaagatgggaagaacagaagggaagcggaggaggaaggaagacaagacagagttggtaggagggattgtttttctatttttcatcatagttgttttgggacagctcattgaggttatattcccctcccgatctgaccacgcagggcccacacaccatgtgacacacacaccaactcctttattacataaatacgctttctcccacataattacgctgtgctgcattgcttaacgcctttaagctttacgccttctgctgttccctgtccattgtcgcaacttcagagtctgtcagaaaggcggtcgtgacacgccgatgggtcgagcactcatccgccatcatcgagccacaacagtaagctgtaatctctatctgtctctgttgaatgatgggtgatcctacgattcatgcggtagcactgttccctcgatctgcaagttctggatgcatttaccttgcgtatgatgatact

SEQ ID NO: 14381 - DNA, 1499 bp, Oryza sativa
  Clone ID: PAT_MRT4530_20324C.1
atggcggttgaaggaaaccgagtggaggccggcatgcggcgcgggatggcgaagctgatggcacacgtggtgaggcgcggcgacggcgggagcagcggcgacgcgcggctggagatcgccgacgagcggcggcaggaggtgcgacggtggcggggggaggggaggccgaatcgagcccgggagaggcggagtcggggcggcaaccgccggggaagtgggatgccgacgtggggtgatggcggctcggccggcgccggtttttgtgggacgagcggggaaaatggtggaggacgtggaggcgatcgtgcccacgtcgttggatgcgagctcgggtgcgggagggcactggattttgtggcgacgtggacggcaatggcggttggggttggccggcgagaggtaggaggaggagctgacgggtgggaccgccggtcccacctgtcggcgaagggagagaaggagggacgcaaaatagacttttgcgagcgggccaggggagaagggagccggcccgagagagggaggaggcgcgcgggccgcgggagaggaaggagggggagtatccggccgccccgcaccacccccggcagccggacaccccgtgaaaccctagcgactcttgccccggcggcggcggcggcggcagcaaaggcgaagatgatctacgacgtgaactcccctctcttccgctccttcctcagccagaagggcggcgcctcctccgacaagaggaaaatggaagagcaaaagccaaaggagcagaggcccaaggccagtgagaacaagcctgtgatgaatgaatgaaggctttctgatgtgtttggtccttacaaggaataggcttcaatcatgtgattcctagtatgtttctgtactggttctgtttaagtgagtttgatgtgaaccatgtctggaacatctgagaacttcccagctatcaatctttaattttacatctgagaacttcccagctatcaatctttaatttagcttgataattttcatgcgtgagatggaatttagcttgataattttcatgcgtgagatggaatgggatgttgctttgagattgatgcggccggtccccacccttctaccccaggagccggacaccccgtgaaaccctagcgactcttgccccggcggcggcggcggcggcagcaaaggcgaagatgatctacgacgtgaactcccctctcttccgctccttcctcagccagaagggcggcgcctcctccgacaagaggaaaatggaagagcaaaagccaaaggagcagaggcccaaggccagtgagaacaagcctgtgatgaatgaatgaaggctttctgatgtgtttggtccttacaaggaataggcttcaatcatgtgattcctagtatgtttctgtactggttctgtttaagtgagtttgatgtgaaccatgtctggaacatctgagaacttcccagctatcaatctttaattttacatcaaaaaaaaaaaaaaaaaaaagcggccc

SEQ ID NO: 14382 - DNA, 597 bp, Oryza sativa
  Clone ID: PAT_MRT4530_20325C.1
ttttttttttttttggtttaacaaaattctcattcacattcatgattgatcgatcataatgtttcaaaaaaacaacagttgtgcatgccatacactgcaacagggtaaacaaacataaacctgaaacagatcaagaaatctgcctacaaaaacatcatactctcgagtcagccaaaactccactctgtgggggcatgcaaaaccgtatgcctatatcctctttttttgatccataagtcacaccatcagtaacagcagctgctgtgatgtatggtatggttggtatccaccggctatgtgtcactaaacctgtgcctaaacaagaagaaaattatccagtcgccccatcaccaccgggtgtatctactctcactttccagtaaacacaacactaactacagctccaccctggcgaatcgccacgtcatcaaaccaagagggcccctgctagggaggcgttacgctcaggtcgatgccccgttcccccccagcctcggcggccccctctgtcccgccccactggcttacaggagttcacgtaagagtggcatagttgaaggggaccgggtagactgagggttgccttgtggtaaaatc

SEQ ID NO: 14383 - DNA, 1620 bp, Oryza sativa
  Clone ID: PAT_MRT4530_20326C.1
atggccgccgtcgcctcctcggccgaggtccacgagggcacccggagctgcgtcctgctcaacgtccgcggctacagggcggcccgccgcgacgccaccaccgccacgtcctacacgagcaacggccatcccatcgaggtcagcttccgcgccgccctcccgccggtcctctccgacttctacgtctactgccccgccctgcagctgcaagaaccagccgattatccctccatggtgcccaaggccatcgccgtcgacggcgacctcttcctcttccgtatcccgatcgaccgcgtcggcaccatgtccctcacccacaacgactacttcgtctacatggcgcggtctccccctcaccgcccgagactggatctgctcccgaacccgtcgcacgataccctgggagacaaggagatcgccatactgagctgtgccgatggcggcgagcagtacgtggtgaccgccctcaggaccatccccggcagtaaaaccatccacaggctgcatctgtaccgctccaaaccgaacggcgagcaagggagatggacttcgcagatggtgtctgtggagggaccactgatgagggacttggtgtgccccatccctgagacggtgcacaggcaagtgcaccacgtgacgagcaaggtgatcaggctgggaacaggtgcaaatggcatggtagggtgggtggatatctggcgcggcatcctcctctgcgacgtgctccaggagagccccaagctccatgacatgccgctgcctctgccggccaagagcaacagccacagggccttcctcaacaccaccgaccagtactgcggcgacgtcgccgtcagccgagacaagagcttcatcaagtacgtcgagatggagatcgtcacgcccaagatcgtgagcgccacgccaccaggtgactgtgatcctgacccgttcctcgaatggctgcgccgtcgagaatgcaaggacctgaaacgcaccttggtccatggccgctggaaggccaccacatggaggatgccgatcccggtcacctcatgggacgattggtgccgcgactgcgctgttgaatctgccgagctcagcactgacaacccaaaggcttatgagttgctgtgtgctgtgagcaaagaaagtcttaaagaggatgatgatgataaggccatggaggcggcaacgacaaccacgacgaggttgccattgggacgcctgggcatggcttaccctgccatgagcatcgatgacgatgtcatttacgtgctgacaaaacccgtcatggggaatggcaaggcggcatttctgactgctgttgatgtgaggaggaagaaggtgctggcagtggccaagcttgatagcgccgttttcatgcgttactaccttgccgttgggatctccaaacattttttcagcgctccaggtaatgataattttcctgggatatttgaccccattacctcttttctttttaaagatttagggcctgatccatatgacagttcttgcttttggatgctccatgtacaagagaatcacttggacaagctgaagatcatgggcagaagtcagcaagaagaagaagaagaagacgtggaaagcggcaagagtgatgctgtccagcagtga

SEQ ID NO: 14384 - DNA, 656 bp, Oryza sativa
  Clone ID: PAT_MRT4530_20327C.1
ccccgggctgcaggatcaaatataggaaatgtaaatgataaatcccctcacttgccacgagttagtactcactaacaagtagtaacgaaataacaatgaagtaaagaacagtatagcttactcactctgtcacttagagactcactggaagcagccaagtagcaagccgagcagtagcaggcaagcaactccggcggcctgctgtgctgctctgcgcttgctgccgcggggccaggcagccgtgcgcccgcgccgccgcgcgcaggccccttccccttgcagcttgcgccttgtcggctttgccgcttgcgctgtgcggctgtgccgctgccgcaatcgctcgtagcccgcagctgccacgcggccgcaatcgcacgccgccgcagcgccacgaaaaatccccacagggcaaaggttagcagccacacggtccaaactccaaaaccctaagccaagacaaaacagacacaatgggccaagtgggcttttgctaaagtgataaatgggccattttacgcgtaccggtttagctacatgacttccatggctcctgttcttcttcctcgccgccagagacggagttcttcgcctcttctcttcttcctgccttctccagctgtttccatggaagagatgctatatacttaaattttttt

SEQ ID NO: 14385 - DNA, 654 bp, Oryza sativa
  Clone ID: PAT_MRT4530_20328C.1
atgaaccgtgttgaaaattgggcaacatttaaatgcggcttttggggcttgtttggtcatgacccaaatgaatcattccaaaaatttggcagcattcaaagtagtccatttggcaacatatatggtcagaatgacgtctatactactattttgccacggtttgttatagttttctccacgagacaaggcgtgaccataggtggacgcaaacacacccctgctacttctgtggggttaaggcagcaagcggaacaacaagagaagggatgccatggaggcaacaacgtcgatgatcccctctccctcggatccatctactccagcgtccccacgccacctctctcactgtccctattcgtggaccccgcgctgcttccctcgccaacgccagtggtcatccccacattgtctcatttgccgacgcagctagtggtctcctccacgcagcctcacttcatcatcatccccgctctctcttcctcattatcacaggtgccacaacctccttccccgctctctgtactagctcaagttcttatgtatgaataccaggaatcacctcactgtgtcactggcactaagaaccacgtgttgtactatgcttacattgagatgtgtcggcagctcgacccacaggggctattcaatgtctaa

SEQ ID NO: 14386 - DNA, 1782 bp, Oryza sativa
  Clone ID: PAT_MRT4530_20329C.1
tgggattctagaggcatttcataaaggatttctccaaaattgctagacccctaattgccttgctagctaaggatgttccgtttgactttgatgatgagtgtctaaaatcatttaaaatctttaaggaatcactcatctcagcactaatcatctgaccccctgattggtcgccgccatttgaaatcatgtgcgatcctagtgattttgcagtgggtactgtccttgggcaaactaaggataggaaacacaaagctatcgcatatgctagtaaaactttgactggagctcagcttaattatgccacaacttaaaaagagctcctagccgtagtgtttgccattgataagttcatgtcatatttagtgggagctaaggtaatagtttacattgaccatgctgcactaaaatacctgctcactaaaaaaatatgcttctactccaaaaattaggagctaccgataaatgactatctgcgtgacggcatgctgttgaaagtcacagactctgacccgtggtatgcaaccatcgtcaacttcatggtcgcgtgccatgtaccaccaggagaaaataagaagagggtgatctacgagagccgcatgcacttgtgggatttaccttacctttacagagtctgttcagacgttctactacggagatgcgttccagtagccgaaggcataaagatcactgagaagtgtcatgttgccccatatggagatcactatggagcattcaagacacacgcaaagatctggcagagtggattcttttggccaacaatgtatgatgcaaaggaattcattcggagatgcacaaggtgccagaagcatggagggatcactgctcgggatgcgatgccactaacatataaccttcaagtcgagctatttgatgtattgggcatcgacttcatgcgacctttcccaaagtcctttgagtgcgaatataacctggtggccgttgactatgtgtccaagtgggtagaggcaataccatgcaaggccgctgacgccaagcacgcccgctggatgttccacgagattaccttccctcattttggaactccgcggatggtgataagtgacggagggtctcatttcatcgataagaccttctaaagctttttgcaagagcttggggctcaatacatcattgccactccattatcattcccaaacaagtggacagacagaaacgagcaacaaacaaatcaagaatattctgtagaagacggtcaacgagatggggaaggcatggaagaacaagttacctgatgcactttgggcatataggactgcttgtaagacacccatcggtatgtcaccgtaccaacttgtctacgggaattcttgcaaactcaaaacaaactagagcgttcatatcatgtgggctatccggacttggaacatggacctaaagggagacggacatcacaggaagatgcagctctctgagctggaggaatggagggacaaggcctatcacaatgccaagatctgtatggacagaaccaaaagatggcatgatagacagatcaagcacaaggagttcaaagcaggggataaggtgctgctgttcaactcacgggtgaagctattcggacatggaaaacttcgaaataaatggatgggcccatatatcgccgtcgacacttcatcacatggagccgtcatacaataaaagtaatatctttaagataaatggctatcattaaaaagtttttcttgatccgttagaagttgatcgtgttagacgtagtgaatttagtcgcttctagcttct

SEQ ID NO: 14387 - DNA, 180 bp, Oryza sativa
  Clone ID: PAT_MRT4530_2032C.1
atgacttacactgtgaaacggaggaagtacatgttctgcaatgcaatatttcgtttgctaacttggttaaaagttcaggacagaaggagtatcactgtatcacacactctgtatgaatggctccagtctccagagagtgtcatattgattattggcgaaatcacccccatgtgcaaacta

SEQ ID NO: 14388 - DNA, 513 bp, Oryza sativa
  Clone ID: PAT_MRT4530_20330C.1
aagttctttctttttagttaaaggaacgcgagctcggctcgggcttggcttgagctcgcgaagctcggctcggctcgaagactaaacgagccaagcccgagctccctccacagctcgtttccaaaccgagccgagcccgagctagctcgcaagctgctcgcgccagaccgccagcggcaggccggcagcgccgttcgaagccctctctgtgccgccgccgtcggcccgccacctccctttcctgcgcggctgcgccgtgggctcgccgcctcactccctgcgccgcctacctcccctagtgtggctgcgtcggctccgtcctccctccacggcgacgccccctgtgccgtcggcccgccgcggcgccgcctcccttccctgcaccacctccggcctccgtccaccgtccccagtgccgctcgagccgagctcgacgccccctgcgtcgccggcgtccctgactcgacgccgtccatcatgacatcacaagctggctcgagctggctcgagctt

SEQ ID NO: 14389 - DNA, 234 bp, Oryza sativa
  Clone ID: PAT_MRT4530_20331C.1
agtacgggcgggcgtcagtgacgcggccaggtcgagcaactccgcccgcgagtgccatctcagggtcgagaagcttggccgctgcttgagatgtaagagctgctggacgtgccttctccttgacgcgatcgatctcattgacggtccttgccgttgcgagtctcggtggcaattcttcttcccgctgcctgctgcctggctgccaagaataggtggctgtctgttgtccacgcc

SEQ ID NO: 14390 - DNA, 263 bp, Oryza sativa
  unsure (1)..(263): unsure at all n locations
  Clone ID: PAT_MRT4530_20332C.1
gcaaagtccgtcggatgccttgctacagaattccttgctttaaacattttttgatttgtggatgagaccacatatagatcttcttaattgcaaggaaataagaaatacctacggtactgcagatgcaacgatcatatatcgatcttccttggtggcttggtctaaatgaacttttagatttgtgtattctcaacccttcaaatttacagggtccaatgatattagattagaaataacttaaaaacataganactaatgttgat

SEQ ID NO: 14391 - DNA, 1291 bp, Oryza sativa
  Clone ID: PAT_MRT4530_20334C.1
tcactcactaccctgcacctcgatcaattgaacgcgagcaaggaaagagagagagcgagaaagagagcggcaatggcgacgtcgcacgcggacgtggagaagggggcgaggaggaaggaggtggggaaggtgccgtcgccgctgtacccgcagcacgagggggagagggagtgggtgccgtggatcgtcccgtcgttcctcgtcgccaacatcgtcgtcttcgtcctcaccatgtacgccaacaactgccccctccacaccccgcctcgcagcggcaagtgcatcgcccgcttcctcggccgcttctccttccagcctctccacgagaacccgctcctcggcccctcctccgccacgctacagaagatgggagcacttgtgtgggacaaggtcgtgcacgagcaccagggctatcgcctcatcacctccatctggctgcatgccggtgttctgcacctggtcgccaacatgctcagcctcatcttcatcggcctgcgccttgagcagcagttcggatacgtacgaattggagcgatctacctcctgtctggcctgggcggcagcgtcctgtcctctctgttcatcagaaaccacatctcggttggtgcttcaggtgctctctttggactcctcggagccatgctctcggagcttctcaccaactggaccatttacaccaacaaggtcgcggccgtgatcaccctcctgttcgtgatcgcggtgaacctggcgctcggcatcctcccacacgtgaataacttcgcgcacatcggcgggttcctgacgggtttcctgctcggattcgtgctgctgatgcggccgcatttcggctggatggagcgctacagcctcccctccggcagcccgtgcagctccaagaagtacctcgtctaccagtggatcctgcttgccatcgccactgccctcgtcattgtcggattcgcggttggtatgaccatgctcttccgcggggagaacgccaacgacagctgccactggtgtcactacctcagctgtgtaccaacctccagatggacctgctcgaactgagaaatacaaggaggccatgaacaaattttctctgtactttttttctttttgcgtaatcctgtatgatgctgcaaacacatattctgtttatctgtagatagattaaagaaggattcttgatcgatcgatctcatactgtaggcaggctcgtcggggtcttccactcttcctatctcttgtacaattgattcattctttgtattgcaattattgaggcttggaatctcttctgtcaaaaaaa

SEQ ID NO: 14392 - DNA, 582 bp, Oryza sativa
  Clone ID: PAT_MRT4530_20335C.1
tttaatgtttctttatcaaagcgatctaagactgtttctaaatatgtcaaacactaacaatcgacctgctacggcttccgatattcgtgttgatgttcaacatggtcaaaatcagagtcaaacatccggacaacaattgaaaaatgatgcagagcgtaaaggagccgaactggccaacgatgcatcacgaaaagctgatcaagccaaggccgctggagcccaattggcaaatgatgcctcgaagaaagctgatgacttgaagaatgctgctggagagaaagttgaccaagcaaaagctgccggtgctcaagcggccaacgatgcctcgaagaaggcagaagaatggaagaatgctgctggagagaaggctgaccaagccaaggctgctggagctcaattagcgaatgatgcttcgaagaaagccgaagaattgaagaacgcaaccggagagaaagttgaccaagccaaagctgccggtgcccaaacagtcaacgatgcgtcgaagaaagccgaggattcgaagaacgcggctggggaaaaagtgaccaggcgaaagcagctggtgctcaagcgcgaatgaca

SEQ ID NO: 14393 - DNA, 2068 bp, Oryza sativa
  Clone ID: PAT_MRT4530_20336C.1
actcctatgggcgattgggaccctcgaggccggccgggaccggactcgtaagcaacgaactgcgagtgattcaagaaaaaagaaaacctgagctttcgatctcctctccatctcccatccaggatgaagttctttctgcctatctgatggcctatctggctggcaactccagccccactgcggaggatttgaaacgattctggagtcagtggttgtgaaatcgacaatgcaaagatggaactcctgtttctcaagtgagtggcaaggacatcgatctgtgtgatttgagtgagtgagtgagattctttggaggagggattttggtttggtttggtttgttggtttgtgcgggattttgtggggaggagagtaatggcgaccgcagggaaggtgatcaagtgcaaagcggcggtggcatgggaggccgcgaagccgctggtgatcgaggaggtggaggtggcgccgccgcaggccatggaggtgcgcgtcaagatcctcttcacctcgctctgccacaccgacgtctacttctgggaggccaagggacagactcccgtgttccctcggatcttcggccatgaagctggaggtattgtggagagtgttggagagggtgtgactgatcttgcccctggtgaccatgttctccctgtgttcactggggagtgcaaggagtgtgcccactgcaagtcagcagagagcaacatgtgtgatctgctcaggatcaacactgacaggggtgtgatgatttggtgatggcaaatcacgcttttccatcaacgggaagcccatttaccatttcgtcgggacttcgaccttcagcgagtacactgtcatgcatgtttggttgcgttgcgaagatcaacccggcagctccacttgataaagtttgcgttcttagctgtggtatttctactggtcttggtgctacaatcaatgtggcaaagccaccaaagggttcgacggtggcgatatttggtctaggagctgtaggccttgctgccgcagaaggtgcaaggattgcaggagcgtcaaggatcattggcattgacctgaacgccaacagatttgaagaagctaggaaatttggttgcactgaatttgtgaacccaaaggaccatgacaagccagttcagcaggtacttgctgagatgaccaatggcggagttgaccgcagcgttgaatgcactggcaacatcaacgccatgatccaagcatttgaatgtgttcatgatggctggggtgttgctgttttggtcggcgtgccacacaaggacgccgagttcaagacccacccgatgaacttcctgaacgagaggactctcaagggaaccttcttcggcaactacaagccacgcaccgatctgcccaacgtcgtcgagctctacatgaagaaggagctggaggtggagaagttcatcacacacagcgtgccgttctcggagatcaacacggcgttcgacctgatgcacaagggcgagggcatccgctgcatcatccgcatggagaactgaggtttttcaggggattatggtgttgggtaataagattgggcagcttgagcagcctgccttgggtgaatgatgatatacggttcttctgtgtatcctgggcaaatttctggctttgtcaatcagtaatagtacggtatgaattccagtgtctgtagctgcaaagagtttgttaagaatcagtgatcttttggcgtaatattatcatatatttatacgagtttcagtgcataaaagaaaccaaaaatgaaagcaaaaaatggatgagaagtttgaggttttccatttaagtttaataatggtcgtgagacagggcttgtgtggagtcagctctgtttactccctcctttcatggcttgatcttgtttattgtcagcattgtggcttagcagattttcaccagttttaccctgtaaattagtaccattctgaaatcgtaataaactactagcagtgtgaggtactattgctggaactgaattgattgtgcagtaaagaggtgaatagcagccagtatgaaggttttacaatttgaacatcgaaacgaaatccacacg

SEQ ID NO: 14394 - DNA, 868 bp, Oryza sativa
  unsure (1)..(868): unsure at all n locations
  Clone ID: PAT_MRT4530_20337C.1
gtggccggagaccacggacccggcgagcggcgccagtacgagcgacgtggtcgttcatctgcgacggcaagtacggcatcgacgacccgctggtggacccgctgtccatgccggcgccggagtggcggaagctggcgtgctcgcgcgtggccgtgacggtgtccgacctcgacgacttcaaggagcgcgggaaggcgtacgcggcggcgctccgcgacagcgggtggggcggcgaggtggaggagtacgagaccgccggcgaggtgcacgtctacttcctcgacaagccctcgagccccaagtccgcccaaggagctgaccttcgtcgccggctacctgagccacgagtagcagcagcagcacaacggcatgggtgtcagattggtcgcagacttgcagtacatgattgattgataattactcattagtggagtaccagctagtacagttgtctacatgtcttcttgtcttgtgcatctatagatttctccattgtttgatcaatcggtcatccggattccacgttcactgatgagtaccacgtgaaanttgnctggggattttgggggaaagttggatgctttccgtgcctgcagtgttcagaagaatcggcacggggagtgtaagtttctccaaagtgagtgcagagtgcagtcagaggattggtcaatctcgttatcttgtggtgaccgggtgacgcatgccgagcacccagtgcaaatattttactgtttggatcatttgttttcttcagaaacctcgtacggttgttcagatgtctcctggtcttgccaaaattatgcatgaagctgctggttattttaaacggtgtcaagaaatcaaaaccggtcaaaaaaaaaaaaaaaaa

SEQ ID NO: 14395 - DNA, 903 bp, Oryza sativa
  Clone ID: PAT_MRT4530_20338C.1
atggccagctggcgcaggcgcgctctggctcctcgagtcctcctcggagccgcccgacgaggatgcctacgtcgcgctgttccggctccgcgaatggcaccgcgcggtcgacggtgggatgcagggtgtgcgcatgtggatgccgagcacccgagcttggttctctgcctcaggaacaccatgctgagcacgctcgtcaggttcggggccatatggtacggggtgagcatcgacgcgtcgaggtccgactacagtggtggtcggaagctcgaggccggcgccggaggtgatgagaggaagaaggagcagatgaagaatattatgcgaacactcaaggggatcatcctggcggcagcaagatggacgcgcccaccgtcctccacaaggccgtcaggtacctcaagttgctcaaggtggaggtcaagaagctcggtgtgcgtagctcaagcagctaagtgtgctaccgacagacccgacatcgacaatgaccttgctcaacggctgacggggacgcggatggagtcaagatggagagggcggcggtcaaaaggggccagcaccggcgtcggtggtggcaagggaagagcgagcgcggtggacacaatggtggtgttgacgggagctcgacagcgttggaagatcggaagagcgagcgcggtgttggcctgttgggaagatttcggctccgactccggcgagggcattggtggaatgcggcggcggggacacgtgaggaggagcgaggaggcgcggaggcggagtcttcggacgggcgaaaatcgcggtcgtggtggaggaggggcttggtgggctggtccagtaggtaggttacgggctggcctggttcttccatactcaggtccactaattcaacccacatatgaaaaactggaaatggagtaa

SEQ ID NO: 14396 - DNA, 169 bp, Oryza sativa
  Clone ID: PAT_MRT4530_20339C.1
attccataaatccgaagcagaaaaaacaagggcggtgccacatggcttttacatatcaacgacagctttttctttctccatattaccaccactttcacatggcccacctccatacgcttgacccccattctaacctaccgtattctatactgttaaaactcattacaag

SEQ ID NO: 14397 - DNA, 1464 bp, Oryza sativa
  Clone ID: PAT_MRT4530_2033C.1
caaaacaccaccactgatcatcactagctttctacttgtagaaggagagagagatcagcaatggagctgcttgccttggtcaccgtgctcctcctggcgcacgccgtggcgtacctcgcgtggacggcggcggcgcggcggcggcagtcgcggtgctacctcctcgactacgtgtgccacaagccgtccgacgaccgcaaggtgagcacggaggcggccggcgcggtgatcgagcggagcaagcggctcagcctgccggagtacaggttcctcctccgcgtcatcgtccgctccggcatcggcgaggagacgtacgcgccgcggaacgtgctcgacggccgggagggcgagcccacgcacggggactcgctcggcgagatggaggacttcttcggcgactccatcgccgagctcttcgccaggacggggttcggcccgcgcgacgtcgacgtgctcgtcgtcaacgcctccatgttctcgccggacccgtcgctggcgtccatgatcgtgcaccgctacggcatgcgcgaggacgtcgccgcctacagcctcgccgggatggggtgcagcgcggggctgatctcgctggacctggcgcggaacacgctggcgacgcggccgcgcgcgctggcgctcgtcgtgtccacggagtccatcgcgcccaactggtacaccggcaccgacaagtccatgatgctggctaactgcctgttccgctgcggcggcgcctccgtgctggtcaccaacgacccggtgctccgcgggcgcgccaagatggagctcggctgcctcgtgcgcgccaacatcgccgccaacgacgacgcccacgcctgcgcgctgcagcgggaggacgacgacggcaccgtcgggatcagcctcagcaaggcgctccccaaggccgccgtccgcgccttcgccgccaacctccgccgcctcgccccgcgcatcctccccatcaccgagctcgcccgcttcgccgcccagctgctcatcaccaagaagctcctccgccgccgcgccaccgccgccaccgccaccaagcacaccggcggcgacgggcccaggatcaacttcaagacgggcgtggaccacttctgcctccaccccggcggcacggccgtgatcgaggccgtgaagcgcagcctgggcctcgacgacgacgacgtggagccggcgaggatgacgctgcaccggtgggggaacacgtcggcgagcagcctgtggtacgtgctgtcgtacatggaggcgaaggggaggctgaggcggggcgacaaggtgctgatggtgacgttcgggtcggggttcaagtgcaacagctgcgtgtgggaggtgaccggcgacatggccgacaagggcgcgtgggccgactgcatcgacgcctacccgccggagaacacggccaacccctacatggagaagtattcgtggatcaacgacgtcgacggagacagcctcatcatctaa

SEQ ID NO: 14398 - DNA, 247 bp, Oryza sativa
  Clone ID: PAT_MRT4530_20340C.1
atgtcaatcaagcatatagaatataaagtagttaaatcagttgaagatcaaaaccgatgcagctcaacccaaaagcaagaactcatcaaaacaaaacgaaagactctatccatgcgcggcaatcctcatgaagcatattaatcttaacccgacaacatataccacgtcatattgtcggatctgactcgatcggctaacttcatccgactcgaactctgccgatcccagtcgtagccgattcggactc

SEQ ID NO: 14399 - DNA, 305 bp, Oryza sativa
  unsure (1)..(305): unsure at all n locations
  Clone ID: PAT_MRT4530_20341C.1
taggccccccnggctttnccctttntgnttccggctngtntnttgtgnggaattgtgagcggataacantttnncccaggaaacagctntnnccntgattncnccnagctngaaattnacccnccctaaagggaacaaaagntggggntcccccccggnggnggccgctttnnaaatagtggntcccccnggcngcaggaattnggcccganatttntccntncaaggacgtatanacttnttttgttcntttgttttaaaaaaaaaaaaaaaaaaaaaaaaaaaaaaaaaaaaaaaaaaaaaaa

SEQ ID NO: 14400 - DNA, 288 bp, Oryza sativa
  Clone ID: PAT_MRT4530_20342C.1
atgagtgctcctcagcgagtgaaagctaagcagctaggaagattggaagctatcaagggggtcgggtccctcaaagaggatgagacaaagataattatacaggctgacacggggaggattttgggtgcgaatgtgccaggaacgccgtcccgggtgtgtccaggggcggagaggggcggctaccgctcatccatgggcccaacccctcgggggaagtgccacgtggacgtcgagggcgacctctcccctttaagcacgatatccccgggcccatatcatcgacagtag

SEQ ID NO: 14401 - DNA, 231 bp, Oryza sativa
  Clone ID: PAT_MRT4530_20343C.1
atgggcttggctcatcttcttgctgttcgggagaaagagagcctcggcctcaaccttcaggacccgggaaaatcagatctggaggatgaaaggcggaagcatgctggccgtcggagctttggtgccccttgcaacaagaatcaggatgacggtgttgatcagggagccacgagcaaggagaagggcggagctccggtgcctcttgagacaagtaacaggatggccgactag

SEQ ID NO: 14402 - DNA, 1033 bp, Oryza sativa
  Clone ID: PAT_MRT4530_20344C.1
gccacatatatatacaggaaatatatcagttggtaaccacatcaatctcgaaacaagttgtgcccaaattactacgcaccgcgtactgcaaaagaatgagctcggtggtgaagattggaccatggggcatgggccggggctcccagttgaccgagaactgtgacatcgcggtagctcctctgcgcctggaaagcatcaccgtgaaacatggcgaggttgtcgactgccttagcttctcctacagggaccgcgagaagctaccccacaccgccggaccctggggcggcagaggcggccaggaaatcacgataaatcttggcccgtcggagttcgtgacggaagttcacggggagtacggatcctactacggccacaacagcatagccaacctcacgttcgtcaccaaccgcggacgccatggaccctttggaatagtggacacatccggctgggatcgcttcagcgttcccatcaagaacaacagcagcatcgtcggcttctttgcccgcaccggcgattcctacctcagcgccatcggtgtctacgtcaggccattctgaatttctcatcgtcgtcaacagatgcctgccctggatgctgtgaatgtatcgctgtaaaatatgaatatccgcgttaattataatgccgggctgcgtccagggctttcccatttattttgcgtaggctgtgtgtctggttgaagttggaactgatctattgtagtacatgtaagttggaactgacctttgctttcagtaaagcgggaccaatttaaaaggtctttggtaagaaaaaaaaaaaaaaaaacttgaggggggccgtgcccattttcccttttggagtctttttcgcccctccctgcccgcttttacaacttgaactggaataccttttctccccctttattgctcgaactatccccttttgccgtggggattcaaaagtccacccttcttcttgcatatgtgctttttaggcattgatcgccctctcgtccttagcactatgcgttttactcaatacttttgagagt

SEQ ID NO: 14403 - DNA, 315 bp, Oryza sativa
  Clone ID: PAT_MRT4530_20345C.1
aaattctcactaattacgagtacacacatacacatatgtcatgtccgtaggtggataaacaccatacatatagtgtatactaacaatcatcgttttttgcgattccatcgttctatgtggcacaatgattcgaaccagactgccaatatgaagcccactgtgaaccccaggccagaaaagatgaacaaaaggatcacgccaagtctgtcctgccagaaactgttggtacctgaaggagctgatgcacttggagatgttgagcctggagtatcacattgtttagagagtggctttccacagaggttgacattacct

SEQ ID NO: 14404 - DNA, 2916 bp, Oryza sativa
  Clone ID: PAT_MRT4530_20346C.1
tggatgtccgtgatgagaggaaggatgcaaggggtgtggcttgcagcattaatctccctcctttgccactctatcgcaaacgcagggaaggaagccgctgctgctgtgtgcatcaccagcgagagggatgctctgcttgccttcaaagcaggcctttgtgctgactccgctggtgagctgccttcctggcaaggccacgactgctgctcatggggtagcgtgtcctgcaacaagaggactggccatgtcatcggccttgacatcggccagtatgctcttagcttcacaggtgaaatcaactcatctttggctgctttgactcatctacggtaccttaacctgagtggaaacgacttcggtggtgtggccatcccagacttcataggctccttcagcaagttgaggcatcttgatctctcccatgctggttttgccgggttggttcctcctcaacttggcaatctgtcaatgctcagccaccttgctttgaactcctctacgatcagaatggataatttccattgggtttctcgcctccgtgccctcaggtacttggacctcggcaggttgtatcttgttgcatgttcagattggttgcaggcaatcagtagtctccctttgcttcaagtgcttcgcttgaatgatgcatttctccctgccaccagtttgaattcagtttcttatgtcaatttcacggccctcacagtgcttgatcttagtaacaatgagctgaattctactttaccaaggtggatctggagcctgcattctctttcttacttggacttgtctagttgtcagctttctggatcggttcctgataacatagggaacttgtcctccctgaataccattgacttttcgaataataatcttcatggagaaataccttcaaccatgggtttcataacctcccttgcaatattatctcttagagagaacagtttatctggcacattaccctcctcattgcagtcatgtaatggattgatcattctcgatctcggatctaatagtttatcaggaagcttaccatcatggctgggtgatagtctgggctctctgattactctatctttacgctcaaatcaattttctggtgaaatacctgagtcactgccccaacttcatgccctgcaaaatttagatcttgcttctaacaaattatctggtcctgtaccacaatttctaggaaatttaacatccatcttctcagtcgatctcagcaaaaactcactatcaggtcatgtacataccaatatcagtcagctcacagagttaattgaactggacctttctcacaattcactcgaagatgtcttgtctgaacaacacctaacaaatctaactaagctaaaaaagctagatttatcttacaattccttgagaatttctgtgggagcaaattggttaccaccctttcaactttatgaactccttttaggttcttccccactacaatcacaagtcccgcagtggcttcaaacacaagttggaatgcagacattagatttgcacagaacggggactctaggtcaattgcctgattggctttggacgtcattgacctctctcattaacttggatctctctgacaatctgcttactggcatgctaccagcatccctggttcatatgaagtcactgcagttcttggggctcagctcgaaccaattggaaggtcagattcctgatatgccagaaagtctagacctgctagatctctccaacaactctttatctggatccatacctgcgtacttttgcaacatgccatggttgtcagcaatagacctatcaaacaacagcttatcaggcgagctacctaattgttggaagaacagcacagaactatttttggtggatttctcgtacaacaacctggaaggacacataccttcaagtcttggctctcttacttttcttggttccctgcatttgaacaacaataggctatctgggttgttgccttcctctctaagttcatgcgggcttctggttttccttgatattggagataataatttggagggttccatacctgaatggataggagataacatgcaatacctcatgattcttcgtttgcgatcaaatcgtttcactggaagcatcccgtctgaattgtcacagcttcaaggtcttcaagtgttggatcttgccaataacaagctgtcagggcccctgccacaaggtattggaaattttagtgaaatggcttcacagaggtcaagacatattataccgatgcagatttctggtgatagttttggtggatctctctatcacaatgagagtctatacattaccatcaaaggagaagaaagattgtattctaagatcctttatctgatgaagagcattgacctttctaacaattatctaacaggtggaattcctgctgaagttggagatcttgtagggctcaaaaacctgaatctctcgaaaaatctcctgagtggtcatattccagagacaattggtaatatgagttcattggagtcgcttgatctctcatggaaccgactgtcaggcataattcctgaaagcatgacatcactgcacttgttgagccacctgaacatgtcctacaacaatctgtccgggatggtaccccagggctctcagcttcaaacccttggtgatgaagatccatacatctatgctggcaacaagtatctctgcatccatcttgcttctggcagctgttttgaacagaaagataaccatgttgatcaagcagagcataatgatgtccatgatatctggctgtatatattttcaggattgggcttcggagtaggattttcttctgtgtggtggcttcttgtgtgcagcaaggcagtgggcaagaggtatttccagttcgtcgactccacatgtgagaaagttattcactggatgatcctactggag

SEQ ID NO: 14405 - DNA, 990 bp, Oryza sativa
  Clone ID: PAT_MRT4530_20347C.1
cttccgacctaaacccttcatatcccaccaccggaaagacacgagaggcgacggagagagagagagaggagagaggaaagctaagcttccagagatgtcggcggacgagctgcggctggacctggaggagctgcggcggctggagggcctcgccaagcggccccgcgtcctctccgccctcgccaacgagatccgcgccgtcgatgccaagctggcgaaagcgaccgagccgcaggcaccgcaggccgtcgcggcgggatcgccacctgtagtggcggcggcggcggcaccggcacctgctgctgctgctggggtgagctacgtgacgttggggtcgttcagctgggatcaggatgctgagaagataaagatttatgttttcctggagggtgttgagcaagataaggtggagactacttttaagcctatgtcagtagatacaaaattccatgatgtgaagggcaagaactaccgatgtgccatacctaagctgcacaaagaaattgttcctgagaaatgcaaggttttagtcaagcctacaaagattattgtgacgctttacaaagcttccaaaggcaactggttagacttgcatttcaaggaggataagttcaagccaagcatggctaaggagaaggatccaatgtctggaattatggatttgatgaagaacatgtatgaggaaggtgacgaagacatgaagcgcacaatagccaaggcctggtctgatgcaaggtctgggaagaccgccgattcagtgaggggattaccttgagtttgcccgaagcgttggctctgctgagccagttcgttgtgattgaatgcacttggttatcttattttgcatgtaacgaactggaaatcggtcacgccgggcctgttcatttgtgaagaaaacatcttctcgtgtgatattatcacttctgcgtgtgatcagcctttaatggaatgattatgtgccaaaaaaaaattttgcgaaaaaaaaaaaaa

SEQ ID NO: 14406 - DNA, 1477 bp, Oryza sativa
  Clone ID: PAT_MRT4530_20348C.1
tctaggatacacggcttttctagtcaagaagttaactggggcggcagcagaggggcaaaaagaagtacgaactccacatggatcagcaagatgggggaagaatctgatatttctgattagcaagcatcgattcgcccttaagatagcaattatcctatgagagacaaccagttagttcgctcatcagactggccttaacgcttaacagatattatcatcatggctcttatggggttatttgaaaaatctgacatctcactttgctgggacaacgaacgctgcttttcgacgaagaaaaggagggttcctcgctctgacgccttgcgcagttgtaccgtacattcgtactaccacacagcttgaagaagaagagggaattcgacgagaaatagtagaagcttggcgttcgtgcgaggaattctcggtggttgatcgatccgtgtttcgcggcggatggggcaggcgttccgcaagctgttcgatgccttcttcggcaccagcgagatgagggtcgtgatgcttgggctggatgccgcgggcaaaaccaccatcctgtacaagctgcacatcggggaggtcctttcgactgttcctacgattgggttcaatgttgagaaagtacagtacaagaacgtgatgtttacagtatgggatgtcggtggccaagagaagttgaggcctctgtggaggcattacttcaataatacggatggtttgatctatgtagttgattcattggatagagagagaatcggaaaagcgaaagcggagtttcaggcaatcgttaatgatcctttgatgcttaacagtgtaatattggtatttgccaataaacaagatatgaaaggggcaatgacgccgttggaggtgtgcgaaggccttggcctctatgatttaaagaatcgcatctggcatatccaaggctcttgtgccctcaaaggtgatggtctttatgagggcttggactggttggcaagtactctgaagggactggaagcctcaggtcgcctcccctcaggagggacctcattgttctaagtagcaggtctgcctgtaagattcttccgttgacactaacaatctttgcatcaaagatgatcatgggaacaaattatcttggtgtggaaggccttacatggtcacaccttacattgctcaggcgatatgcttcgcggtgtcgattctactgaaggcaaaagatgcatgagagcctgactacttgaaacattaccactgcagttttgtcatgggtagtagtgtagtagtacccatcgagtcttgtgaatttccttgaatgttacagctaactatcggatgcatttgttcacatgtgatgagtgaaacgcatgttgatgtaaaaagtttgtgtaaagttatgtttggcaaatgcaatttgtatcaacaaaatctgatcccatgacacatttctctgacggtcctacatcagaaccggagacaaaaaaaaaaaaaaaaaaaa

SEQ ID NO: 14407 - DNA, 273 bp, Oryza sativa
  Clone ID: PAT_MRT4530_20349C.1
aatcacccggtgcaacgcacgggcacttttggtgggatatatttatatgtaaccaggaatcaacacggaagacacaggttttcttgataattaattaagcaagaacctatgtaggaatctacagcatcaactaccatagagattgtaccggattttttgatggggcacatgccggacaaggcgatgccacatacctcagattacgctgtaatgtcacgcttcatccggatgtaacccatctcaccctatccttgttcctcacaagtttttaac

SEQ ID NO: 14408 - DNA, 263 bp, Oryza sativa
  Clone ID: PAT_MRT4530_2034C.1
ggctgccctatgtggatgaatgacaattgaggaaaacgcaacctggtgtgatgctgctgatgcaagatgattgcttgaatgtgcgtgcggatgatgtgatggtgatgtgctgagtgatgctgggaacaccgaaatgagatgagagtgggatgcaaagaaaaaaaaatggaaactgatggatgtgcatgatgtgaactgattgcaagacctgcgcaaaccagactggaaaaaaatggcaatgagttgctgcaaaaaaaaaaaaa

SEQ ID NO: 14409 - DNA, 480 bp, Oryza sativa
  Clone ID: PAT_MRT4530_20350C.1
ctgtggggggggaaaagacaccccccgccttttatatttcgccccccaaacccatttttaattgaaaccctgccccaaaaaaaacattttggtaaaaaaattcaggcggggtttgggttaaacccccggttaaaaggatatttaggaaaacaaaccctccccccccccccgagtaaggcttttggttgcacctacaaaaaaagggggtccttgaaaaaaagggatttaaaaaggggccctcccccggtttggtttttttaaaagagggggttttggggaaaaaaccccggttgggggcccccaaaagaaagaaaatttgcttttttttttgggggggggaaaccccccttttttaggaacgggaggagggccccccttttcaattggcttgggggctttggggaaaaaaacccttttgaaaaagggcttgtttttctcccccccaaatttttgtgagggggggttcaaaaaagggggttt

SEQ ID NO: 14410 - DNA, 330 bp, Oryza sativa
  Clone ID: PAT_MRT4530_20351C.1
atggccatgaccttgccgtcaccgacatcgccgtcgttctacgtgtcgtcctccccgcgccaccagccgggcctgctcctccccctcccgtcgccgtcctcctccgaccggcgccgcccgatgcagctcgccgtcgcggcagcaatggacactactccgagacaaggcggagtgctcctggagatgaggcctagaggaggaggtgggggagctccccggaggccggcgccgccggccggtccgagagaagggcgcggcggagtggtggtcgtccatgcggtggcgagggacgctcctccggagacaggctctggcccaaagatccattga

SEQ ID NO: 14411 - DNA, 598 bp, Oryza sativa
  Clone ID: PAT_MRT4530_20352C.1
tttttttttttttatgatgttgaaaaagagcagatattatgacaacgtatgaagtgaattgttagtacaatagtacatacatgttgaaacatgtaatttacaacgtatagaatgtattatcactacgtacagacaaatgaaaccatccaaaatctaatgcatcaccttgtacaagaggaaaaaaaatgtagaagcacagtaaacaacctaggaaaatacactgtttcatgttttcttgttctttagcagacaaaactgcagttcgaaatattcaagctgaaaaacattatattgagtatactgtcaagagtcagcagtcaccgagccatctttcgccaaccatttgttaaaaggtatgaaaataccagttcattccaagcatcaggaactccagggagacaccaatggctgcaatcaagtacagtgggaggataactccaggtgccaacatgagcatcacttcggaatgctcccattaaagtcacgtttagtagagtgacaggagctttcatgtttgccacaacatcggcaagtatagtcccaaattcactcttatcatttcctttggcctctgatgaaggctgttctgttacttcac

SEQ ID NO: 14412 - DNA, 380 bp, Oryza sativa
  Clone ID: PAT_MRT4530_20353C.1
ttttttttttttttttagcacaaaagaacactcttttaaataaaacatgtacaaagtcaaaatctgatacagctttaaattaaaagaaaccctgattgcatacttgttttcatcatcataaatacaccaagttgaaaacattacattacacagtaactctacacacatggtactcagctagcattctcttgttcaaatttacacatgatgatataaacgaaccgatcatgcatacacataaatttttttccttttttttcctttttcacacaagaagactcgtggcctcatcggttttggttcgtcacgtcacatgacgctgcagccggccggctcctcgtcgtagtacggcggctggtacgggctccggccgccgtacc

SEQ ID NO: 14413 - DNA, 205 bp, Oryza sativa
  Clone ID: PAT_MRT4530_20354C.1
agaacgactctttcaccattttggaacgtcggcactcacaggctgtgtatattactcaaggccgtgccgggttcaagttgtcaacaacaatggaaagacagtgttcaacggcgagcttgcggacagctgcttattataccacaacactatgcagttgtaaagtggcacaagagagatgtgctacatgcatcagacatctctattc

SEQ ID NO: 14414 - DNA, 129 bp, Oryza sativa
  Clone ID: PAT_MRT4530_20355C.1
atggatggtggaatgtttccagatatgctattattggaggccttgaaaaggacagtatttgataggtattaccccttcaatattgttgaaactgagatcgaagaattcaatgtaaacaggaagcaaagg

SEQ ID NO: 14415 - DNA, 160 bp, Oryza sativa
  Clone ID: PAT_MRT4530_20356C.1
atggacagcggaggtgagagtaagagagagggagagggagcggcgaaggagccatcgtcgtcattgccccatccactggcgccggatccgcccaccgtcattgccctagccaccatcgccaccattgtcatggctgaggactatatttggtggaggaagg

SEQ ID NO: 14416 - DNA, 129 bp, Oryza sativa
  Clone ID: PAT_MRT4530_20357C.1
ttactctgttttcgcgacgctcttcatctttgattccgctttgataaggcgattcccaggcgacttcatctccggccagatctccgcctgcggcgatgtcttgttccgccagcccatctgccgcgccat

SEQ ID NO: 14417 - DNA, 369 bp, Oryza sativa
  Clone ID: PAT_MRT4530_20358C.1
atgtggttccccgtggagaacagaggaacggcgacggctgttccggtgacgtcttggcatcgaggaggagcggcggcagcggcggttcagggacgaggagaaccggcgtcgaggaggagaggcgactgcgggtgcggcgttggtgggtgggaggtgcgacggctccaccactactgccgagcggcggcgggcgcgatgtcggcggatccggctcggcacggttgtgggcgcggcaacgacgggagaatgcgggctggaggcgcggcggctccacctccatcgctgatcggcggcaggtacgacgtcggcggatctggcatggcacggctgcgggcgcgacggcaacgggcgactactgataggaggtga

SEQ ID NO: 14418 - DNA, 375 bp, Oryza sativa
  Clone ID: PAT_MRT4530_20359C.1
atggaggtggagccgccgcgcctccagcccgcattctcccgtcgttgccgcgcccacaaccgtgccgagccggatccgccgacatcgcgcccgccgccgctcggcagtagtggtggagccgtcgcacctcccacccaccaacgccgcacccgcagtcgcctgtcaccactgtgcccgcagccgatgccgtgccggatccacctcgtcactcctcatcatccccgaaccaccaccacctctcctcctcgacgccggttctcctcgtccctgaaccgccgctgccgccgctcctcctcgatgccaagacgtcaccggaacagccgtcgccgttcctctgttctccacggggaaccacatgccgtcgctgatccgtaa

SEQ ID NO: 14419 - DNA, 498 bp, Oryza sativa
  Clone ID: PAT_MRT4530_2035C.1
atggtgacggttatggcagttatgacccgttccatggtggtttcacctgacttgtgggcccttcaatccgtgtacttgcgtctgattgaccggaaggaggagttcggcgctcgacggcggacggcgggcacggcgatagcctgcggcggcggatccggcgacgccgtcctcgggagggccggatccgccgccctagggaggagctcggtgctaggcggcgggcggcgggcacggcaacgccttgcggcagcggatcaggcggcggtgtcctcgagagggccggatctgccgccctacggtggagctctgcgctcggcggcgggcacggcgacgtggcggtggatcgggcagcgccatcctcgagagggccggatctgccgccctacggtggagctcggcgctcggcgctcggcggcggatctgggggcggcggtggcagcggcggtctcgggcgatagcggcggcgacggtgacgatgggagcggaagcggcggctga

SEQ ID NO: 14420 - DNA, 167 bp, Oryza sativa
  unsure (1)..(167): unsure at all n locations
  Clone ID: PAT_MRT4530_20360C.1
cgcagccaggcagcgcacgcggatccaggagggggatgcagnccgcacacccacccaggantcatgaagggggagtcagnccaggcggcagacacatcagtgccaagaggcacagcaacccaggcaccaggaggcacgtcgccgcagcctggtgccggcgctacctg

SEQ ID NO: 14421 - DNA, 396 bp, Oryza sativa
  Clone ID: PAT_MRT4530_20361C.1
atggcaaagaggcaggcggcggtgctcgccgtcgtggcgtcagccgccgccgcgtggcgaggctcctgtgggccccacggtcaaccatgccgagctcccccaccctctcacctcccaccagctcaagctctcctctccggcgacatcgtcgcctctcctctcctctctcctcccctgtggcatgatcgacgcggcagcggcgtggatcaacatgggtggtggaagggattgacgcagcgatggcggatcaatgcggagatggcggatcgacacggtggcggcggcgagggtcgatgcagcggcggtggattgtcgcagcccttctctccagtccaccccttctccatcttctccagagcgagaatgacgacgccgcagggcgacgacttagggtga

SEQ ID NO: 14422 - DNA, 3213 bp, Oryza sativa
  Clone ID: PAT_MRT4530_20362C.1
atggcaatcaagtggcagctttcgatgctttctcatcttccacataccgtccccttgatcgcagccgcctcatggtccatcaatggagatgacctctaggcactcctgacattcttatccatcatatgaaacgacccatgagcgatgccaacctcttggaaccccatcggctatgagaacaattggacaccacctgtcttctgccaataaaccggcgtgacttgcaatgatcgctgttacaaccttcaagccgcctaactcaaccaaactgctccgtcaaccaactgtcaggtcttgatccagatatagggattttttgtaatgccactatagtgtcaatctcaggtaatattgaccctcaaccctggcagttgccctaatgctcatctgaagattctaaccatgcttcagtgcttcgactacatctcttaatcttttgcattgctggaccgttgattttcactttgtaacgtctaaatgaatattgcttcattaagacaaagatgaaacctaacaacgttgacactgaaaacccatttctttatgagacgaatgagaggatatcttatgccgaactacaagcagcaaccgagtcattctcaccggcaaatttgattggttctggaagcttcggcaatgttttcactggtaacatccccgaaacttttggtaagatggttaagcttatttacttcagtgtccaagataatcacttggaaggccatgttcctttatcaatcttcaatatttcttccattagattctttgatcttggcttcaatagactgtcaggatcacttccactcgatgttggtgttaagcttcccaggataaatcgttttaacacacttgctaaccattttgagggtataataccacccaccttctcaaacgcatctgctcttgaatccttgcttcttcgtggaaacaactaccatggcattattcctagggaaattggcatccatggtaacctgaaggttttttcgttaggagacaacgcactccaagccacacggacgcgtgggtgggaatttatgacatcactgaccaactgtagtagcttgcgatttctagatattggacacaaaaaccttgttggtgaaatgccaattaacattgcaaacctgagcaaagagctcatagggatttacctaagtgaaaaccaaataactgggaccatacctgaagatttatggaagctcaataaacttacttctctcaacctgtcctgcaacctcttcacagggaaccttacctcctgatattggcgggcttccaataatcaattctatctttatgtcacataatagaatcactgggcagattcctcagccattaggcaatatctcacagttgatctttctatctctgtctaataatcttctggatggcagcattccaattagccttggcaacttcacaaaacttgatctcatggatctttcttgtaacagcttgacaggtcaaattccacaagagatacttgcaataccgtcccttaccagacgcctaagcctctccaacaatgctctaattggctccattccaacacagattgggctcttgaacagccttgtcaaaatggatatgtcaatgaataagctgtctggtggaatcccagaagctattgggagctgtgtccaattgagttccctaaattttcaaggaaatcttctccaaggacaaatcccaaaaagcctaaacaatttgaggagccttcaaatccttgatctctctaagaacagcttggaaggtcgcataccagaatttctagcgaacttcacgtttctaactaatctaaacctctccttcaacaaactatctggcccagttccaaatacagggatttttcgtaatgtcactatagtgttactcttaggaaataaaatgttatgtggtggccctccatacatgcaattcccttcatgctcatatgaagattctgaccaggcttcagtgcatcgacttcatgtcttaatcttttgcattgttggaactttaatttcctctatgtgttgcatgactgcatactgcttcattaagagaaagatgaaactgaatgttgttgataatgagaacctatttcttaatgagacaaatgagaggatatcttatgccgaactacaagcagcaaccaagtcattctcgccggcaaatttgatcggttcgggaagctttggccatgtatacattggaaatttaattattgatcagaatctagtgcctgttgcaatcaaggttcttaatcttagccaacgaggagccagtagaagctttttgaccgagtgtgacgctcttaggagaattcgacaccggaaacttgtcaaggtgatcaccgtctgtagtggatcagaccaaaatggcgacgaattcaaggcacttgtcctagaatttatttgcaatggaactttagatgagtggcttcatgcaaacacgacagcagttagaagaagctacacaaggataaatttgatgaaaaggctgcatattgctcttgatgttgcagatgcattggaatatcttcaccatcatattgtgccgcctatagttcactgtgatattaaaccaagcaacattcttctagacgatgacctggtggcgcatgttacggactttggtctagcgaggataatgaatattgctgaaccgttcaaagaaagcagctcatttgtaattaaaggaacaattggatatgttgcaccagaatatggctccggatctcaggtctccatggatggtgacatatatagctatggggtgctgttattggaaatgtttactggaagaagaccaactgacaattttaactatggtacaacaagtcttgtcgactatccgacatgtgggcccgcgcagtgtcgtcgtcctcctcacgccaacgctcaacgccagctgccccttcttcctctgcccgccgcctcagagccgcaatctgtccttctccctcgtctccgccatgtccaccagcaagcacagcaggtcgcgccgccgctgagcccggtcatcagcgagggcagagatgtcgaggacgccgaccccaacctgcccggcttcttcaagaacccctcccacctctccgacgacgagataggggaagacaggtcgcctcttgccgccgagcctgatggatttcttggagatgatgagggggacaatgcgccgtcagaatctgatattgccaccgaattggacgatctggacagcgcttga

SEQ ID NO: 14423 - DNA, 1857 bp, Oryza sativa
  Clone ID: PAT_MRT4530_20363C.1
atggacggtggatcaaagcgggagtacatacacctgggccacaacctgggcttgggccagaaaagtggcctcactctcgatccctcttgggctgatttcggcctggacgacaccgatcgtccgatctttagggttttgatcggacggccgagcgtcgatatcggggaaacaaaacccctccttctcctcagccgccgaaaccctagcccatttccctccctcccatctcacatcgccgccctcccctccgcgcccccgagcggcggcgacggcgcccctcttcccgcgagcggcggcagcggcgccctcccccacaaccaacggcgcggcgccctctccccgaacaacggcggcgtggaggcggctgcggcccggcgggagcgggaggggcggcgggccggacctcgcctccgccagatctggcggcatggaagcggctgtgtggtggtggtggcggacgtcatggaacgccggtcgggcctcgcctccgccagatccggcggtgtggaggcagctgcagcccggcgggggtgggaggggcggcgggccggacctcgcctccgccagattcggcggcatggaggcggctgcggtccgacgggggcgggagagctcatcctgaattttactgcatcttgtgttcttcccttatttctttcactcgaggagctgcaaatcctgggccggcttcccaagaaggagaagccgggcaagtccggggagaaggatttggccggagtcggctcgtcgctgcctgatgcaagaaccaccacggatttgaccatgtctagtaggatcgccaatcctaacaattatacagccgcggtcacaaatcccggccagaattacaccgtcaagaacgcccatcatggtggtgctggtgtcagcaatggtttcttggcgccgcccgtgtttgaggcgcttccgagcttacgggatgcgccggcgccagagaagcccagcttgtttctccggaaggtggtcatgtgctatgtggttttcgacttcacggacccgaccaaggatgtcaaggagaaggagatcaagaggcaaacattgctggagctcgtggattatgtcacctcagctacggggaaattcccggagcccgctgtgcaggaggtcatcaaaatggtgtccaccaacttgttcagggtaccgaaccccgcgccaagagagaacaagccgcttgagtcatttgatatggaggaggaagaacctgtcatggacccggcttggccgcacttgcagattgtgtatgaactattcttaaggtttgtccagtctcctgagaccgatgctaagctggccaagagatacgtcgatcatggtttcattatcaagctgcttgatctctttgactcggaggatcctagggaaagggagtatttgaagacaatacttcataggatatatgggaagttcatgtttgttgagaaggactgcaagcttgcggatactgttataaggggtttacttaaatactggcccatcacgaatagtgctaaggaggtggcagagcgagctctgtttctgtggaacaacgaccatattgaggtcttgatcaagcagaacagcaaggtgatactgcccataatccttcctgcaatagaacgaaatacaaaagaacactggaaccaggcagttcaaagcttgagtcttaatgttcgcaagatattcatggatcatgaccctgtactgtttgaggagtgcctcaagaagtttgaggaagatgaagcaaaagaaaccgcgttgagatcaaaacgtgaggccacatggaagcgcctagaagagattgcctcgtcaaaaactatcagcagtgagccagcagttcctccagaggctacagttcattag

SEQ ID NO: 14424 - DNA, 488 bp, Oryza sativa
  Clone ID: PAT_MRT4530_20364C.1
cggacgcgtggggccgcgcatggccccgtcaccgccgacggcgtcaggaggctgggcatcgagagtcgacgtcgtcggcgccaggttcagcagcttccatggtgttctcgacgccctcgccgcgaaactcgaatcagattgaagcactaccattgttcgtcccaaatccgaatcaattttagatttctaaaccgaatcttgttgcgagttcttctcctacccatccgcgtctcggggcttggaatcgaatcctcgccaagttcggatcaacgaactgccctcataagcccgcgtcccctccttcctcgcgtcgacgccgcaccgcaccgtatctccgctcgccgccgccgacgacgacgagatgctttcccggattctgcatggctatggaggacacggcgggagaggcttcgagcagacgtaccggtgctactcggcggcggccttcaacaagccgcagctcgaatgcggagacaaggtgatcatgc

SEQ ID NO: 14425 - DNA, 330 bp, Oryza sativa
  Clone ID: PAT_MRT4530_20365C.1
atgccgccggatctggcggaggcgaggtccggcccgccgcccctcccacccccgccgggctgcagccgcctccacaccgccggatctggcggaggcaaggcccgaccggcgttccatgacccgcttccatgccgccagatctggcggaggcgaggtccggcccgccgcccctcccacccccgccgggccgcagccgcctccacgccgccgttgttcggggagagggcgccgccccgtcggttgtgggggagggcgccgccgccgccactcgcgggaagaggggcgccgtcgccgccgctcgggggcgcggaggggagggcggcgatgtga

SEQ ID NO: 14426 - DNA, 549 bp, Oryza sativa
  Clone ID: PAT_MRT4530_20366C.1
atgccgccgaatctggcggaggcgaggtccggcccgccgcccctcccacccccgccgggctgcagctgcctccacaccgccggatctggcggaggcgaggcccgaccggcgttccatgacgtccgccaccaccaccactgccgcacctccccaccatgcacagagagagagaaagagacgacgccgccgcctctcctgccctcgccggaccacagccgcttccatgccgccagatctggcggaggcgaggccgaaatcagcccaagagggatcgagagtgaggccacttttctggcccaagcccaggttgtggcctggggaggggaatccccactcttgagtctcgactcctccgctgctctccactcatcaatctgctcctcgctcgacctcggtgtctccgtcttcaccgcgcatggcggcgggaagcacaggggagggcgaggtggccaggcgaatgtgaagaagacgagcccaacgccgttgagggagaacatgaagcgggtggtcggccgcaacgcgcgggtggcggaggagccagtggattag

SEQ ID NO: 14427 - DNA, 309 bp, Oryza sativa
  unsure (1)..(309): unsure at all n locations
  Clone ID: PAT_MRT4530_20367C.1
tgactgtgcacagtttgttgcacgaaatgaatgcgcaagagtagatgacaataattttcaagatgtcaggcggacaacagtacacttgtctattgcacattgtggctctttaagagcaatcccccctataacaaatttacgtactcttattatacaaagtgnattttgtcttgatcaagaggctgaacttatgcttggagaagntcttcgtaaatcggcacgnttgcgtctgctatacttggatgtgccatccctctctaatgcactttgatgaaatncccagtctaacacagctccgttacctcttcc

SEQ ID NO: 14428 - DNA, 435 bp, Oryza sativa
  Clone ID: PAT_MRT4530_20368C.1
tcacatcgccgccctcccctccgcgcccccgagcggcggcaacggcgcccctcttcccgcgagcggcggcggcggcgccctcccccacaaggccacaaccaacggcgcggtgccctctccccgaacaacggcggcgtggaggcggctgcggcccggcgggagcgggaggggcggcgggccggacctcgcctccgccagatctggcggcatggaagcggctgtggtccggcgagggcaggagaggcggcggcgtcgtctctttctctctctctctgtgcatggtggggaggtgcggcagtggtggtggtggcggacgtcatggaacgccggtcgggcctcgcctccgccagatccggcggtgtggaggcagctgcagcccggcgggggtgggaggggcggcgggccggacctcgcctccgccagattcggcggcat

SEQ ID NO: 14429 - DNA, 2354 bp, Oryza sativa
  unsure (1)..(2354): unsure at all n locations
  Clone ID: PAT_MRT4530_20369C.1
atgacgtaccaaactcatcctgaattttactgcatcttgtgttcttcccttatttctttcactcgaggagctggtgatgtaaatcttttcaagcagcatcaggctttgctttacttcgattacgagagactgtacaaaatgtgtatgatgggtcttacattcttgctcgtgctgaagaacagggcatctggtttgatatttgaccatgtgattttcgacataaaaagttgcttgtttggacgatccgttatgattaagcaaatcctgggccggcttcccaagaaggagaagccgggcaagtccggggagaaggatttggccggagtcggctcgtcgctgcctgatgcaagaaccaccacggatttgaccatgtctagtaggatcgccaatcctaacaattatacagccgcggtcacaaatcccggccagaattacaccgtcaagaacgcccatcatggtggtgctggtgtcagcaatggtttcttggcgccgcccgtgtttgaggcgcttccgagcttacgggatgcgccggcgccagagaagcccagcttgtttctccggaaggtggtcatgtgctatgtggttttcgacttcacggacccgaccaaggatgtcaaggagaaggagatcaagaggcaaacattgctggagctcgtggattatgtcacctcagctacggggaaattcccggagcccgctgtgcaggaggtcatcaaaatggtgtccaccaacttgttcagggtaccgaaccccgcgccaagagagaacaagccgcttgagtcatttgatatggaggaggaagaacctgtcatggacccggcttggccgcacttgcagattgtgtatgaactattcttaaggtttgtccagtctcctgagaccgatgctaagctggccaagagatacgtcgatcatggtttcattatcaagctgcttgatctctttgactcggaggatcctagggaaagggagtatttgaagacaatacttcataggatatatgggaagttcatggtgcaccgtccattcattaggaaggcgattaataatatcttctacaggttcatatttgagacagaaaagcataacgggattgctgagctattagagattttggggagtataatcaatggttttgctttgccactcaaggaagagcacaaattgtttcttgtgcgagcattgattccactccacaaaccaaaatgtgttagcatgtatcatcaacaactgtcatattgtgttactcagtttgttgagaaggactgcaagcttgcggatactgttataaggggtttacttaaatactggcccatcacgaatagtgctaaggaggtgatgtttttgggcgagttagaagaggttttggaagccactcagccagcagaatttcagagatgtatggtgtcacttttctgtcagatcgcccgctgtctgaatagttctcactttcaggtggcagagcgagctctgtttctgtggaacaacgaccatattgaggtcttgatcaagcagaacagcaaggtgatactgcccataatccttcctgcaatagaacgaaatacaaaagaacactggaaccaggcagttcaaagcttgagtcttaatgttcgcaagatattcatggatcatgaccctgtactgtttgaggagtgcctcaagaagtttgaggaagatgaagcaaaagaaaccgcgttgagatcaaaacgtgaggccacatggaagcgcctagaagagattgcctcgtcaaaaactatcagcagtgagccagcagttcctccagaggctacagttcattagcagcgctcctcagcgttgcttgctgaatgctgacgtcgtatgagcagctcgtttgccagatctagtttagatcactngatgtgaatgctcatggattcctgcatgcctcatgttacttgctcctgaacattttcgcaggctgacttgtatatacaaggtagatgatggacttcgaatcttcaacagggctcagagctgtgtctgttccgagatcgtagcacctgttcttcgccgtgggacaaaggaaaggaggcagattatgtccttgcttttctgagatgtatgtgctagcctgctaggggtcaaggtgcagactggagctcagtgccctgatgttgaggacggttagcagcacatgagagagtagcaagtaggaacagagtttgcttgttgatcatggttttgcagaaatacaatgtttttatgtatgaataacttcgagtcttatcatgataatatgtaccccgggtgtacatgtgtttgctttttctagatgtatacagaaatttgtaacgaggaatgcttcctgcttgcatcaatcgatgcagagttgc

SEQ ID NO: 14430 - DNA, 2406 bp, Oryza sativa
  unsure (1)..(2406): unsure at all n locations
  Clone ID: PAT_MRT4530_2036C.1
gagggccccctttttttttgtatntgctgggtgtttttttgttggtgggggggtatgtatgttctagtgggtgcttttgttttttttttttttttttaagattaaatgtagataaacccatgtataaagcttaatggctataacaatgttgcaatacatataaccacagtgtgctcgtggtaaaatgacagccttgaattggaatccacaagcccccggtccaatccatacgaagagaagaaatctagtgccgcatgaatatttcacatgttacaatgttacatcctacttctgattaaaaaaccaaccaaatcctcaactaccacaggtatgcataatcagggcgacatagtcaaaaaagagagtaggcgtatgaatgtatttatattaagttaggagatcatggccccccttcggtctgtggctcaaaaaacttaatcagcatctagcattaatccacttcttggcctctctaccacagttccagtgacaacatgtgatctgctatgtcttccaaactgcgatcatctaatcacatttgatgtttctgtagattctcctcacaaaaagagttgaccctagatagccaatagcaccacaaagtatgcctagaccaaggcagaacatcaatgtgtaaccgaagtagaaactcgtctggaaaaaacctgacatctttgtctttacatgatagtagtagatggaatatagatacacatataacgcagttgatgcagcagagagaaatgaagtccattgccagtgatagttctcagcattcagcaagaaataagtacccacaatagtgacacagattgtaactattagaaggatgacaaagaccagcagcatgaagccgtagacataataaaccttgtagttccagaatgacgtgaacacaaagtacatctcaatgaagatactgccaaagggaagcagcccacccatcaatgagataacagaaggtgtaaggtaccacttcttctctggaataggccgtggaatagtctttactcggcagggattgttaggagcaccactccagttcctaccaacaacagttcccagaagcaccagcggaaaagaaatgaaggcccaaagaacgaacatgacaaccattgtgccgaatggtattgccgctaatgatcggtagaagatagcaattgtattcagaacaaagccaattgcaaagcacaagaatggaaatagggatgctgtaaggatcatagcctttatccagtttttaccaccattccttgagtagaggccaccactgacatagccagaaataaaagatgtaagagcatagcacacaatgaaggttgtgatgatagaccctcgcccaacatatagcatgccaacaatggccaatacaataacaagaaggataagagctgccagctgagtgccgatgccaacaactgcagaaagaaaggccaaacttcgaggagggcgaaatacatcaccatgaacaagcttccatccagattcctcattaacatctctctccagtgactccagatcatcatcttcacgagcatactttgcatagtcatttctcaatgtccgcatcaatatcattgaaaccaaaccagtgaggaaaataaccatcatgaaagaattgaaaatggagaaccaatgaatctggtgctcaaagaaaggataatccaggtatacttcaaagcggcgtgcaaaggtcacatctgtttgtaaccacttcactgaatatgtcatgtccaatttcttaccagcttcaagaagcttaggagactcttgggtgagattaacatgaatgatcctgttatcattgtatttgacaagaatgctcttgtgtgtgtagagataacgcttgttttcattgtttttgtccgtctccccaacaaaaccccaaagatcatccatgaaaaactcgaaccagtatgagttatcaatggcatcggagaactgctgaacctttttagaatcaagctcaagtgtacaaatggagcccctctcctcatttcttaagaactttatgtcaatctgactatcaatcagctcatttccacccaggacctctccaagaccaccccatttatgcgcagggttctcagatggttgacaaaatggaaggctgtgatagttgtaagtttcttgtggattattgtaagggccgactttgttcacccagagcttaactggttcttcaactttgtacttgtggtctgactcggaggcggaggcggggcgcggcgtggcgagggcgaggagggcggcggcgagggcgaggaggagcgcgcggccgctgccgcggcaggcggaggcggaggtggggagcagcatgtcgccgctgccgccggcgagatctgaggagggtctcgggcagactcacagagcatgatcacgagcctcgtgccgaattcctgcagc

SEQ ID NO: 14431 - DNA, 1700 bp, Oryza sativa
  Clone ID: PAT_MRT4530_20370C.1
tcactttttccttcggatcagttgcttgaagttaaccggcgtggtgaactttgcggtgccattgtagaacgcagcggcagccaccatggcagcttgctccgtggtgtaacccccgtcccaaaaccagtactgcgcgcggttgtcgcagggtggttggttgaagtaggggaagggcatgcaaggcccggggcagcacgagctgtcgatgttcacaaacccaggagaaccgacaccattcacagagagagagaaagagacgacgccgccacctctcccgcccccgtcggaccgcagccgcctccatgccgccgaatctggcggaggcgaggtccggcccgccgcccctcccacccccgccgggctgcagctgcctccacaccgccggatctggcggaggcgaggcccgaccggcgttccatgacgtccgccaccaccaccactgccgcacctccccaccatgcagagagagagagaaagagacgacgccgccgcctctcctgccctcgccggaccacagccgcttccatgccgccagatctggcggaggcgaggtccggcccgccgcccctcccgctcccgccgggccgcagccgcctccacgccgccgttgttcggggagagggcgccgcgccgttggttgtgggggagggcgccgccgccgccgctcgcgggaagaggggcgccgtcgccgccgctcgggggcgcggaggggagggcggcgatgtgagatgggagggagggaaatgggctagggtttcggcggctgaggagaaggaggggttttgtttccccgatatcgacgctcggccgtccgatcaaaaccctaaagatcggacgatcggtgtcgtccaggccgaaatcagcccaagagggatcgagagtgaggccacttttctggcccaagcccaggttgtggccggcagccgatgggttggcgaaggtggcgttggagaaggcgtagaaatcagcgagggagtagcgaaggcgacgcttctcggaccggaggccggcgaggagtgccccgagagccgcgttgaactccgcggcgaggccgttcatcctcgcgtcgcacccgccgccgccgccgctgccgccaccgcggcgcgtgtccaccgtcggcccgcacccgacgaggccgacgttgacgacggcgaacctcctggcgcccatgccgtatagcgacgtgacgctggcgttgtagagctccacgagccgctgcacctccgtcttgttgtccggcggcgccggcgggaacgtcaggaagtagttgcagtccgggaggaggtccatggtgccgacggcgagcaggaagagggacctcgagaggaggtcgctcatggcgaggcgccccagcttggactccatctgtgacctcgtcgtggcgaagtagctgatttgcttcgacagtgggatggtcaagccgatgaagtcggccatggtgtagccgttgctgaacctgccggtggccttgccgccggggaagtctcggccgtagggagggaagcccccgcggacgatggtcgggaggtagttgttgttgcccgtgtccacgatcgagtcgccgaacgccagcaccgccggcaccttcgccgccgacgtccccggagccggcggcgctcccagaatggcctccaccgccaccgctccggcgagtacgagcacgagcaggtaggagattatcacaatggcccggacgcgtg

SEQ ID NO: 14432 - DNA, 428 bp, Oryza sativa
  Clone ID: PAT_MRT4530_20371C.1
gcacgaggacaaggcctcgcctcggcccgaccatcaccagcaacccgatcctcccctgcttggctgcagccatggcggcctccacggcgctctccaccgccgccaaccccacccagctctgccggccccgcggcgcttcgtcgctggccaagccggtgaagggcctgggtctgggccgggagcgcgcccagcggagcagcatcacgtgccaggcggcgagcagcatctccgccgaccgcgtccccgacatggagaagcggaagctgatgaacctcctcctcctcggcgccatctcgctgcccaccgtcggcatggtcgtcccctacggcgccttcttcgtccccgccgggtccggcggctccggcggcgggacgtacgccaaggacaagctgggcaacgacatcaaggtggaggactggctcaacacg

SEQ ID NO: 14433 - DNA, 1706 bp, Oryza sativa
  Clone ID: PAT_MRT4530_20372C.1
acttgatcaataaataaactcaaaatgtattaatttcccgggcaaattgcaaaataactttagccagtacctcagtagtaaacagataaattaataatacaacacgcaaaacagtcactgtcagtatcagatcctggcaattgcactgtatttaggtgataaatagagtgagatatacattaagtacaagcctataggatccggattccggatgccttaagcagcagcagtgattctaacaagactctcggtgtatggcattacgctgaagttgaagagattcttccaccttggtggcctaccaccctgatacctgatgccacccagctcgcacacggccgtcagctcatcgctccacaggtcgtagcggtggatggtgtgttttgcccacagcaacatcccgccatcaccaagaaggcccattggatggcaaagtctcgagacatagatgcagtatcgccgctcccaatcatcaaaagacggcgaatttgtcgtccaaatcgtcacaggcatggtgtcactgttggcatgaaggacgcacaattcgccgtgtagcacgtccggcctgaccttgtcatctagggcagggtccagtgaatgaggaagaagagtgacgcggaacgcttggtcttgcaggctaaaccaaaggaggccaccatggagagtgtcattagggtagcgaaaccgatccatgtaccagaacaagtagccaccattgacagtgaaggcagtgagccatctactgacagggtagggaggatcagtgacggtctccctccagccacagcctgcgcccgtttcaccgacggtgaacacctccatccccatgcggatggggtccattgaacggtagaatgctcgaaccaccttgtacttgcgtgtgacaggatctaggcctagccctgcagcgtagcaagcttccatttccgtgccatggtggtggttatcaccatggccgtcagggagagtgatggtgtccctcgtggccgggttgaagaggtagaggttggtgtctgtgggggcgagcactaggccatcgcagtgggcgaagtggcagacgaggtggaactcgttggcagggaaggccgcccacgccttggacctggcaatggaggcacctcgctgccattggtagaagctgatttgggtggagaagttgttgggccaatcacctagtcctccaactgggggttgaatatcgcaacgcccaaggagggtgtgggggctgatgaggatggatggctcctgtttagaagccgagcactggagttgcgttcggatgaaggatggctcggagatgattgcacgccaccctctgcagacggacttgaagcgtagcagggatttgacgggcagccgagccagaatctccaccacaatctcctccggcagcagatcaggaaaagtagctgctgcaggtggtactacagtcctcttcctcttcctattcctgctcctcgtatctctcgccctcacactggtacaacccttcatccatcctcctccactctcagatgcagcagtacggcggcggcgaccgcctaatggatccatcacggcacaacaccgggtctaccggtagattggttggatcttggggggacggtgagggttccggcggctcctcctgggatgggagaaggggaattggggaattctgtgttgcgggggcacatgccacgggggtgatttttatttaattaggt

SEQ ID NO: 14434 - DNA, 114 bp, Oryza sativa
  unsure (1)..(114): unsure at all n locations
  Clone ID: PAT_MRT4530_20373C.1
aaccaatctcttctaaagaaatccaagggcaagtataagagcatgtaaaatgcaagtttactaaaaaaatngaacacggtctaacacgcataggagagaatgattagaacaaat

SEQ ID NO: 14435 - DNA, 404 bp, Oryza sativa
  unsure (1)..(404): unsure at all n locations
  Clone ID: PAT_MRT4530_20374C.1
cccacgcgtccgcccacgcgtccgcaattccccttctcccatcccaggaggagccgccggaaccctcaccgtccccccaagatccaaccaatctaccggtagacccggtgttgtgccgtgatggatccattaggcggtcgccgccgccgtactgctgcatctgagagtggaggaggatggatgaagggttgtaccantgtgagggcgagagattctttgtttgtgtgtttgctgcatgtacgacgacaccatggacgtgaagacgaggagcaggaataggaagaggaagaggactgtagtaccacctgcagcagctacttttcctgatctgctgccggaggagattgtggtggagattctggctcggctgcccgtcaaatccctgctacgcttcaagtccgtct

SEQ ID NO: 14436 - DNA, 651 bp, Oryza sativa
  Clone ID: PAT_MRT4530_20375C.1
atgatgaccgagtgccgccgcctctttgagaacacttctcgggaggtcggggctcagatggaccgcctgacggcccgtgcgatatcgtcggatgggagggtggcgcagctggagatggaacttgaagtcgcccgcgacgaccttcagaagatgaatgagatcgtggctggcaacgagatgcaacgtctggggctggccttggagtgcggcgtgaagtcttccatccctgcgcaccccgacgagacctcagaacccaagctaggccgtgtgcagcggaggatcggcaacaacgtggtcatggatgacgagtggggattggcactggtgtggtcgtggatgacgggtgagactgaacggaagttgtgcggcgtcgatctggagttcatggttcgcgaaggagatcgtcttggcggcgcggaggcaggctcccgggcggagatcggcggcggcgagggcgtatgtgctccgacgccgcacattggtggtgacatggaggaaaccggcgaggaaggcatcgttagagacgccgacgggagggatcgcggtgtctccgagtgggccagggagagagggcgcggcccacgggggaagaaggagggagagaagaggccaggccgggtcgagaaagggagggacgagagagaggagtag

SEQ ID NO: 14437 - DNA, 433 bp, Oryza sativa
  Clone ID: PAT_MRT4530_20376C.1
ccggccgggactgtcctaatccaccctcgccgccgccgacgacgcaagtagccacccgtgccgccgtcgccgccgtcgccggagaaggagaggagcagccatggatggcgggcggagcaagacgcggaagaagacctctaggcaggtgatccagaagtactactcgcgtgtgacgctcgagttccacaccaacaagaaggggctcgaggaggtgtccatcctggcgtcgaagcggctgcaggacaaggtggctcgggtgaccacccgcctgatgcggcgcatccatcgcgggcccgtgcggctcatctcgctgaatctgcaggaggaggagcgggagcgccgcatgtacttcgtcccgcagaatctggcgctccaggtggagcatatccgcgtcgaccagggaatcatcgagctggtccccgcgctcggcatg

SEQ ID NO: 14438 - DNA, 315 bp, Oryza sativa
  Clone ID: PAT_MRT4530_20377C.1
aagcagcagggtgtgtcgtcgcggtccgaggtatcatgcgatttctaccacgtatggcgtgatactcgcgaggtatcatgtgatacttgtcaggtatcagacgatttctaccacgtatcgcgtgatactcgtgaggtatcagacgatttctaccatgtatcgcgtgatacttgcgaggtatcggatgatacctaccagccgtcccctgtagacgaggacggcacgggacggcgcggcggcggcggggaacggcgacggcggcggtgggggatgggcgcggcggtggtggggggggacgacgatggcggcgaggga

SEQ ID NO: 14439 - DNA, 414 bp, Oryza sativa
  Clone ID: PAT_MRT4530_20378C.1
atggcccctcacaacacagggatgccgagtcaaaacctgcgtcgtcgatcgagtccagttgagaccgggagagagatggattatgcctacctcttgcgttttgaatgttcgttaaatcataaatataccatcgaaatcgcggttagaaaacgcgataccgaggttcgctacgggaaagcgcgatatcgccacggtatcgcattaccaatgcgcgagagcgtgacggtctcgtgcgttgaatgggcgaggagatttgagctggcggtgtcgcttgttggttatgcgatatcgacgcggtatcgcgtttccactgagcgagagcgccacgtcataccgatttgggagcaacagctggagtggtgctatcggtctcgcttattggcagcgcgagaatgggatcgctaccaggtttag

SEQ ID NO: 14440 - DNA, 1545 bp, Oryza sativa
  Clone ID: PAT_MRT4530_20379C.1
atgtcggttgaatgcctttctgattggttcaacaatttctacgatggcttcccacggaattccaggacctggtttgcttatgagtgctctaaggacttcgaattcccaatcgatttcagatttgatgagatcaatcacgagaggtttgagaagtccaggatgcttttgtcgacagccatctctccctgtatcctccctgtcggcattcatcagggccgcaaaactcctgtttcatacaagttctatcatcccatgagtgctggaagacaacttgggctgggccagctacccatcggcttgttttttgtggacaagatccaaaccaggggggtgattacatcggccctaatgatggatagactcctgaatatcctagggccgccattaggcagcattgacaacattgagttggctgtgatttggtgtgcgacctttgaccactggtgggctgaatggaagaaacatctctttcaccaatctccctcgatgtatatgaccaatatcttctcggagcagatcccgcaaaccacaaaatcttcacctcctcacatcagccaaagtggtgagcccatacattatgctgtggggatcgtgccgaacagtggaggacttgccccttctatcatcagcttcaacgctcccacgacatcctccttgctctatggccttgttcgtgatcctgttgaaactagaagaaaaagggccaagtcatctgacgccaaatcccctcctaaaggaaaatcctcaaagaagcagaaggcaactgctactgatgacctgccggcgttagacccggatgtggaggagtaccgggataacgaggacatggaggaggccatagaggatgctgctggtgatgtgagtgaaacgagagagggagggcaaacccctccagtcgatccaccaagcccgaagaaggttcaaagccctgtgaaacgccatccgacgaagaaggtggcctccaagaagccatcggcacagctcccaccgcctcctcgcaccccgtctcctccttggcaagagtcaagcgagcggactccattggccgttgtaagctgcgggctgattagagctcggtttgaagagacccagcgtcagatcccagacacctatgccgatgccatttctccagcaatgtatttagagcagcatcggcttaaattggagagggcgatgcagaggatcgccgacagacgtgagagggccgagttggagaccatgattcaaacgaatcagctatctatcaaaggagagaaagccaaacttgatgagatggaggccgatccgagctctactcaggttaacataaaccggcttcgagctagggaggcggaattggtcgccgagcttgagaagtggagggctgacatatcttcgcaggagaaaaagctcgccaacctccccagggccatcgaacaacagaggcttaaactgaagaaatctatcaaacacctcttggacctgagcaagtcattgaagatgatccctagtaccgacgcgctcgatgccctggcaaaagaagaagtagagcaaattaggcaatga

SEQ ID NO: 14441 - DNA, 180 bp, Oryza sativa
  Clone ID: PAT_MRT4530_2037C.1
atggcaagatgcggtgaagggttggcaagacttggctatgcgatagaccgtgcatgggagaagggcaagcgggggcttggcaccgaaggaccaggcacagtgaaagctatgccatggaaaaagctctctggtgatttttggaaacttcggaaagtactttttggaaatttccgaaaatga

SEQ ID NO: 14442 - DNA, 225 bp, Oryza sativa
  unsure (1)..(225): unsure at all n locations
  Clone ID: PAT_MRT4530_20380C.1
ggccatgggggaagtgggcggcggagataagggacccgaagaaggcggcgagggtgtggctggggacgttcgacacggcggaggacgccatcgcctacgacgaggcgtccgttcaaggggaccaaggccaagctcaacttccccnagcncntccagggccgcaccgacctcngcttcctcgtcacccgtggcatcccccccccnnnncacccacnncctacncct

SEQ ID NO: 14443 - DNA, 288 bp, Oryza sativa
  Clone ID: PAT_MRT4530_20381C.1
atggattctccgacaacaagctactcgacgacttctgctatggggagatttaacccgaccgaatgcatatgtacaattgctttggtaagatatgtctgggctactcagacaggtgcacagaaggaacaattgagcactcgagtaggttgtggtcgagtacaccgcattatcgagaatgatctcgacaaatgcagagtcgtcgcgcccaacctaccaatgaagaccgacgacctatctcatagcactggccgtggctggactattcgagaaaaggatgttaacagataa

SEQ ID NO: 14444 - DNA, 383 bp, Oryza sativa
  Clone ID: PAT_MRT4530_20382C.1
ctataggtaaagggggcacccccggggggcccggcccggaattccggggggggcccaacgcgcccgttgtactgcgtgccgtacctctcgcgggatcccagggacccccgacgcgagagtgtccccaatgccgcgccctgcaccgccgcgcgcgggcactggactgccgtacgctgcactcccgcacccgcggcggcaccgacggaggcgcctgcggaatccgagaggtcaatcccgccgccacaggtggagcggcgacagcagctggaccaggaggcggcggacggaaaccaacactgatatgacaggaagcccctagaacagatcttttacaagcggtaccgatgactcccgctccgagagcaacggcgatgaaaccgtta

SEQ ID NO: 14445 - DNA, 1986 bp, Oryza sativa
  Clone ID: PAT_MRT4530_20383C.1
aagcttgcgcccttagggacctccccctagtcttttcttttaattttttttttttgggccaaggaaaaatatcggcaactcagttggccatttattagaaaacactatatctatgaatctcttatttggaaaataaaaaaccaaatctatgaatatatctctagtgttttgctagaagtgacttccttttggttttggttattcagcaaaattatcaatgcgaaaaatatttattagctaaccattacaatgtctgccttcctggaaccacagctaagctcctaataatttcttcagctccttcttgttgacctttcccatggcattccgaggaagcgaatcccataagtacaacctcgtaggaatcttgtatggagcaagcttatcttttgaccaacttgtcagtgcttccaaggtcagtgctggtttcgagtccagttcagctcttttctttgagtcctccttaggcacaattattgcacagataatctctccataagcttcgtcaggtaagccgagaacagcacattccaggacaatttcatgctgtaacagcactgactcaatttctaatgcagacagcttataaccaccaactttcatgatgtcagcatttgtgcgccctaaaattatgaaatatccttcatcgtctacagttactgtatcaccagtcttgaagaacccaccatcaataaatgattctgcagtaacctctggttttctccaatattccttaaaaagggatggacttctaatacaaagctcgccaacttcagatgtagtttcagccccatcctccataataatcttggcctgggaaagaatggttctcaacacacggaagcggtttgccaactgtaccttctttacgtgcaccatgcaatgggttagacagtgccatgacaaactacaaccaataagacgtttcataagtggggaaggaagggccgatgatccacacatccttgcaatagccgtgtgtacattgttggaacctggtagtccaaaagtatcgaataaccataatgcctcgagcaatttaaggacaggtaatagtttagcataaattgtaattgcttcatcatttttactgccattgttgggatatgactcacgccacctctgccatattcccctcacactaaatttcggcatgaactcaacctgagagactatccccttatgagtgtggaccactccttttggtttaccagttgtcccacttgtgtaaaggatgagagcaggatcatctcctctgatttcctttgaactgtcaatctcagctattaagctagaaatagacgaagtcacttcagtacttgatggttcttggcaatctatatttactggtatacttgtcacagatggaagaagagaacagtgagcagaacatttggtagagatattctccatgatgtcttgatgctccttggtgcttaaaatcagcgaaatgtccgagtcattcatgacatgaaggagttcagcttcaggatagctaagtgctagaggcactgcaactccaccagaaagccaggttccaaatatcccggcaacaaattcaggagaaggtttagccactatgccaatacgagctccaccaaggaatccagttccatttattcctttgacagatgaacctgtacttccattctgtgtcatagagaaggagagcggtggtacatttttattgcgcagaatattgtagacatccagtgcagatgcaatgagctggacaaggttataactcttttggtcagatctgatggctgcatggacaccttgtgtcgaaccatgcttaaggacttcctgaacaacctccatgaacgtactagtagtattttgtgtggtgttgtaagctactaggaatattggatatagagctaactgcattctgcgtacgtagcatcgtaggacccaacagacaggtttagaagcaaattcggaccactcctccatgataacgcagattgtaccactgatcatcat

SEQ ID NO: 14446 - DNA, 1525 bp, Oryza sativa
  unsure (1)..(1525): unsure at all n locations
  Clone ID: PAT_MRT4530_20384C.1
tcatgctgtacagccctgaatcaatttctaatgcagacagcttatatccacctaactttcatgatgtcacctatttgtgcgccctaaaattatgaatgtccctcatgcctntacagttgctgtaccgccagtgttacacaccccaccatcaataaatgattttgcagtaacatctggttttgtacaatgtcccttaaaaatggatgcccttttaatacacagctcgcccacctcagatgtagatgcagcgccatcctcaataataatcttggcctcaacacacggaagcggtttgctgactgagccttctttacgtgcaccatgcaatgggttagccagtgccatgccaaactcagtcatgccgtatcgttccaaaagacggtgacctgtcacttcctcccgccgtttcataagtggcgaaggaagggccgatgatccacacatcattagcctcaattgctttgcagcaaaggaagatgcagactgttgttcaggatccataccatcatacccttgcaatagccgtgtgtacattgttggaactccagtaaatactgtaattgcttcatcatttttactgccattgttgggatatgactcacgccacctctgccatattcccctcacactaaatttcggcatgaactcaaccactgatccagaatagaggggtgcaaatagagcattgaacaggccatgaacatggtgcagtgggagacagtgcagaaattgatcttcacttcgatatccccatgcctctgacagaatttgaacctgagagactatccccttatgagtgtggaccactccttttggtttaccagttgtcccacttgtgtaaaggatgagagcaggatcatctcctctgatttcctttgaactgtcaatctcagctattaagctagaaatagacgaagtcacttcagtacttgatggttcttggcaatctatatttactggtatacttgtcacagatggaagaagagaacagtgagcagaacatttggtagagatattctccatgatgtcttgatgctccttggtgcttaaaatcagcgaaatgtccgagtcattcatgacatgaaggagttcagcttcaggatagctaagtgctagaggcactgcaactccaccagaaagccaggttccaaatatcccggcaacaaattcaggagaaggtttagccactatgccaatacgagctccaccaaggaatccagttccatttattcctttgacagatgaacctgtacttccattctgtgtcatatttttattgcgcagaatattgtagacatccagtgcagacgcactgagctggacaaggttataactcttttggtcagatctgatggctgcatggacaccttgtgtcgaaccatgcttaaggacttcctgagcagcctccatgaacgtactagtagtattttgtgtggtgttgtaagctggcgaggaggagcgggaggaggaggaggaggaggaggaggcgaagtggcgtcggaggcgagagaggagggaataagaa

SEQ ID NO: 14447 - DNA, 243 bp, Oryza sativa
  Clone ID: PAT_MRT4530_20385C.1
atggacagagcagaggcgcagcgcgtgcggcccagcccggacgagggcgacccggcggcggtcaggggaggcgcggaggagggtccggcgacctcccgccggcggccacagcacagggcggcgcggcatggccaccatggccgagctctagggtgcaaggggactcggcaaatggcgaggaggagctataggagcgaggttttaccgagagacagcgggatggcgaagttcggcggcgcgtag

SEQ ID NO: 14448 - DNA, 467 bp, Oryza sativa
  unsure (1)..(467): unsure at all n locations
  Clone ID: PAT_MRT4530_20386C.1
aactaaactttttttttaacttttatgggtttttttaataagcaggtataaaaactttatataatttacttgaaaagaaaaaaaaccatcgactgtctttacacatataatttatcaaacacactacacttaaaaacaaggaaaaagcccaacataaaaaaaaaatctaaattggcccaataacaattaagaaaaaaaaacttttaaaaaaaaaaaaataaaaatcttacacgcatgcaacacattaatgtcggatatagaatccaacattttttcctaataaaatgaagtttcngttgagatctttataaacaccaaaccatcactgagatccttttaatctacaaacaaaattcaatttttttttaaaaaaatcaccccttcaattaaagtgtagtttggaatcactacaaaattttattaccactaacacaataggtacaatttttttataaaaagggaacaaa

SEQ ID NO: 14449 - DNA, 948 bp, Oryza sativa
  Clone ID: PAT_MRT4530_20387C.1
atgcaggagctaggtagtgacacggatgatattacaagtgtctatctccgcgcggcgggcccgcccgccaccctcgctgacgggtgggacccacctgtcatcgcctacctcccgccgcgccgccgccgcgcccgtgccctagcgccgccgccgccgcggattccgccgcatcccgccttccccgcgcgccttaatgaggggggaatcattccccgcgattccctctcccgtttcccccgcttttccctctctctctccctcggattcgttcgaatcgcgcccgcaatcctcgccgacgtcatcaatggagcccgagaactccgcggccggtttcctttctctccggccgccttctctcccttccgacgctataaaatcgtccctcgtgcttcgctcttccgtttccgccactcgccgctcgctctcgccgtcggtttcgtgcccgcgccgtgctcctctctctccgccgtcgccgccgagctccgtttcgccgccgtcgtcgctccggtcctcctcccgactcggcgccacctccatcggcttcgccgagtgattgccgaccccgtccgccgctccgcttcgcccgccgaccgccggagcaccgtcgtcatcgtcatcccgaaccgcgccgccgctttcctccgctccggccgccgttctcgtcgtcgtcgttgtcccggggtgagccgaagaccgccgttcgctttcccccttctctccgctctctcgggcgccgctccgccgcgccgatggtcgccggcggtgaccatcggggcgcgggcgcgtccccctcccgtcggccgtgccggcgaggccgccttcgggcgcgccctcgcggctgccaagtgggcccggccgtcagccgcccgcgcccggtccaccgtggaccgagcggctgacgcgtgggcccccactcccgtggacccggtccgcgcgccctccctcggc

SEQ ID NO: 14450 - DNA, 1224 bp, Oryza sativa
  Clone ID: PAT_MRT4530_20388C.1
atgtgcagcgcagcacgcggtgttcgtcgtcacggctcgccggtgatcatagcgtgggcgatcgtgttcttctccgtttttgcgtcgtcggaggcgcagctgcaggtcggatactacaactatacttgccccagggcggaggacctcgtccgcaacgtcgtccgcgccgccatcctccgcgaccccggcaatggccccggtctcgtccgcctcttcttccacgactgcttcgtcaggtctttgaaagggtgtgacgcgtccgtgctgctggacgccgtcccgggcagcaacgcgagggtggagaagatgtcgcaggcgaacaaccccagcctccggggcttcgccgtcatcgaccgcgcgaagcgcgtcctggagcggcgttgccggggcaccgtctcctgcgccgacatcgtcgcgttcgcggcgcgcgacgcctgcggcatcatgggcgggatcgacttcgccgtgccgtcggggaggcgcgacggcgccgtctccgccgagtccgacgtgctcaacaacctcccgccgccgttcttcaacgccacccagctcgtcgccggcttcgccgccaagaacctcaccgccgacgacatggtggtgctctccggcgcgcactccttcggccgctcccactgctccgccttctccttccgcctctacccgcaggtcgcgcccgacatggacgccgcctacgccgcgcagctcagggcgcggtgcccgccgccggcggcgccgccagcgacggggaggcgggacagggtggtggaccttgacccggtgacgaagctggtgctcgacaaccagtactacaagaacatccagagaggggaggtactgttcacgtcggacgccacgctcgtcagccagagcgacacggcggcgctcgtcgacctgtacgcgcggaaccggaagctgtgggcgtcgcggttcgccgccgccatggtcaagatgggcaacctcgacagtgttctcggacatgctgttcctggttttggtgttgctgctgcttccattgatatttccatcccctgcgtgcagctgctggcctcctgctccctgccacgccgccgtggcctcccgctcgccacaatggcttcctgtgcgccaccgcctgctcccagcccagacaccgccgacggggccagcagccccaccgtggcctcctgcccgtggctggctgctcctggccgggacaccgccgccaccgggggtggggattag

SEQ ID NO: 14451 - DNA, 267 bp, Oryza sativa
  Clone ID: PAT_MRT4530_20389C.1
atggacaggcggtgtgtgcacgctgcccttctcgccgtggtcgcgctcgccgccgctgccgccggtgacaacgcgacgtccaacatcggcggtgcgacggcggcggcggaggcggtggtggtgcaccggcgcgtgctggcgaccaccagcatccaggactcggtactggatggcgacaggcaggcgtgcctccggacgccgtgctcggggcgcgggcagtcgtacaccggccggggatgcgcgaaggcgtacgggtgtcaaacctga

SEQ ID NO: 14452 - DNA, 196 bp, Oryza sativa
  Clone ID: PAT_MRT4530_2038C.1
gcggccacgcgtgcgttcgcctccccctgaatcgtgtgcgtatcgtatcgtggcgtcatcagttcgcgaaaaaaaactcccggtcgtggtgccttgtgcgtgcaggatggcgttagatgccgtagtttttccgcatggccattttggctacgggtgcggaagggactcgacggcgtaccggatgccgtggtgcgac

SEQ ID NO: 14453 - DNA, 903 bp, Oryza sativa
  Clone ID: PAT_MRT4530_20390C.1
atggaggtggggccgccagcaggaggtgcgacggcgtcgaacaacggccggcgatccatctttgcaaacgaacaaataacccccccccccagctcaatccgctgtggttttgatcctacatgcgagacgagcgtggcggcggcgaggcagggcggtgtgggggcgggcgcgagcggccacggccggcgcggctgggtggcgattggcagcgcgaggccaagcggctacgcgagacgaggtggcggcgacgcgaagcggcgacgtcgtccccccgccaaccgcctcgccgccgcgctcgcctcctccggcgccctcgatgcaccagacgcggccgcggaccacgataacggacaacgacgacaccgagacaccgtcgccacggtcccggttccttctcgccatcgagcttgccgcctacgccaacggccgtggccacgtccccgtcgcctccttgactcgttccactcctcgtgggtgcgcttccgtgtcgcctacatcaccccactgctccagctcctcgtcgacgcctgcgtcgtgctcctcctcgtccagagcgccgaccgcctcgtccagtgcctcggctgcctctacatccatctcaaccggacgggcgaggcgagcgcggcggggacggccagctcgggcacgtgctcgggtggccaccttcctcccgcctccaacgcggagctcgccccgcctccaacgccggccgcccaacttctctccgcctcctcctccaccggcgcggatctcgcctccccagctgctgttgcggctgccgccttcctcctgccgcagcctcccgcgacaccgctggtcacccgagctcgcctccaccaccgctgcccgccgcccaagctatgcctccgctggcggccatctgagcgagcggcctccgcctaa

SEQ ID NO: 14454 - DNA, 2096 bp, Oryza sativa
  Clone ID: PAT_MRT4530_20391C.1
ttttttttttttttttttggatcaatttaactttgtattagcgctggtttcggggtttttttttttttttttttatcaacaaatgagattcaggtgtcaatgtattatttgacctcaagatcatttccatctaatacatttgcataggcaatttacaatccagtaaattcacctgatgacaatccctcactttccttagtatacatgcctcgtggaaaagcatataaattaaacaggtcgggactccgaaggaatacatttgcaatgaactcagcagcacctaataaacaagtagaagagagaattttatatcacaaccagaagatacgtccccgaagagagaaaagggctaactgagaacagcaaaccaagaaaattagacgagcagttgcagcccgagagcctcagttcagccgccttctcttgttccggtgtagtcccacaccatccacatccaaagaacctaaggcatcatttcttcctctcctcctcagggatctcgaagaccctgcattacttggttcccctgtgctttcagtaaaagcagcatcctcctgaattacagccatggtgcttgaattggaagcttgatctgcagctagtgcaacggcaacatgattcccatcaactggcagcagctcggtatttggtggatttggtggatttgatgaagttgatgctccataagggctcggcctaaccattcttctaaggtcactcacagcgcttgccaatctttccgtgcttgcaaggtcaacaaagtgttgcaataaatcaattctttccgaggaaaatggacttgagctacgcctaggcagatccgatgtgctgtttgctggcagcccactctccgcagcagaagaagcaacaaatgtagagttttcggcttccctctgcaacctccttgccctcattctagtagtaattcgacctaaacggctagcatgatgagcatgatcaatcatttcctggacagttgattcaggaggcccctcaaacctactcacactattcataatctgctgatcaagtatgcgcctccaagaagacaatatcccatgtgcctcgccaagccttctagaaatcgggcgcaaatggtggaatttctgccggaagctctcgagccgattgccatgtggccttggtgggattgtagggcctgatacatttccctcctccgcaaccttcttttccgcgtccgaagtcgaattccctctcccgtaaattggagtgatgttcccttcagtgacctcgcctttgcagacagggcactccttgtgagttgagtggacatgcagccattggtacaaacaaggccagcagaagagatgtccacacgaagttaccacaggctcggaagccatctcgaagcagatgttgcactcaaacatcgcaacgctcttgccacgttcggctggctcctcctctgaggcacccacgatagcgccatcggcgaccaccttgttctcttcaaccgtatcttgcataggctcttgcggtggcggttgtgctgcagcgtcgttctccagggcaggggcctccgagccgagaggcggaaggtccgacctgaaccgtcttggacggaggcagcgactctggcggctattcaggcagatcacggggggacggtagcggtcgacacgctccgggcggaaggaagaggaggccgtcgacgacgatggccggtctacccacccaagcagctcgctgggccgcagcagaagcggcgggtgggagaagccgaactcaaggtcgtcagcgagctcaggtatcgcctccgggggcggcacgggaggcggcacgtagggcgggtgcgcctcgggagccgacgggtcgtacggctcgggcagaggtgtcggggggcgcacaagctcggcggggggcggtgagtacggcgggtggagcggctccgtctccagcggcggcgcgtcggccgaggccgccgaggaggaaggcgaggaggagagcatcggggtgccgagcgcgaggtcggagccgagatcggggcggcgcaggcgcggggcgcgggggaggccgaggtagaggttcagatccatccttctgctgctccgcgcggcatcgtccgcggccattgc

SEQ ID NO: 14455 - DNA, 354 bp, Oryza sativa
  Clone ID: PAT_MRT4530_20392C.1
tcctcctcctcctcctcccacctccgccacctctccacctcgccggacctaatgtgacggcggcgcggatccctcaacggcggcggctgggtccaagaggtgtggttttgttgtgttgtgcacgagaaaaagtcgctggtttgggagcttaccggcgagggcgacgagctacggctcaatgcggctcgatccggagtggtgttcgcggcgatttggctccggttgggcgctgctttggtgaatccggcggcgttgactccagctgggaggagaaggccggatctttgcggtgttctacacgggcgagggctgccttgtggtttcttggggggtgttcttagttggggattaccc

SEQ ID NO: 14456 - DNA, 553 bp, Oryza sativa
  Clone ID: PAT_MRT4530_20393C.1
ccgggctgcaggaatcgcattttgctcgaactccaaaaacccttcccctcttctcccctcgcctcggcccgccggcggccggccaccaccgccacctcctcctccgatggatctcgccgccgtccacgccgccctcgccggcaagtcctactcctccgtcgccccgctctgcgacgacctcttcctccaggccgcgtcccggggcgccgccaccgacggctggccctacgccgtgcacctcctcgcccacctctacctcaacgacctgaacagcgcgaggtttctgtggaagtcgacgccgcaggaggcgaaggacgcgcggccggagctcgccgccgtctggaggatcgggcagtgcctctggaaccgcgattacgcgggcgtctacgcggccgcgcaggggttcgagtggagccctgaaatcgccgacttcgtggccgccttcctaggtcaccactttgtggtgtgggttgggaagtcgggagattcagatgtgcatacatatacttcatggagtaattgtggaaacgatttatctgcacaatcaggctga

SEQ ID NO: 14457 - DNA, 595 bp, Oryza sativa
  Clone ID: PAT_MRT4530_20394C.1
ctttttttttttttttttttttttttttttttttttttttttttttttttttttttttttttttttttttttttttttttttttttttgggaaaaaaaattccccaaaaaattcacccacaaaccaaatttccaaacaacaggcaggactatggccccggggtttaacaaaaccctgaaaaaaacccggggatcccagggcccaaagggaaaaaacacccctgccagggtcccccccccaaaaccaaggggggttcataaagtttcaaaggaaaaaactggggggccccgggtacgggcccacgggttttggcggaagcctcaaaccccgttaaattagccggccgggaaaaaaggcaacccccccccaaagggaaaaacgccggtatccgcccaagaacaaaaaaaaccactttggtcacccttacccaaaaaaggacattctcaggggggtcctcccgcttcggggccggggggggtaaacctaaaccaaggacccccgggttaaacctttttgaaaacgcttaaagccctttccttgaaagaaaactaaaccggggcccgtgaagggctatctcaaaagaatggggcccccc

SEQ ID NO: 14458 - DNA, 307 bp, Oryza sativa
  Clone ID: PAT_MRT4530_20395C.1
aagggaaaggtgcgagcgccagaacattctattactacagattactgggaaaatggtacagtagctttttcctcccttggaaaaagaaacccaaaccttatttacaaaggaacacacacaccggacacaaaggggtcgatcgatcgaagcaaacgagacgaccatggcgaactactaccagggaagggacaacacctaggctatacagggatacagcgggggggggcgaccaccggacagtccaaggctatgaacaagcgctggccttgatggccttcttggacatggccgaccggacggtcttggg

SEQ ID NO: 14459 - DNA, 1032 bp, Oryza sativa
  Clone ID: PAT_MRT4530_20396C.1
atttatggaaagaccttttgaagccactagatcacattattgctcgttcaaataaaaaacccacagtctgaggaagacacaggcctgtcaaactttcccagaaacacctttctagggcgtattctcaaacaaggaacaactgtctatctaacttggcttgaaccctcgagacttatggcccatgctgacgccaagcgccaagaaaaacataaaagtccattggagttttttacgacgagcttgggcggctgcctgggttcgccgggcggtaaatctgccaccggttgcaaggttggggatgcttttgttatagaagacacaacaaatgtgaaatttcctcgagagatagctgttccgggctacaccgagcctttggttattcttggaacagtttgcaatttgaattttagctcacttctaggttacagagagaagttctttctaaaaatatatgctgctgcattctatgttgattgctcaatcggcgttgacactatgcgatggagagaaaaggttggtattgagacctttgatgcttcctcagtttttgactccatttttaaagcaccggttgtgaaatcattgagtataattctcgttagagatgttgatggcaagacgtttgtgaaggctctagatgacattattgctcgtcaaataaaaaaaccaagtgctgaggaagaacagagcctgtcaactttccagaaaacctttctagggcgtagtctgaaacaaggaacaactgtctatctaacttggcttgaaccctcgaaacttctgagaatagatgccatttttcatgcactgacatatctgccaagtgccaactctttaacaagtcaggtgttcttactcatttgtgacaataagatctcaattgcaggaaaccaagatccatgtcaagttgatgctgaaatcacatcagccactgttaattatgcgctatacgatggcttcttgggtagttctccagtatcccctactctgagatcttctactgcactactgctggaggctattcttacaaagtga

SEQ ID NO: 14460 - DNA, 831 bp, Oryza sativa
  Clone ID: PAT_MRT4530_20397C.1
atgtacccaattgaaaggcgactatatactttgaagcgatatgtgaggaataggtcacgaccagaaggttcaattgccgaggcttatattgctgatgagtgtctgacattttgctctaaatacatggacgatgttgaaacaagatttaatcgggagccaagaaataaaggtttctccaatgaagaagcttatggtgttgatgtttttgggcatggagttaattttacttctgcacctgaatatgtatatgatgaaaatggcattgatcaaatggtgtggtttgtgctaaacaactgtgcccaagttgagtattacgtcaatttgttcatagaagagttagagacacaagggattttgaagaagcatagtacaaatccagaagaggtggatgttgatatcttctccttggcatgcggtcctgatttgagagttagaaaatactcctcgtgcatagtgaatggtgtgcggtttaacacagttaaccgtgacaagaacaagaagacactgaatagtggagtaatgtcacaagctacacataatggtcagttaattgatttttttggaaacataaaagagataattcagttggactataacttagaggagaggtccgtagttttgtttgagtgtgactggttcaaactggatggaaagaggactgcacttaaagatgatggcttttttaaaagcatcaatgttggaagtttgtggtacaagaatgattgtttcatattggccactcatgctacgaaggttttctatttgccagatacaaagctgggtgaaaattggcaagttgtacagacatttgaccataggcatttttattac

SEQ ID NO: 14461 - DNA, 230 bp, Oryza sativa
  Clone ID: PAT_MRT4530_20398C.1
tttcggagagtgccgagcagtgaccgcagcgggggtttgcccgctgcgggcggcttcacccaaccagtgctcgtccgaggggcgaactcttctgtgacaatcccagatcctattgctgcgctgctttcctctacccgcatgccctccttctccaacgcctaaggccggccgatgccgtagcctgtccaaatggaaagtgcaaattataccatggatcttaagggttgcct

SEQ ID NO: 14462 - DNA, 3603 bp, Oryza sativa
  Clone ID: PAT_MRT4530_20399C.1
ttatacataaattccatagatgaacatctattcgtcgtcactatcgacctccataactgagtcgtcttcttcgttaaaatactccataagtgtgtcatcttcttcatcttcatcttcatcaccaatgacattcacttctttgctagattctttcatcaaccgagcaatttcagcagcttcaaaaacagggccacgctcatcatctctatttaaaggcgtatcatatataatgctagaaactggtcggcgtggatcctcctcatcatagcactcgtcttcttgatatgcagcagcactaacctccgtctgacttacgttataaagatgcctatggtcaaatgtctgtacaacttgccaattttcacccagctttgtatctggcaaatagaaaaccttcgtagcatgagtggccaatatgaaacaatcattcttgtaccacaaacttccaacattgatgcttttaaaaaagccatcatctttaagtgcagtcctctttccatccagtttgaaccagtcacactcaaacaaaactacggacctctcctctaagttatagtccaactgaattatctcttttatgtttccaaaaaaatcaattaactgaccattatgtgtagcttgtgacattactccactgttcagtgtcttcttgttcttgtcacggttaactgtgttaaaccgcacaccattcactatgcacgaggagtattttctaactctcaaatcaggaccgcatgccaaggagaagatatcaacatccacctcttctggatttgtactatacttcttcaaaatatggttcctaaaccaggtctgaaatccttgtcgaagcattctttcaatgttaggcaccccttgtgtctctaactcttctatgaacaaattgacgtaatactcaacttgggcacagttgtttagcacaaaccacaccatttgatcaatgccattttcatcatatacatattcaggtgcagaagtaaaattaactccatgcccaaaaacatcaacaccataagcttcttcattggagaaacctttatttcttggctcccgattaaatcttgtttcaacatcgtccatgtatttagagcaaaatgtcagacactcatcagcaatataagcctcggcaattgaaccttctggtcgtgacctattcctcacatatcgcttcaaagtatatagtcgcctttcaattgggtacatccacccatattgcacaggacccctgagcaatgcctcatcaggtaaatgtatagcaaggtgtaccatcacatcaaagaaagctggagggaaaattttctcaagcttcaccaaaattatagggatttctttcttcatttgaaccagcacatccttgttaagagttctgctgcacaatttcctaaaaaacatccccaactcagctattgcttcataaatatcactgtccagaaatcctctcatggcagcgggcaaaattctttgcaaaagaatgtgacaatcatgtgttttcagcccctgtaccgttgttccctcagcatttaaacatcttgagatgttggaagcaaatccatctggaaacttgacctcttgtaaaaaagcacaaaaagccttcttctgttcagtagacaaggtatatctagcatgaggcatctctccatcctctctaaattgcagctcctttttaatacccaaatctttcaaatcaagcctagctttagctgtgtcttttgtcttgccctttatattgagaattgtcccaattaggttctcacatatgtttttttcaatgtgcatcacatcaagattatgtctcacctttagttttttccaatatggcaacttccataaactaaccatccggctccaaatttccacatgacccccttcagagttggaacgcttccttttcccagttccttgtggcttcccaggtctgacgtctttaactctctccaattcagccagcaactcttctgtacagaatttacctggtggatcattgctttcgtgaagtccagtaaactcattgtttctcctcaaaggatgttcctttggaaggaaacggaagtgcccaaaataaccaattttgctccttaaggcatatgaaagaggatgcttgtcacaatggagacaagcaaaatagccccttgttgtacgccctgagagagtgctcaaagctgggtaatcatggatgcaccacaaaaccgctgcacgaagtttaaatgatttgccagtaatagcatcataagtatcaacacctgcccaaagctcaagtaaatcctctacaagaggctgtaaaaatacatcaaagtccttcccaggtgatttcggacctggaataagcaaagccatcataaagtttgattcctccatgcactcccacggtgctaggttgtagggcacaacaaacacaggccacatgctatattttgtgttcttttctgaaaaaggattgaacccatcagtagctaggccaagtctaaggtttcttgcatcctttgcaaaaccaggatattcacggtcaaaatcttgccatgcctcgccatcagctgggtggctcatattattctcaacgggctgtcgctttaacttgtgccactgtgccgcttctgatgcttctttggtcgaaaacatcctctttagcctaggtgccaatggaaaatgccgcaacactttttgtggaatcttctttctttctgcatctttccatctcgagagaccacaaaccgagcaattgtcatgcttctcatattcctttctgaacagcacacaattattgtagcacacatgtattgattcataaccaagacccatttcctttagaatgccttttgcttcatcatatgattttgggagtgtattgcattctgggaaagcatcagccaatagcttcatgtgtgcagaaaaagcagaattgctgatcctatataatgacttcatatgaagaagccttaccacaaatgagaaccttgaaaatttggtacaaccaggataaagttgacgctttgcctctctcatgacaatattcaaaaatgactctttatcacgaggttcttcagcaccaacttgattttctacatccggtcttgcttgtgccgctgcagtctgtaggtctcctaaaattccttccaaacgatcaccatagttgtcatcctctgtcaccatagttgtggaaccatcattattttcattcatatcaataggatgctcaataacattgacatctaagctctctccatgatgaatccaccgagtataagtagtttccataccattcatcagtatgtgcttcttcacaacagcctgtctttggtacttctgattaaggcatctgctacatgggcatagaatttcaacattctcattgaatttcccctgaatgaaactcataaattctttgacgccgtcaatgtattcaggggaaaatagtctgctgtgcacccaacttctatccattgctcccttgcgctccacaagcgcgacgacggcgtcggcatcaacgactactgcctcctcgccaagctcttcggcgtcgtcagcatcaacgacggccgcttcctcgctaagttcttcggcattgtgccattcacgcacgtgctccacctcacggtgcagcaccat

SEQ ID NO: 14463 - DNA, 1427 bp, Oryza sativa
  Clone ID: PAT_MRT4530_2039C.1
ccggccgggccggggtcctgcgacgcggagcaccggccgccgctcgccgacgcaagacaacgacgatgccgagcttccctccgcccggcgccgtcaccgtctgcgagatcaaccgcgacctagttgcggcggatgcggtgtccgacgatcgagccaaggatgcctacggggatgtcctcggaatggtcttcagcccgattcctttccagccggatgcgattgttgcccacccacgagcctcctgctgccactgaagctgctgagcctgctgagattgtccccagaacaagtttagcttccaccatagctgagtccttcaaacaaatgatcttcccttcatgcgatccaaatctgctacaagaaattgatacccagaaagtaagttggaatccgcacaagcattgcttggcatttgtatctgggaagaaccaagttacagttcatgactttgaggagccagataataaagaatcctacattctaacaagtgaccatcaaaaggatgttaaagctgttgaatggaggccaaatagtggaaagatgattgcagttgggtgcaagggagggatatgcctctggtcagcatcatatcctggcaacgttgcatctgtgaaatctggtgtcacctcttcttcctttggtgcctttcctagagggttgggaatgcctataagacgtggattaagtagtatatcattagtgcagtggtcacctagtggagattaccttttaactgctaagcttgatggaacttttcacttatgggaaacaaatacatggacgtcagaaccatggtcttcatctaatggatatgtatctggagcaaattgggatccagaaggccgtattgtgttattgtccttttctaactcaacaacactgggctcaattcacttctcatcaaaaccaccatctttagatgcccatctcctaccagtcgaacatcctgaaatttcctctctgattgtcagccgaggcatagataaattagcatgggattcttcaggagagcgcttggcattatcattcaaagatggcaatgaaatgtatcatggccttgttgctgtctatgatgtgaggagatctccacttgtctcagttttactagttgctggagcagtggctggtgttgtacgtatcccctcatacttcgcccgcattgactccctaaaaggagtaagtaaggtcaagagatgattggcatactattgaattatattaaaaaaaatgctactatgattgttatcctcttgtatgtaaatttctgccctatggaagcgatgctattgaatggagacaagtaggaaaaaaaactgaaatgtatttggtagcattacaaaatgtatgtactatacttatttggatggggaaatgtattggctacgcttgtgtttatgcagttccctaagcaaagacaccattgtctt

SEQ ID NO: 14464 - DNA, 659 bp, Oryza sativa
  Clone ID: PAT_MRT4530_203C.1
tgctgaactttttttcttttttggcacaagtgaagcatgcacctagctaggatgcttcgacaaactaattagcagccagatactgccatcgtcgcaagcttggccacaaatcgcctcattgggatctcaatctatttgaacctcctacgtacatggcgtgcaactgaaaatctgaaatgctccttcagacatccagcttgaagctcctgtaaagtggatgtttttaggagcatttcagttgcccatgctagccagaggtgtctggaggagcttcaaagcaaatgtctgcaggagcatctcagggtgttccatcacaagctgaattcgcgcctgggtaattccagatacctgccatgccatgtcgctcaaatgggcttgaggcctagagggcgagctagcgaaggacaaaggaggggaaatcgaggaggtggaagctaagactcagtatacaattgcacatttcactcaagttgtatgcgagtttaaataagttcgaggcaaggttcttgcgtgatgaagggtaggtggatgagataattttgcgtgtggataaggtctggtttagttcccaattttttttcccaaaaacgtcatatcgaatatttggacaaatgcatagagcattaaatatagataaaaacaaaaaaaaaaaaaaaaaa

SEQ ID NO: 14465 - DNA, 345 bp, Oryza sativa
  Clone ID: PAT_MRT4530_20400C.1
atgccaacttttgccatgccgatcgatgagaaagaaagacctggaccaagtgtgtgtggtggtggtgtgatggttaatcggttaaatattgtaacactggacctcctcgcaaaaagaccgagccagttcgaaccttcccttcaacgagatgtcagcagcgtcgtctgcattgctgaccaaccggtgatgcactttgacacgcacagaccgcagaatccaagagaaaaaaaatatatttggtccatccatatcgatcgcatagcttccaagttccaatgcgatgcgttaaataaactagtaagagcaggtacaatagcaggttacaagtcagctgtaaatatattt

SEQ ID NO: 14466 - DNA, 324 bp, Oryza sativa
  Clone ID: PAT_MRT4530_20401C.1
ttggtgttttttttttttttttggtttgtccaccaaactgttgttttttttaaaggttgggcctcggggtcacctttgtttgggtgggtcagcctcccccagaattgatatgtgggttcaaggggttcctttcctcgagtaaccatggggttcacccaagaaacgttgctaaaggctgcaaggtgtcagccgctgctatgggacacctgtaccatatgtggccccaatccgccctgttaggaacttggggtacaaaaaaaaatcaaaatgatcgttcacattggaatccgaccgtgcagtggagccttataaactttggcgccc

SEQ ID NO: 14467 - DNA, 390 bp, Oryza sativa
  Clone ID: PAT_MRT4530_20402C.1
atggaggcagctgatgcatctataaatctactccaaaatcacagagttgagcatataggagcaattagcaaacaatgccagcatataagtccatctgaccaaactatatatattgcgtgcaaacagggaaccgaagaggtcatctcagatgttcttggtgtggaagtgtttcaggcaaactattgcaggaaacatcctggtggggagcttctgttcacccgcagacgccatcaaccggggcagcgaggtggtggccgccggcatggcggtgaacgactgggcggcgttctgcggcgccgacacgacggcgacggagctgtccgtggtggcgtggtggagagcgtgttccgagacatgagcaggtcgctcgtcgtcagcagctacctgtag

SEQ ID NO: 14468 - DNA, 261 bp, Oryza sativa
  Clone ID: PAT_MRT4530_20403C.1
ttaaggaagaggagtttgagacacatgaatcataccttcgataaattgttgcggtaaccaaatagttctacaaactgccataacccattcctcacttcccatctgagcctcaggcttgcagccacagactggatgacaaaaagaccctgaacttctgcaaatgaatcccgtgagtgcggtgatcaaaattaaatccatgacagactcttccgatggctcgctctctgaactcccggctggaagaaaagaaagtctggccat

SEQ ID NO: 14469 - DNA, 3216 bp, Oryza sativa
  Clone ID: PAT_MRT4530_20404C.1
atgggcaacagcctgcggtgctgcctggcctgcgtcctcccctgcggagcgctcgacgtcgtccgcatcgtccacctcagcggccacgtcgacgagttcagctgcccggtcaccgccggcgccgtcctcgccgctcaccccaaccacacgctcaccaccacgtggtcctccgccggcgtcgggtgccccaccaagaagctcgtcatcgtctcgcccgactccgagctcaagcgcggccgcatctacttcctcatcccctcggcgaccctgccggccgacaggaggaagaagagccggcagagctccaacaagaagagcaagcggccgagccaccaccatcacaagagcaacggcgcggcgacggccgcgagcacggcggagcaggacaactacctgagggagcttctgtccgagaagacggcggcgtcgggtggccagcggaggcggcggagcggcagtcggattttggagtcccatatcatgcagatttgtgaacgttggattgtgtcaagattcgtgcctttgtctgatgttggattcttgtttgggctggatcccgtttgggttttggtttccttggcgaagtggtgggggattcctgctgtcgacggcatctcggcggtgaagtgtcgatctgcagtttcggattggatctgcgtatttgattcagtttttgttgtggagatttgtttttggcttataagtctaatgcctcgtgttgataaaagaaaaaaggctgccaaggctgttgttatttcctctgatgaatctcattatgatgattctgaatcttctgagaatttttttgatggtgtttctaagtatactgattcttcttctgatgataacatggaaaagcttttgttgaaaatattcaagaaacagattgctaaaaaaatgaaaaagaagtttatcagtagttcaagtgatgtttttcggaagcataaggctaagaaagcgaaaggagttgttaagagtgatggttcattttcaaggttttctgccaagtattttcgtcgggttgtttcatcgttgtctccacatcagatgtttgttattgaaaaatatggtttcaagaatcttctgttgtttgatagcggtggtgttcccaaaaaatttgctgcttggatttctagtaaggttgatctaaaaacatctgaaatcatcttgaaagatagagtgattcctattacagttgagtcttttagagatatccttggactcccttttggtggcttaagttttgggaaagatttgaatcttttgtcatcttatgattggtgcaagtttgtttatgactggtgcatgaatcgcatcaagaaattccaaaagtcaaagaacttgggtggttgtttgtactattgggctgtttcgtatcttgatactgttgattttggtgaaagaaatgtgccaattggttttcctcgaatgtctgtttggaaagaaggaatgataaagaggtattctgactttgataagatggatgatgatacttttggactgaggccaccaagagttatttgttctacatctaactcacagctgcacttggagaagcactacctaattatgcagctgctcaattatgttattggagaagcattacctaattatctcaaggacatgatttctgctatggagtctgttcatgctgaagtccataatagtactgatcatattgatgttggagatgttcacgtgcttgatgctaatgcacataatcagtttgcttccggagctgttcagaatgaacaacaaacttctccttgttgtaatcatgatgttgacagctatgttcctttggagaatgacttaccagataatgttcctcttgctggtaattttgataatgctggtgatttcaattgtgcttctggttatcttccttcaatgaatactggaaatgcttcgacttctgttgttaatgatggcattgctgagagctttggtgatggtcaagcattagttacacctgatgttggttgtgctaaaaactttaagaactcttcagatgaaagatttagtgcgtctgctatcgcaactgcagctgcagctgtgaagcatgttgcaattaaatttaagtctaggttgccccaattcaatggatctgaaaatgtggatcgtgctgttgatatgttcaagccttcatacaagaatttatttcctcaagataatgctggtatttcatttcactctgttgaagacactccagaagagttaattcaaatcaaacataaccatgagggaactgctaggactcctaacagtggaatcatcaaaaagagggtgtttgaagacttagtaaactctcctgatttaatcattgttggtgaatctaaatttcatgatcgttgcaataatatgactgctcaaagtgatctgatttataatgcaagcattctgcctactagtactgctcatcatgcgagttcgttaggtggaaaaattcccccacatggccctagaagagttcttgctcctgcaaagtacactagtgatccatttgttcaattgcatcgccattttccaatttctgatgttgaaaatcgatactacattgctgtttgtcgtcttgcagatagttcgaaatggcacagttatgatgcagtaaatatcgacaatgtcaaagctaatttttacacttttggacattctttgaagaaaagtggtcatgaacaactagtggttgacccaagttttgctgatgctgaaaaagttcaaaaatcttttgaaggtgctgcaaaggctaggagattggatttgtgtgatatgctttttttccctattcactaccaacagcattggttcttgttcattgttgatgtcaaagatagaatgtttgtttttgtagactctaaacatgaggaacattctgaattttatgaaaacctgaagacttttgtagttgacaattttcagaacttgtggaataagtttgttggtagttctttggattttagtgttttcaagactgtttttcctcctgtccctcgtcaagattatgagtctgattctggagtatttgttatgaaatttatggaaatttggtctccaaggattcttcttcctaatgagttctcaaagcaaaacatcaacaatatccgagtgaaatatgttaaccagatcttttttcatgcaaagaacaaaatgcttcatactgaaattgaagatgctgttcttaattggtttaatcctgagaaatttgctcgtcaataa

SEQ ID NO: 14470 - DNA, 581 bp, Oryza sativa
  Clone ID: PAT_MRT4530_20405C.1
cccggtgtcgacccacgcttctcgaaaaaaaaaaaaaaaaaaaaaaaaagaggggaaaaaaaaaaaaaaaaaaaaaaaaaaaaaaaaaaaaaaaaaaaaaggaacgaaaaaaaaaaaaaaaaactggactaacaaaaacaatacaaaaagggggggcggttttttggggtacccaagtttacttccccttgcttgcacctttttatcttttttggggggggggcgaattcaatttccctgcccctttttttacaacctatacattggaaaacccctggcttgcccaatttaaatcgctttcaaacaaatccctttttcaaacgttggcttattatgaaaaaggcccgccccgctcccttttccaaatatttccccaccctgattgggaatgggacccccccttttaccgcctttttaacccccgcggtggggggggttccccccagttggcccctttcatttgccagccccttagccccctttcttttgctttttttcctttcttttttgccacgttcgcccggttttcctttttaacttttaaatggggggctccttttagggtttcctgtttggttttt

SEQ ID NO: 14471 - DNA, 505 bp, Oryza sativa
  Clone ID: PAT_MRT4530_20406C.1
gtgggggggtggggttttttttttttttttttgttttttttttttttttttaaaaaaaaaaaacaaaattggggggggggtggttccaaaatccagacccaaggggccaacaaacaaaacccaggaaatttcttttggctttgaccttggggggggggggggggaaggggcaatttccaaaaaaggaaaaaaaacccggggggggggggggccctaaaatcggaaggcaaaggttggccaaaaaaaaccccccgggaaatggcgaaaggccctttaaacttggggggaaaggcacacccgggtttatccaggggcaaaaaaaaaccccggcctggccaacccaaattttgaattgggaaaaagggggttaaacattcataaggaggaccggcagttttttttttgggccgggggccccccaaattcttccaaaaaggaaaatttccccccgggggaccaacaaaaaccagggggggggtggttttcccccccacccccaaatttt

SEQ ID NO: 14472 - DNA, 902 bp, Oryza sativa
  Clone ID: PAT_MRT4530_20407C.1
ctgaaatctctagctactactactgctactccagtagcaacaagaggctgaattgagagcaattggcgccatccatggcggcattaagccagctgctacttacagtcttcttggccgctgcattgctcccactggccatggcggcgacgacgacgacgtatcccatcggcagcttctgctgggagccggggatgaactacggcgatctcaacggcagcgatgccgtcgtcaggcggcggagcatcaacttcgtcgtctccgaccttgtcgccaaggcgcgcaccggcggcggattcgccacctccaaggccggcagggggtacgacgccttctacggcctcgcgcagtgccgcggcgacgtctccggcggcgactgcgacgcctgcctcgcccaagccgccaagcagatggtctcctactgcaactatacatcagactccaggctatggtatgagtattgcttcatgcggtacgacaactataactttcttggggaggtggacacgagggaggatgcaagcgtgacaatgagacaatggccggacatggacaaccccaaggctttccagaaagcagcggggaaggcaatgggaaaagcaacagcgcaagccgttgcggtgggcagcagcgggctaggtagggcgaaggagcaatacaccccattcgtgagtgtctacgcattggcgcagtgcacacgagacttatcgccgccgtcgtgcgcgcaatgcctgtcggcagcagtgtccaagtttgataaggcctgtggtagcggaccagggtgccagatcgactatagcagctgctgggcgcgttacgagatctaccccttctacttcccccttgctgctgccggtcgcgccaccatcgatatgaccaaatacactaaggtcaccgtgcattga

SEQ ID NO: 14473 - DNA, 247 bp, Oryza sativa
  unsure (1)..(247): unsure at all n locations
  Clone ID: PAT_MRT4530_20408C.1
atgcggctgacctcctccgctcccgcatcgggcgctcgccccccgggtctagntgtccgaagaaatggcaagaagtgcaagggcaagtgagttattatggctcntcagcgtagatccaggaccgttagcccattccgtncgtaccnntggnaaagcaatggaaagaattcaaaccggaaagaaanactnttgtccaggctngcacagganggattgtgacttngggnagatngccaaactgncatct

SEQ ID NO: 14474 - DNA, 1023 bp, Oryza sativa
  Clone ID: PAT_MRT4530_20409C.1
atgccaccgaagaagatcgctaaggagagagtagccaagcgaaaggaaggaaacagcgagggggagatggttggcgaagagggagcagagccttcggcttcggacgccgaagcaggagctgcgctgcttccggtggcagcgccttctctcccatcttcggcgccgaccacttcgacagaccaggagacggtgaaagcagcggccgcggcgaaggcgctccagattagggacgtaatcctttcatctcaagtgctaggggcgtctcaagccgccgcctcgtcgcagcatgctaccacttcgaccgcactcaccgcctcacaagccaacgctaaccttgaagcccaagccgaagccgacatgggggctatgcggcagaacatggccaagtttgataaagccgtgtggcgaaaagggtttgccactaagctggggaatcaagagtcatcccatttccccacccaattcaagtaccctcccgtcccaagttactcgggagaaacggacccaaaagagttcctttccatctacgaatccgcaattgaatctgctcatggtgatgagaatatcaaggcaaaggtaattcaactcgcgctcgacggcatagccaaatcttggtactttaacttgcttgttaatagcacttgctcatgggagcaattgtgcgatgtctttgtccttaattttcgtggtacctgtgaggagccgaagacccaacaagaccttggcattcaccaaaggccagggaaatcgacgagggattacatgcgccggttctcgcaggcgcgttgccaagtgcaagatataacggaagcatctgtcatcaacgcagctttggccagcttgcttaagggtgaactcacaagaaaaatcgctcgcaaggaaacaaggacgatcgaacacatctttcgcataatcgatggttatgctcgaggtgaagaagataccaagtggcggcaagaaatccaagccaaatacgacaaggcagctgccaccgcaaccgccaccgcacaagctcaagcttag

SEQ ID NO: 14475 - DNA, 432 bp, Oryza sativa
  Clone ID: PAT_MRT4530_2040C.1
atggcctcctccctcccgtccgtgctccgtggctgcgcctgcgccgacggcggccgcctcctccgcgacgcgtgccacggcgccgcgcgcggcctcgcggcgtggacgaggcgcggcggcgccgcccgcgcgctcctcgtcgcatcggtcggatcggtggcgctcgcggcgctgacggtgctcctggtcgccgcgttcgtcctcgtcgcggcggcgacgagcgccgccgccgtcgcggccgtcgtctccctggcggcgctgtccgctctcctcgccgtggcgtacgtcggcgcgttgtcggtcgccgtcttcgtcgtggcggccacgacggcggcgactgtcgtcgccatcacgatcgccactggttgggctgcattattttggattatttggtttgctgcaaggaaatgcctggatcttgctactaactga

SEQ ID NO: 14476 - DNA, 321 bp, Oryza sativa
  unsure (1)..(321): unsure at all n locations
  Clone ID: PAT_MRT4530_20410C.1
ggaaaccgaggaagggtgaaggactgtacttaccacgcattgcttactcggagtagattggaacatcttttaccgggagggatgcgggataattggacggcagatggggttatttataacggggcgnagaactcgggggggggggggcttttcactggtcttgattttcgagggattttttccctttggcgattgcatggaaactgggccttgcctgccgcccgcaggggggccgcgggtgccccctttggaaaaattgccggggagggctcccataccggatgggcgggagctggagggtgcgggggccggtgccctggg

SEQ ID NO: 14477 - DNA, 366 bp, Oryza sativa
  Clone ID: PAT_MRT4530_20411C.1
atggccccaactgcgaaaatcgcagtcgttgggctgcagtcggtccttccccgtgccaggtggtggcggtggctctctccaccctctcttgcctccctcccgcaccagatctggcgtggtggcggcggccgcgggcagatccggcagcagcggctccctctgccccctcttgtctccctccagcggcagatccggcggcagccgcgagtggatctggcggcggtggtggcgtcggcgacggtcgcgggtggatttggcagcgtggtgccagtcgagggtggatccggcggcagtcggcggtggtggtgtcaacaacggccgctggtggatccggcggcggccgagggtggatccggcggcagttag

SEQ ID NO: 14478 - DNA, 1317 bp, Oryza sativa
  Clone ID: PAT_MRT4530_20412C.1
atgcagtcctcggacccgtcccttccgggcttcttctccctcccttcgccaaaatcccccgactaccgcgcgcgcctcgcccccgtcaccgccgacgacacccgcatctcggcctccctgaagtccggccacctccgggagggcgaggcggcggcggcggcgtcgtcgtcgtcggcggcggtgggggtgggggtggaggtggagaaggaggggaagaaggagaacaaggtggtcgtgtgcgcgcgctgccactcgctgcgccactacggcgtcgtcaagcggcccgaggccgagccgctgctcccggacttcgacttcgtcgccgccgtggggccgcgcctcgcgtcgccctcgggcgccaggtcgctcgtgctgctcctcgccgacgcgtcggacttcgacggctccttcccgcgcgccgtggcgcgcctcgtcgcggccgcgggggaggcccacggctcgctgggtcgcgtggcaatgtgtgggcagtgggtgcgaggaatgttggcaagtctacactgctcaatgccattgccccggtgctccgggattgaaggcggaccgaccttgacggaggcgccggtgccaggaacgacccttgatgtgatccaggttgatggcgttcttggatcgcaggcgaagctgttcgacacaccgggcttgcttcatggtcaccagctgacatcgaggctgactcgcgaggagcagaagctggttcgagtgagcaaggagatgcggcccaggacatacagattaaagccagggcagtctgtacatattggagggctggtgcgcctggacatcgaagagttaactgtaggatcagtttatgtaacggtatgggcatcaccacttgtcccacttcacatggggaagacggaaaatgctgccgctatggtaaaagaccactttggtttgcaactacagcctcctattggccaacaacgggtaaacgaactaggtaaatgggtgaggaagcagttcaaagtttctgggaacagttgggatgtgaattccaaggatattgcaattgctggtcttggctggtttggaataggtctgaaaggagaagcggtattaggactatggacatatgatggtgtcgatgtcgtctccagaaactcccttgtccatgagagggcaacaatatttgaggaagccgggttcacagtttcgaagattgtctctcaggcggatagcatggcaaataggctaaagaaccctaagaaaataaacaagaagaaggataacaaagccaattcatctccctccacagatccagaatcttcaaatccagttgaggctgtagatgcttaa

SEQ ID NO: 14479 - DNA, 507 bp, Oryza sativa
  Clone ID: PAT_MRT4530_20413C.1
aaaagaggggctttatcatcattagccaaaaaacgggccagcccaaaccaaaaaaacaatggctggcaattaattaattaagttattctttacccccaacccccccaaaaaggattcccccccataaaaaacccctgggaacctcttgtttgggatgggggggaagccccccaacccatcccctttattatgctggacccccggacccctttcttttgaaaggcaaaatgcatttgctaaaacaacattggggaaaccccggaaaaagaacccctttcccgcaagggggctcaccaaaaagtaaggatgggccttaaaggcaaagaaaccccacccttctttttgggccttttttacaacggcaaagggggggggaaaaaaaagcaactgcccccgggaaaaccccccgtaaaacactgtctttccattggggttgacaacttgaccccggcccccgccttgagaaataaacccaacgctgggagcgttgttgtcccaaaaggggga

SEQ ID NO: 14480 - DNA, 1542 bp, Oryza sativa
  Clone ID: PAT_MRT4530_20414C.1
atgcagtcctcggacccgtcccttccgggcttcttctccctcccttcgccaaaatcccccgactaccgcgcgcgcctcgcccccgtcaccgccgacgacacccgcatctcggcctccctgaagtccggccacctccgggagggcgaggcggcggcggcggcgtcgtcgtcgtcggcggcggtgggggtgggggtggaggtggagaaggaggggaagaaggagaacaaggtggtcgtgtgcgcgcgctgccactcgatgcgccactacggcgtcgtcaagcggcccgaggccgagccgctgctcccggacttcgacttcgtcgccgccgtggggccgcgcctcgcgtcgccctcgggcgccaggtcgctcgtgctgctcctcgccgacgcgtcggacttcgacggctccttcccgcgcgccgtggcgcgcctcgtcgcggccgcgggggaggcccacgggtccgactggaagcacggcgcgccggcgaacctcccgcgcgcgctgctcgtggtcaccaagctcgacctgctccccacgccgtccctgtcccccgacgacgtccacgcgtgggcgcactcccgcgcgcgcgccggcgccggcggcgacctgcgcctcgccggggtgcacctcgtcagcgcggcgcgcgggtggggcgtgcgcgacctgctcgaccacgttcgccagctcgctgggtcgcgtggcaatgtgtgggcagtgggtgcgaggaatgttggcaagtctacactgctcaatgccattgcccggtgctccgggattgaaggcggaccgaccttgacggaggcgccggtgccaggaacgacccttgatgtgatccaggttgatggcgttcttggatcgcaggcgaagctgttcgacacaccgggcttgcttcatggtcaccagctgacatcgaggctgactcgcgaggagcagaagctggttcgagtgagcaaggagatgcggcccaggacatacagattaaagccagggcagtctgtacatattggagggctggtgcgcctggacatcgaagagttaactgtaggatcagtttatgtaacggtatgggcatcaccacttgtcccacttcacatggggaagacggaaaatgctgccgctatggtaaaagaccactttggtttgcaactacagcctcctattggccaacaacgggtaaacgaactaggtaaatgggtgaggaagcagttcaaagtttctgggaacagttgggatgtgaattccaaggatattgcaattgctggtcttggctggtttggaataggtctgaaaggagaagcggtattaggactatggacatatgatggtgtcgatgtcgtctccagaaactcccttgtccatgagagggcaacaatatttgaggaagccgggttcacagtttcgaagattgtctctcaggcggatagcatggcaaataggctaaagaaccctaagaaaataaacaagaagaaggataacaaagccaattcatctccctccacagatccagaatcttcaaatccagttgaggctgtagatgcttaa

SEQ ID NO: 14481 - DNA, 1329 bp, Oryza sativa
  Clone ID: PAT_MRT4530_20415C.1
atggcggcgattcctctctttgacctcaacgctcctcctcctgaagacggtgacgaacttcgaggaggcgaagccatagctgacgaggctggagtcaacattgctggggatgaaggtggaggaggtgctgtagctgacgaggtaatagctcagaatgcaggcaacattgcttcgggtgaaggtgttcaaccacaagagagaaagataaggagatggttatcagacaaagaaagatatgctgtttacatagcattacatgctaaaagcaaaggtggcagattagagaaggacaccacaaaaaaggttgcagaatatttcaatgtaggtattcaagttattcaaaggatttggaagcatgcaagggaacaggttgcactcgggctcaaggttgatgttgacaacagaaaaactagatgctgtggccccaacaagatggaaattgatctctcaaaaatcgctacaattccgctgaatagaagatctaatttaaggtcacttgcaaactctttgggtgtgagtattgcaacagtgcaccaaaaattcaagctggtggttgatatgactaaaaggaagaagacctactatctcctgccagaagaagaagatcctttgcggactgttcaaaataagaatagaatcggtaaagttatgttcctaactgcaatagccaggcccagatttgacgaggaagggaatgtgactttttctggcaagattggcacgtggccatttgttaaagaggttccagctataagaaagagtcgcaacagaaccatagggactttagagacaaaatctatcatagtcaacagggatgtcatgaggcaattcttgattgaaaaagtaattccagctattcagtcattgtggccagaagaggacattggggatacaatttatatccaacaggacaacgctagaacacatgtccctccaaatgacccacacttcctacaagcagtggctgcaacaggactaaacattcagctgaaacaaccctcaaattcaccagatatgaatgtgttagatttaggattctttagctccattcaatcattaactaattgctcaagtccaaaaactattcaagaactaattcatgctgtccaagaagaatttgatggttatgaagcttcaaaaataaacagagtgttcctaactctacagctgtgcatgctagaagtgatgaaagataatggaggaaataggtacaaaatcccacatatgaataagcaagctttggaaagagaaggaaggttaccatcttggctatcatgtgatgctagagtctacgagaaggcgttggactgtctagaacaagttggttag

SEQ ID NO: 14482 - DNA, 342 bp, Oryza sativa
  Clone ID: PAT_MRT4530_20416C.1
atggcctctcattcttgcccaaatacctctaattctaatggcgctctaacttactcaagggaagctggaaaggggtgctcaaatgagaaaccatttttgcttcttcagaagatgacgccgaaatatcagaatgggaaatttaggtcactgccaccaaatggttctctgctccacctggattctgtgtctggcaagcggtgttcaaatgagcaatataaaataaaatataacacactaacacagatctttctatctgtgacggcctctaacaagcctagaaatagcgggccatcacaaggaagtcatctcaatcggaccaaaaagtgtccgattgagatatga

SEQ ID NO: 14483 - DNA, 306 bp, Oryza sativa
  Clone ID: PAT_MRT4530_20417C.1
ctcagggtggccccgctcatgggccccctcccgggcatcctggcgcacctccacctccaccccccggtgcagggcccccagaaggtgcacctcccggcatgatgcaccagggggtcccgtctggtggagcgcagcagggtggcagcggcaaggtgctgaccatggctgagctggagaacatgatgtctgtcagtaggccacctcctggcatgcctccaccaggcatgccctcaccacccggcatgggcttccctgcaccacccgcaggtggttctggaggagggtcccctgacaagcgtgctgacc

SEQ ID NO: 14484 - DNA, 297 bp, Oryza sativa
  Clone ID: PAT_MRT4530_20418C.1
atggcaatgttggtggtggtggtggtggttggtctgcttggagttgcgctaggagcaaagccgaacacagttgacagcgccaagggtagtggcagaggtcagcggcgaagatggcgtggtgatcgcgattctccagctttcgacagttcggtggaggcaagggcaatggcttttagtgagataagctacagcaactcggtgaagatggtaccctatgacgatgatgccatgccagcaatgaatacgttaatgctgaggggacagattatctgctggcatgaggatggtgcttggtga

SEQ ID NO: 14485 - DNA, 248 bp, Oryza sativa
  Clone ID: PAT_MRT4530_20419C.1
gggtaatttggaattcgtgaccgccagtgatgagtgagtccacggaggagataataatgaaagtgcaatggcatccatgcgtgtgtgtggaacacaagttggaaacatgcaggggtggataaccaaatgctggaatgaaaaatggtcaatgcgccaatgttgaaacctgaatggcactgctgtaaggataaatcctataccttttgaaattaattatcatccccctttactatggtttaaaaaaaaaa

SEQ ID NO: 14486 - DNA, 385 bp, Oryza sativa
  Clone ID: PAT_MRT4530_2041C.1
aaataaatgcattaggctttttttaactagttttgtgtgatgttgataaaccttgacgacaaattatttaaagaaaatttttaaaaatttaggatatacaacattgtttattttttataaaatccaacaggttaaaaaaaaaaaaggcagcgtttttcccttggctttttgcttgttgctgctgatgatgctgctgataaaaatccggcgaaagcctttggatgattattttcaaaacgggaggagcataaacggtcaaaagaacctttacggttggtttaccggtccaagcaattatttccccatacctttttttggttgggtcaaaaactgtgaaaccttttgtgatgccataaatttgcaccttaaatacacctttcgtgta

SEQ ID NO: 14487 - DNA, 1615 bp, Oryza sativa
  unsure (1)..(1615): unsure at all n locations
  Clone ID: PAT_MRT4530_20420C.1
atggcgccgccgccgccgcatcgaccctacaagcgccccgccatctccgaccagcagcgccgccgcgacctcgccctccaggcccagtctgcccgccgcgctgacgcccaggcgcgcgcccgcagcctcgccaactcccttctgtccccgtcctctgccgctgccgacacagcagtggagggcgacagcgagcgcgatcatgagcccaccgtcgccgaggccgcttccaagcttcgcggctccgatgcgcgccgctggcatgtttttgccagacctgccgggaaacggtgcttggtcgtctcttgcaacggcatcaccattagcaggctccgaaatggatccattctccaccgattcccttccgctcttccaaatggatcaaagagagacatctccggaccagcaagttcctattccatccttgattgcatctttcatgagcctgatgaaacatattacatcattgatatgatctgttggagaggctactccttgtacgactgcaccgctgagtttaggttcttttgggtgaattctaagctcatggagaccactgctggtgatcctccatcaacgtaccatcgctacagattcagtgctgtccctatatacgagtgcacgcttcagggtcttcaagcagcatactcaggaagcacaccatatgtgaaagatggcttgctgttttacaacaagcatgcacattatctagctggtatcacaccccttgcactggtctggaaagatgaggcttgtagtcaatatgttattgacacagatagcaagggacaagtcccaagtgagcagcatattgtgctggatctgcaagaggatggaaagcttactacttctgatgatcctccagttgtctttggtagcttggacaatgaattcattcagaagtcaaacctgcggccagggaatcttcttcgctttgctgtcaaagatgaaagagtgaaacttgtggatggaaagatggagattagtgagcttcaatttgttggaaagccgaatcgtgctcgtgcttttgctgacagccactcgaaagctttgttccagtacgctgctaggcatgctcctctgagaattgaggatctcgttgcctcgattcagtcaaacaatatggagcttgaatctacggatgttgaaatgcaaggttgatgggagggattaatgattcgtcatcagatcagacaaggaggatacatgtgctaaatttactgggattcagaaagacatggacgggtcttatgcaagaaaaggaacaaatgtaaagtagttgtatatgcatctgaaattgttgttccagttttgatggaatgggagcatgatagtttaacctgatggggactatcccaattatttaaaaaaaaaaaaaaaaaaacttcaggggggccggacccaattggcctatgtggatcgtttaccggcccttacttggcgcgttttaaacgtctggactggaaaaacctgcgttacccaacttaattcctttgaaaaaatcccttttgcaattgggtaaaacgaaaaagcccnaccgtatccctttcaaaatttgccacccctaatggaaatgggaccccccttaacgggccttaacgccgggggtgtggggttt

SEQ ID NO: 14488 - DNA, 258 bp, Oryza sativa
  Clone ID: PAT_MRT4530_20421C.1
atgccgcggatggggtcaaagacggtggcggagtggctcccaagccctcacgccatggatgggatcgacgatggtggcggctccaagccctcccagtggtggaggatgatgaccatcggagatagagtgaatagaggcaagggaaagagcatatttgtagtggcatggatcaccatgaagcgtgatcagctggacacctgggccaatcaacaggcggcccaagtagggtatgggagggtggggcgatgcgggctgtag

SEQ ID NO: 14489 - DNA, 108 bp, Oryza sativa
  Clone ID: PAT_MRT4530_20422C.1
tttctgaccttcctcttgaccctagttccagtaatcactgatgcctcctcactggatgacaccggctagctttgtgtcgactcctattgcttgctatcaatggcgatg

SEQ ID NO: 14490 - DNA, 507 bp, Oryza sativa
  unsure (1)..(507): unsure at all n locations
  Clone ID: PAT_MRT4530_20423C.1
accttctattggcaagtatccccccgggtgcttttgcaaacgagtgccgagaaggccagttagtctttgcttgcgaaggcgtttccccaaaagatgagtgtgcgtttcaagtggctggcccagccagctctagagcagcttggctgtgcggttcatgcaggctgacctttgggactgagcnggccttgtgggttcccttgagttattatgtgcttgcccttgtgatgcccaagttgtgggtgtgctgtgtgtgaacccatagaggagtggagtgtagttgcaccccggctgggcattttgccttgttggcgtggtaaaatgcctntntgtgaatttgatggcacgaggcttacgtattatctggaatctcccttgctgcggtgtggactgacctgtagaactgcacctgtgctgtcgctgccttgtaactgctaccttatgttgcatccaattcangncattcatgngtataatggtattngttgttttgttaaaaaaaaaaaaaaa

SEQ ID NO: 14491 - DNA, 262 bp, Oryza sativa
  Clone ID: PAT_MRT4530_20424C.1
ggctgccccccaattccacatggccctcccccgaggggagtgaggcccgaggtcgccacgtacggtgggttaggtgtccgcctacaggtgcccacctacccgcatttatggcgacccgagcggtcgcgccatgccgcatttaatgtggcgtgcggtgtactcaaccggtctgtgatcggtcgaatgaccgatgggactagaagtcttcatccattaaatggtgaatgacatgggcgccccccgtgtcaggcggcatggtgtg

SEQ ID NO: 14492 - DNA, 420 bp, Oryza sativa
  Clone ID: PAT_MRT4530_20425C.1
atgaatgctacagagaatgcaaagggaccaattgcaaaaggagatggagaacgaaggcaatgcaagcatcatatcatgtggggtgtaagacaaaataacgatgggtttgacaatgcatcggctggagatatctccgacgacagttttactgacggtcctctgaggcaaaacaaaagtatgctagcatctgaacagaacgacaccaatatttacagtggtttatggagcaataactcgtcaggagttccaactgtaccgtatatatgcatgcatgatctttctatgactaaagacgaaagacaagtctatgtgtttcgggaaaagaatacaaaactgagcgtggacttagagacatctatgttgaggttaccaggtcggccgaaccttgagttcacacttgggattgggaaggcttcacaa

SEQ ID NO: 14493 - DNA, 280 bp, Oryza sativa
  Clone ID: PAT_MRT4530_20426C.1
attgttgcacccagtttgctctccatagatggagacgacggattcccagggccttgcttgttcttgttgagaagtgccatgacagtgccaagcaagaacatcacggaggcagcaactggcaatggcattcaaaaagaccaagaaagtgggattgcaccagggagtgttgggtgcttgcgtgacgggcagggatgattctggttgcaaagcttcaggtagaggagattcagcctgagtttcaaccaggctgaggttcatcaggcttttgaatatccttggt

SEQ ID NO: 14494 - DNA, 1365 bp, Oryza sativa
  Clone ID: PAT_MRT4530_20427C.1
atggacgactacttcttcctccagtcgctgctgctctgcgtcgccgccgtggcgctgctgcagctggcgaaggtggccgccaccatgatcgccatggacgagctcttctaccagtcgctgctgctgtcggtggcggccgtgacggtgctgcagctgctgaagctgctcctggtcgcggcatcgccgtccccggacgccgccggggccgtggcggctgccggggatcggcagcctgcaccacctgggtgaacgtgctcccgcaccgcaagctgcgggagctcgcggcggtgcacggaccgctgatgatgctgcagctcggggagacgccagatcgtcggctacggctgggccgacatcctcttctccccctccggcgactactggcgcaagctccgccagctctgcgccgccgagatcctcagccccaagcgcgtcctctccttccgccacatcagggaggacgaggtgacggcgcgggtggaggagatccgcgccgcggcggcgccgtcgacgccggtgaacctgagcgtgctgttccacagcacgaccaacgacatcgtggcgcgcgcggcgttcgggaggaagcggaagagcgcgccggagttcatggccgccatcaaggccggcgtcgggctgtcgagcggcttcaaaatccccgacctcttcccgacgtggaccaccgcgctcgccgcggtcaccggcatgaagcgcagcctccgcggcatccacaagacggtcgacgccatcctgcaggagatcatcgacgagaggcggtgcgtccgcggcgacaagatcaacaacggcggtgccgccgatgatcagaacgccgacgagaacctcgtcgacgtgctcatcgccttgcaggagaagggcggcttcggacatgttcgccggcgggacggggacgtcggcgtcggcgttggagtgggcgatgtcagagctgatgcggaacccggcggtgatgaagaagttgcaggggcagatccgagaggcgttccacaggaaggcggtggtgacggaggccgacctgcaggcaagcaacctgaggtacctgaagctagtgatcaaggaggcgctcaggctgcacccaccggcaccgttgctggtgccgcgggagagcatcgacacgtctacgagttcatcccatttggttctggtaggaggatgtgccctggcttcaactatggcctcgccagtatggagctcgtgctcgttgccatgctctaccacttcgattggtcgctcctggtgggtgtcaaggaggttgacatggaggaggcgccgggcctcggcgtgcgccgccgctcgccgctgctgctctgcgccaccccgtttgttccggccgccgtctccgccgattattag

SEQ ID NO: 14495 - DNA, 564 bp, Oryza sativa
  Clone ID: PAT_MRT4530_20428C.1
aaaccacgagcaacgaactcacctgcaaattaagccaggtaataaaacttgccgtgaaaattaagctgaaaattagctgatcgatcgatcgccatggacgagctcttctaccagtcgctgctgctgtcggtggcggccgtgacggtgctgcagctgctgaagctgctcctggtgcggcatcgccgtccccggacgccgccggggccgtggcggctgccggtgatcggcagcatgcaccacctggtgaacgtgctcccgcaccgcaagctgcgggagctcgcggcggtgcacggcccgctgatgatgctgcagctcggggagacgccgctggtggtggccacctccaaggagacggcgcgcgcggtgctcaagacccacgacaccaacttcgcgacgcggccccggctgctcgccggcgagatcgtcggctacgagtgggtcgacatcctcttctccccctccggcgactactggcgcaagctccgccagctctgcgccgccgagatcctcagccccaagcgcgtcctctccttccgtcacatcagggaaaaacaggtgatgatg

SEQ ID NO: 14496 - DNA, 1990 bp, Oryza sativa
  Clone ID: PAT_MRT4530_20429C.1
gcacgagggattcgccgcgccccctaccaggctaccacctttgccacaccctcccagacctcggatcgcacgcggatgcggtgatgcccgcaccgtgccatctctctctcttttttacttctcgggctttccttagtttccttcgttttcccacacgcccacgcgcggacgccgcgtacttagctagcaaggctagctagaagctcccagtacttgcacgtacgctttcctattctcttttgcttaaaccgagctagagctctgctagctcagttcgtccatgagagcagcagcggcgggtcggcagcctcgcttgtagctagcgataatgaaggtctacatcacgtcggcggcgccgctggctggcgaggcaacgaaggcgatggcgtcgccgccgtcgccgccgccgcaccagcaccagcaagcggcaacaaggcgcgggtgccggtcggctgtcgtgacggggctcctcgccggcgtgctcctcttccgcgccgcgctcctcaccatcgaggccggcgcatccctctgcccttccaccaccggatgcttggactggagggccggtctcggggactggctgtacggcggcagcggcgacgcgatggaggaattcatgaaggagtggaggagaggtcgcagggaggccagcctgttggatcccgtggtggtggaggcggcaccggattcgctggacggcctcatggcggagatggacaccatgctggcgtcctacgatcggctggacatggaagccgtggtgctcaagattatggccatgctgctgaaaatggatcggaaggttaagtcgtccaggatcagagccctgttcaaccggcacctggcctcgctgggcatcccaaagagcatgcactgcctcacactgcggcttgccgaggagttcgcggtgaactccgcggcccgctcgccggtgccgctgccggagcacgcgcctcgcctggccgacgcctcgtacctccacgtcaccatcgtgacagacaacgtgctcgccgccgccgtcgccgtggcttccgccgtcaggagctcggccgagccagcgaggctggtgttccacgtcgtcaccgacaagaagagctacgtgccgatgcactcgtggttcgcgctgcacccggtttccccggcggtggtcgaggtcaagggcctccaccagttcgactggcgcgacggcggtgccatcgcctctgtcatgaggacgatcgaagaggttcagaggagctcaatggagtatcaccagtgtgacgcgtcagttgtcagggaatacaggaggctcgaagcctccaagccaagcacgttctctcttctcaactacctcaagatccacctcccagagttcttcccggagctcgggagggtgatacttcttgacgacgacgtcgtggtgcgaaaggacctgaccgggctgtgggagcagcacctcggcgagaacatcataggcgccgtcggcgggcacaaccccggcgaagacggggtcgtctgcatcgagaagacgctcggtgatcacctgaatttcactgaccccgaagtgtcaaacgtactcgaaagtgcgagatgcgcgtggtcgtggggtgtcaacgtcgtcaacctcgacgcatggcgaagaacaaatgtcaccgacacgtaccagctctggctagagaaggcaattagctctctgattctcttgaacatggatgccgttttcttggttacaaaccgggagtcgggattcaggctgtggaagatgggctcgctgccgccggcgctgatagcgttcgacggccgggtgcaggcggtggagccgcggtggcatctgcggggcctcggctggcacacgccggacggcgagcagctgcagcgctcagccgtgctgcatttcagcgggccgaggaagccctggctggaggtcgcgttcccggagctccgggaactatggctcggccacctcaacagatcagacagctttctacaaggatgcggcgtagtcgagtaa

SEQ ID NO: 14497 - DNA, 222 bp, Oryza sativa
  Clone ID: PAT_MRT4530_2042C.1
atggaggttcaggcgtgtcgccggagctgggagggacaagatggcaaggccggcagtttccaaacatgttgcagaatgaagaacactgaacaacaagattataaggctatatcattgctggccatactgatagaggttgtgttacctgaaaggttgtcagaggacacaaaccaactgtcacgccgaccatctttcgtcctgggaatgcgaggctaccattaa

SEQ ID NO: 14498 - DNA, 355 bp, Oryza sativa
  Clone ID: PAT_MRT4530_20430C.1
gtaatatagccaatacttaggcaaatatacatacatagctaatgttccgcagtcacagaacggccgaggcggccaaaccgatacaattctcactcactaatatcaacatatcactagaacacacggcatctgaaatcactaaagcaggatatatctcaaacaaacgagcttggatctaccttttcttcatccagtagtactagcatatatgcaaaaaaacgctctcagaaacttgaaaatatactgacgacgaaagtaccgacacacgcccaaccatgcaaagcttacaagactgtcagttcatacaacagagaggcacaccttaaatacttatagcaaggctcggattttcaag

SEQ ID NO: 14499 - DNA, 445 bp, Oryza sativa
  Clone ID: PAT_MRT4530_20431C.1
aactaacaatttattttaatggaaatttatggtcaaaattttttaattctttagactttgcttagtgttcgatgactatcacttgtgggctaacaaaaaaaaggccttgaaaacggaacaaattccccttaggacaaaatattaacatcctgggaccaaaattaaaaaagggctcccctgcctaaaagtggaacttaaacaaaaactctaaaaccccacctgttcccgaaacgcagggaatacccaggaattccttcacggaccctgtggagaatcacattttctcaaattggaagcctaaaaagcttcagctacaacttggaaagaacttgactgcgttaaaaatcaaaatctccgaaaccctctctaacaaataagacaccccgacactaaatggtacgcccgggacgccgcaataaagcagctcacaattattaatgggcgc

SEQ ID NO: 14500 - DNA, 2598 bp, Oryza sativa
  Clone ID: PAT_MRT4530_20432C.1
atgacctctccaatgaagggggaaatgtctaaacttgggcttaatcgctcgagcatggatcgtcgctttgttctcatccctagtcgattttctttgacctaaacccatcgtccttctccatacgcgacacagaacacgggcattccctccatgaactcctcctcctttgtcgaagaatatcttccagcagtgtgagacattggatctgtccctgtcaatagctacgagcaagatttatcgatgcagcgttggtcaggggcctctccgtctatctgttcctatggaacctgccggccgggggctgcttccatgggagagaaaaaaaatagtctggcggtggttcgttccatagaagcacggcggaagtagtctggctgcggttcgtcccattgaaccggatctgacctgcaatgggtgagatcgatgccgcagttacccgccacaggccagatcgatctacgggcgtcagtgatatcgccgtcgaacagttcccatgttcgagatcgagatgaactaacggcggtcgggcgagatcgatctaacggcgccaatcgtgtcaccggtgttgcgggttctgatgtacattgtcttgaaagtcttgtggaagtggacgtatttgatacgatattccgttgtgaaagctgtatgaatgaccagaagtcaaccagtaagtgtacatttcatgaaactagagatgttgttattgtgttgcaaagatttgaaccacttacacttgggggttatcgaaagattggagaactaattaactttcctacggagctggacatttcaccatatatgagtggtgttgtaactgacaagcatatatatgaactgtttggaattatagttcatgaaggcggtgttatagggggtcactatagaagttacgtgaaaacaaactgttggtatgaagtcagtgatagagatgtgaaaagagtaaatgaaaattttgtcctaggggcacaagcatatatcctgttctacaacaggaaagaagaggccaaatcattcgatgaggttttagcttttgctgctacagctatgtcttcatctgatgccgtgcctacatcaacttcaaaagattacactgaaagaacattatcacctgaagtatcgtctgctgctctgtcatgttggattgatgctgcacgggtccttgagcccaagagttactcagaccaggatatcctagaaaaatatatcatttgtatggaccgtgacagttcagatgtatctgagaggataaggaatgccatgcggaattgtaatgagtccagacaggagtatcattttaatctccctacaacggatggacctttttatgatgacaacttggggcagtactgtcttcttcggggagctagatttcgaaccattagtacaagcagtaatgtagaagcgaagagagatagggctgttagaatgcacttccttctttctgaaatcttaaaactcctacagctgaaacccacgcgtccggttggagctattggctatctggagaaatttaagtttgggaattattccaggagtgctcttttacggcgaattaatgatgcatgtatgctcttggggactaacagattatcccttaatatctcagttatgtcaagaggatctatcattgggccagtgctgttcaaagttggagaagatgtgatgattgatgcaagcttaagggctgtacagattccacacgacattcacttggtggaccatattaagttgaaaaaaccagtcagctttgttcttgttgttgaaaaactatcaatatttaacatgcttgtcaatcttaactttcatgtcacacacaattgcataatcatcactggatgtggaaaacctgatatggcaacaagaggtgcagtttttaaacttaattattgcttgccagtcaaagtttatatccttgctgatcttgacttggatgggctccagatatacttataaacttggcagcaaagtaagggcttttgagaactttgtgttgcatctagagatcttatatggctgggtgctagaccagaagattctctacttttacaagaacccaatgaatttaccagagtgcagcagaaatctcttactgatcttcgtgattctcttcccaatatttcggacagagatcgtctaaacactgtgttggactggaactttacattgaatctgcatgacattcttgattatgagaatattgtagagtatttgactaatcgaatggcagagtttgaagatccttgatggagaaagatctgacctcagctgtttgcccataagtgaagctgaagatgggttgccaaacgtgtgtcgccatttatgccacttgtatattttgcacgattgcatcttgtttactgcaataggcgatactgtgccagtgtgccaccatctggatgatatcccctactgactgtagttctcattctgggtaattctaattctggtttttaagagtatgctgtaacgtaggagcaatacctctttgctgataagagtttaacagatcaggcaatttctgattaacttaaagactacgtgttttgattaaccgtcgcttaaaaagtgtgttagtatgacaaaaaaaaaaaaaaaaaa

SEQ ID NO: 14501 - DNA, 435 bp, Oryza sativa
  Clone ID: PAT_MRT4530_20433C.1
atgatgatgcatggtgctgttggtcaaggggacacagaggaggatagcttccccttcacctccatcagccgcaagagcacgtggcacaatggccgagccggtggcggggggagagtggcggcggtggccgaagccagagagctgggggagggggcggtggtgggggatggggcggcggcggtggccggagccagagagtcgaggaagagggcggtggtggttgccggagccgagggagagaacggcggcggtggcccgagccgagggagggagcgcgccggtggccggagacaggggagggagcggcgacggtggccggagccagtgaagggagcagcgacggtggccggagccggatccgggggagggagggggtggcggtggtgcggcgccggagccggcggaggagggatcggcggcggtggccggagctag

SEQ ID NO: 14502 - DNA, 1357 bp, Oryza sativa
  Clone ID: PAT_MRT4530_20434C.1
agtggatccccgggctgcaggctaaattcagacgaaaattcagagctgtaaaagaagaagaaaaattcagagttcaaaagttcagtgagaattatcttgcaggtgctgcattatgggggacgagaagcatcctagctcgaagctttcagagattctccggccaggaaagctgctgcaccggcggcggcggctcgtctccgagttcgccgacgtagggcgggaggacgcgttgcacgagagcgacacggtcaagtacagggtgttcgccggcacgtggaacgtcgccggcgtggcgccgccggacgacctggacctcggcgactggctggacgccaaggccgactcctacgacatctacgttcttgggttgcaggagatcgtgccgctgaacgcgaggaacgtgcttggcccgacgaggagctcggccgccatgaaatggaactcgctcatcggcgacgcgctgaacaggttcactaccggaagaagaagacgagacgacgacgacgacgagggggcgcagcggcatggtcagcagcagcagccgttcaggtgcgtggtgagcgagcagatggtgggcatcttcgtctccgtgtgggcgaggagtgggctccgccgccacgtccgccacgccgccgcctcctgcgtcggcgccggcgtcctcggccgcctcggcaacaagggtgcggtgtcggtccggttcttgctgcacggcacaagcttctgcttcgtctgctgccacctcgcctccggcggcaaggacggcgacgcgcagctccgcaacgccgacgcggcggacatcctctccaggaccaccttccgccgccgcaccaccgccgccgcgtcgccggcgccggaggagttgccgttgccgaggaagatcctcgaccacgaccgggtggtgttgctcggcgacctcaactaccggatcgccatggacgacgcggaggcgcggctgctggtgcgggcggggaagtggagcatgctgctggagaacgacgagctcctcctcgagctcgccgagggcgggagcttcgacggctggcgcgagggcctcgtcaccttctccccgacctacaagtaccacctcaactccgacatgttctactggtccatcgacgccgccgccggcggcggcgacaaacagcagcagcgcgcgccggcatggtgtgacaggatactgtggcgagggaaggggatgaggcaggcgagctacgagcgctgcggcggctaccggatctccgaccaccggccggtgagggcgttgttcgacgccgtctgcgagctcgccggaggcggcgtcggcgtcgagcactccgccgccggcatagctagctttggacatgtcccgcttctgtga

SEQ ID NO: 14503 - DNA, 376 bp, Oryza sativa
  Clone ID: PAT_MRT4530_20435C.1
tcagataaagtgtacagcatatcgaaatatgaagctaatctgggtcaatccacatggcatgagctataaggtaggaaacaaagaattcagtggagtagcgatgccttccgtaggacttccagtgagcgtctcaaatgcctggatatcttcagacgccatctcccaattagcagcttatctctcattccaggaaacatagttcaggcctactaatcttctgcgtgacatcttagatttttagtactgtagttgaatactagtatttgaatgttgtgacttcgtcgttatttttccggccatcaatttgtactcttacaaagaattcgaatctcttctgtaaacttcagggaatgaagggcctgtttactttgaagcc

SEQ ID NO: 14504 - DNA, 1248 bp, Oryza sativa
  Clone ID: PAT_MRT4530_20436C.1
tggcagcagcagctgcagccacatgatcagcaggcggcttcttgctcagtcacggccgggatgatgatgcaagcttctggatacgacatggcagaattggatcacatcttcctctacctcaacagccaggatcaagcatcagcagcaattcaagaacaacctcgtaagccacatatatatatgcacttattactgtcaccaaatcttcaaaccctcaacatcttcccttcacagccaatgcacgccggcgagccttctcccaagggatcatcatcccatcacggcggcgcatcgtcggcggcggcgtcggagcacgagggccccaagacgccggacgccaagacgctgcggaggcttgcacagaacagggaggcagccaggaaaagcaggctaaggaagaaggcttacattcaaaatctggagacaagcaggatcagactgtcccagctggaacaggagttggtgcaaagatcaagaactcagcacgtatcaacatagggtgcaattttgggtggtggagctttttctgccggcattggaggacaaagcccaggtatatataatcaggcggcgtggttcgacggcgagtacgcgcggtgggtggagagccacgagaggatgatggctcacatgcgggcggcggtggaggagcagccgcagcacggcggcctacggcagctggtggacgcggcggtggcgcaccacggcgtgctggtggagctcaaggccgccgtggccagcgccgacgtcttccacctcgtctccgggacgtggctgcccgccgccgagcgctgcttcctctggattggtggcttccgcccatccgagctcatcaagatgatggcgcggcacgcggagccattgacggagcaacaggcggcgggtgtgtacggtgtgcagcagtcggcgagggagagggaggaggcacttgaccgcgacctccacgccacccaccacgccctctccgatgccgtctcctcggactcactcctgctcttccctcccggcaccggtgccaccgcatactccgacgtcgccatggctcacctctcccttgccatctccaatctctcctccctcgaagccttcgtcaggcaggcggacgcgctgaggctgcagacgctgtacaagctgccgcagatactgacggcgaggcagtcggcgcggtgcttcctcgccatcgccgaccactcccaccgcctccgcgccctcacctccctctggctctcgcgcccgcgccaccccgac

SEQ ID NO: 14505 - DNA, 202 bp, Oryza sativa
  Clone ID: PAT_MRT4530_20437C.1
atgtggtcgctcaccacgttgccagctggccatagagcaatcgggctcaagtgggtgttcaaaccggagaagaacacggcagacgaggtggtcaagcgaggagtggagcggcaaggagtggacttcgatgaagtgttcatgctggtggtgaggcttgacaccatgcgcgtcgtgctcgctctcgcagcagatcggatagcag

SEQ ID NO: 14506 - DNA, 189 bp, Oryza sativa
  Clone ID: PAT_MRT4530_20438C.1
atttcggccgtttcgtcgatccgcggtttctcgaagatgttgctgtggtctcatcagtgcgagagcaaggcaagcaccggtggcgagggtgggcgtgatggagttgggtcggccggggtgtccggttgtccagctaccggattcaccgcggcgcaagaggggaccacccactacccgttgggggtgggg

SEQ ID NO: 14507 - DNA, 382 bp, Oryza sativa
  unsure (1)..(382): unsure at all n locations
  Clone ID: PAT_MRT4530_20439C.1
attgtgaggctgnccagcactgtgcatgacgtgttgncngtgtgatgctgctgtgcatggcagccatgacccccatgatgcactatggacgccatgtgggcatgcctgcgcactgtgtgtcttggtgaactgaggtgtgttgggggaaatgatgtgagcagnctgagaatgaataagtgaggatgggtgcctgtggctatgaacttggtggaaaccactgccatgggaactgtgcgtgagaaaatgccctgctccactggaggatggctgcctgacctgctgctgtgcttggaccaccttgtgcaatggtgacntcntctanatttccatgtagaatagaaattccggttgctttctactataaaaaaaaaaaaaaaaaaaa

SEQ ID NO: 14508 - DNA, 422 bp, Oryza sativa
  Clone ID: PAT_MRT4530_2043C.1
gacccgaaactctgggaacccttgaccccttttagccggttccactgattagcagagtgactatggagcaatcacaaagtgctaaagaagtataacaatccaagaagaacatagcccaaaaagggctttgggtgcccaggaggatagaagcaggggcgaggagataatggggatggggggagagggccccccgggtccgattggtttgatgaaaaaagcttcttgaggcttcaccacggaggtgccgttgggccggaaacatacagtcatgggcacgcagaatgcgccaaaggactccatcttgataactgttttggggaggataggtgccccggagtttgggagaccagaagaggctaacgttgtcctgcgtaaaccatggggcggccaagttcacaaaagtgaggtgcttgttggggacg

SEQ ID NO: 14509 - DNA, 501 bp, Oryza sativa
  unsure (1)..(501): unsure at all n locations
  Clone ID: PAT_MRT4530_20440C.1
gcgcccacgcgtncgcccacgcgttcggcaaggagaaggagaagggagagctacagccatgggctaaccagctgtgcgccgccacatccgtgccgaagttgcatggactncggacctactactgttctaggtacatggtgaccctgccatcgatgaggatgagcaagaagaggtcccagggcatccggtgcgactacatcgggtcagccaccaccggtatcatggtgacgacgacgacgctcctgctgatcgcggggagggtcgcactggcgccgtcggcgaacaggaagtcgacggcggggctgaagctggaggcgcgcgactccggactgcagaccggcgaccccgtcgggttcacgctcgccgacacgctggcctgcggcgccgtcggccacatcatgggcgtcggcgtcgtcctcgggctgaagaacatcggagtactggaccagatcatcggctaatcaaactcattaagctagtcacacgaatcaatactgctat

SEQ ID NO: 14510 - DNA, 4209 bp, Oryza sativa
  Clone ID: PAT_MRT4530_20441C.1
atgctgcacacaccaatgctgtgtgtggttgcaccaccaaatatgctgcagcatgcagcaatttgtctgccacacaatgcacacaaccagttgcagcatgcacagatgcacaggcagcacaaatgcacagcacagcaggaatgcacaggcgaatcacaggcagggggcacagggcagcaggcgcaggcgatttggtcggggaggcggcgcggggcgctgcggatcgagctccgggtcgacggatttggccgcgtggaacgggagctcgactcgatttttgcggaggcgcgcggtcgccggaggcgggagagggagagggagagagagggacggcatatgcgtgtgacggtgacgcccaaggacgaggagaggctggtggtgctcatggcgcgggagcggccgcggtcggcggtcgtggcacccgggggagacctcgttacggcgggtggcggcggcggtgggggagggggaggggaggggtccgacggggactcgtcggggtcgctggaggagatcagcgccgacgacttcaagaaggagtcgtcggccgccggcggcgcggcggcggcggccgcggcgcagcagagatctagggtttggatggggtacaacatcccgcggagctacgcgccggcgttccacagcttcgcgtgggcgcaggccgtgcagaacaagccgctcgtgccccgcgccgccgacgccgccgacgaggacgaggtggagcacgtcgtggacacctcggacgaggagaaggaggagggcgagatcgaggagggggaggccgtgcagaccaccaccacctcctcctcgtccccgccgtgcgcgcagccgcccgaaaccatcgacctggactccgacgcgccggagaagtccgagtcgatggtggccatgtatggcggtggcgccgcgccggccggtgctgaggaggaggaagtggactttgaccagcgtgtggggagtatactcgaggagcttgagatggtctccattgaggaagctgagaagtatggactgatgatacttctatatggcaaagttcatgtgctcgatgtgttttggtgtatgattcagttgctgagggacccgattctgatgttctgtaggtcgtttgagggtgcatgtacgcgtctgcgaacgtgcttcgagaacctgaagccgttattcccagagagcgggagcccaatgcccatgcttgatgcccttgtgcagcaggcgtttgttggaatcgacaccattaccaccgtggcaaattcgtatgacatgccgaagagggagcagaccaagaacatgcttcttaagttgttattccacataaaaaacagatattcagacatgctaacacctgaccaacgagatgagctggatagccgtgtgaggcagttagtgtttgaggatggaaaagacaatgcaaatggtccaaatgccacttcaactaatgctgcagctccatctggtcaggttttatcagagagactaccatttgaatcaggagcaggaaattcatttagcaaggttgaaataccagcaaagaatagaatggttagccccttgttggatcttcatgcagattatgacgaaaacagcttaccctcaccaactcgagatagtaaaccaccttttgatgtgccaaagcccattggatatggagcacttccaatggcacctgacagaccatcggttctagaaagagttgagcctgcgaagaattcttcgtatcaatcctttaacgatgcactgaaggctgtttgctattaccaacagaagcatgggcagaagtctaactttgcaagcgatgatctaccaagtccaactccttctggtgatggagataaatctggagacaaagggggtgatgtatttggtgaagtttcgagcttttctgcttcaaacaagattgcgttgccaattgtgaatcagatgccctctcgacctagcacagttagcagcaacagtgacagttttgcaggtggtccaccaggttatgctaaacagattgaaaactctgtttcaggatccaaccacctgctaaaagctacagctaaaagtagagatccaaggcttaagtttttaaatcgtgatactggtggtgttgcagatgcaaaccgacgtgtgaattttgcagaaccaaatccttctaaagataggaccatgggtggtggagtatcaatcaatagccgtaagaataaggcagttgatgaacctatggtggatgagaacgcgttaaaaagatctaggggtgtcattggcaacctgagagatatgcaacctacaggtcgaggtgggtgggctaaagatggaggtaatattagctcatattctagtgatgggtttcagccaaatcaaaatacaagacttggaaataacacaactggaaatcataatatcaggacagatagtacacttgctagtaacttaaataatacgacaaataatagtggaactagtcctggaattgtacaagcaccccaaactaattcagctccgcaaaccagttctgctcctgctgtttcattgcctgctatgttaaaagacattgctgtcaatccaacaatgctcatgcaatggattcaaatggaacagcagaagatgtcagcatcagaacctcagcagaaggtaactgcttctgttggcatgactagtaatgtaactcctggcatggttttaccacttggcaatgctccaaagaccacagaagttgcagcagtcccttctgttagaccacaagttccaatgcagtcagctcccatgcactcacaaaatgatactggagttatacgtatgaaaccacgtgatcctcgtcgcatactccatagtaacatagtgcagaagaacgatacagttcctccagttggtgttgagcaagccaaaagcaatggaactgctccgccagactctcagagcagcaaggaccatttgctcaaccaagaccaaaaggcagagcaacttcaggctattgcattgccttctctacctgttacatcatcagcacggccagtcaccatgaatgcaaatcctgtctcaaattcacagttagctgctacagcacttatgcctcctcatggcaatacaaagcaaacttcaagtagtgtaaataaggcagatccaagattagctgctggacagaatgaatctaatgatgatgctgcaacaagtactggtcctgtaacagcacctgatgctgtgccgcctgctagcccatatggagatgttgatcatctccttgatggttatgatgatcagcagaaggctctcattcagaaggaaagggcaaggcggatcaaggaacaacacaagatgtttgcagcacggaaactttgcttggtgcttgatttggatcacacgctcctcaattctgcaaagtttatagaagtggaccatattcacggggaaattttacgaaagaaagaggaacaagatcgagagagggcagagcgccatctcttctgttttaatcatatgggaatgtggaccaaactgagacctggaatatggaactttcttgagaaggcaagtaaactttatgagttgcatctgtacacaatgggcaacaaggtttatgctactgagatggctaaggttcttgatcctactggaaccctgtttgctgggcgtgttatctcaagaggcgatgatggtgatccttttgacagtgatgagcgagtgccaaaaagtaaagatcttgatggggtgttggggatggaatctgcagtggtgatcattgatgactctgtgagagtctggccccacaacaaacacaatttaattgttgtagagagcaggcgtcagtttgggcttcctgggccatcacttcttgaaattgatcgagatgaaagaccagaggatggtactcttgcttcttcactcgcggttattgagcgcattcacaagaacttcttttctcatcctaatctcaatgatgctgatgtgcggagcatactagcatctgagcagcagaggatacttggtggttgccgtattgtctttagccggattttcccggttggagaggccaatccccatatgcatcctttgtggcagactgctgagcagttcggtgcagtttgcacgaaccaaattgatgatcgggtcacccatgttgtggccaactccctcgggactgacaagtcctgccaggctcctactactagccacagactactccgtggtggcttgctggtagcagtcacccatcgagaccagggatggtaa

SEQ ID NO: 14511 - DNA, 2331 bp, Oryza sativa
  Clone ID: PAT_MRT4530_20442C.1
atgccatcctctccacgctcctcgtcgtcgtggtcgccgccggccgccgcgcgcctcggccgcgcccgctcgcccagcaccggcggcggcggcggccgcgcgcgcgctttgaccgtggctgagaagacaacgtcgtggctgcgcacggcggacgcgctgagagacatcaccgggaggtgctccatcccgcgcggcttcaccgcgctcctcgccggcgacctcccggcgtgcgcgccgccgccgccgggtgcggcgttcgtgtacgtcgcggcgatggaggaagaaaggctgatgcggctaccgctgcaaccgttcttcgccgcggtgctcgcccacttcgggctcgcgccgagccagctcacgcccaacgcgtggcgcctcctcgccggcttcgccgcgctctgccgccgcgccggcgtggcgccgccgccgccgccgccgctgaccgtgttccggcacttcttcacggcgatcgggtgcccgcccggggcttggtactccttccgcgccagaggctccgcctccaccggctcgctcttcacccgcctgagcaacgtgacgatgaacccgtggtggaaggagcagttcatcctcgtctcgtcgccggcgccatggccgtgccccgtgaggtgggggaagcctcgcaagcacgccaacttccctccggtgctcaccaccgctgagaaggacatggcgaccaagctacttcttgctcgcggtagctcgttgattgatctcacaacgtacaactccatcgccgctgccaagaacatcatcgcgccgccgccgccgccgcgaactctcaaatccgaacgggcgtacgcgtctgtcaatgccatgatgagggaaccgcggccgcataaggcacccatggcggcggccgcagaggaggtggatgtgaagagcgagcctgatttggacggaccggcgtgcgcaccgtcgtcatcgaggaagaagaagaggaagatggtggacgacgacgccattgcagtggagggaccatccgggcacggcggcggcggcggcgggtggccggcgctgtacccggcttgcctaccgccaccgggcttcaagaagctggacgacgacgacgacggacacgagggtggctggaaggcggcgaggcagctgctgcagggcgccgtcacggcgcgacgggagcgcgcgttcgcggcgtccaagccggccgacgtcgtcgcggcgagctacgtggccatgctccaggcggcgaaccacgtggcgttctcgctgggctacgcgctggagctggaggagaaggcgagggcgagggagcgcgacgccggcgcggcggaggcggccacgccgcgggaggagctggccgaggtgaaggacgagctcgccgagatggagacggcggtggaggcgatgagggccaagctcgccaaggcaaagagtgcgatcgcggcggcggcggcgtcggcggcgcagccggagccggagaggatcaagtcctcgtggggtccagggggagcgcgctccgctcgccggagagggacgaacacggcgtggagagaagaagcaagcaatgaaatgccccgagccctcggaggctcggaggcgttcaagctcgccgccgacgaggtggccctgtaccggcctttgcctggcaggggcgccgctgtgcgggcagtagccgcctggggagggacgccgcctcctgggggcgggacagccaccgcgtcggtcgccgcctggggcacgaacgctcggtcagctctcggcaggagcgccgccgcaggctccggcaacgacgacggctgggacgccacctccactgaccatccaccgtcagatccggtgggtacacaagacaacactggtaaaggagttaagccggcgtctcctgcgacacttccgccgctgcctcctatcaccgaagtaacggaacccctttccggtgtagtcgtccccgatccagtccacaaggttcccaaggcaaaggcggattggtggaaggtggctggaactcggttccctgttttgaggaggatagcaagggatatatttacaattcatgttagcacagttgcttcagaatcagcttttagcactaatgggagagttcttagtgagcatcgtagtcggctcacttctaagttgttagaagctctaatgtgccaacaggattggcttcgaaacaagtacaaagttgatgagaaggacaaagagcaagcttccttttggtcttgtcttcaagacatacaagagggtcttcagtgggcagatttagtttcaatgggtgagggcctcgcagcagcagttgccgcctcgggtgtcggctccggcggccacggcgagaagccctgctga

SEQ ID NO: 14512 - DNA, 110 bp, Oryza sativa
  Clone ID: PAT_MRT4530_20443C.1
ttacatagtctgcagcagtgcatcttgtatcttggtacctatagcctatagttggcttctgaatttaacatcggaatccagggaattgaactgacgacaaacttttctgc

SEQ ID NO: 14513 - DNA, 1461 bp, Oryza sativa
  Clone ID: PAT_MRT4530_20444C.1
atggccaacgaggagcagtacgactggtacgacgccgatggcgatgtcacgcgctacctgctcgacccgaccacggatatcgcgatgttctccgagccgccggtggtccagatctcgcgattcgatccctgctctcctccgcctccggcgaggatgcttcccggcggccagcagcagcaacctcatccagcgccggggggactggatctccgctcggatgagattcacgccctgaaacaacgacgccgtccgccgccaaatcctcagtcctcgtcaccgcctgaaggtttgctcggcgccgcaaaccctgaccggcctgacgatgacgagcttgatgctatcctaagcagcttccgtgatgaggccgcgcacggcgacagtggtggtggcgtggctcgcgtccaagtgctccccgtcgagcaagatgccaacctggtgccttccctgccgctccggcatggccaactggactgctcccgctgccaccttgtcaggcatgtcatgcacgtcgctggaatagagaattataaaacacaggaaaaacatatgaatgtccgtttgattgggcccctcagcaagtggacgcaggaatgggctagcgagttcattgcgagaaacattgacacgatgagaaataatacaaacgggcagcttctggacagcggctactccaatttagttgaatccgtccgcaccaatgtgaatgtcccacacacggcggtggaagtgaacttgctccagacgatcatgtccgccccatcggctgatcatcatcagaatgctgcagatcaggtagcagccccagcggcgcaaccattctctgcagctcctccagtagcattacctccaaaggcggcgccgcgaaaagcgcgcaaggatcgggattatgctagcatgctggttgcagttgaagaattctatgtcgccgcaaccagtcggcctgtaccaaactcagacgtagagatattggaatcttctcatgtctcccagcagcaggatggaggtagagctatcatatacccaagcttgcaagccagaaggggaaagacgaagcaggaggtaccgagaaggaatgcaaaagatgttctagagtatctgagcttggcgaggaaggagactgagaaggaaatcaatactctgtcctccttcgatggaatttaccggaacgacggaacattaagctacctgatgacagaggtacgtcgactcaacaggaagatatggaggctccagaagaatgctccgagtacactgtcgagtaggctgttggcgagcgtgaaggagattgatgatattaaagttgagaagggaaggctgagtcgcatcgctatcaaggtcgtcgtcctggggtcgcctccgctggatcctcatgaggccgacgatgtcggggtcaccgtcaccatcgaggtcatcatcccggggctgcctccactccggctttcacgaagccaccagcactag

SEQ ID NO: 14514 - DNA, 222 bp, Oryza sativa
  Clone ID: PAT_MRT4530_20445C.1
atggcgacagcgacagtgacggtggaggagatgaaacggcgacgacggcaacccagcggtctcgacgcggcgcgagccttccttgctggtgctggacgtgacggcttggtctgtgtggtaaaaaccatgtcctggctccccgagacagggggcagcgatgctctttgtgtcgtttccttcttggaggcgtcgtctcgaagatctcctgttttgttcttgtag

SEQ ID NO: 14515 - DNA, 2208 bp, Oryza sativa
  unsure (1)..(2208): unsure at all n locations
  Clone ID: PAT_MRT4530_20446C.1
agaataaaattgtagcgtgaaatatatatatnatatctctctctcttttgcaacatcatgtgaaagttatgaagtgttttacacctctagcatttgcaccatgtgtacagtgtacacaactaaataccaaatataaaatacaggttagccagttatgacagccaaatatcatcaaacaaaaaaaaagatctccttagctgcatccatcacaaattggttaatgagagattttgaactctgaatgttaaggtgcataaacagtcagtacagccattattaacctcgccagaagttttaggcccatcattatatgccagacaaaccattacctatatgatgagatcagattaaaaagccctaattctcatcgtgctcatttgctcattacatctgcattgcaccatccaagatccatatctgcatatccatagctgatacagctccatcgtgaaaacgtttattcctctacaaggttttgcatgctactactaatgcactatacctttagacattcccaggttacaataccgagtaaacaagctgcctaacaaacattacaatacttgatatgttgtatgatcctgaaggccctagccaagcaattcaagcagactcggcgaacccaatcctgtttttgccaaagtcgaagacagtgtggtatgcagccatgaacacgtctccaagaatccagagtgggccgcgtggaggtggcacgtcgaacgccatgaacccgctgatgcaaacagtttgaccttgctgctccagcttcactacgtactgctctggtgtcaaggtgaaggtcttgtttgctatggtgaatgaaaggttcggcatgtttgagatctcatcgcagtactgcgagtcagcatattgcaaaatgagctcccttgtttggttatgtcggagctgattctgtatccagacaacagccatctcgcaagcagtgcaggaaagatctgagcccaccttttctttatcaacaacagactctatattgtttctgacagaacgagtaccatcaaatgcacagagaccaatctgagagcacagtttcatggggcttgcctgtgctatgagcatctcgaggatcatgtccccgtagtcccgcacaacttgtttgcattccatactaacaattccctcagctccaattgcgtgattaatttgagcaacaatagttgttgggccaccgagcaatgaagtccctgaatccgcaatagcggcgcaaccaccagaacagaacccagttgagtagtcatcaataagaagatcccccatctcaaactgccagtagcctttgcgggtaacaggaacatatgtatggctccccttgtaatgatttgggtctacaccaccaaagattaactcaccccctgtcggtgcatcaggatcgcggttgagccagaaggagaatacatccttctcgatcagttgctgctctttcattccctgccaaattggaggggctcctcccacagagatctccggaaatccaagtccaagaattccatcaaacttcccgatgatgaaagtaaggctcggttccctggttgtctcaatgaacatctgatttttcacagcaagatccccaactagcacgctatcctcactgaagaaaccagcaattgatccagacccataggaaatgctgcaagattctccattctttttgtaactgctcgacccttttgacttgtacctgtggtgtaagtagcatgctatcgaaaaataacatttcactgatggaacccacaagttggagcttccagtgtcgaatatcacagtgaagttctgtggtggagtgccgatgccgatctctccaaagtactgcgtgtccaggtagttgtccaaaggaactatgtcatcacctaaaccgtcggctctcagacgatggctttcctcccttgccaattttgcaccgtccaaggtcttcttgtccaatctcttcttattcaggctaattctcagcaatccatcaggagaagcatgaagcagaactgcgcatgacagaatccacaagcaagtgaccaggcaaagatggttccgtcccatcgtgcttgaaccacctttcttgcgcagacagttagctgcttccctggtccggagaggaggggaaagaagccggtgaagaactcgaggggaaagagtggccctctctcagtggtaggagtaataggacatgaagatgagacgattcataaaagcgtt

SEQ ID NO: 14516 - DNA, 759 bp, Oryza sativa
  Clone ID: PAT_MRT4530_20447C.1
ccctttcctaatatgatgagatcagattaaaaagccttaattctcatcgtgctcattggctcattccatgtgcatggcacaatccaagatcatattttgcatatcaatagctgatacagctccatcgtgaaaacgtttattccttgacaaggttttgcatgctactactaatgcactatacctttagacattcccaggttacaataccgagtaaacaagctgcctaacaaacattacaatacttgatatgttgtatgatcctgaaggccctagccaagcaattcaagcagactcggcgaacccaatcctgtttttgccaaagtcgaagacagtgtggtatgcagccatgaacacgtctccaagaatccagagtgggccgcgtggaggtggcacgtcgaacgccatgaacccgctgatgcaaacagtttgaccttgctgctccagcttcactacgtactgctctggtgtcaaggtgaaggtcttgtttgctatggtgaatgaaaggttcggcatgtttgagatctcatcgcagtcgactgccgattcgccattggggcttgggagacgctcgcagagctggtcagcatattgcaaaatgagctcccttgtttggttatgtcggagctgattctgtatccagacaacagccatctcgcaagcagtgcaggaaagatctgagcccaccttttctttatcaacaacagactctatattgtttctgacagaacaagtaccatcaaatgcacagagaccaatctg

SEQ ID NO: 14517 - DNA, 5091 bp, Oryza sativa
  Clone ID: PAT_MRT4530_20448C.1
atgtggaccgccacgttgcagatcgtcgtgatgcggatcaccgaggccacggcaaggaagcgcgggacaggcgtgaccgcggcaatgaagggcgtggcgaccgacactgacagtacaacgacgaccaccccgagttcgagcgcggccacggctggcgttgtcgcgacgacggcgacggcgacggcgatgatgacgaccgcgacggaaggtcaggccatggtcgtgaaacatggcgaggccgtgacgccgccaagccgtcgggtctcaacggccagagggagagagaccgctcgccaaggcgctgtgactggggcgaaggctctagctatggtggacgacgccgtgccgatgcgccgcgcccagtcagacgcagcaaagaacatcaccgacatgcataagcaccagccaccatcaggcaaacatgcccttgtggccccgacggcggacttcaacggcttcctggcaaaggcgcacaacttggatgctgcgctgcagatcgactggccagctctgcaggtcggcatggggcactgcggcagaccggaggagatgaggagacagcacgtcgacatccctatccgctgcgctttcgactgcatcaaccacgccatgcaggtcagggctccggcaagcaacatcgatgacctcgagcaagctctcgcgaggatggagatagcggcagcggcggccacgccagagtcctgccgggggatgtcgccgccgccctccccgctgcgatccaggcaactggcccatgggccggtgaccaaccacggcctgggacaagcagatggaatagaggccggacacgggccacctctaatcgggccggccaaggtagttggggagcaggccggccagctaccagttgggcccccaggcgtgggttcgccaggcctcactgggcagccttcaccgactgggcttgctagcagaggcgaggtggacgaggccatcttcaagacgctggcccacgaagcaacggagaaggttgctgctgctccctcgccaggaacgcacaaccgaacacaaccagcactgacgcaagcaaccggtgggtcatcgccgacggcggatcatctctcttaattatcgtcatatatcatcaagctgctcgccgagactgtgattatggatttcagcttttgattccggccgtgaccatcttataattaatttccatgtagatcattatcttaagatttacctgtcccttctttttttttcttgatttcaatcacttcattaattaattgttttgtttatataatgacgcagatacagaagtaacaccgggtgttgatgaagcgcctcggtctcctccgcacccacgcctcacttgatgaagttctcgctgagtacgtgacgatgttcaacggcccactgccgccgcacattatcacggcgctcacatccatcttcgacctcgactacgacgacgacggcaatggtgaccagccaccagaggaagccctgctcaaggtggtgggagaagccacgccattaaaccagcaagaggataaagaatctaccattgctgaacacttccggcatgtgatggggtggctagagccaagatcctgcgacctcaattggcctgttctcggatacaccccgatcgatctctccgagctagacgatcccttcacagaagcagagatccgcaaagcgataaaagaaatgccagtcgacaaggcaccaagcccagatggttttacatggaagttctttaaatcgtgttgggacatcatcaaaaatgatgtagtggccgccttcaacgccttacacgattcaagaaacacgcacttcaacctcctaaattctgccaacgtggctatacacctggtagagcacgaggaggacaatataacatggaagcttactaaccacggcgagtacacggcagcatcggcatataacgcgcaacttcttggaaccaccgctaccaacttcaacaggctaatctggaaagcctgggcgccgcgcaagtgcaagaccttcgcctgcgacggtgacggcacacgggggaggagctcgccggccgtcctcaagcgggggaggagccagccggccgtcccgcaagctcgccggctgtccgtgcgcaaggggaggaacacgcgggcgtccgggtggaactcgccggccgtccgcgcgcctggagaggagctcgccgatggtggcggtgggaacgagttggtggggagcagcaacggtcggaagcgacggcggtggctatggggagtggcggagccggtcgggagtggcagcggccgtggcggtggggagcggcgcggcgccgttgagacagtttgctgcctcatgtcccgggagctggagctcctgctgtttttgctggccctacgggtggggttctaccatgccaagtgccctgtcgcggaggacgtcgtgctgggcgagatgaggatgatcctcgaggaggatcccacgctcgcgccgtctctgcaccggatgcattaccacgactgctttgtccaggggtgtgacgtatcgattatgctgaggtcgaggagcggaaagggggagagggacgcgacgcccaaccggagcatgcgaggctacgacgccatcaatcagatcaaggagaggctggagagcatctgcccgctcaccgccgctccccaccgccgtcgtcccgaccgccgccgctcctccgaccaaaagaaaggccggggggagagagataagggagagagaggagaggaagaagggaaggagagggaggatgacatcgcagcgtcatggcctattgggcaccggatctgcccgatgacggaggtcgccggcgccacatccacacggcgacacgcgacagatggaggcgccgaggcagtgagctccggggagatgggagcggtggccgagggccgcggcggaggcggaggcggagccggaggttggggcgccctcgacctgcatctcggctggtgtccgagcgagattgagctcgattcactcaaggtgaggaagctattggaggaagagaagtgcaacttatgtgatctctttacctacatgagattcttcgttctagactgctggttcgggttagatgaggggtacaggccttcctgggctgggctgggctgggctaaaggcctgccactgaagtgctggctgaaccagacgtccctgtttgtcaacgattgggcgatccgcatcgtggtgctctgcagcttcgccgcccacctcgtcctcacgctgtttgccggaatccgtcggcgtaaagccaccggcgtgcgggcacttgtcctatggctggcgtaccagcttggcggctgggctgggacgtatgctctcggcagcatgtcgctcggccgcacaacgcagcagcagcaacagcagctggcattctgggcaccgttcctgctcctgcatcttgctggccccgacaacatcaccgcctactcccttgaggacacggttctcgccgggagacaggtgctcaccgtcacagtacagatcttgggagcatcatatgtcctgtacaagcagatatacaaccgtgacggcggcggtagcgccttgctgtgggtctctgtcgtcatgttcgccatcggcattgccaagtacgtggagagggccgtggcgattaggcaggccaacctgggaaagatgagaagctcaaacaagaagtgcaagttaggaaaacgaagcttcggagatgttaaagaggtgggtaacgagagaaccttgctggttgctcatggcctgctccatatcaccaagggtgccttcatcgatcattcagacgacgagaatcccctgaaaagtgatgcggcacgatcacaaatatttggtcatggatgggaggagatgtgcagggtggtggagatggagctgtccctcatgtacgacatcctctacaccaaggtagctgtggtgcacacatggttcggctacatcatccgtttggcgtcgccggtcgtcagtgccaccgcgttcctgctgttctggttccaaggtaaagatgagcagaggagggcagatgtgctcatcacctacatcttgatggtcggcaccatcatcctggatgtcagatggcttctcagggcgatggtgtctacatggacctattcgttcctgaacaataggccagattgctggtttcatgccgcatgcttgagctccgggaggtggcgcctgctccgtcgtcttgtcctctgtctggatccatgccggctgctcggcaaggaaccaactaggtacaggatgtggtcaggaaccgttgggcagtacaacttattgcatgagtgcactcatggcacgatcggcatgtttggctcgctgctgaagaaggttgtatcagatgacagttggatggagtaccaataccatgacgcaaggggtcttgcaatttcatcggaggtaagggaattgttgttccaacagatatgggagcaactcaagacagcatatccagctgcgactgttgagaagactaatttactctcttgcagcagtctgggatatgccgggagtgcatggaagaaccgggagcttgatgaagctatgaactttgctcatgcattccaagagacaatccttatctggcacatcgccacggacatcttcctcttggtcagtcgtcaatttgcatcaccgtccaactccaagcaagtacaggtgatcatggcgctgtcgaattacatggcgttcctcgtagcggtccgcccaagcatgctaccaggccttaagctacgcagcctgtacaaagaaactcacaaggctcttgtggaaatattgctcaaagaaggatattctggtagcttgatagagagaaaggagaagctggccgacaggctaatagaaatggagaaggagaagcaggtccaaatctcaaacgctccaaagaaggttgcgtttgatatctcgttaatgctggactatatcttcaatgcatgggttcgtattctgatgtatgcgtccgtccgatgcacactggattctcatgccaagcagctcgcctgtggaggcgagctcacaacaattgtctggatactcaacgaacacgctggcatatttcgcatccccggtgatgccagagatgaaactggtgagcttggaacctaa

SEQ ID NO: 14518 - DNA, 198 bp, Oryza sativa
  Clone ID: PAT_MRT4530_20449C.1
atgagcagcggaatgggtgggcggcaaggcgacggcagctccaccgaagccgcgatgagcagcggaatgggtgggcagcaaggcaacaacaatgccactgaaggaatggaagaatggtggaaatcaattaatcattccgtaggattgggaagcggctttgggatgactagcaggaacaactttctattccaactttag

SEQ ID NO: 14519 - DNA, 187 bp, Oryza sativa
  unsure (1)..(187): unsure at all n locations
  Clone ID: PAT_MRT4530_2044C.1
cgcctgcggtacctgnaccggactcccgggtcgaccacgcgtccggagacggcggctgcggcggggggcgcgacacggcggctagggcttcctcgcagcgacgcgacccgcgcgaggtgtaggcgccgctcgcatcgcacgcgcgcgcgcgcgccgccgggggcaggtggctgggcgccgtcgttgc

SEQ ID NO: 14520 - DNA, 2199 bp, Oryza sativa
  Clone ID: PAT_MRT4530_20450C.1
atggcgcgtctcggcgacccctccacccggccggaggaggaggagtgtttcatcccaactccgcacgtcaccgaggtggaactcaaggaatgggaatccacggcggtcatcacttgggcggccaaggcgcctgcatccaccacgccgaaggaggtggaagccattttcatggaggagctccatttgagggagggcgaggtggtcgtctctcgtcaccatcccgaggcgttcatcatcaagtttgcacaccagcgacattgtgtcgaagccctgaagagaggctccgtcaagcgccatggcatcgagcttcacttcgtcaagtggcgaagcctcaaaagtgctctaggcgtcgccttgatgttccgcaagaaatccacgactacacctcggcgatggtggcgctcgacgattccgcggccatcaccccggcaaagcgccgccttctgccgtggcacctcggagtggcggatggcgagccggtcccggagcgagtgttctcagagttcccccaccatccaacgccgccacgcgtggaggaggatcgtgggagccgtatcaggggtgaccaccgcgacgtcgaccaccacgacgcggacagccgcgttgcagattgtcctgatgcggatcactgaggccacggcaaggaagcgcgggacaggcgcgaccacggcgacgaagggcgtggcgaccgacgctgacagtacaacgacgaccaccccgagttcgagcgcggccacggctggcggcgtcacgacgacagcgacgacgacgatgacgaccgcgatagaaggtcaggccgtggtcgtgaaacatggcgaggccgtgacgccgccaagccgtcaggatgcgacaaagaacatcaccgacgtgcacaagcaccagccactatcgggcgaacatgccattgtggccccggtggcggacttcaacagcttcctggcaaaggcgcacaacttggatgctgcgctgcagatcgactggacggctctgcagatcggcagtccggctccactcaccgcttctgtgcgcgagcacgacaaggggaatgaagcctggtccatggctgcgatggggcagtgcagcggaccggaggagatggggagacagcacgtcgacatccctgtcagggctccagcaagcgtcatcgatgacctcgagcaagctctcgcgaagatggagatagcagcagcggcggccacgccggagtcctgccgggggatgtcgccaccgccctccctgctgcggtctaggcagtcggcccatgggccggtgaccgaccacggcctgggacaagtagatggagtagaggccagacacgggccacctctgatcgggccggccaaggtagttggggaacaggccggccagctgccagttgggcccccaggcgtgggctcgccaggcctcactaggcagccttcaccgactgggcttgctagcaaaggtgaggaggacgaggccatcttcaagacgcgggcccacgaagcaacggagaaggtcgctgctgctcccttgccaggaacgcacaaccgaacaccaccagcactgacgcaagcaaccggtgggtcatcgccgacggcggatcacacgtcgccgcactcagacaggttgggcaacctcttcaaggctgttacaccgccgcttcttgaccgactgtcgtctacgccgccggccaaaagccgcccaattcttgcgaagcgctgtcgcattgctcgccttgccgaatactgctctactaaccctcgtcgcagctctaggcttgcaggaaaatcaaagatgccgccgatgcagaagtgccaccgggtgttgatgaagcgcctcggtctcctccgcactgacgcctcacttgatgaagttctcgctgagtacgtggcgatgttcaacggcccattgccgccgcacattattgcggcgctcacatccatcttcgacctcactacgacgacgacggcaatggtgaccagccaccggaggaagccctgctcaaggtggtgggagaaggtatcgctgatctcgccgatgaggtcgacgaagtggcggcttagccttttggctgcagcatggagcaagctgtgcttgcatgtatcgtcgtctcctccatatcatgttgtctactctaccgcactgctatgcttctcttttgttgcaccatgtggtgccctcgacgcagcaagaccttttgccatgcgttgggcttga

SEQ ID NO: 14521 - DNA, 381 bp, Oryza sativa
  Clone ID: PAT_MRT4530_20451C.1
atggcgtgccagagcctacccaagcttttcggggtgatttccactcgtgccaaagccaacgcagccgtaaggctcttgcgaatttctcaagatttaggatgcccaggcctccggaagcagtggggaggcaggaagacaggttgtgaggagactgaggaggtagtcccacctgacggagtcaaaagctttggaaatgtccagcttgaagagaagaattggtcgtctggtcctatgatatttcctgaccatgttccttacatacatgaagttgtcatgcccgtagaccgctgttatgaagaaggtttcagagttgtggagaaggacagcctcggcgtggtgatgaccgtgctgtgtggaggggcgtcgaaggcatgcatgtag

SEQ ID NO: 14522 - DNA, 720 bp, Oryza sativa
  Clone ID: PAT_MRT4530_20452C.1
atggcggtcgacgtcgtggcggtcacccctgatacggctcccacgatcctcctccacgcgtggcggcggtggatggtgggggaactcagtgaacactcgctccgggactggctcgccatccgccactccgaggtgccacggcggaaggcggcgctttgccggggtgatggccgcggaatcgtcaagcgctaccgtcgccgaggtcgcttcggcggccgctcggagaccgtcacggtgtcgagcttcttgctcctcgtgctgctggtgaagatgagccaaactcgcttggggatggagctcaggtttcccgtccacgcccacacactgatccagcgcgtgtccggcgggtggaggaggcttgtctcgatgctctccagagcgcagggcttcgacacaatgtcgctggtgtgcaaacttgatgatgaacgcctcaggatggtgacgagagacgaccacctcaccctccctcagatggagctcctccatgaaaatggcttccgcctccttcggcgtggtggatgcaggtgccctggccacccaagtgatgaccgccgtggattcccattccttgagttccacctcggtggcgtgcggagtcgggatgaaacactcctcctccggctggtggaggtgggcgtgtcgcacggggaagttgctctggccggcgagtctgctctggctggcgagtctggcggcggcgctccgggccgcgttcgctag

SEQ ID NO: 14523 - DNA, 476 bp, Oryza sativa
  Clone ID: PAT_MRT4530_20453C.1
attcagcaaattttagtaaccgatctatttaagcatttttaatttatagtcttcataatacaaataacaaacaataggccgtgtaacacacgggttaacgataggctgtgttactaggcattaggttccaagctcgccagtttcatctctggcatcaccggggatgcgaaatatgccagcgtgttcgttgagtatccagacaattgttgtgagctcgcctccacaggcgagctgcttggcatgagaatcccttgtgcatcggacggacgcatacatcagaatacgaacccatgccttgaagatatagtccagcattaccgagatatcaaacgcaacctgttcttccaatttaggaatcatctctttaatcctttcatatctctcagggctaatttcgatatgtgcggttatatgtgggctgtctacccaagctctacttagcagcacctcggcgaatttagctccatcagacagaa

SEQ ID NO: 14524 - DNA, 183 bp, Oryza sativa
  Clone ID: PAT_MRT4530_20454C.1
ttgaggcgtggacggacacccctgccgacgggtggagactctacaggtcggggggctagcctaccccgaaacccaaatccgccgcacggcggacgcgcccggaaagggtcgagcgcgctcatggctcgcgtgtacgcggtgaacctcagatccacaccatacggaccgtgataacgctcacca

SEQ ID NO: 14525 - DNA, 331 bp, Oryza sativa
  Clone ID: PAT_MRT4530_20455C.1
cctttaagggataagcttgcggccgtctgttttttttcttgagatttatgggaaaaattaccacggggtgatttcaaacagccctgtaggatacattctagcacacaactctgtacgggtagaactggtactatggatctgtagtgcagtccgtttgtcctgcatctactctgaaataaactgacatactctttgtcaggtaggaatgatgcgctgggttgctggcacgactttgacgacaatctctactgatgggaaagagtgagcccggacctatgaagctggggagacgcctaacaccatgctctacttggtacgggggttagacatg

SEQ ID NO: 14526 - DNA, 4286 bp, Oryza sativa
  Clone ID: PAT_MRT4530_20456C.1
atggaatgtttccaactattccttatctcctggtcacctaccgacgttgtcgctcctgttcaacatattgtcgacgttgttcctctttcctccactcatactatttgtttttgtcttcatgacccctacacgcgttatagttcggtctcaccacgtcagcccatcttcaagacgccggcccacgaagcaacggagaaggtcgctgctgctccctcgccaggaacgcacaaccgaacaccaccagcactgacgcaagcaaccggtgggtcatcgccaacagcggatcacacatcgccgcactcaaacaggttgggcaaccttttcaaggctgttacaccgccgcttcttgaccgattgtcgtctacgccgccggccaaaagctgcccgattcttgcgaagcgctatcgcattgctcgccttgccgaatacagctctactaaccctcgtcgcagctccaggcttgcaggaaaaccaaagatgctgccgatgcagaagtgccaccgggtgttgatgaagcgcctcggtctcctccgcaccgacgcctcacttgatgaagttctcgctgagtacgtggcgatgttcaacggcccattgccgccgcacattattgcggcgctcacatccatcttcgacctcgactacgacgacgacggcaatggtgaccagccaccggaggaagccctgctcaaggtggtgggagaagatgatctgcttttcgtactactgcatctacgtgatgacaccatctacatgcatgccttcgacgcccctccacacagcacggtcatcaccacgccgaggctgtcctgcacttgcactcgcatgcgccgtcaaagacaaagagcccctcatctcacatgcgcggtccacaacttcatggcagaaacaaattgtactatcgcctgcttccaagaaacaaaattgcgggcaatggacgacgggcttgcaagatttttaagtggttacaagttggatagctacgccattaaaccggcaagaggaacacgagtgggaatcctcctcatgtggaattccaacttggttgacataaatgaagtcagactacgccggttctcaatgattgctagagttaaccttctccacaactctgaaaccttcttcataacagcggtctacgggcctacaacgcaccgcgaaaaatacgcgtttctaaggcaaatcaaacggcttaaaccggctgaccgcgaaccgtggctactcttcggtgacttcaacatgatttacagagcatgcgacaaaaacaataacaaccttaacttaaggcggatgggccattttagagcagcccttgaacactgcgaactaaaagaagtccatttgcaaaataggagattcacttggagcaacgagagacgcaagccaacacttgtcagactagacagattctactgtaatgagaattgggacctcggctttgggcaccacatcctacatgcgctctcctccggaacgtccgaccattgcccactcctgctcaccaacccacaaggtccacgacgaccgagatctttcaagtttgaaaacttctggacttcgctacctggattcaaggacgaggcaagaggcatctgctcagaggcaaaactcaagtatcttatggcactagacgtaatccaccgtcttgatgtggcacaggagcaccgagatctaacacaggcagaatacagattgcgcttaggccttaagaggatactcctcggctttgcggttattgaaaggactaggaaaaaacaagcttcacgtattaccaacattaaagaagcggacgccaacacgaagttcttccatcgcaagataaatgcaaggagaaggaaaaaccacatccatcgcctaaaaaagcacaacggttgggctgtcactcacgaggataaagaatctaccattgctgaacacttccggcatgtgatggggtggccagagccaagatcctgcgacctcaattggcctgttctcggatacaccccgatcgatctctccggactagacgatcccttcacaaaagcagagatccacgaagcaataaaagaaatgccaatcgacaaggcaccaggcccagatggttttacagggaagttctttaaatcgtgttgggacatcatcaaaaatgatgtagtggccgccttcaacaccttacacgattcaagaaacacgcacttcaacctcctaaattctgccaacgtggtgctaatccccaaaaaagaaggggcagagggaatcggagactatagactgataagtttggtccatggctttgggaaaatcttctccaaagtgctagcaatccgactacggccgctaatgcaatcactgatcccaacgaatcagagcgccttcatctgtgggagaagtatacatgacaacttcatgtatgtaaggaacatggtcaggaaatatcataggaccagacgaccaattcttctcttcaagctggacatttccaaagcttttgactccgtcaggtgggactacctcctcagtctcctgcaaaatagaggattcccaccaaaatggagagaatggataacgggtctcctctcggcatccacctcaaagatcatcctgaatggaacgcctggggaggcaatcaagcacggaaaagggcttcggcagggagaccccctatcccctctcctcttcatcctagcgatcgaccccctacaacgtctgctagacaaggccactgagcttggggcgataagcaaattacgagggaaagcggtacgtttccgcacatccttgtatgctgatgacgcagctatcttcataaacccgaacaaagaagatgtgcaagccttcaccgatctccttggtcgctttggccacgcaactggcttatgcacgaacctccaaaaatcacatgtggccccaatcaggtgtcataacttggacctcgatgacaccctaatggacacgccagcaaccagagcaaacttgcctatgaaatatctgggtctacccctgaccacaagccggctacggaagacagacctccaaccgctatatgacaagtcgatgagtcgcattgttggctggcgaggaagacacatcggtctagcgggacgctctaccctggtaaaggcggtgcttacctcacaacctgtcttcctactcactgggctcaaagcttccaaggagtccctcgaggtcttagataaacaaaggagaaaattcctttgggcgggaggagaggctttgacaggggggaaatgtaaaatcaattggacgcgaacctgcctccccactgcttccggaggcctgggcatcctaaatcttgagaaattcgcaagagccttacggctgcgttggctttggcacgagtggaaatcaccccgaaaagcttgggtgggctctggcacgccatgtgacgacactgataagctcctctttgcggccgccacaaccataacgattggaaatggtgccaaaataagcttctgggaatcggcctggacgcaggggaggagattgaaggatgttgcgccgcttgtctacgcagcctccaagaaaaaaagaacagaacgcttcaacaggcttcgcaagcgaaccaatggcttcttgacttggacctgccagggactgcgggctggacgacagacctgattgatcaacttgtcggggtttggatcgccgttcaggctatacacctggtagagcacgaggaggacaatataacatggaagcttactaaccatggcgagtacacgacagcatcagcatataacgcacaacttcttggaaccaccgctactaacttcaataggctaatctggaaagcctgggcgccgtgtaagtgcaagaccttcgcctggctaatcatccaaaatagagtcaggacctctgacaggctggcgacaagaggttggccaaacggttccatttgccccttatgtcgtcggacccaggaaacaactctgcacctcctcgcagcatgtagatacacaaggagagtctgggcggcactagcggagtgggcgacgtgcgagcaactaaatcctagccaatggaggcaaacttcaacggtgctagattggtgggaggctaccgcaaacatacaagagacacctaagaaggcactccgcactttgatgttgttggtcgccttggagatatggaacgaaaggaatcgcagaaccttccaacagaaggagctttcagctacctcccttttagccaagatcaaggaagaggccaaaacttgggccttagcaggagcgagaagtcttaatagctgctttcttttagttagctcggaccaaaggtcctag

SEQ ID NO: 14527 - DNA, 1085 bp, Oryza sativa
  Clone ID: PAT_MRT4530_20457C.1
ccggccgggggattgccaccttcttcctcctccgcttcctgctttgatccggtctcgaccaacgacctagctaagcgaggcgaaaaccagcagaagagcctctcttcttcttcgatcgtcgcaagaagatactaccagagaagcagatcgcagcgagaggagaaagatcaaagatggacgatatcatgaacaagctggggggctactggctcgggcagaaggccgacaaggagatctcctccgccggcgacgacatcgagtcgctgtcgacgagcgtcggggagggggcaaagtggctggtgaacaagctgaaggggaagatgcagaagccgctgcaggagctgctccgggagcacgacctgccggagggcttgttcccgcgggaggcgaccaactacgagttctcgccggagacgcggcggctgacggtgcacatcccggcggcgtgcgaggtcggctacagggacggctccgtgctgcggttcgacgccacggtgtgcgggacgctggagaaggggaggctggcggaggtggaggggctcaagaccagcgtgctcgtctggctacagggccggctccgcagggccgaccgacgccagggtgtgcgcaacgctggaatcagggaggctcgcggaggtggaaggggctcaagaccaaggtgctcgtctggggccagggtcaccgccgtcagggccgacgccgcccaaggtgcacttcaccgccggcatcaggaagtcgcgcagccgtgacgcctacgaggtcgtcaggggcggcatcatcgtcgaggagttctagcatcgcgcgtgcgccgccagccacgatcgatcagaggaaataataatacgtgcttgtacgattagtgttcgggatgggtaatttaccgcgaatgacctttgtgattataactgattattagtaattataaaagctggatgtccatgataaagggtagatacttgagatgctgtgaagaactactggtctactactgcagccagttttctttatggtgttcgatttcagttacggagttataagaaggtacgcatacgaggaaccaaaaaaaaaaaaaaaaaaaaaaaaaa

SEQ ID NO: 14528 - DNA, 753 bp, Oryza sativa
  Clone ID: PAT_MRT4530_20458C.1
cccacgcgtccggattatctcgccccccatcttcttgtattcccctcgctcctgctgccgctcacctcggccgccggcgtgatgctactggcgcaaccatcggatccctgcgcacgagctccggcctgtcgctcccaccacccgtgacctccattgctgccaacgttggccgtgcgctctcaccaccaccatctccagatccttgccgaagtgctcccgccaccacaaccccaacggcggtggttcttccccaagttctcaccgggcacacgagggaggaaggaggcttgatttggtgcccccacccccctttgcaaaaatcaggaggttgagagctgattagtgattgctcgctggaggtgctgcctgggggctacatcgagcaaaagggtcacaacaggaaggtaatactatcaaatttgccaggtagttcatacgtgctgattattattaaggtttatttgcatgtctagttgtctactgtgctgcttctccctatcacacaatgtttgatatggtacgttccaccaaattcttgtgcttgtgatagctctgccactttcatgagtaattgaggattacaagcaattaattctattttgtaggtaagcatacttcagttgctagctttaatcaaggaagaaattcataactgtgtatcagtgtgcatgactacaggtaaccgggtaactgggaatgaattgatgccatcagttaagcaggctcaatgtttgatgtgaaattcagggacag

SEQ ID NO: 14529 - DNA, 350 bp, Oryza sativa
  unsure (1)..(350): unsure at all n locations
  Clone ID: PAT_MRT4530_20459C.1
gtcgccgtctcctcttcctccgacgagcgacacggtatgccttccactctcctctcctctcctctccacgccattccagaaccaaccctngccgccgcgtcgctcctanncccgccgacgaatccannnccccggatngccccgcgctatggccttngccagctcgctcctccnngngncgncgnncagcgtngcccnggagctngtctccttnctncngnccnaggccaagaggggcgtcgtgtncntagtngtcacgcggntctngggnagcccggattnggagttagagnngaaggtggaatgaatctgggaagtgcttttggctgnttgangtctttggcccaagt

SEQ ID NO: 14530 - DNA, 1338 bp, Oryza sativa
  Clone ID: PAT_MRT4530_2045C.1
gggcagcgggtatgtggctgagctcccgaaaagaggaaagtgagatagctcaatttctccttccttcctctctccatctaatctacacatgcacaaatgttgcagctgatatatggcttagctagcatatgcaaagcaagccttcctgcagtctagtcacctctcaagctacatactcccagtactgcttcatctagctctctctagtagctagctctatcatcatcgatcatcctcctctcaccggccggccaacccagagaagagattattcctcagaagaagaagcaacaagaagaagacgaaatgtctgcccagatcgctccggcagagcaagtgtgctatgtgcactgcaacttctgcaacacgattctcgcggtgagtgtcccaggaaacagcatgctgaacatcgtgaccgtccggtgtgggcactgcacgaatctgctgtcagtgaacttgagaggactgatgcactcagccccagcactacaagatcatcatcatcatcatctccaggagagtggtctgagcggatgcttccgtgatcaaagtggctatccggagtttggtttttctgcagcttcgtcgtcttccaagctcaggctgcctcctgctgctgctgccatggtttcctactcgcagcaaaaccagcagctcgagcaagctctccatgctcgccctccagagaagaggcaaagggtaccttcagcctataacagatttattaaggaagagatacgaaggatcaaagcaaacaaccccgacattagccacagggaagccttcagcacagcagccaagaattgggcacattatccaaacatccattttggcctaagccctggccatgagggtggcaagaagctcgtcgacgtcgaccccatcccaactgctccatcttccaagaagatccaaggtttctactcatagattgaggggatcaatctgccgataccgataccgcaaataggaggaagagcatcaagagcacaaaacatatatatactgtgagtaaagaagcaaaggaaaaaagaaaagaaatgctgccaccttacctttgttcatgaccaaaaaacttgtgaagacgtatgtcataagtacatagaagaaatcaactcatatagagtgaaaaaaaacatacaaaaaatcaagctactatagctcatcgatcgactgaaaggctgaataaaccattcgaccataatgttgttacatgtataagtatgtttgaagctagctagctggctagttctttatttcctctttatgtcttccaatgaaattaatttgcaaacatattaacagcactgtcgacggatgcaaatcagtgaaaaaaaa

SEQ ID NO: 14531 - DNA, 307 bp, Oryza sativa
  unsure (1)..(307): unsure at all n locations
  Clone ID: PAT_MRT4530_20460C.1
tttattttttgagctttcttgtttactcgtgcatgcgactcacctagtgctcccttctttctttattcatttcttttnctcgcctctcnctatacacattacctccatgccgacgagctctcaagggagatagctaggctgctgtactgcaccacatggtccggagcggctcccggtttaatggatccatgcttcccaacgcgctcttgcggcggtttaacttttttttagggttaactaatttcaatgaactggccgaatgttcaccactgcaattattatgataaccttgccttaacccacattt

SEQ ID NO: 14532 - DNA, 408 bp, Oryza sativa
  Clone ID: PAT_MRT4530_20461C.1
actagaaagaatagcccttccaattttttctgcgtcgcccattggatgggaggaggttagaagaagatagaggcagtgttatacagggttccgccgggtggcttctcatggaggatgctggtacagggagtggtgaagcatggtggaggatgcaagacggtgcggtgctcgagaggcggccgcgaggtgatgtccggatgaggtcggcatcgggtgggaagaggacggtggggtttgcagttgcactaacacaacaccgatgttaattactggtgtacggagctacggtgtaaatgtgatggagcacagaacttgaccatgtatgacgacggcgccgttgtgccaaagtcacagcaggctggacctatttacaccaaaagatgatgtgaggctcattgagatcaacct

SEQ ID NO: 14533 - DNA, 489 bp, Oryza sativa
  Clone ID: PAT_MRT4530_20462C.1
aaaaaaaaaataaaaaaaaaaaaaaaaaaaaaaaaaaaaaaaaaaaaaaaaaaaaaaaaaaaaaaaaaaaaaaaaaaaaaaaaaaaaaaaaaaggggggggcgatctaaagaaaaaaaactaacttccccgtgcatgcaacgaaaaattttttttatagtgtcgctaaaaaaaaataaaatgccgggcgttaaacaacaaacgtgtacggaaaaaaaaaatggggtgaccaacctaaatatatgtggtagaaaaccaccttttcattcagcggggaaaaaaaaaaaaaaaaaaaggcacaaatcgccttttccaaacaaatatgtccaccaaaaaatgaaaaaggaaaaggccccttgtactggaccataaaaaaacggcgggtggggtggttactctaaaaaaaacctaaactttatctagccccttaccaccgccccattaaaattttatccctcctttttccaccaaaaagggagggcatttccct

SEQ ID NO: 14534 - DNA, 220 bp, Oryza sativa
  Clone ID: PAT_MRT4530_20463C.1
gccgacttgttcaccgcgctgaaggccatcagcatggcgatgggcgacattaaaccggaacacaggggtgcaacacatatgctggattctgcgctgcgcggccgcgcgatgcctgatacgactatggaccagcgcctgcgcctgggcctacctgaggagtgcaaggaccacggctaccggctgcatcacctgagggcggacgacccagaggtgcacgcca

SEQ ID NO: 14535 - DNA, 2139 bp, Oryza sativa
  Clone ID: PAT_MRT4530_20464C.1
ctaagcgctgcaccgccgccgctgacttccgtctcctcccacgccgaagcccaataaggtggtggttgtctcgccgccacttccactctcactcggcgccgacatcgtctcggccgtcatcgtcatcgtgggcgccgcgtccatcccggacacgcctaacagcttcacgctgcgtgggaggctcaacgaggcccgcgacttgctgtggcgcatccgcagggccggggcggccaccgccgacgtcgacgccgagctcaaggatatcgtccgcgttgccgaggaggaccggaggtacgagtcgggcgcgttgtggcggcttcttcgttgcaagtaccggccacacctggtgatggccgtgctaatcatgccggcgacaagggtgctgatcggtgccagcgtcaccgtggccttcttgctcctgctcgccttcttcttcatcatcttgccgcgcggcggcacaccgccggaggtggtatcgtcgtccaaggagggcgggatccgggggcgtcgcgatggcggcggcgtattccaggttgagagctatggggagaggtgcgagcacgtcgccgaggaggatggccatgatcgccggcgattcccgcgtggctacgtcgactacctgtacctgttcgactgcgtgttcggtgtggagcggcgggttcttggctacggcgtgatggcggcttggctcgccgtgctgttctacctgctcggtgacacggcggcggtgtacttctgctccagcctcaagggcctctcgtggctgctccgcctctcccgacgatcgccggcgtgacgctcctgtcgctcgggaaaggcgcgccggacgcgctctccaccatcgcgtcgttcgcctccggcgggggagagggggaggccaccgccgtgtggctcaacggcgtgctggggagcgcgatgctcgtgtcctccgccgtgctcggcatcatcggcgtccacctcggcgcgcgcggggtcgccattgacagggtgaacttctaccgcgacgcgtctttcctcctcgtctccctcgtcgctgtggccgtcgtcctcgccgccggcgaggtgacaatctggggcgccctcgccttcacctccctctacgtcgtctacgtcgtcgccgtcgccttcacccacggccgctccccgagcaaaggccacgacgcggaggcggaccacacggcggacgccttctccgagctctgcaacgtagcagagacgaagttctacggcgaccaagaaccactcctccccgacactgcaccgctactcagctactaccccggcgacggcgacggcgacggaggcggcggcggcggcggctccaagaagaagatcaggagcgcgttctggtcggtgttgcgcgcgctggagctcccactatggcttccacggcggctgaccatcccggacgcgagcaaggagcggtggagcaagccggcggcggtgaccgcggtcaccatggcgcccgtcctcctctcccacctctgcagccgcgccaccggcatcacctcgcccctcgctgtcctcctcggcgtcctcgccggcgcgtccctcggcgccgtcgccttcttcaccacctccccggacgcgcccccagccgaccacctcgccgcctggctcgccgccgggttcgtcatgagcgtggcctgggcgtacgccgtggcgaccgagctcctcgcgctgctggtctccgcggcgcacgtcatgggcgtcgactcggcggcgctggggctcaccgtgctcgcgtgggggaactccctgggcgacctcgtcgccaacctcgccgtggcgtcgcgcggcggcggcggcgggggcgcgcaggtggccgtggccgggtgctacggcgggccggtgttcgacgtgctcgtgggcctcggcgtgtcgatgttgctgtcgtcgtgggcctcgcatccgcggcccgtggcaatgccggcggaggccggcccattccagacgctgggcttcgccgccgcggggatttgctgggccgtggtggtgatgtccaggagagggatgagggtggacaggacgctggggtttgggctcctggccatttacttgtgctttctttgcatcaacatttctcaggcacttggaccgggacgagaagttcccaacttctccaaaacaaaggcttag

SEQ ID NO: 14536 - DNA, 467 bp, Oryza sativa
  Clone ID: PAT_MRT4530_20465C.1
tgctgtaaaccctagctctcgctcgcgcggggtgcgccgatgcggaggtggctggcggagggggtcatggagctggcggcgggggcgccggagtcgaactcctccttctgctcctccccctcgggcgcgacgccgtcgtcggggggcccgatgtggtgggtgtcggggtgccacgggacggtgtacagcctggcggtgatgctcccgtcgttggcgttcgtcgggttcctggcgtggcaggcgcgccggagcttccgccgcctcagctactgccgctcccacgtcgtcgtcgtcgcctactacgcgctcctctgggccgtcgccgtcctcaacctcctctggtgcttcctgcaagcgtggcaatgtatgcctgatagggcgttctcatggaatgtgctgtctctgtttaccaaatcagggatgttattctgggaagttagtcttatagcatttctgcttcaggaaac

SEQ ID NO: 14537 - DNA, 1160 bp, Oryza sativa
  Clone ID: PAT_MRT4530_20466C.1
aatgttttctaccattctttttgttttcatcccaaatttccaggatgtctaaactgcatcattagcttttagatttaattgcagcttcctgctcttcattagtctgttctacatgttgttctccctgtagctagatggtgccttctcttacttttacagcttttttttaaaggaaaatactaccaggccttgcctagtagaggaaatatttacaaaccaacaaagaaagcaaaacaaaactacgactgctgtaaccaggaaagaatcgaagggctaagagactcattcatcctacacaaatgcaggagaatatcctgtttaatacttctgaaccaaccttcctcttcaggagtaatattctcaaaaaccttcccatttctttgcttccaagttccaaatatccctacaggcaataaaccttttgcagcttttatgggagagcatctttcatattcggctgcagttggcctgtagtttcctttttttttttccctcgagcttcaggttttcgggttgtgcatttgggtagtggaatacataacttattttggcctctgacttgttttgctctttgacagcccttcaatccagtgcttggagaaagcatgagaggatatttgttcaagtcataagcttggtttctctggcatttgcccattcggcaatgttcattagtatactacagaagccctcatatcactggtgttatcagcagtaaatgtaagagagaacagtttgttactcttgtatacctgtacatacatatcatatggaggagatagattcaaacaggagtgagagctgatgataatccacaagtatatgatgcaaactagtggtacaatatatttttcatttgattcaggacaaaaaacttaaatacgaatatcctcacttcatagacgcttccgatgcatcatagttttgcattggtgctcgaccgctagttgctcacgttagggcatttgagtgtaacataatgtttctccggtgttgttactaggtcggctgggtgagcaaaattctttcgcgataggtgcgtattagatgctagtgcagtgtaattaagaactgaacattgtacatggaagctcatgttccaagtgatagtaaaataaaaggcacgcatctcccttggttaaaaaaaaaaaaaaaaaaaa

SEQ ID NO: 14538 - DNA, 405 bp, Oryza sativa
  Clone ID: PAT_MRT4530_20467C.1
atgacggggagctcctggttgccgtcaagtgcagctcgaggtggagataagggagagggtgggaaactcgtggtcgctgtcatcgactccggccctgagcctccactccgtcgtctggccaacctcaccgctggtgcctctttctccgggccgacgttgtctcatcgatttgaagaagcagcggcaacgaccggaagttctcttttcccctttctttttgctacaactgttggccgtcgatgcacggggcgctcacctcagcaaccaactcgctctggctggcagtggaaggggagggcccaagcggagctagccggtgtgaaggaggtgatgggggcaacccaagcggagctagctcgtgcagcggagatgggaaaattgagggcctcgacggtggcgacctag

SEQ ID NO: 14539 - DNA, 547 bp, Oryza sativa
  Clone ID: PAT_MRT4530_20468C.1
gatgtagcaagatcagaaaatgctgtccaagcagatatggaggtagagtttcatcgtagcaagcagcggttcggatttttgaaatggggttcaacacttcaactgcttttacttgttgttccacctggatctggaattttgcatcaggtgaaccttgaatatctgggcagacttgtgtttaacaatggtggtgggatcctttgccctgatcgcgttgtagaaatggacttacgcacaaactatgacagatggccttggccggtgtttctgatgggtgagttgatggtataaaggcagaagctgcaatgcttggccatgggcagccaatgagcatagtattgtcagggcttgtcggtttcaagttagagtgacaaggaagctgaggaatacagatttggtcctagcagtacttcaggctgataggaaacatggtgttttgtcggttaatttgctgaattttacgggggaggcatgagtgaattatcactgcaggttgatagggctacaatcgcaaacatgggattcgaatccaattgtaatgctggga

SEQ ID NO: 14540 - DNA, 453 bp, Oryza sativa
  Clone ID: PAT_MRT4530_20469C.1
atgcattatgatcgtatagatgctgttccttgtaatgtggagagtcttctcgtcttcaattatgctagttcttttagaagggctattttgggggataacttaaaaacttggttggaggaagtgtataaaaaaggtgttctctctgttaactcaatgtacaaggctattatatatcgtgacattgtgccaaggaaagaggtgtttcagaagttaagagtaccgttgaagatcaaaatctttctatggtacctaagaaagggggtcattctaaccaatgataatttggctaagagaggatgggttgggaggactttctgggcgcgggaatggtccttacttcttaaagaggaagagggccaacatgtgaaagatggatgcaaaaagttagaaacgacaatgttggacttctttgccaagtttggttggaaccaaaggagaagattggaagcttga

SEQ ID NO: 14541 - DNA, 1088 bp, Oryza sativa
  Clone ID: PAT_MRT4530_2046C.1
ttattccaaatccgccatcgcatccttctctccatccaccgaggcggcgccaccacctctcgtccggcggcggcgcggcgcgacgctccatccccggcgaaaaggccgccggattccctgtgggggcggcggagaggcgtcggaggaggctggcgccggcgcggcgacaagcttaattaagcaaattggattcggatcacaaaggaggcggtgcctgtagaaaagccatggcttcttcggtgttcaaggcgatggcagagaaggcagggccgtctgtccgaaagcaggcccttacgctgaccgatgcagcggcgtcgagggtgcgccagctgcttggcgtacggcagcgtgcttatctccgtcttggcgtcaaggcccgtggttgcaatgggttgtcgtacacaatgaattatgctgatgagaagggaaaattcgatgaacttgtggaagataaaggagttaagatactaattgatccgaaagctcttatgcacgtgattggaaccaaaatggatttcattgatgatccacttaggtctgagtttgtgtttatgaaccctaattccaagggagaatgtggttgcggcgaatcatttatgacatcaaccaaaaacaaaggcccggcatagtccaccaagttttggcagcgatttgttgattatttgatgtatagaagtatgttgctaatttgctatacacttcagtgacccattgtagaggaaaatttcatttcagctccattgagctgattatccttcgtcactcagcatggttggcacttgttacctttcacctctggattggatcatctgcagcaaaggaggatactgccattcccctctagcacgaaacatccaattgcaagatgcctcctgattgcatactctggtgagaacaatggaggtcagcgttccagcaactcgcctgagggatcatataacaggattttcggcattccatccactcgctaagggatcatataacagaggtcttgtttacatcttgtaagatggcatccaaggatagatgtggcattgttttttttcctcttttgcaccatgatctgataatcaccttgctgcatgttc

SEQ ID NO: 14542 - DNA, 107 bp, Oryza sativa
  unsure (1)..(107): unsure at all n locations
  Clone ID: PAT_MRT4530_20470C.1
caccagancgcaggggcgggaggccggtnttcctccttcagaggagattctgtgggtgctactgtttcgtgctttcgtgtgtgcgagatgcgcgtgcctggcccctt

SEQ ID NO: 14543 - DNA, 306 bp, Oryza sativa
  Clone ID: PAT_MRT4530_20471C.1
atcgcgagcgggccgttcatctctttcctgttgttaagatgtagatgtttgtgttgacattgatcggcttgacttttatccctgatggtgtatttttttgacaccagcgagaatagaaagggttagaggcaagacaaggagggcatgcacccggaccagcagggtcttataatacctggcaagcagccgtaggacggcaggaccctcgctgaccacaacatccaaaaggagtccacccttcaccttggccttcgtccccgtggtggcaggcagaactttgtgaagactcttgccgacaagactatc

SEQ ID NO: 14544 - DNA, 375 bp, Oryza sativa
  Clone ID: PAT_MRT4530_20472C.1
atgccgccatcgcctccctcctccccgttgtcgttcgagtccgactcgcagtcggagtccgggtcgtcgccctcgcccttccacgctgtccgcggccaccacccgccgccgtcctaccgaaagacgaagcagagcagcgaggcgcgcgcgcgagcggttcccctctcctcctcatccggaatggcgagcgcggcggcggtcgtcagatccgcgtccgccacgtcggcgttggcgtccgccaccggcttgggcggaagaagcagctccgcggcggcctcgcgggcggcgcgccggggccggggccatgaggaggaagcagacagcggcggcgagggcgagggcggcaccagcgggagccatgctttgctcttgtga

SEQ ID NO: 14545 - DNA, 282 bp, Oryza sativa
  Clone ID: PAT_MRT4530_20473C.1
ttttaatatggagaggagaaatatgagagagagggacgtgtctaaaaaaaggcatggttgcactggagcttaatagcgaaagcagagatggcatgaccttagctaagagcaaggaattggtggtggcggcatgtgtgatgcatggctggctgatgctaggcaggaagaagaaatggatctggcttaagtcgcttaacttagctatgggtgtccatgccatgccatggatgggtgataacgccttgctgatgctgctgatactgctggcgctggagctgagga

SEQ ID NO: 14546 - DNA, 172 bp, Oryza sativa
  Clone ID: PAT_MRT4530_20474C.1
gaaacttgggacggatcggtttcggtgtatatttctgggcgaaaggaacgggcacagggttgctggagggtaccttttgggggttggaggcaaaagtggcaaacagctattactagataggaagctgcactacacaaagggaggaggagagatgcacaaaccacagagtgag

SEQ ID NO: 14547 - DNA, 962 bp, Oryza sativa
  Clone ID: PAT_MRT4530_20475C.1
gatcacatgagcggtcaaagaatgtgacattgactctccctcccccactttcgataatatcattgagttagaggaaatgctacattgtgtagaacctgaggtgctaatggggtcagctaggggtttagacaattttgaagctttacagaaggcaacgaaggatcttgtgtacgatgagccaaagagttgtgacagggagttctcaacattatgatcagtgcttgaacttataaggttgaaggccatatatggttggtctgatagtagtttcaataacttactacattgaaaatgatgctaccaaagcctaactcattaccttccaacacatgtcaagcgaaaaaattcatctatcccttttctcttggtctagaaaagattcatgcgtgtgtgaatcactacatcctatacatgaaagagtacacttcgttggataaatgcccattatgcagtgctagccggtagaaatcaactaacaacactaccctagatgttgattttttttaataaaagaagaggctgactcattcgaggaaaacaaggaaaaaccccctagctggtgatgtggtacctttctatgaaagatcacattaagcgtttgtactcaaacacccgagatgcagaactaatgagttggtattaagaagggcacaagaaagataggatgctccgacacccaatggatgctcgtcattggaaaaacataggtgcactgaacctataatttgctaaaaacccacgaaatattagatttgcactgagtattgatggagtgaacccttaaagagacatgagcagctcacatagcactttgccagttcttctgaccatatacatcttcatacctgctttgttataagtgaaagtacgttctactatgtgtcctaatacaaggcccccggtagcctggtattgatattgatgtattttttgaaccattgatggaagatatagaacatcag

SEQ ID NO: 14548 - DNA, 1033 bp, Oryza sativa
  Clone ID: PAT_MRT4530_20476C.1
gtcagcttgcacctccttccttcctcagatctgaactaatggccgcctgggaggttctcgttttattgatgcagcgccatgtcggttcttggtggatgccgaatccttcaagatactccttccccgttccatgttcaccgaggacaaggtcaccttgctcaagccctttttcctcattttgataacgcttgttggtgctgtgtagttgcttgtgtgcaggttctagacaaacaacaccatgagcgattccattcgcccagcatcacctccagcttcgatatgttctgctccctttctcctgttcttctttcttttctacacttctttcacgcccatggttttcgcagtgatcaaaaccatggttgcatgatcaggtctattgatatagtgttgttttcacgatgcaatcagcacccccttctttgctcccatctgaattttcttttgattcgtgaattcactttattatgttcaggaaaagctgggaaaaggaacaggaggatatattgcatacagttaagtgatcgaggtcctaatggatgccagtggtgatggcgccacaggaatgctgtcttgttcgccgtccttaatctggcctgaaatgcatgaactgaactgtaggtaggcggtctgattcagatgcttttccagtggcgatgcactctagttagttaaaggaactaacagcaattatgtaattagcctgtgcaaggggctgggctcatatcagtagatttttttccattgtctttttatttgtgattgtctttttctaatatttttactgtacgatggtgaaatgcgcaaaataccctgttgtgccctgtgtcacgactcacgcctctctgcagcaccttctcgccgacatggtcgcagcaaggaagcggatacacttgagcacaaggtgcgggacagatacgatctacaatacctgacggtgacgagaggtacgcacccacttgatttctgcgtcctcagcggaataaaagatggaccgagaattttcgttcagagaaattatattcagagccct

SEQ ID NO: 14549 - DNA, 211 bp, Oryza sativa
  unsure (1)..(211): unsure at all n locations
  Clone ID: PAT_MRT4530_20477C.1
cccacgcntccgggaagttgcaaagcgaagccaccaacctcaaaaacccaaaccctagctctcctcgccgccatcccatggcgcgcctccacctcgtggtcgtggccatggccgcgctcttngccgccgcggggtgngcgcagggcccgancgnntccccgangccgnctccnaagngcacacncggtggcnaccccgccnactcggccgc

SEQ ID NO: 14550 - DNA, 1749 bp, Oryza sativa
  Clone ID: PAT_MRT4530_20478C.1
ccgcagtacgcggcaagctcctctacagcatgctcacccactattctctcactgcaatttctggagctcacacattgcatgcgccggccaataatggcgacgacgacggcgaggttgctcctcctgctcacggtggcgggcttctgcctctgccacaccacctgccaggaggcggcgccgccgccgccgcccgtactgcggcagcctgaggacggccgtggaggcgcggaacatcatcgggtggaagacggtgccgccgccgtgcgccaagtacgtcgccgactacatcaccggcgagcggtacggccgcgacgccgacgtggtgatcaacgaggccatcgcctacgccgagagcctcaagctctccggcagccggcaaagagagatctggggtgttcgacgtcgacgacaccgccctctccaccgtgccctgaccgaagccggaaccatgccctaacaggacttgcgaatcgtccgaacagccggtggagcgagcgcaaccggcggttcacagggaaacactgcgactctaccgacggttgctgcagctcggcatcaagccggcgttccttggtctaaacccgccgatccccaaaaggcccgtccagcaccagcagcaacctcctctccgacaacgtcaatctgacaggtgggagaagctattactccagcctgttgggctccagaccacgactcaggcgttcgttggcgttcaagacctgcgaacgacagaagctggtgaatgatggctacatcatcgtcggcaacattggcgaccagtggaacgacatccgccgctcgccggatggttgccgcacctttaagttccccaaccccatgtactatgtcgactagctagctagctatccatggatatataccttgtttgtgtctgtttcatctactcgttttttgtcatgaatttgcatctagtaattaatctttgacgcgtgcatatgtttgatatgtttgttaatttttcgtgagatgaaaattgaatttgtaataacgcttgtttggcaattggccattgattggacaatgtactgtgttgagcaagcttgttgtatttccacacaattaataatggaattgatggaccaaaaaaaaaaaaaaaaaaaaaaaaaaaaaaaaaaaatgtcggtggagcaagcagtcaccgctaccgcgccaagccaccggagcgaggatctaggaaagggaggagaggggagccgccacgtgagcttccgccaccgcccctccttccccctaccgcctggcggatgctccaggatgccgtcgctctaccaaccaaacctctggccaaggagagggagaagatccggaggagaggaactggaccttgcccaccgcaagatccggagaggtggagccggaagccacctgccgcaagatccggaggggatgagccgatgccgcccgcaaccgttgcgctgcccctccacctccctaccactgggcgctgccgacctacccccggaccggtggggaagagccgacgccacccgccgccggcaccgcgccgcccctcctctctaccgccgagtgctacaacctacctccggccagatccaaaggggaggagccgacgtcacccgccgctgccgctggggaaaggagaagaggatacatgctgaggagagtgagggagaggtggaagggggagtcttttacccctgtgccattaggaaagttgttgcttacctgtgtgccacaaaaaagtttggagttacctgtatgccatga

SEQ ID NO: 14551 - DNA, 2240 bp, Oryza sativa
  Clone ID: PAT_MRT4530_20479C.1
atgggcgcgctcaccgacagccgcaagcgcctctccgccgaccaccgcctcctcccctccttccctccctccccgccgcctccctccaagaagcccaagctcgcgcccctcccctcctcctcatccctcgccgacgcctcctctccgcctccctctccgccgccccctcatccctcctcctcctccgccgccgcgcagggcccctcctcctcgtactccgccgccgccgccgccggcgccggaggtgcctccacctcgtacgcttcctccttgccccccagccgcctccgccgcctgcctccgccgccgccgcacccgcgcccaatccacgggccccaacgcgtcctccgcgcgttccgcctcggttccgcgctctcccgctccaatccgtcgtgcttcaccccgtccccttcgtcgccgcagcatccgcggtctctcggcctcgagcagtatgtcgagctcgtcgacagcgtcgcccacccgccgccgctgccgccttctccttccaccgccgatgcgccgtcgagggtggaggtgatcgctgtcgacgatgcggaggagaggaaagatgacgaggaagcgcgagaagaggaggaggaggaggtgaagggtagcgttgttgtgaggagggtccccctctacaaggagctctatgaggcttccagccggcgacgggacgccaagctcaggacactcgagttcgaggtgcgcctcgcagagaagggccgcctcggccttgagcagctcgccgatgtcctcccacggttcgggccccggaaggaggatgaaccttttgttccttttacggatgaggatgaggatagtgttgatcatgctcttggtggccgtaacagacgtgaaaggctagtggtacatgaatcatcaaatattgtcataacaagagagaccttgcagtgcttgaacgaaacggagtggctaaatgatgaggtcataaatttgtatcttgagctgctgaaagagagggaactgagagaacctaacaagtttttgaaatgccacttcttcaatacctttttctacaaaaagctcattactggtgggtatgattataagtctgtcagaagatggacaactaaaaggaagttaggttacagcctacttgaatgtgataagatctttgttcctatacacaaggaagtgcattggtgtttagcagtcataaacataagggacaaaaagtttcaatttctggattcacttggcagcatggacatgaaggcattgagaactttagcaaggtatcttgtagatgaggtgaaagataagagtggccaacatattgatgctctttcatggaagcaggagggtgtaaaaaaccttcctttgcaagagaatgggtgggattgtggcatgttcatgctcaaatacatagatttctacagcagagatatgggccttacttttggacagaaacatatgcattactttcggaagaggactgccaaggaaattttgaatttgagagctgaataaactgtgaaggacatataaggccacttagaatgttcaccgctggttagcatatgtattttaggaatggtggcgttgtctttcacggagtgctgaatgctgggtttccacgatttctccaataagacacttgtcacgctacctgctgaagtgatgctgaagatggcattcagaacttattacttggctgtgtccatggcggctttcattgcggtgaagtattggacaatgacatggttttatggctggctgcagactaagaccacagtgggccactgagaaaggtatggttgacttctgtttcccaggcaggcgtccacccatgagcaagtttgatgtcttcacaggacctgctttgatgcagcgagaggcgagagttttgtgtactcctcacccctttattttcaacatgtatagtgctcctacactgaaacatatttgtggaatgtctgcttagccctgtgctgcatctcccaattttctcatgatatatgtaattggttgagcatgagtctacatggaagtgtttggtggttcaagtaacgttcacattcagaatatataaatcaaatgatccctttttgtgtgttaatgtaatcaagcaacttaggagcaaagttagtgactgctgttgatgttccttggtgtcctaaacattcattatacgttggcagtgatttgcggaagttattttctataaaaaaaaaaaaaaaaaaaaaaaaaaaaaaaaaaaaaaaaaaaaaaaaaaa

SEQ ID NO: 14552 - DNA, 903 bp, Oryza sativa
  Clone ID: PAT_MRT4530_2047C.1
atggagacggcgccgtcatcgtccatgtcaccggccagcggcacgtacgtcttggacgtccacggcttcagcggcctgaggaggcagcactgcggcggcggcggctgcatcgtctcgccgacgttcaccgtcgccggcctcgagtgggccatccggtaccacccggagggcgacgccgacgaggtgaccgacgacgtggccgtgttcgtcgtgctggtcaccaaggacgccacggcgtgggcgcacgtcgaattccggctgctcgaccaggccgccggcgagatggtcaccttcttcggggagaaggatccgatcttgttcgactccggcagcgaggacctgtccacctggggcaccggcgagctcgccgccaggagcttcctcgacggctcgccctacgtcgccggcgactgcctcaagatcgagtgcgccgtcgacgtctgccgcgaccgcctcacgttccaccacgacacgccgccctccggcgagccgttccgccagtaccccgccgacgacgagccggccgacgtcaccttcaagatcgccggtgagaccttccccgcccatgtctccgtgctcgccgcccgtgctcccggcctgctcaacaacacgacgtcgcaggcggcaaccatcaccatcgacgacgacgacgacgacacgccggcggcggcggcggcattcggagcgctcctccacttcgcctacaccgacacgctccccgtggcgagcggcctcgacggcgccggccacacggcgctgctggggcgcctcctcgtcgcggcggggcggtacggcatggcgaggctgggggcgatctgcgagcgcgccatgtgcaggagcctcgacgcggggacggcggcggacacgctggccatggccgacggcacggcttcgacgcgctga

SEQ ID NO: 14553 - DNA, 828 bp, Oryza sativa
  unsure (1)..(828): unsure at all n locations
  Clone ID: PAT_MRT4530_20480C.1
ttttnnnnttttttttttttttaaaaaaaagaaaaaaaagtagatttttattaaggtagaccgcggtgtactaatctaccattagtagatactacagcgacttctttattacgaaagaaaaaagaaagcgaaaaaacgagagaggaaaaaggaaaggggatcggcgttgcgtcgtcgccttcagcaactctccgctcgccgccgccgatgcgcgcctgtcgctcccctccgcccgccgccggtgcgcccatcttcctgtcgctcccctccccctgctgctcgtcactcctcccatctccccgcgcttcttccctttgcccgtcgctcgctgcatcagatctggatcggaggctggtgacagaaggtgggagacgacggtggccggcgattgaaggtcgggggacggcgggaagaagaggagggatgcagcagcaagacggatccgcctaggggctcgtcgttgtggcccccgtcgagcttcgtcgcctttgagctgttcgctgctgcttcgccatgtccgtagcttcgttgctcgctgggagaatgaggagggggagaggggcagggtggtgaccccatcgcctgcccttgcaggcgcgggtgcggcgctgcacgcgcgggtgcatggcgtggcatcgcgcgggcctggctgagcagcgaagctcaaatcgagcgctcctgctcagcctggctcacggngcttttttgcatccactcggccnagctgggagctacgtgcaggcaaccaaacgaccacatagtgcatccacgcattcgagccaangactatgcaggcaaacaaacacacctagcatccctcaccctgct

SEQ ID NO: 14554 - DNA, 189 bp, Oryza sativa
  Clone ID: PAT_MRT4530_20481C.1
atgctcaggcaagcatgccctagacgaaggccaccaatcctagagggacaagagctccatgagttggagagaaagctgtgcgtcgttgctttatggtgcattcagacaaagccacatgatcggccggcaatgagcgaggtcgtggggatgcttgaagatggtgccgacagcctgcaaaagaatgcctag

SEQ ID NO: 14555 - DNA, 428 bp, Oryza sativa
  Clone ID: PAT_MRT4530_20482C.1
tcggccgtaagttgatggcatcaagcacccctgggatgcgtacattgcggcgaacgctatgttgaacaggatgcataccccgcaggctcccaagtggagcctcttcgataccagatggccaaaccttttcatgagcgaagatatgagcctgatgaccactctgcttatgactatgacgctgacgagtacaaagaacgcatgagcaaggatcatgcatcttgcaaagatggccccagtaatactgaccacaggaattacctgaaacaaggaagataggtccaagttagcactagctaaactctctacaatatatagaagctggtcatggcagtgcagactgctgctagagctatacttattaaggaacgtccagttaccattgttgcattggtcatgctcccacgatgcataatacttccaaaaggatt

SEQ ID NO: 14556 - DNA, 277 bp, Oryza sativa
  Clone ID: PAT_MRT4530_20483C.1
aaaccaggaaaccccaactaaacggtaaccaactaagtgggcaaccttttgattcgaaagggtaactttcgggaaggggagtggacccccggccaggggaaaccacaaaatgggcgcgcatcaaattaaggcttatgacaaaatacaattaggggggggccccaaaaacacaaagggcccaaagaggagaggaaagggaaatgggggaaagaaaatttaaacgggggggtaactctagggggaagacccccgggggaaggacaccttatttcccccc

SEQ ID NO: 14557 - DNA, 1042 bp, Oryza sativa
  Clone ID: PAT_MRT4530_20484C.1
cctcctcctcccgccgccgccggagatgcaggcgacggccgcgctcttcctcgtccgcccgctcccgcgtccccactaccggtgcttgcatgggttgcggggaggcgtctcgctggccccgccgcggcggcggctggtggcgcggggcccgcggtgctccatgagcctctccatcggcggcggcgcgggcgcgggcgccggcggggaccgcgggttcagctacgagcacgttccagtgtttccaagataccggattcgtgatccctacaagcttcttggtgttgatcgtgatgcagctgaagaagagatcaggagtgctagaaatttccttattcaacagtatgctgggcatgaaccaagtgaagaagctattgaaggtgcatacgagaagataataatgaagagctaccagcagcggaaaaagactaagattaatctgaaaactaagctaaaaaagcgagttgaggaatccccgtcatgggtaaaggcactgcttggatattttgaggtgccacaaatggatatcatttcaagaagattgttctttttcgctttcattgctggttggagcatagcgacttctgctgagaatggacctgcattccagcttgcaatatctctcttctcgtgcatatatttccttaatgataagatgaagaacctcatgagggcatcaacaactgggtttggagtgcttgttggtggctggataattggctctctattggtcccacttatcccaacattcatcatcccaccctcttggtcccttgagctacttacatcattagttgcatatgtcttcctgttcctgggttgcactttcctcaaatgaaaaccttgtaaatcttgtaaccgtaaattgtagaattgcttgcagaaattttgcaactactgacatctccactatgggtctcggaaaagttttgtagaatgacatcactttgaggttctcctcttcttccaaaaaaaaaagccccagaaaataaagttcagcactaaaatgaaacaaaaaaatcaatctgtccccaacttcaggtcc

SEQ ID NO: 14558 - DNA, 1728 bp, Oryza sativa
  Clone ID: PAT_MRT4530_20485C.1
atgcaggacgttccgtctcctctcccggcattgagcaccgcctaccagcctctcccgtcgctgtacctcgggttcttggcgatatgggcggcctccggcttctcctgggccttcagctcctggaggagtcggcatttccagggtaggattctcttccagacggcttccttcgtttcgttcatgctcatatcacatggttactgcatcatgtgcgagcgcctctcgatcagggagaggcgaacaactgctggtttgggatgccttctctacctcagcctgatcggttacaaagctgcagttccttacttcacagtgtttcttctgatcaactacttcatgtcattttacatcatatttcgccgcacatcccaaaacctcatggttctaagagaacagctgaatttcatagaggaagaagacatccattcactgcacggcgcactgaacacaaagtacacaatgttcaagagatttcaaggtacaatgcaggttgcagtggtggcattcatcatggtgtacatgagggctgatgatacaccagataactactggaaatggatgcagccgatttcaaaggcctcgtatcagaccactggcatgtcggagtgggtgcacgggctggagcggcggcggcagcggcggctgatacttggtaagaaccgattcgatcgccagattccgccggagctaacgaactgcacgtcgctgcagttcttggacatgagcaccaacgtgttcggcggcaacatgcaggagattcttggcaagttcgtgacattgagatacctcgtgttgcatcacaacaactacactggcagaatcgtctccttcggcgtgctccggttgccgctgttcgccaggctcaacctcagcttcaaccagttctacggcgagctccctctcgaggtggccgacatgaagagcctcaagtatccgatgctcctggcgaataacttctccggtgggattccggcgacctacccgccgttcaacttcgtgtacacggactcggaccccgagttgctctcctgtgagaaccccaagtgcggcggcggcggcggcaagtgcagcgcgttccatatgtcggctacgtcgtcgtcgtcgccgtcgtccggatgctcgtcgtcatgcgtgaccgggaattcccccaccaaaggaagcttatcattgggggatcttgatgctgtcgaggtgttgccggcatcggcgactgctggatggagttctgctcgccaaaaacgaaaatggagccaggggacgggctcagcgacggcggcgatagcgagggacaacaacggcggcagtgggggatgggcgcagcagtggcggcggacgggcgcggagcggcgggggaccgcgacggcggcgggagctttccctaaagctatgtcacttgccgattacctcaagctggagggaagcgatatcaacttaaacataaatacatattattacttggttgcacttggtgagggaggtattgttgtagagggacaaacttctgctgagaagccgcaccagcataaacagatgaagcatgtggaccctaaaattgatgaaaaatacgtggaatttaagcaatttgatattgtaggtgatcactctgatcacttctattcgaacccaagagaaaggaaggttcaagtagttaatgagcctgggaaggactgggtgaagcggattcaacatgaatggaaagtcctagagaaagatttgccaggttggtag

SEQ ID NO: 14559 - DNA, 1634 bp, Oryza sativa
  unsure (1)..(1634): unsure at all n locations
  Clone ID: PAT_MRT4530_20486C.1
cggacnngacagngnacgcgtgggacggacgtgtggggcgcgcgccgtcctcccccaccgccatggcgccgccgtcacggcatgtggacgcggtcgccgccgttctccctgtcctcctcacgatccttctgccttccgccgccgcaatcggcgtcaactacggcaccaagggagacaacctgccgccgccggccaccgtggcgaagttcctcgcgaaccgcacccgcatcgaccgggtgaagctgttcgacaccaacccggacatcgtcaaggccttcgccggcacgggcatcacggtcatggtcaccgccggaaacggcgacatcccgacgctgggcaccaaggacggcgccgccgcctgggtggcggcgaacatcgcgccgtactacccggcgacggacatctccctcgtggccgtcggcaacgagatcatcaacacggcggacaacgccctcatcggcggcctcgtcccggccatgcgcaccctcagggcggcgctcgtcgccgccggcttccggcgcatccgggtcgcgtcgacgccgcactccctcggcatcctgtccgtctcctcgccaccgtcggcgagccggttcctcgacgtcctcgaccgcaccttcttcgcgccgatgctggagttcctccgcaagaccaagtctccgttcgtcgtcaacccgtacccctacttcggctacaacggcgacacgatcccgtacgcgctggcgcggcgccccaaccccggcgtgctcgacccgggcacgggcatcacctacaccagcatgctcgaggcgcagctggactcggtgttctcggcgatgaagaagctggggttcgaggacgtggacatcacggtgggggagaccgggtggccgaccaaggcggagcccggacaagccggcgtgagcgtcgccgaggcggcggagtacaaccgctacctcatcggagaggccagctcggggtcggggacgccgctcatgccgaagcggacgttcgagacctacatcttcgggctcttcaacgagaacctcaagccgggtcccatcgccgagcgcaacttcggcctcttcaagcccgacctcacgcccatgtacgacgtcggcctcatgaaagacacggggaagtcatcagcgtcggcgccggcgccggcgaagggcggcaatgccagcggcgccgccgtgacgaagcgtgactcggagtcggaggccgccgcgccggctgatgaggcgagtgcgcccgcgccgtcgtcggtggggaagaaggtctccacgaaggccaccgcgccggcaccgtcggacgacggctcggcctcgccggagccatcggagggcgaatcggccgacgagaagaatccggaggaggaggaggaggaagagggggatgatgccgccgcgacgacgacgccggggggcgacggcgactcgccggagacggaagccgcgggtgatgatgctaaagagagcgagggaaaaaacaacccccatggccatggagattcttcagaagctatcagtgttatgttctctgtaccttccatgcttacaattgctctgtctgcaatacttcttcatctctaacttttcctcaactcatggtgtaacaatagtgcaaatactaacattggtttttgcccaacccct

SEQ ID NO: 14560 - DNA, 3639 bp, Oryza sativa
  Clone ID: PAT_MRT4530_20487C.1
ttatctcttttggaagttgaatagcttaagtgagaatccgaaaaggatggcaaaaagaattgcaaatgacacaacggccatagcagccacccataacaagtcaagattgtaaccaaagtagctctcaacaaagtcagatacacgcacaccgttatcaaacttgtcatctacatccccaaactgtgaagtaaccaacccattgattgtccatgcaacagggcaaatccaatagtaccatctccaccatattggaattctctgccccaaggcatatggcaaaggcgagtacatgtgagatgctctttccctttttctaccaacgccccagaacattgttccaaacaatagtgcaattacaacggtgaagaagaaattcacagcaatatatggaggattcctccaatatgacaaacgttgcttccagaggcaagccaaacattgtataacaaaggtctgtgaatatttagttggaaacaataagtcgcttgaaccgtcatggggtgtgcttaactcctttatcaaatttttgttcctcctatatagttcagaattcttgtatacttgagtaaagttaaccccagttatctgttcctgcaatgtacaagtcacttccagcatccatgttgaaggattgtagccatgttttatcttcctgacaccttcaatagactttaaaaatgaaagcagttcaatagcatgtttctcaaaatatttgatcaattcacatgaatgttgtcctaatggacctacataaattgcttcacctcctcttttcattaggaagagtgtcctcatgacaatggctgctgctcgtgcatcaagtccagatgttggttcatccatgaatatgatagatgggtttgcaactagttccactgctattgttagccgtttcctttgttcagttgataatccactcaagccaagcaatccaaccaatgcatcttttaagggaaagagctccacaagctccatgaactcatcaataaatctctttcttgccatagaatcaatttcggctggtaatctaagccatgctgagaacataagggattcatagacagttagatttggtgaatggatatcattttgttcacaatatcctgaaactcgagaaaatgtttcttgcttcttcggatagccagatacagtaatattaccatgtatgtgtccactggtcttcctcccagctaacacatccaacaatgttgtcttgcctgcaccactgatacccataagtgctgtaagcactcctggcctaaatgaaccactaagatccttcagtagttccaaccgactccctgccataccctgtactttcagtgcctttggcatgtctatactgtatcttatatcttcaaatgtcatgtaaacgggtacaaaaggcaggatacttcctttcctggctggactagaattatgatttgcattgcttgaagttgcttcatcattgttgccaccctcagtgtatcttttatcattggtaactcggcctccagatgatggctcttgatcataaccggttaaattttctagttttatctgcaatgtttcctgagacatttctcgcacatttcttttaagtaatgtgagaattgagaggcagatggtgtagaggatattgaacagaagcacatatccaagcaaggcaccaagaccaatccaataccatttggcctccgggaaaaccccacgagattccagaactaaccttccaagtggttctctaaaaccaggtagtgcctcattccagctgggacttaggaattcatttactgctaaggcatttagtgcatacatcaggggtgatgtccagtactcccatatcagccattttttaacttcatctcttgataggatgaatccgcttgaaaccataactattagtatacagaattcactcacggtgcttgcaacaactggatgccttgtaagagcagcaatgaaacggaaaagtccacatattgcctcggacattacaaaaagcacaaggaattgtctaaaacatctctctatatttggatcaaatccaataacatagtatgttatggagacccaaattattgtattaaggaaggagattggagtcttaatgatccatgatggcaaggaatatgtccatgctggatagaagagtagatccctttgcttgaaaaaaactgggagatttgcaagagctgctcccatttctgccaaccctttaaacattattgccaacgtaccaaagaactgcactcccatgtacatcctcccgttttctatcgagtcatgatgcatatttgtatggataaagacactcattgcaattatcgccactagtgttaactgaagtgcattgaatatatatagaaatgattttcttttcaacagcaatatctctctgtcaatgttagctttaagtatttttttcaagttgacaccatgctttgatgttttcagcgctgcaatatggctcttgctgttatcaaatgggattgccaactcacttcttattgcctggccgacatggaaacactgaaatgcctcggcaatcactgtaacaggaatatatcgatatgtgtcatcgccatgtatccagtattgtttctgatctttccttgatgtaacttcttgcaagaagtcagctacacctattctttctaggcatttgaatcccaacgatttaaagaactcaagcacatgatcacgagggccactatagacaacttgaccatctgagaggagaattatatcatcaaataattcatatgtctcgggtgcaggctgtagcaaagcaatgacagctgttccaccaagaacatgaatggtttgttggatggtgttcactatctggaatgttgttgagctatcaagtccatttgatatctcgtccatgaaaagagctcgtcctagtgtgacaagcatctcagctgcagaatcaacattaggggctacaattgtgtcggcgcatatatccaaccgcaaaatctttagtatgtgatttgtaactatctcagctttctcctctcctgttgtagctgccttcaaatatatatcagtttcaggatctggtgtaatgttttcttcctcttctcttctcaatagttctagaaacagatcatagtgatggccaactccttgacactttgcagagaaattgattgtctcacgaattttacggttgatgggagtgttccagccaaggccaacaacagtgatgtttttccagagccaggagaacctaatagcaaggtcattcttcaatatgttggcataggtattgagaatggtgggaaggcccctgctgccaacatatgactctgcttctacattcaggttcttgtacctcacctcaattgtcggcagtttaataccaacccgatcgaaacgttccttgaacttgtagaggaagcggaggtagtcgtcgtcgccgacgacgtcaccgcctactggtcgccgcagctcggtgccctccggcatggccggcgccggcagcgccgccatccggcgggctgatcggccgtaggtgagcaggtcatcatcgtcgtcgtcgaccctcccagtggacggcgaccgcgagaacgcagccgccgacgccgatccctcctctcgctgccggtcgaccgcgtagatctcgccggcgtcgacgtcgtcgtccat

SEQ ID NO: 14561 - DNA, 341 bp, Oryza sativa
  Clone ID: PAT_MRT4530_20488C.1
aaaaaaaagccctcggcgtctttttttgggccacccctcggggttagcacctgttttatgggggacccccccccgcggttcgcccggaggttttcccccccgcgctccgggtgccctctccggaattcggggacccctccggcatggggggcccttcttctgttggggcgagcttccttgagatgccttccaccatggaaatgggtttcccgggggaaaattttttttcctcaaaaaatcccaaaaaattattgggggggaaattaaagggtaaaccccggggggcctttgggggggccctccccccatttttggggggggcccccccccccccttttaaa

SEQ ID NO: 14562 - DNA, 345 bp, Oryza sativa
  Clone ID: PAT_MRT4530_20489C.1
atggacgacgacgtcgacgccggcgagatctacgcggtcgaccggcagcgagaggagggatcggcgtcggcggctgcgttctcgcggtcgccgtccactgggagggtcgacgacgacgatgatgacctgctcacctacggccgatcagcccgccggatggcggcgctgccggcgccggccatgccggagggcaccgagctgcggcgaccagtaggcggtgacgtcgtcggcgacgacgactacctccgcttcctctacaagttcaaggaacgtttcgatcgaaaaccacctctggaaatctatatatttgcacaaacggttttccaagggaaccaccaagggtaa

SEQ ID NO: 14563 - DNA, 1609 bp, Oryza sativa
  Clone ID: PAT_MRT4530_2048C.1
gcatgaggacaaggttgaattgatgatggagaaggcatccaaagataggaattgtagcctcacagtttcagcaccatcaatcaccagtttcatcacatttcaatttggtgtttgcccccagttttgaattcgacagaaatgccagccagctgcattcagtttgtgctcttcagtcttcacatgatcggcatgtttggtttgaactttgggcatttcaagaataggagatccaatgtagaacttcatatctgatagaacaaaatggttctgctccaggttcaatccaattcagactcagatcatatactaatttgagatcatgaacacatcacataggaatgaaagaataatcaataattgaacaaaaattccaggtctttcctaccaaagaattgtacaccgccaatcgagcgaattgggaaccccaagaatcaccacccaaaagaatcaaaatcccccccaaataaccaatctgaattccgccgaaaagaacaagatcatcttttctctctatccattctccccccatcctcgcgcgggaatcgccggggcctcccttcaccgccctgtacagccgatggcgaggggtggcttgtctcacgggggcaacagcagcagcaatgcattgcaatgcaattccatcaccacacacagctccacaagcgcaacctcaatgaaagaattattgtgtatactcaattgctgtctaccaagaaaatgccgccgcaggcaatgccgatgatgacaatgcgaacggtgctgatgctgaagatgaatcaccctctgcaatgtagaggtcgtatgatttccaagtgtggtcgagcgggcaaggcttgccggcgtcgagccggtcccatggcttgcccttcccggaccagtgcatgaggctgacagggcccttgtggagagggcggcagctgccgaggacgttgtcgccgcccaatccgtgctggttccagcggtggtcgacggcctccacctcgccggcgaacaccagcaagaacgggggcagcgaccctagctcgtagattcgcttctccttctgcagctccatccacacctcgatgcggcgacggtagttgccgacgcgccaccgccggaggtcgatgaccatgacgccggtgttgaagtagcagggcgcgcggcgtcgcccggcgaagacgcggtcgccgagctgcgggtcggaccagaaggtctcggtgaagtagcgggagaagttggcgtggcagtactcgggcgcggccacgacggcggcggcgggcaggcgcgtctcccagaggcgcctcacgtcgtcgacggcgagcacgtcggagtcgaggtatatcgcccgcgggacgcacttggggagcaggtcggcgaggtagttcctggcgtagttgagcggcgcctcgagagcggcgcgcacggacgccgagatgagcccggtgaccgcgtcagcgcggaacgggtagatctcgaaccgaagcgacgggaacgacgccgccacggcggtcctcagctccccgaccccacccccgcacccctcgccgccgtccgccgccgccaggaagtggaagaatatcgactccgggcacgacgcgtgcttgagcagcgagtagatggccgccat

SEQ ID NO: 14564 - DNA, 3477 bp, Oryza sativa
  Clone ID: PAT_MRT4530_20490C.1
atggatcggatgatgttccgtttgtacagggttggtattaaactgccgacaattgaggtgaggtacaagaacctgaatgtagaagcagagtcatatgttggcagcaggggccttcccaccattctcaatacctatgccaacatattgaagaatgaccttgctattaggttctcctggctctggaaaaacatcactgttgttggccttggctggaacactcccatcaaccgtaaaattcgtgagacaatcaatttctctgcaaagtgtcaaggagttggccatcactatgatctgtttctagaactattgagaagagaagaggaagaaaacattacaccagatcctgaaactgatatatatttgaaggcagctacaacaggagaggagaaagctgagatagttacaaatcacatactaaagattttgcggttggatatatgcgccgacacaattgtagcccctaatgttgattctgcagctgagatgcttgtcacactaggacgagctcttttcatggacgagatatcaaatggacttgatagctcaacaacattccagatagtgaacaccatccaacaaaccattcatgttcttggtggaacagctgtcattgctttgctacagcctgcacccgagacatatgaattatttgatgatataattctcctctcagatggtcaagttgtctatagtggccctcgtgatcatgtgcttgagttctttaaatcgttgggattcaaatgcctagaaagaataggtgtagctgacttcttgcaagaagttacatcaaggaaagatcagaaacaatactggatacatggcgatgacacatatcgatatattcctgttacagtgattgccgaggcatttcagtgtttccatgtcggccaggcaataagaagtgagttggcaatcccatttgataacagcaagagccatattgcagcgctgaaaacatcaaagcatggtgtcaacttgaaaaaaatacttaaagctaacattgacagagagatattgctgttgaaaagaaaatcatttctatatatattcaatgcacttcagttaacactagtggcgataattgcaatgagtgtctttatccatacaaatatgcatcatgactcgatagaaaacgggaggatgtacatgggagtgcagttctttggtacgttggcaataatgtttaaagggttggcagaaatgggagcagctcttgcaaatctcccagtttttttcaagcaaagggatctactcttctatccagcatggacatattccttgccatcatggatcattaagactccaatctccttccttaatacaataatttgggtctccataacatactatgttattggatttgatccaaatatagagagatgttttagacaattccttgtgctttttgtaatgtccgaggcaatatgtggacttttccgtttcattgctgctcttacaaggcatccagttgttgcaagcaccgtgagtgaattctgtatactaatagttatggtttcaagcggattcatcctatcaagagatgaagttaaaaaatggctgatatgggagtactggacatcacccctgatgtatgcactaaatgccttagcagtaaatgaattcctaagtcccagctggaatgaggcactacctggttttagagaaccacttggaaggttagttctggaatctcgtggggttttcccggaggccaaatggtattggattggtcttggtgccttgcttggatatgtgcttctgttcaatatcctctacaccatctgcctctcaattctcacattacttaaaagaaatgtgcgagaaatgtctcaggaaacattgcagataaaactagaaaatttaaccggttatgatcaagagccatcatctggaggccgagttaccaatgataaaagatacactgagggtggcaacaatgatgaagcaacttcaagcaatgcaaatcataattctagtccagccaggaaaggaagtatcctgccttttgtacccgtttacatgacatttgaagatataagatacagtatagacatgccaaaggcactgaaagtacagggtatggcagggagtcggttggaactactgaaggatcttagtggttcatttaggccaggagtgcttacagcacttatgggtatcagtggtgcaggcaagacaacattgttggatgtgttagctgggaggaagaccagtggacacatacatggtaatattactgtatctggctatccgaagaagcaagaaacattttctcgagtttcaggatattgtgaacaaaatgatatccattcaccaaatctaactgtctatgaatcccttatgttctcagcatggcttagattaccagccgaaattgattctatggcaagaaagagatttattgatgagttcatggagcttgtggagctctttcccttaaaagatgcattggttggattgcttggcttgagtggattatcaactgaacaaaggaaacggctaacaatagcagtggaactagttgcaaacccatctatcatattcatggatgaaccaacatctggacttgatgcacgagcagcagccattgtcatgaggacactcttcctaatgaaaagaggaggtgaagcaatttatgtaggtccattaggacaacattcatgtgaattgatcaaatattttgagaaacatgctattgaactgctttcatttttaaagtctattgaaggtgtcaggaagataaaacatggctacaatccttcaacatggatgctggaagtgacttgtacattgcaggaacagataactggggttaactttactcaagtatacaagaattctgaactatataggaggaacaaaaatttgataaaggagttaagcacaccccatgacggttcaagcgacttattgtttccaactaaatattcacagacctttgttatacaatgtttggcttgcctctggaagcaacgtttgtcatattggaggaatcctccatatattgctgtgaatttcttcttcaccgttgtaattgcactattgtttggaacaatgttctggggcgttggtagaaaaagggaaagagcatctcacatgtactcgcctttgccatatgccttggggcaggtatggttctttggcatcatagtgtttacacatgaggctagatataatgtttcaagattgtgttcaatttctacaaaactaaaacccttgagaattccaatatggtggagatggtactattggatttgccctgttgcatggacaatcaatgggttggttacttcacagtttggggatgtagatgacaagtttgataacggtgtgcgtgtatctgactttgttgagagctactttggttacaatcttgacttgttatgggtggctgctatggccgttgtgtcatttgcaattctttttgccatccttttcggattctcacttaagctattcaacttccaaaagagataa

SEQ ID NO: 14565 - DNA, 1206 bp, Oryza sativa
  Clone ID: PAT_MRT4530_20491C.1
atggctgaatcctccgaatctgcgtggccgcagcagagtcagcagctgcagattagcagcacaatgccggccggttctgcatggccggaggaggagaatctcgagaatctcgagcagccgcttcccctgctgatgccatcgtcggaggatcatcgcgagcagcagcttgttcccgttccatggctgcagcaggatcaggatcaggagtggcatgagcaggagcagtttcttcccctcaaaaatcagaatcaggagcagcttcaggatcagcaacctctgcaggatcaggaggagacgcgtagatatttgggcgtgcccggaatccggttcgtgccgtcggatatagaacttatccttgacttcctccggccgaaactacgcggcgagcagctgcccagctacagctacatgcatgtctgcgacgtctactccgaccatcctaaagaacttacgagtaagctgggtcccagccgcgaaggaaactggtacatgttttcacctagaaaccggaaatacaacaaaggcaaaaggcctagccgaagcaccggtcaattgggtttttggaagtcgactaccaagaacgaggccgtccttgacgccctcagcgataacatgttgattggatacaaggcatgcctcacctatcacgaatacgatgagagcatgccgacgccaaagttgaagaaagagaacgcgatcaagacgccgtggaagatgtgggagttcgtgtgttccaactccaaccggccgttcgacgcggaggaggagcccatgcggctcaacgactgggtgttgtgcaaagttaccaacaaggacaacaaagttaccaccaagaagttcaaaccacaacgcagcaagaagccgaagaagccgaagaagctacagcaggaggaacagccacaaaaccaaggcattgtgatcaggcagccgtcagaatccggctcggcctcctcgtcgcaccaagaaatccctggctcttctcttcccggagccggaggagacgccgcggccgcggcggcgacggcggcggcggtggtggatcctatgccattgcatatgattcctccttcttcatggaattatttcagcacgggagttactgcagatggtattgttatggatgacagtacgggagtcgattcatatggttgtgtagatggtgctggtgctcttaatttccagaggaacatcttctaccaccgttaa

SEQ ID NO: 14566 - DNA, 1930 bp, Oryza sativa
  Clone ID: PAT_MRT4530_20492C.1
gggccggaattcccgggtcgacccacgcgtccgggggcattcgccagccacacctctctccatcctctcgttctctctctgtctcctcttctctctcccccgacggagaggagagaaggcgaggagccgggggagatgggatcggactcgccgcccaagaaatggggcctcagggagcagcgcgaagcctacctccggtggttctccctcgccgacgacgatggagatgggcgcgtgacggggaaagacgcgctcaagttcttcgccatgtcgaatctctcccgccccgagctgaagcaggtctgggcaatcgctgattccaagcgtcagggttatcttggattctcggagtttatgaccgcaatgcagctggtttctcttgcacaagctgggaatgagattagtcaggacacccttgcacatgcagatttggagacgttgctacctccgacaatggaaggtctggacaaaaaactaaaaaataattctatgagcaagagcaactctgatattgtcgtacgtcatccgtcagaattgcctgcatcagccaactggtttaactccaagtcaggaaagaagattcctttaagatcagttacttcgatcatcgatgggttaaagaaatcttacattgagaagttgaggccactagaaaaaacatatcagttcgatgactttgtttcacctttgctgactagcagtgatttcgatgcgaagccaatggtcatgttgctgggtcagtattccacaggaaaaaccacattcataaagcatttactgaagacaaattatccaggtgctcatattggtccagagcctacaactgacagatttgttgttattacttctggacctgatgaaagatgcatccctggaaacacaattgccgtgcaagcagacatgccatatagtggcttgtcatcttttgggacagcatttctatcaaagtttgaatgttctcagatgcctcatccactactggatcatataacctttgtggacactcctggagttttatcaggggaaaagcagcgaacacagcgtagctatgacttcactggagttacatcatggtttgcagccaagtgtgacctaattcttctcctatttgatccacataagcttgacatcagtgatgagttcaagcgtgtaattgggtcactcaaagggcatgatgataaaatacgtatagttctgaacaaagcagaccaagttgatgcacaacaactcatgagagtctatggagcactgctatggtcgcttgggaaagttctgaacacaccagaagtcatgcgtgtgtacataggttcatttaacgacaagcccattagggagacagtagctgggccactgggtaaagaactgtttgagaaagaacaagaagacctgctctccgacctgaatgacattccaaagaaagcctgtgaccgtcgaatcaacgaattcgtgaagcgttcgaggtcagccaaggtccatgctcacataatcagccacctgaagaaggagatgccggcgctgatgggcaaggccaaggcgcagcagcggctgctcgacaccctcgacgagcagttcgccaaggttcagaaggagctgcacttgccggccggcgacttccccagcgtggatgagtacagggagacactgagcgcctacaacttcgacaagttcgagaggctgaagcccaagctggtgcagggcgtcgacgacatgctcgcctacgacatccccgatctcctcaagagcttcaggaacccctacgaatgaatgagcaagcagcagcagtcagagaaggcgtgttcgaccacaatacaagcatggatctttcttgttcacaaaaaaagaatgtgatccgtgaatcgtcaatccatctcttttgtgctccacgaaggcgcgataaaaggctttttgttggcgatttacatcaaaaaag

SEQ ID NO: 14567 - DNA, 1177 bp, Oryza sativa
  Clone ID: PAT_MRT4530_20493C.1
caaggtttccggcttctggggaaaggagggtcacaagccccattgcataataagcccaaatctaaatgttggaggcgctctagatcaaaaggccagcaacgggaacactgggatcttgataaacggccgtgagattacgaaatctgagctgcaaatgcttaagttggcaggagttcaatgtgctggaaaacctcacttttgggtgaatgctgatgggacttaccaagaggaaggacaaaaaacagttaaaggcaagatttgggataagcctattgtgaagctgcttagtcctgtcctatcactgccaatgcctcccacgcgtccgaatcaatgcggtgaagagccagtgaatgtggtaaatcgacccatccctgactacttggagcaaaggaccattcagaagctcctgttggttggatcagggacaaacaccatactcaagcaggccaagttcttgtacaagagcagaccattttctgtagaggagtgtgaagatctcagacttatcatacaaagtaacatatacaactaccttggtatactacttgaagggcgtgaaagatttgaagaggaagctatagctgacagaagaactacctgccaaagtgatccttctagctctggccattgtgaaccagagctttgtaatgacattactgagtactatattgctccacgcctgaaagcattctctgattggattctaaaagctatggccataggtaatcttgaagacattttccctgcagctagtcgtgaatatgcaccaatggttgaggaactatggaaagatcctgctattcaagctacatataaccggagaagtgaactgccattccttccatctgctgctagttatttccttgacaaggctgttgatatttcccgaacggaatatgagctctctgatatggatatcctttacgctgatgggataacatcctcagatgggttagcatctacagatttctccttcccacaactggctttggacgggcggggttttgatgagccagatccacaagacactttgctaaggtctgttcttaagtcactgaaaagggcatggtagtctaaataacctgtgtttctagtctttctgtaactttcatctttgttaatgataacagtatgaacaatgaaacattttgttctattttcaggtaccaactaataa

SEQ ID NO: 14568 - DNA, 622 bp, Oryza sativa
  Clone ID: PAT_MRT4530_20494C.1
acattaggatcatgagttcgtttttctaccaacgcgccatctagagtacgattcttcttctggctggctgcaagaggaaggtgtcagacagcagataatctggcgaagaaggggtggccacatgaagacagctgcgcactttgtatgcgcgaacaggaagactgccatcatctatttgttacctgcgaattctctgggagagtctgggaactaatgcgtgcttggatcagtgtcgacttcccgatcccaggtcagattgattgcagtctaatcgattggtggtttgaagccaggcgctgttttcggacgggctatagggaaatcttcgatgctgtcctcatgttagtatgctggttgatatggaaggagcgcaatgctcggattttcgagcaaaggttgcgttcccctgagcaattggtggaagacatcaaggaggagatcaatgtctggaggtcagcagcagttttcaaagaagtgcaacaccaatagcttgtaattgcagtcacagaacatgaataccacacagactctcattgcagtgactatgcaaaatacagagttgcagtgcggtttaccgaaacatttactgacaccagtagctctgtcaatgaaaaccttggta

SEQ ID NO: 14569 - DNA, 2481 bp, Oryza sativa
  Clone ID: PAT_MRT4530_20495C.1
atggcggaggagaaagaaagctttgaaggccaatgggcgccatccgacgtaacggaagagaacttgaaggagatggtggcgcacggcgttctcccagccaaggagatcattgggtggcggccagcgtgcggtgaggcttttccgacccctgatacacatgagatcgtggtcttctcgcatttcttctacggcggctttgctcttccgacctcaaaatttttccgcgggatcttgaatttctatggaatcagcttgcatcacctaaacccgaattccatagtgcatatcgccaatttcgtccatgtttgtgaagcctttttagggatcaaacctcactttgccctattccgccggatcttcttcctcaagccccaaccaaacaagaacaaaccgtgtgtagtcgggggggcaggattccaactaaggggaactctgagccaaaaatatttctcgatgcccttcaagacttcgaacaaaggatggcatgcaaactggttctatgttcagaatcccgagcctgctcttcccgggtacacttgtcttcctccagtgtaccaagatacttggaactctcttccaatcggagatgaagcagtacaagccttggagttgttggatcgtatgttaaatcttaaagaacaaggattacagggagagcaaatcactcggcacttcatcaaatgccgactggcgccaatcaaggaaagatcccgcacagcattcgagttcgacggcaaacatgatcccaaccgtgaagaaccagactccctggatttcaaaatcatgaaggagaggatgtataaaatcttctcaaatgcaattgtagtcagctactctcaccaactgccagttgtgccatataatgcattcaatccgcctccacaggaatatgcattgatgaagtcagatccaccagtcactcatcgccggtctcctcgccaacacaccgctcagggaggtggagggccaacgatcagaccagatccgcaacctcagacctccaaattgactggtcaaacaggtcctcgcaagagaaagctggtacttgatgatgatgaaggcgacgatgataaatctggggataagggctcgcctaataaacccccaaagcgtaccatgcccaggaaaaaactggctggccgtgcaatgccaaagatcagaacatcttccaggaaaccatctgatatagatccatctgggaaagaccccgatcctgccatgacagagcaaaatatatccaaggaccccgagccgactgctgaaaaccagccgactgctgaaagccagccgactggcgcccatacttcgggcgataggaccaatccgagtgacctgccgccgactggaaaccagtcggcaacaactgaaacggcaacaactcaagagcccccgactggaaatcagtcggatgcaggtcctgatcaagagatccccgaagtagaagcgcagacgacgacttcgcaaggaccagaggctggtaacgactcgataatcgggtctccaaataaagaacaaagatcacctcacgctcagctaggtacatcttcaggaccatcaggtgatgacggagaggaaatccctcgcataaaggcaaccgacgactctcgtcctcctatcttgatcaaatggtgggacgagaactcacaagccgccggtatagtcataaaccgtcaaaaagaagatgaagaagtgtgccagctgaagaaagcgctcggagaagccactcgtattgtaaatagaatccatcttcgcaatgaggccaaaaccgcaactttagaaaggctggttcctcatttgggaactcttgaagcggttagggaccagctacatgaggccaaggagcacgccaagaagacggagaaggaattaagggaccgaatcgctcagctccaggattcaaactatgagctgagtggttcatcaaaagcgcaagccgccaggatggaacagatggcgaagcaaattgaagccctggagagagacaagacagaactggctgcgcaaagggactcagccttaaaggaagttgaagatcgcaaaataaaatcgcaagcccaatttgacgtcttggttggtaagatcaagaggcttgaaggagcaagggataacgtcgccaatgccgctgcaccaattatccaagccatgttcctcaataatggtggtccgagtgcactcgacgcaaccgaaatatttgacaagctgagtgttgctccggaagtatatttcaagaatatcaagaaagctggaagtatgggagctggcatggccttggcgatgacaaaatccttgtacccgagaattgaagtcgacaccattgatggatttgcagacgggacaagtgaagaagctgcccttgatcttatcagcagtgcgcaaaatgcggctgacaaaattgcgagcgatgttgtagagcaatttcgcaacaacgacctccagccgagtaatgaagactctgatgatgaaaggactgattctgactga

SEQ ID NO: 14570 - DNA, 431 bp, Oryza sativa
  Clone ID: PAT_MRT4530_20496C.1
tggagtctcgcgtgcggaggcaggcaggtgccgcaagccggagacggacgacgctcttgacgctgccgttgagcaggcccagcgggagctctatcttggcgagggactccgagaactggtgcatgctcttgatggacatgatcatgatcttcttctgggggaccttgacctcctgctagaggttgacgcggatgaccggtggattatccaccgagcttttggacatggcgccaggggagttcgccctcgggctggcgctgctctggacggtgcggaaggactccaccttcgcgtcggtggggaacgaggcggccttgtccttctgctgcgacgacgagacggcattgcccgaggagacggactggggggcggccgggaccgacctggaggtcagcgactcactggaggacacgctgctgaccggggtgtca

SEQ ID NO: 14571 - DNA, 950 bp, Oryza sativa
  Clone ID: PAT_MRT4530_20497C.1
ataatttggtagtagtgagcaagtgaaactgcaagtgagctaaggtgcaagaagagagaggtggagatggattggtacgcgtggctggcgaagaccgggttggcgccggcgctggcgtacgagtacggccgcctcttcaaccagaacgagctggagcgcggcgacgccgcgcacttcgaccacgacctcctcaagagcatgggcatcgccgtcgccaagcaccgcctcgagatcctcaagctcgccaagaaggactcctcctccgccgccgacgcaggcggtggcgactcctcgtcgtcgtcgtacgcgcagctgatcgcgcgcaaggccgggaggtgcatcgcgcggtgcgcgcggcggctggcgcgaccgcggggtgtcggtggagggagggggtcgtcggtgaccgtggtgccgaggatatgcagcggcgacgacgccgtccgcgtgggggcagtgcaggcggcggcgacgaggaggaggaggagcgtcaagaagatggtgctcatgatcaccgacggcggcgccaccgccgcgaggggcggcgtcggcttcgccgccggccggttctcggggtcgcagaaggcgagcctgatgttccacgactgctacgaggaggaggacgacgactacgaccacgaggaggaagcgcggtgcggcgacggagccgagggcggcgacgaggatgccgaggaggaacggtgctccgacggcggcggcggcggcggcaccgacgtcgagatcaagtgggactccatgttccaggacctgaagccgacgtgattgagttgaggcaatttgattaattcgcgagtttgtgtgtagctttttgtgagagaatttttacatctctctttgtggtgcgagagcttaattaggatggtaatgtgtacgtgtctatttgccatgagtttagacgataataatatcgagcgcaaatgttttgagtg

SEQ ID NO: 14572 - DNA, 494 bp, Oryza sativa
  Clone ID: PAT_MRT4530_20498C.1
ccggccgggcacccacttccagcacgccctggtatgcaggtaccctctctggcatcctgcttgatgcatgccaattcaggaggacctcacacagtcacacacatagtgagatcaatttgcatagatttaattatagccatttgctgtgtagcatgaattggtatgtacttatgcattaattctgaagttcacttgcaatttttgacaaaagtgcttttagtaacatgtatgtacaagactgaaagatgaaatataaatgtggcttgattcagaagttgcatgaatttcaatttgcttcacccagagagaccacttaacttcttttacgaaatttgagtgacttgatttaaggtaatctatttatcacaaatattatgtcacatggattccacgtgcatacttactaactgggcctggcaacctttaatggaacgcttaacctgcacgtatttataccacaatatataattaacttacccattttgggaaaacct

SEQ ID NO: 14573 - DNA, 2439 bp, Oryza sativa
  Clone ID: PAT_MRT4530_20499C.1
atggcggaagagagagaaagcttcgaaggtcaatgggcgccatccgacgtaacggaagagaacttgaaggagatggtggcgcacggcgttctcccagccaaggagatcatcgggtggcggccagcgagcggtgagacttttccgacccctgatacacatgagatcgtagtcttctcgcatttcttctatggcggcttcgctcttccgacctcgaaatttttccgcgggatcctgaatttctacggaatcagcttacatcacctaaacccgaattccatagtgcatatcgccaacttcgtccatgtttgtgaagcctttttggggatcaaacctcactttgccctattccgccggatcttcttcctcaaaccccaaccaaacaagaacaaaccgtgtgtagtcggggggggggcaggattccaactaaggggaactctgagtcaaaaatatttctcgatgcccttcaagacttcgaacaaaggatggcatgcaaactggttctatgttcagaatcccgagcctgctcttcccgggtactcttgtcttcctccagtgtaccaagatacttggaattctcttccgatcggagatgaagcagtacaagccttggagttgttggatcgtatgttaaatcttaaagaacaaggcttacagggagagcagatcactcggcacttcattaaatgccgactggcgccaatcaaggaaagatcccgcacagcattcgagttcgacggcaaacatgatcccaaccgtgaagaaccagactccctggatttcaaaatcatgaaggagaggatgtataaaatcttctcaaatgcaattgtagtcagctactctcatcaactgccagtcgtgccatataatgcattcaatccgcctccacaggaatatgcattgatgaagtcagatccaccagtctctcagcgccggtctcctcgccaacacaccgctcagggaggcggagggccaacgatcagaccagatccgcaacctcagacctccaaattggctggtcaaacaggtcctcgtaaaagaaagctggtacttgatgatgatggaggcgacgatgataaatctggggataagggctcgcctaataaacccccaaagcgtaccatgcccaggaaaaaactggctggccgtgcgataccaaagatcagaacatcctccaggaaaccatctgatatagatccatctggaaaagaccctgatccggctatgacagagcaaaatatatccaaggaccccgagccgactaatgaaaaccagccgactgctgaaagccagccgactggcgcccatgcttcaggagatagggccaatccgagtgacctgccgccgactggaaaccagtcggcaacgactgaaacggcaacaactcaagagccctcgactggaaaccagtcggacgcaggccctgatccagagattcccgaagtagaagcgcagacgacgacttcacaaggaccagaggttggtaacgactcgatagctgggtcttcaggaccatcagatgatgacggggaagaaattcctcgcataaaggcgaccgacgactctcgtcctcctatcttgatcaaatggtgggatgagaactcacaagccgccggtatagtcataaaccgtcaaaaagaagatgaagaagtgtgccagctaaagaaagcgcttggagaagccactcgtattgtaaatagaatccatcttcgcaatgaggccaagactacaactttggaaaagctggttcctcatttgggaactctagaagcagtcagggaccagctgcatgaggccaaggagtgcgccaaaaagacagaaaaagagttaagggaccaaatcgcccagctccaggatgcaaacttcgaactaagtggttcttcaaaagcgcaagccgccaggatggaacagatggcgaggcaaattgaagccctggagagagacaagacagaactggctgcgcaaagggactcagccttgaaggaagtcgaagatcgcaagatcaaatctcaagctcagtttgacgtcctggttggtaagatcaagaggcttgaaggagcaagggatgacgtcgccaacgccgctgcaccaattatccaagccatgttcctcaataatggtggtccgagtgcactcgacgcaaccgaaatatttgacaagctgagtgttgctccggaagtatatttcaagaatatcaagaaagctggaagtatgggagctggcatggccttggcgatgacaaaattcttgtacccgagaattgaagtcgacaccattgatggatttgcagacgggacaagtgaagaagctgccctcgatcttatcagcagtgcgcaaaatgcggccgacaaaattgcgagcgatgttgtagagcaatttcgcaacaacgacctccagccgagtaatgaagactctgatgatgaaagaactgattctgactga

SEQ ID NO: 14574 - DNA, 142 bp, Oryza sativa
  Clone ID: PAT_MRT4530_2049C.1
ccatccttcgttcgctcatcgcgtctcgactccactactgtggttgcatatactactacacttgcagttgcatgcagagctcgtcgcgcggctctaatggataggccgcgccgcagaccctagccgtctccaacacttttga

SEQ ID NO: 14575 - DNA, 1008 bp, Oryza sativa
  Clone ID: PAT_MRT4530_204C.1
ccctggcggaacccgcacccttcagcaacagcttagaattcagctcagtaaatctgttgattgctcgtttcaaatcatcatcggtgtttcgtttcttgatttcttgatccatccatggcgacgacagtggattggtgtggccgtggcagcaatcttcctgctgcgatgtatgacatggtggtggatagcaaggagctaatgggcgcgcttgctccgtccatggtgtccttctcctacccgtgttccgagcagagcgcgagctcgcttcttgctggcgccaactacctgactcccgcgcaggtgctccatgtccaggcgcagctacagcgcctgcgccgcccgggcgcggcgagcggctgcctcgccgcggcgccgccgctgccgatgaagcggcatggcgcggtggcggtggcggcggcggcggcggcgcgggcgccggtcaagctgtaccgcggcgtcaggcagcggcattggggcaagtgggtggcggagatccgcctgccgcgcaaccgcacccgcctctggctgggcaccttcgacaccgccgaggaggccgcgctggcgtacgacagcgccgcgttccgcctccgcggcgagtccgcgaggctcaacttccccgagctccgccgcggcggcgcccacctcggcccgccgctccacgccgcggtcgacgccaagctccacgccatctgccacgggatggacctgccccaaccccaaccccaaacccagagcaatgcgacgacgacgacgatgtcgacgacggcgacgaacaccccaagccccttcttctcctcggagagcccggtggtcaagagcgagcccgtctgctccgcctccgagagctcttcctcggccgacggcgacgtgtcatcgacgggctcctccgacgtcgtcccggagatgcagctgctcgacttctcggaggcgccatgggacgagtccgagagcttcctgctgcacaagtacccgtcgctggagatcgactgggacgcgatcctttcctga

SEQ ID NO: 14576 - DNA, 1938 bp, Oryza sativa
  Clone ID: PAT_MRT4530_20500C.1
atggcggaagagagagaaagcttcgaaagccaatgggcgacatccgacgtgacggaggagaatctgaaggagatggtggcgcacggcgttcttcctgccaaggagatcatcgggtggcggccagcgcatggtgaggcttttccgtctccggatactcatgaaatcgtggtcttctcgcatttcttctacggcggctttgctcttccgacctcaaaatttttccgcgggatcttgaatttctatggaatcagcttgcatcacctaaacccgaattccatagtgcatatcgccaatttcgtccatgtttgtgaagcctttttggggatcaaacctcactttgccctattccgccggatcttcttcctcaagccccaaccaaacaagaacaaaccgtgtgtagtcgggggggcaggattccaactaaggggaactctgagccaaaaatatttctcgatgcccttcaagacttcgaacaaaggatggcatgcaaactggttctatgttcagaatcccgagcctgctcttcccgggtacacttgtcttcctccagtgtaccaagatatttggaactcttttccaatcggagatgaagcagtacaagccttggagttgctggatcgtatgttaaatcttaaagaacaaggcctacagggagagcaaatcactcggcacttcatcaaatgccgactggcgccaatcaaggaaagatcccgcacagcattcgagttcgacggcaaacatgatcccaaccgtgaagaaccagactccctggatttcaaaatcatgaaggagaggatgtataaaatcttctcaaatgcaattgtagtcagctactctcaccaactgccagttgtgccatataatgcattcaatccgcctccacaggaatatgcattgatgaagtcagatccaccagtctctcagcgccggtctcctcgccaacacaccgctcagggaggcggagggccaacgatcagaccagatccgcaacctcagacctccaaattgactggtcaaacaggtcctcgcaagagaaagctggtacttgatgatgatgaaggcgacgataataaatctggggataagggctcgcctaataaacccccaaagcgtaccatgcccaggaaaaaactggctggccgtgcaatgccaaagatcagaacatcttccaggaaaccatctgatatagatccaactggaaaagatcctgatccagctgcgacagaagcaaatgtatccaaggattctgagccgactgccgaaagccagccgactgccgaaagccagccgacgggcgcccatgcttcgggtgacaaggccaacccgagtgaccagccgccgactggaaaccggtcggcaacaactgaagcagcaacaacccaagagcccccgactggaaaccagtcggatgtaggtcctgatcaagagatccccgaagtagaagcgcagacgacgacttcgcaagggccagaggctggtaacgactcgataatcgggtctccaaataaagaacaaggatcacctcacgtccagctaggaacaccttcaggaccatcaggtgatgacggagaagaaattcctcgcataaaggcgaccgacgactctcgtcctcctatcttgatcaaatggtgggacgagaactcacaagccgccggtatagtcataaaccgtcaaaaagaagacgaagaagtgtgccagctgaagaaggcgcttggagaagccactcgtattgtaaatagaatccatcttcgcaatgaggccaaaaccgcaactttagaaaggctggttcctcatttgggaactcttgaagcggttagggaccagctacatgaggccaaggagcacgccaagaagacggagaaggagttaagggaccgaatcgctcagctccaggattcaaactatgagctgagtggttcatcaaaaggtaatccctag

SEQ ID NO: 14577 - DNA, 2481 bp, Oryza sativa
  Clone ID: PAT_MRT4530_20501C.1
atggcggaagagagagaaagcttcgaaagccaatgggcgccgtccgacgtgacggaggagaacctgaaggagatggtggcgcacggcgttctcccagccaaggagatcatcgggtggcggccagcgtgcggtgaggctttcccgacccctgatacacatgagatcgtagtcttctcgcatttcttctacggcggctttgctcttccgacctcaaaatttttccgggggatcttgaatttctatggaatcagcttgcatcacctaaacccgaattccatagtgcatatcgccaatttcgtccatgtttgcgaagcctttttggggatcaaacctcactttgccctattccgccggatcttcttcctcaagccccaaccaaacaagaacaaaccgtgcgtagtcgggggggcaggattccaactgaggggaactctgagccaaaaatatttctcgatgcccttcaagacctcgaacaaaggatggcatgcaaactggttctatgttcagaatcccgagcctgctcttcccgggtacacttgtcttcctccagtgtaccaagatatttggaactctcttccaatcggagatgaagcagcacaagccttggagttgctggatcgcatgttaaatcttaaagaacaaggcttacagggagagcaaatcactcggcacttcatcaaatgccgactggcgccactcaaggaaagatcccgcacagcattcgaattcgacggcaagcatgatccaaaccgtgaagacccagactctctagactttaaaatcatgaaggagaggatgtacaagatattctcgaatgctatcgtcgttagctactcacaccagctgccagtcgtgccatacaacgcattcaatccgcctccgcaggaatatgcattgatgaagtcagatccaccagtctctcagcgccggtctcctcgccaacacaccgctcagggaggtggagggccaacgatcagaccagacccgcaacctcagacctctaaattggctggtcaaacaggtcctcgcaagagaaaactggtacttgatgatgatgaaggcgacgatgataaatctggggataagggctcgcctagtaaacccccaaagcgtaccatgcccaggaaaaaactggctggccgtgcaatgccaaagatcagaacatcttccaggaaaccatctgatatagatccatctggaaaagaccctgatccggctatgacagagcagaacatatccaaggaccccgagccgaccactgaaaaccagccgacggctgaaagccagccgactggcgcccatgcttcgggagatagggcgaatccgagtgacctgccgccgactggaaaccagtcggcaacaactgaaacggcaacaactcaagagcccccgactggaaaccagtcggacgcaggccctaatcaagagatccccgaagtagaagcgcagacgacgacttcgcaaggaccagaggctggtaacgactcgatagctgggtcttcgggtaaagaacaaagatcacctcacgcccagctaggtacatcttcaggactatcaggtgatgacggagaagaaatccctcgtataaaggcgaccgacagctctcgtcctcctatcttgatcaaatggtgggacgagaattcacaagccgccggcatagtcataaaccgtcaaaaagaagatgaagaagtgtgccagctgaagaaagcgctcggagaagccactcgtattgtaaatagaatccatcttcgcaatgaggccaagactacaactttggaaaagctggttcctcatttgggaactctagaagcagtcagggaccagctgcatgaggccaaggagtgcgccaaaaagacagagaaagagctaagggaccgaatcgcccagctccaggatgcaaacttcgaactaagtggttcatcaaaagcgcaagccactagaatggctcagatggaaaaacagattgaagccttgaaaaaagacaaggtagaacttgctgcagaaagggactcagccttgaaggaggttgaagatcgcaagatcaaatctcaagctcagtttgacgtcctggttggtaagatcaagaggcttgaaggagcaagagataacgtcgccaatgccgctgcaccacttatccaagccatgttcctcaataatggtggtccgagtgcactcgacgcaaccgaaatatttgacaagctgagtgttgctccggaagtatatttcaagaatatcaagaaagctggaagtatgggagctggcatggccttggcgatgacaaaatccttgtacccgagaattgaaatcgacaccattgatggatttgcagacgggacaagcgaagaagctgcccttgatcttatcagtagtgcgcaaactgcggctgacaaaattgcgagtgatgttgtggagcaatttcgcaacaacgacctccagccgagtaatgatgaatctgatgatgaaagaactgattccgactga

SEQ ID NO: 14578 - DNA, 611 bp, Oryza sativa
  Clone ID: PAT_MRT4530_20502C.1
ttatattaccaaaagagaaaaagctctagctaccgagcaacgacatgcataagagctatagctagccagctagggttgtcttctcggtgatgctgtgcagcctgcatgctcttatgtgattcaaggttgaacatgtagtgtgctcataattatgcagtagtgatgtttggaatagaggtgtatatatatatgaatgttttcagtgaaaactttctgtattttttttttaactaacttccatctccagtatggtttttttaatttgcccttatccgcaggttcaatcatgatttgtcttggtataaagtccgaagaagctctaggacgaactgatgctagattacgtacaataactcagatctgatcgagtagcttggtttaaccttctgcatacgctttcaagaatgtatgtataagagatgaagtggggataagaagtaacctggatgcggttatgcatgttttgttttactgtatattttgtatctagcaagattaattgttggctgaacacagaacatacacacatgcatgcatgatactttgggatgagcaaaggcaatatttaactgtgtttatgttctactctacgagattattaaaaaaaaaaa

SEQ ID NO: 14579 - DNA, 1289 bp, Oryza sativa
  Clone ID: PAT_MRT4530_20503C.1
aggataaagaactagctgaggagacgacagaaggtgaaactacagctgaagtacaggttgcggagactacttcaactgagaaaattgtagaggataaagaactagctgaggagacaacagaaggtgaagctacagctgaagtacacattgaagaaacttcaacaactgaaagaactgtagaggataaagtggtacctgaggagacaacggaaggtgaagctactgctgaagtactcgaggaatgtacagccattgagaaaattgtagaggataataccatagctgaggagattacagaaggtgaaactgtagctgaagtacatgttgaggtagctacagcaattgataaagctgtagaggaaaacacactagctgaggagacagctaaaggtgaaactacacctgaagtacacgttgaggaaactacaacagcagaggaatctgtgggggacaaagcagtagatgagacaacaaaaggtgaaactacagctgaagtatatgctgaagaatcaaccgagaaaactgtagaggataccacagttgaggcaccagatgagaaaactaaaacagccaatgatcctgtagaggatgccaccgttgaagagccagataagaaaaccgcagccaatgatcctgcagaggatgccacagtcgaagagccagataagaaaaccgcagccaatgatcatgtagaggatgctacccttgaagagccagataagaaaactgcagccaatgatcatgtagaggatgtgactgttgaagagccagataagaaaaccgcagccaatgatcctgtagaggaagtcatccctgaagagacagataagaacaccacaaccaatgatccagtagaggatgtgactattgaagagccagatatgaaaaccgaagccaatgatcctgtagaggaagccaccgttgaagagccagctgtggaagctgggacaattgaagagattgctacggctgaagcacgagatgagaaaaccatgataaccgaggaaactgcacaggatcccatggttgaagatgagaaaaccatgacaaccgaggaaaccgtacaggagcccatggttgaagatgagaaaaccgtgacaacggaggaaactgtacaggatcccatggttgtagatgacaaaaccatgacaaccgagaaaactgtacaggattccatggttgaagaaggtggtacgaatatcgcagctgctgaggaaactgtagagcatgctgctgctactgctgaggctttggctggacaagcaagttcaaccgagcagaacgggtag

SEQ ID NO: 14580 - DNA, 2355 bp, Oryza sativa
  Clone ID: PAT_MRT4530_20504C.1
atggcggaagagagagaaagcttcgaaggccaatgggcgtcatccgacgtaacggaggaggatcttaaggagatggtggcgcacggcgttctccctgccaaggagatcatcgggtggcgaccagcgcacggtgaggctttcccgtctccggatactcatgagattgtggtcttctcgcatttcttctacggcggctttgctcttccgacctcaaaatttttccgcgggatcttgaatttctatggaatcagcttgcatcacctaaacccgaattccatagtgcatatcgccaatttcgtccatgcttgtgaagcctttttggggatcaaacctcactttgccctattccgccggatcttcttcctcaagccccaaccaaacaagaacaaaccgtgtgtagtcgggggggcaggattccaactaaggggaactctgagccaaaaatatttctcgatgcccttcaagacttcgaacaaaggatggcatgcaaactggttctatgttcagaatcccgagcctgctctccccgggtactcttgtcttcctccagtgtaccaagatacttggaactctcttccaatcggagatgaagcagtacaagccttggagttgttggatcgtatgttaaatcttaaagaacaaggcttacagggagagcagatcactcggcacttcatcaaatgccgactggcgccaatcaaggaaagatcccgcacagcattcgagttcgacggcaaacatgatcctaaccgtgaagaaccagattccctggatttcaaaatcatgaaggagaggatgtataaaatcttctcaaatgcaattgtagtcagctactctcatcaactgccagttgtgccatataatgcattcaatccgcctccacaggaatatgcattgatgaagtcagatccaccagtcactcagcgccggtctcctcgccaacacaccgctcagggaggtggagggccaacgatcagaccagatccgcaacctcagacctccaaattgactggtcaaacaggtcctcgcaagagaaagctggtacttgatgatgatgaaggcgacgatgataaatctggggataagggctcgcctaataaacccccaaagcgcaccatgcccaggaaaaaactagctggccgtgcaatgccaaagatcagaacatcttccaggaaaccatctgatatagatccatctggaaaagaccccgatcctggcatgacagagcaaaatatatccaaggaccccgagccgactgttgaaaaccagccgaccactgaaagccagccgactggtgcccatgcttcgggcgatagggccgatccgagtgacctgccgccgactggaaaccagtcggcaacaactgaaacggcaacaactcaagagcccccgactggaaaccagtcggacgcaggccctgatcaagagatccccgaagtagaagcgcagacgacgacttcgcaaggaccagaggctggtaatgactcgatagctgggtcttcaggaccgtcaggtgatgacggagaagaaatccctcgcataaaggcgaccgacgactctcgtcctcctatcttgatcaaatgcagaactgaaccacgatccatcatgcagagaatccatcttcgcaatgaggccaagactacaactttggaaaagctggttcctcatttgggaaccctagaagcagttagggaccagctgcatgaggccaaggagtgcgccaaaaagacagagaaagagttaagggaccgaatcgcccagctccaggatgcaaacttcgaactaagtggttcatcaaaagcgcaagccgccagggtggaacagatggcggagcaaattgaagccctggagagagacaagacagagctggctgcgcaaagggactcagccttgaaggaagtcgaagatcgcaagatcaaatctcaagctcagtttgacgtcctggttggtaagatcaagaggcttgaaggagcaagggatgacgtcgccaatgccgctgcaccaattatccaagccatgttcctcaataatggtggtccgagtgcactcgacgcaaccgaaatatttgacaagctgagtgttgctccggaagtatatttcaagaatatcaagaaagctggaagtatgggagctggcatggccttggcgatgacaaaatccttgtacccgagaattgaagtcgacaccattgatggatttgcagacgggacaagtgaagaagctgcccttgatcttatcagcagtgcgcaaaatgcggctgacaaaattgcgagtgatgttgtggagcaatttcgcaacaacgacctccagccgagtaatgaagactctgatgatgaaaggactgattctgactga

SEQ ID NO: 14581 - DNA, 213 bp, Oryza sativa
  Clone ID: PAT_MRT4530_20505C.1
atggcggcggctagaggaggggtcagaggttggcacgatgctttgaggcgtgacagccggtggctggaggccggcttggcgcggttggtggcggaggaggcgggcaaggcgcgacgaggcgttgccggcggtggaggaggcgagcacggtgcgacgaggaggagcttccggtgggttcggtttggtctacggcgcaagaaggctggctggtga

SEQ ID NO: 14582 - DNA, 1595 bp, Oryza sativa
  Clone ID: PAT_MRT4530_20506C.1
cccatgagatagtagaagataaaggtactgctgaagtactggctagggagacaggtgatagtataactggacctggagcactagatgagaaaacagaaaaggaagctactgctgaagcactagctgacaagacgacagaaggtgaaattacagctgaagtacaggttgaggagactactacaactgagaaaattgtagaggataaagaactagctgaggagacgacagaaggtgaaactacagctgaagtacaggttgcggagactacttcaactgagaaaattgtagaggataaagaactagctgaggagacaacagaaggtgaagctacagctgaagtacacattgaagaaacttcaacaactgaaagaactgtagaggataaagtggtacctgaggagacaacggaaggtgaagctactgctgaagtactcgaggaatgtacagccattgagaaaattgtagaggataataccatagctgaggagattacagaaggtgaaactgtagctgaagtacatgttgaggtagctacagcaattgataaagctgtagaggaaaacacactagctgaggagacagctaaaggtgaaactacacctgaagtacacgttgaggaaactacaacagcagaggaatctgtgggggacaaagcagtagatgagacaacaaaaggtgaaactacagctgaagtatatgctgaagaatcaaccgagaaaactgtagaggataccacagttgaggcaccagatgagaaaactaaaacagccaatgatcctgtagaggatgccaccgttgaagagccagataagaaaaccgcagccaatgatcctgtagaggatgccaccgttgaagagccagataagaaaaccgcagccaatgatcctgtagaggatgccaccgttgaagagccagataagaaaaccgcagccaatgatcctgcagaggatgccacagtcgaagagccagataagaaaaccgcagccaatgatcatgtagaggatgctacccttgaagagccagataagaaaactgcagccaatgatcatgtagaggatgtgactgttgaagagccagataagaaaaccgcagccaatgatcctgtagaggaagtcatccctgaagagacagataagaacaccacaaccaatgatccagtagaggatgtgactattgaagagccagatatgaaaaccgaagccaatgatcctgtagaggaagccaccgttgaagagccagctgtggaagctgggacaattgaagagattgctacggctgaagcacgagatgagaaaaccatgataaccgaggaaactgcacaggatcccatggttgaagatgagaaaaccatgacaaccgaggaaaccgtacaggagcccatggttgaagatgagaaaaccgtgacaacggaggaaactgtacaggatcccatggttgtagatgacaaaaccatgacaaccgagaaaactgtacaggattccatggttgaagaaggtggtacgaatatcgcagctgctgaggaaactgtagagcatgctgctgctactgctgaggctttggctggacaagcaagttcaaccgagcagaacgggtag

SEQ ID NO: 14583 - DNA, 2436 bp, Oryza sativa
  Clone ID: PAT_MRT4530_20507C.1
atggcggaagagagagaaagcttcgaaggccaatgggcgtcatccgacgtaacggaggagaatcttaaggagatggtggcgcacggcgttctccctgccaaggagatcatcgggtggcgaccagcgcacggtgaggctttcccgtctccggatactcatgagattgtggtcttctcgcatttcttctacggcggctttgctcttccgacctcaaaatttttccgtgggatcttgaatttctatggaatcagcttgcatcacctaaacccgaattccatagtgcatatcgccaatttcgtccatgcttgtgaagcctttttggggatcaaacctcactttgccctattccgccggatcttcttcctcaagccccaaccaaacaagaacaaaccttgtgtagtcgggggggcaggattccaactaagaggaactctgagccaaaaatatttctcgatgcccttcaagacttcgaacaaaggatggcatgcgaactggttctatgttcagaatcccgagcctgctcttcccgggtactcttgtcttcctccagtgtaccaagatacttggaactctcttccaatcggagatgaagcagtacaagccttggagttgttggatcgtatgttaaatcttaaagaacaaggcttacagggagagcaaatcactcggcacttcataaaatgccgactggcgccaatcaaggaaagatcccgcacagcattcgagttcgacggcaaacatgatcccaaccgtgaagaaccagattccctggatttcaaaatcatgaaggagaggatgtataaaatcttctcaaatgcaattgtagtcaactactctcaccaactgccagttgtgccatataatgcattcaatccgcctccacaggaatatgcattgatgaagtcagatccaccagtcactcagcgccggtctcctcgccaacacaccgctcagggaggtggagggccaacgatcagaccagatccgcaacctcagacctccaaattgactggtcaaacaggtcctcgcaagaggaagctggtacttgatgacgatgaaggcgacgatgataaatctggggataagggctcgcctaataaacccccaaagcgtaccatgcccaggaaaaaactggctggccgtgcaatgccaaagatcagaacatcttccaggaaaccatctgatatagatccatctggaaaagaccccgatcctgccatgacagagcaaaatatatccaaggaccccgagccgactgctgaaaaccagccgactgctgaaggccagccgactggcgcccatacttcgggcgataggaccaatccgagtgacctgccgccgactggaaaccagtcggcaacaactgaaacggcaacaactcaagagcccccgactggaaaccagtcggacgcaggccctgatcaagagatccccgaagtagaagcgcagacgacgacttcgcaaggaccagaggctggtaacgactcgatagctgggtcttcaggaccatcaggtgatgacggagaggaaatccctcgcataaaggcaaccgacgactctcgtcctcctatcttgatcaaatggtgggacgagaactcacaagccgccggtatagtcataaaccgtcaaaaagaagatgaagaagtgtgccagctgaagaaagcgctcggagaagccactcgtattgtaaatagaatccatcttcgtaatgaggccaagactacaaccttagaaaagctggttccacatttgggaactcttgaatccgttagggaacagctacacgaggccaaggagtatgccaagaaaacggagaaggaattaagggaaagaattgcacagctccaggactccaacttcgagctgagtggttcatcaaaagcgcaagccgccaggatggaacagatggcgaagcaaattgaagccctggagagagacaagacagaactggctgcgcaaagggactcagccttaaaggaagttgaagatcgcaaaataaaatcgcaagcccaatttgacgtcttggttggtaagatcaagaggcttgaaggagcaagggataacgtcgccaatgccgctgcaccaattatccaagccatgttcctcaataatggtggtccgagtgcattcgacgcaaccgaaatatttgacaagctgagtgttgctccggaagtatatttcaagaatatcaagaaagctggaagtatgggagctggcatggccttggcgatgacaaaatccttgtacccgagaattgaagtcgacaccattgatggatttgcagacgggacaagtgaagaagctgcccttgatcttatcagcagtgcgcaaaatgcggctgacaaaattgcgagcgatgttgtagagcaatttcgcaacaacgacctccaaccgagtaatgaagactctgatgatgaaaggactgattctgactga

SEQ ID NO: 14584 - DNA, 2436 bp, Oryza sativa
  Clone ID: PAT_MRT4530_20508C.1
atggcggaagagggagaaagcttcgaaagccaatgggcgacatccgacgtgacagaagaaaatctgaaggagatggtggcgcacggcgttcttcctgccaaggaaatcatcgggtggcgaccagcgcacggtgaggctttcccgtctccggatactcatgagatcgtggtcttctcgcatttcttctacggcggctttgctcttccgacctcaaaatttttccgcgggatcttgaatttctatggaatcagcttgcatcacctaaacccgaattccatagtgcatatcgccaatttcgtccatgcttgtgaagcctttttggggatcaaacctcactttgccctattccgccgaatcttcttcctcaaaccccaaccaaacaagaacaaaccgtgtgtagtcgggggggcaggattccaactaaggggaactctaagccaaaaatatttctcgatgcccttcaagacttcgaacaaaggatggcatgcgaactggttctatgttcagaatcccgagcctgctcttcccgggtactcttgtcttcctccaatgtaccaagacacttggaactctcttccgatcggagatgaagcagtacaagccttggagttgttggatcgtatgttaaaccttaaagaacaaggcttacagggagagcaaatcactcggcacttcatcaaatgccgactggcgccaatcaaggaaagatcccgcacagcattcgagttcgacggcaaacatgatcccaaccgtgaagaaccagactccttggatttcaaaatcatgaaggagaggatgtacaaaatcttctcaaatgcaattgtagtcagctactctcaccaactgccagtcgtgccatataatgcattcaatccgcctccacaggaatatgcattgatgaagtcagatccaccaatctctcagcgccggtctcctcgccaacacaccactcagggaggtggagggccaacaatcagaccagatccgcaacctcagacttccaaattggctggtcaaacaggtcctcgcaagagaaagctggtacttgatgatgatgaaggcgacgatgataaatctggggataaaggttcgcctaataaacccccaaagcgtaccatgcccaggaaaaaactggccggccgtgcaatgccaaagatcagaacatcttccaggaaaccatctgatatagatccatctggaaaagaccccgatcctgccatgacagagcagagtatatccaaggaccccgagccgactgctgaaaaccagccgaccgctgaaagtcagccgactggcgcccatgcttcgtgcgatagagccaatccgagtgacccgccgccgactggaaaccagtcggcaacaactgaaacggcaacaactcaagagcccccgactggaaaccagtcggacgcaggccctgatcaagagattcccgaagtagaagcgcagacgacgacttcgcaaggaccggaggctggtaacgactcgatagctgggtcttcaggaccatcaggtgatgacggagaagaaatccctcgcataaaggcgaccgacgactctcgtcctcctatcttgatcaaatggtgggacgagaactcacaagccgccggtatagtcataaaccgtcagaaagaagatgaagaagtgtgccagctgaagaaagcgctcggagaagccactcgtattgtaaacagaatccatcttcgcaatgaggccaagactacaactttggaaaagctggttcctcatttgggaacactagaagcagttagggaccagctgcatgaggccaaggagtgcgccaaaaagacggaaaaagagttaagggaccgaatcgctcagctccaagattcaaactatgagctgagtggttcatccaaagcgcaagccaccagaatagctcagatggaaaaacagattgaagccttgaaaaaagacaaaacagaactggctgcagaaagggactcagccttgaaagaagttgaagaccggaaaatcaagtctcaagctcagtttgacgtcctagttggtaagatcaagaggcttgaaggagcaagggatgacgtcgccaatgccgctgcaccaattatccaagccatgttcctcaataatggtggtccgagtacactcgacgcaaccgaaatatttgacaagctgagtgttgctccggaagtatatttcaagaatatcaagaaggctggaagcatgggagctggcatggccttggcgatgacaaaatccttgtacccgagaattgaagtcgacaccattgatgggtttgcagacgggacaagtgaagaagctgccctagatcttatcagtagtgcgcaaactgcggctgacaaaattgcgagtgatgttgtggaacaatttcgcaacaacgacctccagccgagtaatgatgactctgatgacgaaaggactgactctgattga

SEQ ID NO: 14585 - DNA, 587 bp, Oryza sativa
  Clone ID: PAT_MRT4530_20509C.1
gagctggagtacgcagcttggggacgaacattggtgtcgcatcgaccaacggtactgatctaattaaaccacatgagacgggcgtccagttctccacttgggcccaaaaagagaacggaaagcaacacatggaagctcgcaggttgcacgtgctcgaaacagtgatgggccgccggggtcaccagtcgacggaggtgcttaagaagaagacagccgctaggttgtggttgaagctggaacagatatgcaagactaaggatctaactagtaagatgcaccggaagcaaaagttatttttgcacaagttgcaagatgatggatctgcgatggatcatctctccactttcaagaaaattgttgctaaccttgagtctatggagtgtatttggggaaatcttagaacaaacgtgcaaaagttcagcttttacactgttgatcgaataggcgatcaggaatctgattggaaaaaacggattgaggaagacaagaggagcaggaggagtggtgggttggttttcccatcatattctcagaagttctccaattggaggatcaaaacgattttttctgcgaaagcatataactag

SEQ ID NO: 14586 - DNA, 598 bp, Oryza sativa
  Clone ID: PAT_MRT4530_2050C.1
ttttttttttttttttttttttttttttttttttttttttttttttttttttttttttttttcccctaaaccacctaaaataaccattatggtaacactattcctttccaaccactaacccccccgttggcaataaaaaaaaaaaaaagggaaaaaacaatgggaaaaaaaaaacagcaaaaaaaaaacacccaccccttaaatcccaaatttttttccccatttttggcaaaaaaagaaaatttttttttaaatttgggtggcctcaaaaaaccaaacaattttggccgcccccaccaccgggttgcccctgggaagggcgcccctccccgccaacttgaaatcaaaactgcacccgggggggccgaaaaaccggggctccccaaaaaaaagggggccgaaccggcaccgaaacccggggaggccaaaacgcttccggaaccggaagcaccggttaacccgccaactttttggaaaccggccccggccccgtcgaaagcgcggaggccatttcctcacaggcgggggaaaaggaccctgaggttaaaccaggggccccgccggcctggggggttgtttgtcaaccaccggtaacaac

SEQ ID NO: 14587 - DNA, 939 bp, Oryza sativa
  Clone ID: PAT_MRT4530_20510C.1
atgtctacaggacaagttcaccgcgggcgggagggagcggccgtggagagccacggggaggacttgctgagcgtcctaccggatgagattctgctacacatccggggcggcggcgtcctggacctcgaggaaggatggcgcgacgtgctcgccggcgtcgccaagctcaagagtatccatactgattcagatttcgggggcttctcgcccgacgaatacatgcacatatacacgttggtgtattacatgtgcacgcagaaggggcacaaagactacccgaaagagctgtaccacctatgcaagcaggcattggatgatcacctggattccatcgataccagtgataagggtatggctctggtgaaacatggaacagatactgccaagagtagaaaggataagaagaatgaagtaatggtgggattcccaataaatctaatcagtggttcacgagttgttgatgagattttaggacgggttcctgtcaaagctccatttactgatagcacgtttgagtttggcaattccagctgtaatcctcctgactcatttggatatataccaaccacctcgaaatcatttgcagaacgtcttatggctcctgaaaacgaggatcttgtagtgatgctatcactggacctagctgaagagctagagacaattgatgagccatcgacgaaggaggtcgtccgattgccatcgaggaagcagccggtttatagtgccggcatcgagggaggatgcgttcccagcaacggtagcattgggtgcctcctctcggcgggcgtcaatgcactcgaggtggtagacgtcatggtgcttaggacgacaggcgttgccgcgtcaatgtcgggcctcgtcaggcccaccatgcaccacgtggtgagcacactggcagaggcccaactatctcagacggagcccaggagcccgggctaa

SEQ ID NO: 14588 - DNA, 2415 bp, Oryza sativa
  Clone ID: PAT_MRT4530_20511C.1
atggcggaagagagagaaagcttcgaaggccaatgggcgtcatccgatgtaacggaggagaatcttaaggagatggtggcgcacggcgttctccctgccaaggagatcatcgggtggcgaccagcgcacggtgaggctttcccgtctccggatactcatgagattgtggtcttctcgcatttcttctacggcggctttgctcttccgacctcaaaatttttccgcgggatcttgaatttctatggaatcagcttgcatcacctaaacccgaattccatagtgcatatcgccaatttcgtccatgcttgtgaagcctttttggggatcaaacctcactttgccctattccgccgaatcttcttcctcaagccccaaccaaacaagaacaaaccgtgtgtagtcgggggggcaggattccaactaaggggaactctgagccaaaaatatttctcaatgcccttcaagacttcgaacaaaggatggcatgcaaactggttctatgttcagaatcctgaacctgctcttcccgggtactcttgtcttcctccagtgtatcaagatacttggaactctcttccaatcggagatgaagcagtacaagccttggagttgttggatcgtatgttaaatcttaaagaacaaggcttacagggagaacagatcactcggcatttcatcaaatgccgactagcgccaatcaaggaaagatctcgcacggcattcgagttcgacggcaagtatgatcctaaccgtgaagaatcagactctctggatttcagaatcatgaaggagaggatgtataaaatcttctcaaatgcaatcgtcgtcagctactcacaccagctgccagtcgtgccatataatgcattcaatccgcctccgcaggaatatgcactgatgaaatcagatccaccagtcactcagcgccggtctcctcgccaacacactgctcagggaggtggagggccaacgatcagaccagatccgcaacctcagacctccaaatcaactggtcagacgggtcctcgcaagaggaaactggtgcttgatgacgatgaaggcgacgatgataaatctggggataagggctcgcctaataaacccccaaagcgcaccatgcccaggaaaaaactggccggccgcgcaatgctaaaaattagaacatcttccaggaaaccatctgatatagatccatctggaaaagaccccgatccagccatggcagagcaaaatatatccaaagaccccgagccaactgccgaaagccagccgactgccaaaagccagccgaccggcgcccatgcttcgggtgaccaggccaatccgagtgaccagccgccgactggaaaccagtcggcaacaactgaagcagcaacaactcaagagcccccgactggaaaccagttggacgcaagccctgatcaagaaatccctgaagtagaagcgcagacgacagcttcccaagggccagaagctggtaatgactcgataactggatctccaggcaaagaacaaagatcacctcacgctcagctaggtacatcttcaggaccatcaggtgatgacggagaagaaatccctcgcataaaggcgaccgacgactctcgtcctcctatcttgatcaaatggtgggacgagaactcacaagccgccggtatagtcataaaccgtcaaaaagaagatgaagaagtgtgccagctgaagaaagcgcttggagaggccactcgtattgtaaatagaatccatcttcgcaatgaagccaagaccacaactttggaaaagctggttcctcatttgggaactcttgaagcggttagggaccagctacatgaggccaaggagcacgccaagaagacggagaaggagttaagggatcgaatcgctcagctccaggatgcaaacttcgaactaagtggttcatcaaaagcgcaagccgccagaatggaacaaatgaaaaagcaagttgaagccctggagagagacaatgtagaactggctgcgcagagggactcggccttgaaggaagttgaagaccgcaagatcaagtctcaagctcaattcgacgtcctggttgccatgttcctcaataatggtggtccgagtgcactcgacgcaaccgaaatatttgacaagctgagtgttgctccggaagtgtatttcaagaatatcaagaaagctggaagtatgggagctggcatggccttggcgatgacaaaatccttgtacccgagaattgaagtcgacaccattgatggatttgcagacgggacaagtgaagaagctgcccttgatcttatcagtagtgcgcaaactgcggctgacaaaatagcgagtgatgttgtggagcaatttcgcaacaacgacctccagccgagtaatgatgactctgatgatgaaaggactgactctgactga

SEQ ID NO: 14589 - DNA, 518 bp, Oryza sativa
  Clone ID: PAT_MRT4530_20512C.1
ccctatgccatgcaaaggttatagaaactcggaaaagggcatgctaattcatgattcggtctaccagagatgatactgtgtgaagttaattttgcaactctccttaattcttgtagataagttcaggatgttaggatcatctgcttcttgcacggaggttggctgcatataccgtgttgactgtattactgtaactgtaagtagaacagttcagagctgaagggtgttgcctatgtgaaagacatcacttggaccttagcatttgttgtactaggagtatctagctttacataggcttgctctgaggtccaagtagagtacagcatgccactattatttatgaaacctttggtagtgagtaattatattagtctgtagcatcaaattttgctgcaatgttgttgtaactctagtgttcacacacttacatgtaattgtctgaacaatcatgtaccatgtactcctacgtgctgaataaagaaactagtttctgcagcgaaaaaaaaaaaaaaaaaaaa

SEQ ID NO: 14590 - DNA, 2469 bp, Oryza sativa
  Clone ID: PAT_MRT4530_20513C.1
atggcggaagagagagaaagctttgaaggccaatgggcggcgtccgatgtgacagaggagaatctgaaggagatggtggcgcacggtgttctcccagccaaagagatcatcgggtggcggccagcgtacggtgaggcatttccatctccagatacgcatgaaattgtagtcttctcgcatttcttctacggtggttttgctcttccgacctcaagatttttccgtgggatcttgaacttctatggaatcagcttacatcacctaaacccgaattccatcgtacatattgccaatttcgtccatgcttgtgaagcctttttggggatcaagcctcactttgccctattccgccggatctttttcctcaagccccaaccaaacaagaacaaaccgtgtgtagtcgggggggcaggattccaactgaggggaactctgagccaaaaatatttctccatgcccttcaagacttcgaacaaaggctggcacgcaaactggttctatgtccaaaatcctgagcctgctcttcccgggtactcttgtcttcctccagtataccaagatacctggaactctcttccaattggagatgaagcagtccaagccttggaattgttggatcgcatgttaaagcttaaagagcaaggcttgcaaggagagcagattactcggcacttcatcaaatgccgactagcgccaatcaaggaaagatctcgcacggcattcgagtttgacggcaagtatgatcctaaccgtgaagaatcagactctctggatttcagaatcatgaaggagaggatgtataaaatcttctcaaatgcaatcgtcgtcagctactcacaccagctgccagtcgtgccatacaatgcattcaatccgcctccgcaggaatatacactgatgaagtcagatccaccagtcactcagcgccggtctcctcgtcaacataccgctcagggaggtggagggccaacgatcagaccggatccgcaacctcagacctccaaatcaactggtcagacgggtcctcgcaagaggaaactggtgcttgatgacgatgaaggcgacgatgataaatctggggataagggctcgcctaataaacccccaaaacgcaccatgcccaggaaaaaactggccggccgcgcaatgccaaaaattagaacatcttccaggaaaccatctgatatagatccatctggaaaagaccccgatccagccatggcagagcaaaatatatccaaagaccccgagccaactgccgaaagccagccgactgccaaaagccagccgaccggcgcccatgcttcgggtgaccaggccaatccgagtgaccagccgccgactggaaaccagtcggcaacaactgaagcagcaacaactcaagagcccccgactggaaaccagtcggacgcaggccctgatcaagaaatccctgaagtagaagcgcagacgacagcttcccaagggccagaagctggtaatgactcaatagctggatctccaggcaaagaacaaagatcacctcacgctcagctaggaccatcaggtgatgacggagaagaaatccctcgcataaaggcgaccgacgactctcgtcctcctatcttgatcaaatggtgggacgagaactcacaagccgccggtatagtcataaaccgtcaaaaagaagatgaagaagtgtgccagctgaagaaagcgcttggagaggccactcgtattgtaaatagaatccatcttcgcaatgaggccaagaccacaactttggaaaagctggttcctcatttgggaactctagaagcagttagggaccagctgcatgagaccaaggagcttgccaagaagacggagaaagaattaagggaccgaatcgctcagctccaagagtcaaattatgagctgagtggttcatccaaagcgcaagccgccaggatggaacagatggcaaagcaaattgaagccctggagagagataagacagaactggctgcgcaaagggactcagccttgaaggaagtcgaagatcgcaagatcaaatctcaagctcagtttgacgtcctggttggtaagatcaagaggcttgaaggagcaagggatgatgtcgccaatgccgctgcaccaattatccaagccatgttcctcaataacggtggtccgagtgcactcgacgcaaccgaaatatttgacaagctgagtgttgctccggaagtatatttcaaaaatatcaagaaagctggaagtatgggagctggcatggccttggcgatgacaaaatctttgtacccgagaattgaagtcgacaccattgatggatttgcagacgggacaagtgaagaagctgcccttgatcttatcggtagtgcgcaaactgcggctgacaaaatagcgagtgatgttgtggagcaatttcgcaacaacgacctccagccgagtaatgatgactctgatgatgaaaggactgactctgactga

SEQ ID NO: 14591 - DNA, 135 bp, Oryza sativa
  Clone ID: PAT_MRT4530_20514C.1
atggcggcggccacgcatgtcgctgccctgctttgcgttgcctcgatcgctgccttcccttctccgccccgcaggggatacccaattattggttcctctgaaaatgtccacagggtaacagaacttaagctttaa

SEQ ID NO: 14592 - DNA, 1434 bp, Oryza sativa
  unsure (1)..(1434): unsure at all n locations
  Clone ID: PAT_MRT4530_20515C.1
cctaccgtcctggaataaacacgctccagatcttcacatctccatccagggctccgctgcaaacgagggcagaagatccctccgacgagcacgatccatcgtcgtcgcgtccgccgcgcaccaatgccaggctcttcacggccgcgccatggctttccatgacggcgaggcaagtgtagccgttgttctccgcacctcccctcctccacaccctgaccgtcctgtccgccgagccgctgcacaccagctcgccggccgccgccaggcaaagtatcgctctcgcgtgccctctgagcgtgcccgtggcctccatgccgccgtcgccgccgccggcgctctcccagacgacaacggagcggtcgcacgcgccggagtagagcaccttgccgttggctccgagagcgagcgcgttcaccgccgacctgtggcgctccatcgtgccgaccagcgcgtgcttcctctgcccggggccgcgggtccacgccttgatcttcttgtcggccgagcccgtgtacacgcgcccgtcgggggagaccgcgagcgcgttgatggcgtcgtcgtgcgccgccgcgatggactccacgcaccggaagccgggcaggctccacaccttgatgctccggtcccacgacgcggagtagaggagcgcgccgtccggggacaccgcgagcgcggtgaccgcgtccacgtggtgcacccaggtgcacctcctgtgccgccggatctccacgtagctccacggcagcaggcacgtccggaggcggtccacggcggtcgggagcaccgcgcgcaggacgagctgcggccgtgtctcgccgtccctccgccggctaccggcacgccacgccctgatcttgccgtcctggtgggagctcaggaggagcccgccattgcccgtggcgaggagagacttgacggagctgtcggtgtcggcgaccgtcgtgctgctgctgctgctgctgcaaccgtcatcctgctgctgctcctcctgacttctccttgcgccgtccagtgcccacagcctgatgctcccgtccgacgaggcgatgtacagcgagtcaccgtcgacggcgagagcggagacgtacgccgacgccgacgagtggcctttgatcgtggcgatgaattggtggagcgaagggcttgtgttcaggtcatggacgtcaagggaaggaagggaacggaggctcggctgcgacgcgagcgacatggctcccgagagcatgctaccttttgacagcctcatgttggaatttggcttccttccgtgctcaccagaagaggatttcatggaacgggaganccctactagaccagaaaatcaaatcttctccagggaaacgatccaaacacaagctagagtttcatgcaatataataagaagcggctactcagatagcatgctaggatggatcatatagtttttttattatt

SEQ ID NO: 14593 - DNA, 194 bp, Oryza sativa
  Clone ID: PAT_MRT4530_20516C.1
aatatccaatcaggaacagcgtctgcgttcgtgctactctcgacacgcctgatatttctcaagaaccggtggtggctcgcgttcggttcaactgctcgagcagaaagacgaaggttgatatatccatcccatttgagagcatggaatgtattggtcgatttggttcctacaatcgagtataccagccgtttccg

SEQ ID NO: 14594 - DNA, 452 bp, Oryza sativa
  unsure (1)..(452): unsure at all n locations
  Clone ID: PAT_MRT4530_20517C.1
agataaaagtgaagttaaggtccaacccaaacattgatgctccttactgctatctctcacggttagaaagttcacatggagagcttaccattggttgcaacatcaaaagcatgagaagagacgaatggacaacagtggaacaagatattnttttgaaagctgccagcattgtcaagcaatacgaatcttgaacttgcgagcattacagttctgttctatccctctccattttactgcgagaagaggttaaagtggttactctttttctagtttggtatgggtatatgggactgtaaatagagttntcatgtcccatactctaatgttttgatcacatgtgccatatgcctttcctatttaaggaagtgaccctttgtcatcctactgttacatggatacaagaaaaggagatgaaagatgaatcacctatgcacttcaaaaaaaaaaaaaaa

SEQ ID NO: 14595 - DNA, 1057 bp, Oryza sativa
  Clone ID: PAT_MRT4530_20518C.1
ttagacaaccaggttcttgatcacttatgtggtggcttagtggaagaggagcaaaagctagattttatcgctctattggaaacgggtaagaacaacttttcagactcgtggcttaaaaaaatatgtcgaggtagggacttcctatggcactggacaagaccaagaggaagagctggaggtattttgttgggaattaatttggactttttcgatatagctagtattgatgagggggaattttatattaaattccatgtgagaaataagacagatgatgtgcaatggtgcatagtggcggtaaatggggcagctcaagaagaatataaggagtcttttcttacagaacttgtgaatgcttgtagtagggattctttacctatggtaataggaggggattttaatatcataagaaacccacaagaaaagaataacgatagatataacgacaaatggcccttcttgtttaatgctgtcatagacagtctaaatttgagagagattgaactctcggttcgcaagtttacttgggctaacaacctacaaattccaacttatgagaagttggacagggtgttagttagtactgaatgggagttgaagaatccactagctacagtcaaacactgagtagagaactctcagaccatacaccattgctgctagactcgggataaggaacacatattaattaaccacctctgttcaaatttgagcttgggtggttgttaagggaagatttttatgggttagtggagaacatttggaaaaaggaggacagaggggtaacaaagatggaaaaatggcaaaataagatccgtagtctttgtcaattcctaagaggatgggcgaagaacgtaagtgggtcatacaagaaagaaaaggtgaagttgttagccttgactggggatttagataaaattgcggaaactagacttttgattagtgaggagttggatcgtaaaaatgctatgaaggatagattggcaaaactgctaagagaagaggaattgaagtggtatcaaagggctaacactaatagagtattagaaggcgatcg

SEQ ID NO: 14596 - DNA, 317 bp, Oryza sativa
  Clone ID: PAT_MRT4530_20519C.1
cggacgagggccaggacagcaagacaggcctgggctgtagctagctagctagcttgtagagaaagagagagaaacactggagctttagagagagagagagagagcaagaagagctgaagaggaggaggacacgacgctacgctactcctactggtgctagctgtagctacgctccgaccgactgacggtgacggacgaccgcaactggcggggacgactgcgccggcggcggcgaccggcggcggcgacgggcatgctggcgcggctgcggagggcggcagccaggcggatcgggctctcctgcgcctccttcttct

SEQ ID NO: 14597 - DNA, 1236 bp, Oryza sativa
  Clone ID: PAT_MRT4530_2051C.1
atggccgacgccgaggccgagacgcacaatgccggcggcggcgagctcctcgtctggccgtggaccggcattctcgccacgaccaccgacgacgacgacgctaccgccgacgccgcgagcacgctagccttccacgctcatcagcacttcgccggcgtcccaaccaccgcgctccaagaagcgacggccggcgacggccaccaccaccacttcttggtgctccacttcggcaagagctgggccgggctccgggacgccatgtcgctccccggccgcttccccggcgccgggaggagggagtggcggcgtcgacggcgaggtgagggcgccaccgccggcgccgtgtacgggtggctcgcaggggaggatgccacctccggcgcggtgtacggctggcccgccggggaggacgacctgcacgacggcgacggcttggtcgggaggttcctgagggatgccggcggcgcggcgaggagcgcggaggacgtcgagagggacgaagggaggcaagacatggaagccatttatgcaaaattaaatcagcttgagaagcagctggagcagaggcagtcactagagtccataatacggcagatgaacatgaatttacaagcaggggggagcctcagaaaggaagatcatgaacacatttacagcatcatgatatgtttgagaacgattgtagatgaagaaaaagaaatgctggttgactcatgtgctgaaatcatgaaaagattgcggacgaacagcgatgaacttaaagaatatcgacaggagttgattaagggtgtcgagaacatgacgatcaccacgagcacgattattgggataaaaaggatgggagaacttgatgagaggccatttcaccttgcatgcaagaggaagcacagggaggatgatcctaggggcaaagctgcaatgctgatctcatactggcaggaagaactgaagaatccatcatggcatccgtttaagattattcaggttgatggagaagataagggagttgtagatgaagatgatcaaaaactgaggcagttatgcaaagattacggtgatagtgtctgcaatgcagtgaaagccgccatggctgagctcaacgagtacaatcctcgtggacggcacaccatgaatgagctctggaacttcagggagggcaggaaggcgacgacgaaggaggtggtgaagtacatctcagaccagctgaagacgaacagttctcagtctgacaattga

SEQ ID NO: 14598 - DNA, 417 bp, Oryza sativa
  Clone ID: PAT_MRT4530_20520C.1
atggagcgcaaagacggcgagacgccggtggagaattccgccgtcggcgacgcgaaggaggaggagaaacagcctcggcaggagaagaagccgttcgggatagacgcttacttggagaagtggacggctgcggaacaggaagcggcgaaagccttcttgcgggcgttgatcgcggacgcgcaccagtacatggagatgacggaggaggaggtggtggaggagtaccgacgggcggggaagctgcacaggtatgatccggatacggagtggcagaagcgatatgcccgtgtcgctagggctcaccccccgcctccctgcgtcatggccctcatacctaagttggaacaatacctcaagctcctcgatgaggatgatgaacaagattacctcaagcttcttaatgaggatgatgaataa

SEQ ID NO: 14599 - DNA, 435 bp, Oryza sativa
  Clone ID: PAT_MRT4530_20521C.1
ctgcgaatccaccaaagcctccgccaccgccaccgcctccaaagttctccacaagaaacgctgggtcatgaagagggcaccacaagttgcagagctttaccattcacttatgagaagggactcaaaaaaggatacttctgggagtggaatctgtgaaactgctaactcagcaaatgtgcggagtagcatgattggtgaaattgagaaccgttcttcgcatttgcaggctatcaaggctgatgttgagactcaggtggatgagagagcagtgctgaagcattttgattggccagaaaggaaggcagatactctacgagaggcagcttttggctaccaagacctgaaaaaattggaatctgaagtttcaaactataaagatgatcctcgccttccatgtgacattgcactgaagaaaatggttacaatatcagaaaa

SEQ ID NO: 14600 - DNA, 2413 bp, Oryza sativa
  Clone ID: PAT_MRT4530_20522C.1
gcaaaatcgctacaagatgaaagaagatattatgtttgacaaccaaacaaagccatgcagatcaagggttgactccaaaagcaatataaatgtgctcaagccaaaatttggatcctcttggggttcccaaattgtcaaagggttcacagctgacaaaaagaccaagaagacagcagctgctgcaagcaagaagccacctcttgcaagtgtggaaaatgttaacaccagcaaccaacagattccatatcattctagggttaagagatctcttatgggagatttcccttgttcacctgctggtgctcaggttcacccccatgtctttgattgccatggcatcaggtccccagcatctcatgatctttttcttgagttggatcatctcagggaacaactacgtgagtcaaaggaaagggaactagcattacagtcagagttgcggcaatgcagagaaaatcctagagtttcggaacttgaaaaggatcttgattcaaggaagaatgaaattgacaggcttgtgcgacttaaaacttcactagaagttgagaaaacaagcctttctgaacagctatcagctctatcttgtatggtagagcagcatgaagaaaatgcaaggttggatgggcatggcaatcgggtttctagtatgaatgggggcaatgcatcttcttcagaaaacttggagattgaagttgttgaactgcgacgtttaaacaaagagcttcaatttcagaaacgaaacctcgcaattaaactctcttcagcagagtccaaattggctgtcattgaaaagaatgccgagagtgagatagttgcaaaggttcaagctgaggcttcattattgcggcacacaaatgcaaacttgagcaagcaggttgagggtctgcaaatgagtcggctaactgaagttgaggagcttgcctatcttcggtggatcaattcttgtctacgtcatgagctcagtaactcagatcaagcagctagagcaatgacagatgcagattataatgatgaaattgcttgtcatgttgatgattgtgatggtgatgcaagacttgatcagaacagttctgatcacaagaagttcagcattgctgagcgtatcaaacaatggtctcagaatgataagaattgtgaagcatctaaaaaggaggcccttcttgacagagcatggattgaagctgcagaatgcagaagcccgacacgcaggcactcactaggtggaccaaaaggatgtgctcaggagtttagcattgtgaagaggcgccaatctgatacctttatctgcctgcctgaagcaacagatgaggcaatctcctgtaataaggatgagacaatcagggagaagcgtgaacttcttgtggataagtatgattttggtcgatctgaaagctcaagatttcttcttggcaagtcagaagtatgcaagtctcaaagtatggatgttgaaaagcgtgccttgcgtattccaaaccctcctcctagaccttcagtttctgtgccacattctggtccatcaaatggatcagctgcgaatccaccaaagcctccgccaccgccaccgcctccaaagttctccacaagaaacgctggggtcatgaagagggcaccacaagttgcagagctttaccattcacttatgagaagggactcaaaaaaggatacttctgggagtggaatctgtgaaactgctaactcagcaaatgtgcggagtagcatgattggtgaaattgagaaccgttcttcgcatttgcaggctatcaaggctgatgttgagactcaaggtgaatttgtgaaatcattgatcaaggaggtgaccaatgcagcttacaaagatatagaagatgtggttgcatttgtgaaatggcttgatgatgagcttggtttcctggtggatgagagagcagtgctgaagcattttgattggccagaaaggaaggcagatactctacgagaggcagcttttggctaccaagacctgaaaaaattggaatctgaagtttcaaactataaagatgatcctcgccttccatgtgacattgcactgaagaaaatggttacaatatcagaaaagactgagcggagtgtctacaatcttctgaggacaagggatgctacgatgagacagtgtaaagagtttaatattcctactgactggatgctcgacaacaatcttattggcaagataaaattttcttctgtcaaattagcaaagatgtacatgaaaagagttgctatggaacttcaatacatgggacctctgaacaaagatccagctttggagtatatgctacttcaggctgtgagatttgccttcagaatgcatcagtttgctgggggattcgatccagagaccatggatgcatttgaagagctgaggaatcttgtgcatgtcagaaacagcacccagtag

SEQ ID NO: 14601 - DNA, 273 bp, Oryza sativa
  Clone ID: PAT_MRT4530_20523C.1
atcttacgagccggccggggaaccctagtgccgtacagaggctcacccgaccgtctacatccggcgtcgtcgtcgttgccgcgcgaagagaagtcagcaggaggacccgccagtatggcggatctccatctgctgagtgagcagacgacaagatcgtgactacgctcggtgcggactcaggtatacatccgcctcgccacctagctccgcgcctacaagagcggcgatgccgctgacacaaaggagaaaggcgccgcccacacgccccccccc

SEQ ID NO: 14602 - DNA, 237 bp, Oryza sativa
  Clone ID: PAT_MRT4530_20524C.1
aaaaaaaaaaaataaaaaaataaataaaaataataaaaaaaaaaaaaacctacacaatatttaaaataaaaataccctaccgggggaggaaatttatggccgcctgttttttttgtttctaagtttaccttcccgttcttgttacttcaatctacttctttttggcctcctaattaaatttcactggcccctttttttcaactctgtgcctgataaacctttttcgttctccaattt

SEQ ID NO: 14603 - DNA, 487 bp, Oryza sativa
  Clone ID: PAT_MRT4530_20525C.1
gtcgcttcctgtctctcctccctttgcttgcatctgtagctagcagcagcttgatctggaatactccagccagctagctagctcggatcgatcgatcgggatgctgcctgggcgtgaagagatcgaggtgatgatcaggtgatccatcgatctatatgctgctgactagctgctgcatgcatgcctgccatcccgtctcttgaatcagcagataccgcatgcagagattgcaggaacagcttagatctgatccgaatatatatctggttcagtatcaagaaatcgagctacatatgaaaacttcatttctaagctccagcagctagcgtgatatgatagtgtgattgatatttgatacttccttgagagagacgcatacgatcgaatcggatgcactgcacctgagctaagctagctcaagctcgctcgatcagctcatgtacttgttgagcccaagaaatggcgacgaggaggacgaacaggagga

SEQ ID NO: 14604 - DNA, 258 bp, Oryza sativa
  Clone ID: PAT_MRT4530_20526C.1
atggtgaggaccgggactatgttcagggagaaacagaggtctagtgcggtcgggataccatgtgagaaggcagctcggcctgggaggaagcagcaggagcgagctggcctgggatgtgcgcaggagatcgagaccgggtgccatacggagatggtggtgttcaagcgatctgaccagcgaggtgttggcggtctgaccggcggcaggagggcggttcaaccggcggcgactggacttcgtcatcgacttcgttcgagg

SEQ ID NO: 14605 - DNA, 714 bp, Oryza sativa
  Clone ID: PAT_MRT4530_20527C.1
atggcggcgcgtggttgggaggaggcgctggatctcgacgacagccactcggcagtggcagaggcggcatggccctggccggagtccgcccacctcgcgctttcacctccctctgccgtgttggtggttgtggtggccggagtagaagaagatagagccctcgtgttcaccgtccacgacctcgtcgtcctagccctgcacgtctgctgggccgcgccacgctcgccggcttcgcccttccgtcactggcatacctgccgccgcggatccgcgttcgctgcgtgcgtcgggtgcgccgtccatggcgctaccccttcgatctctccggtcgccttcggccacgcccggcctcgtcttccgttcacgttccgctatcgccggtctgatcgcgagcgacgtcgttgcccccacaacatcctcgttgtcgccaacgatctcatcgccacgactgacgatctcctgtcgatgcacgatcctcacctcatcggatgtggggtcgtcatcactggctgtacctccatgctgcatgccaccacgactacctccgttcgcccggtcggccctgttgttcctggcctgctgagcatcggcatcctcggcggcagagcatgggggctgctgcacaagcctccgcgtcagccaccgtcggccccggacgcgctgccccctgcgagcctgcgactcctgaggacgccgccactcgtcggtctctag

SEQ ID NO: 14606 - DNA, 269 bp, Oryza sativa
  Clone ID: PAT_MRT4530_20528C.1
cccaagagggcggggacacctgggtcttccccataatttcggaccggttcctgcaggcgttccagccatacctatagagagacggttgacagcacgggggaatcatgggcatagcttatccctgtatcaaattgttcttctctgacaatttcacacaacatgggagacggaagcgtaaaacgtgaagcctggggaggctaatgagcgagctaacttacaataaatacaacgggctcactaaccgctttacaaaccggaaacctgtaatg

SEQ ID NO: 14607 - DNA, 184 bp, Oryza sativa
  Clone ID: PAT_MRT4530_20529C.1
cctgttgatcatgagcaaccaattcgcaccgatggatcgatcgatcgatccagcagctagatcaacagtactagctaggaagcatggcccgtgcacagttggtgttggtcgccctggtggcagctctgctcctcgccgccccgtacgccttcgtggtcatcacctgcggtcagtgtaactccgc

SEQ ID NO: 14608 - DNA, 1627 bp, Oryza sativa
  Clone ID: PAT_MRT4530_2052C.1
atggccatttttcttgtcttagcgctatccatagcacagcttcttccgtccctcgtcgctggcaccggccggccaagggtcatcattgttggcgctggcatatccggtatctcagcggggaagcggatatgggaggctgggatagcagacgtattgatcttagaggcgacagaccgcattggcgggcggatgcacaagcagagtttcgccggcgtcaatgtggagatcggtgccaactgggtggagggcgtcaatggcgaaaagaagaaccccatttggcccatcgtcaactccaccctcaagctcagaagcttccgctccgactttgacagccttgcccagaacgtctacaaggacggaggcctctgtgacgaagcatacgtgcagaagagaatggatcgggcagatgaagtggacaagagtggggagaatctctccgccacactgcacccaagcggccgggacgacatcctacccaacggcccgtcgtcgccggtggacatggcggtggactacttcacctacgactacgagttcgccgagccgccgcgcgtgaccagcctgcagaacaccgttcccctccccaccttcaccgacttcggagacgacacctacttcgtcgccgaccaacgtggctacgagtccgtcgtccaccacctcgccggccagtacctcaacgccgacaagtccggcaacatcgccgacgcccgcctgaagctcaacaaggtggtgcgtgagatctcctactcctcgaccggcgtcaccgtgaagacggaggacaactcgacgtaccaggcagactatgtcatggtttctgcgagcttgggagtcctgcagagcgatctcatacagttcaagccacagctgccttcttggaagattcttgcgatctaccaattcgacatggccgtgtacaccaagatattcgtcaagttccccaagaaattctggcccgaaggggcagggagggagttcttcctctacgcgagcaccaggagaggctactacggagtctggcaggagtttgagaagcaatacccggatgccaatgtgctcctggtgacggtgaccgacgaggagtcgaggcggatcgagcagcagccggacagccagaccaaggcagagatcatggaggttgtgaggtgcatgttccctgacgaggatgtccccgacgccaccgacatcctcgtcccgagatggtggtccgacaggttcttccggggcagcttctccaactggcccatcggcgtcagtcgctacgagtatgaccagctcagggcgccggttgggagagtgtacttcaccggtgagcacacgagcgagcgctacaatggctatgtccatggagcttatcttgcaggtattgactctgcagagattctgatcaactgtgcacagaagaagatgtgcaaatataatgtcgggggcaagcacggctacagttcagctgatggcttgtttcatctcgcggttctccggtcgccggaggccaatctgctcgagcgtcgtgcggactgcggcggcgctgtctgttggcttcctcgatcgatcggaaagaacgggctcttgggcctgctggcctttcagaatgcctcttttgacgcctgcaacctgttccaggcccacg

SEQ ID NO: 14609 - DNA, 294 bp, Oryza sativa
  Clone ID: PAT_MRT4530_20530C.1
atggttgggcgggtggatttggattgctactgccccttccatccacttcgaggcttaccaccatcatgtgtctcctacccgacctccatcgctactccccctcctctccaacctccgctgctactctccctcttcttcgacatccgccacttattcctctcctccccgacctccgctgctaccccttctatcctcccgaggtccgccgtcatcgcacgtctcctctctgatctccaccaggctgaagacattgctcaatcacaagatgatttatcctcattgaattatatttaa

SEQ ID NO: 14610 - DNA, 419 bp, Oryza sativa
  Clone ID: PAT_MRT4530_20531C.1
ccgcgccggaattgccgcgtcccaccacgcctgtggtatgaggtgtgcactgctcttgcacatgctggagccatagaagaactcacgttggacaacggcgagggtccgacctttggcatccaccttggcacgacctactcgtgcgtgggacggaggcagcacaaccgcgtgtagatcatggtcaacgaccagagcaaccgcaccaccccctgctacgtcggctttaccaactccgataggcttatcggaaatgctgccaagaaccacgtctgcatgaaccccattaacaacgtttgcgatgccaaacgttttattagcaggagggttagcgatgcttttgtttagagtgacattaaaatactgtccttcaaggggattggtggacctggcgacaagcctatgattggtgtccagtacaa

SEQ ID NO: 14611 - DNA, 597 bp, Oryza sativa
  Clone ID: PAT_MRT4530_20532C.1
ctcactccatgcatgtggccacaggtgattgctggttcttgcattgaaatgattggccctaagcgaggcatttcgatgtcttgttctgttgttctgagtttgacatgaggataaaaaaaggagatcgagaagaggatgatctagaactgattgatggagcattagagtacagccagataacaacaccagcaatgagaccaatgacaagtcgcgttagtggcaattgtggcgcagttgacatcactttagcgtacctttaccaggcagtggaggcaacaatagaagtttccatatcaaaagtgcctagggggtttcaatttatctctgagtgtgtttgttcttattgataaggtacgacaagaaattcaactctttgatggcatggttggcgagccttgtggcttaagaaggtatgtggtcgtagtagcgtcggatacctggatgcatttgaagttcaaggtatgtgaaaaaggctctaaaaatgatgttggtcactactgttccttcaaagcaaaccgccatggatttgccagtcaacaaatagttgttgagcctggagctatcacagtgaaggtgaattggtctgttatccctcta

SEQ ID NO: 14612 - DNA, 503 bp, Oryza sativa
  Clone ID: PAT_MRT4530_20533C.1
aaaatatatatagccggagcttccatatataagattaacatatgcctcacccaacagcatataggcgcagcatatacccctcgtacataaagtcagagagagatcaggcgaaacaaagactgaagcagggctcggccggtgaaagcaaaagacggtgaacaaactgggaacacacgaaacaaggtgggagacatcatctgaatcagagaggaacactgaaacaaggctatctatgacgatgactgcttagttgccaccagactcctagccgcccgggggcttgtaagcgatgaagctgatgagctgcacctgcctgacgttgtcgaagccgacgatacgggcgagtgcatcagggtacgccttcttggccttctcgagctccttgagcacctgggcggcgtcagtgcacccgaacatgggcagctctcacatggtccaggacctgccatagcagtatacggtggatctgtggttcttacggcagacgaatacgaccttgctgg

SEQ ID NO: 14613 - DNA, 244 bp, Oryza sativa
  Clone ID: PAT_MRT4530_20534C.1
agggaatcccataaaatatttgaaggacggggattacaaggggaagaaacagggagggggaatatgggcccgacattgggggatatactttttttaaggaccccttttaaagggaaaatgcttgggccccaaccgccagggccatcggaggggaagaagaaggctaattggcaagatcaaaacgacgggggatcgataaaaaggctttggggggggaaaggggccgacctttggagcctaaaag

SEQ ID NO: 14614 - DNA, 1749 bp, Oryza sativa
  Clone ID: PAT_MRT4530_20535C.1
ccccgggctgcaggaattcggcacgaggccgacgccaaatcggacacggccggcgactccggcgacccaccaccacacaccaatcctcctcctcctcatcgccgcctgcgacggcgaggcggcgagcgatggattccctgggcgtgctgctggtggcgccgatgaacgcctacctggagcaggagctggaccggcggtgccgcctcttccgcctctgggagtcccccgccgaccgccgcgacgactacctccgcgcccacgcctcctccatccgcgccgtcgtcccctacgccctccagggcgtcgacgccgccatgatcgacgccctcccctccctcgagatcgtctcctccttctccgtcggcatcgaccgcgtcgacctcgacgcgtgcctccgccgcggggtccgcgtcaccaacacccccgacgtcctcaccgacgacgtcgccgacctcgccgtggggctcgccatcgccgcgctccgcaagatcccccaggccgaccgctacgtccgcgccggcaagtggaagtccaagggcgacttcacgctcaccactcggttcagtggtaaaagagttggtattctggggcttggcaggataggcttagccgtagcaaaaagagctgaggcatttgattgcccaatcagctatcattcaagatcagagaaaccatttccaaagtacaaattttatccaaatgttgttgacctggcagccaactgtgatgtgctagtcgtagcatgctcacttaatccagagacccgtcacattgtaaaccgtaaggtcattgatgcactaggaccagagggagtgctcataaacattgctcgtggagcacatgtggatgaacctgagcttatatccgcgcttcttgagaaacgcttgggaggagcaggccttgatgtgtttgaggatgaaccctttgctccagagcagctttttgagttagataatgttgtcttagtgcctcatttcagtggcaagagagtcggcatcatcggtttgggcaggatcgggctcgccgtcgcgaagcgagtggaggccttcgactgcccggtgaactactaccagaggacgaagcaggatcaccccggctacacctactacccgtcggtggtggagctggcggcgagcagcgacgtgctggtggtggcgtgcccgctgaacgagcacacccggcacatcgtgaaccgggaggtgatggaggcgctggggcccaggggcgtgctgatcaacatcggccgggggccgcacgtcgacgaggcggcgatggtggcggcgctggccgacggccggctcggcggcgccgggctggacgtgttcgaggacgagccgaacgtgcccgaggcgctgctcgggatggacaacgtcgtgctggtgccgcatgtgggcagcgcgacgcacgagacgcgcacggccatggccgacctggtgctcggcaacctggaggcgcatgtcgccggcaagccgctgctgacgcaggtggtgtgagctaattgagtgactggatgattctgatttgattgattccaaagcaggtgcaattcgacaaaatgtagtatgtactgtttcaggatgtgaaaaatctgttttccctttttgtaaacacggtcggtctgggacgatccagtaataacgatttaatatttgtcattggaaatgtgaaaagtgtgttgggttgaaacggaaaaaaaaaaaaaaaaaaaaaaaaaaaaaaaaaaaaaactcgagactagttctctcccat

SEQ ID NO: 14615 - DNA, 170 bp, Oryza sativa
  Clone ID: PAT_MRT4530_20536C.1
gcctactgttggtatttcttaacgacattactagaaatataattcccagtaatagcgcagaaatacttctggtatattatggttatagagttcatccgcaagcgcacggatatactatcgtagcatgtcacccgagagtattccaagggtatcgtatttattttatcccg

SEQ ID NO: 14616 - DNA, 1343 bp, Oryza sativa
  Clone ID: PAT_MRT4530_20537C.1
agcggcaaagcctccccgcggtcgagcccacgcagcgcaccgcagcgagcgaagccgccgcaatggccgcctcctccgtggcctcgactctcctcctctcgctctcctcttcctcctcgcccttcctctcccccacctcggtctccttcctcccatccgccgccgccgccgcctcctcctccccgcgcgtcgccgtcgccgccggcaagcagaaggcggctatctccgtcctccgcgcccttcgcgccgaggcggccaccctcccggttctctccttcaccggggagaaggtcggggaggtcgccctcgacctcaagtcggcgccgccctccaccgcgcgcgccgtcgtgcaccgcgccatcatcaccgaccgccagaacaagcgccgcggcacggcctccacgctcacccgcggcgaggtcaggggaggcggcaggaagccctaccagcagaagaagacggggaaggcgcggcgcgggtcgatgcgcacgccgctccgccccggcggcggcgtcatattcgggcccaagccccgcgactggtccatcaagatcaaccgcaaggagaagcgcctcgccatctccaccgcgctcgccagtgccgccgtggccgacgatgcattcgtcgtggaggagttcgacgaggagttcgccgcgggtcccaagaccagggacttcgtggccgcgcttcagcggtgggggctcgaccccaaggagaaggccatgttcttcgccacggattttgcagacaatgtgcggctcagcggaaggaacattggctccctcaagatgctaacccccaggactctcaacctatacgacatcctcgatgcccgcaagctcttcttcaccccggccgccattaactatctcaactccaggtatggtgccaccgtttttgatgaatatgaggatgataccaatggcgaggatgatggtgaggaggaagcagaggagttgcaagaaggagaagggagcgcagaggaggctgctcaagatgaggctgcagagactgaggctgatagcaattcctagggaaggaggtgtagatcgcgtgtttttcgtttgttggtctggtaattgcttccctgatgcagaagcgttttggcttacatttgttgtaagtttataatgtttttttttcacttatgcagtaatatgcagcagaattctattgtgccactggctgctgttgtgcaactgaatttactgggtgggattcttaaactaaaaatataccagatcatctcagagtctccggaagtaacaggaaaaacggttgattcatccttcaggctactgttaggacacgaaaacaccagtggaagaaataagttagcatga

SEQ ID NO: 14617 - DNA, 498 bp, Oryza sativa
  Clone ID: PAT_MRT4530_20538C.1
ggggaacccccaagggggaaaaaaccccgggatattgggacaaaaaaaaggtccttccctcaaggccctaaaaattattaaaaccaaaacaacccaaagccctgggcccatcaaatctggaaagaggcccccatacaaaaagagagccggctaccccctgcatggcaggggcaatttgaacatctaaaagcccgcccccggggggcgggggaaaccggcaaattttcgccccaaaagggggggacatttacaaaaaaactttttggacttcaacagttacttttttcgggggcttcccggcaagaaaaatggcccccaaggccctcttggaggaaaaaacaaacaccgggtcaatttggttggggaaggcttcaaggctaaacctcaaaaccccagcgggggcggctttcccttgaaataaggggtccccagggacctcatcaactccaggaacctttggaggggcaaacctagggggaaaacccccgccaccggggg

SEQ ID NO: 14618 - DNA, 1089 bp, Oryza sativa
  Clone ID: PAT_MRT4530_20539C.1
atggctgctgcttccggccgccgccgtgccgcggccttcgccgtcgtgatctgcgccgccctgctgctgctgtcctccgccgtggagcgggcggcggcgcaggtgccctgcagccagtgcgaccaggcgtgcaaggaatcgtgcaagggctacgggcgcgactcgtcgtcgtgcagcgccccctgcggcgacccctccaacaaggacggatgcgagagctgcctggaggcgtactactccaaatgcgtcaactactgtggcccgtcctgccatggaaatatgtcatccacggtggaggtgaggtcggcggctggtcgcggtgacactgggacaggtggttgcggcgaaggggatagaagcgccaggacgccggtggcgaaggtcatcattggggagactggcgaccggcggcgtgtagacgagaagtcggccgaccggcggcgcgtcgacgggcagtcggtgggccaattgcgcgtcgaccgggagtcggcgggccgccgacgcgtcaaggggagtccggcgaccggcacatcgatggggagtcggcgccgtctcgctgggagactgggaaagatcgatttgggggtggacgcgatttgtggagcgagccttaccagatttggggcgccgtctccatgcgccttcctcctccggcgtgcgcgcctttcgtctgttgccgtctccccgcgcgtggtcaccgccctgcgcccgccaaccgccgccgcccctcgcttgccgctgtggccctacgcccacgagccgccgccgccgccctgcgcccgccctaactcaaactcacagttgcctcctcctctcctatggcctctggcgccgtcgccgtttgcatcgtacgtggtgctggtcctgctgcagtcctccgccgtggagcgggcggaggcgcaggccgccgggccgcaggcggcgccgatggcctgcagccagtgcgaccagatgtgcaactcctcttgcgagggcgccggcagcgagccgtgcagctacgcctgcggctcgtgccagggctgcatgcaggcctacttctacaggtgcctgccccgctgcggcgactactgccgttccaactgcgtttaa

SEQ ID NO: 14619 - DNA, 669 bp, Oryza sativa
  Clone ID: PAT_MRT4530_2053C.1
atgcatgaagaacttaacgcgcacggtctcggctcgccgaccaccatattcaccaacctagcgtatgcagccgtacgtaacgtaccgtacgtcgtacgagagtatcacgtcacgggcctctgcaccccgccgatccctcacaacccaaatcaaccggtcctgcaccccatgcatgcatgcatgggcctggcaatcttaactgcagcccaagtgggcccaggatgtcacccagtgcagggacagtcaacgctgtattctctgacccgctgtatattgtctgacctcctcatgtgctgctgcaaccgaggcggctcagctcagctgatcatcgatgctgtagaaacggaaaagccccgcgccatgcaaccctcgtgtcagcaacgcacggatcatactagcgaaacaagcacagataccgcctcgatccgcgaccgcggtaacagtgcacggctgcacgaacgcacccggcccaccccaaccaaacggaccggaaacaagaaaacacggcagctagctagcaaaccatgcagttttgcaacgggcaaaatacgagaaaatccgcgacaatgtgtggttgccgcaatcaaccgtcaaatccacgctgttttgcgttgccgcatcgcgaattcagttggtttagctcaaaatgggacgagatggtactcatgg

SEQ ID NO: 14620 - DNA, 633 bp, Oryza sativa
  Clone ID: PAT_MRT4530_20540C.1
atgatgcggaagaccaacacgcgccgcacaaaaacagaagcgacgacgcatcacgcatactcctatagcctaggaaaacatggtccctttgttgttaggcctaacatgggtgctagtagtaagattttacgggagacggcgtgttttagcatgggtgcagcaactgtgcaagtcctaatcaccagtttgtgcttgtgcactcgactttttttgctgatgaccacgtctacgagagtccgggctatagctgtaatcagggagcgaaacggggaaagtgaaaggaaaaggggggcgaaaagagattcgccccacgcgcaggcaggcagcagctgcattgttgctgttggttgggaaaggtacaccggtcggcgccggatggctctgcttgcaaggacacgtgttgctgctacagggagagagacctttgatcatcctcggctcatcgccctttcctctccagggtttcaaaaaccgccgggggcccggttaccgccacccggcggtacggcggttaccggcggtaaccgcggtaaccgcgcaaaaccgcgacaaatttacaaatcgaaatttgaattcaaaaattcgggcaaaccgcgcggtttggcgcggttaccgcgcggtttgacgcggtaa

SEQ ID NO: 14621 - DNA, 431 bp, Oryza sativa
  Clone ID: PAT_MRT4530_20541C.1
cgcaggacgacagagcttaatggctgggcaaccagtccatcgaaatagtgagagacacatggctggttaccacggcgtatcaagtaagacgctaactcaggcagacctctggtagggcggctcacgagcctatctcatgctcagccctgctgcctgatcttggggcctgttccatcgtcacaagcctggggcgcttaagagcatctccatgccacatggcacatccgcgccagcgtcacgtcacatagagccaatgatggggtgacaaatgcccgcctacctccggataaacactttgaactcatcagtcctggcatgctaaccgatgcacagcccctggatagccttatcgatcgcgccattaatctcaatcttgctgcttgtcctccgcgtcgaggggacttccaggttcatgacaggactgagcctga

SEQ ID NO: 14622 - DNA, 1305 bp, Oryza sativa
  Clone ID: PAT_MRT4530_20542C.1
atggcggcggccaacgcccccatcgccatgcgcgaggcgctcacgctcaccagcctggggatcgcgccccagttcgtcaccttcacccacgtcaccatggagtcggagaaatacatctgcgtccgcgagacctccccgcagaacagcgtcgtcatcgtcgacatggccatgcccgcgcagcccctccgcaggcccatcaccgccgactccgccctcatgaaccccaacacccgcatcctcgccctcaaagctcaaatacctgggacaacacaggatcacctgcaaatcttcaacattgaggctaaaacaaaaattaagtcccaccagatgcctgagcaggttgtgttttggaaatggatcaccccaaagttgttgggtttggtaacacaaacatcagtttatcactggtcaattgagggagattctgaaccggccaagatgttcgataggacggctaatttggccaacaatcaaattatcaactatcgatgtgatccatctgagaagtggcttgtgcttattggaattgcacctggtgctccagagaggccacaactggtgaagggaaatatgcaacttttttctgtggatcagcaacgtagtcaggcacttgaagcccatgcagcatcctttgcatcatttaaggtcgtgggcaacgagaacccttcaactctcatctgctttgcctcaaagacaactaatgctgggcagatcacttctaagttgcatgttattgaattgggtgcccagccagggaaaccagggttttccaagaagcaagctgatctcttcttccccccagattttcaggatgattttcctgtggccatgcagatctctcagaagtatggccttatctatgtaattacgaagcttggccttttatttgtatatgacttggaaacagctgcagcggtctatagaaatagaattagtccagatcctatattcttgacagcagagtcttctgcaagtggtggtttttatgccatcaataggagaggacaggttttacatgccacagttaatgatgcaaccattgtgccttttgtcagcagtcaattaaataaccttgaactagctgtaaatcttgccaaaagagctaatcttcctggggcagagaacttggttgtgcaaaggtttcaagaattgtttgcacaaacaaaatacaaggaagcagctgagttggctgcagaatctcctcaaggtcttctccgaactcctgatactgttgcaaaatttcagattatagagattagtgtgactcttaccatagcaatttcagcaatgcgactactatggtga

SEQ ID NO: 14623 - DNA, 314 bp, Oryza sativa
  unsure (1)..(314): unsure at all n locations
  Clone ID: PAT_MRT4530_20543C.1
aggnangcccccctgaccaancgctcccntcatncncnatgtcnangggacttcggggtattcctggctgcggctcctcatctatctcctcgtgcccgtctgcattggcnccntctnctttgccgtcggccccaagtacacatccctccccgctgttatatgttttactgccngggtcaaggactggcagcctgcagccngaatggtggtggtgncattgtggtggncaggcttcnccctgttgccnttacacntgttcctatgttnttgtaagtggccgctggtcgncactgctattttttccngtgttttag

SEQ ID NO: 14624 - DNA, 292 bp, Oryza sativa
  Clone ID: PAT_MRT4530_20544C.1
atgaccggctgtcccctaacgcactaaggtcagactatgggaggcttcattgcagagttgtcccacatggcgttcgtgatcggttttccaagggagccacaatacactagcatccaccctctcagtggcgagttcccgcaccaggttcgcttgtaggttcacggcatcccctcctacatgcccaacatggaggtgacagcttgcaagggcacattagagcatgcttgtgaggaggccgccctcaggatgatggccaatttgagggagctgcaggacgacactctgaacaccg

SEQ ID NO: 14625 - DNA, 189 bp, Oryza sativa
  Clone ID: PAT_MRT4530_20545C.1
atggcgacggagctaggattcggcttggcgaaggaaaaagatggtgacgaaaagaaaaccggaagcccttaccgcatgcaagaaaaaaatcgcaacgaaaaaaggcagttgaaaaaaccagaaaatataaaactgcgacgaaaaatatccggacggaccataaaaaaccgtatgaaaaaagctggaaaa

SEQ ID NO: 14626 - DNA, 2328 bp, Oryza sativa
  Clone ID: PAT_MRT4530_20546C.1
atgcccgcccgccctgcccacgcactcctcgttctcctcctctgctgctctacccgtccccgctactccaaacttaattttgatttctcgccggagaattcctcctccgcctcccggctcctcccctccgccctcgcttccgcaggcgaactaaaccatggcgacaggtcaaattttctccaaaaccacccaagcgttattctataattataagcaacttccgatccaacggatgcttgattttgacttcctatgtgggagagaaacaccttctgttgctggaataatcaatcctggttctgatgggtttcagaaacttttctttggacaagaagaaattgccattccagttcatcctacaattgaagctgcctgcaatgcacacccaactgctgatgtatttatcaactttgcatcctttcggagcgctgccgcttcttcaatgtcagctttgaagcagccaacaatcagagttgtagccatcatagcagagggtgttcctgaatcagatacaaaacaacttattagttatgcacgtgccaacaacaatgttaatcattggaccagctacagttggaggaatcataactggtgcaacaccgatgccagatacacagatggtatttatgaaggaattgcaattggaggggatgttttccctggctcaactctgtcagaccacatcctgcgtttcaacaacatacctcaggtcaaaatgatggttgttcttggggagcttggaggaaaagatgagtattctcttgttgaagccctgaaacaaggaaaggttcagaaacctgttgttgcatgggttagtgggacatgcgctcgtctattcaagtctgaagtgcagtttggccatgctggtgcgaaaagtggtggtgagttggaatcagcacaagctaagaaccaggcactaaaagatgccggggcagttgtccctacttcatatgaagctcttgaaactgcgatcaaggagacatttgagaaactggttgaggacggaaagatctctcctgttactgagattacaccacctcctattccagaggatcttaaaaccgcaattaagagtgggaaggtccgagctcccacacacattatctccactatctcggatgacagaggcgaggaaccctgctatgctggtgtccccatgtctacaattattgaacagggttatggagttggtgacgttatttcgcttttgtggttcaagcgcagtcttcctcgttactgcactcagtttattgagatgtgcatcatgctttgcgctgatcatggtccttgtgtatccggtgctcacaattctatagttactgctagggctggaaaggaccttgtttccagcttggtatctggtttattgacaattggcccccgttttggtggtgcaattgatgatgctgcccggtacttcaaagatgcatatgatagaaatctcacaccttatgagttcgttgagggtatgaaaaagaagggaatccgtgtccctgggattggtcacaggatcaagagcagagacaacagagataagagagtgcagcttctacagaaatatgcccacacacatttcccttctgtcaaatacatggagtatgctgtccaggttgagacctacaccctgtcaaaagccaacaatttggttctgaacgtcgatggtgcgattgggtcgcttttcttggatcttctttctggcagtggaatgttcagcaaacaagaaatcgatgagattgttgagattggttaccttaatggactctttgtgcttgcgcgttcaattggtctcatcgggcacacctttgaccagaagaggctcaagcaaccactctaccgccacccatgggaggatgtcctctacaccaagtgaagactcggttgttcttaatattacctagatattccagctttgtacacacttcaaaaggtcaagcgaaattgcataaaagtgaacgccgatgaaactagggggagaagaatggggtcaccggtgaccgctgttgttgcgtgtttcaagttagttgcaaattgagatctgttcctgatttttgtcaaagcaagaaccattaggacaacatgggggatattggaaatttactgtatcatcgtgtactatcgattctctcaacgaaaaaaaaaatctagtctgatgctaatgtgttcaccggtcgtggagagtgttgtaatgtttgtgattgtcaatgtgccacttcgataggcatcatttttgctattaaaaataaaataaaatttgcatgtctttcctgctaaaaaaaaaaaaaaaaaaaaaaaaaaaaaaaaaaaaaaaaaaaaggggggggggcctcg

SEQ ID NO: 14627 - DNA, 818 bp, Oryza sativa
  Clone ID: PAT_MRT4530_20547C.1
gggctccccctctcccgtctccgctactccaaacttaattttgatttctcgccggagaattcctcctccgcctcccggctcctcccctccgccctcgcttccgcaggcgaactaaaccatggcgacaggtcaaattttctccaaaaccacccaagcgttattctataattataagcaacttccgatccaacggatgcttgattttgacttcctatgtgggagagaaacaccttctgttgctggaataatcaatcctggttctgatgggtttcagaaacttttctttggacaagaagaaattgccattccagttcatcctacaattgaagctgcctgcaatgcacacccaactgctgatgtatttatcaactttgcatcctttcggagtgctgccgcttcttcaatgtcagcttcgaagcagccaacaatcagagttgtagccatcatagcagagggtgttcctgaatcagatacaaaacaacttattagttatgcacgtgccaacaacaaggtaatcattggaccagcaacagttggaggaatccaagctggtgctttcaagattggtgatactgctggaaccattgacaacattattcaatgcaagctttacaggcctggatctgttggctttgtttctaaatcgggtggcatgtcaaatgagatgtacaacaccattgccagagtgacagatggtatttatgaaggaattgcattgggggggatgttttccctggctcaactctgtcagaccacatcctgcgtttcaacacatacctcaggtcaaatgatggttgttctttggggagctggaggaa

SEQ ID NO: 14628 - DNA, 411 bp, Oryza sativa
  unsure (1)..(411): unsure at all n locations
  Clone ID: PAT_MRT4530_20548C.1
cccacgcgtccgggaaggtccgagctcccacacacattatctccactatctcggatgacagaggcgaggaaccctgctatgctggtgtccccatgtctacaattattgaacagggttatggagttggtgacgttatttcgcttttgtggttcaagcgcagtcttcctcgttactgcactcagtttattgagatgtgcatcatgctttgcgctgatcatggtccttgtgtatccggtgctcacaattctatagttactgctagggctggaaaggnaccttgtttcagcttggtatctggtttattgacaattggcccccgttttggtggtgcaattgatgatgctgcccggtacttcaaagatgcatatgatagaaatctcacaccttatgagttcgttgagggtatgaaaa

SEQ ID NO: 14629 - DNA, 279 bp, Oryza sativa
  Clone ID: PAT_MRT4530_20549C.1
gggtcaccgtgagacaagcaagcacacgggaaacggaggcagagagatgatagatagcgtcacttgcatctaccgtcagttttgtccttgcctgtttctctatcatacattgaattttgtcattcttaatccaagatagcaccagaacactaacatgtagcttagaatctgcgtgtagacattatgagagctccactggctacagattgttgtaacttgtagaccttttcttttctatacatgctcatggacgttgttcttttaaaaaaaaaaaaaaaa

SEQ ID NO: 14630 - DNA, 1237 bp, Oryza sativa
  Clone ID: PAT_MRT4530_2054C.1
aagcttaggaacttccgctccgactacgattacctctcccaaaacgtctacaaggaggacggtggcgtctatgacgaagctcaggcacagaaaatcatcgaccgagcgcatgaagtgaacgagaatggggagaagctatccgccactttgcctccgagtggccgggacgacatgtcaatccttaccatgcaaaggctcatcgcccgcctgcccaacggcccgtcgtcgccggtggacatggtggtggactacttcccctacgactacgagttcgccgagccgccgcgcgtgaccagcctgcggaacgccgttcccctcccgaccttcaccgacttcggagacgacgtctacttcgtcgccgaccaacggggctacgaggccgtcgtccactacctcgccggccagtacctcgacgccgacgactccggcaacgtcgccgacccccgcctgcagctcaacaaggtggtgcgtgagatctcctactcctcgaccggcgtcaccgtcaagacggaggacggctcggcgtaccaggcagactatcgtcatggtctctgccagcttgggagtcctgcagagcgatctcatacagttcaagccacagctgccttcttggaagattcttgcgatctaccaattcgacatggccgtgtacaccaagatattcgtcaagttccccaagagattctggcccgaaggggcagggagggagttcttcctctacgcgagcaccaggagaggctactacggagtctggcaggagttcgagaagcaatacccggatgccaatgtgctcctggtcacggtcaccgacgaggagtcgaggcggatcgagcagcagccggacagccagaccaaggcagagatcatggaggtgctgaggagcatgttccctgaccaggacgtccccgacgccaccgacatcctcgtcccgagatggtggtcggacaggttcttccagggcaccttctccaactggcccatcggcgtcagccgctacgaacatgaccagctcagggccccggttgggagggtctacttcaccggtgagcacacgagcgagcgctacaatggctatgtccatggagcttatcttgcaggtattgactctgcggaaattctgatcgactgcgtgtgcgcagaaccagatgtgcaagtatcacgttcagcgcaagcacgacttcatgatggaatgagaaatgtgagattccacaatttgctcatcgagcagttgagctga

SEQ ID NO: 14631 - DNA, 636 bp, Oryza sativa
  Clone ID: PAT_MRT4530_20550C.1
atggagggagtagttgactttatagtagaccatcatgtagatattgattatgaggaagaggtctacccaaaacaggagaacccgctgaggtttcgccgcccgccggtccccgacaagtcaggccttacccaccagacttgtggttgcaagaagatgccttgcaacagaggcctgaagaccggcggcacgccggcgacggccaacggggaagaggagaaagcgacgaagcggatggtggcgacgccgggctccgacgagaataagcttcttgatctcaggatcattgggaacacaaacacgttccccgtaccaaatggtcccatgttcatgcggacactgttcatggatgatagcattgcagtaactcttccgactcaaagcatcagccacaactgcgccgtagagtcgtcgccgcgccgcttagtccgcttgccgccgccggccgacgtcagccgcgccgccgcgccgcttctgccgtcgtcgccgcttgccgtcgtcgccgttaggtgcgccgtgctcgccgtcgccgaccacccgagccgccgccgtcgcccttctcgtcgccggccgtcgtcgttcgtcgtttgtcgttgtggtgagtaccgttgggttcgtttcgtcgtcctctacgcgtag

SEQ ID NO: 14632 - DNA, 722 bp, Oryza sativa
  Clone ID: PAT_MRT4530_20551C.1
ctagaccaggaaaacctctaccatcacctccgagagtttgagcagctgtgttcgtgcctcctgattcaaggcatgacacatgagaggagggggcgatgcctgctgcatgcgcgaagggggtggcggcggctgtggcgtgcgtgggagggagcggccacggcggcgcgagcggaaggtgggagcggcggtggtggcgcgcacgaaggacgggagcggcggcgcgctcggagggcgggagtggcgtttgcagcgcgcggagagagagcaacggcggtcatcgcggcagcacgcgctgagggtgggagcagggtggcagcggctcgctcgtctcgtggcgctgagaagggaggtgtggttcgccgctgtgccgcgcagtcgatgcagtgctgagaagtgagaggccagcggctcgccggcgttcttcatgatggggaggagaggcagcggctcgcccacgcacggtgctgagaaagtataggctagctgctcgccggtgctctttgcgattgaggagcacggctcgctggtgtgctgcatggtcatgggggaggctgcatctcacctagtgcggtgcacacggggacctcagcataaggcaggcaaggggcatggctatgagacctccatggctattgcttgcccatcttcatctcctctttgttggattgctgctcaggaacattgttagacactaatatactacatgtgtgtgtttatttctt

SEQ ID NO: 14633 - DNA, 346 bp, Oryza sativa
  unsure (1)..(346): unsure at all n locations
  Clone ID: PAT_MRT4530_20552C.1
acggtcaagccgattctcaccctccattttggttagctcctgacatcacaggtcatgttggacacacctgggtctttgngtcacatgganatatgagccatttcgtggatgtgcccacagagtctcaatgcaccatttccatctcattgtcggaatgaggcaaacctgtnacccataaacatgcgtttacatggtggaagagtgctcaatttgtccaattacatggtggaagatgatattttaatgtgttaaatgtcacaagctgcgttttacatgaacagatggtcaaattgcatattacttatgtttaaataaatttagagggctatcgcaaaaaaaaaaaaaa

SEQ ID NO: 14634 - DNA, 204 bp, Oryza sativa
  Clone ID: PAT_MRT4530_20553C.1
atggagtttgtgctgtacagggtcgacagggagctgcgacaataccgcgacgactgctaccttgggtctgatttgtcgtgcactccgctcgacaagccgttaattcccatcggctgcctccacggaaatggcacaaaacaaaggtttgttgctaagcctagtgtcattggcatccagagggtgcttcgctacgtcaacatatag

SEQ ID NO: 14635 - DNA, 1729 bp, Oryza sativa
  Clone ID: PAT_MRT4530_20554C.1
cggaattcccgggtcgacccacgcgtacgggcccagcagcctcgagctgaactgaagcaggggaggggaggagaggagaggagagagcaacgcgttcaccgttgagagaagagaaggaagtaagacgagcgcaatgcgtcgcgtcacggtgctcgttctgctcctcgcctgcgcggcggcgcgcgccgccgccgccgtcgtcaccgacgggctgttgccgaacggcaacttcgaggagggcccacccaagtcggacctggtgaacggcacggtggtgcgcggcgcgaacgccatcccgcggtgggagacgtccgggttcgtggagtacatcgagtccgggcacaagcagggggacatgctgctggtggtgccgcagggcgcgcacgccgtgcgcctcggcaacgaggcgtccatccggcagcggctcgccgtgaccaggggcgcctactacgccgtcacgtttagcgcggcgcgcacctgcgcccaggcggagcagctcaacgtgtcggtgagccccgagtggggggtgctccccatgcagaccatctacggcagcaacgggtgggactcgtacgcgtgggcgttcaaggcgaagatggacgaggtggcgctcgtcatccacaacccgggcgtggaggaggacccggcgtgcggcccgctcatcgacggcgtcgccatcagggcgctgtacccgccgacgctggccaaggggaacatgctcaagaacggcgggttcgaggagggcccctacttcctccccaacgcgtcgtggggggtgctcgtcccgcccaacatcgaggacgaccactcgccgctcccggcgtggatgatcatgtcgtccaaggccgtcaagtacgtcgacgccgcgcacttcgccgtgccgcagggcgcccgcgccgtggagctggtggggggcaaggagtcggcgctggtgcaggaggtgcgcaccgtgcccgggtggacgtaccgcctgtcgttcgccgtgggcgacgcgcgcgacgggtgcgcgggctccatggtcgccgaggcgtacgcggcgagggcctccatcaaggtgccgtacgagtccaagggcaccggcgggtacaagcgcgccgtcctcgagttcgccgccatcgccaaccgcacccgcgtcgtgttccagagcacgttctaccacaccatgaccgacggctcgctctgcgggccggtcatcgacgacgcctccctcgtcggcctccgcaagaagacggccggccggcggctgctcctgtaagacgaacggccgcgtggcatcgaacgccgtcgcattccctccattctatgaatatatgaatacaaggcgcggttaaacttgggggcagttggcacgaccaaagttgggtgctaaaatgggtagtattgctaggctcgtttttttggttttggtgtgtactctggtatatgtacgcgtgtgcgcgcgttgcatggttatactttggagctgcgctcgtttggtgttttgttgtgaagaggagaggtgatacgtggtgcaaggtctgtcacaaggggtttggttgatcaacttaaccggaggtgccaacctaaacgcaccatcagacattatgaatgggaagcattactagtgctcacttttttataaaaaaaaaaaaaaaaaaaaaatctgtcctaaaaagccagatcctttttgaaagttgagtcatacatttgagctatgctcgaaaatcaaaaaaaaaaaaaaaaaaaaaaa

SEQ ID NO: 14636 - DNA, 345 bp, Oryza sativa
  Clone ID: PAT_MRT4530_20555C.1
atggcgctcaacggctcaacccaccagcggcgccgcgggacgctggttctaccacttcggctgcgggccatcggctttggcaccgctcgtcgccgtcggagtggaggaggcaccatcggatgtgcccccggggtggagcctccacgcggctcgggcttggctgttggggcctgggtgtccactgaagccacgcaagaagaggaggtcgtcgtggtgtcacttgtgaggaggaggaggaggaggaggagatgctgggacgctgcagtcgtgcagaggcaccggcgacggaacaggacgccgatgtgcgagagaaaacgaggagcgctcaggtggggagagcgttaa

SEQ ID NO: 14637 - DNA, 189 bp, Oryza sativa
  Clone ID: PAT_MRT4530_20556C.1
cggagcgtgggaaaagaggaaaaaaaacatctacacttctagggatggtctgatggatcaataatggctacgaaggatgattatttcacggaggatctaaaggcggtcagtggggccatatccggaacgcaactgatcaagttgtaaataaggattaaggacaggcattgccaacgggaggggaaggaa

SEQ ID NO: 14638 - DNA, 1181 bp, Oryza sativa
  Clone ID: PAT_MRT4530_20557C.1
aagttctcatccagggtgatcctctctccatctctctgcccagccacgcgttaaagtcgcgcgcggctcagcttggcgcgccgctgcgcgacacacccgcgagagagagaggaggaactgggggtgccagcggcctcagcggccgcaccggcggagggaacggtgatcgcgatcctcagcctcgacgagtgcaccatccagatcgaggaggccaacagcgccaagaagctggttgtgattgacttcactgcatcatggtgcggaccatgccgcatcattgctccagtttttgccgatctagcaaagaagcacacaaatgctgtttttctgaaggttgacgtcgatgaactgaagcctatggccgagcaattcaggaaggcgggccatggccaaggggagcacatagtcagaacaccgcagagcaagtgtgtgtcctgcctcgcgtgaaagataagcggcgctctgctctgctcgccgaggagagagagaagagagagagagagagctagagatggcggcggcctcagcggcggcgcaggcggagggaacggtgatcgcgatccacagcctcgacgagtggaccatccagatcgaggaggccaacagcgccaagaagctggttgtgattgacttcactgcatcatggtgcggaccatgccgcatcattgctccagtttttgccgatctagcaaagaagcacacaaatgctgtttttctgaaggttgacgtcgatgaactgaagcctattgctgagcaattcagtgttgaggctatgccaacattcctgtttatgaaggagggagatgttaaagacagggttgtcggtgctatgaaggatgaactggcgagcaagcttgagctacatatggccatgtagtgttatagtggattagtactgatatcctaaataaaacgggccttcaggctctgaaaggattagtgcctctgtctgtggtggttttcatatgcttctagtatcaagcattgttcttaccgttgtctagttcatggataatgccttgcttgatccaagtttgtgctttgaatattccaacaaaataatataacctgtgttttgcaaaaaaaaaaaaaaaaaaaggtgagatatcagaatgttggatccttgagagttgtttagctttcaaaaaaaaaaaaaaaaaaaaaaaaaaaaaaaaaaaaaa

SEQ ID NO: 14639 - DNA, 2583 bp, Oryza sativa
  Clone ID: PAT_MRT4530_20558C.1
cactgcccataaccctcccatgcctgctcaccgtgtgaccacctacccgcccttcccaagatcccccttcgattcatctgattagcgcgagcagcgaggttcggcgcggcgggatggggacggaggcggaggcggcggaggtggtggagtcggtgagcgacctcgccgtgcaggaccctcccggggaggagttctccgcggcggacctccggtgggtcaagtacgcgagctccgagcaccagcgggacgacgtggcgctcatcccctacgagcggatggacgccttcatcgccggcgaatgcagcaacccggagtgccccacgcgcttccacatcgagcgcggccgcaagcgcgaccgcggcaccctccgggaggtcaggagcgacgactaccttctctacaggatgtactggtgctcgttcggcccggagaattacggcgagggagggacgatcttgccgagcaggaagtataggctcaacacgaggaatcgtgccgctcgtccgcagtcgatgcgtggctgcacctgccactttgccatcaagcggctatatgcccgcccgtccctggtgctcattatctaccatgagaggcggcatatcaacaagtctggtttcatatgccatggtcccttggaccgggacgccattgggccgggtgccaggagggtgccgtatgtggggagcgagatccagcagcagaccatgtcgctgatttaccttggtgtgccggaggagaacatcctgcagacacatatggaagggatacatcgttactgcggctcggacgcgaaggttgatagcctcgcttcacagtatgtccagaagcttgggatgatcatcaagaggtctacgcatgagctggatcttgatgaccaggctagcatcagaatgtgggttgataggaacaagaagtctgtgttctactaccaggattcgacggatacagatgcatttgttctagggatccagacagagtggcaactgcagcagatgattcgctttggtcatcaggatcttttggcttctcattcctcgtttggtgttagcaagctgaagtatccattgcacacactccttgtctttgactcaagacaacatgctctacctgttgcgtggattataacccgatcagttaccaagcaagacactttgagatggatgaaagcacttactgagagaatatattctgttgattccacctggagaatcggtggatttgtaattgatgacccagcttcagagctggatccaatcagggatgtattctcttgcccaattttgttttctttatggcacattaggagaacctggcttaaaaatataatcaagaaatgcagcaacagtgaggtacagcgggaaatgtttatgcaactaggaaaagttatgtacagtatctggagtgagaaaaatcccatggatgctcttgagcaattatttcaagacttcgttgaccaaaccaccttcatacaatatttcaagtccttttgggttcccaaattggagatgtggattgacaccatcagaagtcttccactagcaagtcaggaatcatcaggcactattgaaggttaccatctaaagctcaaggttaaagcatatgatgactcacagcttgatgctctccagcgtgtggactggttggtgcataagctcacaacagagctccattcgagttactggctcaatctgtatgcggatgaaagcggttcatttcctgaggtgaaagcagagtacattgcgtccacttcatggcatagagcgctgcagatacctgacgatgctgttatatttgatgacaaggaaccattttcagcaaaggtgacaagccagaaggatactagtcagatgtggactgtctggaatcctgggtctgagttttctctttgtgattgttcgtggtcaatgcagggcaacctatgtaagcacatcataaaggttaacatgatgtgtggaccacgcaaggatttccagccctcgctctcatttcaatcgtttcagcgtgtcctacttgatctgtggcaaaaacccatggatgattcattctcactcgatctgtcagtagcatgggttatgcaaatgcaggagaggatccagaaggtgactgagcttgctaccgctgacggcattgcggaagtatctaacagattgccgattcaatggacaaacaagaaagggaggaaagtagctgcaaagcgcaccagccctttacgtgttcttcctcactccaatggtattgtgcaaaaggatttcacacccaagaagaacagaaagagaaagaggttgtcaacagtctcgggttaacagtactccaattgttcttgtccagagagttatttttctctctgtgtaattagatggctaaccgtcttttgtttgttttctgtctcaactagttacttttggtataggcattggttactaggatgatcacctcacgtttctgaaaccaattcttctgttgtttagttggatataattattcaggcagcataagaaatacatcgaatcagtctctctggtcaaaaaaaaaaaaaaaaaaaaaaaaaaaaaaaaggggggggcctctgccgaattcctgcag

SEQ ID NO: 14640 - DNA, 370 bp, Oryza sativa
  Clone ID: PAT_MRT4530_20559C.1
aggtagcgcggcgctcccccgcgtcatccccccgcctcgctagctcgatggctaggatgccaaatacttaaggatgtagccaaagccttgcgtctttgccccccggtggttttgcttgtgcttccttcctccccggctgctgctgctggtgtggtctactccaagtctgggtttgtccctagagtgttattctaggaatttagttgtctccctttgtgatagtataacaccccaaatgacccttaaaaaagtatgcaccaaaacgcccaccttgttccagtgtgtcccctgtaagtgttaatgtgtctatctagagttcgtctaggaaaattccccaaaagaagaagtggaagaagaatgtagtagtgtc

SEQ ID NO: 14641 - DNA, 240 bp, Oryza sativa
  Clone ID: PAT_MRT4530_2055C.1
atgggccggctgcggaccgtgggcctggaacaggttgcaggcgtcaaaagaggcattctgaaaggccagcaggcccaagagcccgttctttccgatcgatcgaggaagccaacagacagcgccgccgcagtccgcacgacgctcgagcagattggcctccggcgaccggagaaccgcgagatgaaacaagccctgcaagagaagcggtgccctgcctgcagggagcaccccatggattaa

SEQ ID NO: 14642 - DNA, 339 bp, Oryza sativa
  Clone ID: PAT_MRT4530_20560C.1
atggctgcggcggagtgcgaggacgagtcgccggagtcggctatggtggcgagtggcgacgttggcagtggtccaaccgttgggcacagtggcgtggagcatgcacaagagcggctcatactggttcaacagcagccggccggcatcctctccccctctccagcgggacggcgttgcttgaggccacggagagtattgacggtgatgaatctcatgcgcagtttcaatgcgcagtttcaagatgcaaaatttgatcaaattccaaagagaagtaaaaggttaccgagcttatttaatgcaatgggcaccatcctagtcattgggttgggaatggcctaa

SEQ ID NO: 14643 - DNA, 433 bp, Oryza sativa
  Clone ID: PAT_MRT4530_20561C.1
gccacaaatcacacggcgcgaggcgaggcgaggcgaggcggtggctgctgcggaattgagcttggatcccggagggattacgcggcggcggcggcgccaccatggagccgagcatctaggcgaggattcagttgtcttatggatccagatgttctcgtggagccgtaagcagtcgtcctcctccggccgccgcggcgcggacgcgtcgtcgatggactccagcagccgcggcggcggaggggaagggagcggaagcgggagccgcgggcgtagctcgcggctggagcgccgcaacgcggtgaagcacatcgactacgaggcggcgggggcgggggcgggggcgggggcgtcgtccgagccggcgtgcgcgtcgtggtcgtcgtccatgtcggcggaccggtcgactggggctccggccgtcgagctcgctcga

SEQ ID NO: 14644 - DNA, 515 bp, Oryza sativa
  Clone ID: PAT_MRT4530_20562C.1
ggtatccctgacctgtacactcgccatgatcaacgttactcccatacttgtagggtgccctcttcgggtaccagttgtcatggtcattgtcgtcatcggagactgggtcctgccaatactttcactagcagctgccagctcaagtgcggggtcatcgatcttctgctccaattccatggatctcactgctctcccagattctgtgggaggtatcagctgtcggcgatgatggctttcttgtcctggttcctaacggccgcttcctcactcttcaacctctggttcatcgcctcccggtgaccactgctgattgctgattctggattacgccctaactccagtatgactccacaatcagtcatggatttggataccgtatgtgcatagcactatagcttggaaagtctatttattttgtaattttagtcattgtgggtctgaatgaagagtggtgaagttacactccacatgaatacatgatcatcaatttctgaacctaaaaaaaaaaaaaaaaa

SEQ ID NO: 14645 - DNA, 284 bp, Oryza sativa
  Clone ID: PAT_MRT4530_20563C.1
cagcctggcgccgctcgacgcgctggacccagacctggttcgacaacgcctgagctgaccccaacctgttcgcccagcgcgccatggctccactccgaacaggtgctgcgttcaatggcgcctcgcaggacgcgctggtgcaacagtacagctccaacccggcgctcttcacccccgatcttcccgccgccatgatcaaagatggcggtacatctacccgctcaccggagccccgaccagatcaggcgcagtctgcaggtccgtcgacagcacctgtatggatt

SEQ ID NO: 14646 - DNA, 301 bp, Oryza sativa
  Clone ID: PAT_MRT4530_20564C.1
atgacagttgtgacggttggaatggtcggaaataccttccaaccgtcattgggggctaatctacaccgtccagccgcaaccctgcatccaacggcaccagggagggttcggccgaaccccctggttgagccgaaccaggggccggcccaaccagcccaggttttggctggtggccttctccgttgcttcacttcttagacttgtgaattttggcccaattcatcgtgttaattctgagttcttggcccattcatacataagtctgattctcgacattgtccgattgacttatcgtctgatt

SEQ ID NO: 14647 - DNA, 468 bp, Oryza sativa
  Clone ID: PAT_MRT4530_20565C.1
atgtcagccgctttgtcgtacatccacccgccggcatcgtcgtcctcctccgccacagcttggcgagtgtgctcggggaggagcaccgtggttgggcccggagcgcaggtggtggacgcacgcgagcgcaggcggcggaccgacgatggcacaggcgagcgtgggcagacgaactggctaatggtgaacgacgacgacaacacagcggacaaggcggctgacggtgaacggacgacgtcatggctaacatgggcgcgggagcgggcggtggacgatgacgatggcggcgacgactggaaagaagatgagttgagagtaggggagccccacaccgtttcccccgctgctagacaccaccaccatcttgtcgccgccgccgctagatactaccaccatctcaccaccgcctcaagatttactcgatcatcgaggaccacggtggcaaggaggacggcgaggatggcatga

SEQ ID NO: 14648 - DNA, 357 bp, Oryza sativa
  Clone ID: PAT_MRT4530_20566C.1
aattaagaaggaaacaagattcataccgctccatggcaacttaaggcgacaatgggatcgctccaccaccatagcatcggtgctcgccggcgccgaggtggcagcgctggtctggtgggggaccgtgcttacctccaagggtgacgagggctctagcgaaactggcctggtactcatcaccaagggtcccatctgtgaggcggagatcagggagacggtcggctgcggctgcaccgacattggtggctcgtgcggtatcacgagcgcgaacctgagtggctacaacggcatgggctcctgcggcaacggcctactcttcaaggacggcaggggctgcggctcatgctacgaggtgaa

SEQ ID NO: 14649 - DNA, 362 bp, Oryza sativa
  Clone ID: PAT_MRT4530_20567C.1
taggtgtagcctgcaagtccctaacgaaggagtcaaggaggctgctggttacaagggacattttctacaccctgtctggcaccaggacacaaagtagcatgagagagtcgaggctaggcaaggtgcatttgtccactgatcatcgagcactggaccaccagtcgacgaggtcgtcttggtccattggcgcagcaagagtgagcctcgcgatggccaacaccttctgccagacttgcctcaagaagacaaaacagataagaactgcgagccagaggaagaacttacatcgaggcagtgcccaagcccgccaaagctctttccagcaggggaacggctgcatgccggagaagaagagctggtag

SEQ ID NO: 14650 - DNA, 384 bp, Oryza sativa
  Clone ID: PAT_MRT4530_20568C.1
aacctatctcagattgtccaaatcatgtgtaggatcgacggcgacatgtgtaaccaaacactcggcacgtctgatggatggctcggcgtgctgtacaagcaagatacgcctgctactggccaccacaatgctgaggagacgtgcccgccactgcatggccaccgtgctgccgccatgtcgaggagccacatctaccaccgctgtgttgaaagatgggagagagaccgaacaaacaaagtccagatgactaaagcctcaccttacgcaaaggcgtacttgtccggcccggaacgtacgacgcagcagcagttcatcgcatcgcacgaagaaaaagttctcttcgctggctcgcaaattctccgaccgcgatacggccgatgtgcc

SEQ ID NO: 14651 - DNA, 149 bp, Oryza sativa
  Clone ID: PAT_MRT4530_20569C.1
tccgattcacggtcgaccacgcgtccggtccaggtgctgcacctgcggaacctgccgtgggagtgcgcggaggaggagctcgtccagctctgacaaccagttcaggcgtatcggaaacactaaatgcggcgtacgcgccaaccgccatc

SEQ ID NO: 14652 - DNA, 2782 bp, Oryza sativa
  unsure (1)..(2782): unsure at all n locations
  Clone ID: PAT_MRT4530_2056C.1
cccacgcgtccgtttgcatttcgcacgcagagaagagaaaaaaaaagggaaaaagaaaatgtaccaggcgatcccgtacaacgcgaaccgggcttggccggcggcgagccggccggcgacggtttaattttaggntctcttaagcagtctgagacttttaggaaccatatccagtatgggaaattaaatggttgggttttcgatgactgtggggattgctcggttagccaaggatgcttcgtggacacgaatgatgatccttttgatgttgatgcgtacatgtacagggagcacgcgagtgggtccgcgggcagctatcttcggcatcgcgtgccggttgcattgcacctcgtgagtgaccgtgctacgacgtacgtaccatcatggctgctactatccccgcttctccggccactctgcagccatgcaagaaaaacgtgagcggcagcatgctcatccggtcgcctccgcgcgcttggaggaggaggcacccccagcacgttgtgatagctgatgcgagctcatcgtctcgtggcccgaaggcagcgacgggtggccggctcgagacgtcgactgacgctgcagcggtggccggggaggatattggcgtgatcctgaggctaacccccgcatagcactaaatatgcagtcttctatcccggggtggatgcaaagccatggcaaaggatcttcgttgacaggtatctacgtgacgagtggagtcaatgagtttgttgacatcaccgaagtacaaaagtttgtaaagtagatattatattataatcattagctttctacactttgtatgtataacttttacatccctactggaagatcgaacaagagctttgctctttctgtagagtatgtagagactataatattttgatatcctttcaatagaaacctgcattagtttaagaaagaataattactaatccaacatgaagactgcatcacatctcccatacactcgcaacggcctcaagttcttcatgaagcgcggtggtctcacgtccggcgaggtggaaggggtctgcgaccgtgcggcgcggaagtacgtggccaggaagatgggccttggcggcgggcgaggcatgccgccggtggtgatgcgcgtcgacttgatgagcgcctatgcgcagcacctccgcaacataatcaaggagcgtgttgcccacccgacacactacgacacccccctaaagggcttcaaggtgatcgtgaatgccggcaacggctgcggagggttcttcacgtgggacgtcctggagaagctgggagccgacacgacggggagcctccacctggagcccgacggcaagttccctcaccacatgcccaacccggaggacacgaccgcgatgtccctcacgcgcgatgcggtcctggaccacggcgcggacctcggcgtggtgttcgacaccgacgtggaccgcagcggcgtggtggacgccacgggcgcggccatcaacggcgatcggctcatcgcgctcatgtccgccatcgtgctggacgagcaccccggcacgacggtggtcacggacgcgcggaccagcgacgggctcacccgcttcatccaggccaggggcggccaccactgcctctaccgcgtcggctaccgaaacgtcattgacaagggcgtgcagctcaacgccgacggcgtcgagacgcacctcatgatggagaccaccggccacggcgcgctcaaggagaacaactttctcgacgacggtgcgtacatggtggtgaagattattatcgagatggtcaggatgagactcgtgggattggagggaagcgtaggaacactcatcatggaccttgaggagccggctgagtccaagctgatgaggatgaacattctgggagaagccaagtatgcaaaacaaaggggcactcaagcagtcgagacttttaggaaccatatccaggaagggaaactaaatggttgggttctcgatgactgtggggattgctcggttagccaaggatgcctcgtggacacgaatgatgatccttttgatgttgatgcgtacatgtacagggctaaattttttgatgagtacaagggagaactggggtgggtccacattcgccaaagtgtacataaccccaacatagcaataaatatgcagtcttctatccctggtggatgcaaatccatggcaaaggatcttcttgacaggtatctactgacgagtggagtcaatgagtttgttgacatcaccgaagtacaaaagtttgtaaagtagatattatattataatcattagctttctacactttgtatgtataacttttacatccctactggaagatcgaacaagagctttgctctttctgtagagtatgtagagactataatattttgatatcctttcaatagaaacctgcattagtttaagaaagaataattactaatgttatgtttattaatgtacatatacatgtttattgatcctattaacatacaagattcagttgcgcggtggtctcacgtccggcgaggtggaaggggtctgcgaccgtgcggcgcggaagtacgtggccaggaagatgggccttggcggcgggcgaggcatgccgccggtggtgatgcgcgtcgacttgatgagcgcctatgcgcagcacctccgcaacataatcaaggagcgtgttgcccacccgacacactacgacacccccctaaagggcttcaaggcaaacaaaattcccattactgaaatacatcattatgctgtattaatttggtccctacatcacatcaatgccatttgct

SEQ ID NO: 14653 - DNA, 478 bp, Oryza sativa
  unsure (1)..(478): unsure at all n locations
  Clone ID: PAT_MRT4530_20570C.1
gctatatctgtcttcaaacaaacttaacggaggaattccagatacattgggccaatgtcaaaatttggtgatcgtccaaatggacaagaacaatctgtcgggaaacattccagattcattaggaaatttaaagagcttgagtatgctcaacctttcctataacagtttgtcagggacaatcccaagaagtctaaatgattttaaatttatagctaaactagacttatctcacaattatttacaaggagaaatacctagaactggaatattggataatgcttcagttgtttcactggatggaaattcgggactttgtggaggagcaacgtatctccatctcccaccatgcccttctggtcctcgaaaaacagagagacgatactatttggtcaaaatatgatcccgatatntggttcatgtcactcgggtatgactacttttattcttgagagaggctcagaaaagatcaagactgatg

SEQ ID NO: 14654 - DNA, 138 bp, Oryza sativa
  Clone ID: PAT_MRT4530_20571C.1
atgaggaagaaggcgggggcacctcaccaccactttggcttcgggaatagtggggaaggaggaagagtgggtcatctagcgggcctcatcggccctggcgtagggcgaggcacatggaagaggcactgcaagtcgtga

SEQ ID NO: 14655 - DNA, 436 bp, Oryza sativa
  Clone ID: PAT_MRT4530_20572C.1
agaggaagaaattaactcacatattgttggcaaggtagacattagtgttgtcgaagaagccgacaaagccgccgcggcctgggccatcatcgagggtagtaaatttgtggaagaactcgtcgagggcacaccaagcttctccacctccaaatcatgttgtgaaggcggtggccgcttcgatagttggcaacggaaaggtcatgaggcaaaggcgagcgatgatgcccatcaagctgtgcgagatggcggatcgatgatgtcagcagcctcatttgcagaactggccggattcggaatggcggagccgtggaggcgatctaatcttctctgcctgaggtggagcggcacggtgccagcatcgaccgtcggggaaagagcaagtgcgcggaggcggcgatgtgatcgagcaccatgggaagaccttcctgctaagtag

SEQ ID NO: 14656 - DNA, 634 bp, Oryza sativa
  unsure (1)..(634): unsure at all n locations
  Clone ID: PAT_MRT4530_20573C.1
gtgatgattcactgtgatgtatttgactgagaagttagaaatttgtgattcattgtttggatctgtgatgtatttgagaaatttcttaggatattatgatgtatttgatttgtgtgcataagtaactttatgattgtgatgtggatttggtgatgtgaatttgggatgttagttagatttgcggattgatttggggatttgcctacttgattcgggagaaaataaaaatgaaaaaagaaaaagaaaaaggaaccatctgcactgccgctattgtctctttagtcctggttgggtaacagatccctttagtcaaccgggaataaagatgtatctttagtcccggttattttaaccgggactaaagatggacatctttagtcccggatccttactcccggttggaaaatcggggttaaagggggttctcaaccgggagtaaagatcgtttctccatccgtgatagtacataacccttataattaatcatcaatatcctaattaagcaaactagttacatatgtctatcttgggtacgtagatatagacaggattacattacattagtgntccatttaagaggtgtagacggcaaagggaccagacataacaaaagccatctcaagaccagctttgc

SEQ ID NO: 14657 - DNA, 1048 bp, Oryza sativa
  Clone ID: PAT_MRT4530_20574C.1
ttttagcagattgttaagcacaggaactgtgcttgtttcgaccagtaataaagcacctgaagatctgaatcaggatgggatgcagcgggaaattttccttgacttattgtctaagttggacgagaactgcaacaaaattcttgttggaaccgaaacagattatcgccgcctaattccaactgacggcttaactcagattcactacttttggcctctcacttctgacattcggagtatgtatgaggctatgtggcacgatataactagacaaacaggaggaaacattatttctgtcaccattccagtaatgtttgggaggtatcttgagattcctaaaagttgcaatggagtggcaaggtatgagggcgagtatccttttggcccattaccagccgctgcagacttttggtaaataggccaaaactactgtccacgtttaagttgggacaaaatttggcaaatcataagaaatcctgccaaaattttgacaatattatcatcttgctaaaattttggcattgctaaaatttggtaaggtttattttggctacaatctgaacaaacccttaaatatgagcactgtccatgagtcatgactttgtctggacctatatttctttccaaaatttctggacatgtttgtattcaatttctaacccgtgttttcatgtcggcggtacaccatgtttgagttagatactgtcatcattcttctttgaattaataactgcaatgttcatctgtttcacagatatcccgtctcatagaaatgcagacctcactgtatctggagcgcgtcgagcgtgtgcactcatccctccaacagcagagttcggttcttacaaagagcagcactgtttcgcagtctgctccgtccgtttgacagacgagacccttatagtaccattatttcatttcttatcgtggaaaaaattgtcgaaagcactaataagattggagaacctacttgccgtctgtacaatgcactgaaccgtacaaaacataagtgattcgagcaattgcgtcgcacatattcttatgacttcct

SEQ ID NO: 14658 - DNA, 3631 bp, Oryza sativa
  unsure (1)..(3631): unsure at all n locations
  Clone ID: PAT_MRT4530_20575C.1
atgcattcccgccaccaacgcctggcgtcgctgacgaagttgctcacttcccaggtcaacgtcggccgtcaccgggatgctctcgccttcttctccagcatggtctcggacccctccctccggccgctctccgacccctccttggcntacgccttcccgctggccctcaagtcctcttccgccctccgcctcccctcagcggcggccgccgcagactccctccacgccctcgccgccaagtgtggcttcctctccagtccattcttcgcctccgcgctcgtcgcctcctacggcgcatgcgcctcccccgccctcgcccgccgcctgttcgacgaattgccccaccgcaacgccatcgtctgtagcgccatgatctccgtccacatccgatcgggcgacctcgcgggggcgctgcgtgagctcgatctcatggatgtggcgccgaccgcctcctgcttcaactctgtgatcgccgcggttgctgagtccggggaacatccggcccgggccatcgatctctaccgacggatgcagagaatgggcgttctcccgagcctcattactctgctggcgctcgtcccctcgtgcacggcgctgggtgcgttgagctcaatcaaggaggttcacggttttgctacgcggcacggcatgtttgcgagctgccacctaggaagctccctcattgaagcatacgggcgatgtggttctctggctggcgcacggaacgtgtttgaccaggtgcaggagcgcgatgtggttgtctggagctctattgtatcagcatatgcattccatggccacgcagatgttgcaatgtcgcttttcaggcatatggagctggacaatgtccggcctgatggcataatgttccttggcgtattaaaggcttgcggccatgctggtcacgcagatgatgcattgaagtatttcgatgttctaaccaaaatatttggggtcgaggcctgtggagatcactattcatgcttggttgatgtcttgggccgggcaggaagactacgccaagcttatgatgttatacagacaatgccagttaaggttactgcgaaagcctggggtgctcttcttgctgcttgcaggaaatatggggaggtggggttggcagaggttgcagggagagcattgtttgagattgaaccggagaatgcaggtaactttgtttcacttgcgaacatctattcaggcatgggtatgcatgacaaggcagaacaggcagtgagatcagcatcaagcactaccagcgggcaccagcagatgcatgtgggccacagcactagccagtaccacggatggttccgtcttcctggccgtgcaagccagtccacttctcatcatcctctgtccgtgcaagggacggcgctcctgatctttgttatcttctccctcagtggcatcttctcatgttgctaccactgggacaagctccgtgccttcctctggtctcggcatcctgatgtgatactccaagaaggccagcacaccgtcatctccattgcgtctccgagcaagacaacatctgatcacaagaacgagaaagcagagaaagagtgtggtttgcccgttattatgcctggggacaggatccccaaattcttcgccaggccgtgcccgcatgagaagtgtttgcctgcagcagaggaggaggaagctgagcccatcccaggtgtggcactgatgcataccagctactggtggcatttggctattctgaagtatgaaccagcgatcgatggtgcgtatcgtgggtggaggcaatttggatggggttttgctgttgcaatgcgtgctgatggttgcccactttgctggactgcaatccgtgtgcagaccgtgtacgatgcatatggtcctcttacgctctacagggatctggtgagccaagggaaactccaacatgacatctaccaggaaaatgtagcaactcagctggacaacttacttagacgacttgagcaatacgagatggaaatggaggattaccatgcaagactctctatgtgggaaaatacccgggagaaacaaaggcgaaggcttcttgttcaagaagctgaggataaacagcgtgatggggtgtggatagatgagaaaagggggtttcttgacaagttagtgtcaaggaaaagaagaggaaatatagaacctggagttgggaaatgggtctcatatttgaaccgagaaaagaaactggataccttggttggccagaagcctgttgcacccattgctccgaaaggaatatatctttacggcaatgttggaagtggaaagacaatgctgatggacatgttctatggggccacagaaggtcttatcaagcacaggaggagattccactttcacgaggctatgcttgaaatacatgatcatatgcatgatgtatggaagagacgtgatgaggacaagtctattgagtcgagtgctttcagttggatatcaagcctcccttttgatgggaaaattaaggagtggctaattggggaagagaagtacaaacaaaatacacaacaaaaccatatccttttagctgtcgctgacaaatttcttgttgatagacaagcaaataagagtggagcaagcattctatgctttgacgagatacaggatgggatgcagcgggaaattttccttgacttattgtctaagttggacgagaactgcaacaaaattcttgttggaaccgaaacagattatcgccgcctaattccaactgacggcttaactcagattcactacttttggcctctcacttctgacattcggagtatgtatgaggctatgtggcacgatataactagacaaacaggaggaaacattatttctgtcaccattccagtaatgtttgggaggtatcttgagattcctaaaagttgcaatggagtggcaaggtttgacttcgagtatctgtgtggccgcccagttggagctgcagactatatagcaatagccaggaactaccatacaattttcatatcggatattccagctatgagtatgaagattcgtgacaaagcaagaagatttatcacccttattgatgagctctacaatcatcactgccgtcttgtatgtctagctgcctcatccattgatgatctttttcaaggaactgatgaaggacctctttttgacttggagagttttcagttcgaaggtgaagctgaaggggcaaagcttaggagggatgttttagcagaaggtaatgttggtgcagcgccttctcctacaggcctagtggcaattttgtctggccaagaagagatgtttgcattccgtagggcgatatcccgtctcatagaaatgcagacctcactgtatctggagcgcgtcgagcgtgtgcactcatccctccaacagcagagttcggttcttacaaagagcagcactgtttcgcagtctgctccgtccgtttgacagacgagacccttatagtaccattatttcatttcttatcgtggaaaaaattgtcgaaagcactaataagattggagaacctacttgccgtctgtacaatgcactgaaccgtacaaaacataagtgattcgagcaattgcgtcgcacatattcttatgacttcctaattcctatccaattatgctaaaaaaccccaaacaag

SEQ ID NO: 14659 - DNA, 458 bp, Oryza sativa
  Clone ID: PAT_MRT4530_20576C.1
atatatttcaccgaaatgaaaaagtttagaaagcaccaaaacatgtttttggacatactgtagagaattgggtgcgtccgtgtcgaaaaattactccgtgactcaagcggcgaagttttgttaattaatgccaatattggcctatgttggcacacgtgggtgcgatgtttttcaccggaatgaagaacttcaaaaagcagcaaaacatgatttttggacatattggagtatggtgggtgagtccgtgtcgaaaaatcactccgtgactcgcgcgacgaacttttgtcaattaatgccaacattggcttatattggcacacgtgggtgagttgtttttcatcggaatgaaaaagttcaaaaagtactgatttttggacatattggagtgtcttgggtgcgtccgtgtcgaaaaatcactctgtgactcgcgcagtgaacttttatcactgaatgccaat

SEQ ID NO: 14660 - DNA, 738 bp, Oryza sativa
  Clone ID: PAT_MRT4530_20577C.1
ccggaattcccgggtcgacccacgcgtccggggaacacaagagccaggaaaacgggaaaatgcatgcttgcggccatgatgctcacactgcaatgcttctgggagcagccaagctacttcagaaacgcaagaacgaactcaagggcactgtaaagctggtgttccagccagcagaggaggggagcgcaggtgcctactatgttcttcaggaaggcgtcctcgacgacgtgtcggcgatgtttgggatgcacgtcgatccggctcttccggtgggcgtggttgcagccaggcctgggccattcgccgcaacgtcaggcaggttcttggcaactatcactggaaagggtggccatgctgcattcccccatgacgccattgatcctgttgtcgctgcatccaatgccatcctcagccttcagcagattgtcgcccgcgaaatcgatcccctccagggcgcggtggtatccatcacctttgtgaaaggaggagaagcttacaatgttattcctcagtctgtggagtttggtggcaccatgaggagcatgactgatgagggtttagcatatctaatgaagaggatcaaagagatagtggaagggcaggcggcggtgaaccggtgcggcgggcggcgtggacttcatggaggagtcgatgcggccgtacccggcggtggtgaacgacgaggggatgtacgcgcacgcgcgggcgttggcggagcggctgctgggcgccggcggc

SEQ ID NO: 14661 - DNA, 942 bp, Oryza sativa
  Clone ID: PAT_MRT4530_20578C.1
atggcaaggcaattctataccgatgcaatattccatttgcacattatccggacctttctcttcctggaaaaagaggacgtcgcgctcggcctcctgatgctctcacgcgacaccggcatgtggcgctcaccggtcaaggcggagacgtttgagaagccggagcaaaagaagaaggacgaggaggattcagctctgctccagcctcgccgcctaccgcccatctggcgccgctcaccctcgccgcctgtggccatggtgttcggccccgtcgccacgcagaggtacggccccgacatgacgctgcgggaggcgctggacgggaggggagacatctatcggacgctgctgcgggaggccacggcggcgctcctcaacgcctactacaacgctcccggcgttgcagcgtcgcctcacgtcgcagccgccgccgacactgcgctcgctcgccgacgccgcctcgccctgccgcaacgcgggagcaggagggcgttagcggcaggatggtggcttatggggacattgacgtggtcgcggctgctgcgaaagaagaacatggagcagaagtcatgtcttgtagtcatctcatcggtggcggcgacgtttccgcggagctcccttgcgtggttttcttggaagaggacagaggagcaaaacaattgcgtggatgatgtattgaccggcgacgccggcggtgaccgcggatgtcagcaaaacacaaggatcaaactgaaaacgctcacgctcactcgaggatggattctaatctctcgggcgcctgtcgtggcgagcacgggcgcgctcgtcgccacggataccgacaaagcgggggcagtaggggcgccaccggggacggtcgtggcgagccgcttggtcgcgcagggaccgaccgtggcggggcctgagccgaatgccccagggatggcgccgcctggctgggactga

SEQ ID NO: 14662 - DNA, 269 bp, Oryza sativa
  Clone ID: PAT_MRT4530_20579C.1
cgttaaaaacacaaggcgcgttttgccattatttacacgcaagtttattttacatgatttcaagaagaaaaaagcaccctcgtacgaaaatctcgaaactatatagagagaggaaacaaaaatttcccacacttttgttcgtacaactatgaaatttattaaacacgcacaagtgcgacagatcgatcaaaccatggtcgccctcacgtcgccttctcctcctgctcctgggcctcctggtgcttcccacgcgtccgcccacgcgtccg

SEQ ID NO: 14663 - DNA, 1534 bp, Oryza sativa
  Clone ID: PAT_MRT4530_2057C.1
atggccatttttcttgtcttagcgctatccatagcacagcttcttccgtccctcgtcgctggcaccggccggccaagggtcatcattgttggcgctggcatatccggtatctcagcggggaagcggatatgggaggctgggatagcagacgtattgatcttagaggcgacagaccgcattggcgggcggatgcacaagcagagtttcgccggcgtcaatgtggagatcggtgccaactgggtggagggcgtcaatggcgaaaagaagaaccccatttggcccatcgtcaactccaccctcaagctcagaagcttccgctccgactttgacagccttgcccagaacgtctacaaggacggaggcctctgtgacgaagcatacgtgcagaagagaatggatcgggcagatgaagtggacaagagtggggagaatctctccgccacactgcacccaagcggccgggacgacatgtcaatcctttcaatgcaacggctcatcgcccgcctgcccaacggcccgtcgtcgccggtggacatggcggtggactacttcacctacgactacgagttcgccgagccgccgcgcgtgaccagcctgcggaacaccgttcccctccccaccttcaccgacttcggagacgacacctacttcgtcgccgaccaacggggctacgaggccgtcgtccaccacctcgccggccagtacctcgacgccgacaagtccggcaacatcgccgacgcccgcctgcagctcaacaaggtggtgcgtgagatctcctactcctcgaccggcgtcaccgtgaagacggaggacaactcgacgtaccaggcagactatgtcatggtttctgcgagcttgggagtcctgcagagcgatctcatacagttcaagccacagctgccttcttggaagattcttgcgatctaccaattcgacatggccgtgtacaccaagatattcgtcaagttccccaagaaattctggcccgaaggggcagggagggagttcttcctctacgcgagcaccaggagaggctactacggagtctggcaggagtttgagaagcaatacccggatgccaatgtgctcctggtgacggtgaccgacgaggagtcgaggcggatcgagcagcagccggacagccagaccaaggcagagatcatggaggttgtgaggtgcatgttccctgacgaggacgtccccgacgccaccgacatcctcgtcccgagatggtggtccgacaggttcttccggggcagcttctccaactggcccatcggcgtcagtcgctacgagcatgaccagctcagggcgccggttgggagagtctacttcaccggtgagcacacgagcgagcgctacaatggctatgtccatggagcttatcttgcaggtattgactctgcagagattctgatcaactgtgtgtgcacagaagaagatgtgcaaatataatgtcgggcgcaagcacggcttcagtgatggaatgagaaatgtgagattccacaatttgctcatcgagcagttgagctga

SEQ ID NO: 14664 - DNA, 372 bp, Oryza sativa
  Clone ID: PAT_MRT4530_20580C.1
gacggtctgaccgggcctgttagccggtctgaccggcgtgataaggccggtctgaccggcttcaatgtgtggtacttgatcatccgcggcaagcatcctagacttgttactcttggaggttgccgcctcctagacggcttgtggaggtgttgcccggtgacctctccgaggagattgtggaggaggcctggcgccagttgtgagtggtttggagttcaccaccttcggagtgaaggaagaactaccctagtgatcgaggctttggtagtcctctccgtgggccggctcccgccttgccaccctttgatgaagggggcgtgcgatggcttcgtggttgagcggtggagttgggctcgcctcaacggggactag

SEQ ID NO: 14665 - DNA, 1929 bp, Oryza sativa
  Clone ID: PAT_MRT4530_20581C.1
gcacgaggctcctctcacgcccgtacccacgccctaaaaacgcctcgcccccgccgccacgccaggcctgccgctgccgctccgccgcccctctcacgcctgccgccgccgctccgccgccgcccttcgtgccgctcgggaggagttgcgacggggtcgagcccctcatcgccgaccacctttcttcgctcgcagccgccgtcgtagcgggcgtcgtcgtcaccagacacctgcgatcatcattccctctgtgtcacctcgccgtccgtctgtactacacctctgccgccgggcagccgccgtcgtagcgtgcgtcgtcgtcaccagcgatcaccattccctcagtgccgcctcgccgtccatccgtactccacctctgccgctgggactcagggccgaacagatctccccggccgcggtcgctcgttcttttgctgcaaaactaaaatgatttggcctggtgaacctaaagcagttttctgatgcagtgttgctgcaatctgacactaggcgtgatccacggagacagtagcactacccatgcctcgtcccgtatcacagcgaacagctgcttctatccctcacaatctcattccctgaattgaagattctgaaaaagactgaaatgaaagagtttgttgggggcaccgcaccatcaagtacaacatcagaccctcttgctgatataacaaatacaaatggtctcggtttcactaatagacggggcaagggtagagccaagtcgttatgtgttgttcgaagaaacgacgaagagtgtcacggctctaaagaaaactgtgacaactctgaacagaacactccaatagcttcaaatggtgcgcatggagatgttactaaccttacccatgctgaagttgcaagaaagcgtgctagaaactggtacacatcattgacccaggagcaaaaggatgagaggaacaagaaggaccatgagagaagaaaacggaagaaggaggaaagtcaagttttaaagtctgcaaccaatagtggtgtagaacgaagtgatgcttcccatcttaatatcacacccagacgtctcccatttacaatcatcaacaatgtagctcactatggtccaaatgaagttccaatgagctgcgtaattcaaacaacccaaaacagagactgtcaagttgctgtaatgcaactcttacaccggagcagaagcaagctaaggtctgatcgacagagaacaagactgtcaagcactaaccaatgaacagagactagagatgaatgatcgccgtaggggttgcaaggcaaactctgccggatgtggaaatacatgatatgaatgctcgccagcgatcaagacgacaaagtgttactcctggagaacggtctgctcatctggcacgacgtaatgaactgtatgcagctaggcgtgacaaaccatgcactcaatcgattgcattggagtgccctgaggattgtagctcgtcgttgctaaatccaacgccttcctttgaaacaaccggtgatgtgccagctacatcgagcctgcaaactgaacttgctgcagatcatcttgcacgatcgtctaactttgatgatggtatggattccttcatggatgatgacaccgacgatgaacactacatgtttgctgggctaggcgatgatgaggatgacgagatggtacaatccgatgacgatgacacgcaagcaccgagctcttcaattcctgatccgttcgactttgtgtatagcaacatcccacagagcgaaaatgttctgaaacctgagcctgactgtaaacactgtggtgccaagaggttccagtacgaaccgccgggcttctgttgtcgggatggcgagatcaagcttgtagaaaacgaaacaccacctgaaatagtttcattacgatgccatatttgtcttttcgatgccatattttatcccccgtga

SEQ ID NO: 14666 - DNA, 169 bp, Oryza sativa
  Clone ID: PAT_MRT4530_20582C.1
tggataagatcgcgagcggccgaccataatttttggttttttgaccatcaaaaggccatcgaattcgtagtctacggcgtgctaaggatggaaaagtggttatactgctgctagagtgctatcccgaatgctaccggaatccggtgtttaatctgaatgtagggtgatg

SEQ ID NO: 14667 - DNA, 940 bp, Oryza sativa
  Clone ID: PAT_MRT4530_20583C.1
atgtcggtgagcggcatggcgtgggcgcacgcggtgatgggctgggcggcggtggcgttcgccctcttcgtcctcgccatcaccaccgccgacgcgtcgtcgtcgcaggggccctgcgccgcctacggcggcggcagcggcggcgccacgttcatgcgcgccggggcggcgctggtgctgctgtcggcgacggcgcaggcggtggcggcgacggcggcgcgggcggctgcgaacggggcgcggttcctgtcggggttctttgccctggtggcgcacttcgccggcgcgtacaccgccgccgtcctctccgagctggtccccgtcgtggtcgccgccgccggcggggtctgcgccgcgtccggctacaagcacatgctggaacgcgtctcctctcctctcttctcttctctctccggcggcggcggcggcggaatccgatccgaaccaaggtacgtgctcgccgacccccgcccccctagacctagggctcccagatctctcgcggatctgctctctccgttcatctcctccatggtgctgcgcctctccgtcggacttctctacgtataagctgggcttcctaactcgttcgttcgtgggtcctgccgtgtttgcgcagcgagctcgcctgcgttttgggggtcccagtttcatcttctctgatgaatttgtgcatgaatcgtcgagatttgaagtggtcgtgtttgatcgattacaagctaccgattcctcagggatgatcgatcgatcgatcgcggagtctactctgtgatcctcttaaccaaatactatgattaattggagcaggggcggaggcaaatgactttttgctaatcccactattaatacacattacgaatagaaaattgctgttgtgaacatatactttgacaccattatagttgaagaatggacccatcgatactaccactggtttcga

SEQ ID NO: 14668 - DNA, 1169 bp, Oryza sativa
  Clone ID: PAT_MRT4530_20584C.1
acgcactacccatcggcggtgatcgccatggcgaacaagctggtctcggagatgcgggtacctccccacctcgcccacatgctcgccgcgcgccggctcaccaccgccaaggtcagcccccgccgccgccctccaaaacccctccccctgctccaacaccaaccgccgccgctaaaccccattctacccaggacgtgctgtcgctgccggaggtggagctcatgggcgtcctcgacgccggcatccacaccgcccgcgccgccgtcgcccacgtcagcgagatcgcctgccctccgtaccaaacggcgcttgcgctcctcgaggccttcagggcaagaggagatgggcggctggccaccacgctccgcggattggatgaggcattgcatggaggaatccccgcagggaagctcactgaggtcgctgggccctcggggattggcaagacccagttctgtctgaagctggctttgctagcaacattaccagaatgctatggaggcttaaatggtcgagttttgtatattgatactgaatccaaattctcttcacggaggatgatcgagattggtgagaaaagctttcctcaaatatttcgtcaagaaggcttggcccaaaagatggctgggaggatcctagtcctgcgcccaacatcattatctgaatttaccaagagtttggaacagatgaaggtgactcttcttcagcatgatgtgaagctacttgttgttgatagcatggctgctcttatgtcatcatctatagcagagttctcacagattcctgttgttgttacaaaccaagtacgcagccaaagtaatgatgatggctatcgttattcatttgaagttgagaagaaatacgatagtaataatgctgaaggctttgaatctcatcttgttgctgctctaggaatccagtgggctcatgctgtaactatacgtctagtctttgaggctcactcaggtcacaggtacatcaaggtagctaaatcccctatgactccagcggtagcttttccctttactgtggagtcatcaggaataatattacttagtgatgagggcattgatgtgccatctcctgaaataacctcaatccgttgtcaaggttgcaatataagaactgaagatatttcttcagtccccagggatggcacaaatggctga

SEQ ID NO: 14669 - DNA, 174 bp, Oryza sativa
  Clone ID: PAT_MRT4530_20585C.1
atgtctctgacatttctgatgatgaggagttgtgatgagggtccctctggcacttctcgtttcttcaatgaggagtcctctcactccgagaagagtagcgatgatgaggagtcagatgcccctactgagaatattcctacagatccagatgaggcagtggacgccgccgggtaa

SEQ ID NO: 14670 - DNA, 360 bp, Oryza sativa
  Clone ID: PAT_MRT4530_20586C.1
atgcagtgtttcgtgggaatcaggggtaagggagaagcactcttaaatgaagagaaggaggtggaaatatatcgatcaatcaatcgaaagtctgccagcgatctacaattacatgagaaggcccaaaagtccaatttaataatcacaaatgggcctagaatgtatgtcactgatttaggggcccacatggaagtctccaggaggaagctgagggccagaagagcccatagggggtccgccgaccctttgttgagcccaatccagtcacattttggccaagagataagggagaccgaggaggtagcagcaggccaaaaaccaggcctattgggccactctagggttcggccgaaccactag

SEQ ID NO: 14671 - DNA, 404 bp, Oryza sativa
  unsure (1)..(404): unsure at all n locations
  Clone ID: PAT_MRT4530_20587C.1
tgatgcangancnggngttgatncntncagnctgnttgtcacnatcgngnaagcggtgcacacggctcgncggnnccgggatctgtacggnagctcactcaccacttccagatngtcggaggcctgctccgtnagctgcanatcccggagctgangcggcacccgganacccggcggccnctggatcaactggacganacgctcctccgcgcgtncaaactcntcaggtcttgcagccantgccnaaaacaaaacgccngncagctctncngaatcatcaatggancaaccntggnctgcaaactccngggggngcaagangaaattgancgctacatccaactcatccccctgatnactctggttggcnccgtcntcctccctcngggnacccangaagtcat

SEQ ID NO: 14672 - DNA, 540 bp, Oryza sativa
  Clone ID: PAT_MRT4530_20588C.1
gcacgaggggaccatcccccattgttttaaatcttgcaatatcagatgagtcacagtagtgtagataccatcaatcagcaagaatctagaggaaaggaagggattgtgatggcaatttgctagcaaaactgtgaaagagatgtggaacaaggttccaacaaattgaggtctctaaaagagtaaaaggtcaataggaaaaaaatggtatcccttgtccagcaagaagtagcatccgaggccgaattgtttccttgttcttgattgcattttttgcagaatatgctgctgcatcgattaatccagactgctctgcgtcaaataactctatggatcattctgctcaatctaattcgaacatgacactttattgccaaaaaccaactgtaatgaataaatcactaacaaagattattcagttggccacttgtgggctcgaaagcacaactattttcagtcataaatttaccaaatgacacatggttgcactgaatgaaactttaaatgtgcttattcatgtacatgtatgagaaatatgtgata

SEQ ID NO: 14673 - DNA, 180 bp, Oryza sativa
  Clone ID: PAT_MRT4530_20589C.1
atggtggtggtggcaggagagagaaagaggaggaggaggaggaaggctgacaaagtggggcccacctcgtcagtgagtggacccgggggggggctcgggatcctctgcggccgtaactctgtgagcggctgccagtacaagacggaatgtgtggcgccgttggtgatgactgatgagtga

SEQ ID NO: 14674 - DNA, 510 bp, Oryza sativa
  Clone ID: PAT_MRT4530_2058C.1
atggcggaggccagccgcgatgatgtcaacggccacggaatgaggatggccgagagctttccacgacgacgagtgagagcttctcgaggccttgtggtggcgaatctgcatgctcgaggcccaaagacggcagatccacctgcgtcaagctcggcggcggtggatctagattcccaaggccctatggttgcaaacctgatgctcctgaggccggtgacggcggattcaagctgtggaggtcacatcgctgtcatcacgatcgtggtcacagtcgtcatcactattgtcgttgtggtggtggtcacggtcatcgttgcaggcccaattgatgtccctttgactcctaaggcccaccaactacgggcgtggtcgatgacggcagtgggcaggagcggagcgttggctgtgataggtaggtacggaggaggaaggccaggagagggaggacttgggggaggagatggggatgggggagagtctgctcgctcgggtgggaaggaggtggagtag

SEQ ID NO: 14675 - DNA, 237 bp, Oryza sativa
  Clone ID: PAT_MRT4530_20590C.1
gcgtgcgctcctttaccattttggaacatcaacgctcacagcgacgcgtatattactcaaggccgtgcccagggtcaaggtgggaacaacaatggaaagacagtggtcaacagcgagcttcaccgcggacagctgcttattataccacaacactatgcacatgtctagaaagcacaaaaagaaggatgtgcttacattggattctacaccaaatctaactctattgttagccacatt

SEQ ID NO: 14676 - DNA, 363 bp, Oryza sativa
  Clone ID: PAT_MRT4530_20591C.1
atgaaaaaccgcaacgtctctatcaagggcaaccaacacctcgtagtataccacatccagcgccataacaaggtcgaagcgagaagcagctacgagggcctccattgcaagacagagacggagcctccatgggagtcaagtagggatgcgttgagggagccgttgtggcgaaggttggggagtaccatggggagatccaagaggatgggatgggcaggctgtgccatggccatgccaagcccggcggtgctggttcccgagctgagcttatggattcctagagagctcttcgaggtgaatgtccatgggaggaggtccagggaggctgggagcaggcaaaggagggtggagaccaacagctag

SEQ ID NO: 14677 - DNA, 258 bp, Oryza sativa
  Clone ID: PAT_MRT4530_20592C.1
actctctctgtttgaagccacggggaaattgtttgtttgattgcttgccagcgaatagcgaggggagaagaagaagaagaagaagaacaagaggggggaggaggaggatcttccaacttatttctgtggatgatgcagaatatctggacaaggttttcccgaaattcaatggacagtcacagcagtcagcctactacagctacaatgggcaaggaacttgttgaaaggtttccttcacttgcatttattttttcagat

SEQ ID NO: 14678 - DNA, 975 bp, Oryza sativa
  Clone ID: PAT_MRT4530_20593C.1
ctatcggcggccgcgggaggcacggagcagcggcctgcgcctctccccggccagccggtggcgcgggaccgcggcgcggcggcgccacgcaggggaccgcggccccagccgccgttccacctgcagctgcccacccgccgccgccgccgccgccgccgccacagcagacacctcctggtgcctgctctgccagccaccggcgtagcccttctcgatatccgccgtcagaggaggcgacgcgcttgcttgctcagtcaacagacaccgcgatggaaccccggcgtggacgaccacgctcgctaaaagggagcgcggccggccgctcacagccggccgcggcccgtggtcgtgcagcaggccgagccacagtggagcacaccccgcgcggtggaagcgactcctacggccatgcacgagccgaaacgacaagtgctcatctaaggcaaggcaaaagcagctcactgtgcgcaaccggacctagcagcccagctcatccgctcgcccgcagcgcggctgcccctgccgctggactagcatccctatgcctgctccggcttggttcaccagatgggcaagaatgtgatggagcgtgaacatcaggtgaagatttcgggcagacgaagaaactcctaggaacccaatcccatcaccttttcccttgggtccggcggcctccggctccagctgctcgccgccgccggcggccgcggcggggccgaagctcgccgccgtcgccctccccctcacgccggcgagcaggtccggctgcgtcttgggcctctgcctcgccagctggtgccacggctccgtgccgcgcccgtggaacgacgccgaccgctgccccggcccccgctgcagcagcagctgcccgcccgccgccgccgccgccgccgccgccgcagccgacgcctcctgctgcctgctctgccggccaccggcgtagcccttctcgatgtgcggcgtcagaggaggcat

SEQ ID NO: 14679 - DNA, 507 bp, Oryza sativa
  Clone ID: PAT_MRT4530_20594C.1
cgacttctcttcgatctcgcgccaactcatcaccgccatagcttagcttagcttaaccataattaagctagcttagcttagccatgctgacctcgctgagatacctggccggcctgctccgacctccgccacatcaccgccatcatcaccggggcgacgtcggggataggggcggagacggcgagggtgctggcgaagcgaggggcgaggctggtgctgccggcgaggagcctcaaggcggcggcggaggcgcgggcgcggctgctcgccgagtgccccgccgccgccggcgacgtggtggtgatgccgctggacctcagctcgctcgcctccgtccgccgcttcgccgcccgattcctcgcgctcggcctccctctcaacctcctcatcaacaacgccggcaagttcgccgaccgattcgccttgtccgacgacggcgtcgagatgaccttcgccacaaactacttggggcacttcctgctgacgaagctgctgatggagaagatg

SEQ ID NO: 14680 - DNA, 1890 bp, Oryza sativa
  unsure (1)..(1890): unsure at all n locations
  Clone ID: PAT_MRT4530_20595C.1
atgtcgatcgaggaggcgttaggtcgcctcaaggtcgtcgatggtgatgagccacggcctctctcggggcccatcaccatcggcgggaagctccatctcactcgggagcagtgggaggcctctcanggtgacgggaggaagggggagtcatcttccccgacaggcggccataagccgcgcaaggcgcggggaggtgtccagctacgaggcgcccagggcgttgccaccggcaaccacaagccggcacgagatgacacctgccgcaactgtggcaagcttggccattgggccaaagactgtcgacagccacgacgcggccaggcccacgtcgcacgggtggaggaggaagagccggctctgctcctagctcacgcaagcatcgagctacctccagcggcaccggccgcagcggctttcctccaccttgatgagccgaaggtactcgtctccctctgcgacggctccagcaacgacaaggctgatgggtggtacctcgacaccggcgccacccatcacatgaccggccgacgggagttcttcaccgagttcgactccagcgtccgaggcaccgtcaagttcggggacgcctccggcgtggagatcaagggtgttggctccgtcaccttcaccgccaagtccggtgagcacaggctgctcaccggagtctactacatccccgcgttgaggaattctatcatcagcgtgggacagctggatgagaacggctcacgcgtgttggtcgaggacggactcatgaggatttgggatcgccgtcgtcgccttcttgccaaggtaaccagaggcactaatcgactctacatctgttgatnnnnnnnnnnnnnnnnnnnnnnnnnnnnnnnnnnnnnnnnnnnnnnnnnnagatcccaccacggcgcggagggagaagaccggggcgccctggtccgcgtcgctaacggcgggctcctcgtccgcgagctcgatgccgtcgatgaagaagatgcggcggcagacccggttatggcccctggagtagggttcgttgcagttgtagcagaggccgaggcgacgacgttcggcctgttccgccggcgagaggcgcttggcctggttgggcgcaccccgcggaggtggagccgggagcgcggccacgggcggcgcaggcagcgccaggggagccggtgccgcaggcaggggcgcgcgcgccgccgggggaggcagtggtgcgcgctgtgcggcctggagcaggggcggctgggggcgctccaactccatcaactctacctggcgggcgagactcatcgcggcggcgagggactccgggttgtggagacggacggcgtggctgagcggagcgaggaggccgccggtgaagagttgcacgcgctgagattcatccagccgtcccgcgcgaggcaagagcgcctggaatcggttggcgtactcctccacggtcccggtacggcggcactcagagagctcgaacagcggtgcggaacggaggggaggcccgaaccggaggttcaggagctcctttaagcgcccccaggtgggagtgccctcgtcctcctggagctggttgaaccagagttgcgcgacctcgtccaggttgtaggacgccatccacacgcgctcctccgccatggtgcgatgttggcggaagtacgagtcgcacttgttcaggaagagcatcggatcggtggtgccatcgaaacggggaaagtcccacttcttgtgcttcgggggctgatcaaaatcccgcgcgccgtctggccgagggccgccgccgccggtgcccgacgacgaagcagacttctccttcagggccgccatatcagcttccatggcggacatcttcgtggagatggacttcagggactccaggacgtcggcgattgttggttcagtcat

SEQ ID NO: 14681 - DNA, 1504 bp, Oryza sativa
  Clone ID: PAT_MRT4530_20596C.1
tttttttttttttttttgaaagaagtcaaaacgttttataacatgaaacatgatacagcatatatcacgatattatacatatggtgtaattgtatgtatatatttacatctagcatattcttatacatatctaacatattatcttacatctaaactcagattacagtatacatataccattatactctagtgtttttactctctgtaattactcctctggtttctgaaactgacaatctaacttgaattttcttccaggctctgtgatgaatctctttgaatttgtcgggcgtcggcgatcaaaatgggattaattttttttcttcttctggtgatgatgaactgaactgatgatcttgctagctaggcgaaagccaagccacggtctgcattggagctctgaacctggagcctgaagctgccggcatgaacactctcctccttctcctccgcagcgacctcgtcggagaatctccacagcttggcggcctcgtcggcgttggatcccagcctcgacggcgacgcctcgttgcagtcggcgaagtacttgccggacactccggccaccgccgggtgcaccgccacgtagcacgtcgtcgccgccgcctgagggatcgtcttgagcagcttggacgccaggaagaagactgtattggtgacaaggccgtcgcgttctcggatgagccgggtcctgacgataccagggtggacgcagtttgccgtcacgttggctttcatctccttgagccgatccgcgagtgccctcgtgtggagaacgttggccagcttggagagcgcgtaggctctcgtcggatcgtacggtatcttcctgcgcgtgacggcgtcgatgtagccgacggcgtcgtcgccggcgaaccagctgtggattgtggaggatacgttgacgatgcggccctcgacgccggtcgccgccgccgtctccgccatcttctccatcagcagcttcgtcagcaggaagtgccccaagtagtttgtggcgaaggtcatctcgacgccgtcgtcggacaaggcgaatcggtcggcgaacttgccggcgttgttgatgaggaggttgagagggaggccgagcgcgaggaatcgggcggcgaagcggcggacggaggcgagcgagctgaggtccagcggcatcaccaccacgtcgccggcggcggcggggcactcggcgagcagccgcgcccgcgcctccgccgccgccttgaggctcctcgccggcagcaccagcctcgcccctcgcttcgccagcaccctcgccgtctccgcccctatccccgacgtcgccccggtgatgatggcggtgatgtggcggaggtcggagcaggccgcggtggcgtcctccgcggtggcgcgcgacccgaagccgctcgcccccgccgtgccggccaggtatctcagcgaggtcagcatggctaagctaagctagcttaacctctggttaagctaagctaagctatggcggtgatgagttggcgcgagatcgaagaga

SEQ ID NO: 14682 - DNA, 235 bp, Oryza sativa
  Clone ID: PAT_MRT4530_20597C.1
atatttggaatacgcttgcgtgctgccgtgctccatactcatctggggcattgctgctcgcccagatggccatgggtgtgggtcgctgcgcttcagcgccatccatttttcggggtgcttagttggattctggcaagtgtgcaggttgttcacagacgtccattcagcgggcatttctgcacttcccatgaaccaacctgtccatggctgatcatttaatctgcacctaactacc

SEQ ID NO: 14683 - DNA, 1487 bp, Oryza sativa
  unsure (1)..(1487): unsure at all n locations
  Clone ID: PAT_MRT4530_20598C.1
gatccccgggctgcaggctcgactccccgtctcgttcgcccgccgcgccgcgccgccttcccactgcatcccgcgccgcgccgccagccgccggtgagcagcatcttaggaaggaggggagcccgcggcggcggcggcggcggccaagatgagcgacgacgtgatatggcactgcatccggcacaaccactgcagcttcatggccaagatcacgacggggatattctgccggaacccgtacaacgccaccggaatatgcaaccggagctcctgccctctcgccaacagccgttacgccaccatccgggaccatgacggtattttctacctatacatgaaaacagctgaaagagcccatcttccgaacaaattatgggagagggtcaaactacccagaaattatgagaaagcaatggaagtcatcaataagcatcttgaattttggcccaagttacttgtgcacaaaattaagcagcgcctgacaaaaatgactcagtatcggataagaatgaggaagcttcaactgaaagtgagagagaaggtgatgacaatgcccaggaaggagactcagcgccatctcagaagaatggataaagctgaaaaggccgctcagttggaaaagaatattgaaagtgaattgaaggaacggttgaagaaaggtgtctatggtgacatctataactatcccttcaaagaatttgacactattcttgaaatggaaaaagatgatgtagctcctactgaggaagaggaagaagaagaggtggagtatgttgaaggtgatgatgaaatggatgacatggaagacattgaagattttggaggccttcctgatgatgatgaagatgatgataatgatggtgagacggatgaagatgatcttttggatgaaccggtagcaaagaaacctaaagggcgaggttctgatttgagatcaaatatagggaaaaaatccaagaagcttatcactgaggtggaacgagatgatgacatgggtatcagacgaaggacgcgaatgtgagttgtgcgagcactggcttcaattgcatatgccacggggtgctgtgctgtcagttttggttgtacctgagattggcttagacttagttgctgagaaatcaagatgagttgtggcatagaacattatatttatatgttggcaaactattaggtttagcgttcaaattgcaagataagtgtaacattattttgcagcaagcactttacaggaagatgctcactctggcctgaggcagttgtttagggttgtttgtatcaacttatccatcgacggataagccatccaatttggctcttaggcaagcgggtgttttgcgttacacagatcttaacagttccaacgtcacaaacaatctgtttgtaaccgctacggtccaccaaaancagtaattttnttaatgttttgcagcaacatttgatcaaactctntggtttaaaatgntcnaaaaaaaaaaaaaaaaaaaaaa

SEQ ID NO: 14684 - DNA, 258 bp, Oryza sativa
  Clone ID: PAT_MRT4530_20599C.1
atggggacgtcctgtggccacggagcccggcggatgtcgacgccccatcggtggaggaagtcggccggctgcagtagccaccgcaccagcggctccgcttgccttggcagcgctaccgcggacaacgacgccgcggccgctccccccgccgccgggtcgacgctcctctgcgcgctcgccgacgctctgtggtcccatgtttttttattaatttttcaagatataatgccacgtaagcgccacgtcaatgccacgtag

SEQ ID NO: 14685 - DNA, 2478 bp, Oryza sativa
  Clone ID: PAT_MRT4530_2059C.1
atggcgtcgttgtcttcctcaggcacagcagccgtaaacctttcccaaggccattccatctccgagaagctcggaaaaggcaaccacgcgctatggaaagcgcaagtgagtgctgcagtacgcggcgcccgactccagggctatctcaccggcgctgtgaaagctccagacgccaaaatctcggtcaccacagatggaaagaccgtgacaaagccgaacccgacatttgaagattgggaggccaacgatcaacttgttcttggctatatcttgtcatccctctcaagagatgtcctgattcaagtcgccacgagcaagatggcagctgaagcatggcgagctattgaagaactctactccaaccgcacgcgcgcaagagcagtgaataccagactcgccctcaccaacacgaagaaaggaacgatgaagatcgctgagtatatcgccaagatgcgtgctcttggtgatgagatggctgccggcgatgaagacttcagtcctatcgtctccgcactctgcaccaaatctgatccaatcacggttggggagttgtgttcgcaacttctcaactttgaaaccctccttgatctctaccgcagcactggtcaaggaggggctgcctttgtcgctaatcgcggcaggggcggcggcggcggtggcggacgcggcggcaacaacgccaccaacaactccaacggcggcggtggcaggggtgcaccacgaggacgtggtggcggccagatacgtggtggccgagggcgcggcacaggaggccaagacaggcgtccaacctgccaggtttgcttcaagcgtgggcataccgcagccgattgctggtatcgcttcgacgaggactacgttgcggatgaaaaactggttgctactgccactaactcgtatggtatagatacaaattggtatattgatataggtgctacagatcacattaccggcgagttagagaagctttccaccaaggagaagtacaacggcagcgagcagattcacactgctagtggagcaagtatggatattagccacattggtcatactactgttcatacccctagccgtaacattcctctaaataatgttctttatgttcctcaagccaagaaaagtcttgtatctgctagtcaattagccgctgataattctgctttccttgaacttcactcgaaattcttttctataaaggatcagttcacgagggacattctgcttgaagggagatgtaggcatggtctctatccaatccataagccctttggccaatcaaccagcaaacaagtccttggcgccgtcaagttacctctgtccagtactcatcacaaaggctttaagtgtcttgatgtctcgtcaggacgtgtctacatctctagggatgtcatctttgatgagaatatttttcctttttccacccttcatgcaaacgcaggagcgaggctgaaatatgagattttattgttaccatcttccttgacaaattacacggctaatatagggggtgtacatgtggttgaaccagtggttaatactccattgcctagtggtgcagaattaaatcctgatgctactaataatttttctagagaaaacagtgctgcaaatgagcagggaacccagccggaaattaacatggagagcgctggccacgaggcgccagacactgacaatctatccgcatcggcgtctgggccggaccagggagctgacaaccctggcgctgtctctggcgcctctgggagcgacgggggcgaggcgttgattatgaagacacttttagccctattaggaagaagcatgcaacaacctcctggttttgagtcttcttctaagcctaactatgtatctagctctacagagaaggcaacaacagcactcctgaaggacttgaacaaggaatttgcactcaaggacctgggtgatctacactactttcttggaatcgaggtaacaaaagtgtctaatggtatacttttgactcaagaaaaatatgccaatgatttgctaaagagggtaaatatgtcaaactgcaagccagttagtactcctctttctgttagtgaaaaattaactctatatgaagggtcaccattggggcccaatgatgcaactcagtatagaagtatagttggtgctttacaatacttgactttgactaggcctgatatagcttattcggtaaataaggtttgtcagttccttcatgctcccacaactgaccattggacagtagtgaaaaggatacttagatacctaaaccagtgcacaagtctaagacttaatatacataagagtgcttctactcttgttcatggatattcagatgcagactgggcaggtagcatagatgatagaaaatcaacaggagggtttgctgtttttctgggttctaatcttgtgtcatggagtgcaaggaaacaacctactgtgtcaaggtcaagtacagaagcagaatataagactagaatataa

SEQ ID NO: 14686 - DNA, 406 bp, Oryza sativa
  Clone ID: PAT_MRT4530_205C.1
ccacggcggggtgtcacctcaccagtcaccacccgcaatggaggaaggcgacggcgtcgtcatgccctcccctgctcccacctcgccgccgtcgcctccaccgccaccgccaccgccaccgcgaccttccgcacccgcagctacgggaggcgtcgccggccgcgtcggcgactcgccttcatcgccgctcgaatcgggaccgctcctccccgcctccaagtccgagctccttcgtctcccccacctccccgacgccgggagccgcaggcgtccccgtctcgccgtcgacatgtccgacgcagccggcaccaacggtcgtgtcatccccttccgcggcttctcgggaaggccacgtctcagctgtcactccgcctcccggaagcccgcagccgcagaaggccctccc

SEQ ID NO: 14687 - DNA, 329 bp, Oryza sativa
  Clone ID: PAT_MRT4530_20600C.1
gggacgcttgtgcatacgagggggctgcaatacgaaattgaggagatgtatactaatatcatggctgtgcatgccggcagcgtaatcattaatagggaaaagtgattcgacggctcgggaaggatattcgtggtccaccagcgaggacataggatattccatatgatgattgcagagattggcattccgcatgctatgtgggggggtgaactgagaatacaacctggagtcatggcctatgagagagcgagagctgctggctagccattgccttagaccgccttggtagcgcatatacattcgacagccagtgacattatgggaaaggg

SEQ ID NO: 14688 - DNA, 279 bp, Oryza sativa
  unsure (1)..(279): unsure at all n locations
  Clone ID: PAT_MRT4530_20601C.1
tcgacccagcgtccggtacctctcgagtggggaaagtgggatgggcaccatgccgacctcgtatcgcttccattctccatggacgagtaggtagctctcgtgagcttaatttacagcgcgattgccgtctccggtgcccgccacacctctcggagttgtgcggatgggtgcgatcgttttactgctcttccttggggggggcttaatgcccggttccaatgggcagacnacgcccttctccccgcgattctccgtctacctcgcgtgcggggcccgcgg

SEQ ID NO: 14689 - DNA, 1585 bp, Oryza sativa
  unsure (1)..(1585): unsure at all n locations
  Clone ID: PAT_MRT4530_20602C.1
tttttttttttttttagtagtatataaatattatatattgacacataacatattatatatatatttggcatacatatgtacacacacatgcacatacgcacttcgatgattgatctcattctcgaccagcagacgctcagacatgtacatttctcccaacacagcgacgacagaacaaaaaaaanaanaacaagaaaatcttacgatgctaattataagacacatatatatataattaattagctatgtatgtctcatggtggtcggcgtcggcggcggcagtagggccggcgagggacttggtccagcggcgggcgatgtcggcggcgatcatggcggcgtcgtaggaggtgccctggaggcccctcttggtgaatccggtggcgtagaggccgttcttccccctccagctgtgcgggaacgccttcctcgggaacccgtcgctctcgctgaagaactcctcctccttgagccatgatggcacattgcttttgtatccagtggcaaagatgacggcatcaaagtcctccctacagccattcacgaattcgaccccatcctctgtgaagcagtgtattgctgggaccacctttatttcgccgttcttgatctttttaagagcgccgatgtcaagcaccggtgttttcccggtagagcacttgatctggagtggaccaatcttaggtcgtcggaggccgtatttctcaatgtttccaaggatcaatctcgagaaaatgagtagtaaagcatcaacccattttatgggaaaccacttgagaaggaacactgagaggccaaatgttgagatgcccagaatctccctaggcagaacatgaatcttgtccctgacgaccatggaggtggcggcgccattgttgcagaggtcgaggctgacctccatgccggagttgccgcagccgacgacgagcaccttcttcccggcgaactcgtcccctctcttgtagctgctggtgtgcatcacggcgccgcggtaggcgcccacgccctccgccggccacgccgccaccgcgttctcgccggtggccaccaccagccaccgcgacaggaactccgtctcgcctccggcgcctccgccgccggcctcgtcgacggcggcgacgcgccagaagccgatggcggcgtcgtaggaggcggcgcggacgcgggacccgaggcggggctcgacggcgaaggcgcgggcgtaggcgtcgaggtaggcgacgaactggtcccgcgtcgggtacggcggcgtccccggcgggaacggcggcgcgagggggagctcgcagaagccgcgcgggaggtggaggcggaggcgctcgtaggtgcgctcccgccacgacgccgccacggtggcgtccttgtcgagcaccagcgacggcaccccgcgcgccttcaggcacgccgccgtcgccagccccgacggccccgcccccacgatcaccggccccggcacccacacctgcctcgccgccgccgccgccgccgccccaccaccaccaccaccgtctccatctccggcgccgccgccgtgaaacagcctctcgccgccgccgccgccatcttgttgcgaggttggcatggc

SEQ ID NO: 14690 - DNA, 1125 bp, Oryza sativa
  Clone ID: PAT_MRT4530_20603C.1
gtgtctgagaacaaccaaggtaatgaggaagagaagaaagacggggatcaaaaagaactatccatagctccatgtatgcttgaggaatgtttaattgaccaagcgcctataatttctaaagatgagaaaaaaggcaatgataatggtgctacaactactcaaggtctggataaggagtctgcattccatctaaacattaccaccagaggatcttttatgcacaaaactccatcagaaggaaaagtaattctagatcgaattatggaaaatgcatccttcaagaatcagagtgaggaaccactccttgaggggaataatgttggaattatttatagtccaacaatcggtgttaacattatttcagaatcttctgcattcgcttacttaagcgataaggcaacaacaccgactgacaaattcttcaagcaccctaacgggagccttattgaaggatatgggattgttcaagatgggcctatcatctgtgacggcaaagaggcaatcttggatttccatgtcatcgaaatccaagaggtcgatgttctcatcggattttcaatcgagaaacttctcatcaatacccctcgattgggctgcctcgagttctctttaggggggcggatacattctcgttaccctttgaccaatcgaagctattccctcaaggatctcaagggaatcaatccagttctttgcacacatcgcattcccattgagcccgagagctcgccatctagggagcctcaaagacggtttaataatgcgatgagagaagttgtgaagaaagaggtattaaaactcttgcacaccgggattatttatcccatgccatacagggttgttcttggtcatcgaatatcagagaggggaatcgaggttgatcgggctaagattgaagtaatagatcaacttcctcctcccgtcaacatcaaagggatccgtagcttcttgggtcatgctggcttttatagaaggttcatcaaggacttcactacaatcaccagaccattaactaacctgctagccaaggatgctccctttcattttgacgacgtgtgcctaaaatcctttgaaactctcaaaaaggcacttgttttcgctccaatcattcaacctcctgattag

SEQ ID NO: 14691 - DNA, 459 bp, Oryza sativa
  Clone ID: PAT_MRT4530_20604C.1
atgacgatgatggcggacgggtgctcaccgaagccggaagagggacaccaccataggcgaggggaggcggacggagaggccgtcggatccaaagccccccgacatcgccaccgctgccgctgcctcccgcaggatctggcgaaggggagagtgctaccgctgacgccgtcgtcccgaggacccgccgccactgtcgccccgaggatcggccgccaccgggccaccacctccacccctcccaccgtcgggctgccaccgccttccctccatgccatccgccgccaccgcgcctcccctcccgcccctgccgggcgggccccgctgccgccgccgaaccgccgctacacacaaaggagagtgagagaggagaagttgagaaaaatcgaccttatctcctccgtgtgtgggccccgccgggagaagaaatatctcctgcagttcggctcagctcgattctaa

SEQ ID NO: 14692 - DNA, 176 bp, Oryza sativa
  Clone ID: PAT_MRT4530_20605C.1
gcacaggctccctctagtgagcaaaagcatttactcaccaacaatgagccgtccattaccgggtgatcgatcagcactggacaccaatggcggagcgccagagcctattggttagaccagagcaagccaagccgagcaggcgccactggctggagctgatggaattactttgctcc

SEQ ID NO: 14693 - DNA, 501 bp, Oryza sativa
  Clone ID: PAT_MRT4530_20606C.1
atgaaggaacgccgcggcagcgccggcgtcttccccttctccatcggctgcatgtcgcagtccgccgtcgacgtcgccgacccgcacgacaagaagtcgacgacgacgacgcagaacgacccttcctcctcctccgcctccgccgccgccatggccgccgccgcacagagcgcggaggaagaaggcggcggcgagaaggtgaaaggcgccacggcggcggcggcggcggcggtggcgtcctctggcatcgtggccaccggcgtgcagcggctgatcaaggggatcaagagcctgtcccagattttcgccatgtacgacgacgaggaggaagacgaagaggagagggagatggtgatcgggtacccgaccgacgtgcagcacgtcggccacatcgggtgggacggcatgaacaaggtcggaggcatggtgaacgccttctccctcccatcctccctctccctccgacagctcgagatggccatggaagcagctcatgcctga

SEQ ID NO: 14694 - DNA, 798 bp, Oryza sativa
  Clone ID: PAT_MRT4530_20607C.1
atggccatctcgagctgtcggagggagagggaggatgggagggagaaggcgttcaccatgcctccgaccttgttcatgccgtcccacccgatgtggccgacgtgctgcacgtcggtcgggtacccgatcaccatctccctctcctcttcgtcttcctcctcgtcgtcgtacatggcgaaaatctgggacaggctcttgatccccttgatcagccgctgcacgccggtggccacgatgccagaggacgccaccgccgccgccgccgccgccgtggcgcctttcaccttctcgccgccgccttcttcctccgcgccttttgatcaattgcagtactactcggtgatcaagaactcactctgtgcggcggcggccatggcggcggcggaggcggaggaggaggaagggtcgttctgcgtcgtcgtcgtcgacttcttgtcgtgcgggtcggcgacgtcgacggcggactgcgacatgcagccgatggagaaggggaagacgccggcgctgccgcggcgttccttcatggcagcagcagccaatgagaatcttgaattcttgattacttctactacggacgatgacaaggtagaggagaagaagaagaagcaactagcagcaacaatggaaaatgttcagggtgaagcaggtagcaaggttgacaagaatgaaccttaccacagccagccgacagtacagtccatagcaaaatctagcagtgcaagatggaggaaggttgttgctggtatggttgttgcagtgaacacgtcgatccaaccctacactgatacggaatgctaa

SEQ ID NO: 14695 - DNA, 367 bp, Oryza sativa
  unsure (1)..(367): unsure at all n locations
  Clone ID: PAT_MRT4530_20608C.1
ccctccccctcctccgcccctctcctcctccacctcctccgatttctccgcctcctccgccgccgcccgcagccgcggagctccccgccgccgacatggnacgacgcctgcgccgtctgcgcggagccgntcgagtgggtggcctacggcgcctgcgcccaccgcgaggtctgctccacctgcgtcgcccgcctccgcttcgtcctccgcgacctccgctgctgcctctgcatcaccccctgccccgccgtcttcgtcaccaaggcaatgggggaccggacgaaggtgatccccgatttctcggcgctccgcggcgccgncggcgaggggaaggccggggagtactggcaccacnaggccacgcana

SEQ ID NO: 14696 - DNA, 1323 bp, Oryza sativa
  Clone ID: PAT_MRT4530_20609C.1
gcacgaggtgatatcaaggccccgtcggtgttcaatgtgcggaacatcggcaagacctcgtgtcgaggacacagggtacaaagatgcttctgagggcctaaagcatagagtgttggagatcagctaaggccggccgggctttaaccattcactcaccttaagggggtttctcctcgccgcttccacctctctcgcgccgccgccgccgccgagcgcctggagcagcgtcagccatggccgtaggtaagaacaagcgcatctccaaggggaagaagggatccaagaagaagaccgtcgatccctttgctaagaaggactggtatgatatcaaggccccgtcggtgttcaatgtgcggaacatcggcaagaccctcgtgtccaggacacagggtacaaagattgcttctgagggcctaaagcatagagtgtttgaggtctccttagctgatctccagaacgatgaggatcaggcgtacaggaagatcagacttcgtgctgaggatgtgcaagggaagaacgtgctcaccaacttttggggcatgtcgtttactaccgataagctcagatcacttgttaagaagtggcagacactgattgaggctcatgtggatgtcaaaaccacagacggctacatgctgcgtctgttctgtatcggcttcaccaagcggcggcctaaccaggtgaagaggacttgctatgctcaagcgagtcagatcagacagattcgtcgcaagatggttgaaatcatggccaaccaggcttcaagctgtgatttgaaagagctagtttcaaagttcattcctgaagttattgggaaggaaattgagaaggcgacatccagtattttcccccttcagaatgtgtttgtccgcaaagtgaagattctaaaggccccgaaatttgacctggggaagctcatggaggtgcatggtgactatgccaaggaggacatcggtacgaagcttgataggcctgcagaagatgaggccatggccgggcaggaggtcgctgctgccgagtagagattatcacttattttgctgcccgtttatttagacaacaagtaaacagctatctagttgtggatcgtgaacatcctagcctgtgtcaatggcagatattctgaatagtttgttgggattacttgccagctgcatatttgctttctgatgagaaatgaatgtttttgagtctatgcgtttgctttgtttggtcttgatgatgaagttaagaattttgaagtaattgtttggtctggagtaaaaaaaaaaaaaaaaaaaaaaaaaaaaaaaaaaaaaaaaaaaaaaaaaaaaaaaaaaaaaa

SEQ ID NO: 14697 - DNA, 472 bp, Oryza sativa
  Clone ID: PAT_MRT4530_2060C.1
gaaatataatataacattggggagtattttttttaatcgggaaaacctcctaacctatatttatacaaaccaaactgagtctccataacacctttgggctttcctatctataaaaaaaccataccaatattttttttcccttaccaaagaagccatcgtccacacaaacaattccgtaaccaaacctaattgttttccagattacaatataacaattcctaataaaacaaaacgcatttataatcattcctaggtcctttatgaaattatcatccattcacaaagacacacaatattctaacgcatttgcataaagatttaaaactacaacacctaattttttaactaacttacattaattcccaacaaaaaactattcaatggaaagccacaaaactaaccattcctgcttcattaataaaaatttccaatctcaaatacaggtttaacaatttttttacactaatataat

SEQ ID NO: 14698 - DNA, 911 bp, Oryza sativa
  Clone ID: PAT_MRT4530_20610C.1
atgcggtgggggcgcgacgcgccgccgacttcgctgctttcgtcgctgtgtcctctcctgtgtgcggtggcgattttgccgatttggggccgagccgtggacagcctgggtatttcacgcgcagccaccggcgccgtcgattccgacgccctgcctttgccgccggcgcccctccccgccgaccgcctccagatcgacgccgccgctcccggacgccgccgccgtcgcctcgcctcgcccgatcccggacgccgccgcgactcacgccgacgccccgaccccacgccaaccggctacgctgcctcgtccctcacgccaatcgtcgatccacatctacgaccgccggctttctcctccgcgggcgctgctgaccgccgatccacatccacatcgaggacagccaaggaagccagcgacaacctcctctgcgggcgctgccgacagcctccgccgcccgcatcgccgatctactccacgccgactatctcctccgcggtcgctgccgaccgccgatccacagcgaggacagccgaaccacatccacactgcagtccctggaggcgagccaccaacaacaaggatttgcgacttcaggttgggaattcaattgaaatgttcataaattagttttgaattgagacttatctgattcatgctctgcgtgttgttctatataatattactgcccctcaatgcatgtaatgttatttttatcatgatgactctcagttctgcttaattattgaaaaactatggtgtcaagagtagcatgcttgagtgcttagtaacaactgatgtcaagagtagcatgcttgagtgcttaggaatagaacaatatttttagatgaaagatatgaaggctcaaaaatcattaagttttacaaatgcagaacttccttttttttcttcaa

SEQ ID NO: 14699 - DNA, 159 bp, Oryza sativa
  Clone ID: PAT_MRT4530_20611C.1
atgcttcatctacgtcaagctcagctctacttcctctacggcaatgtcgaccagtacgggaacggagggaacggcagcaatggaggagggaacggcaatgaccacggaggcaataacaacaacaatgcctcatcatccaaagggtttctccgatactaa

SEQ ID NO: 14700 - DNA, 1593 bp, Oryza sativa
  Clone ID: PAT_MRT4530_20612C.1
atggagggcaggggtctgtctgagctgttcaggaacacaagtgaagatatgttcctaaaggcgatgatggagaactcgatgggagtggcggcggcggcaccaagcatggagatgatggggttcagaaatctgtcccaaggtttcagagaagacagcgaggagttgttcaatagctggcttatgaatggagaggcaagttttctgaaaatccataagattttgtctcagtacatgaaaattccaggatttagtgccatgaataatcgccctcgacaaccatctaggttgtcatcagaagcagctggctttcctaatcagcaacatgaaattgctcaagaacattttcctactgacaacctgattccgcagaatttggcagttcattcagagtttacaatgaaccataaccagcaacaactcaagtactatagcttttcaccaacatcatattgtgttctggattttttccaaattgtactgaattggttgtctcccatgacaggaatgcagcagaaaagggaatgcaagctagtgacctacttttggcaaaggaagagatatgcggcgatgcaaagtaacatgccaccaataacaactgaaacaattgaaacagctaacaaactgagacaagatctgacaaacgcaagtactgtgaacagtgcaccaatgagcaatacacccagtcagactccaacatttgtatctccttcaagttcatcaacatcccctttggataatccacatatagtagcacaagataccatcacctcagttgtgagcatgctcaaggatacactggagcgcaagaagcttagtagccatgctaatggagacacctcatcaggcatatcttttggtttttatgacagtcaacattttcaacagaacattcttggaggaacagatatattccctctggtgacaacttcccaaattcaagactcggtgatgcttccgaaagtcgagaggccaacagaacaaggcagtgggaactttgttgctcctgcaaaccaggtttggcttggtacagcatctcgagagccttcgcagagtggatcatctactgctatcccagcaccttcagctggatttgaagtttgtgatgacctgcctcccattgggcaagcaatgactgtttgtgagagtactagaacaaatgctgcaaatggcaatgggacagctgactgtagatcaaaaggcaaagatttcagagagagaatactaaaagaaaatttgaaggatgacagaaagaaagggagcctaactcgaatgggatccatttcatctgaacaagcagataaaggagatcctacaaagaaacgcagggttgagcgctcacgcaagatggcagaagcaaaggaaagaagctcaacaccagtaataccatctgacatacaggttgtgcttaagcgctgcgaaactctagagaaagaggtccggtcactgaagcttaacctctccttcatgaaccggaaagattcagaacagaccaagcagatagaagagcttcagaagcaaaatgaggatctggtggaagaaaaagagcgactactagaagagatagaacgaatcgtctctgataccaacacataa

SEQ ID NO: 14701 - DNA, 390 bp, Oryza sativa
  Clone ID: PAT_MRT4530_20613C.1
gtcgtcgacgacgacgacgagctcgacgaggggaggcgcagcggcgatgactcagacagcgcgccgtcggtcgggagcgacctgtacaaggacgaggacgacaaggagcagctggagaagatgtcggagctggacagggagatgatcctggcggagcgcggcgcgcggatcgacgactacaagctgaagcagctggcgagggcgtcgtcgtcgtcgtccaaggcggacaagtcgcggagggacagcagccctccgccgtcgccgagccgcgcgcggtcgtcggccaggaccgacaggtccgccgccaagagcgcgctggacgagctgcgggccaagcggatgagggcagcatgacccggaggggtacccgaacaaggttaaggatttgat

SEQ ID NO: 14702 - DNA, 231 bp, Oryza sativa
  Clone ID: PAT_MRT4530_20614C.1
atgacggtggttgtcaaaggggccttcgccgttgtggctgttcaaaccgcggcatgtgaggtcgaagccactgccttggacggtactggtacggttggggccgcggcggggctgaaggctggacagcctgcatcgccctcggtggcgccgaaggcatttgctactttgggcgatggctttgtgcttcgacttacagccttcgcccgtggtggatctttggttgatcaatga

SEQ ID NO: 14703 - DNA, 356 bp, Oryza sativa
  Clone ID: PAT_MRT4530_20615C.1
tttcgttctgaccattattgcgcgaccgctggatcggtccaccttgcagtcgccgtgctccggactgcccgcgtggccgaaaggtgtcagctaagccggccagccgaattgttacccaccagaattcgggtatttcctgatcgatgacgcagcgggcggatctggacacgctccggccggcggaggccgccgacgtgcaggtcgtcacgtgggacgggaagagcatcgccgcccataccgttgaccttgtaagatgcacccctggctcttttatgttcaaggcactgccatctgctccgctggagcggactgatctcatcgggcactcctttggtggaacccccagtgcaccatac

SEQ ID NO: 14704 - DNA, 188 bp, Oryza sativa
  Clone ID: PAT_MRT4530_20616C.1
gtagcccagcatacactcgtgaccgctacctctactacaacggcctcccaaatgcaaggctagacaaaggtccctgcgacctgtacaggggtggcatgaatggccggcggccatatttgggttcgccggtggcgaacggtggccgatatcgccatgtgtccaaaatagaaaatgtatctaaggtctag

SEQ ID NO: 14705 - DNA, 650 bp, Oryza sativa
  Clone ID: PAT_MRT4530_20617C.1
ttcacattttagaactctctttactcacttagtgttgctttggaatgtatgctggttcttgaaaactttgtgtgctgcgatcagttatgaatatttagactgcacataacatactgcacaacttcgtctgatgatgcacttcaactagataatattataacttttgcatgctttatgaacataatacagcatagataagtgatggattttttgggatcatgtaaaatgtacaaccacaacactgcttttgagactgactcataactatgctacaagtagcgggctattatatatttctaaacttctgacatagcatttgatgattgtacaatatgaacaagctgatgcgacgtgcactatatgcttacggattgtgctatttttttattacttgcctatataaacatctctctaaactcctgtgacgattttaggagaactactgaaagagatatgctgtggaatatttacaagcagtgtttctccttcgcctgaatctgatacgacatgactgcctatcagcaacagccagtacaactcttctaaagtctgagtatgatcattttcaccatttctctgcaaagaagagatattaaagattacatacaaatattaaaaataatatcctacactaatataactcataacat

SEQ ID NO: 14706 - DNA, 507 bp, Oryza sativa
  Clone ID: PAT_MRT4530_20618C.1
atggccaactacctcggctacgacgtctacgacatggagctcacgtcgcaactgatcgatcgcggcggcggcggcggcggcgtcggcggcgacagcaaggtgacgctgtccgggctgctaaacttcatcgacgggctgtggtcggcgttcggggaggagcggctgatcgtgctgacgacgaaccacgtcgaggacctggacccggcgctgatcaggacggggaggatggacaagaagatcgagatgtcctactgcgacttcgagacgttcaagtccatggccaagatccacctcgacgtcgacgaccacgagatgttcgccgccgtcgagaggctgctgccggaggtggacctggtgccggccgacgtcggcgagcacctcacggccaagaacccccgggacgacgccggcgcctgcctcgcgaggctggtgaacgcgttgcacgaggccaaggccaagaaggatgcagctgaacgacaagatgaagacaatggagtggtagtctga

SEQ ID NO: 14707 - DNA, 1444 bp, Oryza sativa
  Clone ID: PAT_MRT4530_20619C.1
ccgggctgcaggaatcggcacgagggcgggctgcacctgcaacctgtgcgcgtacggcgttgtccgccatctcccgccgctccgctcgcctcgcctattgcggcctcttcgcggcctccctagtactctccttcctcatgcgccagttcgccacgcctctcctcaagcaaatcccatggataaatacgttggattatacacaaccggatgaatggtttcaaatgaagtgctgttcttcgtgtcagccttgggaacttcttgttttttgcaatatttgctctgatgatgattggtgtcaaagaccaaaatgaccggatggcaatggttttggccttttggtgcggtgtgcttgagcaagcgtacagtgcaatgctcagtgaaatgtggaacaaagtgaaatacaaggcacaatgcttggagcatcagcaaattgcaatttactccaagaattttaattgttcggtcgtgatgcttttagacttcacaaacaattggaatgactcatggattgagaaggatgagcaaaagtgggaaattgctttgttggtagtaactgtggtttgctatctctctacatttgccttctctggtttgctcttcacgtggttcaatccctctggtcatgattgtggtctcaatgtgttcttcattaccatgaccattattcttgcttttgcattcgccataattgcgttgcacccccaggtcaatggaagtgttatgcctgcttctgttatttcagtttactgtgcatacctgtgttacactagtctctcgagtgaaccagatgactatgcatgcaacggacttcacagacactctaagcaggtttcaatgagcgctcttatactcgggatgctcacaactgttctctctgtcgtgtactctgctgttcgtgctggatcttccactacatttctttcgccaccatcatctcctagatctggaatcaagaatcctttacttggtgatgataacgtggaggcggggaaaagcaacagtaaagaaattgatgcgcgccccgtgagctattcatatacattttttcacgttatctttgctcttgcaagtatgtattcagccatgcttctgactggctggacgagcgctgcttcagacagctcggagctgatggatgttggatggacaactgtttgggttcgcatctgcactgagtgggctacggctgcattgtacatctggacccttgttgctcccctgctatttccagaccgggacttctcataggcatgtcaagcattgttaaaaacgtggttaaaccatgaaattatatatatatatatgtttgtgtgtgtgtatgtacgtacgtacgtacgtacgtacgtacgtacgttatttgatgcgggaagccagtagtaatggataaagtccttattgacttgtacgctcttccgttttttaaatttatattcaatttgatttt

SEQ ID NO: 14708 - DNA, 402 bp, Oryza sativa
  Clone ID: PAT_MRT4530_2061C.1
atgtccatgccctccgccggccctcccctccttcctccctccctccctctcgccgtcagtggagccgaccaccaaaaatcgtgcggcagtaaggatggggactatagtgattccctccttttcgtggatccaagaagcacgacggatctgctggaggttgctgattgggccaaggcatggatgcatcctaagggcaaccagggacgtggaggtgacagctcgatgtggcaagaaaggcggtgttggtgtagggagactgcaggagttggtgtgggggatggctgcacggggtggcctaaaactatagatgctgctcaccgcaaggctgttgggtggcttggtggtgagatcacggttggcgtgggaatatatgctggtggtggcttgaaggatagcaagtag

SEQ ID NO: 14709 - DNA, 757 bp, Oryza sativa
  Clone ID: PAT_MRT4530_20620C.1
ccggccagtagcggaagagccgccggggcaccggagattaggaggacatgtggtgcgcctcgtgcctggcgtccgcctgcgcgggctgcacctgcaacctgtgcgcgtcggcgttgtccgccatctcccgccgctccgctcgcctcgcctattgcggcctcttcgcggcctccctaatactctccttcctcatgcgccagttcgccacgcctctcctcaagcaaatcccatggataaatacgtttgattatacacaaccggatgaatggtttcaaatgaatgctgttcttcgtgtcagccttgggaacttcttgttttttgcaatatttgctctgatgatgattggtgtcaaagaccaaaatgaccggcgtgatgcatggcaccatggtggctggattgcaaaaattgttgtctgggttgttctcatcgttcttatgttctgtgtgccgaacgttgttattactatttatgaggtactgtcaaaatttggatccggcttgtttcttctggtgcaggtcgtgatgcttttagacttcacaaacaattggaatgactcatggattgagaaggatgagcaaaagtgggaaattgctttgttggtagtaactgtggtttgctatctctctacatttgccttctctggtttgctcttcacgtggttcaatccctctggtccatgattggggtctcatgtgttcttcattacatgaccattattcttgctgttgcattcgccatatttgcgttgcccccccag

SEQ ID NO: 14710 - DNA, 363 bp, Oryza sativa
  unsure (1)..(363): unsure at all n locations
  Clone ID: PAT_MRT4530_20621C.1
atggggagctcgggaggggtcggcgaaatggggaaaaagcggatccccgccaactgggaatggaagagaaaagccgattcgatttcaatccggcctctcggaccggcccgagcggaaaagaagggaaaaggcccgggaaacgcggcgcacgcgcggcggtggtcgacgtggcccgagaaggcggagactgggcgcggcgacgtttcgggcgcggcggcgctccgggatcggcgggaggaagaagacgggcccgacaggtnggccccacctgtcggcgaccccgagagaggaggcagcggggcggcctgggtcctcttggatatcaatgtgctccgaatcagcctgttcttcaggtacccttaa

SEQ ID NO: 14711 - DNA, 666 bp, Oryza sativa
  Clone ID: PAT_MRT4530_20622C.1
aacagcaagtactaaggcaaaagaggtactcttcgctgtgtcaacaaaaataaccgttggagacagaaacacaatgcgcttttgggattccgtgtggatagatgggcgcagatcaaaggacctcatgccactagtctgtgcaatctcgaagaaaaaaagacaagtccctacgacagggaaaagaaaatgatgcttggatcaacaacttagactttgaagctaacccagcaatctcggtggaccttattgaacaactagtctctttatggattgtcgtgagagacattcacttaaacaataagcagttagaccaaattgtgtggaaattcacaaaccatggagaatactcagcaatcagcattgtcggcttagcaggcacaatgcttcagcatgacatccatgaactttcattcgctcatctggagagtttgggcgccagggaagtgtaaattccacgcttggctagtcatttaaaactgggtttggacctccaatcgagtcgcgactagagtatggcaaaacaatgggctctgcccactctgctgcagagaaggcgaaacagtcccatatcttcttgtcagttgcagatacacgaaaggaatatggagcatggtagtcgactaggtggcttaccagcagctcgaccctaggcattgggagacgacc

SEQ ID NO: 14712 - DNA, 540 bp, Oryza sativa
  Clone ID: PAT_MRT4530_20623C.1
atggccagcggcgacgaggagggctcgggctcgcgctcgcccagcaaggcggctccggctccagctccggcgaaaaagaagaagacgaagacgacgacgacgacctcggcgatggccccgctgccactagcggaggtgaagtggatcctcgcgcagaagcgagagccctacaccaacccggacgacatcgagggcttcaagatcagcagcaaccccaacaacgacaacgacgacgggttcccggaggaactcaaggcgagctgcagggactccatccgcagatcgaacatcctccgcaaggtcgcggacgaccgcttcttcgagtaccagagcgaggtcagggccgccatggagtccagcggccgcttcttggtcgacgccggcttcttcgagcgcagggcgaggggtcgcgccaagcttaacgaggcatgggcgaagttgcgcgatggcctcccgctctccgactctgacagcgatgcggatgaggaggatgacgaagacatggcattgctggctgcgatgggtttagaattcgattga

SEQ ID NO: 14713 - DNA, 1098 bp, Oryza sativa
  Clone ID: PAT_MRT4530_20624C.1
atggcgggctcctccccgtcggctgcggcaagcggcggcggctgcgaagcggtgccgagcacgtcgaccatcgtggccgagatggcgacgggctcgcacgtgctcaccgtcgacggctactccggcaccaaggggctcgccgtcggcgtgcacgtcaagtccggcacgttcgtcgccggcggccacagctggcacatcaagtacttccccaacggcgccaccgacgagacctccgagtggacgaagggcgccgccgcgaccgtcaaggcgcggtgcaagctcaccctgctcctcgacggccgcgacgggagggcggcattgccgccgccgccgccgttcaccaagagctgcgagctccggaccttctcctccggcaagggcggctccgatcagtggggccacaagaagttcgtgcggcggaaggagctcgaggacccgtcgaagcgtctcctccgccatgaccgcttcagcgtccggtgtgacgtcaccgtcgccgtggggatccgcaccgacgacaccaccgcgaagctcccgccaccgtccgacctgcaccgccacctcggccgcctcctcaagacgaatgcgggcgccgacgtcacgttcgacgtcgccggccacaagttcgccgcgcaccggtgcgtcctcgccgcgcggtcgccggtgttcatggcggagctcctcggcccgatgaaggaggaggacaccgagagccacgtcgtggccatccgcgacatggacgcgagggcgttcaaggccatgctccacttcatctacaccgactcgctgcccaatgtcgacgacggcggcgaggcggcggccatggcgcagcatctgctcgcggcggcggacaggtacgacatcgagaggctaaagctgatctgcgaggacaagctaagcggcggcgtcgacgcgaccacggcggcgacgacgctggcgctggcggagcagcacggctgctgccggctgaaggaggcgtgcctcaggttcatggcgtctccggccaacctcaaggcggccatggcgagcgatggcttcgagcatctggctagaagctgcccttctctcctcaaagaattagttgctaatctcgctgtttaa

SEQ ID NO: 14714 - DNA, 435 bp, Oryza sativa
  Clone ID: PAT_MRT4530_20625C.1
atggaacaaaagggcggcggatccggccctcccgaggacgatgccgccgccgctcgccgccgagagcccctagggcggcggatccgccgccgtaggccgttgtcgtgcccgccgcttgccgccgagacccccaagggcgacggatccggccttcccgaggacggcgccgccggatcctccgccgtaagccgtcgccgtgcccgccgctccccgccgagaccccctagggtggcggatccggccttcccgaagacggcgccgcctgatccgccgccgctcccgccgtctcgccgtagggcgtcgccaccgcggctccttgctgccgtcgcccgctccctcctcgcggccgccgctacgcctccttgcttccgccgctactcccgccatctcgccatcgcccgctgcctccttgatgtcgccgcccgctcctcctag

SEQ ID NO: 14715 - DNA, 2451 bp, Oryza sativa
  Clone ID: PAT_MRT4530_20626C.1
atggaggggaagcacgtggtgatgtcggcggtggggatcgggataggcgtcggggtggggctggggctggcgtccgcgccgtgggcaggcggcggcgggcagggggcgagggtcggggttacggtggagagggtggagcaggagctccgccgcctcgtcgtcgacggcgccgacagcagggtcaccttcgacgggttcccctactacctcagcgagcaaacgcgtgtattgctgacaagcgcggcgtatgttcacttgaagcaagcagacatctcacaatacaccaggaatcttgcaccagctagccgtgcgattctattgtcaggccctgcagacttttcttcctcacagatccatagcaaatatggtggtggtagcagcacagactcgtctttcaaaagatccatatctgagacgacccttgaaaaggtgtctggattacttggatctctttcgattctaccacaaaaggagaaacccaaaggaactattcgtagacaaagcagcatgacggacatgaaattaaggagctctgaaagtacgagcagcttcccgaagcttaaaaggaatgcctcaacttcatctgatatgagtagtctggcatcacaaggccctccaaataatccagcttctctcagacgtgctagcagctggacttttgatgagaagattttggtgcaagcagtatacaaggtactgcattcagtatctaagaagaacccaattgttctctacataagagatgttgagaagtttcttcacaagtccaaaaaaatgtatgtcatgtttgaaaaactactgaataaacttgaagggccagtgctagtccttggctcaagaattgtggatatggactttgatgaagagttggatgaaagactaactgctttatttccatacaacatcgaaatcaagccaccagaaaatgagaaccaccttgtgagctggaactcccaattagaagaagatatgaagatgattcagttccaggataaccggaaccatattacggaagtccttgccgaaaacgaccttgagtgtgatgatttaggctcgatatgcctatctgatactatggttctaggtaggtacattgaggagattgtggtttcagcagtttcttatcacctgatgaataagaaagatccggagtaccgaaacggaaaattacttctatctgcaaagagcttgtcccatgcactggaaatttttcaagagaacaagatgtatgataaggatagcatgaagttggaagcaaagcgtgatgcttcaaaggtggctgacaggggaattgctccatttgctgcaaaatcagaaacaaaacctgcaactttgctaccaccagtacctcctacagctgctgctgcccctcctgttgagagcaaagcagaaccagagaaattcgagaagaaggataatccatctccagctgcaaaagcacctgaaatgccgccagacaatgagtttgaaaagcgcatcagacctgaagtgatacctgctaatgaaatcggtgtcacatttgatgatatcggtgcattaagtgatatcaaagaatcccttcaagaacttgtcatgctccctctcagaagaccagatctcttcaaagggggtcttcttaaaccttgcagaggtatattactttttggtcctcctggaactggcaagacgatgctagccaaggctattgcaaatgaagctcaagcgagtttcataaatgtttcaatgtcgactatcacatcgaaatggtttggtgaagatgaaaagaatgttagagcattgttcacattagctgccaaagtatcaccgacgatcatttttgtcgatgaggtcgacagcatgcttggtcagcggaacagagctggagagcacgaggcaatgaggaagataaaaaatgagttcatgacacactgggatggcctcttgtcaagaccagatcaaaaaattcttgtccttgctgcgaccaaccgaccctttgatcttgatgaagctatcattcgaaggtttgagcgcaggatcatggtcggcctgccatcattggaaagtcgggaattgattttgaggagccttctgtcgaaggagaaagttgatggcgggctagactataaggaactagccaccatgactgaaggatatagtggcagtgatctaaagaacctgtgcacaacagcagcgtatcgtccagtgagggaactgatccaaaaggaaagaaagaaggaactggagaagaagcgggaacaaggaggcaatgcttcagatgcttcgaagatgaaagagaaggacgagacgatcatactaaggccactaaacatgaaagatttgaaagaagcaaaaaaccaggtggcggcaagctttgctgctgaaggaacaataatgggtgagctgaagcaatggaatgagttgtacggtgaaggaggctccagaaagaaacaacagttgacatactttctctga

SEQ ID NO: 14716 - DNA, 476 bp, Oryza sativa
  Clone ID: PAT_MRT4530_20627C.1
gagatcagaaagctcattatttcactagggggggagcatgcatcatgtgatcctacaaatgaaaaaaacactgtaccatatgcattcaaatgtaacacgggaaaaaaaggctatcggacataaagtgacaagtactgggtatacgaagccaacatatattacttcgagtgccatcataaccccaaacagaacacctcaaagccccaaatgtccactctagattacctggcgaacacagctcatacctcatatctcacaggccagatatgagggtataaaagcggtgtcaaacgctgtgaagcgataactctaggatcatcagaaactgcattttacagacgtcacctggaacaagaccaattacacgagtgccaatcacttaatctttggcgttcacaaggactatcttgtaaacatgaaactggatctcagaaacatccataaattctagatccatagcaccacggacaacgact

SEQ ID NO: 14717 - DNA, 660 bp, Oryza sativa
  Clone ID: PAT_MRT4530_20628C.1
atgcgtggagcgacaagcacttggcaagatgcagtcgtcatcgaccgccagcccacgctcgcctgctcgccccacgaccgccatccccggcgccgccgcgcccaacagctcagacgccaccagagtccggtgactcgacgtgacgcgacgcgacgcgactctcctctgccccggcaatgctgcggcacggcctccgtgtggagggactcggcgacgccctctctccttgtccgcgtctccgccttcttcctcctcgccgacgccgactccctggtcgggccactcgccgccgaggcggtcatgttggccgccacgacctactccgccgtggcggtcggctacactgtcgccgagtgccgacacctccaccaagcgtcgtcttcgcccgggacatcggacgccgccgccgccgccgctggtgtacgagtcacaggtggagaggcgccaccacgagacctggaagaagttcaccgtgcgcattcgccgtcctcctcgtggatcttctacctcgtgtggttgctacggccaaacgacgcgccgccaccgcagccagcaggggacgacgacgatgatggcgtggggccagcgcagggccgccgggaggtcacgggcctcacggcgacgatcggaggtagagaagaaggagaggagaggggctga

SEQ ID NO: 14718 - DNA, 434 bp, Oryza sativa
  Clone ID: PAT_MRT4530_20629C.1
cgttctgggcaacggaaaagggcacaatttattttggtcacacaactaacgggtaaagaacgaaaggaggcccaacaaataacaatggggggaatatgtccggtacatccacaattagatgaacatttccaggcccagaagcaaaaggaacacttttttttatggggcattaccgtaaacagttaacgggcaaggggaaccaatcaatcacgcagatcgaatcactatggggggaaaagaaaaactaggggctccaggaagttactttttgagtttagggcgcctttggggggggcgctccccccggcggcggcgggtgtgggaaacaataagcgggggcctgggggcgccctaggacctccttggcctgcctccgggcggggaacattttctgggtttcgacgacaacgaggcacttgacctgggggagcatg

SEQ ID NO: 14719 - DNA, 258 bp, Oryza sativa
  Clone ID: PAT_MRT4530_2062C.1
ttttgttttaatcaactattgaaaaaaaactataaataattaagatggtgaggtttataacaatttatatcgtatagtattgatggttgaaacaaatgtggtttaatattgctgctgaaatacatacgtagcattctaagattaatctttgcatatagataactgatggaagtgcctagtaaattgaaattgcatttggtcaaaatgaatcgggtgggtctactgtatatatatatttagattgaaccaatatgtaac

SEQ ID NO: 14720 - DNA, 575 bp, Oryza sativa
  Clone ID: PAT_MRT4530_20630C.1
cccacgcgtccgatttctacggaacagagttaatcctgattgaaccaaccaacacgaatttttctcgccaaaaaaaaaaaaaaaaaaaaaaaaaaaaaaaaaaaaaaaaaaaaaaaaaaaaaaaaaaaaaaaaaaaaaaaaaaaaaaaaaaaaaaaaaaaaaaaaaaaaaaaaaaagggggggccgttttaaaggatcaaattttacttccgcgtgcttgcaacgtaatattttttttttggggccacctaaattaaattaattggccggggttttaaaacgtggggattggaaaaaccttggggttaccaaatttaatggctttgaagaaaatccccttttggcaagttgggttaatagaaaaaaggcccgaaccaatcgcctttccaaaaatttgccaaccttaaatggaaattggaaccccccttttaggggggaattaagcggggggggtgtgggggttaccccaagggtaaccgttaaatttgcaagggccttagggcccgttcttttggtttttttcctttcttttttggaaattttggcgggttttcccggtaaagttttaattgggg

SEQ ID NO: 14721 - DNA, 1024 bp, Oryza sativa
  Clone ID: PAT_MRT4530_20631C.1
ctaaagtaaacgtgtcgtgccgtgctggcctacgggctgaggcgtcggcccaaacacggcacgggataacgggccatgctggcacggcccaccggctggcttgccgtgctgagccttagccggcggtggcgcgagatatgtggccagggacgacgccaggtgaggactccggagtcgcccggatggcggcaaattgaacgaccgcacttttgtaagccgacgcccttgtgttccgctagccggccgctccccgcgccgtcgcccgctccgccccccgctcgcccggtcctccggcaggcccgtgcggcgggtgcatctgccgccggccgcgcgccgccgccttgtgggtctcgtgggtggcggccggcgtgggagcccgcgagccgctcctccccccaccgccgccgcgtcgcccgtcgccgccatcaccgtctccaatctccatcctttttttccggatctgggggcagtcggcagcatcatcggccaccggggcgacaacctctcctgctggatctgactcctctcctgtgttgcgacgggcgaggacggcatcaacagaatcaggggcatagaggaagcctgtcctggtcgtcggcgtcaccttccgccgacgcagccgtgcgcggtagtcggcgagcacatccgcgcgttgcccctgattttgttgtgtaatttttgcacgccgtttgtggtcgtcgtccaccttcagtgaatcataatgacgcggcacggtacggctgcgggcgcggtggtgacgggcgactatgggcgggagagacgcggcagttccgcctccaccgccgagtggcggcgtgcgcggcgtcagcggatccggcacagcatggctgcgggcacggcggtgatgggcgattgcaggcgggaggcgaggaggcagcacgccggcacatccggtcgccgctcctcgccccacgcgcgcggatccggctgcggtggggcatatcgagcggtaggcaaggcggcagcggatccggccgctgctccgcgcccacgcgcatggcat

SEQ ID NO: 14722 - DNA, 608 bp, Oryza sativa
  Clone ID: PAT_MRT4530_20632C.1
gtgcgcgtaggcatggagcagcggctggatccgctgccgccttgcctaccgctcgtactcgcccatcacagccgcgcctgccatcaccagtgcaggatccacgctggatccgccgttgcgccgcccgcatccgtgccagatatggcccactgcagccggatccgggcgcgtggggcgaggagcggcgaccggatgtaccggcgtgccgtctcctcgcctcccacctgcaatcgccgatcaccgccgtgctcgtagccatgccgtgccggatccgccgacgccgtgcacgccgccgctcggcttaaaaagaaggcacgtagcagtatccatcagtattcactgaaggtggacgacgaccacaaacggcgtgcaaaaattacacaatagaatcaggggcaacgcgcggatgtgctcgccgacgaccgcgcagggctgcgtcggcggaaggtgatttgacgccgacgaccaggacaggcttcctctgtgcccctgattctgttgcaacacgggaaaggagtcagatctagtgggagaggttgttgccccggtggccgatgatgctgccggctacccccaagatccggaaaaaaaggatggagattgaagag

SEQ ID NO: 14723 - DNA, 219 bp, Oryza sativa
  Clone ID: PAT_MRT4530_20633C.1
cattaccactacaacaacatgagatccatatatcgccccttagatatctacaaagattgtttgtaccttttgtgtaatggctctctagaccagcagctattaggcccaagcacttgctaatgcctaaggtcacgcccagcaatacccacatatggcaccgaccataaactgttgaaattatctccaatggcaagagtgaagtcccgatgatgctaccac

SEQ ID NO: 14724 - DNA, 702 bp, Oryza sativa
  Clone ID: PAT_MRT4530_20634C.1
atggatcatggcagctactgtgccgatgccactgcggccaccgtttgccatctccattgcgagatcagctctgtcgaggtcactggtctcagctgccccggaggcggcgcgctgatcttcctccggtgccacgtccccgccggcggcgggaggacgatccagatcgacagccgcggcgccgacgtcgacggtggtggtggtgcccggtcgatcgacgcgtcgtggcgcgacgtggcgtcgctgaggtgcgacggctcgccggcgtgcgtgcgggagctcgtggaccggaggagcgtggtgttcgaggtgaggaggaggaggcggcggcggcggatcagggatatggtcctggggcccgccatggcgtccgagctggtgggccgcgccgaggtggcgtggagggacgtggtcgccgccgccgccgacgacgacgacgacgacgacgcagcggtggtggtggagcggcgggtcgagctcgccgcgggcgccacggcgcccgcggtgatgacgatgtcggtgagaatgagcgtgcgcgtgtcggagacgacggcggtgccggccgccggccttagcgttcgccctgcgtcgtcggcggcggcgcgaagggagagcatcaacgccgggtgcgagtggagcgccggcggggaggacgacgtgttcgccatggctgctgcttgcgtcgccggcgatgcgttcgagtag

SEQ ID NO: 14725 - DNA, 1468 bp, Oryza sativa
  Clone ID: PAT_MRT4530_20635C.1
atgccaccggccggcgacgacgagtcgccggcggccaccggcgacggctactcgaagaaggtcctgcagggccggtacgagctcggccgcgtgctcggccagggcgcctcctccaaggtgtaccgcgcgcgcgacgcccgcacgggcgcccacgtcgccgtcaaggccatccgcaagcagcagcagccgcaccaccacccgtcgtgccgctcgcccgaggcggccgccgcggcgcggaggtgcgtggaggtggagcgggaggtcgccgcgctccgccgcgtgcgcggccacccgcacgtggtggcgctcctcgacgtgctcgccacccgctccaccgtctacctcgtcctcgagctcgccagcggcggcagcgtcctgtccgcgctcgacagccgcggcggcggccactacgacgagcccgcggcgcgccgcctgttcgcgcagctggcctccgcggtggcgcacgcgcactccctcggcgtgttccatcgcgacatcaagccggagaacctcctcctcgacgagcgcggcgacctccggctcacggacttcgggctcagcgcgttcgccgacgccgaccagcacctcggcgccacagacggcctcgccgccacgcactgcggctccccggcctacgtcgcgccggagatcctcctgaagcggcggtacgacgccagcaaggcggacgtgtggtcctgcggcgtcgtgctcttcgtgctcaccgccggctacctgccgttcaacgacggcaacctcatggccatgtaccggaagatctgcgccgctaagttccggtgtccaaaatggtgctcgcaggagctccgctcccttatcgggcggatgcttgacccggaacccgatacccgcatcaagattggtgaaatcttcgatcacccttggctccaacaagatgggagttcatcatcattcggtatgatccaagctgcgtcctctcattctaaaccagaggtagagaaatgggaggctgaattggagcaagcaatggagctaaatgctttcgacataatcgggttcgcctcgggatgcgatctaagcgggttgatcggtccattgccagatcgagttcgattcgtcttgccgggtggggattccaagtcagttctggacaaagttgagaagctagggcgagaggaagggcttgtagtgaggaggaaagaggaagaatggtgtggaggagttcatgtagaggcaactagtgggaaattcactgcatatgtgagggttaatctattgcccaagaaaatactgatgatagaggctgaaaggggacggcgacgacaacggtggacgtcctccttcctcgccaagccaccgccggggagccgcatcgactggagcgggccagcggatccggcctgccggatggtcccgggtggcggattcagtcacaggagaggcacatgtagagaagggaagcgtgcaaacggtggattcggtagcggcaatg

SEQ ID NO: 14726 - DNA, 1590 bp, Oryza sativa
  Clone ID: PAT_MRT4530_20636C.1
atggagggagtagctacgtatttcctctccaacttcacgaggctagagatgccaccggccggcgacgacaagtcgccggcggccaacggcgccggcgacggctattcaaaggtactgcagggccggtacgagctcggccgcgtgctcggccggggcgcctcctccaaggtgtactgcgcgcgcgacgcccgcacgggcgcccatgtcgccgtacgtcaaggccatccgaaagcagccgcagccgcactaccacccatgtcgctcgcccgaggcggccgccgcggcgcggaggtgcgtggagcgggaggtcgccgcgctccgccacgtgcgcggccacccgcacgtggtggggctcctcgacgtcctcaccacccgctccaccgtctctacctcgtcctcgagctcgcccgcggcggcagcgtcctgtccgcgctcgacggccgcggcggcggccactacgacgagcccgcggcgcgccgcctcttcgtgcagctggcctccgcggtggcgcacgcgcactctctcgacgtgttccaccgcgacgtcaagtcagagaacctcctcctcgacgagcgtggcgacctccggttcacggacttcgggcttagcacgttcactgacgccgaccagcaactcggcgccacagacggcctcgccgccacgcactgcggctcgtcggcctacgtcgcgccggagatcctcctgaagcggcggtacgacgccggcaaggcggacgtgtggtcctgcggcgtcgtgctcttcgtgctcaccgccggctacctgccgttcaacgacggcaacctcatggccatgtaccggaagatctgcgccgccaagttccggtgcccgaaatggtgctcgccggagctccgctctcttatcgggcggatgcttgaccggaacccgatacccgtatcaagattggtgaaatcttcgatcacccttggttccaacaagatgggagcttgtggagaaatgggaggctgggaggctgaattggagcaagcaatggagctaaatgctttcgacataatcgggttcgcctcgggatgcgatctaagcgggttgatcggtccattgccagatcgagttcgattcgtcgtgccgggtgcggattccaggtcagttctggacagagttgagaagctagggcgagaggaagggcttgtagtgaggaggaaagaggaagaatggcgtggaggagttcatgtggaggcaacaagtgggaaattcactgcatatgtgagggttagtctattgcccaaaaagatgctgatgatagaggctgaaaggagaagaacttggtgcaagtcactaggatacacctgccaccaccgctcacaagactacaaggatttgctagagaagagcaagctcatgaggctcctcctctgccacttcgaccgcctcggcggccgcctccccgccccggaccccgtcttcaccgagccctactcaaagcgcctcatgctccgcctccgcctccgcggcgaggtcctccatggcagcagcggtgtcacgctggagcagggccatgccgtggagttcgccgtccacgaccgcctctacaatgcgtgcgctcaccggtga

SEQ ID NO: 14727 - DNA, 592 bp, Oryza sativa
  unsure (1)..(592): unsure at all n locations
  Clone ID: PAT_MRT4530_20637C.1
atgaccgaagttttgcccgatagttcgggtgtcaaaatgtgctcgaaggagtcgtctccntatcggcgaatgctcgacccgagaggatcccccgatacccgcatccagatgggtgaaatcttcgatcaccctgggctccaacaagatgggagttcatcatcattcggtatgatccaagctgcgtcctctcattctaaaccagaggttgagaaatgggtggctgaattggagcaagcaatggagctaaatgctttcgacataatcgggttcgcctcgggatgcgatctaagcgggttgatcggtccattgccagatcgagttcgattcgtcgtgccgggtggggattccaagtcagttctggacaaagttgagaagctagggcgagaggaagggcttgttgtgaggaggaaagaggaagaatggcgtggaggagttcatgtggaggcaactagtgggaaattcactgcatatgtgagggttagtctattgcccaagaagatgctgatgatagaggctgaaagggttatcggaagcgagattcctaaattttggcatcaacttcagatcgggtaatctattagtaagaaaatga

SEQ ID NO: 14728 - DNA, 430 bp, Oryza sativa
  Clone ID: PAT_MRT4530_20638C.1
gctctccttcccgtccggcctcatcgcccgagccgttaccacgcgcagacgcgctgcagaggtcgccggcgctggagtcgggcccatgaactcccccatcacggcggtgagcggcggcccgatgagcagggtaatgatctggtacatgtgcgacaggggtggtttgctgccgtcgttgatccttgctggtcgtgtttcgctgctactggtccgtgcgacttcaacaaggagccctgtgttgtcgtcggcagcatgctgggattcgctgccgtcggcggcgccgcggcggtggggtcaggttcgacgggttcagcccggagggtttggcgtcgacggactgctcatcgggccgccactcactgccgtgatgggggaattcatggggcccgactccagcgccggcgccggcgacctccgtaacgcgcgatag

SEQ ID NO: 14729 - DNA, 441 bp, Oryza sativa
  Clone ID: PAT_MRT4530_20639C.1
atgtggccgtgtcagcaccaccgccattcctctgtccctcctcctcccccaccagcggctatcatccactctgcaaccccttcttggcctctcctcctctcccaccgaggccctaacccatgcgaccgctatctcctccactggcattggcatgcctcaggagtcacgaatccatcattggccggcctcgggaacgtagatccagaagtgggctcgcggctcctcgtgtcggcggctagtggttctgggcgtggatggtggtggctgcctactcctcccccccttgctcttcctgtgttgagctctgggtgtggtggcggcgggcgcgggcgccgtggtaggcagatctgccagttcgtggcgatgaccggcgatcacggccctcatgtcgatggccccctcctcactcccccttcttcatatgttgggctctgcgcatag

SEQ ID NO: 14730 - DNA, 412 bp, Oryza sativa
  Clone ID: PAT_MRT4530_2063C.1
ctgcagaagttctcttcagttaatttcctcttttggaaaaggtgctatgtaccgagtctttatatcattggttttgagaacacaatgaagttggtcagaggacataccagtttagcaaatgaaaacaggaggtacgacctgcttcacaaaacaagcaggcaggaaaggtaattgatgaactacctatactcttttctatactgatgaactaccaccctatgttcttgattatatatgataatatgaatggcgtgatgtttgtgtactccttttatctacatatgtccaaacagtagtgaccaccgccatgctgaaggcaaggcttcacggaatcacggtccatacgatcacgtcaagtgaagatgcctattcagaagtgtagtatgtggagcttgaactgctacctatactg

SEQ ID NO: 14731 - DNA, 748 bp, Oryza sativa
  unsure (1)..(748): unsure at all n locations
  Clone ID: PAT_MRT4530_20640C.1
tgtgaatccagcacatatccaatattgcatggatctgccctgttttcacgtggggatacacaggttttatgtacagttacccttggtgctcctggtgatgctcagcgattggattcaattgttggtcctccaacaaagcgtttcatgcttcactacagctttccaccattttcaataaatgaagttgcgaaacgtgggggcttgaatcgacgtgaagttggacatggcacacttgcggagaaagcattgctcgctgtgcttcccccagaaggtgaatttccatatacagttcgggtaaattcagaagtcatggcttctgatggttcaacatcaatggcatcagtatgtggaggaagtatggctttaatggatgctggaatacctgtaagggaacatgtggctggtgtttctgttggtcttgtcagtgaagtggaccagacaactggagatatttctagttatcgcatattaacggatattttaggtcttgaggatcacttgggtgatatggacttcaaaattgcaggaacaaggagaggtattactgctattcaactggatataaaacctgctggaataccgttggacataantatgtgaaagtttggaacctgcacgaaaggctcgaaatcaaatccttgaccgtatggaccaggaaataagttctgcacgtgcttttaatgatgggagctctcctcgattagctacactgagcttcagcagtgattctcttaggaaactgcttttc

SEQ ID NO: 14732 - DNA, 342 bp, Oryza sativa
  Clone ID: PAT_MRT4530_20641C.1
gcagcgacacgtggcgcacgcgtggggactgctgaaccgctcagaggcgccggactacctcatcggagagttacccggagactacgggtcctacccttttgccctgagtatgaactcagacgtcttatgcaagcaccaggcctatgagctgatccatgcctggtgggcgatgctaggagccgttgggttcattatccccgaggcctgcaacaagttaggagcaaactgctgcccctaggccgtatggttcaagactggtgccctactactgtacggatacaccttatactacttgtggaccagaatgcccatcaacctcatcgtcgccgtcgccaccgaggt

SEQ ID NO: 14733 - DNA, 459 bp, Oryza sativa
  Clone ID: PAT_MRT4530_20642C.1
tttttttttttttttttttttcacccataatatggctagcaattattactttagtgggataatttacactaataatccattgggcgcattatgccccaatttatggtacaaaagattattgaccgtcatatctcctatgatcactaaataataaaaccctaagcacaaagataacatattcccaatctgtacccacaagggtgcacctagcaaaacgacacaccccctacagtctatggcaagctgggcccaccagcaaacagtaaaccatccttttcttacaggtccccgtgagtgcctacacccatggttgcatggtcaacatcaacaatcatcaccctcacattacactgctagtgggccccctttagtttgaactatctatattaactgattactcactcccgatcgttgagcagccccaaggaccggaattagcacgggcttggagtttggttt

SEQ ID NO: 14734 - DNA, 4581 bp, Oryza sativa
  Clone ID: PAT_MRT4530_20643C.1
ttatactccagatatgaggttgatgtgttgcagcagtagaaacctgtaagatccagtggcgaagtagtccccgcccttgctggagcagcagctgaacctgtcgaaaatgcagtcgttgttgtacagctccgacagcttaggacgaaggaactcatgcaccttgtaagttgcaacaggggagctctccacgcgcaagtcccagagcttcaggttcatgtagtctcgagttagcagatacttcccatctccggtgaacttcacatcggagatgcaagagatgatctcggtgaagagcgtcctaggctgcacgctgttcccacgatcctggaatattctgacgttgcggtcgcacagcgccgactgccgcaggtcgaccagccggacgaagcccctcgagctgccgaaggcgaggaggctgcacgacgacgggtggaactctgccgaagtgtccacctctacgagatcctccatgtccgcgggcttcatgtccacgacgttgaagcactggtccgtcacctccaggtgccacaggttgatcctgaggtcgtcggccgacacgaacgtctccccgtcacagttgttcgaaatggagttgatgttgtacacatgagcacgggcgaacactctccggcacttcgcggtatatccttctccaacctcacttgccttttcggaatgttcagccgaatcaggggacaaatagttcctagctttcttgctcgcccactcgtaataatacccatttcttacgctcgaatcaccctccccgagcagcgcgatctcggacagcgacgccgaagtcggagtgctccgccgccgccgcggctggccgttccctttcctcgacctgtgttcggagacctgccttgaagcttccagagcttgacggtgcggtcgttggtggcgagcatggacagcgacgagctgttcggccgcgcgcaccatctcagcttcttcaccttctcgccgatctccaagctcctgctcgtggctctggaactccgccatgtaggcgtacgccggcggcgccgccgcggcgtagtccgtgcgctccaggtcggcgcgagacggcggcggcggcgggtggctctcgtcgtcggttcttcggaagaggatgacgcgcccggcgtggtcgccggcggccaggtgctcgccccggccgtcgaactcgattgccgagatcgtatcaccgtcatcttggagcgtgccgttgtcgtggccttcgccggcggcggcgagcggcagttcgccgagcacctgggagaacttccagctgggaagctgggacggcggcgcctgagcttcccgggcgccggaagggaaagaagaggaggaaacgggggagggagctatggaggtcaggctcctcctcctcctgccggcgttgctcatcgccgcgacccgcgaggagctcctcatctttggttcgtttttttggttcatttcttggcgattatcagaggcggcctcggagccacaggcctcgtcgttgtgggacctggtggcagaaaaggccacaatcttgcctcccgttctgtactccggaattccctttgcattgaaacttgagcatttcacaagtagttcttctccgacctcaaaatccttgtgtccattttccgcaaatttatgcattccacgaactccatcactcaactcaagtactaatccataggctcgtatctggtagacctttgctgtaactacgtcacccagcttcatagacccagacctgaagtttgagggactagaatagttcatgatgttacttttattttgttctggaatggcatccagcacatcatttgaagagtcagctttttctttcttatttttcttggccgttgttgatgcacctgaagttttcttagcactagttctcttaacttcctgcctttcgctggctggtttagatagcttaggagatgactttgcaacctttgggcgtttcttcttaggatcatttgtaacatcttgcgcatcacattcagcagcacttcgaattataactgcaggagtagaacacccaggtgtctcctcaatcatgttgtcttcgtctttgctgatggatggttcagcattagcatccttgctaggcatgttctctacagccgtccagccaacaacttcttgacttggcaaaggatcagtatgattacttgctaaatccttcttttcatgggcatggggcagggtagctttaagagaaagtttaatgttacccctcaagtcctgtccaatgcatgtcaatgagagcacttggccaacagatacaacatccgagaccttagacaccttatcatgtgacaactcagaaatatgaagtagaccttgctgtccaccattgaattccacaaaagcaccgtactcctttattgaggaaacaacacctttgtacgttctgccaacttcaatttcacgacccacaagaaattctaccttctcgatagccttatccataattggttgggtttttgctacaatagtgactgtaccatcactaacagatacccgtgcacctgtttcttgctcaatttttttcctgtggaaaagcagtttcctaagagaatcactgctgaagctcagtgtagctaatcgaggagagctcccatcattaaaagcacgtgcagaacttatttcctggtccatacggtcaaggatttgatttcgagcctttcgtgcaggttccaaactttcacatattatgtccaacggtattccagcaggttttatatccagttgaatagcagtaatacctctccttgttcctgcaattttgaagtccatatcacccaagtgatcctcaagacctaaaatatccgttaatatgcgataactagaaatatctccagttgtctggtccacttcactgacaagaccaacagaaacaccagccacatgttcccttacaggtattccagcatccattaaagccatacttcctccacatactgatgccattgatgttgaaccatcagaagccatgacttctgaatttacccgaactgtatatggaaattcaccttctgggggaagcacagcgagcaatgctttctccgcaagtgtgccagctgataaccactgcctctcccaaaaaaccaggcggttggttaacaaaaaaccagttggatctagtgctttatgctcgatccacaccctcagctcatctcccagtcgtatgggctagttcctataatcatgtccaacttcacgtcgattcaagcccccacgtttcgcaacttcatttattgaaaatggtggaaagctgtagtgaagcatgaaacgctttgttggaggaccaacaattgaatccaatcgctgagcatcaccaggagcaccaagggtaactgtacataaaacctgtgtatccccacgtgaaaacagggcagatccatgcaatattggatatgtgctggattcacagtagagtggcctaacttcatcaagttgcctgccatcaactctaagtcctttctcgattattcttttgcgtataacctgttttctcactgtatcaactgccttgtgaagaaacttcaagctgtcctcatcgcattcttcttcaagctttgctttcacagattgtgtaatattttccaaggcttctcctcgctcaaacttgccgtatgttgaatcagtgaagacttcttcaatgggtgcttctgataatgttctaattttctcataggatttatctgaaatcaatgagatcttgtactctttcttctttttgccagctctcttagctaatctaagttgtgggttgatgcatttaactgcctcagcgtgtgcaagtttcattcctgcttgaagatccctttcagtaatctcacgagcttgcacatctatcattaatgttttatcacgagaacacgcataaacaaggttgaggtcactcaaacctaactcatccaccgttgggttcagcacaaaatttccatcaattcttcctacacgaattactccaattggtccattccaaggtatatccgatagcattaatgcagctgaagaggcatttgcagccatcacatctgggtcttgttttccatccgacgatataacatttaccatgatctggacttcatggtaaaatccaggaggaaacaatggtcgtattggtcgatcgattatacgcccacatagaagctccctttccttaggggcaccttccctccgcatatatgttgtcggaataacaccttgggcatattgtttctcttgataatcaacagtcagtgggaggaagtcccggacgggttcggaggacttggcggcggcgacggtggagaggacatgggtgtcgtccatggagatcacgacggagccgttggcgaagcgggccatcttcccggtctcgaaggagatgacgcgcccaccgatctcgaactcctcgcggaagctctccagcaccttccgtcccggcggcggcggcggcggcgcgtccgcctgcgcgacctcctcggccgcgccggagaggaacgccgcgcggcctcccgggacggagagcggcgcggggaagcgggcgcggcggcggccgccgcgcgcgaggaggcggagggaggccaccgccatcgacat

SEQ ID NO: 14735 - DNA, 658 bp, Oryza sativa
  Clone ID: PAT_MRT4530_20644C.1
cggatgcttcgatatgagtattcatcaacatgtatgtataactctcactaggactggcgtcttcagttggcatccgctatcacaacaattgtgtttgtaccagcagttcctcatggggttcttcaactgcgctctttaaattcggttgcataaagttcaacatcactggcactcatcaaggatttgttctataagctttatgatgcctcaatatctggcagtccttcaggcacagggtttggttactcaaatactgggagacaacctgctgcaatgctaccaatggattctccagatgttgtgccccataatttttttcgttccataaagagttcagctcagctcttgaacaatgatcaccttagtctcctacatgcctttcctgtgttggagtttgcatcaacagaagatagcattgtaagcatttatgacactagtctaacagcttgcgcggttgaacccttggatggtaatgacagtgatatttggaccaatgttcatgaagagctatctcaatttactcgctgcaatacagcctctgaggcagataaggcaaacataagctatatggataagttgatcaattcagatagcaaaatgagctgcagatcagtaagtcatgcggaagatccaggatatggtaataatgatcacttta

SEQ ID NO: 14736 - DNA, 1797 bp, Oryza sativa
  Clone ID: PAT_MRT4530_20645C.1
gcacgaggagagagagaactagtctcgagtttttttttttttttttttgtgacaaattaccttccgtaggggctaaaatatgtactgggtattatatggtatgaaacggtcattacaacgcaacgacacttttaggtagcatctaagatcccactaagacggttttaacaattttatgaaaaaacattcttgttacaggtgcatatgcttacatgactttagccagtacagcattcacgacataacattttctctatagctccaggtctttaagttttaagttataggaactcctgaacatatctgccaagcaggcatgccgtcaacttattgtcacggcgaatcctgtaacggctgaagaaatgtcacggagtctcgactgtagattgaactcacaggatccggtcttgaagatcagacatgatgttcgatgccaaagatgtcaacttcttcccagtttccccagccatgttcttgatagaagacagatcctgggaagcctggaaagaaagccggttgatcaaatctgaagcactcagatccacgttggaactattggttggatgaccaaatagatcagcacttgaaatggcagaagatcccgaaaacttttggagggaaacttgagcctccttttcaaaactggcctggtctccaaaaaactgagaagatgaaattgactttgcatttgaaaacttctgtcttgcttcactactttcttcaatctgcactttggatgggccaggggcagattttttgtgatatccactgtccatccaaacctgcactttggatgggccaggggcagatgttgtgtgatatccactgtccatcccaaattcgccaaagaagtttgaagattttgggggcgcaacatgtccaatgacctggttttcttctgaattgctcccagcagaaggtgtattttccacatattcaaatcgtgaagtatgagatttgctctttgctgtactgttctcagtcactggtggcagcgcaggagctagctcttcaggcttctgctcatagagactttcatttggctttgacgtaagtttccgtgcaccaagtccaccggtcttatttccaggcttcttcgcaacaattggcttcttgaaagaatgagttggagcccttggtgaacgaataacctcaggctcagtcttctcatttgcaacttctttagatgcctctgccagcttaagatctggaattgcatcagcttgatttgtaggttgtgaagctgcaactggggaggacggccaactgttgttcccatcttcagtggaatttttagcaacatccttagcgagcaactgccggtataagtcagcagctcttgaagtatactttgcttcaatttttccaccatctgtccaaccatgctgcttgaagaaagcttgtgcacggttgttacctccataaaccatcattttcaattgttctggggtccacgaatccaaatttgttgacctgacgaaggagacgtgaacgccgaggctacggtggacggcagagcagtcgatgcagaggaagacgccgtaggtgacggaggcccaggtcgggttcttggcgttgcagtcgaagcacatcttgttgtctgatttggcgcggagcttgcggaagacggtgttcttatcggcggcagcggaggaggaggagtcggtcgccatggcagccgaagcagagggtggatcgctcgcccaagcgggattggaattggaattggaatttgcggcaggagaggcgagtaggcgaagggggaagaagaagatgaacctgcagcccggggatcca

SEQ ID NO: 14737 - DNA, 235 bp, Oryza sativa
  unsure (1)..(235): unsure at all n locations
  Clone ID: PAT_MRT4530_20646C.1
ccgtccgnactccggtcgacccgcgtcgcttagccggattcggaggaaccctagctagctcccgtctcgatcccgcgcccgccaccgcactcggcaagatgtcctacgaggacggagtacgaccggggtgaacacctttccggagggcggtgtcagcgagtcccttgagccatcagtgggtcactggacgggtgaaacaagatgggtgtcttgctgaaaacggggacctgcctgt

SEQ ID NO: 14738 - DNA, 1127 bp, Oryza sativa
  Clone ID: PAT_MRT4530_20647C.1
ctctctcccgtgttcaccacgccgtccccgaagtttacagtctccaccatggaggaggtcctgctgcgccacgcccgcctcccgaggcccaccgcgcccaccgcgcgccgcagccgccgcctccgcgtctcctccactcccgtgtcgtcgtcgtcgtcgtcgtctgcttcgtcggccgccgcgcgccgcccgcgatggcgtcgtcgggggacagcagcggcaagcagcggagcgacgaggagtggcgcgccgtcctctccccggagcagttccgcatcctccgcctcaagggcaccgagttacctggaacaggtgagtacaacaagttctatggtgatggggtctacaactgtgctggctgtggaacacccctgtacaaatccacaaccaagtttgattctggttgtggctggccagcattttttgagggacttcctggagccataaaccgaacaccggatcctgatggaaggagggtagaaatcacgtgtgcagcttgcggtgggcatttgggtcacgtgttcaaaggagaaggcttcaagacgcctactgatgagcgtcactgtgtgaacagtgtttcgatcaagttcaccccggcctcctaaatcctttcccaggtcattattattggaggtgaattccccagggctaaagctgtggaaagcactacaaaataatgaataaaatcacagagacatatcctgtttgtccatatatgaattcatctcctgttaatttagctgtaaacttgtaacttaacattgctgggaatggtaaatgaatgaataaatgaatctggttcattagttaaaaaaaaaaaaaaaaaaaagtccgtgtatctcgttatgttcttggtccgcgacgtggaggggggtggcgccgctgctctgatttgctagttttctgcctggtcatcattattttccgcggctttgccctcgcccgccctttttgttgttttttatcttgcgccggtctaatacttgtcggtgcgatcgctgtctggtcggatggggcttgttggattctcgctgcttccttgccttgattcttacgctgcccgctgggtgttagatcaagtgcggatcaaaatgagtgcagacgcggcgcacccgttggtggtcttc

SEQ ID NO: 14739 - DNA, 304 bp, Oryza sativa
  Clone ID: PAT_MRT4530_20648C.1
attctaaacagaaaatacccctggacataggtggggttcattgaacaagcatggcacaaacacccctatggggatatatgcacatgaatggaatcccacggtcgaccagaactcaagaataactaatgcgggttgaactgcagagcggagtgcataaaacaccacccaactaaagcttcttggtctataacgacatacgagaatactatttatgaacacaagcttcatctctcaacaccagccaaaagttgacaagattaactggatgaaccccgaactgaatccgcggggatgatcaaccagc

SEQ ID NO: 14740 - DNA, 462 bp, Oryza sativa
  Clone ID: PAT_MRT4530_20649C.1
agaccaggaaaagaagaacgctcagactgctgctgctgcagctgcagttgcagcattgtcatccccagctgccccagctgctgagactgtagatcctgctcctccaactcctccacccaaaagagtacttccaccaataccccaagacgagcagcgccacggtctaccaagtggatgcctggaagagaagccggaagattcaagccaccgcaatgcccgcctgagaagagccaagattcaaccgaagagaaggctcttctccaaggagttcactccacgggcagacgtctctccctcgtttgtgattgttatcacctggctgcccctgctgggcccttggtttttcgtttgcccgcagatccacgtgaggaccgtgttctggattttgcaccttgtctcttgttagttggcagaaatgatgacactttgtacctctcgtgtcaaaaaaaaaaaaaaaaaaaa

SEQ ID NO: 14741 - DNA, 1875 bp, Oryza sativa
  Clone ID: PAT_MRT4530_2064C.1
atgggtacaggatttagaaggatccaaataccaggcctgcaagttcattcaagcccactaaccaatcggctgataaatcatgcaaggtgtaaagaccagaatccctatctaagatggtacatatggaactatgaatcagatcctgatatggcactcacaagtttgatgactcagaaggagcagcgccacagcgagcgcgtcaacggcgggcacggcctcgccgacggcaatcgccaccccacgaagcgccaagcggcgcctcacgagccctcgccgagccgcagggtcacccgacgcgtctcagttcacatccccccacaaatcccccaatgtcggaatcgtaagtcccccacctcccctcgatctctagtgcaggactatgcagatgctggcgtgctgctgctgctgctgcatattacctggtattctgttgcaatgaggagcaattgctcgatcttgcaggttggcaccccgaagctgctctcggcgtcgcccaggtcatctaggaagcggctttacggcgacttcgtcgcggccgagaagcccaagtggaatcctcgaggcaagtctccagaatcccatttcagtagggctcagagttctgattgggatctgacgaaagaattcatctgttctgcagatcccgctcagatgcaggtggtcaaggaggcgcttcacgtggctacggtgccctcttgcggattggtctgccgagatgatgagcagagtcgcgtgcttgagttctgcaagggttgcgtggagcaggagcgttcagggagcctgtatgtgtgcgggtgccctggtacagggaagaccttgtcgattaacaaggttaaggagagcgtggcgcgttgggcagacgagaccggaatggagacacctgatgccttatcgatcaattgtacaagcctagcaaagacgcatgaaatttttagtaagatacttgcgaagtttcagactcggaagaaggcaacctgcaaactgtcaccacttcagcaacttcaaaccatgttttcccacaaggaatcagccccaagaaggatgttgttggtcgttgtggatgagatggactacttaataacaagagaccgggctgtgctacatgatcttttcatgcttacgacttaccaattctcaagatgcatactgataggtattgcaaatgctatagacctagcggatcggtttcttccaaagcttgagtccttaaattgcaaaccacttgttgtgactttccgtgcttattccaaggatcaaatatctgacataattaagcataggctgaaggttctcgagtatgatgtttttgaaccactggcccttgaattttgtgctaggaaagtcgctgcagcctctggagacatgagaaaagctcttggtgtttgcaggagcgctgtagaggtttttgaagcaaggttacaagagtcttctgatcaagaatttggacttgtaacatgtataaccaacaaagtggttcctgtaaaggaaatcacctttgttcatgtctacattgatgtgacatttgaccacatggacattgctttgtcaaaggctttcaagtcacctgtagtagatagcattctctgtcttccccaacatcagcagatggtattgtgtgcattggcaaatacttttcatcattgcaagaaaaaggcaacgactctaggagagctcaataaatcatacatagaaatttgtagatcaacccaagtcccagcagttggaatgcttgaattttcaaacatgtgcatggttttgagtgatcagggattcatgaagcttgggcaatccaaagaagataagctcaggagagtgatgcttcaaattgacagttcagatatcacttttgcatttaagatgtactcattagcctaa

SEQ ID NO: 14742 - DNA, 1212 bp, Oryza sativa
  Clone ID: PAT_MRT4530_20650C.1
atgcgggtgctccccctcgcgctcgccgccgccatcttctccggcgtcaccgccatcctcgtctacctctccggcctctcctcatatggcggcgctagggtttccgatgcggacttggcggcgctgggcgcgctgcagagcggcttcagcaagtgtgtggatgcaaatggtctagggctgaaagcaattccaggagaggattactgtcgagttgtaatacagtatccaagcgacacagattctaagtggaaagatccaaaaactggagaacctgaaggtttatcatttgagttcaatctctgtgaagctgtggcttcatgggagcaggttcgcaatagcacaacaatacttacaaaggagtacatcgatgcgttgccaaatggttgggaggagaacaagtgccagaacaggactctttgcatggaaaaactttcattagttcttcctgagacaccaccatatgtacctcggcaatttggtagatgtgctgtagttggaaactctggggatcttcttaaaaccaaatttggggatgaaattgattcttatgatgtcgttattagagagaacggtgcacccatccagaattatacagaatatgttgggacaaagagtacatttcgacttcttaacagaggatctgcaaaggctctagataaagttgttgagttagatgaaacaaaaaaggaagcccttatcgttaagacaacaatacatgatatcatgaaccaaatgatccgggaaattccaataaccaatccagtatacctcatgctaggcacatcgtttggttcctctgctaaaggaactgggcttaaggctcttgaattcgctctgtctatgtgtgacagtgtcgacatgtatggatttacagttgacccaggatacaaggaatggttggaccagcttgtaaaaatccactcacctatgcgaggtgatcctggcagagtagtaaagtgggctccaaccaaggacaccattgaagctgctagggttgcttctgagaaactgttgaagagacctggggctggaagcgagggccctttgagctcttgcaccatgataaagaagcgcgagaaagggaagacaccaaaaagatctgttgtccgccatgctgccttgaagcatctggagtacatgagaggtgccaccaggtaccctctggagcggaatgctgggggtggttacctctgcatgatcaacgaaagatag

SEQ ID NO: 14743 - DNA, 327 bp, Oryza sativa
  Clone ID: PAT_MRT4530_20651C.1
atggccggctcgggcggcaacctcgccggagctaggatggtcgaccgggcgattggagggcatctacgcgtagaggatgacgagacgaacccgatggatgtgacactgggtgatgtcaatctccaggatggatttgccgacccagtcttcaaagatgctcatagggcgtcaccgcctgccaccaccttgactgagcgccagctcgccccgcgctgctcctcccgctcccgcggttcgatttcggccacccgatccaccgtcttcgccgctccttgcatcctcgtcgtccgccgttcttgcgtcgcccgtgaccgccagccgagctag

SEQ ID NO: 14744 - DNA, 396 bp, Oryza sativa
  Clone ID: PAT_MRT4530_20652C.1
acacaataatcaaggttgaggtgaaaaattagatttgaggctcctaatcttttcccaccaatcatcacataccgaatgatcaaaattaattggcaaaaataggcatccccctttttttttacattcttccctaaaaaaaaaacaacaatgctttaaaaaacaggtggatcaccctcatttgaaaagtcaccttgaacaatccctttgaatggaccgatttaaaagaaattgggtgaaagtccataattttaaaggagcatttaaccccatcccaataaattttaaaaaaacccaaattcttttattccccttccaaacaaaaaacctggcggatttttcctaaaccttttacccagcccttaaattggccataaaaggcaaatcccaatttttttt

SEQ ID NO: 14745 - DNA, 448 bp, Oryza sativa
  Clone ID: PAT_MRT4530_20653C.1
ggtggagacacaggatggtggagatgcaaaagtagaggtgtcacctcgtgacatagtttacatggaaaatgctgagcctataaatggtgaacaaccagagattctgcataaacttgacctccgatatgcagggacctcttggtgtgatgaatctcttgcattagtgtatgaatcttggtacaaaacacggaaaacaagaacatgggttatctccccagataaaaaagatgtcagtccacgcatcttattcgatagatcttctgaagatgtatattctgatcctggctcaccaatgctacgaagaactgccatggggacatatgttattgcaaaagttaagaagcaagatgaaaatacctacatcttgctgaatgggatgggtgccacaccagaaggaaatgttccgttccttgatttgtttgatatgtatgtctatatccatcaatag

SEQ ID NO: 14746 - DNA, 386 bp, Oryza sativa
  unsure (1)..(386): unsure at all n locations
  Clone ID: PAT_MRT4530_20654C.1
cgagctaaaattaacccnactaaaggaatagcttggccgctccaacatcaaaatgagcttggcccaactgcaggctacggttcatgctcatgttttggctctggttttggttcatgacttacctcctgctctggttctggcttgtgctcagacttaggctcacgctcacggaggggcttgtgctcaagctccagctttagctctagctttggctatgaacatggtacacagaatggcctccaaatgtcattatccctataaatgcacgcttaggctcaggctttgcataaggctcacggcgctgattagcctcacagcttatgtacacgcttacgctaaggctcaaaccgcgactgacgctcaagataccaatcatgctccgcttc

SEQ ID NO: 14747 - DNA, 2193 bp, Oryza sativa
  Clone ID: PAT_MRT4530_20655C.1
atggcgagttccagatgccgcgtggcctacgtcgtcctcgcggcgctcgcggcggcgccgttcctgctgctcctcctctacggcggcgggtccccgtccgcgctctgcctcgccgccgcacgctccggcggtgcgtcgcgccggctccagtacccgtctgtcgcgtggtcgcgcgtgccccctctcccggtgctcccgtcctcgccgctcccgtcgctgcgcgcctccaggtggatcatcttcgccgcggcggcccaccacccgcgccaccgcccgctgcccgcggtccccgggtggcagctcctcgccgtggccgacgagaccacgcccccggactggtcgcacccgggcgccgcgctgctcacgctcgccgaccaggcgcgcctcgggttccgctccgttgccttcctccccgcgcgcggccacgcccgcaaggccgccgcctacctcttcgccgtgcagcgcggcgcgcgcgtcatctacgacgcggacgcgcgcaacgccgtcctgggcagtaacctcaccaagcacttcgatgtcgatctggaccatcgccaagggggcggcgtgctcttgcagtacagccatgcggatcccaaccgcacggtggtgaatccctacgtgcactttgggcagccgtcggtgtggccgcgggggttgccgctgcacaaagccggggaggtgggtgtggaagaattctacactcaggtgttcggtggcgggcagttcatacagcaggggctgtgcaatggcctaccggatgttgacgctgtgttctacttcactcggaaatcatcggaaatggaagcttttgatctccggtttgatgcagatgcgcctaaggtcgcacttcctcagggcatgatggctccaatcaactcagttaatacactgttccattcaccggcattttgggggcttgcattgccagtatcagtgagtccaatggcagctgatgttatacgtgggtattggtcgcagcgcatattatgggagattgggggttacttagtggtctacccaccgaccgtgcaccgcatggataatgtgcatgctcacccgtttgatgatgagaaggatatccatgtcagtgtagggaggctgatagatttcctaatggagtggcggtcacataagcagacactctttgaacgtattcttgatttgagttatgcgatgactgaggaggggttctggggagagaaggatttgcagttcatgtccgcgtggctgcaagatctggtctctgttggttaccggcagccaaggttgatgtcattggagattgatcggccaagggcgaccattggacatggggacaagcaggtgtttgtccccaagaaactgcctaccgtacatcttggtgttgaggagattggggaagttagcactgagattggaaatctcataaaatggaggaagcactttggtgatgttgtgcttatagtgcactgcaccgtacctgtggaccgtgttgcacttgagtggagattgctttatggtcgtatattcagggcagttgttattctttcagagaaaagcaattcagatcttgctgttgaagtcagcaacttggcacaagcttacaagttcttgccaaaggtgtttgaccggtttgcaggtgctgggggatttatgttccttcaggatcatatgatcctcaattattggaacctctatgattttgacaaggctaagctctggataaccaacaaggtgaaggaatcatggtccgatgtccccttacatggcaataaaattgaatggttcattaaccaaggagatatggtaaaaaaggcaattgctagctttccatttcaatatcaagccaactacaaaagaagtgttggcgaagataagataattcattgcaacagtgagatattctacatacctcgaagtcacattggtgacttttcttatctagttcaagctattggaagcttagacattcatcacagtattgctatccccatgttgttccttgcaatggatttgccaagcaattttgaatcaaaagctttgaccaaacttatttataggacaaatgtgcaatcaaatgccacttttgcaacaatatacactgctcaagcacatgcagtgtacccaatgaaggttcagaatgagatagattttgtagagctaatcagagtcatggcttcaggtgatccgtttcttatggaattgatctga

SEQ ID NO: 14748 - DNA, 2114 bp, Oryza sativa
  Clone ID: PAT_MRT4530_20656C.1
atgagcgcggcggagctgtgcgacgccctcgccgccgccgggttcgacggcgacggcccactcgatctggacagcctcgagtggccgttcctccagggggacgacgcccgccgccttctcgcctgggtctcctccaggctccgccccgccaacgtcctctccgccaccgacctcgccctgtatgagcagcttgaactagaagggaaacttttggagggggaggacttagactttgcgtttgacagtatttcggccttctcagagactggagaaaaccaggaagacacatttctgacagaagaaagtcttgagcacatccgtgactcaaagcttacactcagagctgaagtttctgatttggaaaggcagcttgcttctcttgaatggcagcttgatatgcttacagcacaagctaccaccattactcagggaaagaagtcacgtgtatctgctaaaactaatcctaatatacaaatttcaagattagatgagaaacttgctaagagaagtttagagcagatgaattcattacttggaaaacttgctgctaccacccaggagttgtcttattatcattcagaagctgatattggaatttacctatcatacagtgacttccagtcttacataatccaaaatttggcttgtatcaaggaactaaacagatggttctccaagaagtttgagaagggacctctccaatttgttgccaaagaagacatgtcaagaggagattatgaagggtcacaccatctttctgttgaactgaagcgaattaattccatttctataagattcgctagaagcaaaagacagtacatagaagcacaagcagaatatgctaaggaggaggccatactctcaacgcttagaacccaattggcatcccagcagtcacttgttcatcaggatgttcattctctaaggaggagaaactctgagtttgctgaagagcttagggatctttcacttcaagtgaagagatgcctatctgagattattacaagcctgtgtgctgaccttgctcaacttgagggtgcaaatattttgcaaggggatcataatttgaaggttctgcgtcaggaatgctacataagccagcagaaaaggttcatcaattatctggttaatcaacttgctgctcatcagtttctaaagatagcttgccagattgaaggacgggcaaaaatgtcaagtgcctattcactgctaaaagcagcagcaatggagctgcagggttacttctcagttgttgatggccgtctggaccgatatcatttaattggtcaagctgcatctgtaatgcttgaagaaggatctattgatgatcgtgatacttttcttcatgctgtgagggatattcttagtactcactcaggtgctcaagcaatgactccatcatatgtttcagcatatggtttagttgagcagatctcagatctgcaaaatgagctcgagtatcttcatcatgagcttgaaaatgttcttccacgtgaacgcaaaagatgtatcgatgaactatgcaggatgatccaaacactcgagcaaattctgtctgtaccatttacatatgtgcaaccaacattgacaccatggcctgtagcacaatcgcttgaagaattggaaataatcaaccagcaagtctctgcttgtgttaacgaagtaacgatggctcgagataaaaaggccaagatgttacaacaaccttcgcgcaatgtgcagcaggaaagacgagtatttgtcgatttcttctgccacccaggacggcttgagaatcaagtcagagagatgagttcccatgttagagcactccaagagtgatcttcgattttgctgtgaagaagggcccaataaataattcttttgattcttaaaaaatcagcatcgtgcaccctgtcttctgttggcagaatgcaggctttttgcagttgtatatcctcagcataaaaaaatttagagttatggtacagattttcttctatatcgtccataaaaatatacgcagcctagtgcttcaagaataactgatgccgtgtttaagatgttcggccaaaattttacatatttcgcctgtaaagatgctaataacaaaacaaattatagattctacctgt

SEQ ID NO: 14749 - DNA, 419 bp, Oryza sativa
  unsure (1)..(419): unsure at all n locations
  Clone ID: PAT_MRT4530_20657C.1
aaacagaatccaatcacaaacattctttttttaacacaaaacattggtttcaaatccacgggaattaacatgtaaactttgaaaaaaaaaagaaacaacttttttgttgtcgccggcaaactcttttgcttgcggggggcggcgccaccccccttcttttttagggcggatttaggagggagggaggttttcggcaccggcaccggccttctttttttttgtaggggccggatctatgagagggaggggaggggagccncntccgcaccgtcgttgccgttcgggcaaccgttgtcgccccatccatgccgttgtcgccattcacgttgttgtcgcttccccttctccaaccaaatttattaactgggagggaaaaagggggaacctccaccacccgcgttgttggcccattcattcaa

SEQ ID NO: 14750 - DNA, 372 bp, Oryza sativa
  Clone ID: PAT_MRT4530_20658C.1
aaattcaaactatttcttttttttttttgtttttttttttcaagggaaagggggaccaacccaatacccgttcattaacacgataacccaaaacattccataactttgaaagtgcataggaagcccccctaattaacagggggtctttcccatatgaacccttttcttatttacacgtgcctaaataccctgccagccttttaccattggggcattcattaaacctttttactccagggtcaccaaacacacccatcccaggaggaatgccttacaaatcattggagtttgagtttgggggaaacagaaccatttgtcctgatttaaggaggcgggtatttacatggggagccttgtgcattttcccaattt

SEQ ID NO: 14751 - DNA, 331 bp, Oryza sativa
  unsure (1)..(331): unsure at all n locations
  Clone ID: PAT_MRT4530_20659C.1
gtgttcagtgtatgagcctttggttgatttgactattgataattgataacaagtactactagtatttactattgcttgatactccagttccaccagctttcttgtgaaacataatctacatctcttgaaggggaactgcattgctagaaaaaganaaatagtggtgctttattttttttcctgggaataaacatgtcgctgcctggctttattagaatcaagcagcgcaaaatcagataagcattttggaatttgctgtttgtccaagttgagatgatgtggccagtatagatttggtttacaaagtgatttggatggatgtaatgtaggt

SEQ ID NO: 14752 - DNA, 1487 bp, Oryza sativa
  Clone ID: PAT_MRT4530_2065C.1
cccacgcgtccgcccacgcgtccggtacgctactggaccatatactggttcggatcgtatcaaaatcaatcctttctcgtccacacactcatgaatcatcgctcactcaaacagccttgcctcctcctgttgagttgacccgatcccatccggtgttatccatcccttccctgatcccccatccatcgccgccgccgccgccgccgtggagacgatgacgacgacgaagaagaagctcgtcatcgacaccgacccgggaatcgatgacgccatggccatcttcgtggcgctgaggtcgccggaggtggagctgctgggcctcaccaccatcttcggcaacgtctacaccaccctcgccacccgcaacgccctccacctgctggaggctgttgggaggactgacatccccgtggcagagggatcccatgtaacaatcaagaaagccaccaagctacggattgcgagctttgttcatggctcggatggtctaggaaatcagaactttcctccgccaactgggaagcccttagatcaatcggccgccgcgtttcttgtcgagcaggcaaatctgtaccctggacaagttactgtggttgcccttggtccacttaccaacctagctttggctatagaacttgatccttctttcccgaagaagattgggcagattgtgatccttggtggtgcgtattcagttaatggaaatgtcaaccctgcagctgaggcaaatatatttggtgaccctgatgcagctgatatagttttcacctccggtgctgatattttggctgtgggaataaatattacacaccaagtagttctttctgatgctgaccgggaaaagcttgaacagtctgatagcaaatatgcccgatacttgagcaagatcctgggtctttattatgattaccacaaggacgcctacttcataaaaggagtgtatcttcacgatccagcaacacttattgctgcggtagatccgtcactgatgacttacacggaaggtgtagtgagggtgcagactgatggcatcacaaagggtctcacagttttcgacacaaccaagaaaaggtatggggagataactgcgtggaccggtaagccaaccgtgaaggttgctgtgaccgttgatgctcctgccgttgtggagatgatcatgcagaggcttacgacggatgattagcagcagcagcagcagcagcagcaagcaagcagccaagggaaaaacgctgcctttgtcttgttgaacctgtcggatcttataaagaatagacaatgctgtatatcctaaattctgaagaatttgctttacatgattcgtcgtcgaggttgatcaacatcacacagaactagctagaaacagcctgatgcactgattcagaggttgacaatccatttcaattttatggccagaattcatactacaaagagtaaatttcagaaagctaaaaaaaaaaaaaaaaaaaaaaaaaaaaaaaaaaaaaaaa

SEQ ID NO: 14753 - DNA, 490 bp, Oryza sativa
  Clone ID: PAT_MRT4530_20660C.1
ctcagtgatcactgaatcacataaactgaaaacttggtttgtgtcctcccaaatattagttgtattctcggagccacccacttgtcttagcgttgagttgtttcttactcaatttcttttgttttctaatccagttgaccatgcatgcttaactatgtttgatttagcttgtagtgcaaaaatatgactagccactaagcaggccatttgatatgttttgtgcatctttcactaaaaaagtgtctcatgtgaatcatctgtactgggaagcaatttgccttctggtctctattactagtggtagtccttgttattcctaatttcaatggaccattgattttgtacttcttataattgacatttgatagttaataccaccctagttttgaagttctcataaaattgaggccataatctcaataatattaatatttttgtatgcattcttgacaattccttcgctagaggcaagcaatgcagtttacaaatg

SEQ ID NO: 14754 - DNA, 458 bp, Oryza sativa
  unsure (1)..(458): unsure at all n locations
  Clone ID: PAT_MRT4530_20661C.1
cacaaatatgctcctagataattgctcatcaatcatcactcacgaccaagacaaactaaattatatgaaacgaggattagtgtttctgcgctcataaacagggtgaatgaagtatttctttgatttttcataatagctttgaatatacggcggaatttgatgaagtacataccaccaccaagtgaactgtcatatgcatgcatggcagaaggtaatatttcaatcatagaagcttcctgttcatacagtaggtagaacatcggaagtggagggagggcatccattattgtaaatgctcatgaattgatgctatttagcttaacaatcttatttcagataggttgttatttgcagttacattctatagtgtcttcaggncaatattcagccaagtttgcttacaattccttccaaggtgccactctattcaggccatggggaccgtngttgaaaagtgt

SEQ ID NO: 14755 - DNA, 339 bp, Oryza sativa
  Clone ID: PAT_MRT4530_20662C.1
atggggacgacggccggaggggaggatggcgtcggcggcggtgaggaggcctgggggcggcggatccggcgtcggcaatgggagtgggcggtggatccggcgtcgggagctggcgacgacgatggcggtggtggcagcggtctcccagcgtccggattaggcagattttcacgtgcaggtgcatcacccgcacgaaaaaatcgtgattttcgcagacacttcgttctagaagggcgtaacaaccacacgcaaaaaccgattcgaccacacggaaaaatagctattgtactagtgatcctttggcagattcataatctcctgaagcctaatataccatga

SEQ ID NO: 14756 - DNA, 258 bp, Oryza sativa
  Clone ID: PAT_MRT4530_20663C.1
ttcgttataacgccatagatagatagctcgatagggtagcacgcactcatggcgtcgttttacacttgaggctctgtcgccgtggaagatgtggtggtcctagactgtacttctctgagagatgcaggcataaacagccaaggggcccgcctagtggataaataacttccgaccgtcgacatccaagcgaaatccagactccccgaagtgcagccggtggtaccccgcctaccgttgaatctagctgtgcccggagtg

SEQ ID NO: 14757 - DNA, 426 bp, Oryza sativa
  Clone ID: PAT_MRT4530_20664C.1
atggccaccgccgccctccgcatcgacagcgacgacgtcgtcctcgacgtgagcaatctggccctagccgcgcaggcgagcggcgccggtagaggcgacgacggcgacgcggcggacaatgcgttgatgaggctcccgcgcgctctcggcgcggccggcgtcctcaccggcgcgatggccgccgcggcggccgtgtacgggagccccccggccgggacggtcctcgcccgcggcggcgggatgggttactatgttggcctcggcggcgcgttcgccgccggcgtggcggaggtgtgggccgcgatgtggatggccggggattgcccgggccgccgcgtcgtcgggaagcggctcctgtgcgccgccgtcgtccctttcctgatcgtcgtctcgctcggcggattttccgtccatgtcaagaactga

SEQ ID NO: 14758 - DNA, 390 bp, Oryza sativa
  Clone ID: PAT_MRT4530_20665C.1
atgcagatcaggaatctctccgatttctacctccactgccactcggtgctcgacccgcgcaccctcgccgccgccgccgccaccgtcttctcctgctccgactgcgacgaggatgacacgagcatgaacatcgtggagatcatcttccagtcaagctggctgaagaagaacgcggggaagccttcatcccggaggcgcaaagcggcaggccgcagcggggacgacggtgacgccgaggccgagggcgaggacgaggggagctcccgcttctgccctccccggggcgacgactccccggcgcacatccgaccgacgagggcggtgagccaaagcggcgcagcaagggaaggcgagctcgagggcgaccccgctgaggcccggcccgtctaa

SEQ ID NO: 14759 - DNA, 120 bp, Oryza sativa
  Clone ID: PAT_MRT4530_20666C.1
atggccatcgacccgatgtaccacgacgagctcccggcctcccgcaacacagctggttgcaatcttgcctactttgttgtttctaattcatggggtgaaaaattttgccagaggatctaa

SEQ ID NO: 14760 - DNA, 246 bp, Oryza sativa
  Clone ID: PAT_MRT4530_20667C.1
atgccatggcctcgcctctttctctccctcgccctctctctctctctctctctcatcgacctcaaggatggatggcagacggcagcttcgccaccgcggcgtgtggacaggaaggaggaccatggtcattgggccgcaccaagtgaggacgctgtgacgaatgacgtccaagattggacactatttcgaatagcgtccacggctggacgctctcaacaacaacgtccttcttattttcgttattaa

SEQ ID NO: 14761 - DNA, 3393 bp, Oryza sativa
  Clone ID: PAT_MRT4530_20668C.1
atgagggaacagtttggtctcaagcctaaggatactggcaacttgcatcggcatccaaatccagaatgttttgaaagggttccattgccaaaccgatacaacgtgtcaacctatgaacatgttagccgatttttggctcagtgtggtgaggcattgtctattgatgctctaagggttagtggggttcatgagatgaagttgtccgatctgacatcgatcaagcaaagggacaatgaatatgttcaagattatattcagagatttagggatatgagaaaaagatgttacagcttggctttaaccgattctcagttggctgatctggctttccaagaactgttgacgccgatcagggaaaggttttcagccaaggactttgaaagtttggctcatctagctcagaaggtgactgcacatgaacaagtatttcaagaagagaagaaagccttcaagaaggttaaccatcttagttcttatgtttctgaattggataatgaagatgatactgaggaagcgatgaaggttgatggtatcaataagtatcagagaaggtatgatcggcaggaggagcaatgttataaggatgatgatagttttgatcaccattggagttattgttttcagaaggatctttctgatgatgtggaggaaaccaagcacccgcaatggtgtccttctggtattttcactaaaaatcaaaagagacgggttcaaaggatgaggaacagggaactgttccaggatgttcaaaaagagattaatcatcggctgaacaggacaaagccaaagcaagagtggcgtgttaagagcaagatgttgtcagctgatgaagttgaagccgacaaggcaaaaagggtagctaagggaaaggctattgcttctgcatcgattaatatggtttttgtactaccggcagaatttggggttgatcaggccgatgcagatatcatggaagaatctttggctaggttggttttgtcaccagagcaagctatttttgagaagccagaaaggacaggaaatcggcatctcaaaccgttgtatgttaaaggatttgttaacggtaagtcgatttctaaaatgttggttgatggtggagctgctgtgaatttgatgccatatgctacattcaagaagttgggaaagaattcagatgatctcatcaagactaacatggttcttaaagattccggtggcaatccttcggaggctaaaggagttttgaatgtggagttaacaatcagcagtaaaaccgttcttaccacgttttttgtcatcgatgggaagggttcctatagtctgctgcttggaaaggattggattcatgcaaattgttgtgttccttcaaccatgcaccagagcttgatccaatggcaaggcgacaagatcgaaattgtgccagccaacagccagttggagatggagagccccaattgttgctctgagggcgtcgtggaggggtcaaatttctacacaaaagatactgtagatgatctcgatggcaaattgggacaaggtttcatgtcggctgatgatttggaagatgttgatataggtccaggggatagatctaggccgacttttatcagtaataatttatcatctgaatttgggaccaagatagtagagcttttgaaagaatacagagattgctttgcttgggaatattttgagatgctaggacttagccgatcaattgttgaacatcggctatctatcaaaccaggatatcggccatataaacaaccacctaggagatttccagtcatcaagaaaaagggtaagcttagggtttgtattgattttcgagatctaaacaaggctacccctaaggatgaatacccgataccgatttccaatcaattggttgatgctactttagggcataagattatggcagaagaggatattcataagacagcttttagatgtcctagtgcaatcggcttgtacgagtgggttgtgatgacttttggtttgaagagcgctggggccacatatcaaagagctatgaattatatctttcatgatccaatcagcttgttggttgaaatttacattgatggtgtggaagatggagccttttacacctttgctcaggttgaaagcagatcaagagtttacctgggggggcagagcagcagaaagtttggacaatatcaagaaatatttgagttccccccaattttgattcctccacagaagggagtgcctttcaagttgtacttgtcaactgatgagaagtcaatcggctcggtcttgattcaggaatttgaaggtacggaaagagcaatcttttatcttagcagaaagcttttggatgcagagacaaggtattcaccagtggagaagttatgcttatgcctgtacttttcttgtactaagttgagacattatttgttatccaacgaatgcaccattgtttgcaaagctgatgtggtcaagtacaagctatcagctccggttttgaaaggtagagttgggaagtggatttatgcattaacggagtttgatcttaggtatcagtcacccaaagcagtcaaggggcaggccatagccgatttcattgttgaacatcgcgatgactcaatcagtttggttgatatagtgcactggacattcttctttgatggatcaggggcaagttttgagtttgcttataatattaaaccctatgctattaataaccaagctgagtatgaagcagtactcaagggattgcaacttttgaaggaggttgaagctgatgttgttgaaatcatgggtgattctttgttagtcattagccaattagccggggaatatgaatgcaagaacgatacattgatgatctacaatgagaagtgccgagaattgatggatggttttccacttgtgacattgaaacatgtttctcgggagcagaatatcgaggctaatgatttggctcaaagtgcattaggttacaagccgatggtcaaaggtgttgatatagaagtggccgcaattacaggcgatgattggaggtgtgatgtctacagttacttaaagaatccttctcaatcggcttcaaggaaattaaggtataaggttttgacatatgtcttactggaagatgagctatactatcagatgattgatgggatgttgctcaagtgttcgagtgccgatcaagccatggtagcgatgggagaagtgcatgaaggatcaaaccaactggcacgccttgaacccgaaaccaagatttggacctgcactggagttaagcaaatctcccaagccagtgaagtggtgttgacggcagagaaactcgagcgaagacgatgccgacgacttctaaagattgattccatcacactcatcgataggaaactcggcgtgcccatatctggcgcgccaagtgtcgaaacatga

SEQ ID NO: 14762 - DNA, 1651 bp, Oryza sativa
  Clone ID: PAT_MRT4530_20669C.1
ctgcaggcgacgacccgatattccgatccgccggcgccggcgccgccagtcgccgactttatcggccgtgcggctcactccactccggccgccgccgccgctgatcgccggcttcatcaaggattcctcctctcccttcgcgaccccgccgcctcctctccgtcgccgcaaggaggagatcccctgcggcggcgccgtcgagccggtgggggaagggagagcttgaggcggaggcggaggcagagcgtgactccgaaccaccaccatggggacctctgcgcaggagccaaatctctggaagcaaatcgacgacgccgagcactatctggtcagcggattgttcgagcaggccgtatccactgccttatctgtatccagtcaagtacattcggctgccatggagaattcatgcgaccatgatgagcttctggaaatgcttgaattagctgggatggtacttgttcaggcgcttaaagaacttaagaggacatctgagatgtttatccagctcaagacaatctacggttcagtggcatcaataccattgaaaattttcattacaggggctacgatgcacatggcaggaggatctggatctgatcttagaccaatcttcgatgaataccttgctaaatggagatatactgatgatcaagtttatgttttagatgaaggaaagaacagctcctcaaatgggttggttgttacatcggttatgtcacctgaacaatattttgaggtggcagagttgtacacggtaacattccttagtgttgtctcccatgagactgcaactgctatctcatggactgaaaaggctgagttgactgaacaagatcggcaggacctattgagaaaacttcatgcgttacaatctgcagctaataagaagtccaccaatcagggtgcaaaactatcagaatcagcagaaagaaacctttccacttctcagaatggctcaatatcaccagcacatgaggatgctactaaaagctcagcacctacgcacaatgggaatatacagggacttagaaaggctttgccgaaatccattcaaccttcttttcaacgcgtcacaaatcaatttgatccattgttctggtggtttcattcatttcgcataaaatttggaaaggtgcatgtggttctaccaagtggtaaagtgatgtttctattttcactgctgttctcgacattatacatccttaggaggaaaggtgctgcgttgaagaggactgcattccaacaaatttcatctctgcgacggggcttccttgatgccctgcaactcgccttctccacccagataaatccactcgcagctgttcaacaggtgccgcaagccccgcgtgctagctggtgatgtagtgtaattattttacatatttatgccgacatcagacttgagatatgagtgtatgacaaatgtgatacctgattttgtgccattgaaaatgtaaggcaatggtaagagagctgcttaatacttccttgtaaggatccagattgagactaatatatatgtgtttttaaaaaaaaaaaaaaaaaaggtggccatcttctagggcttgcttacctgagcatcttcatgccggcttcgactcacttgtcctttggtctcttggcaactgtggaagaaacgcaactgtag

SEQ ID NO: 14763 - DNA, 703 bp, Oryza sativa
  unsure (1)..(703): unsure at all n locations
  Clone ID: PAT_MRT4530_2066C.1
taacgcccgttgncccccnnttaattccgccccccttttngggccctcctgcgtccatggctcagccccaagggaaactggtggacacaatcaggaggccattcacagcagcttcaacgtttcatcgatcagcaacaaggcatctccagccactggccatgttggctcagaggaacggcattagcaggaggggccttctcactttcctcacctccactgcagccatacctgaggctggtgaatcaagaaaggctctactgcaagagtatctgaagaaatcaaaggaaaacaaagaaaagaacgacaaagagaggctagacgactactacaagaggaattacagggattactttggtctgatcgagggccctgcaagacagaagaatgaagatgagcttacagagtcggagaaaggaattctcgaatggcttgacaagaacaaatagtcagaagctcaggataatatgcatgcctaaattctggaaggttttcttacagttattgctttagttatgcagtcttgtgctgcttatctgagaggcatgctttcttgaaggtcatcctttgtagtgccggtactctggcagtaatgttgtaattacaagtgtgttcatagacaaagtataaaaaatgctgaacgatctcaacataatagttcacaatcagagaggcgaagacagatattttaaaaaaaaaaaaaaaa

SEQ ID NO: 14764 - DNA, 255 bp, Oryza sativa
  Clone ID: PAT_MRT4530_20670C.1
atggcagcgggcgaccagctgccagatctctcgagcaaggacctcggcgctacgaacatcaacatgctcggcctcgttagtggtggcacggtctgcggcgacgccgatgaggagctcgatttcgaagtaggcccattcctatggctggcgagccgcatagtggtgtgggcatggaatttggccaggacaccaacaagaagtgggcgcgcgaatacagagactggcatggggagtagtttgccgactccttgttag

SEQ ID NO: 14765 - DNA, 1725 bp, Oryza sativa
  Clone ID: PAT_MRT4530_20671C.1
cggcacgagggggggactctctctggctgccatggcagaagcggcgaagcttccacgggtctccgcctatatatccccacccccaagcccgcgccttgccgacctctactcctcctaggcgtgtggcgggtttgactttctgactttgggagggagatttgtccaagaagaattccgttggaggaggattcggagagctccattggtctgtgggtcggtcggtccagcttgctggagaataagaagggggtgttgttgcgttgcgggcgagggaaggaggggaggagaggaggcgtcttgccgttggggttctgatccctcttggggctcccgtcgaggaggtggcacgatgaagacgccatcactgcttgttcagtgtttccctggcttgcttcccagcaaggctacgagttgtgtgccaattgtatcagaaagggatctacagctaccatcaccagctgtcgagataatcccatcaaagagtgctcatccttacaaatatgctggcgagaaggttgatgttcaaggtcttgacattttcaaggggaaggtcagtgtagcggatatgatagccttctccccttctgaagtagtcgcatccaaatatgatggatctctgaaatattgggagagttccattactctcgtcaacattattaaaaatgagatccgtgatgggcagttgagcttcaggggcaagcgggttctagagcttggttgtggatctggtctggctgggatttttgcctgtttgaagggtgcatccacagttcattttcaggacacaaatgcagaaacaataagatgcagagcaatacccaatgtgcttgcaaaccttgagcaggctcgggacaggcagaacagaccatcagagagccctgttacaccatcacgacaactgttagccccaaacgtacatttctatgctggggactgggaggagctccctactattctctcagttgtacacccacctgcagcaccaagtaaccttagcttctcagaggacgactttatggatggctgcagtagccatgatgggagcagcatagttggtgtcgacaattgccccaggcgatcaaggaaactttctggtagccgtgcatgggagagggccagtgagacagaccaagctgatggaggctatgatgtaattttgatttctgaggtcccctatgcggtgaactctttgaagaagctctatgcccttatcacaaagtgcctgcgacccccatacggagtactgtatgtggtttcaaagaagaacttggttggttccaatggcggcgcaaggcaactcagagctttgatggaggaggagggtgtccttggtggccactttttaaccgagttagctgaccgggaaatttggaagttcttcttcaagtaaactagcaaaccaaggagctgggaagatgaaatggggccctggccttgtgacacaattttttgatgtctactctgcagcgctgtacataccgcaaagcgtagttccattaattctttggtaatataggattatgatatgtgtgcctcagttgttgtgcttgctgatgtgttggaaattccacccttttgtagatctcctatgtggtgttgctaagtaaagaaatcaaattgtaatgaaccttctgcataccgaaattatacggtgatggcattagtcagagcacgataccagaaataaaaaaaaaaaaaaaataaaaaaaaaaaaaaaacctgcag

SEQ ID NO: 14766 - DNA, 675 bp, Oryza sativa
  Clone ID: PAT_MRT4530_20672C.1
atgacggtcggagagagcatgagcacggtgaaaggaagggcgaggcccgtggatcacccaaagcggtggtggcgacggaaaagttggtgtgagctcggggagaacggggttcgaacagtcctcgggtgtggtgaaggggcgatcgaggttggcggagacgctacaaagccagagttggtggcgccgagacgaaaggaggtcctgaccacggcgaagctcggtcggagctcggcgacagcggcggcggagagagagagagagagcaacgacgggagctcgtttcgggtcgagtgtggatggggacgagggggagggctggagagcggggaactggtggtgtcaaatccagtggccttcaatggccccggcaagatttgcgggaggatatccggccaattcaagaggagagagagagaggaggggaaatggagggaaagggaaagggaaacacgggttgtaaatccccccttccaagcgggcggcaacggcggcgctatggttaggcgagggcaacaggagcggcgggaggtgggagatgataggtgggtccgcatgttggcgtctgtggtgtgtggtgcagtgtgcgttcaggtgggccggcctagcaagcgaggggaggcggaccaggccgatgggaggagagagaggaatggaatgggccacatcatcaccctc

SEQ ID NO: 14767 - DNA, 602 bp, Oryza sativa
  Clone ID: PAT_MRT4530_20673C.1
cctcgagtttttttttttttttttttgctctgctaatagaatggcagtaatatttcttataagcctgctatattacttcatgacgagcttgaccaataaaatcacactttctgacctattattttcctttattgaaagcacagctgaatcatatgtctaatgtgcacactctctgtggaataactatttcaggtctcaccgtgtattcttcacatcatagcaaaacagatttgctcttattagcagtaagagaaaaggcaggactgctggttactcaaatattgccaagaatatgatggtccttatcatccttgattgcatagatgaattcatgagaatgtaactggtacactttgtctggtaacatgaagcaagcttgatgtcagggaaaaaattctatgaactacgtataatgttagttgagtaggctgtgtgcatgcacacacaaacacaaaaacagaataaaaaaacttgttcttcctcaaccatgatttcaatcttactcttggcgcttggcatcagcatgggccatggaggcaggccagcaccaagcaccttaatgccaaggcgaggctaggcggccactatagcagaaaaagtct

SEQ ID NO: 14768 - DNA, 110 bp, Oryza sativa
  Clone ID: PAT_MRT4530_20674C.1
acaataactggggacaaattttatgttcaaagggttggatgtccatggcatgagacggttgatagccctggctaggtggcattacatgtgaagaagtgacaaggaaaaga

SEQ ID NO: 14769 - DNA, 1941 bp, Oryza sativa
  Clone ID: PAT_MRT4530_20675C.1
gcgcgtttgttaggattcagcccgccgcccgttgggaagggagcttcgaggcggccggacacggcgattgggcgtcacctctcggtccatggaggcaatctctcctgctccccccccaacgccgccgccaccgccgccgccgccgccgccgaatccgagacccccatctcggattcacctctcccgcctccggcctccgtcaccgtctccccacgcgcgtcagtcatggcgggaatggcaccagagggatcccagtttgatgctaagcactatgattctaaaatgcaggagcttctgaaccaaggtgaaaccgaggagttcttcacatcttatgatgaagttcatgagagttttgatgacatgggtctccaagagaaccttctcagaggcatctatgcctatggtttcgagaagccttcagccattcagcaaaggggtattgtccctttctgcaagggtcttgatgtgattcacgcaagctcagtcagaggaacaggaaagactgccaccgttctgttctgggaattttggcacgaaacttgacctattcgtggtaggatagagtgagaggccttggtccttgctcctaactcggaagctgacaccagcaaattgacaatgtcattgagcgcacttggttcttcatttcggctgtgaatgattcattcttttgtgggtggtacttctgttcggaagctagaaaatgaatcttgcaggtggagtgcatgttaaatgttggaagacctgggggtatttttgacctgctgagatgtcactggcttccgttcttagaataggagtatgttggtatgtgatgaacgttattgaacttgcttttaaaggttgtgacgagttgaagtttaatgatatcttccagctcctcccgtcaaagatccaagttggtgtgttctctgctacaatgccccctgaggcccttgagatcacccgtaaattcatgaacaagcctgtgcggatccttgtgaagagggatgagctcactcttgagggtatcaaacagttttatgtcaatgtggagaaggaagaatggaagcttgacacactctgtgacctgtatgagacactggccatcacgcagagtgtcatctttgtgaacacccgccgcaaggtggactggctcactgataagatgaggggcagggatcacacagtttctgctacccatggtgacatggaccagaacactagggacatcatcatgagggagttccgatctggttcttcccgtgtgctcattaccacggaccttcttgcccgtggtattgatgtccagcaggtgtcccttgtcatcaactatgatctgccgacccaacctgagaactacctgcatcgcattggtcgtagtggtcgttttggtaggaaaggtgttgccattaactttgtgacccgtgacgatgagaggatgctgtttgacatccagaggttctacaatgtggtgattgaggagctgccggccaacgtcgctgaccttctgtgatcaagttcagaagagttatgttaaggggcctgataaggattgtttttgtctgaagtatcactgtcttatctgggggggggggggagtgataaaggtgggggttctgttttaaaagtcactgtggtcgtagacaatttccaaatttttatgccatgttatgggaatttttgtagttgctaggctgtgctatgtgctggtgaggagggaggagtcttttacttttattatatctattgttaaaactatgtatgaccgaatgatgttatttatttgtgtcatggttgactatttgccataaaaaaaatgaaaaagataggctgtgctgcttcctgggctagctgggagagggagacactactggaatatttactttctttattaagctatgcttgccttgtgttaaaaataaaaaaaaaaaaaaaaaaaaaaaaaaaaaaaaaaaaaaa

SEQ ID NO: 14770 - DNA, 666 bp, Oryza sativa
  Clone ID: PAT_MRT4530_20676C.1
atggccaaaattgaagaaatcgtaatccggaggcatcccagcaaaaggatcctcgatctcttcctacccatgctcatcgggctcggcctcaaagcccgaaggggagggagagacatccacgtgaaaatgctcattgagctgcgcctacatgttcttgacgcgccgagccgtcttcttgacctcgttccacgctctgcggaggctgagaggatgtggaggggatgtcctgaggcacagaacaacgcttgggtgaggagcatatggaagccccctcctgtactgaagagatgccatgaccgcatcttgaggcggactctgactcccaaggatggtgatgcaaacaacatcaaccattactcccgctccgtactcctcagaagtctctgccgccgctcgctcgtgttcccctaccgcggcgagctcggcctcctgccggagccgcgcgctcgaggcgaccgagcgctgagactgtcctacggacatggcacgctactgggaggctgctacgtggggaagaggctgcctctgatgagctgctgcttgtcagcacaggggaaaagggatgagcaggaacagtcggtgttcctgctgccggctgaggacagaggggagctcaagaaggggatgagcaagagatgtctaggctacaggatagaatggctctga
